(19) United States
(12) Patent Application Publication
(10) Pub. No.: US 2022/0073911 A1
(43) Pub. Date: Mar. 10, 2022

(54) METHODS FOR APTAMER SELECTION

(71) Applicant: DOTS Technology Corp., Natick, MA (US)

(72) Inventors: Adi Gilboa-Geffen, Wayland, MA (US); Sarah Elizabeth Stidham, Brighton, MA (US); Olivia Jean Alley, Cambridge, MA (US)

(21) Appl. No.: 17/265,550

(22) PCT Filed: Aug. 2, 2019
(86) PCT No.: PCT/US2019/044772

§ 371 Date: Feb. 3, 2021

Related U.S. Application Data
(60) Provisional application No. 62/714,102, filed on Aug. 3, 2018.

(51) Int. Cl. C12N 15/11; C12N 15/10; C12Q 1/6806; C12Q 1/686; G01N 33/02

(52) U.S. Cl. CPC C12N 15/111; C12N 15/1048; C12Q 1/6806; C12N 2310/3517; G01N 33/02; C12N 2310/16; C12Q 1/686

(57) ABSTRACT

The present disclosure relates to methods for identifying aptamers against allergen proteins and signaling polynucleotides (SPNs) for allergen detection. The screening method of the present disclosure combines several positive SELEX selections, and on-chip positive and counter selections to identify aptamer sequences that are preferentially bind to target proteins when competing with short complementary sequences.

### CROSS REFERENCE TO RELATED APPLICATIONS

[0001] The present application claims priority to U.S. Provisional Application No. 62/714,102 filed Aug. 3, 2018, entitled with “Methods for Aptamer Selection”; the contents of which are incorporated herein by reference in their entirety.

### REFERENCE TO THE SEQUENCE LISTING

[0002] The instant application is being filed along with a Sequence Listing text file in electronic format. The Sequence Listing is provided as a file entitled 2066_1011PCT_SL.txt, created on Aug. 1, 2019, which is 14,790,207 bytes in size. The subject matter of the Sequence Listing is incorporated herein by reference in its entirety.

### FIELD OF THE DISCLOSURE

[0003] The present disclosure relates to methods for identification of aptamers against a target of interest (e.g., an allergen). The disclosure also provides aptamers, signaling polynucleotides (SPNs), DNA chips, detection sensors and kits, and assays for detecting a target in a sample.

### BACKGROUND OF THE DISCLOSURE

[0004] Nucleic acid aptamers are single-stranded oligonucleotides (DNAs, RNAs or DNA/RNA hybrids) that can bind to target molecules with high affinity and specificity. Nucleic acid aptamers are generally selected from a library of oligonucleotides with randomized sequences by an iterative process of adsorption, recovery and reamplification, for example, by conventional SELEX (Systematic Evolution of Ligands by Exponential Enrichment) and other closely related methods (See, e.g., U.S. Pat. Nos. 5,270,163; 5,567,588; 5,637,459; 5,670,637; 5,705,337; and 5,723,592). Aptamers can adapt unique secondary and tertiary structures and recognize targets with high affinity and specificity.

[0005] Aptamers provide a cost-effective alternative to antibodies as there is no need for aptamer selection in animals or cell lines, they have shelf-lives of years, and they can be easily modified to reduce cross-reactivity with undesired molecules. Aptamers have significant advantages over antibodies, such as better specificity and affinity, wider varieties of targets, easier synthesis and modification, higher stability and lower cost. These properties favor aptamers as new detection agents for wide applications in biosensor development, among other fields, for detecting the presence, absence and/or amount of target molecules in a sample. For example, aptamers and aptamer-based assays have been shown, among many other useful applications (e.g., diagnostic tests and therapy) as a promising alternative in food safety control, e.g., detection and control of pathogens, toxins, allergens and other forbidden contaminants in food matrices (Amaya-Gonzalez, et al., Sensors, 2013, 13:16292-16311; and Amaya-Gonzalez, et al., Anal. Chem. 2014, 86(5), 2733-2739). Aptamers based assays replace many immunoblotting methods using antibodies (e.g., ELISA).

[0006] Allergy (e.g., food allergy) is a common medical condition. It has been estimated that in the United States, up to 2 percent of adults and up to 8 percent of children, particularly those under three years of age, suffer from food allergies (about 15 million people), and this prevalence is believed to be increasing. Allergen detection, either in clinical settings or consumer based, is important to a person who is allergic to certain types of food, e.g., gluten and peanuts. Sensitive and specific detection agents against allergens are keys in developing detection assays that can efficiently and quickly test a suspect food product before consuming it. Aptamers that selectively bind to an allergen have been employed in many allergen detection sensors and assays (Weng and Neethirajan, Biosens Bioelectron, 2016, 85: 649-656; Svobodova et al., Food Chem., 2014, 165: 419-423; Tran et al., Biosens. Bioelectron, 2013, 43, 245-251; and Nadal et al., Plos One, 2012, 7(4): e35253). Studies have shown that an aptamer-based assay has significant advantages as compared to antibody-based immunoassay (e.g., ELISA).

[0007] The present disclosure developed a modified selection method for identifying aptamer sequences against a specific allergen target; the aptamers and/or signal polynucleotides derived from the aptamers can be directly used in detection assays with increased specificity and sensitivity. Specifically, the modified selection method combines several positive, negative and counter selection processes to identify aptamers that can specifically recognize a target molecule (e.g., an allergen protein) but the features (e.g., the primary and secondary structures) of the aptamers block the same aptamers bound to the target to hybridize to short oligonucleotides comprising sequences complementary to the same aptamers. Therefore, the target and the short complementary sequence do not bind to the same aptamer simultaneously.

### SUMMARY OF THE DISCLOSURE

[0008] The present disclosure provides screening methods tailored for selection of aptamers against target molecules that can be directly employed in competition-based target detection assays, such as allergen detection assays; the methods comprising several positive, negative (counter) selection processes to identify aptamers having particular primary and secondary structural features that when the aptamers are bound to target molecules to form aptamer.target complexes, they do not simultaneously hybridize to short oligonucleotides complementary to the aptamer sequences. The identified aptamers are suitable to develop chip sensors for target detection in which the aptamers or signal polynucleotides derived from the aptamers compete binding to their target molecule in the presence of oligonucleotides (i.e., anchor sequences) that are complementary to the sequences of the aptamers.

[0009] In some embodiments, the screening method comprises (a) preparing an input DNA library comprising a plurality of single stranded DNA (ssDNA) molecules, each of which comprises a central randomized nucleic acid sequence flanked by a constant sequence at the 5′ end and a constant sequence at the 3′ end, the constant 5′ end and the constant 3′ end functioning as primers; (b) selecting a pool of ssDNA molecules, from the input DNA library of (a), that substantially bind to a target material; (c) selecting a pool of ssDNA molecules, from the target binding pool of ssDNA molecules obtained in (b), that do not bind to the complementary sequences in the presence of the target material (i.e., do not simultaneously bind to the target and complementary sequences); (d) counter-selecting ssDNA molecules, from the positive binding pool of ssDNA molecules obtained in (c), that do not bind to the complementary sequences in the absence of the target material, or that substantially bind to counter target materials; and (e) subtracting the pool of ssDNA molecules obtained in (d) from the positive binding pool of ssDNA molecules in (c), and identifying candidate ssDNA molecules that specifically bind to the target of interest. Each sub-pool of ssDNA molecules can be identified through positive SELEX and/or on-chip selection processes and each process can be repeated several rounds at the same condition.

[0010] Accordingly, the aptamers identified via the present screening methods and signaling polynucleotides (SPNs) derived from the aptamers bind to their target molecule with high affinity and specificity. In some embodiments, the aptamers and SPNs may not hybridize to short complementary sequences in the presence of the target molecule, while they can bind to the short complementary sequences in the absence of the target molecule.

[0011] In some embodiments, the present screening method further comprises amplifying the ssDNA molecules in each pool after each selection process. The ssDNA molecules may be amplified by PCR using a pair of primers labeled with a fluorophore probe. The amplified and regenerated ssDNA molecules are therefore labeled with the fluorophore probe.

[0012] In some embodiments, the pool of ssDNA molecules that substantially bind to a target may be selected by a modified Graphene Oxide (GO)-SELEX process using an input ssDNA library and a target material. This positive selection may comprise the steps of (i) contacting the input ssDNA library with the target material wherein complexes are formed between the target and a plurality of ssDNA molecules present in the input library; (ii) partitioning the complexes formed in step (i) using a Graphene Oxide (GO) solution, and isolating the ssDNA molecules in the complexes to produce a subset of ssDNA molecules for the target material; (iii) contacting the subset of ssDNA molecules in (ii) with the same target material wherein complexes are formed between the target and a second plurality of ssDNA molecules present in the subset of ssDNA molecules to generate a second subset group of ssDNA molecules; and (iv) optionally repeating steps (ii) to (iii), one, two, three or more times to produce a respective third, fourth, fifth or more subset group of ssDNA molecules, thereby producing the enriched pool of ssDNA molecules that substantially bind to the target material.

[0013] In some embodiments, the positive pool of ssDNA molecules that do not bind to the complementary sequences in the presence of the target material may be selected through on-chip positive binding selection process using the target binding pool of ssDNA molecules (e.g., the pool of ssDNA molecules selected by the GO-SELEX process), the same target material and a solid support that is coated with a plurality of short oligonucleotides comprising sequences complementary to the sequences of the ssDNA molecules, e.g., the constant sequence at the 5′ end of the ssDNA molecules.

[0014] In some embodiments, the positive binding pool of ssDNA molecules selected by the on-chip positive selection process may be further refined to subtract non-specific ssDNA molecules. The counter selection may comprise: (i) counter selecting a pool of ssDNA molecules, from the positive pool of ssDNA molecules (e.g., the pool from the on-chip positive selection), that do not bind to the complementary sequences even in the absence of the target material (i.e. the non-binding ssDNA molecules); this selection including an on-chip non-binding counter process that uses the positive binding pool of ssDNA molecules as the input and a chip that is coated with short oligonucleotides comprising complementary sequences of the ssDNA molecules; and (ii) counter selecting a pool of ssDNA molecules, from the positive binding pool of ssDNA molecules, that substantially bind to counter target molecules; this selection including an on-chip counter binding process using the positive binding pool of ssDNA molecules as the input, one or more counter target materials and a chip that is coated with short oligonucleotides comprising sequences complementary to the sequences of the ssDNA molecules.

[0015] In some embodiments, the target material may be a common allergen such as a common food allergen. In one embodiment, the target material is peanut, almond, brazil nut, cashew, hazelnut, pecan, pistachio, walnut, gluten, whey and/or casein.

[0016] In another aspect, the present disclosure provides aptamers, signaling polynucleotides (SPNs), DNA chips, aptamer-based detection sensors and kits for detecting the presence, absence, and/or amount of a target (e.g., an allergen) in a sample.

[0017] In some embodiments, aptamer sequences that specifically bind to an allergen are selected by the present selection processes, wherein the allergen is a common food allergen, e.g., peanut, almond, brazil nut, cashew, hazelnut, pecan, pistachio, walnut, gluten, whey and casein. Aptamers that can bind to all nuts including peanut, almond, brazil nut, cashew, hazelnut, pecan, pistachio and walnut, may also be selected, for example, by multiple SELEX methods.

[0018] In some embodiments, aptamer sequences that specifically bind to peanut are selected, which may comprise a unique nucleic acid sequence selected from the group consisting of SEQ ID NOs.3 to 1002. In some examples, the aptamer against peanut may comprise a nucleic acid sequence selected from the group consisting of SEQ ID NOs. 1003 to 4002.

[0019] In some embodiments, aptamer sequences that specifically bind to almond are selected, which may comprise a unique nucleic acid sequence selected from the group consisting of SEQ ID Nos. 4003 to 5002. In some examples, the aptamer against almond may comprise a nucleic acid sequence selected from the group consisting of SEQ ID NOs. 5003 to 8002.

[0020] In some embodiments, aptamer sequences that specifically bind to brazil nut are selected, which may comprise a unique nucleic acid sequence selected from the group consisting of SEQ ID NOs. 8003 to 9002. In some examples, the aptamer against brazil nut may comprise a nucleic acid sequence selected from the group consisting of SEQ ID NOs. 9003 to 12002.

[0021] In some embodiments, aptamer sequences that specifically bind to cashew are selected, which may comprise a unique nucleic acid sequence selected from the group consisting of SEQ ID NOs. 12003 to 13002. In some examples, the aptamer against cashew may comprise a nucleic acid sequence selected from the group consisting of SEQ ID NOs. 13003 to 16002.

[0022] In some embodiments, aptamer sequences that specifically bind to hazelnut are selected, which may comprise a unique nucleic acid sequence selected from the group consisting of SEQ ID NOs. 16003 to 17002. In some examples, the aptamer against hazelnut may comprise a nucleic acid sequence selected from the group consisting of SEQ ID NOs. 17003 to 20002.

[0023] In some embodiments, aptamer sequences that specifically bind to pecan are selected, which may comprise a unique nucleic acid sequence selected from the group consisting of SEQ ID NOs. 20003 to 21002. In some examples, the aptamer against pecan may comprise a nucleic acid sequence selected from the group consisting of SEQ ID NOs. 21003 to 24002.

[0024] In some embodiments, aptamer sequences that specifically bind to pistachio are selected which may comprise a unique nucleic acid sequence selected from the group consisting of SEQ ID NOs. 24003 to 25002. In some examples, the aptamer against pistachio may comprise a nucleic acid sequence selected from the group consisting of SEQ ID NOs. 25003 to 28002.

[0025] In some embodiments, aptamer sequences that specifically bind to walnut are selected, which may comprise a unique nucleic acid sequence selected from the group consisting of SEQ ID NOs. 28003 to 29002. In some examples, the aptamer against walnut may comprise a nucleic acid sequence selected from the group consisting of SEQ ID NOs. 29003 to 32002.

[0026] In some embodiments, aptamer sequences that can bind to all nuts are selected, which may comprise a unique nucleic acid sequence selected from the group consisting of SEQ ID NOs. 32003 to 33002. In some examples, the aptamer against all nuts may comprise a nucleic acid sequence selected from the group consisting of SEQ ID NOs. 33003 to 36002.

[0027] In some embodiments, aptamer sequences that specifically bind to gluten are selected, which may comprise a unique nucleic acid sequence selected from the group consisting of SEQ ID NOs. 40003 to 41002. In some examples, the aptamer against gluten may comprise a nucleic acid sequence selected from the group consisting of SEQ ID NOs. 41003 to 44002.

[0028] In some embodiments, aptamer sequences that specifically bind to whey are selected, which may comprise a unique nucleic acid sequence selected from the group consisting of SEQ ID NOs. 44003 to 45002. In some examples, the aptamer against whey may comprise a nucleic acid sequence selected from the group consisting of SEQ ID NOs. 45003 to 48002.

[0029] In some embodiments, aptamer sequences that specifically bind to casein are selected, which may comprise a unique nucleic acid sequence selected from the group consisting of SEQ ID NOs. 48003 to 49002. In some examples, the aptamer against casein may comprise a nucleic acid sequence selected from the group consisting of SEQ ID NOs. 49003 to 52002.

[0030] In some embodiments, aptamer sequences that specifically bind to a target control material may be selected. Such control sequences can be used together with the aptamer sequences that bind to the target in a detection assay. The control aptamer sequences have similar response to the sample (e.g., the food matrix) as the target specific aptamers. However, the control aptamers will not respond to the target (e.g., a target allergen) and have no binding affinity to the target specific aptamers or to the short anchor sequences complementary to the target specific aptamers. For example, aptamer sequences that bind to peanut control material may be used together with the aptamer sequences against peanut for detecting the presence/absence of peanut in a food sample. The peanut control sequences and the aptamer specific to peanut may demonstrate a similar response to the food type to be tested. Therefore, the signal from the peanut control sequences can be used as internal sample control.

[0031] In some examples, aptamer sequences that bind to peanut control material are selected which may comprise a unique nucleic acid sequence selected from the group consisting of SEQ ID NOs. 36003 to 37002. In some examples, the aptamer sequence for peanut control may comprise a nucleic acid sequence selected from the group consisting of SEQ ID NOs. 37003 to 40002.

[0032] In accordance with the present disclosure, a SPN may comprise an aptamer selected by the present method that specifically binds to a target of interest and a short nucleic acid sequence that is complementary to the aptamer sequence. The short complementary sequences may be printed on a solid surface for a detection assay. In some embodiments, the short complementary sequence may comprise a nucleic acid sequence selected from the group consisting of SEQ ID NOs. 52003 to 52042.

[0033] In further another aspect, the present disclosure provides methods for detecting the presence, absence and/or amount of a target in a sample using aptamers and SPNs identified by the present screening methods. In some embodiments, the target is a food allergen and the sample to be tested is a food sample. The food allergen may be peanut, almond, brazil nut, cashew, hazelnut, pecan, pistachio, walnut, gluten, whey and casein.

### BRIEF DESCRIPTION OF THE DRAWINGS

[0034] FIG. 1 is a flow chart demonstrating an embodiment of the aptamer screening methods of the present disclosure.

### DETAILED DESCRIPTION OF THE DISCLOSURE

[0035] The foregoing has outlined rather broadly the features and technical advantages of the present disclosure in order that the detailed description of the disclosure that follows may be better understood. Additional features and advantages of the disclosure will be described hereinafter which form the subject of the claims of the disclosure. It should be appreciated by those skilled in the art that the conception and specific embodiment disclosed may be readily utilized as a basis for modifying or designing other structures for carrying out the same purposes of the present disclosure. It should also be realized by those skilled in the art that such equivalent constructions do not depart from the spirit and scope of the disclosure as set forth in the appended claims. The novel features which are believed to be characteristic of the disclosure, both as to its organization and method of operation, together with further objects and advantages will be better understood from the following description when considered in connection with the accompanying figures. It is to be expressly understood, however, that each of the figures is provided for the purpose of illustration and description only and is not intended as a definition of the limits of the present disclosure. Unless defined otherwise, all technical and scientific terms used herein have the same meaning as commonly understood by one of ordinary skill in the art to which this disclosure belongs. In the case of conflict, the present description will control.

[0036] The present screening methods modify conventional aptamer selection methods, combining several positive and negative (counter) selections to identify aptamers that specifically bind to a target of interest. These selections mimic the conditions of competition-based detection assays in which aptamers (or SPNs derived from the aptamers) are used to capture their target and short oligonucleotides comprising sequences complementary to the aptamers are used to detect the presence or absence of the aptamer:target complexes. The competition particularly is between the target to which an aptamer can bind with high level of specificity and affinity, and complementary sequences of the aptamer. The selected aptamer sequences can specifically bind to their target, but only hybridize to short complementary sequences in the absence of the target. The selected aptamer sequences cannot bind to the short complementary sequences in the presence of their target. The present screening methods also select control aptamer sequences for a specific target material. The control aptamer sequences can be used in parallel with target specific aptamers and serve as internal control. The detailed description of the screening methods is included.

### Definitions

[0037] In order for the present disclosure to be more readily understood, certain terms and phrases are defined below. Additional terms and phrases are also defined and set forth through the specification.

[0038] As used herein, the term “aptamer” refers to a nucleic acid molecule or a peptide that can bind to a specific target molecule. A nucleic acid aptamer is a nucleic acid molecule having at least one binding site for a target molecule, such as another nucleic acid sequence, protein, peptide, antibody, small organic molecule, mineral, cell and tissue. A nucleic acid aptamer can be a single stranded or double stranded deoxyribonucleic acid (ssDNA or dsDNA), or ribonucleic acid (RNA), or a hybrid of DNA/RNA. Nucleic acid aptamers typically range from 10-150 nucleotides in length, for example, from 15-120 nucleotides in length, or from 20-100 nucleotides in length, or from 20-80 nucleotides in length, or from 30-90 nucleotides in length, or from 50-90 nucleotides in length. The nucleic acid sequence of an aptamer may optionally have a minimum length of one of 10, 11, 12, 13, 14, 15, 16, 17, 18, 19, 20, 21, 22, 23, 24, 25, 26, 27, 28, 29, 30, 31, 32, 33, 34, 35, 36, 37, 38, 39, 40, 41, 42, 43, 44, 45, 46, 47, 48, 49, 50, 51, 52, 53, 54, 55, 56, 57, 58, 59, 60, 61, 62, 63, 64, 65, 66, 67, 68, 69, 70, 71, 72, 73, 74, 75, 76, 77, 78, 79, 80, 81, 82, 83, 84, 85, 86, 87, 88, 89, 90, 91, 92, 93, 94, 95, 96, 97, 98, 99, or 100 nucleotides. In the context of the present disclosure, the term “aptamer” refers to a nucleic acid aptamer. The terms “a single stranded DNA(ssDNA) molecule,” and “aptamer” are used interchangeably.

[0039] An aptamer can fold into specific and stable secondary, tertiary, or quaternary conformational structures that enable it to bind to a target with high specificity and affinity. The structures may include, but are not limited to, hairpin loop, bulge loop, internal loop, multi-branch loop, pseudoknot, or combinations thereof. For example, the binding site of an aptamer may comprise a stem loop conformation or G-quartets.

[0040] Aptamers against a target may be naturally occurring or made by synthetic or recombinant means. An aptamer can be selected from a random oligonucleotide library through repeated rounds of in vitro partition, selection and amplification of nucleic acid molecules, e.g., conventional SELEX. As used herein, the term “SELEX” refers to a methodology known in the art as “Systematic Evolution of Ligands by Exponential Enrichment (SELEX)”. SELEX, or equivalently In vitro selection, is a powerful and widely used method to select nucleic acid sequences (i.e., aptamers) that bind to a target (e.g., a protein) with specificity and affinity (Ellington A D, et al., Nature, 1990, 346: 818-822; Tuerk C, et al., Science, 1990, 249: 505-510; and Gold L, et al., Anmi Rev Biochem, 1995, 64: 763-797). The SELEX process and various modifications are described in the art, e.g., U.S. Pat. Nos. 5,270,163; 5,567,588; 5,696,249; 5,853,984; 6,083,696; 6,376190; 6, 262, 774; 6,569,620; 6,706,482; 6,730,482; 6,933,116; 8,975,388; 8,975026; and 9,382,533; the contents of each of which are incorporated herein by reference in their entirety. The SELEX process is based on the unique insight that nucleic acids have sufficient capacity for forming a variety of two- and three-dimensional structures and sufficient chemical versatility available within their monomers to act as ligands (i.e., form specific binding complexes) with virtually any chemical compound, whether monomeric or polymeric. Molecules of any size or composition can serve as targets. SELEX relies as a starting point upon a large library of single stranded oligonucleotides comprising randomized sequences. The oligonucleotides can be modified or unmodified DNAs, RNAs, or DNA/RNA hybrids. In some examples, the library comprises 100% randomized or partially randomized oligonucleotides.

[0041] Nucleic acid aptamers show robust binding affinities to their target, preferably binding to the target with an equilibrium (K_{d}) less than 10⁻⁶, 10⁻⁸, 10⁻¹⁰, or 10⁻¹². Aptamers also bind to the target molecule with a very high degree of specificity. It is preferred that aptamers have a K_{d} with the target molecule at least 10, 100, 1000, 10,000, or 100,000-fold lower than the K_{d} of other non-targeted molecules. In some examples, the aptamer selection process may be tailored to select aptamers with pre-defined parameters such as equilibrium (K_{d}), rate constants (K_{off} and Kₒₙ) and thermodynamic parameters (ΔH and ΔS) of aptamer-target interaction.

[0042] Aptamers may comprise naturally occurring nucleotides, and/or modified nucleotides including but not limited to chemically modified nucleobases, unnatural bases (e.g., 2-aminopurine), nucleotide analogs, addition of a label (e.g., a fluorophore), addition of a conjugate, or mixtures of any of the above. The nucleic acid sequence of an aptamer can be modified as desired so long as the functional aspects are still maintained (e.g., binding to the target).

[0043] As used herein, the terms “nucleic acid”, “oligonucleotide” and “polynucleotide” are used interchangeably to refer to a polymer of nucleotides of any length, and such nucleotides may include deoxyribonucleotides (DNAs), ribonucleotides (RNAs), and/or analogs or chemically modified deoxyribonucleotides or ribonucleotides and RNA/DNA hybrids. The terms “nucleic acid”, “oligonucleotide” and “polynucleotide” include double- or single-stranded molecules as well as triple-helical molecules. A nucleic acid molecule may comprise at least one chemical modification.

[0044] As used herein, the term “primary structure” of a nucleic acid molecule refers to its nucleotide sequence. The “secondary structure” of a nucleic acid molecule include, but is not limited to, a hairpin loop, a bulge loop, an internal loop, a multi-branch loop, a pseudoknot or combinations thereof. “Pre-selected secondary structures” refer to those secondary structures that are selected and engineered into an aptamer by design.

[0045] As used herein, the term “complementary” refer to the natural binding of polynucleotides by base pairing such as A-T(U) and C-G pairs. Two single-stranded molecules may be partially complementary such that only some of the nucleic acids bind, or it may be “complete,” such that total complementarity exists between the single stranded molecules. The degree of complementarity between nucleic acid strands has significant effects on the efficiency and strength of the hybridization between the nucleic acid strands. As used herein, the term “hybridization” or “hybridize to” refers to the process by which a polynucleotide strand anneals with a complementary strand through base pairing under defined hybridization conditions. Specific hybridization is an indication that two nucleic acid sequences share a high degree of identity. Specific hybridization complexes form under permissive annealing conditions.

[0046] As used herein, the term “high affinity” refers to the binding of a candidate aptamer to a target with binding dissociation constant Kₐ less than 100 nM. The “specific binding affinity” of an aptamer for its target means that the aptamer binds to its target generally with a much higher degree of affinity than it binds to other components in a test sample. In similar, the term “specifically binds” means that an aptamer reacts or associates more frequently, more rapidly, with greater duration and with greater affinity with a particular target molecule, than it does with non-target molecules. For example, an aptamer against a target allergen binds to that allergen or a structural part or fragment thereof with greater affinity, avidity, more readily, and/or with greater duration than it binds to unrelated allergen proteins and/or parts or fragments thereof. It is also understood by reading this definition that, for example, an aptamer that specifically binds to a first target may or may not specifically bind to a second target. As such, “specific binding” does not necessarily require exclusive binding or non-detectable binding of another molecule, this is encompassed by the term “selective binding”. The specificity of binding is defined in terms of the comparative dissociation constants (K_{d}) of the aptamer for its target as compared to the dissociation constant with respect to the aptamer and other materials in the environment or unrelated molecules in general. Typically, the K_{d} for the aptamer with respect to the target will be 2-fold, 5-fold, 6-fold, 7-fold, 8-fold, 9-fold, or 10-fold less than the Kₐ with respect to the target and the unrelated molecule or accompanying molecule in the environment. Even more preferably, the Kₐ will be 50-fold, 100-fold, 150-fold or 200-fold less.

[0047] As used herein, the term “amplification” or “amplifying” means any process or combination of steps that increases the amount or number of copies of a molecule or class of molecules. The amplification of a nucleic acid molecule is generally carried out but not limiting to using polymerase chain reaction (PCR) (e.g., U.S. Pat. Nos. 4,683,195 and 4,683,202; the contents of each of which are herein incorporated by reference in their entirety).

[0048] As used herein, the term “library,” or “pool,” or “subset” refers to a plurality of compounds, e.g. single stranded DNA (ssDNA) molecules.

[0049] As used herein, the terms “target molecule,” “target material” and “target” are used interchangeably to refer to any molecule to which an aptamer can bind. “Target molecules” or “targets” can be, for example, proteins, polypeptides, nucleic acids, carbohydrates, lipids, polysaccharides, glycoproteins, hormones, receptors, antigens, antibodies, affybodies, antibody mimics, viruses, pathogens, toxic substances, substrates, metabolites, transition state analogs, cofactors, inhibitors, drugs, small molecules, dyes, nutrients, pollutants, growth factors, cells, tissues, or microorganisms and any fragment or portion of any of the foregoing. In one embodiment, a target may be an allergenic protein.

[0050] As used herein, the term “counter target” refers to a molecule belonging to a family which has a similar structure, a similar active site, or similar activity to a target or a target material. In the context of the present disclosure, a counter target can be any molecules to which a selected aptamer against a target of interest has no cross-specificity. Counter targets may be used in counter selection processes to refine aptamer candidates for separating sequences that cross-recognize other closely related molecules.

[0051] As used herein, the term “allergen” means a compound, substance or composition that causes, elicits or triggers an immune reaction in a subject. As such, allergens are typically referred to as antigens. An allergen is typically a protein or a polypeptide.

[0052] As used herein, the terms “polypeptide,” “peptide,” and “protein” are used interchangeably herein to refer to polymers of amino acids of any length.

[0053] As used herein, the term “sample” means a composition that contains or is assumed to contain one or more targets to be tested. A sample may be, but is not limited to, a biological sample obtained from a subject (including human and animal), a sample obtained from the environment (e.g., soil sample, water sample, agriculture sample such as a plant and a crop sample), a chemical sample, and a food sample.

### Combined Selection Processes

[0054] In accordance with the present disclosure, the selection method is modified to identify aptamer candidates that can recognize a target molecule with high specificity and affinity and lower cross-reactivity with counter targets, and that do not hybridize to oligonucleotides that are complementary to the aptamer sequences in the presence of the target. The selected aptamers and SPNs derived from these aptamers can be used as detection agents in competition-based detection assays in which target molecules in a test sample and the complementary oligonucleotides compete binding to the aptamers (or SPNs).

[0055] In accordance with the present disclosure, the aptamer screening method may comprise (a) preparing an input DNA library comprising a plurality of single stranded DNA (ssDNA) molecules, each of which comprises a central randomized nucleic acid sequence flanked by a constant sequence at the 5′ end and a constant sequence at the 3′ end, the constant 5′ end and the constant 3′ end functioning as primers; (b) selecting a pool of ssDNA molecules, from the input DNA library of (a), that substantially bind to a target material; (c) selecting a pool of ssDNA molecules, from the target binding pool of ssDNA molecules obtained in (b), that do not bind to the complementary sequences in the presence of the target material (i.e., do not simultaneously bind to the target and complementary sequences); (d) counter-selecting ssDNA molecules, from the positive binding pool of ssDNA molecules obtained in (c), that do not bind to the complementary sequences in the absence of the target material (referred to as non-binding ssDNA molecules), or that substantially bind to counter target materials (cross-specificity); and (e) subtracting the pool of ssDNA molecules obtained in (d) from the positive binding pool of ssDNA molecules in (c), and identifying candidate ssDNA molecules that specifically bind to the target of interest.

[0056] The present screening methods combine several positive target binding selections (e.g., positive SELEX and on-ship SELEX), non-binding counter selections, complementary hybridization selections and counter target binding selections. Candidate aptamers are identified through repeated positive and negative selections, sequence amplification and sequencing analysis. The modified screening method affords improved efficiency in aptamer selection as compared to conventional SELEX and other known methods in the art and ensures selection of aptamers that preferably bind to a target molecule to short complementary nucleic acid sequences. The flow chart in FIG. 1 demonstrates an exemplary embodiment of the present screening methods for identification of aptamer sequences specific to a target that can be used in competition-based detection assays.

### Target Binding Selections

[0057] In some embodiments, a pool of ssDNA molecules that substantially bind to a target molecule may be selected by a positive target-binding selection process comprising repeated target binding, partition, isolation and amplification of nucleic acid sequences using an input library comprising randomized ssDNA (single stranded DNA) molecules and a target material. Conventional aptamer selection processes may be used such as systematic evolution of ligands by exponential enrichment (SELEX), selected and amplified binding site (SAAB), cyclic amplification and selection of targets (CASTing), or the like. As a non-limiting example, a plurality of sequences that form ssDNA:target complexes may be identified by performing several rounds of positive Graphene Oxide (GO)-SELEX selection using an input ssDNA library comprising randomized single stranded DNA sequences and a target material (FIG. 1).

[0058] SELEX procedure generally involves a progressive selection, from a large library of double-stranded or single-stranded nucleic acids (DNAs, RNAs or DNA/RNA hybrids), of variable nucleic acid sequences that bind to a target of interest with high affinities and specificities by repeated rounds of target partition and amplification.

[0059] Each round of SELEX process consists of several steps including preparation of nucleic acid libraries, formation of nucleic acid-target complexes, separation between bound and unbound sequences, elution of aptamers, PCR amplification, and identification of aptamers specific to the target. Each round of selection enriches aptamer candidates from the nucleic acid library.

[0060] The input nucleic acid library may comprise a plurality of single-stranded DNA (ssDNA) molecules with randomized sequences. The ssDNA may be 50-150 nucleotides in length, for example, the ssDNA in the library is about 50 to 140 nucleotides in length, or about 50 to 130 nucleotides in length, or about 50 to 120 nucleotides in length, or about 50 to 100 nucleotides in length, or about 60 to 80 nucleotides in length, or about 70 to 90 nucleotides in length, or about 70-80 nucleotides in length. In some embodiments, the ssDNA in the library may be 60 nucleotides in length, or 61 nucleotides in length, or 62 nucleotides in length, or 63 nucleotides in length, or 64 nucleotides in length, or 65 nucleotides in length, or 66 nucleotides in length, or 67 nucleotides in length, or 68 nucleotides in length, or 69 nucleotides in length, or 70 nucleotides in length, or 71 nucleotides in length, or 72 nucleotides in length, or 73 nucleotides in length, or 74 nucleotides in length, or 75 nucleotides in length, or 76 nucleotides in length, or 77 nucleotides in length, or 78 nucleotides in length, or 79 nucleotides in length, or 80 nucleotides in length, or 81 nucleotides in length, or 82 nucleotides in length, or 83 nucleotides in length, or 84 nucleotides in length, or 85 nucleotides in length, or 86 nucleotides in length, or 87 nucleotides in length, or 88 nucleotides in length, or 89 nucleotides in length, or 90 nucleotides in length, or 91 nucleotides in length, or 92 nucleotides in length, or 93 nucleotides in length, or 94 nucleotides in length, or 95 nucleotides in length, or 96 nucleotides in length, or 97 nucleotides in length, or 98 nucleotides in length, or 99 nucleotides in length, or 100 nucleotides in length. Each ssDNA molecule in the library comprises a randomized nucleic acid sequence at the center flanked by a constant sequence at the 5′ end and a constant sequence at the 3′ end that serve as PCR primers, where the sequences of the primers are known, and the central randomized sequence may be 30 to 50 nucleotides in length. The randomized sequences can be produced in a number of ways including chemical synthesis and size selection from randomly cleaved cellular nucleic acids. Sequence variation in test nucleic acids can also be introduced or increased by mutagenesis before or during the selection/amplification iterations.

[0061] As a non-limiting example, the input ssDNA molecule library may be generated by automated chemical synthesis on a DNA synthesizer.

[0062] As used herein, the “central randomized nucleic acid sequence” within an ss DNA may also be referred to as the “inner sequence” of the ssDNA.

[0063] In one preferred embodiment, the ssDNA molecules in the input library are 76 nucleotides in length, wherein a central randomized nucleic acid sequence with 30 nucleotides in length is flanked by two 23 nucleotides primers at the 5′ end and 3′-end of each ssDNA. As a non-limiting example, the 5′ end primer may comprise a nucleic acid sequence of 5′ TAGGGAAGAGAAGGACATATGAT3′ (SEQ ID NO. 1) and the 3′ end primer may comprise a nucleic acid sequence of 5′ TTGACTAGTACATGACCACTTGA 3′ (SEQ ID NO. 2).

[0064] As used herein, the term “primer” refers to a short nucleic acid which is capable of acting as a point of initiation of synthesis (e.g., PCR) when placed under conditions in which synthesis of a primer extension product which is complementary to a nucleic acid strand is induced, (i.e., in the presence of nucleotides and an inducing agent such as DNA polymerase and at a suitable temperature and pH). The primer is preferably single stranded for maximum efficiency in amplification but may alternatively be double stranded.

[0065] The input DNA library may be mixed with a target wherein the complexes are formed between the target and a plurality of ssDNA molecules present in the library. The target may be any molecule (e.g., nucleic acids, proteins, small molecules, sugars, toxins, biomarkers, cells and pathogens). In some embodiments, the target is a protein, such as an allergen protein or mixed allergen components of an allergen. The allergen may include, but is not limited to, a food allergen, an allergen from the environment such as plants, animals, microorganisms, air or water, and a medical allergen (i.e., any allergen found in a medicine or medical device).

[0066] Food allergens include, but are not limited to proteins in legumes such as peanuts, peas, lentils and beans, as well as the legume-related plant lupin, tree nuts such as almond, cashew, walnut, Brazil nut, filbert/hazelnut, pecan, pistachio, walnut, beechnut, butternut, chestnut, chinquapin nut, coconut, ginkgo nut, lychee nut, macadamia nut, nangai nut and pine nut, egg, fish, shellfish such as crab, crawfish, lobster, shrimp and prawns, mollusks such as clams, oysters, mussels and scallops, milk, soy, wheat, gluten, corn, meat such as beef, pork, lamb, mutton and chicken, gelatin, sulphite, seeds such as sesame, sunflower and poppy seeds, and spices such as coriander, garlic and mustard, fruits, vegetables such as celery, and rice. Some exemplary allergenic proteins from food allergens may include the parvalbumins in codfish, tropomyosin in crustaceans, arginine kinase and myosin light chain, casein, α-lactalbumin and 3 lactoglobulin in milk, and globulin or vicilin seed storage protein.

[0067] Other target molecules include, but are not limited to, pathogens from a pathogenic microorganism in a sample, such as bacteria, yeasts, fungi, spores, viruses and prions; disease proteins (e.g., biomarkers for diseases diagnosis and prognosis); pesticides and fertilizers remained in the environment; and toxins. Targets may include non-protein compounds such as minerals and small molecules (e.g., antibiotics).

[0068] In some embodiments, the steps for selecting an enriched pool of ssDNA molecules that substantially bind to the target material may comprise (i) contacting the input ssDNA library with the target material wherein complexes are formed between the target and a plurality of ssDNA molecules present in the input library; (ii) partitioning the complexes formed in step (i) from the unbound ssDNA molecules and isolating the ssDNA molecules in the complexes to produce a subset of ssDNA molecules for the target material and amplifying the isolated subset of ssDNA molecules; (iii) contacting the enriched subset of ssDNA molecules from step (ii) with the same target material wherein complexes are formed between the target and a second plurality of ssDNA molecules present in the enriched library to generate a second enriched subset group of ssDNA molecules; and (iv) optionally repeating steps of binding, partition, isolation and amplification (steps (i) to (iii)), one, two, three, four or more times as desired to yield highly specific, high affinity ssDNA molecules to the target molecule, thereby producing the enriched pool of ssDNA molecules that substantially bind to the target material (e.g., Pool 1 in Table 1).

[0069] In one embodiment, a graphene oxide (GO)-SELEX process modified from the general SELEX method is performed to select the target binding pool. As used herein, the terms “graphene,” “graphene oxide (GO),” “graphene oxide nanosheet” and “graphene nanosheet” mean two-dimensional carbon structures and are used interchangeably throughout the present specification. The exposed nucleobases in the ssDNA molecules can be absorbed to the surface of graphene oxide (Chen et al., J. Agric. Food Chem. 2014; 62, 10368-10374). Accordingly, when a graphene oxide (GO) solution is added to the mixture of a ssDNA library and a target material, GO can adsorb the ssDNA sequences that are not bound to a specific target, to its surface, and let the sequences bound to the target free. The unbound sequences and GO can then be removed, e.g., by centrifugation, while the ssDNA molecules that bind to a specific target are not absorbed to the surface of GO and then recovered and employed in the following selection process. This process can avoid the need to immobilize the target material as used in conventional SELEX.

[0070] The GO-SELEX process is inexpensive, fast, and simple. In a conventional SELEX, many expensive, less efficient and time-consuming methods such as chromatography, an affinity column, and the like, are used to separate nucleic acid molecules which are bound to a target material from nucleic acid molecules which are not bound to the target material. The GO-SELEX process is characterized in that the separation of binding ssDNA molecules from non-binding ssDNA molecules can be carried out simply by centrifugation even if the target material or the counter-target material is not specifically immobilized to a specific carrier (Nguyen et al., Chem. Commun. 2014, 50, 10513-10516; the contents of which are incorporated by reference herein in their entirety.)

[0071] After removing GO absorbed ssDNA molecules (e.g., by centrifugation), the target material may be removed from the collected DNA:target complexes. Methods for participating proteins in a solution well known in the art, for example, ethanol precipitation and strataclean resin may be used. As a non-limiting example, a strataclean resin may be added to the supernatant recovered after centrifugation. The target material bound to the strataclean resin can be removed by centrifugation. The target removal step may be repeated for two, three, four or more times. A supernatant containing the enriched ssDNA molecules that bind to the target material may be used for next target binding selection round (FIG. 1).

[0072] In some embodiments, the final concentration of ssDNA molecules that bind to the target material may be measured and compared to the initial concentration of the input ssDNA library. The ratio of the concentrations will be used to determine if another round of the GO-SELEX selection is needed. If the ratio is below 50%, another round of positive GO-SELEX process is carried out with the same condition. The same process is repeated until the recovery of ssDNA molecules that bind to the target material reaches to a satisfactory ratio, e.g., above 50% recovery. Rounds of partition and isolation are repeated until a desired goal is achieved, for example, two, three, four, five, six, seven, eight or more times with the same condition. In the most general case, selection is continued until no significant improvement in binding strength is achieved on repetition of the selection round.

[0073] The target binding pool of ssDNA molecules selected from the positive GO-SELEX process may be further amplified by performing a PCR using labeled primers, e.g., a biotinylated reverse primer and a fluorophore-labeled forward primer. In other aspects, the ssDNA molecules can be amplified by any other known method, such as sequencing the selected sequences and synthesizing them synthetically using an oligonucleotide synthesizer for the next round of binding and selection.

[0074] The fluorophore that is conjugated to the forward primer may be, but is not limited to, Cy5, Alexa Fluor 350, Alexa Fluor 430, Alexa Fluor 488, Alexa Fluor 532, Alexa Fluor 546, Alexa Fluor 594, Alexa Fluor 647, Alexa Fluor 658, Cyanine-3, Cyanine-5, fluorescein, Texas red, FITC (Fluorescein Isothiocyanate), rhodamine, or the like. In one preferred embodiment, the forward primer is conjugated with Cy5. In another embodiment, the forward primer is conjugated with Alexa Fluor 647.

[0075] After PCR amplification, the resulted double stranded DNA (dsDNA) molecules may be cleaned and further denatured to regenerate single stranded DNA (ssDNA) molecules. The biotinylated reverse primer allows for removal of the complementary strands to regenerate ssDNA molecules from the dsDNA molecules created during PCR amplification. As a non-limiting example, streptavidin coated magnetic beads may be added to the PCR product. The biotinylated complementary strands bind to the streptavidin coated magnetic beads. After denaturation of ssDNA molecules (e.g., addition of a base), the bound biotinylated complementary strands are separated and removed using a magnetic force. The desired ssDNA molecules with the fluorophore tags are collected. The fluorophore (e.g., Cy5 and Alexa Fluor 647) tagged ssDNA molecules that substantially bind to the target are used for next selection process.

[0076] The fluorophore (e.g., Cy5) tagged ssDNA molecules give several advantages in developing detection agents used in competition-based detection assays. The addition of Cy5 or other fluorescence markers to the ssDNA sequences at the beginning of aptamer selection can ensure that all aptamer candidates have proper secondary and tertiary structures when they are further developed as signaling polynucleotides (SPNs) used in detection assays. The addition of Cy5 or another fluorescence marker at the later stage may influence the secondary and tertiary structures of aptamer candidates. This modification can significantly reduce false hits during the selection.

[0077] As a non-limiting example, the GO-SELEX process to identify a pool of sequences that substantially bind to a target may comprise the steps of (i) mixing the input ssDNA library (e.g., Pool 0 in Table 1) with an allergen composition in a buffer solution; and these are induced to be bound to each other at normal temperature; (ii) adding a graphene oxide solution to the mixture of step (i) to remove ssDNA molecules which are not bound to the target; (iii) removing the target from the collected ssDNA molecules and amplifying the ssDNA molecules by performing a PCR using the PCR primers at the ends of the ssDNA molecules; and (iv) denaturing the double stranded PCT products and collecting ssDNA molecules labeled with fluorophore. Optionally, the positive GO-SELEX selection may be repeated for 2, 3, 4, 5, 6, 7, 8, 9, 10, or more rounds. The ssDNA molecules in the input library comprise approximately 76 nucleotides in length, including a primer for PCR amplification at each end and about 30 nucleotides (the binding site) at its center (i.e., the inner sequence of an aptamer). The target material is an allergen material, particularly a food allergen, comprising one allergenic component, or a mixture of allergenic components from a single allergen. Food allergens may include but are not limited to proteins in legumes such as peanuts, peas, lentils and beans, tree nuts (e.g., almond, brazil nut, cashew, hazelnut, pecan, pistachio and walnut), wheat, milk, fish, egg white and sea food.

[0078] In some embodiments, the 5′ constant sequence (i.e., the 5′ primer) comprises a nucleic acid sequence of SEQ ID NO. 1 and the 3′ constant sequence (i.e., the 3′ primer) comprises a nucleic acid sequence of SEQ ID NO. 2.

### On-Chip Target Binding and Competition Selections

[0079] The target binding pool of ssDNA molecules (e.g., Pool 1 in Table 1) may be further partitioned to select a subset of sequences that substantially bind to the target and compete with short oligonucleotides having sequences complementary to the ssDNA molecules. In some embodiments, this positive target binding selection may be performed using solid supports (e.g., glass or plastic chips) that are coated with short oligonucleotides comprising sequences complementary to the ssDNA molecules. By this process, families of nucleic acid sequences which can simultaneously bind to a target molecule and their complementary sequences may be subtracted from the pool. This additional positive selection process is tailored to differentiate ssDNA molecules that bind to the target and to the complementary sequences attached to a solid support (e.g., a glass or plastic chip).

[0080] The short oligonucleotide anchors may comprise sequences complementary to the constant sequences at the ends of the ssDNA molecules. The oligonucleotide anchors may comprise sequences complementary to either the 5′ end or 3′ end sequence of the aptamers. The complementary sequence contains about 5-25 nucleotides, or 5-18 nucleotides, or 6-20 nucleotides, or 8-20 nucleotides. For example, it may comprise 5 nucleotides, 6 nucleotides, 7 nucleotides, 8 nucleotides, 9 nucleotides, 10 nucleotides, 11 nucleotides, 12 nucleotides, 13 nucleotides, 14 nucleotides, 15 nucleotides, 16 nucleotides, 17 nucleotides, 18 nucleotides, 19 nucleotides, 20 nucleotides, 21 nucleotides, 22 nucleotides, 23 nucleotides, 24 nucleotides, or 25 nucleotides. In one preferred example, the complementary anchor sequence contains 5-15 nucleotides. The oligonucleotide anchor may be 100%, or 99%, or 98%, or 97%, or 96%, or 95%, or 94%, or 93%, or 92%, or 91%, or 90% complementary to the sequence of an ssDNA. The short complementary sequences are covalently linked to a solid support such as a glass chip, directly or through a linker.

[0081] The solid support on which the oligonucleotides are covalently attached may include, but is not limited to, a glass, a polymer support (e.g., see, U.S. Pat. No. 5,919,525), polyacrylamide gel, or plastic (e.g., a microwell plate), or a nylon membrane. The glass may be a polymer glass (e.g., acrylic glass, polycarbonate and polyethylene terephthalate), or a silicate glass (e.g., Pyrex glass, quartz and germanium-oxide glass), or a porous glass, etc., Polymers may include, but are not limited to, polyimide, photoresist, SU-8 negative photoresist, polydimethylsiloxane (PDMS), silicone elastomer PDMS and COC. In one preferred embodiment, the solid support is a glass chip.

[0082] Different technologies may be used for attaching the short complementary sequences to the solid support at determined sites. These methods are well-known in the pertinent art. For example, the oligonucleotides can be deposited on specific sites on the solid support as microdroplets by ink jet, or piezoelectric, or other similar methods. The solid support may be pre-treated to provide active attaching surfaces for oligonucleotides. In addition, the density of the attached oligonucleotides may be measured and controlled on the solid support.

[0083] In one embodiment, The on-chip target binding selection may comprise the steps: (i) mixing the target binding pool of ssDNA molecules (i.e., Pool 1) with the same target material in a buffer solution; and they are induced to be bound to each other at normal temperature; (ii) contacting the mixture of step (i) with a solid support of which the surface is covalently coated with short oligonucleotides comprising sequences complementary to the sequences of ssDNA molecules; (iii) collecting the ssDNA:target complexes that are not bound to the solid support (e.g., the flow-through) (FIG. 1); and (iv) removing the target material from the collected ssDNA:target complexes and collecting an enriched subset of ssDNA molecules. Optionally, the collected mixture in (iii) is again contacted with the solid support coated with the complementary oligonucleotides for two, three, four, five, six, seven, eight, or more times and the flow-through after the final incubation is processed to recover the ssDNA molecules from the complexes.

[0084] By this selection, a subset of ssDNA molecules in Pool 1 that are not bound to the target material will hybridize to the complimentary sequences covalently attached to the solid support and be removed from the pool. In addition, a subset of ssDNA molecules bound to the target material may also hybridize to the complimentary sequences attached to the solid support. These ssDNA molecules stay on the solid support and are subtracted from the collected ssDNA pool.

[0085] The collected ssDNA molecules from the final incubation are cleaned and separated from the target material as described herein. Similar to the positive GO-SELEX selection, the concentration of the recovered ssDNA molecules is measured and compared to the input pool (Pool 1). In some embodiments, the on-chip positive selection may be repeated for two, three, four, five, six, seven, eight or more rounds until the ratio of the recovered ssDNA molecules reaches to a desired recovery ratio (e.g., more than 50% from the input pool).

[0086] The ssDNA molecules are then amplified by performing PCR and single stranded DNA molecules are recovered as described in the positive GO-SELEX process. By this selection process, a pool of ssDNA molecules that bind to the target material but do not hybridize to the complementary sequences in the presence of the target material is selected (i.e. positive binding pool (Pool 2) in Table 1). The selection process mimics a condition used in a competition-based detection assay. The combination of regular SELEX (e.g., GO-SELEX) and on-chip positive target binding processes increases the specificity and affinity of aptamers.

### On-Chip Negative (Counter) Selections

[0087] The positive pool of ssDNA molecules (Pool 2) containing aptamer candidates that bind to the target material in the presence of the complementary sequences may be further screened to isolate ssDNA molecules that do not bind to the complementary sequences even when the sequences are free, and sequences that substantially bind to counter target materials in addition to the target of interest. In some embodiments, these non-specific ssDNA sequences may be isolated by counter selection processes using solid supports (e.g., glass chips) precoated with short oligonucleotides comprising sequences complementary to the ssDNA molecules.

[0088] In some embodiments, an on-chip non-binding counter selection is performed to identify ssDNA molecules that do not hybridize to their complementary sequences in the pool even when they are free. A DNA solution comprising the positive pool of ssDNA molecules (Pool 2), without addition of the target material, is directly incubated with a solid support (e.g., a glass chip) that is precoated with short oligonucleotides comprising sequences complementary to the aptamers in the pool. After incubation, the DNA solution including the unbound ssDNA molecules is collected (i.e. the flow-through) (FIG. 1). The flow-through DNA solution is incubated again with the solid support (e.g., a glass chip) that is precoated with short complementary oligonucleotides and a second flow-through is collected. The incubation step may be repeated two, three, four, five, six, seven, eight or more times, preferably eight times.

[0089] In one preferred embodiment, the on-chip non-binding counter process may comprise the steps: (i) preparing a DNA solution comprising the positive binding pool of ssDNA molecules (Pool 2); (ii) contacting the DNA solution with a solid support coated with short oligonucleotides comprising sequences complementary to the ssDNA molecules; (iii) collecting the ssDNA solution after incubation; and (iv) contacting the collected solution again with a new solid support coated with the complementary sequences. These steps may be repeated for two, three, four, five, six, seven or eight rounds and the collected ssDNA solution from the final incubation will be cleaned and amplified for sequencing. In one embodiment, these steps are repeated for eight rounds and the collected ssDNA solution from the final incubation are cleaned and amplified for sequencing.

[0090] This on-chip non-binding counter selection creates a non-binding pool of ssDNA molecules (i.e., Pool 3 in Table 1) including ssDNA molecules that cannot hybridize to the complementary sequences even in the absence of the target material.

[0091] In other embodiments, an on-chip counter binding selection is performed to isolate any sequences that can bind to non-specific counter targets from the positive binding pool of ssDNA molecules (Pool 2 in Table 1). This counter selection process improves the target specificity of selected ssDNA molecules by eliminating nucleic acid sequences with cross-reactivity to one or more non-target molecules (e.g., counter targets).

[0092] In one preferred embodiment, the on-chip counter selection process may comprise the steps of (i) preparing a ssDNA solution comprising the positive binding pool of ssDNA molecules (Pool 2) and incubating the ssDNA solution with a counter target or a mixture of counter targets; (ii) contacting the mixture of step (i) with a solid support that is coated with short oligonucleotides comprising sequences complementary to the ssDNA molecules; (iii) collecting the ssDNA/counter target complexes after step (ii) (i.e. the flow-through) (FIG. 1); and (iv) contacting the collected solution in step (iii) to a solid support that is coated with complementary oligonucleotides. The incubation and collection steps may be repeated for two, three, four, five, six, seven, eight or more rounds, preferably eight rounds. The collected solution after the final incubation step will be cleaned and/or amplified for sequencing.

[0093] In some embodiments, the on-chip counter binding selection may be repeated for as many counter targets as desired, beginning each time with the same pool of ssDNA molecules from the positive binding pool (i.e., Pool 2 in Table 1). In some alternative embodiments, multiple counter targets can be run within the same round in parallel.

[0094] By this on-chip counter selection process, ssDNA sequences with cross-specificity towards undesirable related proteins (counter target material) are removed from the positive binding pool. This counter selection process creates a pool of ssDNA molecules (i.e., Pool 4 in Table 1) including the ssDNA molecules that can cross react with a counter target or several counter targets.

[0095] As non-limiting examples, the counter targets may be allergen proteins in the same family, including allergen proteins from different sources that can be attributed to these structurally related allergen families, e.g., prolamins family including seed storage proteins (e.g., Sec c 20 in Rye; Tri a 19 in wheat and Tri a 36 in wheat), non-specific lipid transfer proteins family (e.g., Act d 10 in Kiwi, Api g 2 in celery, Ara h 9 in peanut, Cas s 8 in chestnut, Cor a 8 in hazelnut, Jug r 3 in walnut, Lyc e 3 in tomato, Mus a 3 in banana, and Pru du 3 in almond), 2S albumins family including seed storage proteins (e.g., Ana o 3 in cashew nut, Ara h 2 in peanut, Ber e 1 in Brazil nut, Fag e 2 in buckwheat, Gly m 8 in soybean, Jug r 1 in walnut, Ses i 1 in sesame, and Sin a 1 in mustard), Bet VI family including pathogenesis related proteins (e.g., Api g 1/celery, Ara h 8/peanut, Cor a 1/hazelnut, Dau c 1/carrot, Gly m 4/soybean, Mal d 1/apple, and Pru p 1/peach), 7S (vicilin-like) globulins family (e.g., Ana o 1/cashew nut; Ara h 1/peanut; Gly m 5/soybean; Jug r 2/walnut; Pis v 3/pistachio), 11S (legumin-like) globulins family (e.g., Ana o 2/cashew nut; Ara h 3/peanut; Ber e 2/Brazil nut; Cor a 9/hazelnut; Gly m 6/soybean; Jug r 4/walnut; Pru du 6/almond), Cysteine protease C1 family (e.g., Act d 1/kiwi; Gly m Bd 30K/soybean), Profilins family including actin binding proteins (e.g., Act d 9/kiwi; Api g 4/celery; Ara h 5/peanut; Cuc m 2/melon; Dau c 4/carrot; Gly m 3/soybean; Lyc e 1/tomato; Mus a 1/banana; Ory s 12/rice; Pru av 4/cherry; Pru du 4/almond; Pru p 4/peach and Tri a 12/wheat), tropomyosin family including actin binding proteins in muscle (e.g., Pen m 1/shrimp), parvalbumin family including muscle proteins (e.g., Cyp c 1/carp; Gad c 1/cod; Ran e 2/frog; Sal s 1/salmon; Seb m 1/redfish; Xip g 1/swordfish), caseins family including mammalian milk proteins (e.g., Bos d 8-Bos d 12/cow's milk), transferrin family including sulfur-rich ion-binding glycoproteins from milk and hen's egg white (e.g., Bos d Lactoferrin/cow's milk; Gal d 3/hen's egg), serpins family including Serine protease inhibitors (e.g., Gal d 2/hen's egg), Arginine kinases family including Adenosine triphosphate:guanido phosphotransferases (e.g., Pen m 2/shrimp), Lipocalins family including carrier proteins (e.g., Bos d 5/cow's milk), Ovomucoids family including Kazal inhibitors (e.g., Gal d 1/hen's egg), Lysozyme family (e.g., Bos d 4/cow's milk; Gal d 4/hen's egg), and Albumins family including Serum albumins (e.g., Bos d 6/cow's milk; Gal d 5/hen's egg).

### Deep Sequencing

[0096] In accordance with the present screening method, the ssDNA pools (e.g., Pool 1, Pool 2, Pool 3 and Pool 4 in Table 1) from each selection may be cleaned, amplified and sequenced. In one embodiment, the method comprises an amplification of the individual ssDNA molecules using a polymerase chain reaction (PCR). The sequences within each pool are identified using deep sequencing. In some embodiments, the ssDNA molecules in the target binding pool (i.e., Pool 1) are amplified and sequenced. In parallel, an artifact library may be made by amplifying the input ssDNA library and the sequences in this artifact library are sequenced (See, e.g., the flow-chart of FIG. 1). The artifact library may be made from repeating the PCR amplification and strand separation steps for the same number of rounds for the positive GO-SELEX selection (FIG. 1). These sequences, resulted from over amplification by PCR, are removed from the target binding pool (Pool 2 in Table 1).

[0097] The ssDNA molecules in the positive binding pool from the final round of the on-chip target binding selection (e.g., Pool 2 in Table 1) may be sequenced. The ssDNA molecules within this pool contain ssDNA sequences that preferentially bind to their target in the presence of their complementary sequences.

[0098] The non-specific ssDNA molecules from the final round of the on-chip non-binding counter selection and from the final round of the on-chip counter selection (e.g., Pools 3 and 4 in Table 1) may be sequenced. The ssDNA molecules within these pools contain ssDNA sequences that fail to hybridize to the complementary sequences even in the absence of the target material and sequences with cross-specificity to other counter targets.

[0099] The ssDNA sequences from each pool may be barcoded for identity. Following barcoding, ssDNA molecules from each pool may be pooled together and run deep sequencing in a single lane on the Illumina MiSeq System.

TABLE 1
Summary of Selection rounds

| DNA pool | Description | |
|---|---|---|
| Input library | A library of random synthesized single | Input |
| (Pool 0) | stranded DNA molecules comprising a central | sequences |
| | randomized region and two primer regions | |
| | at both ends. | |
| Target | A sub-pool of ssDNA molecules that positively | Sequenced |
| binding pool | bind to the target of interest selected by | |
| (Pool 1) | the GO-SELEX process | |
| Positive pool | A sub-pool of ssDNA molecules that | Sequenced |
| (Pool 2) | preferentially bind to the target of interest | |
| | to various short complementary sequences, | |
| | selected by the on-chip positive target | |
| | binding process | |
| Non-binder | A sub-pool of ssDNA molecules that do not | Sequenced |
| pool | bind to various short complementary sequences | |
| (Pool 3) | in the absence of the target selected from the | |
| | on-chip non-binding counter selection | |
| Counter | A sub-pool of ssDNA molecules that bind to | Sequenced |
| binding pool | various counter targets in addition to binding | |
| (Pool 4) | to the target of interest, selected by the on- | |
| | chip counter selection | |
| Aptamer | a final subset of ssDNA molecules after | selected |
| candidate | extracting the sequences in Pool 3 and Pool | |
| pool | 4 from Pool 2 | |
| (Pool 5) | | |

### Data Analysis and Bioinformatics

[0100] After sequencing and barcoding of the ssDNA sequences in each pool, and running the deep sequencing, the data are analyzed using any available bioinformatics tools. In some embodiments, heat maps are generated for each individual pool, which represent the frequencies of ssDNA sequences in each pool, by using a local occurrence of the open-source bioinformatics tool Galaxy (Thiel and Giangrande, Methods 2016, 97, 3-10; the contents of which are incorporated herein by reference in their entirety).

[0101] Potential aptamer hits are selected by analyzing the over-expressed sequences in each pool using the heat maps for sequences in each pool. Essentially, the heat maps of the ssDNA molecules from the non-binding pool (Pool 3) and the counter binding pool (Pool 4) are subtracted from the heat maps of the ssDNA molecules from the positive binding pool (Pool 2). The final data represent a pool of potential aptamer hits with characteristics including: (i) binding to the target protein with high specificity and affinity, (ii) hybridizing to their short complementary sequences only in the absence of the target but not binding to the short complementary sequences in the presence of the target; and (iii) no cross-reactivity to non-specific counter targets. These characteristics of the aptamer candidates make them suitable for target detection in a sample, e.g., in competition-based assays.

[0102] From the final pool of potential aptamer hits (e.g., Pool 5 in Table 1), a sequence family tree may be constructed to show the similarities between different aptamer sequences. Multiple sequences from various branches of the family tree structure can be selected and folded using expected assay conditions. The secondary and tertiary structures will be assessed, and those sequences that show multiple well-defined structures are selected for synthesis and further evaluation. The structures or motifs may include hairpin loops, symmetric and asymmetric bulges, pseudoknots and myriad combinations of the same. The equilibrium dissociation constant (K_{d}), and other parameters of the selected aptamers will be measured.

[0103] In accordance with the present disclosure, the selection method may further comprise the steps of (i) amplifying all the sequences in the first, second, third and fourth sub-pools, and barcoding each sequence from each pool; (ii) pooling the sequences from each sub-pool together and running sequencing together; (iii) analyzing the data from (ii) and separating each sequence data into the original sub-pool according to the barcode information; (iv) generating heat maps for each individual sub-pool that represent the frequencies of each sequence in the pool; and (v) subtracting the sequences in the heat maps of the third sub-pool and the fourth sub-pool from the heat maps of the second sub-pool, wherein the final pool of sequences are candidate aptamers that specifically bind to the target of interest and preferentially bind to the target of the interest in competing the binding of various short complementary sequences.

[0104] In accordance with the present disclosure, sequences that specifically bind to peanut, tree nuts including almond, brazil nut, cashew, hazelnut, pecan, pistachio and walnut, gluten, milk allergens whey and casein are selected. Aptamer sequences that bind to all nuts are also selected. As used here, the term “all nuts” refers to peanut and the tree nuts including almond, brazil nut, cashew, hazelnut, pecan, pistachio and walnut. A selected aptamer sequence that is specific to “all nuts” can bind to any of the nuts (i.e., peanut, almond, brazil nut, cashew, hazelnut, pecan, pistachio and walnut), e.g., one, two, three, four, five, six, seven or eight nuts present in samples.

[0105] In some embodiments, the sequences that specifically bind to peanut comprise an inner sequence selected from the group consisting of the nucleic acid sequences of SEQ ID NO. 3 to 1002.

[0106] In some embodiments, the sequences that specifically bind to almond comprise an inner sequence selected from the group consisting of the nucleic acid sequences of SEQ ID NO. 4003 to 5002.

[0107] In some embodiments, the sequences that specifically bind to brazil nut comprise an inner sequence selected from the group consisting of the nucleic acid sequences of SEQ ID NO. 8003 to 9002.

[0108] In some embodiments, the sequences that specifically bind to cashew comprise an inner sequence selected from the group consisting of the nucleic acid sequences of SEQ ID NO. 12003 to 13002.

[0109] In some embodiments, the sequences that specifically bind to hazelnut comprise an inner sequence selected from the group consisting of the nucleic acid sequences of SEQ ID NO. 16003 to 17002.

[0110] In some embodiments, the sequences that specifically bind to pecan comprise an inner sequence selected from the group consisting of the nucleic acid sequences of SEQ ID NO. 20003 to 21002.

[0111] In some embodiments, the sequences that specifically bind to pistachio comprise an inner sequence selected from the group consisting of the nucleic acid sequences of SEQ ID NO. 24003 to 25002.

[0112] In some embodiments, the sequences that specifically bind to walnut comprise an inner sequence selected from the group consisting of the nucleic acid sequences of SEQ ID NO. 28003 to 29002.

[0113] In some embodiments, the sequences that specifically bind to all nuts comprise an inner sequence selected from the group consisting of the nucleic acid sequences of SEQ ID NO. 32003 to 33002.

[0114] In some embodiments, the sequences that specifically bind to gluten comprise an inner sequence selected from the group consisting of the nucleic acid sequences of SEQ ID NO. 40003 to 41002.

[0115] In some embodiments, the sequences that specifically bind to whey comprise an inner sequence selected from the group consisting of the nucleic acid sequences of SEQ ID NO. 44003 to 45002.

[0116] In some embodiments, the sequences that specifically bind to casein comprise an inner sequence selected from the group consisting of the nucleic acid sequences of SEQ ID NO. 48003 to 49002.

### Multiple SELEX Selections

[0117] In some embodiments, the present selection method may be modified to identify aptamer sequences that bind to multiple targets. The multiple target selection process provides an efficient method for identifying the best binding aptamers to a group of targets.

[0118] Many allergens, particularly food allergens, are composed of multiple allergenic components. These components may induce component specific IgE in a person's body. Some people are allergic to only one specific component but not the other components of the same allergen. Some people are allergic to all the components of an allergen. For example, milk includes two primary allergenic components: the whey proteins (alpha-lactalbumin and beta-lactoglobulin) and caseins. A person who is allergic to milk, may be allergic to only whey or casein, or to both whey and casein. In this context, an aptamer ligand that binds to the whey proteins only, or caseins only, or both the whey proteins and caseins, may be desirable to milk allergy.

[0119] In some embodiments, the present screening methods may be modified for selecting aptamers that can bind to the multiple components of an allergen.

[0120] As a non-limiting example, two, three, four or more rounds of the positive GO-SELEX selection are performed using the whole allergen material as the target material (e.g., the whole milk including casein and the whey proteins). The ssDNA molecules selected from this process (Pool 1) include a mixture of ssDNA sequences that bind to any of the various components of milk (e.g., caseins and the whey proteins). These milk binding sequences are used to run two parallel selection processes: a selection process for casein only and a selection process for the whey protein only. The two selection processes are performed as previously described for a single target. Importantly, during the counter selection process, a separate selection will be performed using only the other component as the counter target. That is, in the selection for the aptamer sequences that specifically bind to casein, a whey protein is used as the counter target in the counter selection process, while casein is used as the counter target for selecting aptamer sequences that specifically bind to a whey protein.

[0121] Following similar procedures, the various sub-pools of ssDNA molecules will be barcoded and submitted for deep sequencing. The casein and whey samples will be pooled separately from one another and run in separate lanes during deep sequencing. The bioinformatic analysis of the sequencing data will reveal the pool of aptamer hits for the target alone. In order to find an aptamer sequence that binds both casein and whey, overlaps between the special counter rounds may be collected.

[0122] In another example, a mixture of all nuts may be used as target materials, sequences that can recognize all nuts may be selected by the present methods. The selected sequences may bind to any nut, and the combinations of any nuts present in a test sample.

### Aptamers, Signaling Polynucleotides (SPNs) and Detection Sensors

[0123] In another aspect of the disclosure, aptamers that specifically bind to allergen targets, signaling polynucleotides (SPNs) derived from the selected aptamers, and detection sensors comprising these aptamers and SPNs are provided. An aptamer that binds to a target allergen with high specificity and affinity may not hybridize to the short complementary sequence in the presence of the target allergen, and demonstrates little or no cross-specificity to any counter target.

[0124] A SPN may be derived from an aptamer sequence selected by the present method. The SPN may further comprise additional nucleotides at one end or both ends of the aptamer sequence. The sequence may be further modified to change its secondary and/or tertiary structures to make it more stable, to increase the binding affinity and/or specificity, or to add a fluorescence marker, or to be modified to comprise one or more conjugates.

[0125] Detection sensors comprising selected aptamers and SPNs are provided. In some embodiments, the detection sensor may include a SPN, a solid support and a short oligonucleotide comprising a nucleic acid sequence complementary to the SPN, wherein the oligonucleotide is covalently anchored to the solid support by one of the ends, directly or through a linker (e.g., a 6 carbon atom arm). The SPN comprises an inner sequence that specifically binds to a target of interest and it hybridizes to the complementary oligonucleotide when it is not bound to the target of interest. In one example, the short complementary sequences and the target of interest will compete binding to the SPN. In this competitive assay, for example, the SPN can either bind to the short complementary sequences attached on the solid support or a target of interest in a sample. Under conditions sufficient to allow the target of interest in the sample to compete with the short complementary sequences attached on the solid support, the SPN:target complexes can be detected and measured.

[0126] In accordance with the present disclosure, aptamer sequences that specifically bind to peanut, tree nuts including almond, brazil nut, cashew, hazelnut, pecan, pistachio and walnut, gluten, milk allergens whey and casein are selected. Aptamer sequences that bind to all nuts are also selected.

[0127] In some embodiments, the sequences that specifically bind to peanut comprise an inner sequence selected from the group consisting of the nucleic acid sequences of SEQ ID NOs.3 to 1002. In some examples, a short nucleic acid sequence may be affixed to the 5-end of the inner sequence. The short nucleic acid sequence may be the 5′ primer sequence used in the random ssDNA library, i.e. the nucleic acid sequence of SEQ ID NO.1. Accordingly, the aptamer that specifically binds to peanut may comprise a nucleic acid sequence selected from the group consisting of SEQ ID NOs.1003 to 2002. In other examples, a short nucleic acid sequence may be affixed to the 3-end of the inner sequence. The short nucleic acid sequence may be the 3′ primer sequence used in the random ssDNA library, i.e. the nucleic acid sequence of SEQ ID NO.2. Accordingly, the aptamer that specifically binds to peanut may comprise a nucleic acid sequence selected from the group consisting of SEQ ID NOs. 2003 to 3002. In other examples, the inner sequence may comprise a 5′ end short sequence (i.e., SEQ ID NO. 1) and a 3′ end short sequence (i.e., SEQ ID NO. 2). Accordingly, the aptamer that specifically binds to peanut may comprise a nucleic acid sequence selected from the group consisting of SEQ ID NOs. 3003 to 4002. In one embodiment, the aptamer of the present disclosure that specifically binds to peanut may comprise a nucleic acid sequence selected from the group consisting of SEQ ID NOs. 3 to 4002 listed in Table 2, or variant thereof.

TABLE 2
Aptamer sequences against peanut
Aptamer sequence

| | | | 5′ sequence |
|---|---|---|---|
| | 5′-sequence | Inner | and inner |
| Inner | and inner | sequence and | sequence and |
| sequence | sequence | 3′ sequence | 3′ sequence |
| (SEQ ID NO.) | (SEQ ID NO.) | (SEQ ID NO.) | (SEQ ID NO.) |
| 3 | 1003 | 2003 | 3003 |
| 4 | 1004 | 2004 | 3004 |
| 5 | 1005 | 2005 | 3005 |
| 6 | 1006 | 2006 | 3006 |
| 7 | 1007 | 2007 | 3007 |
| 8 | 1008 | 2008 | 3008 |
| 9 | 1009 | 2009 | 3009 |
| 10 | 1010 | 2010 | 3010 |
| 11 | 1011 | 2011 | 3011 |
| 12 | 1012 | 2012 | 3012 |
| 13 | 1013 | 2013 | 3013 |
| 14 | 1014 | 2014 | 3014 |
| 15 | 1015 | 2015 | 3015 |
| 16 | 1016 | 2016 | 3016 |
| 17 | 1017 | 2017 | 3017 |
| 18 | 1018 | 2018 | 3018 |
| 19 | 1019 | 2019 | 3019 |
| 20 | 1020 | 2020 | 3020 |
| 21 | 1021 | 2021 | 3021 |
| 22 | 1022 | 2022 | 3022 |
| 23 | 1023 | 2023 | 3023 |
| 24 | 1024 | 2024 | 3024 |
| 25 | 1025 | 2025 | 3025 |
| 26 | 1026 | 2026 | 3026 |
| 27 | 1027 | 2027 | 3027 |
| 28 | 1028 | 2028 | 3028 |
| 29 | 1029 | 2029 | 3029 |
| 30 | 1030 | 2030 | 3030 |
| 31 | 1031 | 2031 | 3031 |
| 32 | 1032 | 2032 | 3032 |
| 33 | 1033 | 2033 | 3033 |
| 34 | 1034 | 2034 | 3034 |
| 35 | 1035 | 2035 | 3035 |
| 36 | 1036 | 2036 | 3036 |
| 37 | 1037 | 2037 | 3037 |
| 38 | 1038 | 2038 | 3038 |
| 39 | 1039 | 2039 | 3039 |
| 40 | 1040 | 2040 | 3040 |
| 41 | 1041 | 2041 | 3041 |
| 42 | 1042 | 2042 | 3042 |
| 43 | 1043 | 2043 | 3043 |
| 44 | 1044 | 2044 | 3044 |
| 45 | 1045 | 2045 | 3045 |
| 46 | 1046 | 2046 | 3046 |
| 47 | 1047 | 2047 | 3047 |
| 48 | 1048 | 2048 | 3048 |
| 49 | 1049 | 2049 | 3049 |
| 50 | 1050 | 2050 | 3050 |
| 51 | 1051 | 2051 | 3051 |
| 52 | 1052 | 2052 | 3052 |
| 53 | 1053 | 2053 | 3053 |
| 54 | 1054 | 2054 | 3054 |
| 55 | 1055 | 2055 | 3055 |
| 56 | 1056 | 2056 | 3056 |
| 57 | 1057 | 2057 | 3057 |
| 58 | 1058 | 2058 | 3058 |
| 59 | 1059 | 2059 | 3059 |
| 60 | 1060 | 2060 | 3060 |
| 61 | 1061 | 2061 | 3061 |
| 62 | 1062 | 2062 | 3062 |
| 63 | 1063 | 2063 | 3063 |
| 64 | 1064 | 2064 | 3064 |
| 65 | 1065 | 2065 | 3065 |
| 66 | 1066 | 2066 | 3066 |
| 67 | 1067 | 2067 | 3067 |
| 68 | 1068 | 2068 | 3068 |
| 69 | 1069 | 2069 | 3069 |
| 70 | 1070 | 2070 | 3070 |
| 71 | 1071 | 2071 | 3071 |
| 72 | 1072 | 2072 | 3072 |
| 73 | 1073 | 2073 | 3073 |
| 74 | 1074 | 2074 | 3074 |
| 75 | 1075 | 2075 | 3075 |
| 76 | 1076 | 2076 | 3076 |
| 77 | 1077 | 2077 | 3077 |
| 78 | 1078 | 2078 | 3078 |
| 79 | 1079 | 2079 | 3079 |
| 80 | 1080 | 2080 | 3080 |
| 81 | 1081 | 2081 | 3081 |
| 82 | 1082 | 2082 | 3082 |
| 83 | 1083 | 2083 | 3083 |
| 84 | 1084 | 2084 | 3084 |
| 85 | 1085 | 2085 | 3085 |
| 86 | 1086 | 2086 | 3086 |
| 87 | 1087 | 2087 | 3087 |
| 88 | 1088 | 2088 | 3088 |
| 89 | 1089 | 2089 | 3089 |
| 90 | 1090 | 2090 | 3090 |
| 91 | 1091 | 2091 | 3091 |
| 92 | 1092 | 2092 | 3092 |
| 93 | 1093 | 2093 | 3093 |
| 94 | 1094 | 2094 | 3094 |
| 95 | 1095 | 2095 | 3095 |
| 96 | 1096 | 2096 | 3096 |
| 97 | 1097 | 2097 | 3097 |
| 98 | 1098 | 2098 | 3098 |
| 99 | 1099 | 2099 | 3099 |
| 100 | 1100 | 2100 | 3100 |
| 101 | 1101 | 2101 | 3101 |
| 102 | 1102 | 2102 | 3102 |
| 103 | 1103 | 2103 | 3103 |
| 104 | 1104 | 2104 | 3104 |
| 105 | 1105 | 2105 | 3105 |
| 106 | 1106 | 2106 | 3106 |
| 107 | 1107 | 2107 | 3107 |
| 108 | 1108 | 2108 | 3108 |
| 109 | 1109 | 2109 | 3109 |
| 110 | 1110 | 2110 | 3110 |
| 111 | 1111 | 2111 | 3111 |
| 112 | 1112 | 2112 | 3112 |
| 113 | 1113 | 2113 | 3113 |
| 114 | 1114 | 2114 | 3114 |
| 115 | 1115 | 2115 | 3115 |
| 116 | 1116 | 2116 | 3116 |
| 117 | 1117 | 2117 | 3117 |
| 118 | 1118 | 2118 | 3118 |
| 119 | 1119 | 2119 | 3119 |
| 120 | 1120 | 2120 | 3120 |
| 121 | 1121 | 2121 | 3121 |
| 122 | 1122 | 2122 | 3122 |
| 123 | 1123 | 2123 | 3123 |
| 124 | 1124 | 2124 | 3124 |
| 125 | 1125 | 2125 | 3125 |
| 126 | 1126 | 2126 | 3126 |
| 127 | 1127 | 2127 | 3127 |
| 128 | 1128 | 2128 | 3128 |
| 129 | 1129 | 2129 | 3129 |
| 130 | 1130 | 2130 | 3130 |
| 131 | 1131 | 2131 | 3131 |
| 132 | 1132 | 2132 | 3132 |
| 133 | 1133 | 2133 | 3133 |
| 134 | 1134 | 2134 | 3134 |
| 135 | 1135 | 2135 | 3135 |
| 136 | 1136 | 2136 | 3136 |
| 137 | 1137 | 2137 | 3137 |
| 138 | 1138 | 2138 | 3138 |
| 139 | 1139 | 2139 | 3139 |
| 140 | 1140 | 2140 | 3140 |
| 141 | 1141 | 2141 | 3141 |
| 142 | 1142 | 2142 | 3142 |
| 143 | 1143 | 2143 | 3143 |
| 144 | 1144 | 2144 | 3144 |
| 145 | 1145 | 2145 | 3145 |
| 146 | 1146 | 2146 | 3146 |
| 147 | 1147 | 2147 | 3147 |
| 148 | 1148 | 2148 | 3148 |
| 149 | 1149 | 2149 | 3149 |
| 150 | 1150 | 2150 | 3150 |
| 151 | 1151 | 2151 | 3151 |
| 152 | 1152 | 2152 | 3152 |
| 153 | 1153 | 2153 | 3153 |
| 154 | 1154 | 2154 | 3154 |
| 155 | 1155 | 2155 | 3155 |
| 156 | 1156 | 2156 | 3156 |
| 157 | 1157 | 2157 | 3157 |
| 158 | 1158 | 2158 | 3158 |
| 159 | 1159 | 2159 | 3159 |
| 160 | 1160 | 2160 | 3160 |
| 161 | 1161 | 2161 | 3161 |
| 162 | 1162 | 2162 | 3162 |
| 163 | 1163 | 2163 | 3163 |
| 164 | 1164 | 2164 | 3164 |
| 165 | 1165 | 2165 | 3165 |
| 166 | 1166 | 2166 | 3166 |
| 167 | 1167 | 2167 | 3167 |
| 168 | 1168 | 2168 | 3168 |
| 169 | 1169 | 2169 | 3169 |
| 170 | 1170 | 2170 | 3170 |
| 171 | 1171 | 2171 | 3171 |
| 172 | 1172 | 2172 | 3172 |
| 173 | 1173 | 2173 | 3173 |
| 174 | 1174 | 2174 | 3174 |
| 175 | 1175 | 2175 | 3175 |
| 176 | 1176 | 2176 | 3176 |
| 177 | 1177 | 2177 | 3177 |
| 178 | 1178 | 2178 | 3178 |
| 179 | 1179 | 2179 | 3179 |
| 180 | 1180 | 2180 | 3180 |
| 181 | 1181 | 2181 | 3181 |
| 182 | 1182 | 2182 | 3182 |
| 183 | 1183 | 2183 | 3183 |
| 184 | 1184 | 2184 | 3184 |
| 185 | 1185 | 2185 | 3185 |
| 186 | 1186 | 2186 | 3186 |
| 187 | 1187 | 2187 | 3187 |
| 188 | 1188 | 2188 | 3188 |
| 189 | 1189 | 2189 | 3189 |
| 190 | 1190 | 2190 | 3190 |
| 191 | 1191 | 2191 | 3191 |
| 192 | 1192 | 2192 | 3192 |
| 193 | 1193 | 2193 | 3193 |
| 194 | 1194 | 2194 | 3194 |
| 195 | 1195 | 2195 | 3195 |
| 196 | 1196 | 2196 | 3196 |
| 197 | 1197 | 2197 | 3197 |
| 198 | 1198 | 2198 | 3198 |
| 199 | 1199 | 2199 | 3199 |
| 200 | 1200 | 2200 | 3200 |
| 201 | 1201 | 2201 | 3201 |
| 202 | 1202 | 2202 | 3202 |
| 203 | 1203 | 2203 | 3203 |
| 204 | 1204 | 2204 | 3204 |
| 205 | 1205 | 2205 | 3205 |
| 206 | 1206 | 2206 | 3206 |
| 207 | 1207 | 2207 | 3207 |
| 208 | 1208 | 2208 | 3208 |
| 209 | 1209 | 2209 | 3209 |
| 210 | 1210 | 2210 | 3210 |
| 211 | 1211 | 2211 | 3211 |
| 212 | 1212 | 2212 | 3212 |
| 213 | 1213 | 2213 | 3213 |
| 214 | 1214 | 2214 | 3214 |
| 215 | 1215 | 2215 | 3215 |
| 216 | 1216 | 2216 | 3216 |
| 217 | 1217 | 2217 | 3217 |
| 218 | 1218 | 2218 | 3218 |
| 219 | 1219 | 2219 | 3219 |
| 220 | 1220 | 2220 | 3220 |
| 221 | 1221 | 2221 | 3221 |
| 222 | 1222 | 2222 | 3222 |
| 223 | 1223 | 2223 | 3223 |
| 224 | 1224 | 2224 | 3224 |
| 225 | 1225 | 2225 | 3225 |
| 226 | 1226 | 2226 | 3226 |
| 227 | 1227 | 2227 | 3227 |
| 228 | 1228 | 2228 | 3228 |
| 229 | 1229 | 2229 | 3229 |
| 230 | 1230 | 2230 | 3230 |
| 231 | 1231 | 2231 | 3231 |
| 232 | 1232 | 2232 | 3232 |
| 233 | 1233 | 2233 | 3233 |
| 234 | 1234 | 2234 | 3234 |
| 235 | 1235 | 2235 | 3235 |
| 236 | 1236 | 2236 | 3236 |
| 237 | 1237 | 2237 | 3237 |
| 238 | 1238 | 2238 | 3238 |
| 239 | 1239 | 2239 | 3239 |
| 240 | 1240 | 2240 | 3240 |
| 241 | 1241 | 2241 | 3241 |
| 242 | 1242 | 2242 | 3242 |
| 243 | 1243 | 2243 | 3243 |
| 244 | 1244 | 2244 | 3244 |
| 245 | 1245 | 2245 | 3245 |
| 246 | 1246 | 2246 | 3246 |
| 247 | 1247 | 2247 | 3247 |
| 248 | 1248 | 2248 | 3248 |
| 249 | 1249 | 2249 | 3249 |
| 250 | 1250 | 2250 | 3250 |
| 251 | 1251 | 2251 | 3251 |
| 252 | 1252 | 2252 | 3252 |
| 253 | 1253 | 2253 | 3253 |
| 254 | 1254 | 2254 | 3254 |
| 255 | 1255 | 2255 | 3255 |
| 256 | 1256 | 2256 | 3256 |
| 257 | 1257 | 2257 | 3257 |
| 258 | 1258 | 2258 | 3258 |
| 259 | 1259 | 2259 | 3259 |
| 260 | 1260 | 2260 | 3260 |
| 261 | 1261 | 2261 | 3261 |
| 262 | 1262 | 2262 | 3262 |
| 263 | 1263 | 2263 | 3263 |
| 264 | 1264 | 2264 | 3264 |
| 265 | 1265 | 2265 | 3265 |
| 266 | 1266 | 2266 | 3266 |
| 267 | 1267 | 2267 | 3267 |
| 268 | 1268 | 2268 | 3268 |
| 269 | 1269 | 2269 | 3269 |
| 270 | 1270 | 2270 | 3270 |
| 271 | 1271 | 2271 | 3271 |
| 272 | 1272 | 2272 | 3272 |
| 273 | 1273 | 2273 | 3273 |
| 274 | 1274 | 2274 | 3274 |
| 275 | 1275 | 2275 | 3275 |
| 276 | 1276 | 2276 | 3276 |
| 277 | 1277 | 2277 | 3277 |
| 278 | 1278 | 2278 | 3278 |
| 279 | 1279 | 2279 | 3279 |
| 280 | 1280 | 2280 | 3280 |
| 281 | 1281 | 2281 | 3281 |
| 282 | 1282 | 2282 | 3282 |
| 283 | 1283 | 2283 | 3283 |
| 284 | 1284 | 2284 | 3284 |
| 285 | 1285 | 2285 | 3285 |
| 286 | 1286 | 2286 | 3286 |
| 287 | 1287 | 2287 | 3287 |
| 288 | 1288 | 2288 | 3288 |
| 289 | 1289 | 2289 | 3289 |
| 290 | 1290 | 2290 | 3290 |
| 291 | 1291 | 2291 | 3291 |
| 292 | 1292 | 2292 | 3292 |
| 293 | 1293 | 2293 | 3293 |
| 294 | 1294 | 2294 | 3294 |
| 295 | 1295 | 2295 | 3295 |
| 296 | 1296 | 2296 | 3296 |
| 297 | 1297 | 2297 | 3297 |
| 298 | 1298 | 2298 | 3298 |
| 299 | 1299 | 2299 | 3299 |
| 300 | 1300 | 2300 | 3300 |
| 301 | 1301 | 2301 | 3301 |
| 302 | 1302 | 2302 | 3302 |
| 303 | 1303 | 2303 | 3303 |
| 304 | 1304 | 2304 | 3304 |
| 305 | 1305 | 2305 | 3305 |
| 306 | 1306 | 2306 | 3306 |
| 307 | 1307 | 2307 | 3307 |
| 308 | 1308 | 2308 | 3308 |
| 309 | 1309 | 2309 | 3309 |
| 310 | 1310 | 2310 | 3310 |
| 311 | 1311 | 2311 | 3311 |
| 312 | 1312 | 2312 | 3312 |
| 313 | 1313 | 2313 | 3313 |
| 314 | 1314 | 2314 | 3314 |
| 315 | 1315 | 2315 | 3315 |
| 316 | 1316 | 2316 | 3316 |
| 317 | 1317 | 2317 | 3317 |
| 318 | 1318 | 2318 | 3318 |
| 319 | 1319 | 2319 | 3319 |
| 320 | 1320 | 2320 | 3320 |
| 321 | 1321 | 2321 | 3321 |
| 322 | 1322 | 2322 | 3322 |
| 323 | 1323 | 2323 | 3323 |
| 324 | 1324 | 2324 | 3324 |
| 325 | 1325 | 2325 | 3325 |
| 326 | 1326 | 2326 | 3326 |
| 327 | 1327 | 2327 | 3327 |
| 328 | 1328 | 2328 | 3328 |
| 329 | 1329 | 2329 | 3329 |
| 330 | 1330 | 2330 | 3330 |
| 331 | 1331 | 2331 | 3331 |
| 332 | 1332 | 2332 | 3332 |
| 333 | 1333 | 2333 | 3333 |
| 334 | 1334 | 2334 | 3334 |
| 335 | 1335 | 2335 | 3335 |
| 336 | 1336 | 2336 | 3336 |
| 337 | 1337 | 2337 | 3337 |
| 338 | 1338 | 2338 | 3338 |
| 339 | 1339 | 2339 | 3339 |
| 340 | 1340 | 2340 | 3340 |
| 341 | 1341 | 2341 | 3341 |
| 342 | 1342 | 2342 | 3342 |
| 343 | 1343 | 2343 | 3343 |
| 344 | 1344 | 2344 | 3344 |
| 345 | 1345 | 2345 | 3345 |
| 346 | 1346 | 2346 | 3346 |
| 347 | 1347 | 2347 | 3347 |
| 348 | 1348 | 2348 | 3348 |
| 349 | 1349 | 2349 | 3349 |
| 350 | 1350 | 2350 | 3350 |
| 351 | 1351 | 2351 | 3351 |
| 352 | 1352 | 2352 | 3352 |
| 353 | 1353 | 2353 | 3353 |
| 354 | 1354 | 2354 | 3354 |
| 355 | 1355 | 2355 | 3355 |
| 356 | 1356 | 2356 | 3356 |
| 357 | 1357 | 2357 | 3357 |
| 358 | 1358 | 2358 | 3358 |
| 359 | 1359 | 2359 | 3359 |
| 360 | 1360 | 2360 | 3360 |
| 361 | 1361 | 2361 | 3361 |
| 362 | 1362 | 2362 | 3362 |
| 363 | 1363 | 2363 | 3363 |
| 364 | 1364 | 2364 | 3364 |
| 365 | 1365 | 2365 | 3365 |
| 366 | 1366 | 2366 | 3366 |
| 367 | 1367 | 2367 | 3367 |
| 368 | 1368 | 2368 | 3368 |
| 369 | 1369 | 2369 | 3369 |
| 370 | 1370 | 2370 | 3370 |
| 371 | 1371 | 2371 | 3371 |
| 372 | 1372 | 2372 | 3372 |
| 373 | 1373 | 2373 | 3373 |
| 374 | 1374 | 2374 | 3374 |
| 375 | 1375 | 2375 | 3375 |
| 376 | 1376 | 2376 | 3376 |
| 377 | 1377 | 2377 | 3377 |
| 378 | 1378 | 2378 | 3378 |
| 379 | 1379 | 2379 | 3379 |
| 380 | 1380 | 2380 | 3380 |
| 381 | 1381 | 2381 | 3381 |
| 382 | 1382 | 2382 | 3382 |
| 383 | 1383 | 2383 | 3383 |
| 384 | 1384 | 2384 | 3384 |
| 385 | 1385 | 2385 | 3385 |
| 386 | 1386 | 2386 | 3386 |
| 387 | 1387 | 2387 | 3387 |
| 388 | 1388 | 2388 | 3388 |
| 389 | 1389 | 2389 | 3389 |
| 390 | 1390 | 2390 | 3390 |
| 391 | 1391 | 2391 | 3391 |
| 392 | 1392 | 2392 | 3392 |
| 393 | 1393 | 2393 | 3393 |
| 394 | 1394 | 2394 | 3394 |
| 395 | 1395 | 2395 | 3395 |
| 396 | 1396 | 2396 | 3396 |
| 397 | 1397 | 2397 | 3397 |
| 398 | 1398 | 2398 | 3398 |
| 399 | 1399 | 2399 | 3399 |
| 400 | 1400 | 2400 | 3400 |
| 401 | 1401 | 2401 | 3401 |
| 402 | 1402 | 2402 | 3402 |
| 403 | 1403 | 2403 | 3403 |
| 404 | 1404 | 2404 | 3404 |
| 405 | 1405 | 2405 | 3405 |
| 406 | 1406 | 2406 | 3406 |
| 407 | 1407 | 2407 | 3407 |
| 408 | 1408 | 2408 | 3408 |
| 409 | 1409 | 2409 | 3409 |
| 410 | 1410 | 2410 | 3410 |
| 411 | 1411 | 2411 | 3411 |
| 412 | 1412 | 2412 | 3412 |
| 413 | 1413 | 2413 | 3413 |
| 414 | 1414 | 2414 | 3414 |
| 415 | 1415 | 2415 | 3415 |
| 416 | 1416 | 2416 | 3416 |
| 417 | 1417 | 2417 | 3417 |
| 418 | 1418 | 2418 | 3418 |
| 419 | 1419 | 2419 | 3419 |
| 420 | 1420 | 2420 | 3420 |
| 421 | 1421 | 2421 | 3421 |
| 422 | 1422 | 2422 | 3422 |
| 423 | 1423 | 2423 | 3423 |
| 424 | 1424 | 2424 | 3424 |
| 425 | 1425 | 2425 | 3425 |
| 426 | 1426 | 2426 | 3426 |
| 427 | 1427 | 2427 | 3427 |
| 428 | 1428 | 2428 | 3428 |
| 429 | 1429 | 2429 | 3429 |
| 430 | 1430 | 2430 | 3430 |
| 431 | 1431 | 2431 | 3431 |
| 432 | 1432 | 2432 | 3432 |
| 433 | 1433 | 2433 | 3433 |
| 434 | 1434 | 2434 | 3434 |
| 435 | 1435 | 2435 | 3435 |
| 436 | 1436 | 2436 | 3436 |
| 437 | 1437 | 2437 | 3437 |
| 438 | 1438 | 2438 | 3438 |
| 439 | 1439 | 2439 | 3439 |
| 440 | 1440 | 2440 | 3440 |
| 441 | 1441 | 2441 | 3441 |
| 442 | 1442 | 2442 | 3442 |
| 443 | 1443 | 2443 | 3443 |
| 444 | 1444 | 2444 | 3444 |
| 445 | 1445 | 2445 | 3445 |
| 446 | 1446 | 2446 | 3446 |
| 447 | 1447 | 2447 | 3447 |
| 448 | 1448 | 2448 | 3448 |
| 449 | 1449 | 2449 | 3449 |
| 450 | 1450 | 2450 | 3450 |
| 451 | 1451 | 2451 | 3451 |
| 452 | 1452 | 2452 | 3452 |
| 453 | 1453 | 2453 | 3453 |
| 454 | 1454 | 2454 | 3454 |
| 455 | 1455 | 2455 | 3455 |
| 456 | 1456 | 2456 | 3456 |
| 457 | 1457 | 2457 | 3457 |
| 458 | 1458 | 2458 | 3458 |
| 459 | 1459 | 2459 | 3459 |
| 460 | 1460 | 2460 | 3460 |
| 461 | 1461 | 2461 | 3461 |
| 462 | 1462 | 2462 | 3462 |
| 463 | 1463 | 2463 | 3463 |
| 464 | 1464 | 2464 | 3464 |
| 465 | 1465 | 2465 | 3465 |
| 466 | 1466 | 2466 | 3466 |
| 467 | 1467 | 2467 | 3467 |
| 468 | 1468 | 2468 | 3468 |
| 469 | 1469 | 2469 | 3469 |
| 470 | 1470 | 2470 | 3470 |
| 471 | 1471 | 2471 | 3471 |
| 472 | 1472 | 2472 | 3472 |
| 473 | 1473 | 2473 | 3473 |
| 474 | 1474 | 2474 | 3474 |
| 475 | 1475 | 2475 | 3475 |
| 476 | 1476 | 2476 | 3476 |
| 477 | 1477 | 2477 | 3477 |
| 478 | 1478 | 2478 | 3478 |
| 479 | 1479 | 2479 | 3479 |
| 480 | 1480 | 2480 | 3480 |
| 481 | 1481 | 2481 | 3481 |
| 482 | 1482 | 2482 | 3482 |
| 483 | 1483 | 2483 | 3483 |
| 484 | 1484 | 2484 | 3484 |
| 485 | 1485 | 2485 | 3485 |
| 486 | 1486 | 2486 | 3486 |
| 487 | 1487 | 2487 | 3487 |
| 488 | 1488 | 2488 | 3488 |
| 489 | 1489 | 2489 | 3489 |
| 490 | 1490 | 2490 | 3490 |
| 491 | 1491 | 2491 | 3491 |
| 492 | 1492 | 2492 | 3492 |
| 493 | 1493 | 2493 | 3493 |
| 494 | 1494 | 2494 | 3494 |
| 495 | 1495 | 2495 | 3495 |
| 496 | 1496 | 2496 | 3496 |
| 497 | 1497 | 2497 | 3497 |
| 498 | 1498 | 2498 | 3498 |
| 499 | 1499 | 2499 | 3499 |
| 500 | 1500 | 2500 | 3500 |
| 501 | 1501 | 2501 | 3501 |
| 502 | 1502 | 2502 | 3502 |
| 503 | 1503 | 2503 | 3503 |
| 504 | 1504 | 2504 | 3504 |
| 505 | 1505 | 2505 | 3505 |
| 506 | 1506 | 2506 | 3506 |
| 507 | 1507 | 2507 | 3507 |
| 508 | 1508 | 2508 | 3508 |
| 509 | 1509 | 2509 | 3509 |
| 510 | 1510 | 2510 | 3510 |
| 511 | 1511 | 2511 | 3511 |
| 512 | 1512 | 2512 | 3512 |
| 513 | 1513 | 2513 | 3513 |
| 514 | 1514 | 2514 | 3514 |
| 515 | 1515 | 2515 | 3515 |
| 516 | 1516 | 2516 | 3516 |
| 517 | 1517 | 2517 | 3517 |
| 518 | 1518 | 2518 | 3518 |
| 519 | 1519 | 2519 | 3519 |
| 520 | 1520 | 2520 | 3520 |
| 521 | 1521 | 2521 | 3521 |
| 522 | 1522 | 2522 | 3522 |
| 523 | 1523 | 2523 | 3523 |
| 524 | 1524 | 2524 | 3524 |
| 525 | 1525 | 2525 | 3525 |
| 526 | 1526 | 2526 | 3526 |
| 527 | 1527 | 2527 | 3527 |
| 528 | 1528 | 2528 | 3528 |
| 529 | 1529 | 2529 | 3529 |
| 530 | 1530 | 2530 | 3530 |
| 531 | 1531 | 2531 | 3531 |
| 532 | 1532 | 2532 | 3532 |
| 533 | 1533 | 2533 | 3533 |
| 534 | 1534 | 2534 | 3534 |
| 535 | 1535 | 2535 | 3535 |
| 536 | 1536 | 2536 | 3536 |
| 537 | 1537 | 2537 | 3537 |
| 538 | 1538 | 2538 | 3538 |
| 539 | 1539 | 2539 | 3539 |
| 540 | 1540 | 2540 | 3540 |
| 541 | 1541 | 2541 | 3541 |
| 542 | 1542 | 2542 | 3542 |
| 543 | 1543 | 2543 | 3543 |
| 544 | 1544 | 2544 | 3544 |
| 545 | 1545 | 2545 | 3545 |
| 546 | 1546 | 2546 | 3546 |
| 547 | 1547 | 2547 | 3547 |
| 548 | 1548 | 2548 | 3548 |
| 549 | 1549 | 2549 | 3549 |
| 550 | 1550 | 2550 | 3550 |
| 551 | 1551 | 2551 | 3551 |
| 552 | 1552 | 2552 | 3552 |
| 553 | 1553 | 2553 | 3553 |
| 554 | 1554 | 2554 | 3554 |
| 555 | 1555 | 2555 | 3555 |
| 556 | 1556 | 2556 | 3556 |
| 557 | 1557 | 2557 | 3557 |
| 558 | 1558 | 2558 | 3558 |
| 559 | 1559 | 2559 | 3559 |
| 560 | 1560 | 2560 | 3560 |
| 561 | 1561 | 2561 | 3561 |
| 562 | 1562 | 2562 | 3562 |
| 563 | 1563 | 2563 | 3563 |
| 564 | 1564 | 2564 | 3564 |
| 565 | 1565 | 2565 | 3565 |
| 566 | 1566 | 2566 | 3566 |
| 567 | 1567 | 2567 | 3567 |
| 568 | 1568 | 2568 | 3568 |
| 569 | 1569 | 2569 | 3569 |
| 570 | 1570 | 2570 | 3570 |
| 571 | 1571 | 2571 | 3571 |
| 572 | 1572 | 2572 | 3572 |
| 573 | 1573 | 2573 | 3573 |
| 574 | 1574 | 2574 | 3574 |
| 575 | 1575 | 2575 | 3575 |
| 576 | 1576 | 2576 | 3576 |
| 577 | 1577 | 2577 | 3577 |
| 578 | 1578 | 2578 | 3578 |
| 579 | 1579 | 2579 | 3579 |
| 580 | 1580 | 2580 | 3580 |
| 581 | 1581 | 2581 | 3581 |
| 582 | 1582 | 2582 | 3582 |
| 583 | 1583 | 2583 | 3583 |
| 584 | 1584 | 2584 | 3584 |
| 585 | 1585 | 2585 | 3585 |
| 586 | 1586 | 2586 | 3586 |
| 587 | 1587 | 2587 | 3587 |
| 588 | 1588 | 2588 | 3588 |
| 589 | 1589 | 2589 | 3589 |
| 590 | 1590 | 2590 | 3590 |
| 591 | 1591 | 2591 | 3591 |
| 592 | 1592 | 2592 | 3592 |
| 593 | 1593 | 2593 | 3593 |
| 594 | 1594 | 2594 | 3594 |
| 595 | 1595 | 2595 | 3595 |
| 596 | 1596 | 2596 | 3596 |
| 597 | 1597 | 2597 | 3597 |
| 598 | 1598 | 2598 | 3598 |
| 599 | 1599 | 2599 | 3599 |
| 600 | 1600 | 2600 | 3600 |
| 601 | 1601 | 2601 | 3601 |
| 602 | 1602 | 2602 | 3602 |
| 603 | 1603 | 2603 | 3603 |
| 604 | 1604 | 2604 | 3604 |
| 605 | 1605 | 2605 | 3605 |
| 606 | 1606 | 2606 | 3606 |
| 607 | 1607 | 2607 | 3607 |
| 608 | 1608 | 2608 | 3608 |
| 609 | 1609 | 2609 | 3609 |
| 610 | 1610 | 2610 | 3610 |
| 611 | 1611 | 2611 | 3611 |
| 612 | 1612 | 2612 | 3612 |
| 613 | 1613 | 2613 | 3613 |
| 614 | 1614 | 2614 | 3614 |
| 615 | 1615 | 2615 | 3615 |
| 616 | 1616 | 2616 | 3616 |
| 617 | 1617 | 2617 | 3617 |
| 618 | 1618 | 2618 | 3618 |
| 619 | 1619 | 2619 | 3619 |
| 620 | 1620 | 2620 | 3620 |
| 621 | 1621 | 2621 | 3621 |
| 622 | 1622 | 2622 | 3622 |
| 623 | 1623 | 2623 | 3623 |
| 624 | 1624 | 2624 | 3624 |
| 625 | 1625 | 2625 | 3625 |
| 626 | 1626 | 2626 | 3626 |
| 627 | 1627 | 2627 | 3627 |
| 628 | 1628 | 2628 | 3628 |
| 629 | 1629 | 2629 | 3629 |
| 630 | 1630 | 2630 | 3630 |
| 631 | 1631 | 2631 | 3631 |
| 632 | 1632 | 2632 | 3632 |
| 633 | 1633 | 2633 | 3633 |
| 634 | 1634 | 2634 | 3634 |
| 635 | 1635 | 2635 | 3635 |
| 636 | 1636 | 2636 | 3636 |
| 637 | 1637 | 2637 | 3637 |
| 638 | 1638 | 2638 | 3638 |
| 639 | 1639 | 2639 | 3639 |
| 640 | 1640 | 2640 | 3640 |
| 641 | 1641 | 2641 | 3641 |
| 642 | 1642 | 2642 | 3642 |
| 643 | 1643 | 2643 | 3643 |
| 644 | 1644 | 2644 | 3644 |
| 645 | 1645 | 2645 | 3645 |
| 646 | 1646 | 2646 | 3646 |
| 647 | 1647 | 2647 | 3647 |
| 648 | 1648 | 2648 | 3648 |
| 649 | 1649 | 2649 | 3649 |
| 650 | 1650 | 2650 | 3650 |
| 651 | 1651 | 2651 | 3651 |
| 652 | 1652 | 2652 | 3652 |
| 653 | 1653 | 2653 | 3653 |
| 654 | 1654 | 2654 | 3654 |
| 655 | 1655 | 2655 | 3655 |
| 656 | 1656 | 2656 | 3656 |
| 657 | 1657 | 2657 | 3657 |
| 658 | 1658 | 2658 | 3658 |
| 659 | 1659 | 2659 | 3659 |
| 660 | 1660 | 2660 | 3660 |
| 661 | 1661 | 2661 | 3661 |
| 662 | 1662 | 2662 | 3662 |
| 663 | 1663 | 2663 | 3663 |
| 664 | 1664 | 2664 | 3664 |
| 665 | 1665 | 2665 | 3665 |
| 666 | 1666 | 2666 | 3666 |
| 667 | 1667 | 2667 | 3667 |
| 668 | 1668 | 2668 | 3668 |
| 669 | 1669 | 2669 | 3669 |
| 670 | 1670 | 2670 | 3670 |
| 671 | 1671 | 2671 | 3671 |
| 672 | 1672 | 2672 | 3672 |
| 673 | 1673 | 2673 | 3673 |
| 674 | 1674 | 2674 | 3674 |
| 675 | 1675 | 2675 | 3675 |
| 676 | 1676 | 2676 | 3676 |
| 677 | 1677 | 2677 | 3677 |
| 678 | 1678 | 2678 | 3678 |
| 679 | 1679 | 2679 | 3679 |
| 680 | 1680 | 2680 | 3680 |
| 681 | 1681 | 2681 | 3681 |
| 682 | 1682 | 2682 | 3682 |
| 683 | 1683 | 2683 | 3683 |
| 684 | 1684 | 2684 | 3684 |
| 685 | 1685 | 2685 | 3685 |
| 686 | 1686 | 2686 | 3686 |
| 687 | 1687 | 2687 | 3687 |
| 688 | 1688 | 2688 | 3688 |
| 689 | 1689 | 2689 | 3689 |
| 690 | 1690 | 2690 | 3690 |
| 691 | 1691 | 2691 | 3691 |
| 692 | 1692 | 2692 | 3692 |
| 693 | 1693 | 2693 | 3693 |
| 694 | 1694 | 2694 | 3694 |
| 695 | 1695 | 2695 | 3695 |
| 696 | 1696 | 2696 | 3696 |
| 697 | 1697 | 2697 | 3697 |
| 698 | 1698 | 2698 | 3698 |
| 699 | 1699 | 2699 | 3699 |
| 700 | 1700 | 2700 | 3700 |
| 701 | 1701 | 2701 | 3701 |
| 702 | 1702 | 2702 | 3702 |
| 703 | 1703 | 2703 | 3703 |
| 704 | 1704 | 2704 | 3704 |
| 705 | 1705 | 2705 | 3705 |
| 706 | 1706 | 2706 | 3706 |
| 707 | 1707 | 2707 | 3707 |
| 708 | 1708 | 2708 | 3708 |
| 709 | 1709 | 2709 | 3709 |
| 710 | 1710 | 2710 | 3710 |
| 711 | 1711 | 2711 | 3711 |
| 712 | 1712 | 2712 | 3712 |
| 713 | 1713 | 2713 | 3713 |
| 714 | 1714 | 2714 | 3714 |
| 715 | 1715 | 2715 | 3715 |
| 716 | 1716 | 2716 | 3716 |
| 717 | 1717 | 2717 | 3717 |
| 718 | 1718 | 2718 | 3718 |
| 719 | 1719 | 2719 | 3719 |
| 720 | 1720 | 2720 | 3720 |
| 721 | 1721 | 2721 | 3721 |
| 722 | 1722 | 2722 | 3722 |
| 723 | 1723 | 2723 | 3723 |
| 724 | 1724 | 2724 | 3724 |
| 725 | 1725 | 2725 | 3725 |
| 726 | 1726 | 2726 | 3726 |
| 727 | 1727 | 2727 | 3727 |
| 728 | 1728 | 2728 | 3728 |
| 729 | 1729 | 2729 | 3729 |
| 730 | 1730 | 2730 | 3730 |
| 731 | 1731 | 2731 | 3731 |
| 732 | 1732 | 2732 | 3732 |
| 733 | 1733 | 2733 | 3733 |
| 734 | 1734 | 2734 | 3734 |
| 735 | 1735 | 2735 | 3735 |
| 736 | 1736 | 2736 | 3736 |
| 737 | 1737 | 2737 | 3737 |
| 738 | 1738 | 2738 | 3738 |
| 739 | 1739 | 2739 | 3739 |
| 740 | 1740 | 2740 | 3740 |
| 741 | 1741 | 2741 | 3741 |
| 742 | 1742 | 2742 | 3742 |
| 743 | 1743 | 2743 | 3743 |
| 744 | 1744 | 2744 | 3744 |
| 745 | 1745 | 2745 | 3745 |
| 746 | 1746 | 2746 | 3746 |
| 747 | 1747 | 2747 | 3747 |
| 748 | 1748 | 2748 | 3748 |
| 749 | 1749 | 2749 | 3749 |
| 750 | 1750 | 2750 | 3750 |
| 751 | 1751 | 2751 | 3751 |
| 752 | 1752 | 2752 | 3752 |
| 753 | 1753 | 2753 | 3753 |
| 754 | 1754 | 2754 | 3754 |
| 755 | 1755 | 2755 | 3755 |
| 756 | 1756 | 2756 | 3756 |
| 757 | 1757 | 2757 | 3757 |
| 758 | 1758 | 2758 | 3758 |
| 759 | 1759 | 2759 | 3759 |
| 760 | 1760 | 2760 | 3760 |
| 761 | 1761 | 2761 | 3761 |
| 762 | 1762 | 2762 | 3762 |
| 763 | 1763 | 2763 | 3763 |
| 764 | 1764 | 2764 | 3764 |
| 765 | 1765 | 2765 | 3765 |
| 766 | 1766 | 2766 | 3766 |
| 767 | 1767 | 2767 | 3767 |
| 768 | 1768 | 2768 | 3768 |
| 769 | 1769 | 2769 | 3769 |
| 770 | 1770 | 2770 | 3770 |
| 771 | 1771 | 2771 | 3771 |
| 772 | 1772 | 2772 | 3772 |
| 773 | 1773 | 2773 | 3773 |
| 774 | 1774 | 2774 | 3774 |
| 775 | 1775 | 2775 | 3775 |
| 776 | 1776 | 2776 | 3776 |
| 777 | 1777 | 2777 | 3777 |
| 778 | 1778 | 2778 | 3778 |
| 779 | 1779 | 2779 | 3779 |
| 780 | 1780 | 2780 | 3780 |
| 781 | 1781 | 2781 | 3781 |
| 782 | 1782 | 2782 | 3782 |
| 783 | 1783 | 2783 | 3783 |
| 784 | 1784 | 2784 | 3784 |
| 785 | 1785 | 2785 | 3785 |
| 786 | 1786 | 2786 | 3786 |
| 787 | 1787 | 2787 | 3787 |
| 788 | 1788 | 2788 | 3788 |
| 789 | 1789 | 2789 | 3789 |
| 790 | 1790 | 2790 | 3790 |
| 791 | 1791 | 2791 | 3791 |
| 792 | 1792 | 2792 | 3792 |
| 793 | 1793 | 2793 | 3793 |
| 794 | 1794 | 2794 | 3794 |
| 795 | 1795 | 2795 | 3795 |
| 796 | 1796 | 2796 | 3796 |
| 797 | 1797 | 2797 | 3797 |
| 798 | 1798 | 2798 | 3798 |
| 799 | 1799 | 2799 | 3799 |
| 800 | 1800 | 2800 | 3800 |
| 801 | 1801 | 2801 | 3801 |
| 802 | 1802 | 2802 | 3802 |
| 803 | 1803 | 2803 | 3803 |
| 804 | 1804 | 2804 | 3804 |
| 805 | 1805 | 2805 | 3805 |
| 806 | 1806 | 2806 | 3806 |
| 807 | 1807 | 2807 | 3807 |
| 808 | 1808 | 2808 | 3808 |
| 809 | 1809 | 2809 | 3809 |
| 810 | 1810 | 2810 | 3810 |
| 811 | 1811 | 2811 | 3811 |
| 812 | 1812 | 2812 | 3812 |
| 813 | 1813 | 2813 | 3813 |
| 814 | 1814 | 2814 | 3814 |
| 815 | 1815 | 2815 | 3815 |
| 816 | 1816 | 2816 | 3816 |
| 817 | 1817 | 2817 | 3817 |
| 818 | 1818 | 2818 | 3818 |
| 819 | 1819 | 2819 | 3819 |
| 820 | 1820 | 2820 | 3820 |
| 821 | 1821 | 2821 | 3821 |
| 822 | 1822 | 2822 | 3822 |
| 823 | 1823 | 2823 | 3823 |
| 824 | 1824 | 2824 | 3824 |
| 825 | 1825 | 2825 | 3825 |
| 826 | 1826 | 2826 | 3826 |
| 827 | 1827 | 2827 | 3827 |
| 828 | 1828 | 2828 | 3828 |
| 829 | 1829 | 2829 | 3829 |
| 830 | 1830 | 2830 | 3830 |
| 831 | 1831 | 2831 | 3831 |
| 832 | 1832 | 2832 | 3832 |
| 833 | 1833 | 2833 | 3833 |
| 834 | 1834 | 2834 | 3834 |
| 835 | 1835 | 2835 | 3835 |
| 836 | 1836 | 2836 | 3836 |
| 837 | 1837 | 2837 | 3837 |
| 838 | 1838 | 2838 | 3838 |
| 839 | 1839 | 2839 | 3839 |
| 840 | 1840 | 2840 | 3840 |
| 841 | 1841 | 2841 | 3841 |
| 842 | 1842 | 2842 | 3842 |
| 843 | 1843 | 2843 | 3843 |
| 844 | 1844 | 2844 | 3844 |
| 845 | 1845 | 2845 | 3845 |
| 846 | 1846 | 2846 | 3846 |
| 847 | 1847 | 2847 | 3847 |
| 848 | 1848 | 2848 | 3848 |
| 849 | 1849 | 2849 | 3849 |
| 850 | 1850 | 2850 | 3850 |
| 851 | 1851 | 2851 | 3851 |
| 852 | 1852 | 2852 | 3852 |
| 853 | 1853 | 2853 | 3853 |
| 854 | 1854 | 2854 | 3854 |
| 855 | 1855 | 2855 | 3855 |
| 856 | 1856 | 2856 | 3856 |
| 857 | 1857 | 2857 | 3857 |
| 858 | 1858 | 2858 | 3858 |
| 859 | 1859 | 2859 | 3859 |
| 860 | 1860 | 2860 | 3860 |
| 861 | 1861 | 2861 | 3861 |
| 862 | 1862 | 2862 | 3862 |
| 863 | 1863 | 2863 | 3863 |
| 864 | 1864 | 2864 | 3864 |
| 865 | 1865 | 2865 | 3865 |
| 866 | 1866 | 2866 | 3866 |
| 867 | 1867 | 2867 | 3867 |
| 868 | 1868 | 2868 | 3868 |
| 869 | 1869 | 2869 | 3869 |
| 870 | 1870 | 2870 | 3870 |
| 871 | 1871 | 2871 | 3871 |
| 872 | 1872 | 2872 | 3872 |
| 873 | 1873 | 2873 | 3873 |
| 874 | 1874 | 2874 | 3874 |
| 875 | 1875 | 2875 | 3875 |
| 876 | 1876 | 2876 | 3876 |
| 877 | 1877 | 2877 | 3877 |
| 878 | 1878 | 2878 | 3878 |
| 879 | 1879 | 2879 | 3879 |
| 880 | 1880 | 2880 | 3880 |
| 881 | 1881 | 2881 | 3881 |
| 882 | 1882 | 2882 | 3882 |
| 883 | 1883 | 2883 | 3883 |
| 884 | 1884 | 2884 | 3884 |
| 885 | 1885 | 2885 | 3885 |
| 886 | 1886 | 2886 | 3886 |
| 887 | 1887 | 2887 | 3887 |
| 888 | 1888 | 2888 | 3888 |
| 889 | 1889 | 2889 | 3889 |
| 890 | 1890 | 2890 | 3890 |
| 891 | 1891 | 2891 | 3891 |
| 892 | 1892 | 2892 | 3892 |
| 893 | 1893 | 2893 | 3893 |
| 894 | 1894 | 2894 | 3894 |
| 895 | 1895 | 2895 | 3895 |
| 896 | 1896 | 2896 | 3896 |
| 897 | 1897 | 2897 | 3897 |
| 898 | 1898 | 2898 | 3898 |
| 899 | 1899 | 2899 | 3899 |
| 900 | 1900 | 2900 | 3900 |
| 901 | 1901 | 2901 | 3901 |
| 902 | 1902 | 2902 | 3902 |
| 903 | 1903 | 2903 | 3903 |
| 904 | 1904 | 2904 | 3904 |
| 905 | 1905 | 2905 | 3905 |
| 906 | 1906 | 2906 | 3906 |
| 907 | 1907 | 2907 | 3907 |
| 908 | 1908 | 2908 | 3908 |
| 909 | 1909 | 2909 | 3909 |
| 910 | 1910 | 2910 | 3910 |
| 911 | 1911 | 2911 | 3911 |
| 912 | 1912 | 2912 | 3912 |
| 913 | 1913 | 2913 | 3913 |
| 914 | 1914 | 2914 | 3914 |
| 915 | 1915 | 2915 | 3915 |
| 916 | 1916 | 2916 | 3916 |
| 917 | 1917 | 2917 | 3917 |
| 918 | 1918 | 2918 | 3918 |
| 919 | 1919 | 2919 | 3919 |
| 920 | 1920 | 2920 | 3920 |
| 921 | 1921 | 2921 | 3921 |
| 922 | 1922 | 2922 | 3922 |
| 923 | 1923 | 2923 | 3923 |
| 924 | 1924 | 2924 | 3924 |
| 925 | 1925 | 2925 | 3925 |
| 926 | 1926 | 2926 | 3926 |
| 927 | 1927 | 2927 | 3927 |
| 928 | 1928 | 2928 | 3928 |
| 929 | 1929 | 2929 | 3929 |
| 930 | 1930 | 2930 | 3930 |
| 931 | 1931 | 2931 | 3931 |
| 932 | 1932 | 2932 | 3932 |
| 933 | 1933 | 2933 | 3933 |
| 934 | 1934 | 2934 | 3934 |
| 935 | 1935 | 2935 | 3935 |
| 936 | 1936 | 2936 | 3936 |
| 937 | 1937 | 2937 | 3937 |
| 938 | 1938 | 2938 | 3938 |
| 939 | 1939 | 2939 | 3939 |
| 940 | 1940 | 2940 | 3940 |
| 941 | 1941 | 2941 | 3941 |
| 942 | 1942 | 2942 | 3942 |
| 943 | 1943 | 2943 | 3943 |
| 944 | 1944 | 2944 | 3944 |
| 945 | 1945 | 2945 | 3945 |
| 946 | 1946 | 2946 | 3946 |
| 947 | 1947 | 2947 | 3947 |
| 948 | 1948 | 2948 | 3948 |
| 949 | 1949 | 2949 | 3949 |
| 950 | 1950 | 2950 | 3950 |
| 951 | 1951 | 2951 | 3951 |
| 952 | 1952 | 2952 | 3952 |
| 953 | 1953 | 2953 | 3953 |
| 954 | 1954 | 2954 | 3954 |
| 955 | 1955 | 2955 | 3955 |
| 956 | 1956 | 2956 | 3956 |
| 957 | 1957 | 2957 | 3957 |
| 958 | 1958 | 2958 | 3958 |
| 959 | 1959 | 2959 | 3959 |
| 960 | 1960 | 2960 | 3960 |
| 961 | 1961 | 2961 | 3961 |
| 962 | 1962 | 2962 | 3962 |
| 963 | 1963 | 2963 | 3963 |
| 964 | 1964 | 2964 | 3964 |
| 965 | 1965 | 2965 | 3965 |
| 966 | 1966 | 2966 | 3966 |
| 967 | 1967 | 2967 | 3967 |
| 968 | 1968 | 2968 | 3968 |
| 969 | 1969 | 2969 | 3969 |
| 970 | 1970 | 2970 | 3970 |
| 971 | 1971 | 2971 | 3971 |
| 972 | 1972 | 2972 | 3972 |
| 973 | 1973 | 2973 | 3973 |
| 974 | 1974 | 2974 | 3974 |
| 975 | 1975 | 2975 | 3975 |
| 976 | 1976 | 2976 | 3976 |
| 977 | 1977 | 2977 | 3977 |
| 978 | 1978 | 2978 | 3978 |
| 979 | 1979 | 2979 | 3979 |
| 980 | 1980 | 2980 | 3980 |
| 981 | 1981 | 2981 | 3981 |
| 982 | 1982 | 2982 | 3982 |
| 983 | 1983 | 2983 | 3983 |
| 984 | 1984 | 2984 | 3984 |
| 985 | 1985 | 2985 | 3985 |
| 986 | 1986 | 2986 | 3986 |
| 987 | 1987 | 2987 | 3987 |
| 988 | 1988 | 2988 | 3988 |
| 989 | 1989 | 2989 | 3989 |
| 990 | 1990 | 2990 | 3990 |
| 991 | 1991 | 2991 | 3991 |
| 992 | 1992 | 2992 | 3992 |
| 993 | 1993 | 2993 | 3993 |
| 994 | 1994 | 2994 | 3994 |
| 995 | 1995 | 2995 | 3995 |
| 996 | 1996 | 2996 | 3996 |
| 997 | 1997 | 2997 | 3997 |
| 998 | 1998 | 2998 | 3998 |
| 999 | 1999 | 2999 | 3999 |
| 1000 | 2000 | 3000 | 4000 |
| 1001 | 2001 | 3001 | 4001 |
| 1002 | 2002 | 3002 | 4002 |

[0128] In some embodiments, the sequences that specifically bind to almond comprise an inner sequence selected from the group consisting of the nucleic acid sequences of SEQ ID NOs. 4003 to 5002. In some examples, a short nucleic acid sequence may be affixed to the 5-end of the inner sequence. The short nucleic acid sequence may be the 5′ primer sequence used in the random ssDNA library, i.e. the nucleic acid sequence of SEQ ID NO. 1. Accordingly, the aptamer that specifically binds to almond may comprise a nucleic acid sequence selected from the group consisting of SEQ ID NOs. 5003 to 6002. In other examples, a short nucleic acid sequence may be affixed to the 3-end of the inner sequence. The short nucleic acid sequence may be the 3′ primer sequence used in the random ssDNA library, i.e. the nucleic acid sequence of SEQ ID NO. 2. Accordingly, the aptamer that specifically binds to almond may comprise a nucleic acid sequence selected from the group consisting of SEQ ID NOs. 6003 to 7002. In other examples, the inner sequence may comprise a 5′ end short sequence (i.e., SEQ ID NO. 1) and a 3′ end short sequence (i.e., SEQ ID NO. 2). Accordingly, the aptamer that specifically binds to almond may comprise a nucleic acid sequence selected from the group consisting of SEQ ID NOs. 7003 to 8002. In one embodiment, the aptamer of the present disclosure that specifically binds to almond may comprise a nucleic acid sequence selected from the group consisting of SEQ ID NOs. 4003 to 8002 listed in Table 3, or variant thereof.

TABLE 3
Aptamer sequences against almond
Aptamer Sequence

| | | | 5′-sequence |
|---|---|---|---|
| | 5′-sequence | Inner | and inner |
| Inner | and inner | sequence and | sequence and |
| sequence | sequence | 3′-sequence | 3′-sequence |
| (SEQ ID NO.) | (SEQ ID NO.) | (SEQ ID NO.) | (SEQ ID NO.) |
| 4003 | 5003 | 6003 | 7003 |
| 4004 | 5004 | 6004 | 7004 |
| 4005 | 5005 | 6005 | 7005 |
| 4006 | 5006 | 6006 | 7006 |
| 4007 | 5007 | 6007 | 7007 |
| 4008 | 5008 | 6008 | 7008 |
| 4009 | 5009 | 6009 | 7009 |
| 4010 | 5010 | 6010 | 7010 |
| 4011 | 5011 | 6011 | 7011 |
| 4012 | 5012 | 6012 | 7012 |
| 4013 | 5013 | 6013 | 7013 |
| 4014 | 5014 | 6014 | 7014 |
| 4015 | 5015 | 6015 | 7015 |
| 4016 | 5016 | 6016 | 7016 |
| 4017 | 5017 | 6017 | 7017 |
| 4018 | 5018 | 6018 | 7018 |
| 4019 | 5019 | 6019 | 7019 |
| 4020 | 5020 | 6020 | 7020 |
| 4021 | 5021 | 6021 | 7021 |
| 4022 | 5022 | 6022 | 7022 |
| 4023 | 5023 | 6023 | 7023 |
| 4024 | 5024 | 6024 | 7024 |
| 4025 | 5025 | 6025 | 7025 |
| 4026 | 5026 | 6026 | 7026 |
| 4027 | 5027 | 6027 | 7027 |
| 4028 | 5028 | 6028 | 7028 |
| 4029 | 5029 | 6029 | 7029 |
| 4030 | 5030 | 6030 | 7030 |
| 4031 | 5031 | 6031 | 7031 |
| 4032 | 5032 | 6032 | 7032 |
| 4033 | 5033 | 6033 | 7033 |
| 4034 | 5034 | 6034 | 7034 |
| 4035 | 5035 | 6035 | 7035 |
| 4036 | 5036 | 6036 | 7036 |
| 4037 | 5037 | 6037 | 7037 |
| 4038 | 5038 | 6038 | 7038 |
| 4039 | 5039 | 6039 | 7039 |
| 4040 | 5040 | 6040 | 7040 |
| 4041 | 5041 | 6041 | 7041 |
| 4042 | 5042 | 6042 | 7042 |
| 4043 | 5043 | 6043 | 7043 |
| 4044 | 5044 | 6044 | 7044 |
| 4045 | 5045 | 6045 | 7045 |
| 4046 | 5046 | 6046 | 7046 |
| 4047 | 5047 | 6047 | 7047 |
| 4048 | 5048 | 6048 | 7048 |
| 4049 | 5049 | 6049 | 7049 |
| 4050 | 5050 | 6050 | 7050 |
| 4051 | 5051 | 6051 | 7051 |
| 4052 | 5052 | 6052 | 7052 |
| 4053 | 5053 | 6053 | 7053 |
| 4054 | 5054 | 6054 | 7054 |
| 4055 | 5055 | 6055 | 7055 |
| 4056 | 5056 | 6056 | 7056 |
| 4057 | 5057 | 6057 | 7057 |
| 4058 | 5058 | 6058 | 7058 |
| 4059 | 5059 | 6059 | 7059 |
| 4060 | 5060 | 6060 | 7060 |
| 4061 | 5061 | 6061 | 7061 |
| 4062 | 5062 | 6062 | 7062 |
| 4063 | 5063 | 6063 | 7063 |
| 4064 | 5064 | 6064 | 7064 |
| 4065 | 5065 | 6065 | 7065 |
| 4066 | 5066 | 6066 | 7066 |
| 4067 | 5067 | 6067 | 7067 |
| 4068 | 5068 | 6068 | 7068 |
| 4069 | 5069 | 6069 | 7069 |
| 4070 | 5070 | 6070 | 7070 |
| 4071 | 5071 | 6071 | 7071 |
| 4072 | 5072 | 6072 | 7072 |
| 4073 | 5073 | 6073 | 7073 |
| 4074 | 5074 | 6074 | 7074 |
| 4075 | 5075 | 6075 | 7075 |
| 4076 | 5076 | 6076 | 7076 |
| 4077 | 5077 | 6077 | 7077 |
| 4078 | 5078 | 6078 | 7078 |
| 4079 | 5079 | 6079 | 7079 |
| 4080 | 5080 | 6080 | 7080 |
| 4081 | 5081 | 6081 | 7081 |
| 4082 | 5082 | 6082 | 7082 |
| 4083 | 5083 | 6083 | 7083 |
| 4084 | 5084 | 6084 | 7084 |
| 4085 | 5085 | 6085 | 7085 |
| 4086 | 5086 | 6086 | 7086 |
| 4087 | 5087 | 6087 | 7087 |
| 4088 | 5088 | 6088 | 7088 |
| 4089 | 5089 | 6089 | 7089 |
| 4090 | 5090 | 6090 | 7090 |
| 4091 | 5091 | 6091 | 7091 |
| 4092 | 5092 | 6092 | 7092 |
| 4093 | 5093 | 6093 | 7093 |
| 4094 | 5094 | 6094 | 7094 |
| 4095 | 5095 | 6095 | 7095 |
| 4096 | 5096 | 6096 | 7096 |
| 4097 | 5097 | 6097 | 7097 |
| 4098 | 5098 | 6098 | 7098 |
| 4099 | 5099 | 6099 | 7099 |
| 4100 | 5100 | 6100 | 7100 |
| 4101 | 5101 | 6101 | 7101 |
| 4102 | 5102 | 6102 | 7102 |
| 4103 | 5103 | 6103 | 7103 |
| 4104 | 5104 | 6104 | 7104 |
| 4105 | 5105 | 6105 | 7105 |
| 4106 | 5106 | 6106 | 7106 |
| 4107 | 5107 | 6107 | 7107 |
| 4108 | 5108 | 6108 | 7108 |
| 4109 | 5109 | 6109 | 7109 |
| 4110 | 5110 | 6110 | 7110 |
| 4111 | 5111 | 6111 | 7111 |
| 4112 | 5112 | 6112 | 7112 |
| 4113 | 5113 | 6113 | 7113 |
| 4114 | 5114 | 6114 | 7114 |
| 4115 | 5115 | 6115 | 7115 |
| 4116 | 5116 | 6116 | 7116 |
| 4117 | 5117 | 6117 | 7117 |
| 4118 | 5118 | 6118 | 7118 |
| 4119 | 5119 | 6119 | 7119 |
| 4120 | 5120 | 6120 | 7120 |
| 4121 | 5121 | 6121 | 7121 |
| 4122 | 5122 | 6122 | 7122 |
| 4123 | 5123 | 6123 | 7123 |
| 4124 | 5124 | 6124 | 7124 |
| 4125 | 5125 | 6125 | 7125 |
| 4126 | 5126 | 6126 | 7126 |
| 4127 | 5127 | 6127 | 7127 |
| 4128 | 5128 | 6128 | 7128 |
| 4129 | 5129 | 6129 | 7129 |
| 4130 | 5130 | 6130 | 7130 |
| 4131 | 5131 | 6131 | 7131 |
| 4132 | 5132 | 6132 | 7132 |
| 4133 | 5133 | 6133 | 7133 |
| 4134 | 5134 | 6134 | 7134 |
| 4135 | 5135 | 6135 | 7135 |
| 4136 | 5136 | 6136 | 7136 |
| 4137 | 5137 | 6137 | 7137 |
| 4138 | 5138 | 6138 | 7138 |
| 4139 | 5139 | 6139 | 7139 |
| 4140 | 5140 | 6140 | 7140 |
| 4141 | 5141 | 6141 | 7141 |
| 4142 | 5142 | 6142 | 7142 |
| 4143 | 5143 | 6143 | 7143 |
| 4144 | 5144 | 6144 | 7144 |
| 4145 | 5145 | 6145 | 7145 |
| 4146 | 5146 | 6146 | 7146 |
| 4147 | 5147 | 6147 | 7147 |
| 4148 | 5148 | 6148 | 7148 |
| 4149 | 5149 | 6149 | 7149 |
| 4150 | 5150 | 6150 | 7150 |
| 4151 | 5151 | 6151 | 7151 |
| 4152 | 5152 | 6152 | 7152 |
| 4153 | 5153 | 6153 | 7153 |
| 4154 | 5154 | 6154 | 7154 |
| 4155 | 5155 | 6155 | 7155 |
| 4156 | 5156 | 6156 | 7156 |
| 4157 | 5157 | 6157 | 7157 |
| 4158 | 5158 | 6158 | 7158 |
| 4159 | 5159 | 6159 | 7159 |
| 4160 | 5160 | 6160 | 7160 |
| 4161 | 5161 | 6161 | 7161 |
| 4162 | 5162 | 6162 | 7162 |
| 4163 | 5163 | 6163 | 7163 |
| 4164 | 5164 | 6164 | 7164 |
| 4165 | 5165 | 6165 | 7165 |
| 4166 | 5166 | 6166 | 7166 |
| 4167 | 5167 | 6167 | 7167 |
| 4168 | 5168 | 6168 | 7168 |
| 4169 | 5169 | 6169 | 7169 |
| 4170 | 5170 | 6170 | 7170 |
| 4171 | 5171 | 6171 | 7171 |
| 4172 | 5172 | 6172 | 7172 |
| 4173 | 5173 | 6173 | 7173 |
| 4174 | 5174 | 6174 | 7174 |
| 4175 | 5175 | 6175 | 7175 |
| 4176 | 5176 | 6176 | 7176 |
| 4177 | 5177 | 6177 | 7177 |
| 4178 | 5178 | 6178 | 7178 |
| 4179 | 5179 | 6179 | 7179 |
| 4180 | 5180 | 6180 | 7180 |
| 4181 | 5181 | 6181 | 7181 |
| 4182 | 5182 | 6182 | 7182 |
| 4183 | 5183 | 6183 | 7183 |
| 4184 | 5184 | 6184 | 7184 |
| 4185 | 5185 | 6185 | 7185 |
| 4186 | 5186 | 6186 | 7186 |
| 4187 | 5187 | 6187 | 7187 |
| 4188 | 5188 | 6188 | 7188 |
| 4189 | 5189 | 6189 | 7189 |
| 4190 | 5190 | 6190 | 7190 |
| 4191 | 5191 | 6191 | 7191 |
| 4192 | 5192 | 6192 | 7192 |
| 4193 | 5193 | 6193 | 7193 |
| 4194 | 5194 | 6194 | 7194 |
| 4195 | 5195 | 6195 | 7195 |
| 4196 | 5196 | 6196 | 7196 |
| 4197 | 5197 | 6197 | 7197 |
| 4198 | 5198 | 6198 | 7198 |
| 4199 | 5199 | 6199 | 7199 |
| 4200 | 5200 | 6200 | 7200 |
| 4201 | 5201 | 6201 | 7201 |
| 4202 | 5202 | 6202 | 7202 |
| 4203 | 5203 | 6203 | 7203 |
| 4204 | 5204 | 6204 | 7204 |
| 4205 | 5205 | 6205 | 7205 |
| 4206 | 5206 | 6206 | 7206 |
| 4207 | 5207 | 6207 | 7207 |
| 4208 | 5208 | 6208 | 7208 |
| 4209 | 5209 | 6209 | 7209 |
| 4210 | 5210 | 6210 | 7210 |
| 4211 | 5211 | 6211 | 7211 |
| 4212 | 5212 | 6212 | 7212 |
| 4213 | 5213 | 6213 | 7213 |
| 4214 | 5214 | 6214 | 7214 |
| 4215 | 5215 | 6215 | 7215 |
| 4216 | 5216 | 6216 | 7216 |
| 4217 | 5217 | 6217 | 7217 |
| 4218 | 5218 | 6218 | 7218 |
| 4219 | 5219 | 6219 | 7219 |
| 4220 | 5220 | 6220 | 7220 |
| 4221 | 5221 | 6221 | 7221 |
| 4222 | 5222 | 6222 | 7222 |
| 4223 | 5223 | 6223 | 7223 |
| 4224 | 5224 | 6224 | 7224 |
| 4225 | 5225 | 6225 | 7225 |
| 4226 | 5226 | 6226 | 7226 |
| 4227 | 5227 | 6227 | 7227 |
| 4228 | 5228 | 6228 | 7228 |
| 4229 | 5229 | 6229 | 7229 |
| 4230 | 5230 | 6230 | 7230 |
| 4231 | 5231 | 6231 | 7231 |
| 4232 | 5232 | 6232 | 7232 |
| 4233 | 5233 | 6233 | 7233 |
| 4234 | 5234 | 6234 | 7234 |
| 4235 | 5235 | 6235 | 7235 |
| 4236 | 5236 | 6236 | 7236 |
| 4237 | 5237 | 6237 | 7237 |
| 4238 | 5238 | 6238 | 7238 |
| 4239 | 5239 | 6239 | 7239 |
| 4240 | 5240 | 6240 | 7240 |
| 4241 | 5241 | 6241 | 7241 |
| 4242 | 5242 | 6242 | 7242 |
| 4243 | 5243 | 6243 | 7243 |
| 4244 | 5244 | 6244 | 7244 |
| 4245 | 5245 | 6245 | 7245 |
| 4246 | 5246 | 6246 | 7246 |
| 4247 | 5247 | 6247 | 7247 |
| 4248 | 5248 | 6248 | 7248 |
| 4249 | 5249 | 6249 | 7249 |
| 4250 | 5250 | 6250 | 7250 |
| 4251 | 5251 | 6251 | 7251 |
| 4252 | 5252 | 6252 | 7252 |
| 4253 | 5253 | 6253 | 7253 |
| 4254 | 5254 | 6254 | 7254 |
| 4255 | 5255 | 6255 | 7255 |
| 4256 | 5256 | 6256 | 7256 |
| 4257 | 5257 | 6257 | 7257 |
| 4258 | 5258 | 6258 | 7258 |
| 4259 | 5259 | 6259 | 7259 |
| 4260 | 5260 | 6260 | 7260 |
| 4261 | 5261 | 6261 | 7261 |
| 4262 | 5262 | 6262 | 7262 |
| 4263 | 5263 | 6263 | 7263 |
| 4264 | 5264 | 6264 | 7264 |
| 4265 | 5265 | 6265 | 7265 |
| 4266 | 5266 | 6266 | 7266 |
| 4267 | 5267 | 6267 | 7267 |
| 4268 | 5268 | 6268 | 7268 |
| 4269 | 5269 | 6269 | 7269 |
| 4270 | 5270 | 6270 | 7270 |
| 4271 | 5271 | 6271 | 7271 |
| 4272 | 5272 | 6272 | 7272 |
| 4273 | 5273 | 6273 | 7273 |
| 4274 | 5274 | 6274 | 7274 |
| 4275 | 5275 | 6275 | 7275 |
| 4276 | 5276 | 6276 | 7276 |
| 4277 | 5277 | 6277 | 7277 |
| 4278 | 5278 | 6278 | 7278 |
| 4279 | 5279 | 6279 | 7279 |
| 4280 | 5280 | 6280 | 7280 |
| 4281 | 5281 | 6281 | 7281 |
| 4282 | 5282 | 6282 | 7282 |
| 4283 | 5283 | 6283 | 7283 |
| 4284 | 5284 | 6284 | 7284 |
| 4285 | 5285 | 6285 | 7285 |
| 4286 | 5286 | 6286 | 7286 |
| 4287 | 5287 | 6287 | 7287 |
| 4288 | 5288 | 6288 | 7288 |
| 4289 | 5289 | 6289 | 7289 |
| 4290 | 5290 | 6290 | 7290 |
| 4291 | 5291 | 6291 | 7291 |
| 4292 | 5292 | 6292 | 7292 |
| 4293 | 5293 | 6293 | 7293 |
| 4294 | 5294 | 6294 | 7294 |
| 4295 | 5295 | 6295 | 7295 |
| 4296 | 5296 | 6296 | 7296 |
| 4297 | 5297 | 6297 | 7297 |
| 4298 | 5298 | 6298 | 7298 |
| 4299 | 5299 | 6299 | 7299 |
| 4300 | 5300 | 6300 | 7300 |
| 4301 | 5301 | 6301 | 7301 |
| 4302 | 5302 | 6302 | 7302 |
| 4303 | 5303 | 6303 | 7303 |
| 4304 | 5304 | 6304 | 7304 |
| 4305 | 5305 | 6305 | 7305 |
| 4306 | 5306 | 6306 | 7306 |
| 4307 | 5307 | 6307 | 7307 |
| 4308 | 5308 | 6308 | 7308 |
| 4309 | 5309 | 6309 | 7309 |
| 4310 | 5310 | 6310 | 7310 |
| 4311 | 5311 | 6311 | 7311 |
| 4312 | 5312 | 6312 | 7312 |
| 4313 | 5313 | 6313 | 7313 |
| 4314 | 5314 | 6314 | 7314 |
| 4315 | 5315 | 6315 | 7315 |
| 4316 | 5316 | 6316 | 7316 |
| 4317 | 5317 | 6317 | 7317 |
| 4318 | 5318 | 6318 | 7318 |
| 4319 | 5319 | 6319 | 7319 |
| 4320 | 5320 | 6320 | 7320 |
| 4321 | 5321 | 6321 | 7321 |
| 4322 | 5322 | 6322 | 7322 |
| 4323 | 5323 | 6323 | 7323 |
| 4324 | 5324 | 6324 | 7324 |
| 4325 | 5325 | 6325 | 7325 |
| 4326 | 5326 | 6326 | 7326 |
| 4327 | 5327 | 6327 | 7327 |
| 4328 | 5328 | 6328 | 7328 |
| 4329 | 5329 | 6329 | 7329 |
| 4330 | 5330 | 6330 | 7330 |
| 4331 | 5331 | 6331 | 7331 |
| 4332 | 5332 | 6332 | 7332 |
| 4333 | 5333 | 6333 | 7333 |
| 4334 | 5334 | 6334 | 7334 |
| 4335 | 5335 | 6335 | 7335 |
| 4336 | 5336 | 6336 | 7336 |
| 4337 | 5337 | 6337 | 7337 |
| 4338 | 5338 | 6338 | 7338 |
| 4339 | 5339 | 6339 | 7339 |
| 4340 | 5340 | 6340 | 7340 |
| 4341 | 5341 | 6341 | 7341 |
| 4342 | 5342 | 6342 | 7342 |
| 4343 | 5343 | 6343 | 7343 |
| 4344 | 5344 | 6344 | 7344 |
| 4345 | 5345 | 6345 | 7345 |
| 4346 | 5346 | 6346 | 7346 |
| 4347 | 5347 | 6347 | 7347 |
| 4348 | 5348 | 6348 | 7348 |
| 4349 | 5349 | 6349 | 7349 |
| 4350 | 5350 | 6350 | 7350 |
| 4351 | 5351 | 6351 | 7351 |
| 4352 | 5352 | 6352 | 7352 |
| 4353 | 5353 | 6353 | 7353 |
| 4354 | 5354 | 6354 | 7354 |
| 4355 | 5355 | 6355 | 7355 |
| 4356 | 5356 | 6356 | 7356 |
| 4357 | 5357 | 6357 | 7357 |
| 4358 | 5358 | 6358 | 7358 |
| 4359 | 5359 | 6359 | 7359 |
| 4360 | 5360 | 6360 | 7360 |
| 4361 | 5361 | 6361 | 7361 |
| 4362 | 5362 | 6362 | 7362 |
| 4363 | 5363 | 6363 | 7363 |
| 4364 | 5364 | 6364 | 7364 |
| 4365 | 5365 | 6365 | 7365 |
| 4366 | 5366 | 6366 | 7366 |
| 4367 | 5367 | 6367 | 7367 |
| 4368 | 5368 | 6368 | 7368 |
| 4369 | 5369 | 6369 | 7369 |
| 4370 | 5370 | 6370 | 7370 |
| 4371 | 5371 | 6371 | 7371 |
| 4372 | 5372 | 6372 | 7372 |
| 4373 | 5373 | 6373 | 7373 |
| 4374 | 5374 | 6374 | 7374 |
| 4375 | 5375 | 6375 | 7375 |
| 4376 | 5376 | 6376 | 7376 |
| 4377 | 5377 | 6377 | 7377 |
| 4378 | 5378 | 6378 | 7378 |
| 4379 | 5379 | 6379 | 7379 |
| 4380 | 5380 | 6380 | 7380 |
| 4381 | 5381 | 6381 | 7381 |
| 4382 | 5382 | 6382 | 7382 |
| 4383 | 5383 | 6383 | 7383 |
| 4384 | 5384 | 6384 | 7384 |
| 4385 | 5385 | 6385 | 7385 |
| 4386 | 5386 | 6386 | 7386 |
| 4387 | 5387 | 6387 | 7387 |
| 4388 | 5388 | 6388 | 7388 |
| 4389 | 5389 | 6389 | 7389 |
| 4390 | 5390 | 6390 | 7390 |
| 4391 | 5391 | 6391 | 7391 |
| 4392 | 5392 | 6392 | 7392 |
| 4393 | 5393 | 6393 | 7393 |
| 4394 | 5394 | 6394 | 7394 |
| 4395 | 5395 | 6395 | 7395 |
| 4396 | 5396 | 6396 | 7396 |
| 4397 | 5397 | 6397 | 7397 |
| 4398 | 5398 | 6398 | 7398 |
| 4399 | 5399 | 6399 | 7399 |
| 4400 | 5400 | 6400 | 7400 |
| 4401 | 5401 | 6401 | 7401 |
| 4402 | 5402 | 6402 | 7402 |
| 4403 | 5403 | 6403 | 7403 |
| 4404 | 5404 | 6404 | 7404 |
| 4405 | 5405 | 6405 | 7405 |
| 4406 | 5406 | 6406 | 7406 |
| 4407 | 5407 | 6407 | 7407 |
| 4408 | 5408 | 6408 | 7408 |
| 4409 | 5409 | 6409 | 7409 |
| 4410 | 5410 | 6410 | 7410 |
| 4411 | 5411 | 6411 | 7411 |
| 4412 | 5412 | 6412 | 7412 |
| 4413 | 5413 | 6413 | 7413 |
| 4414 | 5414 | 6414 | 7414 |
| 4415 | 5415 | 6415 | 7415 |
| 4416 | 5416 | 6416 | 7416 |
| 4417 | 5417 | 6417 | 7417 |
| 4418 | 5418 | 6418 | 7418 |
| 4419 | 5419 | 6419 | 7419 |
| 4420 | 5420 | 6420 | 7420 |
| 4421 | 5421 | 6421 | 7421 |
| 4422 | 5422 | 6422 | 7422 |
| 4423 | 5423 | 6423 | 7423 |
| 4424 | 5424 | 6424 | 7424 |
| 4425 | 5425 | 6425 | 7425 |
| 4426 | 5426 | 6426 | 7426 |
| 4427 | 5427 | 6427 | 7427 |
| 4428 | 5428 | 6428 | 7428 |
| 4429 | 5429 | 6429 | 7429 |
| 4430 | 5430 | 6430 | 7430 |
| 4431 | 5431 | 6431 | 7431 |
| 4432 | 5432 | 6432 | 7432 |
| 4433 | 5433 | 6433 | 7433 |
| 4434 | 5434 | 6434 | 7434 |
| 4435 | 5435 | 6435 | 7435 |
| 4436 | 5436 | 6436 | 7436 |
| 4437 | 5437 | 6437 | 7437 |
| 4438 | 5438 | 6438 | 7438 |
| 4439 | 5439 | 6439 | 7439 |
| 4440 | 5440 | 6440 | 7440 |
| 4441 | 5441 | 6441 | 7441 |
| 4442 | 5442 | 6442 | 7442 |
| 4443 | 5443 | 6443 | 7443 |
| 4444 | 5444 | 6444 | 7444 |
| 4445 | 5445 | 6445 | 7445 |
| 4446 | 5446 | 6446 | 7446 |
| 4447 | 5447 | 6447 | 7447 |
| 4448 | 5448 | 6448 | 7448 |
| 4449 | 5449 | 6449 | 7449 |
| 4450 | 5450 | 6450 | 7450 |
| 4451 | 5451 | 6451 | 7451 |
| 4452 | 5452 | 6452 | 7452 |
| 4453 | 5453 | 6453 | 7453 |
| 4454 | 5454 | 6454 | 7454 |
| 4455 | 5455 | 6455 | 7455 |
| 4456 | 5456 | 6456 | 7456 |
| 4457 | 5457 | 6457 | 7457 |
| 4458 | 5458 | 6458 | 7458 |
| 4459 | 5459 | 6459 | 7459 |
| 4460 | 5460 | 6460 | 7460 |
| 4461 | 5461 | 6461 | 7461 |
| 4462 | 5462 | 6462 | 7462 |
| 4463 | 5463 | 6463 | 7463 |
| 4464 | 5464 | 6464 | 7464 |
| 4465 | 5465 | 6465 | 7465 |
| 4466 | 5466 | 6466 | 7466 |
| 4467 | 5467 | 6467 | 7467 |
| 4468 | 5468 | 6468 | 7468 |
| 4469 | 5469 | 6469 | 7469 |
| 4470 | 5470 | 6470 | 7470 |
| 4471 | 5471 | 6471 | 7471 |
| 4472 | 5472 | 6472 | 7472 |
| 4473 | 5473 | 6473 | 7473 |
| 4474 | 5474 | 6474 | 7474 |
| 4475 | 5475 | 6475 | 7475 |
| 4476 | 5476 | 6476 | 7476 |
| 4477 | 5477 | 6477 | 7477 |
| 4478 | 5478 | 6478 | 7478 |
| 4479 | 5479 | 6479 | 7479 |
| 4480 | 5480 | 6480 | 7480 |
| 4481 | 5481 | 6481 | 7481 |
| 4482 | 5482 | 6482 | 7482 |
| 4483 | 5483 | 6483 | 7483 |
| 4484 | 5484 | 6484 | 7484 |
| 4485 | 5485 | 6485 | 7485 |
| 4486 | 5486 | 6486 | 7486 |
| 4487 | 5487 | 6487 | 7487 |
| 4488 | 5488 | 6488 | 7488 |
| 4489 | 5489 | 6489 | 7489 |
| 4490 | 5490 | 6490 | 7490 |
| 4491 | 5491 | 6491 | 7491 |
| 4492 | 5492 | 6492 | 7492 |
| 4493 | 5493 | 6493 | 7493 |
| 4494 | 5494 | 6494 | 7494 |
| 4495 | 5495 | 6495 | 7495 |
| 4496 | 5496 | 6496 | 7496 |
| 4497 | 5497 | 6497 | 7497 |
| 4498 | 5498 | 6498 | 7498 |
| 4499 | 5499 | 6499 | 7499 |
| 4500 | 5500 | 6500 | 7500 |
| 4501 | 5501 | 6501 | 7501 |
| 4502 | 5502 | 6502 | 7502 |
| 4503 | 5503 | 6503 | 7503 |
| 4504 | 5504 | 6504 | 7504 |
| 4505 | 5505 | 6505 | 7505 |
| 4506 | 5506 | 6506 | 7506 |
| 4507 | 5507 | 6507 | 7507 |
| 4508 | 5508 | 6508 | 7508 |
| 4509 | 5509 | 6509 | 7509 |
| 4510 | 5510 | 6510 | 7510 |
| 4511 | 5511 | 6511 | 7511 |
| 4512 | 5512 | 6512 | 7512 |
| 4513 | 5513 | 6513 | 7513 |
| 4514 | 5514 | 6514 | 7514 |
| 4515 | 5515 | 6515 | 7515 |
| 4516 | 5516 | 6516 | 7516 |
| 4517 | 5517 | 6517 | 7517 |
| 4518 | 5518 | 6518 | 7518 |
| 4519 | 5519 | 6519 | 7519 |
| 4520 | 5520 | 6520 | 7520 |
| 4521 | 5521 | 6521 | 7521 |
| 4522 | 5522 | 6522 | 7522 |
| 4523 | 5523 | 6523 | 7523 |
| 4524 | 5524 | 6524 | 7524 |
| 4525 | 5525 | 6525 | 7525 |
| 4526 | 5526 | 6526 | 7526 |
| 4527 | 5527 | 6527 | 7527 |
| 4528 | 5528 | 6528 | 7528 |
| 4529 | 5529 | 6529 | 7529 |
| 4530 | 5530 | 6530 | 7530 |
| 4531 | 5531 | 6531 | 7531 |
| 4532 | 5532 | 6532 | 7532 |
| 4533 | 5533 | 6533 | 7533 |
| 4534 | 5534 | 6534 | 7534 |
| 4535 | 5535 | 6535 | 7535 |
| 4536 | 5536 | 6536 | 7536 |
| 4537 | 5537 | 6537 | 7537 |
| 4538 | 5538 | 6538 | 7538 |
| 4539 | 5539 | 6539 | 7539 |
| 4540 | 5540 | 6540 | 7540 |
| 4541 | 5541 | 6541 | 7541 |
| 4542 | 5542 | 6542 | 7542 |
| 4543 | 5543 | 6543 | 7543 |
| 4544 | 5544 | 6544 | 7544 |
| 4545 | 5545 | 6545 | 7545 |
| 4546 | 5546 | 6546 | 7546 |
| 4547 | 5547 | 6547 | 7547 |
| 4548 | 5548 | 6548 | 7548 |
| 4549 | 5549 | 6549 | 7549 |
| 4550 | 5550 | 6550 | 7550 |
| 4551 | 5551 | 6551 | 7551 |
| 4552 | 5552 | 6552 | 7552 |
| 4553 | 5553 | 6553 | 7553 |
| 4554 | 5554 | 6554 | 7554 |
| 4555 | 5555 | 6555 | 7555 |
| 4556 | 5556 | 6556 | 7556 |
| 4557 | 5557 | 6557 | 7557 |
| 4558 | 5558 | 6558 | 7558 |
| 4559 | 5559 | 6559 | 7559 |
| 4560 | 5560 | 6560 | 7560 |
| 4561 | 5561 | 6561 | 7561 |
| 4562 | 5562 | 6562 | 7562 |
| 4563 | 5563 | 6563 | 7563 |
| 4564 | 5564 | 6564 | 7564 |
| 4565 | 5565 | 6565 | 7565 |
| 4566 | 5566 | 6566 | 7566 |
| 4567 | 5567 | 6567 | 7567 |
| 4568 | 5568 | 6568 | 7568 |
| 4569 | 5569 | 6569 | 7569 |
| 4570 | 5570 | 6570 | 7570 |
| 4571 | 5571 | 6571 | 7571 |
| 4572 | 5572 | 6572 | 7572 |
| 4573 | 5573 | 6573 | 7573 |
| 4574 | 5574 | 6574 | 7574 |
| 4575 | 5575 | 6575 | 7575 |
| 4576 | 5576 | 6576 | 7576 |
| 4577 | 5577 | 6577 | 7577 |
| 4578 | 5578 | 6578 | 7578 |
| 4579 | 5579 | 6579 | 7579 |
| 4580 | 5580 | 6580 | 7580 |
| 4581 | 5581 | 6581 | 7581 |
| 4582 | 5582 | 6582 | 7582 |
| 4583 | 5583 | 6583 | 7583 |
| 4584 | 5584 | 6584 | 7584 |
| 4585 | 5585 | 6585 | 7585 |
| 4586 | 5586 | 6586 | 7586 |
| 4587 | 5587 | 6587 | 7587 |
| 4588 | 5588 | 6588 | 7588 |
| 4589 | 5589 | 6589 | 7589 |
| 4590 | 5590 | 6590 | 7590 |
| 4591 | 5591 | 6591 | 7591 |
| 4592 | 5592 | 6592 | 7592 |
| 4593 | 5593 | 6593 | 7593 |
| 4594 | 5594 | 6594 | 7594 |
| 4595 | 5595 | 6595 | 7595 |
| 4596 | 5596 | 6596 | 7596 |
| 4597 | 5597 | 6597 | 7597 |
| 4598 | 5598 | 6598 | 7598 |
| 4599 | 5599 | 6599 | 7599 |
| 4600 | 5600 | 6600 | 7600 |
| 4601 | 5601 | 6601 | 7601 |
| 4602 | 5602 | 6602 | 7602 |
| 4603 | 5603 | 6603 | 7603 |
| 4604 | 5604 | 6604 | 7604 |
| 4605 | 5605 | 6605 | 7605 |
| 4606 | 5606 | 6606 | 7606 |
| 4607 | 5607 | 6607 | 7607 |
| 4608 | 5608 | 6608 | 7608 |
| 4609 | 5609 | 6609 | 7609 |
| 4610 | 5610 | 6610 | 7610 |
| 4611 | 5611 | 6611 | 7611 |
| 4612 | 5612 | 6612 | 7612 |
| 4613 | 5613 | 6613 | 7613 |
| 4614 | 5614 | 6614 | 7614 |
| 4615 | 5615 | 6615 | 7615 |
| 4616 | 5616 | 6616 | 7616 |
| 4617 | 5617 | 6617 | 7617 |
| 4618 | 5618 | 6618 | 7618 |
| 4619 | 5619 | 6619 | 7619 |
| 4620 | 5620 | 6620 | 7620 |
| 4621 | 5621 | 6621 | 7621 |
| 4622 | 5622 | 6622 | 7622 |
| 4623 | 5623 | 6623 | 7623 |
| 4624 | 5624 | 6624 | 7624 |
| 4625 | 5625 | 6625 | 7625 |
| 4626 | 5626 | 6626 | 7626 |
| 4627 | 5627 | 6627 | 7627 |
| 4628 | 5628 | 6628 | 7628 |
| 4629 | 5629 | 6629 | 7629 |
| 4630 | 5630 | 6630 | 7630 |
| 4631 | 5631 | 6631 | 7631 |
| 4632 | 5632 | 6632 | 7632 |
| 4633 | 5633 | 6633 | 7633 |
| 4634 | 5634 | 6634 | 7634 |
| 4635 | 5635 | 6635 | 7635 |
| 4636 | 5636 | 6636 | 7636 |
| 4637 | 5637 | 6637 | 7637 |
| 4638 | 5638 | 6638 | 7638 |
| 4639 | 5639 | 6639 | 7639 |
| 4640 | 5640 | 6640 | 7640 |
| 4641 | 5641 | 6641 | 7641 |
| 4642 | 5642 | 6642 | 7642 |
| 4643 | 5643 | 6643 | 7643 |
| 4644 | 5644 | 6644 | 7644 |
| 4645 | 5645 | 6645 | 7645 |
| 4646 | 5646 | 6646 | 7646 |
| 4647 | 5647 | 6647 | 7647 |
| 4648 | 5648 | 6648 | 7648 |
| 4649 | 5649 | 6649 | 7649 |
| 4650 | 5650 | 6650 | 7650 |
| 4651 | 5651 | 6651 | 7651 |
| 4652 | 5652 | 6652 | 7652 |
| 4653 | 5653 | 6653 | 7653 |
| 4654 | 5654 | 6654 | 7654 |
| 4655 | 5655 | 6655 | 7655 |
| 4656 | 5656 | 6656 | 7656 |
| 4657 | 5657 | 6657 | 7657 |
| 4658 | 5658 | 6658 | 7658 |
| 4659 | 5659 | 6659 | 7659 |
| 4660 | 5660 | 6660 | 7660 |
| 4661 | 5661 | 6661 | 7661 |
| 4662 | 5662 | 6662 | 7662 |
| 4663 | 5663 | 6663 | 7663 |
| 4664 | 5664 | 6664 | 7664 |
| 4665 | 5665 | 6665 | 7665 |
| 4666 | 5666 | 6666 | 7666 |
| 4667 | 5667 | 6667 | 7667 |
| 4668 | 5668 | 6668 | 7668 |
| 4669 | 5669 | 6669 | 7669 |
| 4670 | 5670 | 6670 | 7670 |
| 4671 | 5671 | 6671 | 7671 |
| 4672 | 5672 | 6672 | 7672 |
| 4673 | 5673 | 6673 | 7673 |
| 4674 | 5674 | 6674 | 7674 |
| 4675 | 5675 | 6675 | 7675 |
| 4676 | 5676 | 6676 | 7676 |
| 4677 | 5677 | 6677 | 7677 |
| 4678 | 5678 | 6678 | 7678 |
| 4679 | 5679 | 6679 | 7679 |
| 4680 | 5680 | 6680 | 7680 |
| 4681 | 5681 | 6681 | 7681 |
| 4682 | 5682 | 6682 | 7682 |
| 4683 | 5683 | 6683 | 7683 |
| 4684 | 5684 | 6684 | 7684 |
| 4685 | 5685 | 6685 | 7685 |
| 4686 | 5686 | 6686 | 7686 |
| 4687 | 5687 | 6687 | 7687 |
| 4688 | 5688 | 6688 | 7688 |
| 4689 | 5689 | 6689 | 7689 |
| 4690 | 5690 | 6690 | 7690 |
| 4691 | 5691 | 6691 | 7691 |
| 4692 | 5692 | 6692 | 7692 |
| 4693 | 5693 | 6693 | 7693 |
| 4694 | 5694 | 6694 | 7694 |
| 4695 | 5695 | 6695 | 7695 |
| 4696 | 5696 | 6696 | 7696 |
| 4697 | 5697 | 6697 | 7697 |
| 4698 | 5698 | 6698 | 7698 |
| 4699 | 5699 | 6699 | 7699 |
| 4700 | 5700 | 6700 | 7700 |
| 4701 | 5701 | 6701 | 7701 |
| 4702 | 5702 | 6702 | 7702 |
| 4703 | 5703 | 6703 | 7703 |
| 4704 | 5704 | 6704 | 7704 |
| 4705 | 5705 | 6705 | 7705 |
| 4706 | 5706 | 6706 | 7706 |
| 4707 | 5707 | 6707 | 7707 |
| 4708 | 5708 | 6708 | 7708 |
| 4709 | 5709 | 6709 | 7709 |
| 4710 | 5710 | 6710 | 7710 |
| 4711 | 5711 | 6711 | 7711 |
| 4712 | 5712 | 6712 | 7712 |
| 4713 | 5713 | 6713 | 7713 |
| 4714 | 5714 | 6714 | 7714 |
| 4715 | 5715 | 6715 | 7715 |
| 4716 | 5716 | 6716 | 7716 |
| 4717 | 5717 | 6717 | 7717 |
| 4718 | 5718 | 6718 | 7718 |
| 4719 | 5719 | 6719 | 7719 |
| 4720 | 5720 | 6720 | 7720 |
| 4721 | 5721 | 6721 | 7721 |
| 4722 | 5722 | 6722 | 7722 |
| 4723 | 5723 | 6723 | 7723 |
| 4724 | 5724 | 6724 | 7724 |
| 4725 | 5725 | 6725 | 7725 |
| 4726 | 5726 | 6726 | 7726 |
| 4727 | 5727 | 6727 | 7727 |
| 4728 | 5728 | 6728 | 7728 |
| 4729 | 5729 | 6729 | 7729 |
| 4730 | 5730 | 6730 | 7730 |
| 4731 | 5731 | 6731 | 7731 |
| 4732 | 5732 | 6732 | 7732 |
| 4733 | 5733 | 6733 | 7733 |
| 4734 | 5734 | 6734 | 7734 |
| 4735 | 5735 | 6735 | 7735 |
| 4736 | 5736 | 6736 | 7736 |
| 4737 | 5737 | 6737 | 7737 |
| 4738 | 5738 | 6738 | 7738 |
| 4739 | 5739 | 6739 | 7739 |
| 4740 | 5740 | 6740 | 7740 |
| 4741 | 5741 | 6741 | 7741 |
| 4742 | 5742 | 6742 | 7742 |
| 4743 | 5743 | 6743 | 7743 |
| 4744 | 5744 | 6744 | 7744 |
| 4745 | 5745 | 6745 | 7745 |
| 4746 | 5746 | 6746 | 7746 |
| 4747 | 5747 | 6747 | 7747 |
| 4748 | 5748 | 6748 | 7748 |
| 4749 | 5749 | 6749 | 7749 |
| 4750 | 5750 | 6750 | 7750 |
| 4751 | 5751 | 6751 | 7751 |
| 4752 | 5752 | 6752 | 7752 |
| 4753 | 5753 | 6753 | 7753 |
| 4754 | 5754 | 6754 | 7754 |
| 4755 | 5755 | 6755 | 7755 |
| 4756 | 5756 | 6756 | 7756 |
| 4757 | 5757 | 6757 | 7757 |
| 4758 | 5758 | 6758 | 7758 |
| 4759 | 5759 | 6759 | 7759 |
| 4760 | 5760 | 6760 | 7760 |
| 4761 | 5761 | 6761 | 7761 |
| 4762 | 5762 | 6762 | 7762 |
| 4763 | 5763 | 6763 | 7763 |
| 4764 | 5764 | 6764 | 7764 |
| 4765 | 5765 | 6765 | 7765 |
| 4766 | 5766 | 6766 | 7766 |
| 4767 | 5767 | 6767 | 7767 |
| 4768 | 5768 | 6768 | 7768 |
| 4769 | 5769 | 6769 | 7769 |
| 4770 | 5770 | 6770 | 7770 |
| 4771 | 5771 | 6771 | 7771 |
| 4772 | 5772 | 6772 | 7772 |
| 4773 | 5773 | 6773 | 7773 |
| 4774 | 5774 | 6774 | 7774 |
| 4775 | 5775 | 6775 | 7775 |
| 4776 | 5776 | 6776 | 7776 |
| 4777 | 5777 | 6777 | 7777 |
| 4778 | 5778 | 6778 | 7778 |
| 4779 | 5779 | 6779 | 7779 |
| 4780 | 5780 | 6780 | 7780 |
| 4781 | 5781 | 6781 | 7781 |
| 4782 | 5782 | 6782 | 7782 |
| 4783 | 5783 | 6783 | 7783 |
| 4784 | 5784 | 6784 | 7784 |
| 4785 | 5785 | 6785 | 7785 |
| 4786 | 5786 | 6786 | 7786 |
| 4787 | 5787 | 6787 | 7787 |
| 4788 | 5788 | 6788 | 7788 |
| 4789 | 5789 | 6789 | 7789 |
| 4790 | 5790 | 6790 | 7790 |
| 4791 | 5791 | 6791 | 7791 |
| 4792 | 5792 | 6792 | 7792 |
| 4793 | 5793 | 6793 | 7793 |
| 4794 | 5794 | 6794 | 7794 |
| 4795 | 5795 | 6795 | 7795 |
| 4796 | 5796 | 6796 | 7796 |
| 4797 | 5797 | 6797 | 7797 |
| 4798 | 5798 | 6798 | 7798 |
| 4799 | 5799 | 6799 | 7799 |
| 4800 | 5800 | 6800 | 7800 |
| 4801 | 5801 | 6801 | 7801 |
| 4802 | 5802 | 6802 | 7802 |
| 4803 | 5803 | 6803 | 7803 |
| 4804 | 5804 | 6804 | 7804 |
| 4805 | 5805 | 6805 | 7805 |
| 4806 | 5806 | 6806 | 7806 |
| 4807 | 5807 | 6807 | 7807 |
| 4808 | 5808 | 6808 | 7808 |
| 4809 | 5809 | 6809 | 7809 |
| 4810 | 5810 | 6810 | 7810 |
| 4811 | 5811 | 6811 | 7811 |
| 4812 | 5812 | 6812 | 7812 |
| 4813 | 5813 | 6813 | 7813 |
| 4814 | 5814 | 6814 | 7814 |
| 4815 | 5815 | 6815 | 7815 |
| 4816 | 5816 | 6816 | 7816 |
| 4817 | 5817 | 6817 | 7817 |
| 4818 | 5818 | 6818 | 7818 |
| 4819 | 5819 | 6819 | 7819 |
| 4820 | 5820 | 6820 | 7820 |
| 4821 | 5821 | 6821 | 7821 |
| 4822 | 5822 | 6822 | 7822 |
| 4823 | 5823 | 6823 | 7823 |
| 4824 | 5824 | 6824 | 7824 |
| 4825 | 5825 | 6825 | 7825 |
| 4826 | 5826 | 6826 | 7826 |
| 4827 | 5827 | 6827 | 7827 |
| 4828 | 5828 | 6828 | 7828 |
| 4829 | 5829 | 6829 | 7829 |
| 4830 | 5830 | 6830 | 7830 |
| 4831 | 5831 | 6831 | 7831 |
| 4832 | 5832 | 6832 | 7832 |
| 4833 | 5833 | 6833 | 7833 |
| 4834 | 5834 | 6834 | 7834 |
| 4835 | 5835 | 6835 | 7835 |
| 4836 | 5836 | 6836 | 7836 |
| 4837 | 5837 | 6837 | 7837 |
| 4838 | 5838 | 6838 | 7838 |
| 4839 | 5839 | 6839 | 7839 |
| 4840 | 5840 | 6840 | 7840 |
| 4841 | 5841 | 6841 | 7841 |
| 4842 | 5842 | 6842 | 7842 |
| 4843 | 5843 | 6843 | 7843 |
| 4844 | 5844 | 6844 | 7844 |
| 4845 | 5845 | 6845 | 7845 |
| 4846 | 5846 | 6846 | 7846 |
| 4847 | 5847 | 6847 | 7847 |
| 4848 | 5848 | 6848 | 7848 |
| 4849 | 5849 | 6849 | 7849 |
| 4850 | 5850 | 6850 | 7850 |
| 4851 | 5851 | 6851 | 7851 |
| 4852 | 5852 | 6852 | 7852 |
| 4853 | 5853 | 6853 | 7853 |
| 4854 | 5854 | 6854 | 7854 |
| 4855 | 5855 | 6855 | 7855 |
| 4856 | 5856 | 6856 | 7856 |
| 4857 | 5857 | 6857 | 7857 |
| 4858 | 5858 | 6858 | 7858 |
| 4859 | 5859 | 6859 | 7859 |
| 4860 | 5860 | 6860 | 7860 |
| 4861 | 5861 | 6861 | 7861 |
| 4862 | 5862 | 6862 | 7862 |
| 4863 | 5863 | 6863 | 7863 |
| 4864 | 5864 | 6864 | 7864 |
| 4865 | 5865 | 6865 | 7865 |
| 4866 | 5866 | 6866 | 7866 |
| 4867 | 5867 | 6867 | 7867 |
| 4868 | 5868 | 6868 | 7868 |
| 4869 | 5869 | 6869 | 7869 |
| 4870 | 5870 | 6870 | 7870 |
| 4871 | 5871 | 6871 | 7871 |
| 4872 | 5872 | 6872 | 7872 |
| 4873 | 5873 | 6873 | 7873 |
| 4874 | 5874 | 6874 | 7874 |
| 4875 | 5875 | 6875 | 7875 |
| 4876 | 5876 | 6876 | 7876 |
| 4877 | 5877 | 6877 | 7877 |
| 4878 | 5878 | 6878 | 7878 |
| 4879 | 5879 | 6879 | 7879 |
| 4880 | 5880 | 6880 | 7880 |
| 4881 | 5881 | 6881 | 7881 |
| 4882 | 5882 | 6882 | 7882 |
| 4883 | 5883 | 6883 | 7883 |
| 4884 | 5884 | 6884 | 7884 |
| 4885 | 5885 | 6885 | 7885 |
| 4886 | 5886 | 6886 | 7886 |
| 4887 | 5887 | 6887 | 7887 |
| 4888 | 5888 | 6888 | 7888 |
| 4889 | 5889 | 6889 | 7889 |
| 4890 | 5890 | 6890 | 7890 |
| 4891 | 5891 | 6891 | 7891 |
| 4892 | 5892 | 6892 | 7892 |
| 4893 | 5893 | 6893 | 7893 |
| 4894 | 5894 | 6894 | 7894 |
| 4895 | 5895 | 6895 | 7895 |
| 4896 | 5896 | 6896 | 7896 |
| 4897 | 5897 | 6897 | 7897 |
| 4898 | 5898 | 6898 | 7898 |
| 4899 | 5899 | 6899 | 7899 |
| 4900 | 5900 | 6900 | 7900 |
| 4901 | 5901 | 6901 | 7901 |
| 4902 | 5902 | 6902 | 7902 |
| 4903 | 5903 | 6903 | 7903 |
| 4904 | 5904 | 6904 | 7904 |
| 4905 | 5905 | 6905 | 7905 |
| 4906 | 5906 | 6906 | 7906 |
| 4907 | 5907 | 6907 | 7907 |
| 4908 | 5908 | 6908 | 7908 |
| 4909 | 5909 | 6909 | 7909 |
| 4910 | 5910 | 6910 | 7910 |
| 4911 | 5911 | 6911 | 7911 |
| 4912 | 5912 | 6912 | 7912 |
| 4913 | 5913 | 6913 | 7913 |
| 4914 | 5914 | 6914 | 7914 |
| 4915 | 5915 | 6915 | 7915 |
| 4916 | 5916 | 6916 | 7916 |
| 4917 | 5917 | 6917 | 7917 |
| 4918 | 5918 | 6918 | 7918 |
| 4919 | 5919 | 6919 | 7919 |
| 4920 | 5920 | 6920 | 7920 |
| 4921 | 5921 | 6921 | 7921 |
| 4922 | 5922 | 6922 | 7922 |
| 4923 | 5923 | 6923 | 7923 |
| 4924 | 5924 | 6924 | 7924 |
| 4925 | 5925 | 6925 | 7925 |
| 4926 | 5926 | 6926 | 7926 |
| 4927 | 5927 | 6927 | 7927 |
| 4928 | 5928 | 6928 | 7928 |
| 4929 | 5929 | 6929 | 7929 |
| 4930 | 5930 | 6930 | 7930 |
| 4931 | 5931 | 6931 | 7931 |
| 4932 | 5932 | 6932 | 7932 |
| 4933 | 5933 | 6933 | 7933 |
| 4934 | 5934 | 6934 | 7934 |
| 4935 | 5935 | 6935 | 7935 |
| 4936 | 5936 | 6936 | 7936 |
| 4937 | 5937 | 6937 | 7937 |
| 4938 | 5938 | 6938 | 7938 |
| 4939 | 5939 | 6939 | 7939 |
| 4940 | 5940 | 6940 | 7940 |
| 4941 | 5941 | 6941 | 7941 |
| 4942 | 5942 | 6942 | 7942 |
| 4943 | 5943 | 6943 | 7943 |
| 4944 | 5944 | 6944 | 7944 |
| 4945 | 5945 | 6945 | 7945 |
| 4946 | 5946 | 6946 | 7946 |
| 4947 | 5947 | 6947 | 7947 |
| 4948 | 5948 | 6948 | 7948 |
| 4949 | 5949 | 6949 | 7949 |
| 4950 | 5950 | 6950 | 7950 |
| 4951 | 5951 | 6951 | 7951 |
| 4952 | 5952 | 6952 | 7952 |
| 4953 | 5953 | 6953 | 7953 |
| 4954 | 5954 | 6954 | 7954 |
| 4955 | 5955 | 6955 | 7955 |
| 4956 | 5956 | 6956 | 7956 |
| 4957 | 5957 | 6957 | 7957 |
| 4958 | 5958 | 6958 | 7958 |
| 4959 | 5959 | 6959 | 7959 |
| 4960 | 5960 | 6960 | 7960 |
| 4961 | 5961 | 6961 | 7961 |
| 4962 | 5962 | 6962 | 7962 |
| 4963 | 5963 | 6963 | 7963 |
| 4964 | 5964 | 6964 | 7964 |
| 4965 | 5965 | 6965 | 7965 |
| 4966 | 5966 | 6966 | 7966 |
| 4967 | 5967 | 6967 | 7967 |
| 4968 | 5968 | 6968 | 7968 |
| 4969 | 5969 | 6969 | 7969 |
| 4970 | 5970 | 6970 | 7970 |
| 4971 | 5971 | 6971 | 7971 |
| 4972 | 5972 | 6972 | 7972 |
| 4973 | 5973 | 6973 | 7973 |
| 4974 | 5974 | 6974 | 7974 |
| 4975 | 5975 | 6975 | 7975 |
| 4976 | 5976 | 6976 | 7976 |
| 4977 | 5977 | 6977 | 7977 |
| 4978 | 5978 | 6978 | 7978 |
| 4979 | 5979 | 6979 | 7979 |
| 4980 | 5980 | 6980 | 7980 |
| 4981 | 5981 | 6981 | 7981 |
| 4982 | 5982 | 6982 | 7982 |
| 4983 | 5983 | 6983 | 7983 |
| 4984 | 5984 | 6984 | 7984 |
| 4985 | 5985 | 6985 | 7985 |
| 4986 | 5986 | 6986 | 7986 |
| 4987 | 5987 | 6987 | 7987 |
| 4988 | 5988 | 6988 | 7988 |
| 4989 | 5989 | 6989 | 7989 |
| 4990 | 5990 | 6990 | 7990 |
| 4991 | 5991 | 6991 | 7991 |
| 4992 | 5992 | 6992 | 7992 |
| 4993 | 5993 | 6993 | 7993 |
| 4994 | 5994 | 6994 | 7994 |
| 4995 | 5995 | 6995 | 7995 |
| 4996 | 5996 | 6996 | 7996 |
| 4997 | 5997 | 6997 | 7997 |
| 4998 | 5998 | 6998 | 7998 |
| 4999 | 5999 | 6999 | 7999 |
| 5000 | 6000 | 7000 | 8000 |
| 5001 | 6001 | 7001 | 8001 |
| 5002 | 6002 | 7002 | 8002 |

[0129] In some embodiments, the sequences that specifically bind to brazil nut comprise an inner sequence selected from the group consisting of the nucleic acid sequences of SEQ ID NOs. 8003 to 9002. In some examples, a short nucleic acid sequence may be affixed to the 5-end of the inner sequence. The short nucleic acid sequence may be the 5′ primer sequence used in the random ssDNA library, i.e. the nucleic acid sequence of SEQ ID NO. 1. Accordingly, the aptamer that specifically binds to brazil nut may comprise a nucleic acid sequence selected from the group consisting of SEQ ID NOs. 9003 to 10002. In other examples, a short nucleic acid sequence may be affixed to the 3-end of the inner sequence. The short nucleic acid sequence may be the 3′ primer sequence used in the random ssDNA library, i.e. the nucleic acid sequence of SEQ ID NO. 2. Accordingly, the aptamer that specifically binds to brazil nut may comprise a nucleic acid sequence selected from the group consisting of SEQ ID NOs. 10003 to 11002. In other examples, the inner sequence may comprise a 5′ end short sequence (i.e., SEQ ID NO. 1) and a 3′ end short sequence (i.e., SEQ ID NO. 2). Accordingly, the aptamer that specifically binds to brazil nut may comprise a nucleic acid sequence selected from the group consisting of SEQ ID NOs. 11003 to 12002. In one embodiment, the aptamer of the present disclosure that specifically binds to brazil nut may comprise a nucleic acid sequence selected from the group consisting of SEQ ID NOs. 8003 to 12002 listed in Table 4, or variant thereof.

TABLE 4
Aptamer sequences against brazil nut
Aptamer sequence

| | | | 5′-sequence |
|---|---|---|---|
| | 5′-sequence | Inner | and inner |
| Inner | and inner | sequence and | sequence and |
| sequence | sequence | 3′-sequence | 3′-sequence |
| (SEQ ID NO.) | (SEQ ID NO.) | (SEQ ID NO.) | (SEQ ID NO.) |
| 8003 | 9003 | 10003 | 11003 |
| 8004 | 9004 | 10004 | 11004 |
| 8005 | 9005 | 10005 | 11005 |
| 8006 | 9006 | 10006 | 11006 |
| 8007 | 9007 | 10007 | 11007 |
| 8008 | 9008 | 10008 | 11008 |
| 8009 | 9009 | 10009 | 11009 |
| 8010 | 9010 | 10010 | 11010 |
| 8011 | 9011 | 10011 | 11011 |
| 8012 | 9012 | 10012 | 11012 |
| 8013 | 9013 | 10013 | 11013 |
| 8014 | 9014 | 10014 | 11014 |
| 8015 | 9015 | 10015 | 11015 |
| 8016 | 9016 | 10016 | 11016 |
| 8017 | 9017 | 10017 | 11017 |
| 8018 | 9018 | 10018 | 11018 |
| 8019 | 9019 | 10019 | 11019 |
| 8020 | 9020 | 10020 | 11020 |
| 8021 | 9021 | 10021 | 11021 |
| 8022 | 9022 | 10022 | 11022 |
| 8023 | 9023 | 10023 | 11023 |
| 8024 | 9024 | 10024 | 11024 |
| 8025 | 9025 | 10025 | 11025 |
| 8026 | 9026 | 10026 | 11026 |
| 8027 | 9027 | 10027 | 11027 |
| 8028 | 9028 | 10028 | 11028 |
| 8029 | 9029 | 10029 | 11029 |
| 8030 | 9030 | 10030 | 11030 |
| 8031 | 9031 | 10031 | 11031 |
| 8032 | 9032 | 10032 | 11032 |
| 8033 | 9033 | 10033 | 11033 |
| 8034 | 9034 | 10034 | 11034 |
| 8035 | 9035 | 10035 | 11035 |
| 8036 | 9036 | 10036 | 11036 |
| 8037 | 9037 | 10037 | 11037 |
| 8038 | 9038 | 10038 | 11038 |
| 8039 | 9039 | 10039 | 11039 |
| 8040 | 9040 | 10040 | 11040 |
| 8041 | 9041 | 10041 | 11041 |
| 8042 | 9042 | 10042 | 11042 |
| 8043 | 9043 | 10043 | 11043 |
| 8044 | 9044 | 10044 | 11044 |
| 8045 | 9045 | 10045 | 11045 |
| 8046 | 9046 | 10046 | 11046 |
| 8047 | 9047 | 10047 | 11047 |
| 8048 | 9048 | 10048 | 11048 |
| 8049 | 9049 | 10049 | 11049 |
| 8050 | 9050 | 10050 | 11050 |
| 8051 | 9051 | 10051 | 11051 |
| 8052 | 9052 | 10052 | 11052 |
| 8053 | 9053 | 10053 | 11053 |
| 8054 | 9054 | 10054 | 11054 |
| 8055 | 9055 | 10055 | 11055 |
| 8056 | 9056 | 10056 | 11056 |
| 8057 | 9057 | 10057 | 11057 |
| 8058 | 9058 | 10058 | 11058 |
| 8059 | 9059 | 10059 | 11059 |
| 8060 | 9060 | 10060 | 11060 |
| 8061 | 9061 | 10061 | 11061 |
| 8062 | 9062 | 10062 | 11062 |
| 8063 | 9063 | 10063 | 11063 |
| 8064 | 9064 | 10064 | 11064 |
| 8065 | 9065 | 10065 | 11065 |
| 8066 | 9066 | 10066 | 11066 |
| 8067 | 9067 | 10067 | 11067 |
| 8068 | 9068 | 10068 | 11068 |
| 8069 | 9069 | 10069 | 11069 |
| 8070 | 9070 | 10070 | 11070 |
| 8071 | 9071 | 10071 | 11071 |
| 8072 | 9072 | 10072 | 11072 |
| 8073 | 9073 | 10073 | 11073 |
| 8074 | 9074 | 10074 | 11074 |
| 8075 | 9075 | 10075 | 11075 |
| 8076 | 9076 | 10076 | 11076 |
| 8077 | 9077 | 10077 | 11077 |
| 8078 | 9078 | 10078 | 11078 |
| 8079 | 9079 | 10079 | 11079 |
| 8080 | 9080 | 10080 | 11080 |
| 8081 | 9081 | 10081 | 11081 |
| 8082 | 9082 | 10082 | 11082 |
| 8083 | 9083 | 10083 | 11083 |
| 8084 | 9084 | 10084 | 11084 |
| 8085 | 9085 | 10085 | 11085 |
| 8086 | 9086 | 10086 | 11086 |
| 8087 | 9087 | 10087 | 11087 |
| 8088 | 9088 | 10088 | 11088 |
| 8089 | 9089 | 10089 | 11089 |
| 8090 | 9090 | 10090 | 11090 |
| 8091 | 9091 | 10091 | 11091 |
| 8092 | 9092 | 10092 | 11092 |
| 8093 | 9093 | 10093 | 11093 |
| 8094 | 9094 | 10094 | 11094 |
| 8095 | 9095 | 10095 | 11095 |
| 8096 | 9096 | 10096 | 11096 |
| 8097 | 9097 | 10097 | 11097 |
| 8098 | 9098 | 10098 | 11098 |
| 8099 | 9099 | 10099 | 11099 |
| 8100 | 9100 | 10100 | 11100 |
| 8101 | 9101 | 10101 | 11101 |
| 8102 | 9102 | 10102 | 11102 |
| 8103 | 9103 | 10103 | 11103 |
| 8104 | 9104 | 10104 | 11104 |
| 8105 | 9105 | 10105 | 11105 |
| 8106 | 9106 | 10106 | 11106 |
| 8107 | 9107 | 10107 | 11107 |
| 8108 | 9108 | 10108 | 11108 |
| 8109 | 9109 | 10109 | 11109 |
| 8110 | 9110 | 10110 | 11110 |
| 8111 | 9111 | 10111 | 11111 |
| 8112 | 9112 | 10112 | 11112 |
| 8113 | 9113 | 10113 | 11113 |
| 8114 | 9114 | 10114 | 11114 |
| 8115 | 9115 | 10115 | 11115 |
| 8116 | 9116 | 10116 | 11116 |
| 8117 | 9117 | 10117 | 11117 |
| 8118 | 9118 | 10118 | 11118 |
| 8119 | 9119 | 10119 | 11119 |
| 8120 | 9120 | 10120 | 11120 |
| 8121 | 9121 | 10121 | 11121 |
| 8122 | 9122 | 10122 | 11122 |
| 8123 | 9123 | 10123 | 11123 |
| 8124 | 9124 | 10124 | 11124 |
| 8125 | 9125 | 10125 | 11125 |
| 8126 | 9126 | 10126 | 11126 |
| 8127 | 9127 | 10127 | 11127 |
| 8128 | 9128 | 10128 | 11128 |
| 8129 | 9129 | 10129 | 11129 |
| 8130 | 9130 | 10130 | 11130 |
| 8131 | 9131 | 10131 | 11131 |
| 8132 | 9132 | 10132 | 11132 |
| 8133 | 9133 | 10133 | 11133 |
| 8134 | 9134 | 10134 | 11134 |
| 8135 | 9135 | 10135 | 11135 |
| 8136 | 9136 | 10136 | 11136 |
| 8137 | 9137 | 10137 | 11137 |
| 8138 | 9138 | 10138 | 11138 |
| 8139 | 9139 | 10139 | 11139 |
| 8140 | 9140 | 10140 | 11140 |
| 8141 | 9141 | 10141 | 11141 |
| 8142 | 9142 | 10142 | 11142 |
| 8143 | 9143 | 10143 | 11143 |
| 8144 | 9144 | 10144 | 11144 |
| 8145 | 9145 | 10145 | 11145 |
| 8146 | 9146 | 10146 | 11146 |
| 8147 | 9147 | 10147 | 11147 |
| 8148 | 9148 | 10148 | 11148 |
| 8149 | 9149 | 10149 | 11149 |
| 8150 | 9150 | 10150 | 11150 |
| 8151 | 9151 | 10151 | 11151 |
| 8152 | 9152 | 10152 | 11152 |
| 8153 | 9153 | 10153 | 11153 |
| 8154 | 9154 | 10154 | 11154 |
| 8155 | 9155 | 10155 | 11155 |
| 8156 | 9156 | 10156 | 11156 |
| 8157 | 9157 | 10157 | 11157 |
| 8158 | 9158 | 10158 | 11158 |
| 8159 | 9159 | 10159 | 11159 |
| 8160 | 9160 | 10160 | 11160 |
| 8161 | 9161 | 10161 | 11161 |
| 8162 | 9162 | 10162 | 11162 |
| 8163 | 9163 | 10163 | 11163 |
| 8164 | 9164 | 10164 | 11164 |
| 8165 | 9165 | 10165 | 11165 |
| 8166 | 9166 | 10166 | 11166 |
| 8167 | 9167 | 10167 | 11167 |
| 8168 | 9168 | 10168 | 11168 |
| 8169 | 9169 | 10169 | 11169 |
| 8170 | 9170 | 10170 | 11170 |
| 8171 | 9171 | 10171 | 11171 |
| 8172 | 9172 | 10172 | 11172 |
| 8173 | 9173 | 10173 | 11173 |
| 8174 | 9174 | 10174 | 11174 |
| 8175 | 9175 | 10175 | 11175 |
| 8176 | 9176 | 10176 | 11176 |
| 8177 | 9177 | 10177 | 11177 |
| 8178 | 9178 | 10178 | 11178 |
| 8179 | 9179 | 10179 | 11179 |
| 8180 | 9180 | 10180 | 11180 |
| 8181 | 9181 | 10181 | 11181 |
| 8182 | 9182 | 10182 | 11182 |
| 8183 | 9183 | 10183 | 11183 |
| 8184 | 9184 | 10184 | 11184 |
| 8185 | 9185 | 10185 | 11185 |
| 8186 | 9186 | 10186 | 11186 |
| 8187 | 9187 | 10187 | 11187 |
| 8188 | 9188 | 10188 | 11188 |
| 8189 | 9189 | 10189 | 11189 |
| 8190 | 9190 | 10190 | 11190 |
| 8191 | 9191 | 10191 | 11191 |
| 8192 | 9192 | 10192 | 11192 |
| 8193 | 9193 | 10193 | 11193 |
| 8194 | 9194 | 10194 | 11194 |
| 8195 | 9195 | 10195 | 11195 |
| 8196 | 9196 | 10196 | 11196 |
| 8197 | 9197 | 10197 | 11197 |
| 8198 | 9198 | 10198 | 11198 |
| 8199 | 9199 | 10199 | 11199 |
| 8200 | 9200 | 10200 | 11200 |
| 8201 | 9201 | 10201 | 11201 |
| 8202 | 9202 | 10202 | 11202 |
| 8203 | 9203 | 10203 | 11203 |
| 8204 | 9204 | 10204 | 11204 |
| 8205 | 9205 | 10205 | 11205 |
| 8206 | 9206 | 10206 | 11206 |
| 8207 | 9207 | 10207 | 11207 |
| 8208 | 9208 | 10208 | 11208 |
| 8209 | 9209 | 10209 | 11209 |
| 8210 | 9210 | 10210 | 11210 |
| 8211 | 9211 | 10211 | 11211 |
| 8212 | 9212 | 10212 | 11212 |
| 8213 | 9213 | 10213 | 11213 |
| 8214 | 9214 | 10214 | 11214 |
| 8215 | 9215 | 10215 | 11215 |
| 8216 | 9216 | 10216 | 11216 |
| 8217 | 9217 | 10217 | 11217 |
| 8218 | 9218 | 10218 | 11218 |
| 8219 | 9219 | 10219 | 11219 |
| 8220 | 9220 | 10220 | 11220 |
| 8221 | 9221 | 10221 | 11221 |
| 8222 | 9222 | 10222 | 11222 |
| 8223 | 9223 | 10223 | 11223 |
| 8224 | 9224 | 10224 | 11224 |
| 8225 | 9225 | 10225 | 11225 |
| 8226 | 9226 | 10226 | 11226 |
| 8227 | 9227 | 10227 | 11227 |
| 8228 | 9228 | 10228 | 11228 |
| 8229 | 9229 | 10229 | 11229 |
| 8230 | 9230 | 10230 | 11230 |
| 8231 | 9231 | 10231 | 11231 |
| 8232 | 9232 | 10232 | 11232 |
| 8233 | 9233 | 10233 | 11233 |
| 8234 | 9234 | 10234 | 11234 |
| 8235 | 9235 | 10235 | 11235 |
| 8236 | 9236 | 10236 | 11236 |
| 8237 | 9237 | 10237 | 11237 |
| 8238 | 9238 | 10238 | 11238 |
| 8239 | 9239 | 10239 | 11239 |
| 8240 | 9240 | 10240 | 11240 |
| 8241 | 9241 | 10241 | 11241 |
| 8242 | 9242 | 10242 | 11242 |
| 8243 | 9243 | 10243 | 11243 |
| 8244 | 9244 | 10244 | 11244 |
| 8245 | 9245 | 10245 | 11245 |
| 8246 | 9246 | 10246 | 11246 |
| 8247 | 9247 | 10247 | 11247 |
| 8248 | 9248 | 10248 | 11248 |
| 8249 | 9249 | 10249 | 11249 |
| 8250 | 9250 | 10250 | 11250 |
| 8251 | 9251 | 10251 | 11251 |
| 8252 | 9252 | 10252 | 11252 |
| 8253 | 9253 | 10253 | 11253 |
| 8254 | 9254 | 10254 | 11254 |
| 8255 | 9255 | 10255 | 11255 |
| 8256 | 9256 | 10256 | 11256 |
| 8257 | 9257 | 10257 | 11257 |
| 8258 | 9258 | 10258 | 11258 |
| 8259 | 9259 | 10259 | 11259 |
| 8260 | 9260 | 10260 | 11260 |
| 8261 | 9261 | 10261 | 11261 |
| 8262 | 9262 | 10262 | 11262 |
| 8263 | 9263 | 10263 | 11263 |
| 8264 | 9264 | 10264 | 11264 |
| 8265 | 9265 | 10265 | 11265 |
| 8266 | 9266 | 10266 | 11266 |
| 8267 | 9267 | 10267 | 11267 |
| 8268 | 9268 | 10268 | 11268 |
| 8269 | 9269 | 10269 | 11269 |
| 8270 | 9270 | 10270 | 11270 |
| 8271 | 9271 | 10271 | 11271 |
| 8272 | 9272 | 10272 | 11272 |
| 8273 | 9273 | 10273 | 11273 |
| 8274 | 9274 | 10274 | 11274 |
| 8275 | 9275 | 10275 | 11275 |
| 8276 | 9276 | 10276 | 11276 |
| 8277 | 9277 | 10277 | 11277 |
| 8278 | 9278 | 10278 | 11278 |
| 8279 | 9279 | 10279 | 11279 |
| 8280 | 9280 | 10280 | 11280 |
| 8281 | 9281 | 10281 | 11281 |
| 8282 | 9282 | 10282 | 11282 |
| 8283 | 9283 | 10283 | 11283 |
| 8284 | 9284 | 10284 | 11284 |
| 8285 | 9285 | 10285 | 11285 |
| 8286 | 9286 | 10286 | 11286 |
| 8287 | 9287 | 10287 | 11287 |
| 8288 | 9288 | 10288 | 11288 |
| 8289 | 9289 | 10289 | 11289 |
| 8290 | 9290 | 10290 | 11290 |
| 8291 | 9291 | 10291 | 11291 |
| 8292 | 9292 | 10292 | 11292 |
| 8293 | 9293 | 10293 | 11293 |
| 8294 | 9294 | 10294 | 11294 |
| 8295 | 9295 | 10295 | 11295 |
| 8296 | 9296 | 10296 | 11296 |
| 8297 | 9297 | 10297 | 11297 |
| 8298 | 9298 | 10298 | 11298 |
| 8299 | 9299 | 10299 | 11299 |
| 8300 | 9300 | 10300 | 11300 |
| 8301 | 9301 | 10301 | 11301 |
| 8302 | 9302 | 10302 | 11302 |
| 8303 | 9303 | 10303 | 11303 |
| 8304 | 9304 | 10304 | 11304 |
| 8305 | 9305 | 10305 | 11305 |
| 8306 | 9306 | 10306 | 11306 |
| 8307 | 9307 | 10307 | 11307 |
| 8308 | 9308 | 10308 | 11308 |
| 8309 | 9309 | 10309 | 11309 |
| 8310 | 9310 | 10310 | 11310 |
| 8311 | 9311 | 10311 | 11311 |
| 8312 | 9312 | 10312 | 11312 |
| 8313 | 9313 | 10313 | 11313 |
| 8314 | 9314 | 10314 | 11314 |
| 8315 | 9315 | 10315 | 11315 |
| 8316 | 9316 | 10316 | 11316 |
| 8317 | 9317 | 10317 | 11317 |
| 8318 | 9318 | 10318 | 11318 |
| 8319 | 9319 | 10319 | 11319 |
| 8320 | 9320 | 10320 | 11320 |
| 8321 | 9321 | 10321 | 11321 |
| 8322 | 9322 | 10322 | 11322 |
| 8323 | 9323 | 10323 | 11323 |
| 8324 | 9324 | 10324 | 11324 |
| 8325 | 9325 | 10325 | 11325 |
| 8326 | 9326 | 10326 | 11326 |
| 8327 | 9327 | 10327 | 11327 |
| 8328 | 9328 | 10328 | 11328 |
| 8329 | 9329 | 10329 | 11329 |
| 8330 | 9330 | 10330 | 11330 |
| 8331 | 9331 | 10331 | 11331 |
| 8332 | 9332 | 10332 | 11332 |
| 8333 | 9333 | 10333 | 11333 |
| 8334 | 9334 | 10334 | 11334 |
| 8335 | 9335 | 10335 | 11335 |
| 8336 | 9336 | 10336 | 11336 |
| 8337 | 9337 | 10337 | 11337 |
| 8338 | 9338 | 10338 | 11338 |
| 8339 | 9339 | 10339 | 11339 |
| 8340 | 9340 | 10340 | 11340 |
| 8341 | 9341 | 10341 | 11341 |
| 8342 | 9342 | 10342 | 11342 |
| 8343 | 9343 | 10343 | 11343 |
| 8344 | 9344 | 10344 | 11344 |
| 8345 | 9345 | 10345 | 11345 |
| 8346 | 9346 | 10346 | 11346 |
| 8347 | 9347 | 10347 | 11347 |
| 8348 | 9348 | 10348 | 11348 |
| 8349 | 9349 | 10349 | 11349 |
| 8350 | 9350 | 10350 | 11350 |
| 8351 | 9351 | 10351 | 11351 |
| 8352 | 9352 | 10352 | 11352 |
| 8353 | 9353 | 10353 | 11353 |
| 8354 | 9354 | 10354 | 11354 |
| 8355 | 9355 | 10355 | 11355 |
| 8356 | 9356 | 10356 | 11356 |
| 8357 | 9357 | 10357 | 11357 |
| 8358 | 9358 | 10358 | 11358 |
| 8359 | 9359 | 10359 | 11359 |
| 8360 | 9360 | 10360 | 11360 |
| 8361 | 9361 | 10361 | 11361 |
| 8362 | 9362 | 10362 | 11362 |
| 8363 | 9363 | 10363 | 11363 |
| 8364 | 9364 | 10364 | 11364 |
| 8365 | 9365 | 10365 | 11365 |
| 8366 | 9366 | 10366 | 11366 |
| 8367 | 9367 | 10367 | 11367 |
| 8368 | 9368 | 10368 | 11368 |
| 8369 | 9369 | 10369 | 11369 |
| 8370 | 9370 | 10370 | 11370 |
| 8371 | 9371 | 10371 | 11371 |
| 8372 | 9372 | 10372 | 11372 |
| 8373 | 9373 | 10373 | 11373 |
| 8374 | 9374 | 10374 | 11374 |
| 8375 | 9375 | 10375 | 11375 |
| 8376 | 9376 | 10376 | 11376 |
| 8377 | 9377 | 10377 | 11377 |
| 8378 | 9378 | 10378 | 11378 |
| 8379 | 9379 | 10379 | 11379 |
| 8380 | 9380 | 10380 | 11380 |
| 8381 | 9381 | 10381 | 11381 |
| 8382 | 9382 | 10382 | 11382 |
| 8383 | 9383 | 10383 | 11383 |
| 8384 | 9384 | 10384 | 11384 |
| 8385 | 9385 | 10385 | 11385 |
| 8386 | 9386 | 10386 | 11386 |
| 8387 | 9387 | 10387 | 11387 |
| 8388 | 9388 | 10388 | 11388 |
| 8389 | 9389 | 10389 | 11389 |
| 8390 | 9390 | 10390 | 11390 |
| 8391 | 9391 | 10391 | 11391 |
| 8392 | 9392 | 10392 | 11392 |
| 8393 | 9393 | 10393 | 11393 |
| 8394 | 9394 | 10394 | 11394 |
| 8395 | 9395 | 10395 | 11395 |
| 8396 | 9396 | 10396 | 11396 |
| 8397 | 9397 | 10397 | 11397 |
| 8398 | 9398 | 10398 | 11398 |
| 8399 | 9399 | 10399 | 11399 |
| 8400 | 9400 | 10400 | 11400 |
| 8401 | 9401 | 10401 | 11401 |
| 8402 | 9402 | 10402 | 11402 |
| 8403 | 9403 | 10403 | 11403 |
| 8404 | 9404 | 10404 | 11404 |
| 8405 | 9405 | 10405 | 11405 |
| 8406 | 9406 | 10406 | 11406 |
| 8407 | 9407 | 10407 | 11407 |
| 8408 | 9408 | 10408 | 11408 |
| 8409 | 9409 | 10409 | 11409 |
| 8410 | 9410 | 10410 | 11410 |
| 8411 | 9411 | 10411 | 11411 |
| 8412 | 9412 | 10412 | 11412 |
| 8413 | 9413 | 10413 | 11413 |
| 8414 | 9414 | 10414 | 11414 |
| 8415 | 9415 | 10415 | 11415 |
| 8416 | 9416 | 10416 | 11416 |
| 8417 | 9417 | 10417 | 11417 |
| 8418 | 9418 | 10418 | 11418 |
| 8419 | 9419 | 10419 | 11419 |
| 8420 | 9420 | 10420 | 11420 |
| 8421 | 9421 | 10421 | 11421 |
| 8422 | 9422 | 10422 | 11422 |
| 8423 | 9423 | 10423 | 11423 |
| 8424 | 9424 | 10424 | 11424 |
| 8425 | 9425 | 10425 | 11425 |
| 8426 | 9426 | 10426 | 11426 |
| 8427 | 9427 | 10427 | 11427 |
| 8428 | 9428 | 10428 | 11428 |
| 8429 | 9429 | 10429 | 11429 |
| 8430 | 9430 | 10430 | 11430 |
| 8431 | 9431 | 10431 | 11431 |
| 8432 | 9432 | 10432 | 11432 |
| 8433 | 9433 | 10433 | 11433 |
| 8434 | 9434 | 10434 | 11434 |
| 8435 | 9435 | 10435 | 11435 |
| 8436 | 9436 | 10436 | 11436 |
| 8437 | 9437 | 10437 | 11437 |
| 8438 | 9438 | 10438 | 11438 |
| 8439 | 9439 | 10439 | 11439 |
| 8440 | 9440 | 10440 | 11440 |
| 8441 | 9441 | 10441 | 11441 |
| 8442 | 9442 | 10442 | 11442 |
| 8443 | 9443 | 10443 | 11443 |
| 8444 | 9444 | 10444 | 11444 |
| 8445 | 9445 | 10445 | 11445 |
| 8446 | 9446 | 10446 | 11446 |
| 8447 | 9447 | 10447 | 11447 |
| 8448 | 9448 | 10448 | 11448 |
| 8449 | 9449 | 10449 | 11449 |
| 8450 | 9450 | 10450 | 11450 |
| 8451 | 9451 | 10451 | 11451 |
| 8452 | 9452 | 10452 | 11452 |
| 8453 | 9453 | 10453 | 11453 |
| 8454 | 9454 | 10454 | 11454 |
| 8455 | 9455 | 10455 | 11455 |
| 8456 | 9456 | 10456 | 11456 |
| 8457 | 9457 | 10457 | 11457 |
| 8458 | 9458 | 10458 | 11458 |
| 8459 | 9459 | 10459 | 11459 |
| 8460 | 9460 | 10460 | 11460 |
| 8461 | 9461 | 10461 | 11461 |
| 8462 | 9462 | 10462 | 11462 |
| 8463 | 9463 | 10463 | 11463 |
| 8464 | 9464 | 10464 | 11464 |
| 8465 | 9465 | 10465 | 11465 |
| 8466 | 9466 | 10466 | 11466 |
| 8467 | 9467 | 10467 | 11467 |
| 8468 | 9468 | 10468 | 11468 |
| 8469 | 9469 | 10469 | 11469 |
| 8470 | 9470 | 10470 | 11470 |
| 8471 | 9471 | 10471 | 11471 |
| 8472 | 9472 | 10472 | 11472 |
| 8473 | 9473 | 10473 | 11473 |
| 8474 | 9474 | 10474 | 11474 |
| 8475 | 9475 | 10475 | 11475 |
| 8476 | 9476 | 10476 | 11476 |
| 8477 | 9477 | 10477 | 11477 |
| 8478 | 9478 | 10478 | 11478 |
| 8479 | 9479 | 10479 | 11479 |
| 8480 | 9480 | 10480 | 11480 |
| 8481 | 9481 | 10481 | 11481 |
| 8482 | 9482 | 10482 | 11482 |
| 8483 | 9483 | 10483 | 11483 |
| 8484 | 9484 | 10484 | 11484 |
| 8485 | 9485 | 10485 | 11485 |
| 8486 | 9486 | 10486 | 11486 |
| 8487 | 9487 | 10487 | 11487 |
| 8488 | 9488 | 10488 | 11488 |
| 8489 | 9489 | 10489 | 11489 |
| 8490 | 9490 | 10490 | 11490 |
| 8491 | 9491 | 10491 | 11491 |
| 8492 | 9492 | 10492 | 11492 |
| 8493 | 9493 | 10493 | 11493 |
| 8494 | 9494 | 10494 | 11494 |
| 8495 | 9495 | 10495 | 11495 |
| 8496 | 9496 | 10496 | 11496 |
| 8497 | 9497 | 10497 | 11497 |
| 8498 | 9498 | 10498 | 11498 |
| 8499 | 9499 | 10499 | 11499 |
| 8500 | 9500 | 10500 | 11500 |
| 8501 | 9501 | 10501 | 11501 |
| 8502 | 9502 | 10502 | 11502 |
| 8503 | 9503 | 10503 | 11503 |
| 8504 | 9504 | 10504 | 11504 |
| 8505 | 9505 | 10505 | 11505 |
| 8506 | 9506 | 10506 | 11506 |
| 8507 | 9507 | 10507 | 11507 |
| 8508 | 9508 | 10508 | 11508 |
| 8509 | 9509 | 10509 | 11509 |
| 8510 | 9510 | 10510 | 11510 |
| 8511 | 9511 | 10511 | 11511 |
| 8512 | 9512 | 10512 | 11512 |
| 8513 | 9513 | 10513 | 11513 |
| 8514 | 9514 | 10514 | 11514 |
| 8515 | 9515 | 10515 | 11515 |
| 8516 | 9516 | 10516 | 11516 |
| 8517 | 9517 | 10517 | 11517 |
| 8518 | 9518 | 10518 | 11518 |
| 8519 | 9519 | 10519 | 11519 |
| 8520 | 9520 | 10520 | 11520 |
| 8521 | 9521 | 10521 | 11521 |
| 8522 | 9522 | 10522 | 11522 |
| 8523 | 9523 | 10523 | 11523 |
| 8524 | 9524 | 10524 | 11524 |
| 8525 | 9525 | 10525 | 11525 |
| 8526 | 9526 | 10526 | 11526 |
| 8527 | 9527 | 10527 | 11527 |
| 8528 | 9528 | 10528 | 11528 |
| 8529 | 9529 | 10529 | 11529 |
| 8530 | 9530 | 10530 | 11530 |
| 8531 | 9531 | 10531 | 11531 |
| 8532 | 9532 | 10532 | 11532 |
| 8533 | 9533 | 10533 | 11533 |
| 8534 | 9534 | 10534 | 11534 |
| 8535 | 9535 | 10535 | 11535 |
| 8536 | 9536 | 10536 | 11536 |
| 8537 | 9537 | 10537 | 11537 |
| 8538 | 9538 | 10538 | 11538 |
| 8539 | 9539 | 10539 | 11539 |
| 8540 | 9540 | 10540 | 11540 |
| 8541 | 9541 | 10541 | 11541 |
| 8542 | 9542 | 10542 | 11542 |
| 8543 | 9543 | 10543 | 11543 |
| 8544 | 9544 | 10544 | 11544 |
| 8545 | 9545 | 10545 | 11545 |
| 8546 | 9546 | 10546 | 11546 |
| 8547 | 9547 | 10547 | 11547 |
| 8548 | 9548 | 10548 | 11548 |
| 8549 | 9549 | 10549 | 11549 |
| 8550 | 9550 | 10550 | 11550 |
| 8551 | 9551 | 10551 | 11551 |
| 8552 | 9552 | 10552 | 11552 |
| 8553 | 9553 | 10553 | 11553 |
| 8554 | 9554 | 10554 | 11554 |
| 8555 | 9555 | 10555 | 11555 |
| 8556 | 9556 | 10556 | 11556 |
| 8557 | 9557 | 10557 | 11557 |
| 8558 | 9558 | 10558 | 11558 |
| 8559 | 9559 | 10559 | 11559 |
| 8560 | 9560 | 10560 | 11560 |
| 8561 | 9561 | 10561 | 11561 |
| 8562 | 9562 | 10562 | 11562 |
| 8563 | 9563 | 10563 | 11563 |
| 8564 | 9564 | 10564 | 11564 |
| 8565 | 9565 | 10565 | 11565 |
| 8566 | 9566 | 10566 | 11566 |
| 8567 | 9567 | 10567 | 11567 |
| 8568 | 9568 | 10568 | 11568 |
| 8569 | 9569 | 10569 | 11569 |
| 8570 | 9570 | 10570 | 11570 |
| 8571 | 9571 | 10571 | 11571 |
| 8572 | 9572 | 10572 | 11572 |
| 8573 | 9573 | 10573 | 11573 |
| 8574 | 9574 | 10574 | 11574 |
| 8575 | 9575 | 10575 | 11575 |
| 8576 | 9576 | 10576 | 11576 |
| 8577 | 9577 | 10577 | 11577 |
| 8578 | 9578 | 10578 | 11578 |
| 8579 | 9579 | 10579 | 11579 |
| 8580 | 9580 | 10580 | 11580 |
| 8581 | 9581 | 10581 | 11581 |
| 8582 | 9582 | 10582 | 11582 |
| 8583 | 9583 | 10583 | 11583 |
| 8584 | 9584 | 10584 | 11584 |
| 8585 | 9585 | 10585 | 11585 |
| 8586 | 9586 | 10586 | 11586 |
| 8587 | 9587 | 10587 | 11587 |
| 8588 | 9588 | 10588 | 11588 |
| 8589 | 9589 | 10589 | 11589 |
| 8590 | 9590 | 10590 | 11590 |
| 8591 | 9591 | 10591 | 11591 |
| 8592 | 9592 | 10592 | 11592 |
| 8593 | 9593 | 10593 | 11593 |
| 8594 | 9594 | 10594 | 11594 |
| 8595 | 9595 | 10595 | 11595 |
| 8596 | 9596 | 10596 | 11596 |
| 8597 | 9597 | 10597 | 11597 |
| 8598 | 9598 | 10598 | 11598 |
| 8599 | 9599 | 10599 | 11599 |
| 8600 | 9600 | 10600 | 11600 |
| 8601 | 9601 | 10601 | 11601 |
| 8602 | 9602 | 10602 | 11602 |
| 8603 | 9603 | 10603 | 11603 |
| 8604 | 9604 | 10604 | 11604 |
| 8605 | 9605 | 10605 | 11605 |
| 8606 | 9606 | 10606 | 11606 |
| 8607 | 9607 | 10607 | 11607 |
| 8608 | 9608 | 10608 | 11608 |
| 8609 | 9609 | 10609 | 11609 |
| 8610 | 9610 | 10610 | 11610 |
| 8611 | 9611 | 10611 | 11611 |
| 8612 | 9612 | 10612 | 11612 |
| 8613 | 9613 | 10613 | 11613 |
| 8614 | 9614 | 10614 | 11614 |
| 8615 | 9615 | 10615 | 11615 |
| 8616 | 9616 | 10616 | 11616 |
| 8617 | 9617 | 10617 | 11617 |
| 8618 | 9618 | 10618 | 11618 |
| 8619 | 9619 | 10619 | 11619 |
| 8620 | 9620 | 10620 | 11620 |
| 8621 | 9621 | 10621 | 11621 |
| 8622 | 9622 | 10622 | 11622 |
| 8623 | 9623 | 10623 | 11623 |
| 8624 | 9624 | 10624 | 11624 |
| 8625 | 9625 | 10625 | 11625 |
| 8626 | 9626 | 10626 | 11626 |
| 8627 | 9627 | 10627 | 11627 |
| 8628 | 9628 | 10628 | 11628 |
| 8629 | 9629 | 10629 | 11629 |
| 8630 | 9630 | 10630 | 11630 |
| 8631 | 9631 | 10631 | 11631 |
| 8632 | 9632 | 10632 | 11632 |
| 8633 | 9633 | 10633 | 11633 |
| 8634 | 9634 | 10634 | 11634 |
| 8635 | 9635 | 10635 | 11635 |
| 8636 | 9636 | 10636 | 11636 |
| 8637 | 9637 | 10637 | 11637 |
| 8638 | 9638 | 10638 | 11638 |
| 8639 | 9639 | 10639 | 11639 |
| 8640 | 9640 | 10640 | 11640 |
| 8641 | 9641 | 10641 | 11641 |
| 8642 | 9642 | 10642 | 11642 |
| 8643 | 9643 | 10643 | 11643 |
| 8644 | 9644 | 10644 | 11644 |
| 8645 | 9645 | 10645 | 11645 |
| 8646 | 9646 | 10646 | 11646 |
| 8647 | 9647 | 10647 | 11647 |
| 8648 | 9648 | 10648 | 11648 |
| 8649 | 9649 | 10649 | 11649 |
| 8650 | 9650 | 10650 | 11650 |
| 8651 | 9651 | 10651 | 11651 |
| 8652 | 9652 | 10652 | 11652 |
| 8653 | 9653 | 10653 | 11653 |
| 8654 | 9654 | 10654 | 11654 |
| 8655 | 9655 | 10655 | 11655 |
| 8656 | 9656 | 10656 | 11656 |
| 8657 | 9657 | 10657 | 11657 |
| 8658 | 9658 | 10658 | 11658 |
| 8659 | 9659 | 10659 | 11659 |
| 8660 | 9660 | 10660 | 11660 |
| 8661 | 9661 | 10661 | 11661 |
| 8662 | 9662 | 10662 | 11662 |
| 8663 | 9663 | 10663 | 11663 |
| 8664 | 9664 | 10664 | 11664 |
| 8665 | 9665 | 10665 | 11665 |
| 8666 | 9666 | 10666 | 11666 |
| 8667 | 9667 | 10667 | 11667 |
| 8668 | 9668 | 10668 | 11668 |
| 8669 | 9669 | 10669 | 11669 |
| 8670 | 9670 | 10670 | 11670 |
| 8671 | 9671 | 10671 | 11671 |
| 8672 | 9672 | 10672 | 11672 |
| 8673 | 9673 | 10673 | 11673 |
| 8674 | 9674 | 10674 | 11674 |
| 8675 | 9675 | 10675 | 11675 |
| 8676 | 9676 | 10676 | 11676 |
| 8677 | 9677 | 10677 | 11677 |
| 8678 | 9678 | 10678 | 11678 |
| 8679 | 9679 | 10679 | 11679 |
| 8680 | 9680 | 10680 | 11680 |
| 8681 | 9681 | 10681 | 11681 |
| 8682 | 9682 | 10682 | 11682 |
| 8683 | 9683 | 10683 | 11683 |
| 8684 | 9684 | 10684 | 11684 |
| 8685 | 9685 | 10685 | 11685 |
| 8686 | 9686 | 10686 | 11686 |
| 8687 | 9687 | 10687 | 11687 |
| 8688 | 9688 | 10688 | 11688 |
| 8689 | 9689 | 10689 | 11689 |
| 8690 | 9690 | 10690 | 11690 |
| 8691 | 9691 | 10691 | 11691 |
| 8692 | 9692 | 10692 | 11692 |
| 8693 | 9693 | 10693 | 11693 |
| 8694 | 9694 | 10694 | 11694 |
| 8695 | 9695 | 10695 | 11695 |
| 8696 | 9696 | 10696 | 11696 |
| 8697 | 9697 | 10697 | 11697 |
| 8698 | 9698 | 10698 | 11698 |
| 8699 | 9699 | 10699 | 11699 |
| 8700 | 9700 | 10700 | 11700 |
| 8701 | 9701 | 10701 | 11701 |
| 8702 | 9702 | 10702 | 11702 |
| 8703 | 9703 | 10703 | 11703 |
| 8704 | 9704 | 10704 | 11704 |
| 8705 | 9705 | 10705 | 11705 |
| 8706 | 9706 | 10706 | 11706 |
| 8707 | 9707 | 10707 | 11707 |
| 8708 | 9708 | 10708 | 11708 |
| 8709 | 9709 | 10709 | 11709 |
| 8710 | 9710 | 10710 | 11710 |
| 8711 | 9711 | 10711 | 11711 |
| 8712 | 9712 | 10712 | 11712 |
| 8713 | 9713 | 10713 | 11713 |
| 8714 | 9714 | 10714 | 11714 |
| 8715 | 9715 | 10715 | 11715 |
| 8716 | 9716 | 10716 | 11716 |
| 8717 | 9717 | 10717 | 11717 |
| 8718 | 9718 | 10718 | 11718 |
| 8719 | 9719 | 10719 | 11719 |
| 8720 | 9720 | 10720 | 11720 |
| 8721 | 9721 | 10721 | 11721 |
| 8722 | 9722 | 10722 | 11722 |
| 8723 | 9723 | 10723 | 11723 |
| 8724 | 9724 | 10724 | 11724 |
| 8725 | 9725 | 10725 | 11725 |
| 8726 | 9726 | 10726 | 11726 |
| 8727 | 9727 | 10727 | 11727 |
| 8728 | 9728 | 10728 | 11728 |
| 8729 | 9729 | 10729 | 11729 |
| 8730 | 9730 | 10730 | 11730 |
| 8731 | 9731 | 10731 | 11731 |
| 8732 | 9732 | 10732 | 11732 |
| 8733 | 9733 | 10733 | 11733 |
| 8734 | 9734 | 10734 | 11734 |
| 8735 | 9735 | 10735 | 11735 |
| 8736 | 9736 | 10736 | 11736 |
| 8737 | 9737 | 10737 | 11737 |
| 8738 | 9738 | 10738 | 11738 |
| 8739 | 9739 | 10739 | 11739 |
| 8740 | 9740 | 10740 | 11740 |
| 8741 | 9741 | 10741 | 11741 |
| 8742 | 9742 | 10742 | 11742 |
| 8743 | 9743 | 10743 | 11743 |
| 8744 | 9744 | 10744 | 11744 |
| 8745 | 9745 | 10745 | 11745 |
| 8746 | 9746 | 10746 | 11746 |
| 8747 | 9747 | 10747 | 11747 |
| 8748 | 9748 | 10748 | 11748 |
| 8749 | 9749 | 10749 | 11749 |
| 8750 | 9750 | 10750 | 11750 |
| 8751 | 9751 | 10751 | 11751 |
| 8752 | 9752 | 10752 | 11752 |
| 8753 | 9753 | 10753 | 11753 |
| 8754 | 9754 | 10754 | 11754 |
| 8755 | 9755 | 10755 | 11755 |
| 8756 | 9756 | 10756 | 11756 |
| 8757 | 9757 | 10757 | 11757 |
| 8758 | 9758 | 10758 | 11758 |
| 8759 | 9759 | 10759 | 11759 |
| 8760 | 9760 | 10760 | 11760 |
| 8761 | 9761 | 10761 | 11761 |
| 8762 | 9762 | 10762 | 11762 |
| 8763 | 9763 | 10763 | 11763 |
| 8764 | 9764 | 10764 | 11764 |
| 8765 | 9765 | 10765 | 11765 |
| 8766 | 9766 | 10766 | 11766 |
| 8767 | 9767 | 10767 | 11767 |
| 8768 | 9768 | 10768 | 11768 |
| 8769 | 9769 | 10769 | 11769 |
| 8770 | 9770 | 10770 | 11770 |
| 8771 | 9771 | 10771 | 11771 |
| 8772 | 9772 | 10772 | 11772 |
| 8773 | 9773 | 10773 | 11773 |
| 8774 | 9774 | 10774 | 11774 |
| 8775 | 9775 | 10775 | 11775 |
| 8776 | 9776 | 10776 | 11776 |
| 8777 | 9777 | 10777 | 11777 |
| 8778 | 9778 | 10778 | 11778 |
| 8779 | 9779 | 10779 | 11779 |
| 8780 | 9780 | 10780 | 11780 |
| 8781 | 9781 | 10781 | 11781 |
| 8782 | 9782 | 10782 | 11782 |
| 8783 | 9783 | 10783 | 11783 |
| 8784 | 9784 | 10784 | 11784 |
| 8785 | 9785 | 10785 | 11785 |
| 8786 | 9786 | 10786 | 11786 |
| 8787 | 9787 | 10787 | 11787 |
| 8788 | 9788 | 10788 | 11788 |
| 8789 | 9789 | 10789 | 11789 |
| 8790 | 9790 | 10790 | 11790 |
| 8791 | 9791 | 10791 | 11791 |
| 8792 | 9792 | 10792 | 11792 |
| 8793 | 9793 | 10793 | 11793 |
| 8794 | 9794 | 10794 | 11794 |
| 8795 | 9795 | 10795 | 11795 |
| 8796 | 9796 | 10796 | 11796 |
| 8797 | 9797 | 10797 | 11797 |
| 8798 | 9798 | 10798 | 11798 |
| 8799 | 9799 | 10799 | 11799 |
| 8800 | 9800 | 10800 | 11800 |
| 8801 | 9801 | 10801 | 11801 |
| 8802 | 9802 | 10802 | 11802 |
| 8803 | 9803 | 10803 | 11803 |
| 8804 | 9804 | 10804 | 11804 |
| 8805 | 9805 | 10805 | 11805 |
| 8806 | 9806 | 10806 | 11806 |
| 8807 | 9807 | 10807 | 11807 |
| 8808 | 9808 | 10808 | 11808 |
| 8809 | 9809 | 10809 | 11809 |
| 8810 | 9810 | 10810 | 11810 |
| 8811 | 9811 | 10811 | 11811 |
| 8812 | 9812 | 10812 | 11812 |
| 8813 | 9813 | 10813 | 11813 |
| 8814 | 9814 | 10814 | 11814 |
| 8815 | 9815 | 10815 | 11815 |
| 8816 | 9816 | 10816 | 11816 |
| 8817 | 9817 | 10817 | 11817 |
| 8818 | 9818 | 10818 | 11818 |
| 8819 | 9819 | 10819 | 11819 |
| 8820 | 9820 | 10820 | 11820 |
| 8821 | 9821 | 10821 | 11821 |
| 8822 | 9822 | 10822 | 11822 |
| 8823 | 9823 | 10823 | 11823 |
| 8824 | 9824 | 10824 | 11824 |
| 8825 | 9825 | 10825 | 11825 |
| 8826 | 9826 | 10826 | 11826 |
| 8827 | 9827 | 10827 | 11827 |
| 8828 | 9828 | 10828 | 11828 |
| 8829 | 9829 | 10829 | 11829 |
| 8830 | 9830 | 10830 | 11830 |
| 8831 | 9831 | 10831 | 11831 |
| 8832 | 9832 | 10832 | 11832 |
| 8833 | 9833 | 10833 | 11833 |
| 8834 | 9834 | 10834 | 11834 |
| 8835 | 9835 | 10835 | 11835 |
| 8836 | 9836 | 10836 | 11836 |
| 8837 | 9837 | 10837 | 11837 |
| 8838 | 9838 | 10838 | 11838 |
| 8839 | 9839 | 10839 | 11839 |
| 8840 | 9840 | 10840 | 11840 |
| 8841 | 9841 | 10841 | 11841 |
| 8842 | 9842 | 10842 | 11842 |
| 8843 | 9843 | 10843 | 11843 |
| 8844 | 9844 | 10844 | 11844 |
| 8845 | 9845 | 10845 | 11845 |
| 8846 | 9846 | 10846 | 11846 |
| 8847 | 9847 | 10847 | 11847 |
| 8848 | 9848 | 10848 | 11848 |
| 8849 | 9849 | 10849 | 11849 |
| 8850 | 9850 | 10850 | 11850 |
| 8851 | 9851 | 10851 | 11851 |
| 8852 | 9852 | 10852 | 11852 |
| 8853 | 9853 | 10853 | 11853 |
| 8854 | 9854 | 10854 | 11854 |
| 8855 | 9855 | 10855 | 11855 |
| 8856 | 9856 | 10856 | 11856 |
| 8857 | 9857 | 10857 | 11857 |
| 8858 | 9858 | 10858 | 11858 |
| 8859 | 9859 | 10859 | 11859 |
| 8860 | 9860 | 10860 | 11860 |
| 8861 | 9861 | 10861 | 11861 |
| 8862 | 9862 | 10862 | 11862 |
| 8863 | 9863 | 10863 | 11863 |
| 8864 | 9864 | 10864 | 11864 |
| 8865 | 9865 | 10865 | 11865 |
| 8866 | 9866 | 10866 | 11866 |
| 8867 | 9867 | 10867 | 11867 |
| 8868 | 9868 | 10868 | 11868 |
| 8869 | 9869 | 10869 | 11869 |
| 8870 | 9870 | 10870 | 11870 |
| 8871 | 9871 | 10871 | 11871 |
| 8872 | 9872 | 10872 | 11872 |
| 8873 | 9873 | 10873 | 11873 |
| 8874 | 9874 | 10874 | 11874 |
| 8875 | 9875 | 10875 | 11875 |
| 8876 | 9876 | 10876 | 11876 |
| 8877 | 9877 | 10877 | 11877 |
| 8878 | 9878 | 10878 | 11878 |
| 8879 | 9879 | 10879 | 11879 |
| 8880 | 9880 | 10880 | 11880 |
| 8881 | 9881 | 10881 | 11881 |
| 8882 | 9882 | 10882 | 11882 |
| 8883 | 9883 | 10883 | 11883 |
| 8884 | 9884 | 10884 | 11884 |
| 8885 | 9885 | 10885 | 11885 |
| 8886 | 9886 | 10886 | 11886 |
| 8887 | 9887 | 10887 | 11887 |
| 8888 | 9888 | 10888 | 11888 |
| 8889 | 9889 | 10889 | 11889 |
| 8890 | 9890 | 10890 | 11890 |
| 8891 | 9891 | 10891 | 11891 |
| 8892 | 9892 | 10892 | 11892 |
| 8893 | 9893 | 10893 | 11893 |
| 8894 | 9894 | 10894 | 11894 |
| 8895 | 9895 | 10895 | 11895 |
| 8896 | 9896 | 10896 | 11896 |
| 8897 | 9897 | 10897 | 11897 |
| 8898 | 9898 | 10898 | 11898 |
| 8899 | 9899 | 10899 | 11899 |
| 8900 | 9900 | 10900 | 11900 |
| 8901 | 9901 | 10901 | 11901 |
| 8902 | 9902 | 10902 | 11902 |
| 8903 | 9903 | 10903 | 11903 |
| 8904 | 9904 | 10904 | 11904 |
| 8905 | 9905 | 10905 | 11905 |
| 8906 | 9906 | 10906 | 11906 |
| 8907 | 9907 | 10907 | 11907 |
| 8908 | 9908 | 10908 | 11908 |
| 8909 | 9909 | 10909 | 11909 |
| 8910 | 9910 | 10910 | 11910 |
| 8911 | 9911 | 10911 | 11911 |
| 8912 | 9912 | 10912 | 11912 |
| 8913 | 9913 | 10913 | 11913 |
| 8914 | 9914 | 10914 | 11914 |
| 8915 | 9915 | 10915 | 11915 |
| 8916 | 9916 | 10916 | 11916 |
| 8917 | 9917 | 10917 | 11917 |
| 8918 | 9918 | 10918 | 11918 |
| 8919 | 9919 | 10919 | 11919 |
| 8920 | 9920 | 10920 | 11920 |
| 8921 | 9921 | 10921 | 11921 |
| 8922 | 9922 | 10922 | 11922 |
| 8923 | 9923 | 10923 | 11923 |
| 8924 | 9924 | 10924 | 11924 |
| 8925 | 9925 | 10925 | 11925 |
| 8926 | 9926 | 10926 | 11926 |
| 8927 | 9927 | 10927 | 11927 |
| 8928 | 9928 | 10928 | 11928 |
| 8929 | 9929 | 10929 | 11929 |
| 8930 | 9930 | 10930 | 11930 |
| 8931 | 9931 | 10931 | 11931 |
| 8932 | 9932 | 10932 | 11932 |
| 8933 | 9933 | 10933 | 11933 |
| 8934 | 9934 | 10934 | 11934 |
| 8935 | 9935 | 10935 | 11935 |
| 8936 | 9936 | 10936 | 11936 |
| 8937 | 9937 | 10937 | 11937 |
| 8938 | 9938 | 10938 | 11938 |
| 8939 | 9939 | 10939 | 11939 |
| 8940 | 9940 | 10940 | 11940 |
| 8941 | 9941 | 10941 | 11941 |
| 8942 | 9942 | 10942 | 11942 |
| 8943 | 9943 | 10943 | 11943 |
| 8944 | 9944 | 10944 | 11944 |
| 8945 | 9945 | 10945 | 11945 |
| 8946 | 9946 | 10946 | 11946 |
| 8947 | 9947 | 10947 | 11947 |
| 8948 | 9948 | 10948 | 11948 |
| 8949 | 9949 | 10949 | 11949 |
| 8950 | 9950 | 10950 | 11950 |
| 8951 | 9951 | 10951 | 11951 |
| 8952 | 9952 | 10952 | 11952 |
| 8953 | 9953 | 10953 | 11953 |
| 8954 | 9954 | 10954 | 11954 |
| 8955 | 9955 | 10955 | 11955 |
| 8956 | 9956 | 10956 | 11956 |
| 8957 | 9957 | 10957 | 11957 |
| 8958 | 9958 | 10958 | 11958 |
| 8959 | 9959 | 10959 | 11959 |
| 8960 | 9960 | 10960 | 11960 |
| 8961 | 9961 | 10961 | 11961 |
| 8962 | 9962 | 10962 | 11962 |
| 8963 | 9963 | 10963 | 11963 |
| 8964 | 9964 | 10964 | 11964 |
| 8965 | 9965 | 10965 | 11965 |
| 8966 | 9966 | 10966 | 11966 |
| 8967 | 9967 | 10967 | 11967 |
| 8968 | 9968 | 10968 | 11968 |
| 8969 | 9969 | 10969 | 11969 |
| 8970 | 9970 | 10970 | 11970 |
| 8971 | 9971 | 10971 | 11971 |
| 8972 | 9972 | 10972 | 11972 |
| 8973 | 9973 | 10973 | 11973 |
| 8974 | 9974 | 10974 | 11974 |
| 8975 | 9975 | 10975 | 11975 |
| 8976 | 9976 | 10976 | 11976 |
| 8977 | 9977 | 10977 | 11977 |
| 8978 | 9978 | 10978 | 11978 |
| 8979 | 9979 | 10979 | 11979 |
| 8980 | 9980 | 10980 | 11980 |
| 8981 | 9981 | 10981 | 11981 |
| 8982 | 9982 | 10982 | 11982 |
| 8983 | 9983 | 10983 | 11983 |
| 8984 | 9984 | 10984 | 11984 |
| 8985 | 9985 | 10985 | 11985 |
| 8986 | 9986 | 10986 | 11986 |
| 8987 | 9987 | 10987 | 11987 |
| 8988 | 9988 | 10988 | 11988 |
| 8989 | 9989 | 10989 | 11989 |
| 8990 | 9990 | 10990 | 11990 |
| 8991 | 9991 | 10991 | 11991 |
| 8992 | 9992 | 10992 | 11992 |
| 8993 | 9993 | 10993 | 11993 |
| 8994 | 9994 | 10994 | 11994 |
| 8995 | 9995 | 10995 | 11995 |
| 8996 | 9996 | 10996 | 11996 |
| 8997 | 9997 | 10997 | 11997 |
| 8998 | 9998 | 10998 | 11998 |
| 8999 | 9999 | 10999 | 11999 |
| 9000 | 10000 | 11000 | 12000 |
| 9001 | 10001 | 11001 | 12001 |
| 9002 | 10002 | 11002 | 12002 |

[0130] In some embodiments, the sequences that specifically bind to cashew comprise an inner sequence selected from the group consisting of the nucleic acid sequences of SEQ ID NOs. 12003 to 13002. In some examples, a short nucleic acid sequence may be affixed to the 5-end of the inner sequence. The short nucleic acid sequence may be the 5′ primer sequence used in the random ssDNA library, i.e. the nucleic acid sequence of SEQ ID NO. 1. Accordingly, the aptamer that specifically binds to cashew may comprise a nucleic acid sequence selected from the group consisting of SEQ ID NOs. 13003 to 14002. In other examples, a short nucleic acid sequence may be affixed to the 3-end of the inner sequence. The short nucleic acid sequence may be the 3′ primer sequence used in the random ssDNA library, i.e. the nucleic acid sequence of SEQ ID NO. 2. Accordingly, the aptamer that specifically binds to cashew may comprise a nucleic acid sequence selected from the group consisting of SEQ ID NOs. 14003 to 15002. In other examples, the inner sequence may comprise a 5′ end short sequence (i.e., SEQ ID NO. 1) and a 3′ end short sequence (i.e., SEQ ID NO. 2). Accordingly, the aptamer that specifically binds to cashew may comprise a nucleic acid sequence selected from the group consisting of SEQ ID NOs. 15003 to 16002. In one embodiment, the aptamer of the present disclosure that binds to cashew may comprise a nucleic acid sequence selected from the group consisting of SEQ ID NOs. 12003 to 16002 listed in Table 5, or variant thereof.

TABLE 5
Aptamer sequences against cashew
Aptamer Sequence

| | | | 5′-sequence |
|---|---|---|---|
| | 5′-sequence | Inner | and inner |
| Inner | and inner | sequence and | sequence and |
| sequence | sequence | 3′-sequence | 3′-sequence |
| (SEQ ID NO.) | (SEQ ID NO.) | (SEQ ID NO.) | (SEQ ID NO.) |
| 12003 | 13003 | 14003 | 15003 |
| 12004 | 13004 | 14004 | 15004 |
| 12005 | 13005 | 14005 | 15005 |
| 12006 | 13006 | 14006 | 15006 |
| 12007 | 13007 | 14007 | 15007 |
| 12008 | 13008 | 14008 | 15008 |
| 12009 | 13009 | 14009 | 15009 |
| 12010 | 13010 | 14010 | 15010 |
| 12011 | 13011 | 14011 | 15011 |
| 12012 | 13012 | 14012 | 15012 |
| 12013 | 13013 | 14013 | 15013 |
| 12014 | 13014 | 14014 | 15014 |
| 12015 | 13015 | 14015 | 15015 |
| 12016 | 13016 | 14016 | 15016 |
| 12017 | 13017 | 14017 | 15017 |
| 12018 | 13018 | 14018 | 15018 |
| 12019 | 13019 | 14019 | 15019 |
| 12020 | 13020 | 14020 | 15020 |
| 12021 | 13021 | 14021 | 15021 |
| 12022 | 13022 | 14022 | 15022 |
| 12023 | 13023 | 14023 | 15023 |
| 12024 | 13024 | 14024 | 15024 |
| 12025 | 13025 | 14025 | 15025 |
| 12026 | 13026 | 14026 | 15026 |
| 12027 | 13027 | 14027 | 15027 |
| 12028 | 13028 | 14028 | 15028 |
| 12029 | 13029 | 14029 | 15029 |
| 12030 | 13030 | 14030 | 15030 |
| 12031 | 13031 | 14031 | 15031 |
| 12032 | 13032 | 14032 | 15032 |
| 12033 | 13033 | 14033 | 15033 |
| 12034 | 13034 | 14034 | 15034 |
| 12035 | 13035 | 14035 | 15035 |
| 12036 | 13036 | 14036 | 15036 |
| 12037 | 13037 | 14037 | 15037 |
| 12038 | 13038 | 14038 | 15038 |
| 12039 | 13039 | 14039 | 15039 |
| 12040 | 13040 | 14040 | 15040 |
| 12041 | 13041 | 14041 | 15041 |
| 12042 | 13042 | 14042 | 15042 |
| 12043 | 13043 | 14043 | 15043 |
| 12044 | 13044 | 14044 | 15044 |
| 12045 | 13045 | 14045 | 15045 |
| 12046 | 13046 | 14046 | 15046 |
| 12047 | 13047 | 14047 | 15047 |
| 12048 | 13048 | 14048 | 15048 |
| 12049 | 13049 | 14049 | 15049 |
| 12050 | 13050 | 14050 | 15050 |
| 12051 | 13051 | 14051 | 15051 |
| 12052 | 13052 | 14052 | 15052 |
| 12053 | 13053 | 14053 | 15053 |
| 12054 | 13054 | 14054 | 15054 |
| 12055 | 13055 | 14055 | 15055 |
| 12056 | 13056 | 14056 | 15056 |
| 12057 | 13057 | 14057 | 15057 |
| 12058 | 13058 | 14058 | 15058 |
| 12059 | 13059 | 14059 | 15059 |
| 12060 | 13060 | 14060 | 15060 |
| 12061 | 13061 | 14061 | 15061 |
| 12062 | 13062 | 14062 | 15062 |
| 12063 | 13063 | 14063 | 15063 |
| 12064 | 13064 | 14064 | 15064 |
| 12065 | 13065 | 14065 | 15065 |
| 12066 | 13066 | 14066 | 15066 |
| 12067 | 13067 | 14067 | 15067 |
| 12068 | 13068 | 14068 | 15068 |
| 12069 | 13069 | 14069 | 15069 |
| 12070 | 13070 | 14070 | 15070 |
| 12071 | 13071 | 14071 | 15071 |
| 12072 | 13072 | 14072 | 15072 |
| 12073 | 13073 | 14073 | 15073 |
| 12074 | 13074 | 14074 | 15074 |
| 12075 | 13075 | 14075 | 15075 |
| 12076 | 13076 | 14076 | 15076 |
| 12077 | 13077 | 14077 | 15077 |
| 12078 | 13078 | 14078 | 15078 |
| 12079 | 13079 | 14079 | 15079 |
| 12080 | 13080 | 14080 | 15080 |
| 12081 | 13081 | 14081 | 15081 |
| 12082 | 13082 | 14082 | 15082 |
| 12083 | 13083 | 14083 | 15083 |
| 12084 | 13084 | 14084 | 15084 |
| 12085 | 13085 | 14085 | 15085 |
| 12086 | 13086 | 14086 | 15086 |
| 12087 | 13087 | 14087 | 15087 |
| 12088 | 13088 | 14088 | 15088 |
| 12089 | 13089 | 14089 | 15089 |
| 12090 | 13090 | 14090 | 15090 |
| 12091 | 13091 | 14091 | 15091 |
| 12092 | 13092 | 14092 | 15092 |
| 12093 | 13093 | 14093 | 15093 |
| 12094 | 13094 | 14094 | 15094 |
| 12095 | 13095 | 14095 | 15095 |
| 12096 | 13096 | 14096 | 15096 |
| 12097 | 13097 | 14097 | 15097 |
| 12098 | 13098 | 14098 | 15098 |
| 12099 | 13099 | 14099 | 15099 |
| 12100 | 13100 | 14100 | 15100 |
| 12101 | 13101 | 14101 | 15101 |
| 12102 | 13102 | 14102 | 15102 |
| 12103 | 13103 | 14103 | 15103 |
| 12104 | 13104 | 14104 | 15104 |
| 12105 | 13105 | 14105 | 15105 |
| 12106 | 13106 | 14106 | 15106 |
| 12107 | 13107 | 14107 | 15107 |
| 12108 | 13108 | 14108 | 15108 |
| 12109 | 13109 | 14109 | 15109 |
| 12110 | 13110 | 14110 | 15110 |
| 12111 | 13111 | 14111 | 15111 |
| 12112 | 13112 | 14112 | 15112 |
| 12113 | 13113 | 14113 | 15113 |
| 12114 | 13114 | 14114 | 15114 |
| 12115 | 13115 | 14115 | 15115 |
| 12116 | 13116 | 14116 | 15116 |
| 12117 | 13117 | 14117 | 15117 |
| 12118 | 13118 | 14118 | 15118 |
| 12119 | 13119 | 14119 | 15119 |
| 12120 | 13120 | 14120 | 15120 |
| 12121 | 13121 | 14121 | 15121 |
| 12122 | 13122 | 14122 | 15122 |
| 12123 | 13123 | 14123 | 15123 |
| 12124 | 13124 | 14124 | 15124 |
| 12125 | 13125 | 14125 | 15125 |
| 12126 | 13126 | 14126 | 15126 |
| 12127 | 13127 | 14127 | 15127 |
| 12128 | 13128 | 14128 | 15128 |
| 12129 | 13129 | 14129 | 15129 |
| 12130 | 13130 | 14130 | 15130 |
| 12131 | 13131 | 14131 | 15131 |
| 12132 | 13132 | 14132 | 15132 |
| 12133 | 13133 | 14133 | 15133 |
| 12134 | 13134 | 14134 | 15134 |
| 12135 | 13135 | 14135 | 15135 |
| 12136 | 13136 | 14136 | 15136 |
| 12137 | 13137 | 14137 | 15137 |
| 12138 | 13138 | 14138 | 15138 |
| 12139 | 13139 | 14139 | 15139 |
| 12140 | 13140 | 14140 | 15140 |
| 12141 | 13141 | 14141 | 15141 |
| 12142 | 13142 | 14142 | 15142 |
| 12143 | 13143 | 14143 | 15143 |
| 12144 | 13144 | 14144 | 15144 |
| 12145 | 13145 | 14145 | 15145 |
| 12146 | 13146 | 14146 | 15146 |
| 12147 | 13147 | 14147 | 15147 |
| 12148 | 13148 | 14148 | 15148 |
| 12149 | 13149 | 14149 | 15149 |
| 12150 | 13150 | 14150 | 15150 |
| 12151 | 13151 | 14151 | 15151 |
| 12152 | 13152 | 14152 | 15152 |
| 12153 | 13153 | 14153 | 15153 |
| 12154 | 13154 | 14154 | 15154 |
| 12155 | 13155 | 14155 | 15155 |
| 12156 | 13156 | 14156 | 15156 |
| 12157 | 13157 | 14157 | 15157 |
| 12158 | 13158 | 14158 | 15158 |
| 12159 | 13159 | 14159 | 15159 |
| 12160 | 13160 | 14160 | 15160 |
| 12161 | 13161 | 14161 | 15161 |
| 12162 | 13162 | 14162 | 15162 |
| 12163 | 13163 | 14163 | 15163 |
| 12164 | 13164 | 14164 | 15164 |
| 12165 | 13165 | 14165 | 15165 |
| 12166 | 13166 | 14166 | 15166 |
| 12167 | 13167 | 14167 | 15167 |
| 12168 | 13168 | 14168 | 15168 |
| 12169 | 13169 | 14169 | 15169 |
| 12170 | 13170 | 14170 | 15170 |
| 12171 | 13171 | 14171 | 15171 |
| 12172 | 13172 | 14172 | 15172 |
| 12173 | 13173 | 14173 | 15173 |
| 12174 | 13174 | 14174 | 15174 |
| 12175 | 13175 | 14175 | 15175 |
| 12176 | 13176 | 14176 | 15176 |
| 12177 | 13177 | 14177 | 15177 |
| 12178 | 13178 | 14178 | 15178 |
| 12179 | 13179 | 14179 | 15179 |
| 12180 | 13180 | 14180 | 15180 |
| 12181 | 13181 | 14181 | 15181 |
| 12182 | 13182 | 14182 | 15182 |
| 12183 | 13183 | 14183 | 15183 |
| 12184 | 13184 | 14184 | 15184 |
| 12185 | 13185 | 14185 | 15185 |
| 12186 | 13186 | 14186 | 15186 |
| 12187 | 13187 | 14187 | 15187 |
| 12188 | 13188 | 14188 | 15188 |
| 12189 | 13189 | 14189 | 15189 |
| 12190 | 13190 | 14190 | 15190 |
| 12191 | 13191 | 14191 | 15191 |
| 12192 | 13192 | 14192 | 15192 |
| 12193 | 13193 | 14193 | 15193 |
| 12194 | 13194 | 14194 | 15194 |
| 12195 | 13195 | 14195 | 15195 |
| 12196 | 13196 | 14196 | 15196 |
| 12197 | 13197 | 14197 | 15197 |
| 12198 | 13198 | 14198 | 15198 |
| 12199 | 13199 | 14199 | 15199 |
| 12200 | 13200 | 14200 | 15200 |
| 12201 | 13201 | 14201 | 15201 |
| 12202 | 13202 | 14202 | 15202 |
| 12203 | 13203 | 14203 | 15203 |
| 12204 | 13204 | 14204 | 15204 |
| 12205 | 13205 | 14205 | 15205 |
| 12206 | 13206 | 14206 | 15206 |
| 12207 | 13207 | 14207 | 15207 |
| 12208 | 13208 | 14208 | 15208 |
| 12209 | 13209 | 14209 | 15209 |
| 12210 | 13210 | 14210 | 15210 |
| 12211 | 13211 | 14211 | 15211 |
| 12212 | 13212 | 14212 | 15212 |
| 12213 | 13213 | 14213 | 15213 |
| 12214 | 13214 | 14214 | 15214 |
| 12215 | 13215 | 14215 | 15215 |
| 12216 | 13216 | 14216 | 15216 |
| 12217 | 13217 | 14217 | 15217 |
| 12218 | 13218 | 14218 | 15218 |
| 12219 | 13219 | 14219 | 15219 |
| 12220 | 13220 | 14220 | 15220 |
| 12221 | 13221 | 14221 | 15221 |
| 12222 | 13222 | 14222 | 15222 |
| 12223 | 13223 | 14223 | 15223 |
| 12224 | 13224 | 14224 | 15224 |
| 12225 | 13225 | 14225 | 15225 |
| 12226 | 13226 | 14226 | 15226 |
| 12227 | 13227 | 14227 | 15227 |
| 12228 | 13228 | 14228 | 15228 |
| 12229 | 13229 | 14229 | 15229 |
| 12230 | 13230 | 14230 | 15230 |
| 12231 | 13231 | 14231 | 15231 |
| 12232 | 13232 | 14232 | 15232 |
| 12233 | 13233 | 14233 | 15233 |
| 12234 | 13234 | 14234 | 15234 |
| 12235 | 13235 | 14235 | 15235 |
| 12236 | 13236 | 14236 | 15236 |
| 12237 | 13237 | 14237 | 15237 |
| 12238 | 13238 | 14238 | 15238 |
| 12239 | 13239 | 14239 | 15239 |
| 12240 | 13240 | 14240 | 15240 |
| 12241 | 13241 | 14241 | 15241 |
| 12242 | 13242 | 14242 | 15242 |
| 12243 | 13243 | 14243 | 15243 |
| 12244 | 13244 | 14244 | 15244 |
| 12245 | 13245 | 14245 | 15245 |
| 12246 | 13246 | 14246 | 15246 |
| 12247 | 13247 | 14247 | 15247 |
| 12248 | 13248 | 14248 | 15248 |
| 12249 | 13249 | 14249 | 15249 |
| 12250 | 13250 | 14250 | 15250 |
| 12251 | 13251 | 14251 | 15251 |
| 12252 | 13252 | 14252 | 15252 |
| 12253 | 13253 | 14253 | 15253 |
| 12254 | 13254 | 14254 | 15254 |
| 12255 | 13255 | 14255 | 15255 |
| 12256 | 13256 | 14256 | 15256 |
| 12257 | 13257 | 14257 | 15257 |
| 12258 | 13258 | 14258 | 15258 |
| 12259 | 13259 | 14259 | 15259 |
| 12260 | 13260 | 14260 | 15260 |
| 12261 | 13261 | 14261 | 15261 |
| 12262 | 13262 | 14262 | 15262 |
| 12263 | 13263 | 14263 | 15263 |
| 12264 | 13264 | 14264 | 15264 |
| 12265 | 13265 | 14265 | 15265 |
| 12266 | 13266 | 14266 | 15266 |
| 12267 | 13267 | 14267 | 15267 |
| 12268 | 13268 | 14268 | 15268 |
| 12269 | 13269 | 14269 | 15269 |
| 12270 | 13270 | 14270 | 15270 |
| 12271 | 13271 | 14271 | 15271 |
| 12272 | 13272 | 14272 | 15272 |
| 12273 | 13273 | 14273 | 15273 |
| 12274 | 13274 | 14274 | 15274 |
| 12275 | 13275 | 14275 | 15275 |
| 12276 | 13276 | 14276 | 15276 |
| 12277 | 13277 | 14277 | 15277 |
| 12278 | 13278 | 14278 | 15278 |
| 12279 | 13279 | 14279 | 15279 |
| 12280 | 13280 | 14280 | 15280 |
| 12281 | 13281 | 14281 | 15281 |
| 12282 | 13282 | 14282 | 15282 |
| 12283 | 13283 | 14283 | 15283 |
| 12284 | 13284 | 14284 | 15284 |
| 12285 | 13285 | 14285 | 15285 |
| 12286 | 13286 | 14286 | 15286 |
| 12287 | 13287 | 14287 | 15287 |
| 12288 | 13288 | 14288 | 15288 |
| 12289 | 13289 | 14289 | 15289 |
| 12290 | 13290 | 14290 | 15290 |
| 12291 | 13291 | 14291 | 15291 |
| 12292 | 13292 | 14292 | 15292 |
| 12293 | 13293 | 14293 | 15293 |
| 12294 | 13294 | 14294 | 15294 |
| 12295 | 13295 | 14295 | 15295 |
| 12296 | 13296 | 14296 | 15296 |
| 12297 | 13297 | 14297 | 15297 |
| 12298 | 13298 | 14298 | 15298 |
| 12299 | 13299 | 14299 | 15299 |
| 12300 | 13300 | 14300 | 15300 |
| 12301 | 13301 | 14301 | 15301 |
| 12302 | 13302 | 14302 | 15302 |
| 12303 | 13303 | 14303 | 15303 |
| 12304 | 13304 | 14304 | 15304 |
| 12305 | 13305 | 14305 | 15305 |
| 12306 | 13306 | 14306 | 15306 |
| 12307 | 13307 | 14307 | 15307 |
| 12308 | 13308 | 14308 | 15308 |
| 12309 | 13309 | 14309 | 15309 |
| 12310 | 13310 | 14310 | 15310 |
| 12311 | 13311 | 14311 | 15311 |
| 12312 | 13312 | 14312 | 15312 |
| 12313 | 13313 | 14313 | 15313 |
| 12314 | 13314 | 14314 | 15314 |
| 12315 | 13315 | 14315 | 15315 |
| 12316 | 13316 | 14316 | 15316 |
| 12317 | 13317 | 14317 | 15317 |
| 12318 | 13318 | 14318 | 15318 |
| 12319 | 13319 | 14319 | 15319 |
| 12320 | 13320 | 14320 | 15320 |
| 12321 | 13321 | 14321 | 15321 |
| 12322 | 13322 | 14322 | 15322 |
| 12323 | 13323 | 14323 | 15323 |
| 12324 | 13324 | 14324 | 15324 |
| 12325 | 13325 | 14325 | 15325 |
| 12326 | 13326 | 14326 | 15326 |
| 12327 | 13327 | 14327 | 15327 |
| 12328 | 13328 | 14328 | 15328 |
| 12329 | 13329 | 14329 | 15329 |
| 12330 | 13330 | 14330 | 15330 |
| 12331 | 13331 | 14331 | 15331 |
| 12332 | 13332 | 14332 | 15332 |
| 12333 | 13333 | 14333 | 15333 |
| 12334 | 13334 | 14334 | 15334 |
| 12335 | 13335 | 14335 | 15335 |
| 12336 | 13336 | 14336 | 15336 |
| 12337 | 13337 | 14337 | 15337 |
| 12338 | 13338 | 14338 | 15338 |
| 12339 | 13339 | 14339 | 15339 |
| 12340 | 13340 | 14340 | 15340 |
| 12341 | 13341 | 14341 | 15341 |
| 12342 | 13342 | 14342 | 15342 |
| 12343 | 13343 | 14343 | 15343 |
| 12344 | 13344 | 14344 | 15344 |
| 12345 | 13345 | 14345 | 15345 |
| 12346 | 13346 | 14346 | 15346 |
| 12347 | 13347 | 14347 | 15347 |
| 12348 | 13348 | 14348 | 15348 |
| 12349 | 13349 | 14349 | 15349 |
| 12350 | 13350 | 14350 | 15350 |
| 12351 | 13351 | 14351 | 15351 |
| 12352 | 13352 | 14352 | 15352 |
| 12353 | 13353 | 14353 | 15353 |
| 12354 | 13354 | 14354 | 15354 |
| 12355 | 13355 | 14355 | 15355 |
| 12356 | 13356 | 14356 | 15356 |
| 12357 | 13357 | 14357 | 15357 |
| 12358 | 13358 | 14358 | 15358 |
| 12359 | 13359 | 14359 | 15359 |
| 12360 | 13360 | 14360 | 15360 |
| 12361 | 13361 | 14361 | 15361 |
| 12362 | 13362 | 14362 | 15362 |
| 12363 | 13363 | 14363 | 15363 |
| 12364 | 13364 | 14364 | 15364 |
| 12365 | 13365 | 14365 | 15365 |
| 12366 | 13366 | 14366 | 15366 |
| 12367 | 13367 | 14367 | 15367 |
| 12368 | 13368 | 14368 | 15368 |
| 12369 | 13369 | 14369 | 15369 |
| 12370 | 13370 | 14370 | 15370 |
| 12371 | 13371 | 14371 | 15371 |
| 12372 | 13372 | 14372 | 15372 |
| 12373 | 13373 | 14373 | 15373 |
| 12374 | 13374 | 14374 | 15374 |
| 12375 | 13375 | 14375 | 15375 |
| 12376 | 13376 | 14376 | 15376 |
| 12377 | 13377 | 14377 | 15377 |
| 12378 | 13378 | 14378 | 15378 |
| 12379 | 13379 | 14379 | 15379 |
| 12380 | 13380 | 14380 | 15380 |
| 12381 | 13381 | 14381 | 15381 |
| 12382 | 13382 | 14382 | 15382 |
| 12383 | 13383 | 14383 | 15383 |
| 12384 | 13384 | 14384 | 15384 |
| 12385 | 13385 | 14385 | 15385 |
| 12386 | 13386 | 14386 | 15386 |
| 12387 | 13387 | 14387 | 15387 |
| 12388 | 13388 | 14388 | 15388 |
| 12389 | 13389 | 14389 | 15389 |
| 12390 | 13390 | 14390 | 15390 |
| 12391 | 13391 | 14391 | 15391 |
| 12392 | 13392 | 14392 | 15392 |
| 12393 | 13393 | 14393 | 15393 |
| 12394 | 13394 | 14394 | 15394 |
| 12395 | 13395 | 14395 | 15395 |
| 12396 | 13396 | 14396 | 15396 |
| 12397 | 13397 | 14397 | 15397 |
| 12398 | 13398 | 14398 | 15398 |
| 12399 | 13399 | 14399 | 15399 |
| 12400 | 13400 | 14400 | 15400 |
| 12401 | 13401 | 14401 | 15401 |
| 12402 | 13402 | 14402 | 15402 |
| 12403 | 13403 | 14403 | 15403 |
| 12404 | 13404 | 14404 | 15404 |
| 12405 | 13405 | 14405 | 15405 |
| 12406 | 13406 | 14406 | 15406 |
| 12407 | 13407 | 14407 | 15407 |
| 12408 | 13408 | 14408 | 15408 |
| 12409 | 13409 | 14409 | 15409 |
| 12410 | 13410 | 14410 | 15410 |
| 12411 | 13411 | 14411 | 15411 |
| 12412 | 13412 | 14412 | 15412 |
| 12413 | 13413 | 14413 | 15413 |
| 12414 | 13414 | 14414 | 15414 |
| 12415 | 13415 | 14415 | 15415 |
| 12416 | 13416 | 14416 | 15416 |
| 12417 | 13417 | 14417 | 15417 |
| 12418 | 13418 | 14418 | 15418 |
| 12419 | 13419 | 14419 | 15419 |
| 12420 | 13420 | 14420 | 15420 |
| 12421 | 13421 | 14421 | 15421 |
| 12422 | 13422 | 14422 | 15422 |
| 12423 | 13423 | 14423 | 15423 |
| 12424 | 13424 | 14424 | 15424 |
| 12425 | 13425 | 14425 | 15425 |
| 12426 | 13426 | 14426 | 15426 |
| 12427 | 13427 | 14427 | 15427 |
| 12428 | 13428 | 14428 | 15428 |
| 12429 | 13429 | 14429 | 15429 |
| 12430 | 13430 | 14430 | 15430 |
| 12431 | 13431 | 14431 | 15431 |
| 12432 | 13432 | 14432 | 15432 |
| 12433 | 13433 | 14433 | 15433 |
| 12434 | 13434 | 14434 | 15434 |
| 12435 | 13435 | 14435 | 15435 |
| 12436 | 13436 | 14436 | 15436 |
| 12437 | 13437 | 14437 | 15437 |
| 12438 | 13438 | 14438 | 15438 |
| 12439 | 13439 | 14439 | 15439 |
| 12440 | 13440 | 14440 | 15440 |
| 12441 | 13441 | 14441 | 15441 |
| 12442 | 13442 | 14442 | 15442 |
| 12443 | 13443 | 14443 | 15443 |
| 12444 | 13444 | 14444 | 15444 |
| 12445 | 13445 | 14445 | 15445 |
| 12446 | 13446 | 14446 | 15446 |
| 12447 | 13447 | 14447 | 15447 |
| 12448 | 13448 | 14448 | 15448 |
| 12449 | 13449 | 14449 | 15449 |
| 12450 | 13450 | 14450 | 15450 |
| 12451 | 13451 | 14451 | 15451 |
| 12452 | 13452 | 14452 | 15452 |
| 12453 | 13453 | 14453 | 15453 |
| 12454 | 13454 | 14454 | 15454 |
| 12455 | 13455 | 14455 | 15455 |
| 12456 | 13456 | 14456 | 15456 |
| 12457 | 13457 | 14457 | 15457 |
| 12458 | 13458 | 14458 | 15458 |
| 12459 | 13459 | 14459 | 15459 |
| 12460 | 13460 | 14460 | 15460 |
| 12461 | 13461 | 14461 | 15461 |
| 12462 | 13462 | 14462 | 15462 |
| 12463 | 13463 | 14463 | 15463 |
| 12464 | 13464 | 14464 | 15464 |
| 12465 | 13465 | 14465 | 15465 |
| 12466 | 13466 | 14466 | 15466 |
| 12467 | 13467 | 14467 | 15467 |
| 12468 | 13468 | 14468 | 15468 |
| 12469 | 13469 | 14469 | 15469 |
| 12470 | 13470 | 14470 | 15470 |
| 12471 | 13471 | 14471 | 15471 |
| 12472 | 13472 | 14472 | 15472 |
| 12473 | 13473 | 14473 | 15473 |
| 12474 | 13474 | 14474 | 15474 |
| 12475 | 13475 | 14475 | 15475 |
| 12476 | 13476 | 14476 | 15476 |
| 12477 | 13477 | 14477 | 15477 |
| 12478 | 13478 | 14478 | 15478 |
| 12479 | 13479 | 14479 | 15479 |
| 12480 | 13480 | 14480 | 15480 |
| 12481 | 13481 | 14481 | 15481 |
| 12482 | 13482 | 14482 | 15482 |
| 12483 | 13483 | 14483 | 15483 |
| 12484 | 13484 | 14484 | 15484 |
| 12485 | 13485 | 14485 | 15485 |
| 12486 | 13486 | 14486 | 15486 |
| 12487 | 13487 | 14487 | 15487 |
| 12488 | 13488 | 14488 | 15488 |
| 12489 | 13489 | 14489 | 15489 |
| 12490 | 13490 | 14490 | 15490 |
| 12491 | 13491 | 14491 | 15491 |
| 12492 | 13492 | 14492 | 15492 |
| 12493 | 13493 | 14493 | 15493 |
| 12494 | 13494 | 14494 | 15494 |
| 12495 | 13495 | 14495 | 15495 |
| 12496 | 13496 | 14496 | 15496 |
| 12497 | 13497 | 14497 | 15497 |
| 12498 | 13498 | 14498 | 15498 |
| 12499 | 13499 | 14499 | 15499 |
| 12500 | 13500 | 14500 | 15500 |
| 12501 | 13501 | 14501 | 15501 |
| 12502 | 13502 | 14502 | 15502 |
| 12503 | 13503 | 14503 | 15503 |
| 12504 | 13504 | 14504 | 15504 |
| 12505 | 13505 | 14505 | 15505 |
| 12506 | 13506 | 14506 | 15506 |
| 12507 | 13507 | 14507 | 15507 |
| 12508 | 13508 | 14508 | 15508 |
| 12509 | 13509 | 14509 | 15509 |
| 12510 | 13510 | 14510 | 15510 |
| 12511 | 13511 | 14511 | 15511 |
| 12512 | 13512 | 14512 | 15512 |
| 12513 | 13513 | 14513 | 15513 |
| 12514 | 13514 | 14514 | 15514 |
| 12515 | 13515 | 14515 | 15515 |
| 12516 | 13516 | 14516 | 15516 |
| 12517 | 13517 | 14517 | 15517 |
| 12518 | 13518 | 14518 | 15518 |
| 12519 | 13519 | 14519 | 15519 |
| 12520 | 13520 | 14520 | 15520 |
| 12521 | 13521 | 14521 | 15521 |
| 12522 | 13522 | 14522 | 15522 |
| 12523 | 13523 | 14523 | 15523 |
| 12524 | 13524 | 14524 | 15524 |
| 12525 | 13525 | 14525 | 15525 |
| 12526 | 13526 | 14526 | 15526 |
| 12527 | 13527 | 14527 | 15527 |
| 12528 | 13528 | 14528 | 15528 |
| 12529 | 13529 | 14529 | 15529 |
| 12530 | 13530 | 14530 | 15530 |
| 12531 | 13531 | 14531 | 15531 |
| 12532 | 13532 | 14532 | 15532 |
| 12533 | 13533 | 14533 | 15533 |
| 12534 | 13534 | 14534 | 15534 |
| 12535 | 13535 | 14535 | 15535 |
| 12536 | 13536 | 14536 | 15536 |
| 12537 | 13537 | 14537 | 15537 |
| 12538 | 13538 | 14538 | 15538 |
| 12539 | 13539 | 14539 | 15539 |
| 12540 | 13540 | 14540 | 15540 |
| 12541 | 13541 | 14541 | 15541 |
| 12542 | 13542 | 14542 | 15542 |
| 12543 | 13543 | 14543 | 15543 |
| 12544 | 13544 | 14544 | 15544 |
| 12545 | 13545 | 14545 | 15545 |
| 12546 | 13546 | 14546 | 15546 |
| 12547 | 13547 | 14547 | 15547 |
| 12548 | 13548 | 14548 | 15548 |
| 12549 | 13549 | 14549 | 15549 |
| 12550 | 13550 | 14550 | 15550 |
| 12551 | 13551 | 14551 | 15551 |
| 12552 | 13552 | 14552 | 15552 |
| 12553 | 13553 | 14553 | 15553 |
| 12554 | 13554 | 14554 | 15554 |
| 12555 | 13555 | 14555 | 15555 |
| 12556 | 13556 | 14556 | 15556 |
| 12557 | 13557 | 14557 | 15557 |
| 12558 | 13558 | 14558 | 15558 |
| 12559 | 13559 | 14559 | 15559 |
| 12560 | 13560 | 14560 | 15560 |
| 12561 | 13561 | 14561 | 15561 |
| 12562 | 13562 | 14562 | 15562 |
| 12563 | 13563 | 14563 | 15563 |
| 12564 | 13564 | 14564 | 15564 |
| 12565 | 13565 | 14565 | 15565 |
| 12566 | 13566 | 14566 | 15566 |
| 12567 | 13567 | 14567 | 15567 |
| 12568 | 13568 | 14568 | 15568 |
| 12569 | 13569 | 14569 | 15569 |
| 12570 | 13570 | 14570 | 15570 |
| 12571 | 13571 | 14571 | 15571 |
| 12572 | 13572 | 14572 | 15572 |
| 12573 | 13573 | 14573 | 15573 |
| 12574 | 13574 | 14574 | 15574 |
| 12575 | 13575 | 14575 | 15575 |
| 12576 | 13576 | 14576 | 15576 |
| 12577 | 13577 | 14577 | 15577 |
| 12578 | 13578 | 14578 | 15578 |
| 12579 | 13579 | 14579 | 15579 |
| 12580 | 13580 | 14580 | 15580 |
| 12581 | 13581 | 14581 | 15581 |
| 12582 | 13582 | 14582 | 15582 |
| 12583 | 13583 | 14583 | 15583 |
| 12584 | 13584 | 14584 | 15584 |
| 12585 | 13585 | 14585 | 15585 |
| 12586 | 13586 | 14586 | 15586 |
| 12587 | 13587 | 14587 | 15587 |
| 12588 | 13588 | 14588 | 15588 |
| 12589 | 13589 | 14589 | 15589 |
| 12590 | 13590 | 14590 | 15590 |
| 12591 | 13591 | 14591 | 15591 |
| 12592 | 13592 | 14592 | 15592 |
| 12593 | 13593 | 14593 | 15593 |
| 12594 | 13594 | 14594 | 15594 |
| 12595 | 13595 | 14595 | 15595 |
| 12596 | 13596 | 14596 | 15596 |
| 12597 | 13597 | 14597 | 15597 |
| 12598 | 13598 | 14598 | 15598 |
| 12599 | 13599 | 14599 | 15599 |
| 12600 | 13600 | 14600 | 15600 |
| 12601 | 13601 | 14601 | 15601 |
| 12602 | 13602 | 14602 | 15602 |
| 12603 | 13603 | 14603 | 15603 |
| 12604 | 13604 | 14604 | 15604 |
| 12605 | 13605 | 14605 | 15605 |
| 12606 | 13606 | 14606 | 15606 |
| 12607 | 13607 | 14607 | 15607 |
| 12608 | 13608 | 14608 | 15608 |
| 12609 | 13609 | 14609 | 15609 |
| 12610 | 13610 | 14610 | 15610 |
| 12611 | 13611 | 14611 | 15611 |
| 12612 | 13612 | 14612 | 15612 |
| 12613 | 13613 | 14613 | 15613 |
| 12614 | 13614 | 14614 | 15614 |
| 12615 | 13615 | 14615 | 15615 |
| 12616 | 13616 | 14616 | 15616 |
| 12617 | 13617 | 14617 | 15617 |
| 12618 | 13618 | 14618 | 15618 |
| 12619 | 13619 | 14619 | 15619 |
| 12620 | 13620 | 14620 | 15620 |
| 12621 | 13621 | 14621 | 15621 |
| 12622 | 13622 | 14622 | 15622 |
| 12623 | 13623 | 14623 | 15623 |
| 12624 | 13624 | 14624 | 15624 |
| 12625 | 13625 | 14625 | 15625 |
| 12626 | 13626 | 14626 | 15626 |
| 12627 | 13627 | 14627 | 15627 |
| 12628 | 13628 | 14628 | 15628 |
| 12629 | 13629 | 14629 | 15629 |
| 12630 | 13630 | 14630 | 15630 |
| 12631 | 13631 | 14631 | 15631 |
| 12632 | 13632 | 14632 | 15632 |
| 12633 | 13633 | 14633 | 15633 |
| 12634 | 13634 | 14634 | 15634 |
| 12635 | 13635 | 14635 | 15635 |
| 12636 | 13636 | 14636 | 15636 |
| 12637 | 13637 | 14637 | 15637 |
| 12638 | 13638 | 14638 | 15638 |
| 12639 | 13639 | 14639 | 15639 |
| 12640 | 13640 | 14640 | 15640 |
| 12641 | 13641 | 14641 | 15641 |
| 12642 | 13642 | 14642 | 15642 |
| 12643 | 13643 | 14643 | 15643 |
| 12644 | 13644 | 14644 | 15644 |
| 12645 | 13645 | 14645 | 15645 |
| 12646 | 13646 | 14646 | 15646 |
| 12647 | 13647 | 14647 | 15647 |
| 12648 | 13648 | 14648 | 15648 |
| 12649 | 13649 | 14649 | 15649 |
| 12650 | 13650 | 14650 | 15650 |
| 12651 | 13651 | 14651 | 15651 |
| 12652 | 13652 | 14652 | 15652 |
| 12653 | 13653 | 14653 | 15653 |
| 12654 | 13654 | 14654 | 15654 |
| 12655 | 13655 | 14655 | 15655 |
| 12656 | 13656 | 14656 | 15656 |
| 12657 | 13657 | 14657 | 15657 |
| 12658 | 13658 | 14658 | 15658 |
| 12659 | 13659 | 14659 | 15659 |
| 12660 | 13660 | 14660 | 15660 |
| 12661 | 13661 | 14661 | 15661 |
| 12662 | 13662 | 14662 | 15662 |
| 12663 | 13663 | 14663 | 15663 |
| 12664 | 13664 | 14664 | 15664 |
| 12665 | 13665 | 14665 | 15665 |
| 12666 | 13666 | 14666 | 15666 |
| 12667 | 13667 | 14667 | 15667 |
| 12668 | 13668 | 14668 | 15668 |
| 12669 | 13669 | 14669 | 15669 |
| 12670 | 13670 | 14670 | 15670 |
| 12671 | 13671 | 14671 | 15671 |
| 12672 | 13672 | 14672 | 15672 |
| 12673 | 13673 | 14673 | 15673 |
| 12674 | 13674 | 14674 | 15674 |
| 12675 | 13675 | 14675 | 15675 |
| 12676 | 13676 | 14676 | 15676 |
| 12677 | 13677 | 14677 | 15677 |
| 12678 | 13678 | 14678 | 15678 |
| 12679 | 13679 | 14679 | 15679 |
| 12680 | 13680 | 14680 | 15680 |
| 12681 | 13681 | 14681 | 15681 |
| 12682 | 13682 | 14682 | 15682 |
| 12683 | 13683 | 14683 | 15683 |
| 12684 | 13684 | 14684 | 15684 |
| 12685 | 13685 | 14685 | 15685 |
| 12686 | 13686 | 14686 | 15686 |
| 12687 | 13687 | 14687 | 15687 |
| 12688 | 13688 | 14688 | 15688 |
| 12689 | 13689 | 14689 | 15689 |
| 12690 | 13690 | 14690 | 15690 |
| 12691 | 13691 | 14691 | 15691 |
| 12692 | 13692 | 14692 | 15692 |
| 12693 | 13693 | 14693 | 15693 |
| 12694 | 13694 | 14694 | 15694 |
| 12695 | 13695 | 14695 | 15695 |
| 12696 | 13696 | 14696 | 15696 |
| 12697 | 13697 | 14697 | 15697 |
| 12698 | 13698 | 14698 | 15698 |
| 12699 | 13699 | 14699 | 15699 |
| 12700 | 13700 | 14700 | 15700 |
| 12701 | 13701 | 14701 | 15701 |
| 12702 | 13702 | 14702 | 15702 |
| 12703 | 13703 | 14703 | 15703 |
| 12704 | 13704 | 14704 | 15704 |
| 12705 | 13705 | 14705 | 15705 |
| 12706 | 13706 | 14706 | 15706 |
| 12707 | 13707 | 14707 | 15707 |
| 12708 | 13708 | 14708 | 15708 |
| 12709 | 13709 | 14709 | 15709 |
| 12710 | 13710 | 14710 | 15710 |
| 12711 | 13711 | 14711 | 15711 |
| 12712 | 13712 | 14712 | 15712 |
| 12713 | 13713 | 14713 | 15713 |
| 12714 | 13714 | 14714 | 15714 |
| 12715 | 13715 | 14715 | 15715 |
| 12716 | 13716 | 14716 | 15716 |
| 12717 | 13717 | 14717 | 15717 |
| 12718 | 13718 | 14718 | 15718 |
| 12719 | 13719 | 14719 | 15719 |
| 12720 | 13720 | 14720 | 15720 |
| 12721 | 13721 | 14721 | 15721 |
| 12722 | 13722 | 14722 | 15722 |
| 12723 | 13723 | 14723 | 15723 |
| 12724 | 13724 | 14724 | 15724 |
| 12725 | 13725 | 14725 | 15725 |
| 12726 | 13726 | 14726 | 15726 |
| 12727 | 13727 | 14727 | 15727 |
| 12728 | 13728 | 14728 | 15728 |
| 12729 | 13729 | 14729 | 15729 |
| 12730 | 13730 | 14730 | 15730 |
| 12731 | 13731 | 14731 | 15731 |
| 12732 | 13732 | 14732 | 15732 |
| 12733 | 13733 | 14733 | 15733 |
| 12734 | 13734 | 14734 | 15734 |
| 12735 | 13735 | 14735 | 15735 |
| 12736 | 13736 | 14736 | 15736 |
| 12737 | 13737 | 14737 | 15737 |
| 12738 | 13738 | 14738 | 15738 |
| 12739 | 13739 | 14739 | 15739 |
| 12740 | 13740 | 14740 | 15740 |
| 12741 | 13741 | 14741 | 15741 |
| 12742 | 13742 | 14742 | 15742 |
| 12743 | 13743 | 14743 | 15743 |
| 12744 | 13744 | 14744 | 15744 |
| 12745 | 13745 | 14745 | 15745 |
| 12746 | 13746 | 14746 | 15746 |
| 12747 | 13747 | 14747 | 15747 |
| 12748 | 13748 | 14748 | 15748 |
| 12749 | 13749 | 14749 | 15749 |
| 12750 | 13750 | 14750 | 15750 |
| 12751 | 13751 | 14751 | 15751 |
| 12752 | 13752 | 14752 | 15752 |
| 12753 | 13753 | 14753 | 15753 |
| 12754 | 13754 | 14754 | 15754 |
| 12755 | 13755 | 14755 | 15755 |
| 12756 | 13756 | 14756 | 15756 |
| 12757 | 13757 | 14757 | 15757 |
| 12758 | 13758 | 14758 | 15758 |
| 12759 | 13759 | 14759 | 15759 |
| 12760 | 13760 | 14760 | 15760 |
| 12761 | 13761 | 14761 | 15761 |
| 12762 | 13762 | 14762 | 15762 |
| 12763 | 13763 | 14763 | 15763 |
| 12764 | 13764 | 14764 | 15764 |
| 12765 | 13765 | 14765 | 15765 |
| 12766 | 13766 | 14766 | 15766 |
| 12767 | 13767 | 14767 | 15767 |
| 12768 | 13768 | 14768 | 15768 |
| 12769 | 13769 | 14769 | 15769 |
| 12770 | 13770 | 14770 | 15770 |
| 12771 | 13771 | 14771 | 15771 |
| 12772 | 13772 | 14772 | 15772 |
| 12773 | 13773 | 14773 | 15773 |
| 12774 | 13774 | 14774 | 15774 |
| 12775 | 13775 | 14775 | 15775 |
| 12776 | 13776 | 14776 | 15776 |
| 12777 | 13777 | 14777 | 15777 |
| 12778 | 13778 | 14778 | 15778 |
| 12779 | 13779 | 14779 | 15779 |
| 12780 | 13780 | 14780 | 15780 |
| 12781 | 13781 | 14781 | 15781 |
| 12782 | 13782 | 14782 | 15782 |
| 12783 | 13783 | 14783 | 15783 |
| 12784 | 13784 | 14784 | 15784 |
| 12785 | 13785 | 14785 | 15785 |
| 12786 | 13786 | 14786 | 15786 |
| 12787 | 13787 | 14787 | 15787 |
| 12788 | 13788 | 14788 | 15788 |
| 12789 | 13789 | 14789 | 15789 |
| 12790 | 13790 | 14790 | 15790 |
| 12791 | 13791 | 14791 | 15791 |
| 12792 | 13792 | 14792 | 15792 |
| 12793 | 13793 | 14793 | 15793 |
| 12794 | 13794 | 14794 | 15794 |
| 12795 | 13795 | 14795 | 15795 |
| 12796 | 13796 | 14796 | 15796 |
| 12797 | 13797 | 14797 | 15797 |
| 12798 | 13798 | 14798 | 15798 |
| 12799 | 13799 | 14799 | 15799 |
| 12800 | 13800 | 14800 | 15800 |
| 12801 | 13801 | 14801 | 15801 |
| 12802 | 13802 | 14802 | 15802 |
| 12803 | 13803 | 14803 | 15803 |
| 12804 | 13804 | 14804 | 15804 |
| 12805 | 13805 | 14805 | 15805 |
| 12806 | 13806 | 14806 | 15806 |
| 12807 | 13807 | 14807 | 15807 |
| 12808 | 13808 | 14808 | 15808 |
| 12809 | 13809 | 14809 | 15809 |
| 12810 | 13810 | 14810 | 15810 |
| 12811 | 13811 | 14811 | 15811 |
| 12812 | 13812 | 14812 | 15812 |
| 12813 | 13813 | 14813 | 15813 |
| 12814 | 13814 | 14814 | 15814 |
| 12815 | 13815 | 14815 | 15815 |
| 12816 | 13816 | 14816 | 15816 |
| 12817 | 13817 | 14817 | 15817 |
| 12818 | 13818 | 14818 | 15818 |
| 12819 | 13819 | 14819 | 15819 |
| 12820 | 13820 | 14820 | 15820 |
| 12821 | 13821 | 14821 | 15821 |
| 12822 | 13822 | 14822 | 15822 |
| 12823 | 13823 | 14823 | 15823 |
| 12824 | 13824 | 14824 | 15824 |
| 12825 | 13825 | 14825 | 15825 |
| 12826 | 13826 | 14826 | 15826 |
| 12827 | 13827 | 14827 | 15827 |
| 12828 | 13828 | 14828 | 15828 |
| 12829 | 13829 | 14829 | 15829 |
| 12830 | 13830 | 14830 | 15830 |
| 12831 | 13831 | 14831 | 15831 |
| 12832 | 13832 | 14832 | 15832 |
| 12833 | 13833 | 14833 | 15833 |
| 12834 | 13834 | 14834 | 15834 |
| 12835 | 13835 | 14835 | 15835 |
| 12836 | 13836 | 14836 | 15836 |
| 12837 | 13837 | 14837 | 15837 |
| 12838 | 13838 | 14838 | 15838 |
| 12839 | 13839 | 14839 | 15839 |
| 12840 | 13840 | 14840 | 15840 |
| 12841 | 13841 | 14841 | 15841 |
| 12842 | 13842 | 14842 | 15842 |
| 12843 | 13843 | 14843 | 15843 |
| 12844 | 13844 | 14844 | 15844 |
| 12845 | 13845 | 14845 | 15845 |
| 12846 | 13846 | 14846 | 15846 |
| 12847 | 13847 | 14847 | 15847 |
| 12848 | 13848 | 14848 | 15848 |
| 12849 | 13849 | 14849 | 15849 |
| 12850 | 13850 | 14850 | 15850 |
| 12851 | 13851 | 14851 | 15851 |
| 12852 | 13852 | 14852 | 15852 |
| 12853 | 13853 | 14853 | 15853 |
| 12854 | 13854 | 14854 | 15854 |
| 12855 | 13855 | 14855 | 15855 |
| 12856 | 13856 | 14856 | 15856 |
| 12857 | 13857 | 14857 | 15857 |
| 12858 | 13858 | 14858 | 15858 |
| 12859 | 13859 | 14859 | 15859 |
| 12860 | 13860 | 14860 | 15860 |
| 12861 | 13861 | 14861 | 15861 |
| 12862 | 13862 | 14862 | 15862 |
| 12863 | 13863 | 14863 | 15863 |
| 12864 | 13864 | 14864 | 15864 |
| 12865 | 13865 | 14865 | 15865 |
| 12866 | 13866 | 14866 | 15866 |
| 12867 | 13867 | 14867 | 15867 |
| 12868 | 13868 | 14868 | 15868 |
| 12869 | 13869 | 14869 | 15869 |
| 12870 | 13870 | 14870 | 15870 |
| 12871 | 13871 | 14871 | 15871 |
| 12872 | 13872 | 14872 | 15872 |
| 12873 | 13873 | 14873 | 15873 |
| 12874 | 13874 | 14874 | 15874 |
| 12875 | 13875 | 14875 | 15875 |
| 12876 | 13876 | 14876 | 15876 |
| 12877 | 13877 | 14877 | 15877 |
| 12878 | 13878 | 14878 | 15878 |
| 12879 | 13879 | 14879 | 15879 |
| 12880 | 13880 | 14880 | 15880 |
| 12881 | 13881 | 14881 | 15881 |
| 12882 | 13882 | 14882 | 15882 |
| 12883 | 13883 | 14883 | 15883 |
| 12884 | 13884 | 14884 | 15884 |
| 12885 | 13885 | 14885 | 15885 |
| 12886 | 13886 | 14886 | 15886 |
| 12887 | 13887 | 14887 | 15887 |
| 12888 | 13888 | 14888 | 15888 |
| 12889 | 13889 | 14889 | 15889 |
| 12890 | 13890 | 14890 | 15890 |
| 12891 | 13891 | 14891 | 15891 |
| 12892 | 13892 | 14892 | 15892 |
| 12893 | 13893 | 14893 | 15893 |
| 12894 | 13894 | 14894 | 15894 |
| 12895 | 13895 | 14895 | 15895 |
| 12896 | 13896 | 14896 | 15896 |
| 12897 | 13897 | 14897 | 15897 |
| 12898 | 13898 | 14898 | 15898 |
| 12899 | 13899 | 14899 | 15899 |
| 12900 | 13900 | 14900 | 15900 |
| 12901 | 13901 | 14901 | 15901 |
| 12902 | 13902 | 14902 | 15902 |
| 12903 | 13903 | 14903 | 15903 |
| 12904 | 13904 | 14904 | 15904 |
| 12905 | 13905 | 14905 | 15905 |
| 12906 | 13906 | 14906 | 15906 |
| 12907 | 13907 | 14907 | 15907 |
| 12908 | 13908 | 14908 | 15908 |
| 12909 | 13909 | 14909 | 15909 |
| 12910 | 13910 | 14910 | 15910 |
| 12911 | 13911 | 14911 | 15911 |
| 12912 | 13912 | 14912 | 15912 |
| 12913 | 13913 | 14913 | 15913 |
| 12914 | 13914 | 14914 | 15914 |
| 12915 | 13915 | 14915 | 15915 |
| 12916 | 13916 | 14916 | 15916 |
| 12917 | 13917 | 14917 | 15917 |
| 12918 | 13918 | 14918 | 15918 |
| 12919 | 13919 | 14919 | 15919 |
| 12920 | 13920 | 14920 | 15920 |
| 12921 | 13921 | 14921 | 15921 |
| 12922 | 13922 | 14922 | 15922 |
| 12923 | 13923 | 14923 | 15923 |
| 12924 | 13924 | 14924 | 15924 |
| 12925 | 13925 | 14925 | 15925 |
| 12926 | 13926 | 14926 | 15926 |
| 12927 | 13927 | 14927 | 15927 |
| 12928 | 13928 | 14928 | 15928 |
| 12929 | 13929 | 14929 | 15929 |
| 12930 | 13930 | 14930 | 15930 |
| 12931 | 13931 | 14931 | 15931 |
| 12932 | 13932 | 14932 | 15932 |
| 12933 | 13933 | 14933 | 15933 |
| 12934 | 13934 | 14934 | 15934 |
| 12935 | 13935 | 14935 | 15935 |
| 12936 | 13936 | 14936 | 15936 |
| 12937 | 13937 | 14937 | 15937 |
| 12938 | 13938 | 14938 | 15938 |
| 12939 | 13939 | 14939 | 15939 |
| 12940 | 13940 | 14940 | 15940 |
| 12941 | 13941 | 14941 | 15941 |
| 12942 | 13942 | 14942 | 15942 |
| 12943 | 13943 | 14943 | 15943 |
| 12944 | 13944 | 14944 | 15944 |
| 12945 | 13945 | 14945 | 15945 |
| 12946 | 13946 | 14946 | 15946 |
| 12947 | 13947 | 14947 | 15947 |
| 12948 | 13948 | 14948 | 15948 |
| 12949 | 13949 | 14949 | 15949 |
| 12950 | 13950 | 14950 | 15950 |
| 12951 | 13951 | 14951 | 15951 |
| 12952 | 13952 | 14952 | 15952 |
| 12953 | 13953 | 14953 | 15953 |
| 12954 | 13954 | 14954 | 15954 |
| 12955 | 13955 | 14955 | 15955 |
| 12956 | 13956 | 14956 | 15956 |
| 12957 | 13957 | 14957 | 15957 |
| 12958 | 13958 | 14958 | 15958 |
| 12959 | 13959 | 14959 | 15959 |
| 12960 | 13960 | 14960 | 15960 |
| 12961 | 13961 | 14961 | 15961 |
| 12962 | 13962 | 14962 | 15962 |
| 12963 | 13963 | 14963 | 15963 |
| 12964 | 13964 | 14964 | 15964 |
| 12965 | 13965 | 14965 | 15965 |
| 12966 | 13966 | 14966 | 15966 |
| 12967 | 13967 | 14967 | 15967 |
| 12968 | 13968 | 14968 | 15968 |
| 12969 | 13969 | 14969 | 15969 |
| 12970 | 13970 | 14970 | 15970 |
| 12971 | 13971 | 14971 | 15971 |
| 12972 | 13972 | 14972 | 15972 |
| 12973 | 13973 | 14973 | 15973 |
| 12974 | 13974 | 14974 | 15974 |
| 12975 | 13975 | 14975 | 15975 |
| 12976 | 13976 | 14976 | 15976 |
| 12977 | 13977 | 14977 | 15977 |
| 12978 | 13978 | 14978 | 15978 |
| 12979 | 13979 | 14979 | 15979 |
| 12980 | 13980 | 14980 | 15980 |
| 12981 | 13981 | 14981 | 15981 |
| 12982 | 13982 | 14982 | 15982 |
| 12983 | 13983 | 14983 | 15983 |
| 12984 | 13984 | 14984 | 15984 |
| 12985 | 13985 | 14985 | 15985 |
| 12986 | 13986 | 14986 | 15986 |
| 12987 | 13987 | 14987 | 15987 |
| 12988 | 13988 | 14988 | 15988 |
| 12989 | 13989 | 14989 | 15989 |
| 12990 | 13990 | 14990 | 15990 |
| 12991 | 13991 | 14991 | 15991 |
| 12992 | 13992 | 14992 | 15992 |
| 12993 | 13993 | 14993 | 15993 |
| 12994 | 13994 | 14994 | 15994 |
| 12995 | 13995 | 14995 | 15995 |
| 12996 | 13996 | 14996 | 15996 |
| 12997 | 13997 | 14997 | 15997 |
| 12998 | 13998 | 14998 | 15998 |
| 12999 | 13999 | 14999 | 15999 |
| 13000 | 14000 | 15000 | 16000 |
| 13001 | 14001 | 15001 | 16001 |
| 13002 | 14002 | 15002 | 16002 |

[0131] In some embodiments, the sequences that specifically bind to hazelnut comprise an inner sequence selected from the group consisting of the nucleic acid sequences of SEQ ID NOs. 16003 to 17002. In some examples, a short nucleic acid sequence may be affixed to the 5-end of the inner sequence. The short nucleic acid sequence may be the 5′ primer sequence used in the random ssDNA library, i.e. the nucleic acid sequence of SEQ ID NO. 1. Accordingly, the aptamer that specifically binds to hazel nut may comprise a nucleic acid sequence selected from the group consisting of SEQ ID NOs. 17003 to 18002. In other examples, a short nucleic acid sequence may be affixed to the 3-end of the inner sequence. The short nucleic acid sequence may be the 3′ primer sequence used in the random ssDNA library, i.e. the nucleic acid sequence of SEQ ID NO. 2. Accordingly, the aptamer that specifically binds to hazel nut may comprise a nucleic acid sequence selected from the group consisting of SEQ ID NOs. 18003 to 19002. In other examples, the inner sequence may comprise a 5′ end short sequence (i.e., SEQ ID NO. 1) and a 3′ end short sequence (i.e., SEQ ID NO. 2). Accordingly, the aptamer that specifically binds to hazel nut may comprise a nucleic acid sequence selected from the group consisting of SEQ ID NOs. 19003 to 20002. In one embodiment, the aptamer of the present disclosure that specifically binds to hazelnut may comprise a nucleic acid sequence selected from the group consisting of SEQ ID NOs. 16003 to 20002 listed in Table 6, or variant thereof.

TABLE 6
Aptamer sequences against hazel nut
Aptamer sequence

| | | | 5′-sequence |
|---|---|---|---|
| | 5′-sequence | Inner | and inner |
| Inner | and inner | sequence and | sequence and |
| sequence | sequence | 3′-sequence | 3′-sequence |
| (SEQ ID NO.) | (SEQ ID NO.) | (SEQ ID NO.) | (SEQ ID NO.) |
| 16003 | 17003 | 18003 | 19003 |
| 16004 | 17004 | 18004 | 19004 |
| 16005 | 17005 | 18005 | 19005 |
| 16006 | 17006 | 18006 | 19006 |
| 16007 | 17007 | 18007 | 19007 |
| 16008 | 17008 | 18008 | 19008 |
| 16009 | 17009 | 18009 | 19009 |
| 16010 | 17010 | 18010 | 19010 |
| 16011 | 17011 | 18011 | 19011 |
| 16012 | 17012 | 18012 | 19012 |
| 16013 | 17013 | 18013 | 19013 |
| 16014 | 17014 | 18014 | 19014 |
| 16015 | 17015 | 18015 | 19015 |
| 16016 | 17016 | 18016 | 19016 |
| 16017 | 17017 | 18017 | 19017 |
| 16018 | 17018 | 18018 | 19018 |
| 16019 | 17019 | 18019 | 19019 |
| 16020 | 17020 | 18020 | 19020 |
| 16021 | 17021 | 18021 | 19021 |
| 16022 | 17022 | 18022 | 19022 |
| 16023 | 17023 | 18023 | 19023 |
| 16024 | 17024 | 18024 | 19024 |
| 16025 | 17025 | 18025 | 19025 |
| 16026 | 17026 | 18026 | 19026 |
| 16027 | 17027 | 18027 | 19027 |
| 16028 | 17028 | 18028 | 19028 |
| 16029 | 17029 | 18029 | 19029 |
| 16030 | 17030 | 18030 | 19030 |
| 16031 | 17031 | 18031 | 19031 |
| 16032 | 17032 | 18032 | 19032 |
| 16033 | 17033 | 18033 | 19033 |
| 16034 | 17034 | 18034 | 19034 |
| 16035 | 17035 | 18035 | 19035 |
| 16036 | 17036 | 18036 | 19036 |
| 16037 | 17037 | 18037 | 19037 |
| 16038 | 17038 | 18038 | 19038 |
| 16039 | 17039 | 18039 | 19039 |
| 16040 | 17040 | 18040 | 19040 |
| 16041 | 17041 | 18041 | 19041 |
| 16042 | 17042 | 18042 | 19042 |
| 16043 | 17043 | 18043 | 19043 |
| 16044 | 17044 | 18044 | 19044 |
| 16045 | 17045 | 18045 | 19045 |
| 16046 | 17046 | 18046 | 19046 |
| 16047 | 17047 | 18047 | 19047 |
| 16048 | 17048 | 18048 | 19048 |
| 16049 | 17049 | 18049 | 19049 |
| 16050 | 17050 | 18050 | 19050 |
| 16051 | 17051 | 18051 | 19051 |
| 16052 | 17052 | 18052 | 19052 |
| 16053 | 17053 | 18053 | 19053 |
| 16054 | 17054 | 18054 | 19054 |
| 16055 | 17055 | 18055 | 19055 |
| 16056 | 17056 | 18056 | 19056 |
| 16057 | 17057 | 18057 | 19057 |
| 16058 | 17058 | 18058 | 19058 |
| 16059 | 17059 | 18059 | 19059 |
| 16060 | 17060 | 18060 | 19060 |
| 16061 | 17061 | 18061 | 19061 |
| 16062 | 17062 | 18062 | 19062 |
| 16063 | 17063 | 18063 | 19063 |
| 16064 | 17064 | 18064 | 19064 |
| 16065 | 17065 | 18065 | 19065 |
| 16066 | 17066 | 18066 | 19066 |
| 16067 | 17067 | 18067 | 19067 |
| 16068 | 17068 | 18068 | 19068 |
| 16069 | 17069 | 18069 | 19069 |
| 16070 | 17070 | 18070 | 19070 |
| 16071 | 17071 | 18071 | 19071 |
| 16072 | 17072 | 18072 | 19072 |
| 16073 | 17073 | 18073 | 19073 |
| 16074 | 17074 | 18074 | 19074 |
| 16075 | 17075 | 18075 | 19075 |
| 16076 | 17076 | 18076 | 19076 |
| 16077 | 17077 | 18077 | 19077 |
| 16078 | 17078 | 18078 | 19078 |
| 16079 | 17079 | 18079 | 19079 |
| 16080 | 17080 | 18080 | 19080 |
| 16081 | 17081 | 18081 | 19081 |
| 16082 | 17082 | 18082 | 19082 |
| 16083 | 17083 | 18083 | 19083 |
| 16084 | 17084 | 18084 | 19084 |
| 16085 | 17085 | 18085 | 19085 |
| 16086 | 17086 | 18086 | 19086 |
| 16087 | 17087 | 18087 | 19087 |
| 16088 | 17088 | 18088 | 19088 |
| 16089 | 17089 | 18089 | 19089 |
| 16090 | 17090 | 18090 | 19090 |
| 16091 | 17091 | 18091 | 19091 |
| 16092 | 17092 | 18092 | 19092 |
| 16093 | 17093 | 18093 | 19093 |
| 16094 | 17094 | 18094 | 19094 |
| 16095 | 17095 | 18095 | 19095 |
| 16096 | 17096 | 18096 | 19096 |
| 16097 | 17097 | 18097 | 19097 |
| 16098 | 17098 | 18098 | 19098 |
| 16099 | 17099 | 18099 | 19099 |
| 16100 | 17100 | 18100 | 19100 |
| 16101 | 17101 | 18101 | 19101 |
| 16102 | 17102 | 18102 | 19102 |
| 16103 | 17103 | 18103 | 19103 |
| 16104 | 17104 | 18104 | 19104 |
| 16105 | 17105 | 18105 | 19105 |
| 16106 | 17106 | 18106 | 19106 |
| 16107 | 17107 | 18107 | 19107 |
| 16108 | 17108 | 18108 | 19108 |
| 16109 | 17109 | 18109 | 19109 |
| 16110 | 17110 | 18110 | 19110 |
| 16111 | 17111 | 18111 | 19111 |
| 16112 | 17112 | 18112 | 19112 |
| 16113 | 17113 | 18113 | 19113 |
| 16114 | 17114 | 18114 | 19114 |
| 16115 | 17115 | 18115 | 19115 |
| 16116 | 17116 | 18116 | 19116 |
| 16117 | 17117 | 18117 | 19117 |
| 16118 | 17118 | 18118 | 19118 |
| 16119 | 17119 | 18119 | 19119 |
| 16120 | 17120 | 18120 | 19120 |
| 16121 | 17121 | 18121 | 19121 |
| 16122 | 17122 | 18122 | 19122 |
| 16123 | 17123 | 18123 | 19123 |
| 16124 | 17124 | 18124 | 19124 |
| 16125 | 17125 | 18125 | 19125 |
| 16126 | 17126 | 18126 | 19126 |
| 16127 | 17127 | 18127 | 19127 |
| 16128 | 17128 | 18128 | 19128 |
| 16129 | 17129 | 18129 | 19129 |
| 16130 | 17130 | 18130 | 19130 |
| 16131 | 17131 | 18131 | 19131 |
| 16132 | 17132 | 18132 | 19132 |
| 16133 | 17133 | 18133 | 19133 |
| 16134 | 17134 | 18134 | 19134 |
| 16135 | 17135 | 18135 | 19135 |
| 16136 | 17136 | 18136 | 19136 |
| 16137 | 17137 | 18137 | 19137 |
| 16138 | 17138 | 18138 | 19138 |
| 16139 | 17139 | 18139 | 19139 |
| 16140 | 17140 | 18140 | 19140 |
| 16141 | 17141 | 18141 | 19141 |
| 16142 | 17142 | 18142 | 19142 |
| 16143 | 17143 | 18143 | 19143 |
| 16144 | 17144 | 18144 | 19144 |
| 16145 | 17145 | 18145 | 19145 |
| 16146 | 17146 | 18146 | 19146 |
| 16147 | 17147 | 18147 | 19147 |
| 16148 | 17148 | 18148 | 19148 |
| 16149 | 17149 | 18149 | 19149 |
| 16150 | 17150 | 18150 | 19150 |
| 16151 | 17151 | 18151 | 19151 |
| 16152 | 17152 | 18152 | 19152 |
| 16153 | 17153 | 18153 | 19153 |
| 16154 | 17154 | 18154 | 19154 |
| 16155 | 17155 | 18155 | 19155 |
| 16156 | 17156 | 18156 | 19156 |
| 16157 | 17157 | 18157 | 19157 |
| 16158 | 17158 | 18158 | 19158 |
| 16159 | 17159 | 18159 | 19159 |
| 16160 | 17160 | 18160 | 19160 |
| 16161 | 17161 | 18161 | 19161 |
| 16162 | 17162 | 18162 | 19162 |
| 16163 | 17163 | 18163 | 19163 |
| 16164 | 17164 | 18164 | 19164 |
| 16165 | 17165 | 18165 | 19165 |
| 16166 | 17166 | 18166 | 19166 |
| 16167 | 17167 | 18167 | 19167 |
| 16168 | 17168 | 18168 | 19168 |
| 16169 | 17169 | 18169 | 19169 |
| 16170 | 17170 | 18170 | 19170 |
| 16171 | 17171 | 18171 | 19171 |
| 16172 | 17172 | 18172 | 19172 |
| 16173 | 17173 | 18173 | 19173 |
| 16174 | 17174 | 18174 | 19174 |
| 16175 | 17175 | 18175 | 19175 |
| 16176 | 17176 | 18176 | 19176 |
| 16177 | 17177 | 18177 | 19177 |
| 16178 | 17178 | 18178 | 19178 |
| 16179 | 17179 | 18179 | 19179 |
| 16180 | 17180 | 18180 | 19180 |
| 16181 | 17181 | 18181 | 19181 |
| 16182 | 17182 | 18182 | 19182 |
| 16183 | 17183 | 18183 | 19183 |
| 16184 | 17184 | 18184 | 19184 |
| 16185 | 17185 | 18185 | 19185 |
| 16186 | 17186 | 18186 | 19186 |
| 16187 | 17187 | 18187 | 19187 |
| 16188 | 17188 | 18188 | 19188 |
| 16189 | 17189 | 18189 | 19189 |
| 16190 | 17190 | 18190 | 19190 |
| 16191 | 17191 | 18191 | 19191 |
| 16192 | 17192 | 18192 | 19192 |
| 16193 | 17193 | 18193 | 19193 |
| 16194 | 17194 | 18194 | 19194 |
| 16195 | 17195 | 18195 | 19195 |
| 16196 | 17196 | 18196 | 19196 |
| 16197 | 17197 | 18197 | 19197 |
| 16198 | 17198 | 18198 | 19198 |
| 16199 | 17199 | 18199 | 19199 |
| 16200 | 17200 | 18200 | 19200 |
| 16201 | 17201 | 18201 | 19201 |
| 16202 | 17202 | 18202 | 19202 |
| 16203 | 17203 | 18203 | 19203 |
| 16204 | 17204 | 18204 | 19204 |
| 16205 | 17205 | 18205 | 19205 |
| 16206 | 17206 | 18206 | 19206 |
| 16207 | 17207 | 18207 | 19207 |
| 16208 | 17208 | 18208 | 19208 |
| 16209 | 17209 | 18209 | 19209 |
| 16210 | 17210 | 18210 | 19210 |
| 16211 | 17211 | 18211 | 19211 |
| 16212 | 17212 | 18212 | 19212 |
| 16213 | 17213 | 18213 | 19213 |
| 16214 | 17214 | 18214 | 19214 |
| 16215 | 17215 | 18215 | 19215 |
| 16216 | 17216 | 18216 | 19216 |
| 16217 | 17217 | 18217 | 19217 |
| 16218 | 17218 | 18218 | 19218 |
| 16219 | 17219 | 18219 | 19219 |
| 16220 | 17220 | 18220 | 19220 |
| 16221 | 17221 | 18221 | 19221 |
| 16222 | 17222 | 18222 | 19222 |
| 16223 | 17223 | 18223 | 19223 |
| 16224 | 17224 | 18224 | 19224 |
| 16225 | 17225 | 18225 | 19225 |
| 16226 | 17226 | 18226 | 19226 |
| 16227 | 17227 | 18227 | 19227 |
| 16228 | 17228 | 18228 | 19228 |
| 16229 | 17229 | 18229 | 19229 |
| 16230 | 17230 | 18230 | 19230 |
| 16231 | 17231 | 18231 | 19231 |
| 16232 | 17232 | 18232 | 19232 |
| 16233 | 17233 | 18233 | 19233 |
| 16234 | 17234 | 18234 | 19234 |
| 16235 | 17235 | 18235 | 19235 |
| 16236 | 17236 | 18236 | 19236 |
| 16237 | 17237 | 18237 | 19237 |
| 16238 | 17238 | 18238 | 19238 |
| 16239 | 17239 | 18239 | 19239 |
| 16240 | 17240 | 18240 | 19240 |
| 16241 | 17241 | 18241 | 19241 |
| 16242 | 17242 | 18242 | 19242 |
| 16243 | 17243 | 18243 | 19243 |
| 16244 | 17244 | 18244 | 19244 |
| 16245 | 17245 | 18245 | 19245 |
| 16246 | 17246 | 18246 | 19246 |
| 16247 | 17247 | 18247 | 19247 |
| 16248 | 17248 | 18248 | 19248 |
| 16249 | 17249 | 18249 | 19249 |
| 16250 | 17250 | 18250 | 19250 |
| 16251 | 17251 | 18251 | 19251 |
| 16252 | 17252 | 18252 | 19252 |
| 16253 | 17253 | 18253 | 19253 |
| 16254 | 17254 | 18254 | 19254 |
| 16255 | 17255 | 18255 | 19255 |
| 16256 | 17256 | 18256 | 19256 |
| 16257 | 17257 | 18257 | 19257 |
| 16258 | 17258 | 18258 | 19258 |
| 16259 | 17259 | 18259 | 19259 |
| 16260 | 17260 | 18260 | 19260 |
| 16261 | 17261 | 18261 | 19261 |
| 16262 | 17262 | 18262 | 19262 |
| 16263 | 17263 | 18263 | 19263 |
| 16264 | 17264 | 18264 | 19264 |
| 16265 | 17265 | 18265 | 19265 |
| 16266 | 17266 | 18266 | 19266 |
| 16267 | 17267 | 18267 | 19267 |
| 16268 | 17268 | 18268 | 19268 |
| 16269 | 17269 | 18269 | 19269 |
| 16270 | 17270 | 18270 | 19270 |
| 16271 | 17271 | 18271 | 19271 |
| 16272 | 17272 | 18272 | 19272 |
| 16273 | 17273 | 18273 | 19273 |
| 16274 | 17274 | 18274 | 19274 |
| 16275 | 17275 | 18275 | 19275 |
| 16276 | 17276 | 18276 | 19276 |
| 16277 | 17277 | 18277 | 19277 |
| 16278 | 17278 | 18278 | 19278 |
| 16279 | 17279 | 18279 | 19279 |
| 16280 | 17280 | 18280 | 19280 |
| 16281 | 17281 | 18281 | 19281 |
| 16282 | 17282 | 18282 | 19282 |
| 16283 | 17283 | 18283 | 19283 |
| 16284 | 17284 | 18284 | 19284 |
| 16285 | 17285 | 18285 | 19285 |
| 16286 | 17286 | 18286 | 19286 |
| 16287 | 17287 | 18287 | 19287 |
| 16288 | 17288 | 18288 | 19288 |
| 16289 | 17289 | 18289 | 19289 |
| 16290 | 17290 | 18290 | 19290 |
| 16291 | 17291 | 18291 | 19291 |
| 16292 | 17292 | 18292 | 19292 |
| 16293 | 17293 | 18293 | 19293 |
| 16294 | 17294 | 18294 | 19294 |
| 16295 | 17295 | 18295 | 19295 |
| 16296 | 17296 | 18296 | 19296 |
| 16297 | 17297 | 18297 | 19297 |
| 16298 | 17298 | 18298 | 19298 |
| 16299 | 17299 | 18299 | 19299 |
| 16300 | 17300 | 18300 | 19300 |
| 16301 | 17301 | 18301 | 19301 |
| 16302 | 17302 | 18302 | 19302 |
| 16303 | 17303 | 18303 | 19303 |
| 16304 | 17304 | 18304 | 19304 |
| 16305 | 17305 | 18305 | 19305 |
| 16306 | 17306 | 18306 | 19306 |
| 16307 | 17307 | 18307 | 19307 |
| 16308 | 17308 | 18308 | 19308 |
| 16309 | 17309 | 18309 | 19309 |
| 16310 | 17310 | 18310 | 19310 |
| 16311 | 17311 | 18311 | 19311 |
| 16312 | 17312 | 18312 | 19312 |
| 16313 | 17313 | 18313 | 19313 |
| 16314 | 17314 | 18314 | 19314 |
| 16315 | 17315 | 18315 | 19315 |
| 16316 | 17316 | 18316 | 19316 |
| 16317 | 17317 | 18317 | 19317 |
| 16318 | 17318 | 18318 | 19318 |
| 16319 | 17319 | 18319 | 19319 |
| 16320 | 17320 | 18320 | 19320 |
| 16321 | 17321 | 18321 | 19321 |
| 16322 | 17322 | 18322 | 19322 |
| 16323 | 17323 | 18323 | 19323 |
| 16324 | 17324 | 18324 | 19324 |
| 16325 | 17325 | 18325 | 19325 |
| 16326 | 17326 | 18326 | 19326 |
| 16327 | 17327 | 18327 | 19327 |
| 16328 | 17328 | 18328 | 19328 |
| 16329 | 17329 | 18329 | 19329 |
| 16330 | 17330 | 18330 | 19330 |
| 16331 | 17331 | 18331 | 19331 |
| 16332 | 17332 | 18332 | 19332 |
| 16333 | 17333 | 18333 | 19333 |
| 16334 | 17334 | 18334 | 19334 |
| 16335 | 17335 | 18335 | 19335 |
| 16336 | 17336 | 18336 | 19336 |
| 16337 | 17337 | 18337 | 19337 |
| 16338 | 17338 | 18338 | 19338 |
| 16339 | 17339 | 18339 | 19339 |
| 16340 | 17340 | 18340 | 19340 |
| 16341 | 17341 | 18341 | 19341 |
| 16342 | 17342 | 18342 | 19342 |
| 16343 | 17343 | 18343 | 19343 |
| 16344 | 17344 | 18344 | 19344 |
| 16345 | 17345 | 18345 | 19345 |
| 16346 | 17346 | 18346 | 19346 |
| 16347 | 17347 | 18347 | 19347 |
| 16348 | 17348 | 18348 | 19348 |
| 16349 | 17349 | 18349 | 19349 |
| 16350 | 17350 | 18350 | 19350 |
| 16351 | 17351 | 18351 | 19351 |
| 16352 | 17352 | 18352 | 19352 |
| 16353 | 17353 | 18353 | 19353 |
| 16354 | 17354 | 18354 | 19354 |
| 16355 | 17355 | 18355 | 19355 |
| 16356 | 17356 | 18356 | 19356 |
| 16357 | 17357 | 18357 | 19357 |
| 16358 | 17358 | 18358 | 19358 |
| 16359 | 17359 | 18359 | 19359 |
| 16360 | 17360 | 18360 | 19360 |
| 16361 | 17361 | 18361 | 19361 |
| 16362 | 17362 | 18362 | 19362 |
| 16363 | 17363 | 18363 | 19363 |
| 16364 | 17364 | 18364 | 19364 |
| 16365 | 17365 | 18365 | 19365 |
| 16366 | 17366 | 18366 | 19366 |
| 16367 | 17367 | 18367 | 19367 |
| 16368 | 17368 | 18368 | 19368 |
| 16369 | 17369 | 18369 | 19369 |
| 16370 | 17370 | 18370 | 19370 |
| 16371 | 17371 | 18371 | 19371 |
| 16372 | 17372 | 18372 | 19372 |
| 16373 | 17373 | 18373 | 19373 |
| 16374 | 17374 | 18374 | 19374 |
| 16375 | 17375 | 18375 | 19375 |
| 16376 | 17376 | 18376 | 19376 |
| 16377 | 17377 | 18377 | 19377 |
| 16378 | 17378 | 18378 | 19378 |
| 16379 | 17379 | 18379 | 19379 |
| 16380 | 17380 | 18380 | 19380 |
| 16381 | 17381 | 18381 | 19381 |
| 16382 | 17382 | 18382 | 19382 |
| 16383 | 17383 | 18383 | 19383 |
| 16384 | 17384 | 18384 | 19384 |
| 16385 | 17385 | 18385 | 19385 |
| 16386 | 17386 | 18386 | 19386 |
| 16387 | 17387 | 18387 | 19387 |
| 16388 | 17388 | 18388 | 19388 |
| 16389 | 17389 | 18389 | 19389 |
| 16390 | 17390 | 18390 | 19390 |
| 16391 | 17391 | 18391 | 19391 |
| 16392 | 17392 | 18392 | 19392 |
| 16393 | 17393 | 18393 | 19393 |
| 16394 | 17394 | 18394 | 19394 |
| 16395 | 17395 | 18395 | 19395 |
| 16396 | 17396 | 18396 | 19396 |
| 16397 | 17397 | 18397 | 19397 |
| 16398 | 17398 | 18398 | 19398 |
| 16399 | 17399 | 18399 | 19399 |
| 16400 | 17400 | 18400 | 19400 |
| 16401 | 17401 | 18401 | 19401 |
| 16402 | 17402 | 18402 | 19402 |
| 16403 | 17403 | 18403 | 19403 |
| 16404 | 17404 | 18404 | 19404 |
| 16405 | 17405 | 18405 | 19405 |
| 16406 | 17406 | 18406 | 19406 |
| 16407 | 17407 | 18407 | 19407 |
| 16408 | 17408 | 18408 | 19408 |
| 16409 | 17409 | 18409 | 19409 |
| 16410 | 17410 | 18410 | 19410 |
| 16411 | 17411 | 18411 | 19411 |
| 16412 | 17412 | 18412 | 19412 |
| 16413 | 17413 | 18413 | 19413 |
| 16414 | 17414 | 18414 | 19414 |
| 16415 | 17415 | 18415 | 19415 |
| 16416 | 17416 | 18416 | 19416 |
| 16417 | 17417 | 18417 | 19417 |
| 16418 | 17418 | 18418 | 19418 |
| 16419 | 17419 | 18419 | 19419 |
| 16420 | 17420 | 18420 | 19420 |
| 16421 | 17421 | 18421 | 19421 |
| 16422 | 17422 | 18422 | 19422 |
| 16423 | 17423 | 18423 | 19423 |
| 16424 | 17424 | 18424 | 19424 |
| 16425 | 17425 | 18425 | 19425 |
| 16426 | 17426 | 18426 | 19426 |
| 16427 | 17427 | 18427 | 19427 |
| 16428 | 17428 | 18428 | 19428 |
| 16429 | 17429 | 18429 | 19429 |
| 16430 | 17430 | 18430 | 19430 |
| 16431 | 17431 | 18431 | 19431 |
| 16432 | 17432 | 18432 | 19432 |
| 16433 | 17433 | 18433 | 19433 |
| 16434 | 17434 | 18434 | 19434 |
| 16435 | 17435 | 18435 | 19435 |
| 16436 | 17436 | 18436 | 19436 |
| 16437 | 17437 | 18437 | 19437 |
| 16438 | 17438 | 18438 | 19438 |
| 16439 | 17439 | 18439 | 19439 |
| 16440 | 17440 | 18440 | 19440 |
| 16441 | 17441 | 18441 | 19441 |
| 16442 | 17442 | 18442 | 19442 |
| 16443 | 17443 | 18443 | 19443 |
| 16444 | 17444 | 18444 | 19444 |
| 16445 | 17445 | 18445 | 19445 |
| 16446 | 17446 | 18446 | 19446 |
| 16447 | 17447 | 18447 | 19447 |
| 16448 | 17448 | 18448 | 19448 |
| 16449 | 17449 | 18449 | 19449 |
| 16450 | 17450 | 18450 | 19450 |
| 16451 | 17451 | 18451 | 19451 |
| 16452 | 17452 | 18452 | 19452 |
| 16453 | 17453 | 18453 | 19453 |
| 16454 | 17454 | 18454 | 19454 |
| 16455 | 17455 | 18455 | 19455 |
| 16456 | 17456 | 18456 | 19456 |
| 16457 | 17457 | 18457 | 19457 |
| 16458 | 17458 | 18458 | 19458 |
| 16459 | 17459 | 18459 | 19459 |
| 16460 | 17460 | 18460 | 19460 |
| 16461 | 17461 | 18461 | 19461 |
| 16462 | 17462 | 18462 | 19462 |
| 16463 | 17463 | 18463 | 19463 |
| 16464 | 17464 | 18464 | 19464 |
| 16465 | 17465 | 18465 | 19465 |
| 16466 | 17466 | 18466 | 19466 |
| 16467 | 17467 | 18467 | 19467 |
| 16468 | 17468 | 18468 | 19468 |
| 16469 | 17469 | 18469 | 19469 |
| 16470 | 17470 | 18470 | 19470 |
| 16471 | 17471 | 18471 | 19471 |
| 16472 | 17472 | 18472 | 19472 |
| 16473 | 17473 | 18473 | 19473 |
| 16474 | 17474 | 18474 | 19474 |
| 16475 | 17475 | 18475 | 19475 |
| 16476 | 17476 | 18476 | 19476 |
| 16477 | 17477 | 18477 | 19477 |
| 16478 | 17478 | 18478 | 19478 |
| 16479 | 17479 | 18479 | 19479 |
| 16480 | 17480 | 18480 | 19480 |
| 16481 | 17481 | 18481 | 19481 |
| 16482 | 17482 | 18482 | 19482 |
| 16483 | 17483 | 18483 | 19483 |
| 16484 | 17484 | 18484 | 19484 |
| 16485 | 17485 | 18485 | 19485 |
| 16486 | 17486 | 18486 | 19486 |
| 16487 | 17487 | 18487 | 19487 |
| 16488 | 17488 | 18488 | 19488 |
| 16489 | 17489 | 18489 | 19489 |
| 16490 | 17490 | 18490 | 19490 |
| 16491 | 17491 | 18491 | 19491 |
| 16492 | 17492 | 18492 | 19492 |
| 16493 | 17493 | 18493 | 19493 |
| 16494 | 17494 | 18494 | 19494 |
| 16495 | 17495 | 18495 | 19495 |
| 16496 | 17496 | 18496 | 19496 |
| 16497 | 17497 | 18497 | 19497 |
| 16498 | 17498 | 18498 | 19498 |
| 16499 | 17499 | 18499 | 19499 |
| 16500 | 17500 | 18500 | 19500 |
| 16501 | 17501 | 18501 | 19501 |
| 16502 | 17502 | 18502 | 19502 |
| 16503 | 17503 | 18503 | 19503 |
| 16504 | 17504 | 18504 | 19504 |
| 16505 | 17505 | 18505 | 19505 |
| 16506 | 17506 | 18506 | 19506 |
| 16507 | 17507 | 18507 | 19507 |
| 16508 | 17508 | 18508 | 19508 |
| 16509 | 17509 | 18509 | 19509 |
| 16510 | 17510 | 18510 | 19510 |
| 16511 | 17511 | 18511 | 19511 |
| 16512 | 17512 | 18512 | 19512 |
| 16513 | 17513 | 18513 | 19513 |
| 16514 | 17514 | 18514 | 19514 |
| 16515 | 17515 | 18515 | 19515 |
| 16516 | 17516 | 18516 | 19516 |
| 16517 | 17517 | 18517 | 19517 |
| 16518 | 17518 | 18518 | 19518 |
| 16519 | 17519 | 18519 | 19519 |
| 16520 | 17520 | 18520 | 19520 |
| 16521 | 17521 | 18521 | 19521 |
| 16522 | 17522 | 18522 | 19522 |
| 16523 | 17523 | 18523 | 19523 |
| 16524 | 17524 | 18524 | 19524 |
| 16525 | 17525 | 18525 | 19525 |
| 16526 | 17526 | 18526 | 19526 |
| 16527 | 17527 | 18527 | 19527 |
| 16528 | 17528 | 18528 | 19528 |
| 16529 | 17529 | 18529 | 19529 |
| 16530 | 17530 | 18530 | 19530 |
| 16531 | 17531 | 18531 | 19531 |
| 16532 | 17532 | 18532 | 19532 |
| 16533 | 17533 | 18533 | 19533 |
| 16534 | 17534 | 18534 | 19534 |
| 16535 | 17535 | 18535 | 19535 |
| 16536 | 17536 | 18536 | 19536 |
| 16537 | 17537 | 18537 | 19537 |
| 16538 | 17538 | 18538 | 19538 |
| 16539 | 17539 | 18539 | 19539 |
| 16540 | 17540 | 18540 | 19540 |
| 16541 | 17541 | 18541 | 19541 |
| 16542 | 17542 | 18542 | 19542 |
| 16543 | 17543 | 18543 | 19543 |
| 16544 | 17544 | 18544 | 19544 |
| 16545 | 17545 | 18545 | 19545 |
| 16546 | 17546 | 18546 | 19546 |
| 16547 | 17547 | 18547 | 19547 |
| 16548 | 17548 | 18548 | 19548 |
| 16549 | 17549 | 18549 | 19549 |
| 16550 | 17550 | 18550 | 19550 |
| 16551 | 17551 | 18551 | 19551 |
| 16552 | 17552 | 18552 | 19552 |
| 16553 | 17553 | 18553 | 19553 |
| 16554 | 17554 | 18554 | 19554 |
| 16555 | 17555 | 18555 | 19555 |
| 16556 | 17556 | 18556 | 19556 |
| 16557 | 17557 | 18557 | 19557 |
| 16558 | 17558 | 18558 | 19558 |
| 16559 | 17559 | 18559 | 19559 |
| 16560 | 17560 | 18560 | 19560 |
| 16561 | 17561 | 18561 | 19561 |
| 16562 | 17562 | 18562 | 19562 |
| 16563 | 17563 | 18563 | 19563 |
| 16564 | 17564 | 18564 | 19564 |
| 16565 | 17565 | 18565 | 19565 |
| 16566 | 17566 | 18566 | 19566 |
| 16567 | 17567 | 18567 | 19567 |
| 16568 | 17568 | 18568 | 19568 |
| 16569 | 17569 | 18569 | 19569 |
| 16570 | 17570 | 18570 | 19570 |
| 16571 | 17571 | 18571 | 19571 |
| 16572 | 17572 | 18572 | 19572 |
| 16573 | 17573 | 18573 | 19573 |
| 16574 | 17574 | 18574 | 19574 |
| 16575 | 17575 | 18575 | 19575 |
| 16576 | 17576 | 18576 | 19576 |
| 16577 | 17577 | 18577 | 19577 |
| 16578 | 17578 | 18578 | 19578 |
| 16579 | 17579 | 18579 | 19579 |
| 16580 | 17580 | 18580 | 19580 |
| 16581 | 17581 | 18581 | 19581 |
| 16582 | 17582 | 18582 | 19582 |
| 16583 | 17583 | 18583 | 19583 |
| 16584 | 17584 | 18584 | 19584 |
| 16585 | 17585 | 18585 | 19585 |
| 16586 | 17586 | 18586 | 19586 |
| 16587 | 17587 | 18587 | 19587 |
| 16588 | 17588 | 18588 | 19588 |
| 16589 | 17589 | 18589 | 19589 |
| 16590 | 17590 | 18590 | 19590 |
| 16591 | 17591 | 18591 | 19591 |
| 16592 | 17592 | 18592 | 19592 |
| 16593 | 17593 | 18593 | 19593 |
| 16594 | 17594 | 18594 | 19594 |
| 16595 | 17595 | 18595 | 19595 |
| 16596 | 17596 | 18596 | 19596 |
| 16597 | 17597 | 18597 | 19597 |
| 16598 | 17598 | 18598 | 19598 |
| 16599 | 17599 | 18599 | 19599 |
| 16600 | 17600 | 18600 | 19600 |
| 16601 | 17601 | 18601 | 19601 |
| 16602 | 17602 | 18602 | 19602 |
| 16603 | 17603 | 18603 | 19603 |
| 16604 | 17604 | 18604 | 19604 |
| 16605 | 17605 | 18605 | 19605 |
| 16606 | 17606 | 18606 | 19606 |
| 16607 | 17607 | 18607 | 19607 |
| 16608 | 17608 | 18608 | 19608 |
| 16609 | 17609 | 18609 | 19609 |
| 16610 | 17610 | 18610 | 19610 |
| 16611 | 17611 | 18611 | 19611 |
| 16612 | 17612 | 18612 | 19612 |
| 16613 | 17613 | 18613 | 19613 |
| 16614 | 17614 | 18614 | 19614 |
| 16615 | 17615 | 18615 | 19615 |
| 16616 | 17616 | 18616 | 19616 |
| 16617 | 17617 | 18617 | 19617 |
| 16618 | 17618 | 18618 | 19618 |
| 16619 | 17619 | 18619 | 19619 |
| 16620 | 17620 | 18620 | 19620 |
| 16621 | 17621 | 18621 | 19621 |
| 16622 | 17622 | 18622 | 19622 |
| 16623 | 17623 | 18623 | 19623 |
| 16624 | 17624 | 18624 | 19624 |
| 16625 | 17625 | 18625 | 19625 |
| 16626 | 17626 | 18626 | 19626 |
| 16627 | 17627 | 18627 | 19627 |
| 16628 | 17628 | 18628 | 19628 |
| 16629 | 17629 | 18629 | 19629 |
| 16630 | 17630 | 18630 | 19630 |
| 16631 | 17631 | 18631 | 19631 |
| 16632 | 17632 | 18632 | 19632 |
| 16633 | 17633 | 18633 | 19633 |
| 16634 | 17634 | 18634 | 19634 |
| 16635 | 17635 | 18635 | 19635 |
| 16636 | 17636 | 18636 | 19636 |
| 16637 | 17637 | 18637 | 19637 |
| 16638 | 17638 | 18638 | 19638 |
| 16639 | 17639 | 18639 | 19639 |
| 16640 | 17640 | 18640 | 19640 |
| 16641 | 17641 | 18641 | 19641 |
| 16642 | 17642 | 18642 | 19642 |
| 16643 | 17643 | 18643 | 19643 |
| 16644 | 17644 | 18644 | 19644 |
| 16645 | 17645 | 18645 | 19645 |
| 16646 | 17646 | 18646 | 19646 |
| 16647 | 17647 | 18647 | 19647 |
| 16648 | 17648 | 18648 | 19648 |
| 16649 | 17649 | 18649 | 19649 |
| 16650 | 17650 | 18650 | 19650 |
| 16651 | 17651 | 18651 | 19651 |
| 16652 | 17652 | 18652 | 19652 |
| 16653 | 17653 | 18653 | 19653 |
| 16654 | 17654 | 18654 | 19654 |
| 16655 | 17655 | 18655 | 19655 |
| 16656 | 17656 | 18656 | 19656 |
| 16657 | 17657 | 18657 | 19657 |
| 16658 | 17658 | 18658 | 19658 |
| 16659 | 17659 | 18659 | 19659 |
| 16660 | 17660 | 18660 | 19660 |
| 16661 | 17661 | 18661 | 19661 |
| 16662 | 17662 | 18662 | 19662 |
| 16663 | 17663 | 18663 | 19663 |
| 16664 | 17664 | 18664 | 19664 |
| 16665 | 17665 | 18665 | 19665 |
| 16666 | 17666 | 18666 | 19666 |
| 16667 | 17667 | 18667 | 19667 |
| 16668 | 17668 | 18668 | 19668 |
| 16669 | 17669 | 18669 | 19669 |
| 16670 | 17670 | 18670 | 19670 |
| 16671 | 17671 | 18671 | 19671 |
| 16672 | 17672 | 18672 | 19672 |
| 16673 | 17673 | 18673 | 19673 |
| 16674 | 17674 | 18674 | 19674 |
| 16675 | 17675 | 18675 | 19675 |
| 16676 | 17676 | 18676 | 19676 |
| 16677 | 17677 | 18677 | 19677 |
| 16678 | 17678 | 18678 | 19678 |
| 16679 | 17679 | 18679 | 19679 |
| 16680 | 17680 | 18680 | 19680 |
| 16681 | 17681 | 18681 | 19681 |
| 16682 | 17682 | 18682 | 19682 |
| 16683 | 17683 | 18683 | 19683 |
| 16684 | 17684 | 18684 | 19684 |
| 16685 | 17685 | 18685 | 19685 |
| 16686 | 17686 | 18686 | 19686 |
| 16687 | 17687 | 18687 | 19687 |
| 16688 | 17688 | 18688 | 19688 |
| 16689 | 17689 | 18689 | 19689 |
| 16690 | 17690 | 18690 | 19690 |
| 16691 | 17691 | 18691 | 19691 |
| 16692 | 17692 | 18692 | 19692 |
| 16693 | 17693 | 18693 | 19693 |
| 16694 | 17694 | 18694 | 19694 |
| 16695 | 17695 | 18695 | 19695 |
| 16696 | 17696 | 18696 | 19696 |
| 16697 | 17697 | 18697 | 19697 |
| 16698 | 17698 | 18698 | 19698 |
| 16699 | 17699 | 18699 | 19699 |
| 16700 | 17700 | 18700 | 19700 |
| 16701 | 17701 | 18701 | 19701 |
| 16702 | 17702 | 18702 | 19702 |
| 16703 | 17703 | 18703 | 19703 |
| 16704 | 17704 | 18704 | 19704 |
| 16705 | 17705 | 18705 | 19705 |
| 16706 | 17706 | 18706 | 19706 |
| 16707 | 17707 | 18707 | 19707 |
| 16708 | 17708 | 18708 | 19708 |
| 16709 | 17709 | 18709 | 19709 |
| 16710 | 17710 | 18710 | 19710 |
| 16711 | 17711 | 18711 | 19711 |
| 16712 | 17712 | 18712 | 19712 |
| 16713 | 17713 | 18713 | 19713 |
| 16714 | 17714 | 18714 | 19714 |
| 16715 | 17715 | 18715 | 19715 |
| 16716 | 17716 | 18716 | 19716 |
| 16717 | 17717 | 18717 | 19717 |
| 16718 | 17718 | 18718 | 19718 |
| 16719 | 17719 | 18719 | 19719 |
| 16720 | 17720 | 18720 | 19720 |
| 16721 | 17721 | 18721 | 19721 |
| 16722 | 17722 | 18722 | 19722 |
| 16723 | 17723 | 18723 | 19723 |
| 16724 | 17724 | 18724 | 19724 |
| 16725 | 17725 | 18725 | 19725 |
| 16726 | 17726 | 18726 | 19726 |
| 16727 | 17727 | 18727 | 19727 |
| 16728 | 17728 | 18728 | 19728 |
| 16729 | 17729 | 18729 | 19729 |
| 16730 | 17730 | 18730 | 19730 |
| 16731 | 17731 | 18731 | 19731 |
| 16732 | 17732 | 18732 | 19732 |
| 16733 | 17733 | 18733 | 19733 |
| 16734 | 17734 | 18734 | 19734 |
| 16735 | 17735 | 18735 | 19735 |
| 16736 | 17736 | 18736 | 19736 |
| 16737 | 17737 | 18737 | 19737 |
| 16738 | 17738 | 18738 | 19738 |
| 16739 | 17739 | 18739 | 19739 |
| 16740 | 17740 | 18740 | 19740 |
| 16741 | 17741 | 18741 | 19741 |
| 16742 | 17742 | 18742 | 19742 |
| 16743 | 17743 | 18743 | 19743 |
| 16744 | 17744 | 18744 | 19744 |
| 16745 | 17745 | 18745 | 19745 |
| 16746 | 17746 | 18746 | 19746 |
| 16747 | 17747 | 18747 | 19747 |
| 16748 | 17748 | 18748 | 19748 |
| 16749 | 17749 | 18749 | 19749 |
| 16750 | 17750 | 18750 | 19750 |
| 16751 | 17751 | 18751 | 19751 |
| 16752 | 17752 | 18752 | 19752 |
| 16753 | 17753 | 18753 | 19753 |
| 16754 | 17754 | 18754 | 19754 |
| 16755 | 17755 | 18755 | 19755 |
| 16756 | 17756 | 18756 | 19756 |
| 16757 | 17757 | 18757 | 19757 |
| 16758 | 17758 | 18758 | 19758 |
| 16759 | 17759 | 18759 | 19759 |
| 16760 | 17760 | 18760 | 19760 |
| 16761 | 17761 | 18761 | 19761 |
| 16762 | 17762 | 18762 | 19762 |
| 16763 | 17763 | 18763 | 19763 |
| 16764 | 17764 | 18764 | 19764 |
| 16765 | 17765 | 18765 | 19765 |
| 16766 | 17766 | 18766 | 19766 |
| 16767 | 17767 | 18767 | 19767 |
| 16768 | 17768 | 18768 | 19768 |
| 16769 | 17769 | 18769 | 19769 |
| 16770 | 17770 | 18770 | 19770 |
| 16771 | 17771 | 18771 | 19771 |
| 16772 | 17772 | 18772 | 19772 |
| 16773 | 17773 | 18773 | 19773 |
| 16774 | 17774 | 18774 | 19774 |
| 16775 | 17775 | 18775 | 19775 |
| 16776 | 17776 | 18776 | 19776 |
| 16777 | 17777 | 18777 | 19777 |
| 16778 | 17778 | 18778 | 19778 |
| 16779 | 17779 | 18779 | 19779 |
| 16780 | 17780 | 18780 | 19780 |
| 16781 | 17781 | 18781 | 19781 |
| 16782 | 17782 | 18782 | 19782 |
| 16783 | 17783 | 18783 | 19783 |
| 16784 | 17784 | 18784 | 19784 |
| 16785 | 17785 | 18785 | 19785 |
| 16786 | 17786 | 18786 | 19786 |
| 16787 | 17787 | 18787 | 19787 |
| 16788 | 17788 | 18788 | 19788 |
| 16789 | 17789 | 18789 | 19789 |
| 16790 | 17790 | 18790 | 19790 |
| 16791 | 17791 | 18791 | 19791 |
| 16792 | 17792 | 18792 | 19792 |
| 16793 | 17793 | 18793 | 19793 |
| 16794 | 17794 | 18794 | 19794 |
| 16795 | 17795 | 18795 | 19795 |
| 16796 | 17796 | 18796 | 19796 |
| 16797 | 17797 | 18797 | 19797 |
| 16798 | 17798 | 18798 | 19798 |
| 16799 | 17799 | 18799 | 19799 |
| 16800 | 17800 | 18800 | 19800 |
| 16801 | 17801 | 18801 | 19801 |
| 16802 | 17802 | 18802 | 19802 |
| 16803 | 17803 | 18803 | 19803 |
| 16804 | 17804 | 18804 | 19804 |
| 16805 | 17805 | 18805 | 19805 |
| 16806 | 17806 | 18806 | 19806 |
| 16807 | 17807 | 18807 | 19807 |
| 16808 | 17808 | 18808 | 19808 |
| 16809 | 17809 | 18809 | 19809 |
| 16810 | 17810 | 18810 | 19810 |
| 16811 | 17811 | 18811 | 19811 |
| 16812 | 17812 | 18812 | 19812 |
| 16813 | 17813 | 18813 | 19813 |
| 16814 | 17814 | 18814 | 19814 |
| 16815 | 17815 | 18815 | 19815 |
| 16816 | 17816 | 18816 | 19816 |
| 16817 | 17817 | 18817 | 19817 |
| 16818 | 17818 | 18818 | 19818 |
| 16819 | 17819 | 18819 | 19819 |
| 16820 | 17820 | 18820 | 19820 |
| 16821 | 17821 | 18821 | 19821 |
| 16822 | 17822 | 18822 | 19822 |
| 16823 | 17823 | 18823 | 19823 |
| 16824 | 17824 | 18824 | 19824 |
| 16825 | 17825 | 18825 | 19825 |
| 16826 | 17826 | 18826 | 19826 |
| 16827 | 17827 | 18827 | 19827 |
| 16828 | 17828 | 18828 | 19828 |
| 16829 | 17829 | 18829 | 19829 |
| 16830 | 17830 | 18830 | 19830 |
| 16831 | 17831 | 18831 | 19831 |
| 16832 | 17832 | 18832 | 19832 |
| 16833 | 17833 | 18833 | 19833 |
| 16834 | 17834 | 18834 | 19834 |
| 16835 | 17835 | 18835 | 19835 |
| 16836 | 17836 | 18836 | 19836 |
| 16837 | 17837 | 18837 | 19837 |
| 16838 | 17838 | 18838 | 19838 |
| 16839 | 17839 | 18839 | 19839 |
| 16840 | 17840 | 18840 | 19840 |
| 16841 | 17841 | 18841 | 19841 |
| 16842 | 17842 | 18842 | 19842 |
| 16843 | 17843 | 18843 | 19843 |
| 16844 | 17844 | 18844 | 19844 |
| 16845 | 17845 | 18845 | 19845 |
| 16846 | 17846 | 18846 | 19846 |
| 16847 | 17847 | 18847 | 19847 |
| 16848 | 17848 | 18848 | 19848 |
| 16849 | 17849 | 18849 | 19849 |
| 16850 | 17850 | 18850 | 19850 |
| 16851 | 17851 | 18851 | 19851 |
| 16852 | 17852 | 18852 | 19852 |
| 16853 | 17853 | 18853 | 19853 |
| 16854 | 17854 | 18854 | 19854 |
| 16855 | 17855 | 18855 | 19855 |
| 16856 | 17856 | 18856 | 19856 |
| 16857 | 17857 | 18857 | 19857 |
| 16858 | 17858 | 18858 | 19858 |
| 16859 | 17859 | 18859 | 19859 |
| 16860 | 17860 | 18860 | 19860 |
| 16861 | 17861 | 18861 | 19861 |
| 16862 | 17862 | 18862 | 19862 |
| 16863 | 17863 | 18863 | 19863 |
| 16864 | 17864 | 18864 | 19864 |
| 16865 | 17865 | 18865 | 19865 |
| 16866 | 17866 | 18866 | 19866 |
| 16867 | 17867 | 18867 | 19867 |
| 16868 | 17868 | 18868 | 19868 |
| 16869 | 17869 | 18869 | 19869 |
| 16870 | 17870 | 18870 | 19870 |
| 16871 | 17871 | 18871 | 19871 |
| 16872 | 17872 | 18872 | 19872 |
| 16873 | 17873 | 18873 | 19873 |
| 16874 | 17874 | 18874 | 19874 |
| 16875 | 17875 | 18875 | 19875 |
| 16876 | 17876 | 18876 | 19876 |
| 16877 | 17877 | 18877 | 19877 |
| 16878 | 17878 | 18878 | 19878 |
| 16879 | 17879 | 18879 | 19879 |
| 16880 | 17880 | 18880 | 19880 |
| 16881 | 17881 | 18881 | 19881 |
| 16882 | 17882 | 18882 | 19882 |
| 16883 | 17883 | 18883 | 19883 |
| 16884 | 17884 | 18884 | 19884 |
| 16885 | 17885 | 18885 | 19885 |
| 16886 | 17886 | 18886 | 19886 |
| 16887 | 17887 | 18887 | 19887 |
| 16888 | 17888 | 18888 | 19888 |
| 16889 | 17889 | 18889 | 19889 |
| 16890 | 17890 | 18890 | 19890 |
| 16891 | 17891 | 18891 | 19891 |
| 16892 | 17892 | 18892 | 19892 |
| 16893 | 17893 | 18893 | 19893 |
| 16894 | 17894 | 18894 | 19894 |
| 16895 | 17895 | 18895 | 19895 |
| 16896 | 17896 | 18896 | 19896 |
| 16897 | 17897 | 18897 | 19897 |
| 16898 | 17898 | 18898 | 19898 |
| 16899 | 17899 | 18899 | 19899 |
| 16900 | 17900 | 18900 | 19900 |
| 16901 | 17901 | 18901 | 19901 |
| 16902 | 17902 | 18902 | 19902 |
| 16903 | 17903 | 18903 | 19903 |
| 16904 | 17904 | 18904 | 19904 |
| 16905 | 17905 | 18905 | 19905 |
| 16906 | 17906 | 18906 | 19906 |
| 16907 | 17907 | 18907 | 19907 |
| 16908 | 17908 | 18908 | 19908 |
| 16909 | 17909 | 18909 | 19909 |
| 16910 | 17910 | 18910 | 19910 |
| 16911 | 17911 | 18911 | 19911 |
| 16912 | 17912 | 18912 | 19912 |
| 16913 | 17913 | 18913 | 19913 |
| 16914 | 17914 | 18914 | 19914 |
| 16915 | 17915 | 18915 | 19915 |
| 16916 | 17916 | 18916 | 19916 |
| 16917 | 17917 | 18917 | 19917 |
| 16918 | 17918 | 18918 | 19918 |
| 16919 | 17919 | 18919 | 19919 |
| 16920 | 17920 | 18920 | 19920 |
| 16921 | 17921 | 18921 | 19921 |
| 16922 | 17922 | 18922 | 19922 |
| 16923 | 17923 | 18923 | 19923 |
| 16924 | 17924 | 18924 | 19924 |
| 16925 | 17925 | 18925 | 19925 |
| 16926 | 17926 | 18926 | 19926 |
| 16927 | 17927 | 18927 | 19927 |
| 16928 | 17928 | 18928 | 19928 |
| 16929 | 17929 | 18929 | 19929 |
| 16930 | 17930 | 18930 | 19930 |
| 16931 | 17931 | 18931 | 19931 |
| 16932 | 17932 | 18932 | 19932 |
| 16933 | 17933 | 18933 | 19933 |
| 16934 | 17934 | 18934 | 19934 |
| 16935 | 17935 | 18935 | 19935 |
| 16936 | 17936 | 18936 | 19936 |
| 16937 | 17937 | 18937 | 19937 |
| 16938 | 17938 | 18938 | 19938 |
| 16939 | 17939 | 18939 | 19939 |
| 16940 | 17940 | 18940 | 19940 |
| 16941 | 17941 | 18941 | 19941 |
| 16942 | 17942 | 18942 | 19942 |
| 16943 | 17943 | 18943 | 19943 |
| 16944 | 17944 | 18944 | 19944 |
| 16945 | 17945 | 18945 | 19945 |
| 16946 | 17946 | 18946 | 19946 |
| 16947 | 17947 | 18947 | 19947 |
| 16948 | 17948 | 18948 | 19948 |
| 16949 | 17949 | 18949 | 19949 |
| 16950 | 17950 | 18950 | 19950 |
| 16951 | 17951 | 18951 | 19951 |
| 16952 | 17952 | 18952 | 19952 |
| 16953 | 17953 | 18953 | 19953 |
| 16954 | 17954 | 18954 | 19954 |
| 16955 | 17955 | 18955 | 19955 |
| 16956 | 17956 | 18956 | 19956 |
| 16957 | 17957 | 18957 | 19957 |
| 16958 | 17958 | 18958 | 19958 |
| 16959 | 17959 | 18959 | 19959 |
| 16960 | 17960 | 18960 | 19960 |
| 16961 | 17961 | 18961 | 19961 |
| 16962 | 17962 | 18962 | 19962 |
| 16963 | 17963 | 18963 | 19963 |
| 16964 | 17964 | 18964 | 19964 |
| 16965 | 17965 | 18965 | 19965 |
| 16966 | 17966 | 18966 | 19966 |
| 16967 | 17967 | 18967 | 19967 |
| 16968 | 17968 | 18968 | 19968 |
| 16969 | 17969 | 18969 | 19969 |
| 16970 | 17970 | 18970 | 19970 |
| 16971 | 17971 | 18971 | 19971 |
| 16972 | 17972 | 18972 | 19972 |
| 16973 | 17973 | 18973 | 19973 |
| 16974 | 17974 | 18974 | 19974 |
| 16975 | 17975 | 18975 | 19975 |
| 16976 | 17976 | 18976 | 19976 |
| 16977 | 17977 | 18977 | 19977 |
| 16978 | 17978 | 18978 | 19978 |
| 16979 | 17979 | 18979 | 19979 |
| 16980 | 17980 | 18980 | 19980 |
| 16981 | 17981 | 18981 | 19981 |
| 16982 | 17982 | 18982 | 19982 |
| 16983 | 17983 | 18983 | 19983 |
| 16984 | 17984 | 18984 | 19984 |
| 16985 | 17985 | 18985 | 19985 |
| 16986 | 17986 | 18986 | 19986 |
| 16987 | 17987 | 18987 | 19987 |
| 16988 | 17988 | 18988 | 19988 |
| 16989 | 17989 | 18989 | 19989 |
| 16990 | 17990 | 18990 | 19990 |
| 16991 | 17991 | 18991 | 19991 |
| 16992 | 17992 | 18992 | 19992 |
| 16993 | 17993 | 18993 | 19993 |
| 16994 | 17994 | 18994 | 19994 |
| 16995 | 17995 | 18995 | 19995 |
| 16996 | 17996 | 18996 | 19996 |
| 16997 | 17997 | 18997 | 19997 |
| 16998 | 17998 | 18998 | 19998 |
| 16999 | 17999 | 18999 | 19999 |
| 17000 | 18000 | 19000 | 20000 |
| 17001 | 18001 | 19001 | 20001 |
| 17002 | 18002 | 19002 | 20002 |

[0132] In some embodiments, the sequences that specifically bind to pecan comprise an inner sequence selected from the group consisting of the nucleic acid sequences of SEQ ID NOs. 20003 to 21002. In some examples, a short nucleic acid sequence may be affixed to the 5-end of the inner sequence. The short nucleic acid sequence may be the 5′ primer sequence used in the random ssDNA library, i.e. the nucleic acid sequence of SEQ ID NO. 1. Accordingly, the aptamer that specifically binds to pecan may comprise a nucleic acid sequence selected from the group consisting of SEQ ID NOs. 21003 to 22002. In other examples, a short nucleic acid sequence may be affixed to the 3-end of the inner sequence. The short nucleic acid sequence may be the 3′ primer sequence used in the random ssDNA library, i.e. the nucleic acid sequence of SEQ ID NO. 2. Accordingly, the aptamer that specifically binds to pecan may comprise a nucleic acid sequence selected from the group consisting of SEQ ID NOs. 22003 to 23002. In other examples, the inner sequence may comprise a 5′ end short sequence (i.e., SEQ ID NO. 1) and a 3′ end short sequence (i.e., SEQ ID NO. 2). Accordingly, the aptamer that specifically binds to pecan may comprise a nucleic acid sequence selected from the group consisting of SEQ ID NOs. 23003 to 24002. In one embodiment, the aptamer of the present disclosure that specifically binds to pecan may comprise a nucleic acid sequence selected from the group consisting of SEQ ID NOs. 20003 to 24002 listed in Table 7, or variant thereof.

TABLE 7
Aptamer sequences against pecan
Aptamer sequence

| | | | 5′-sequence |
|---|---|---|---|
| | 5′-sequence | Inner | and inner |
| Inner | and inner | sequence and | sequence and |
| sequence | sequence | 3′-sequence | 3′-sequence |
| (SEQ ID NO.) | (SEQ ID NO.) | (SEQ ID NO.) | (SEQ ID NO.) |
| 20003 | 21003 | 22003 | 23003 |
| 20004 | 21004 | 22004 | 23004 |
| 20005 | 21005 | 22005 | 23005 |
| 20006 | 21006 | 22006 | 23006 |
| 20007 | 21007 | 22007 | 23007 |
| 20008 | 21008 | 22008 | 23008 |
| 20009 | 21009 | 22009 | 23009 |
| 20010 | 21010 | 22010 | 23010 |
| 20011 | 21011 | 22011 | 23011 |
| 20012 | 21012 | 22012 | 23012 |
| 20013 | 21013 | 22013 | 23013 |
| 20014 | 21014 | 22014 | 23014 |
| 20015 | 21015 | 22015 | 23015 |
| 20016 | 21016 | 22016 | 23016 |
| 20017 | 21017 | 22017 | 23017 |
| 20018 | 21018 | 22018 | 23018 |
| 20019 | 21019 | 22019 | 23019 |
| 20020 | 21020 | 22020 | 23020 |
| 20021 | 21021 | 22021 | 23021 |
| 20022 | 21022 | 22022 | 23022 |
| 20023 | 21023 | 22023 | 23023 |
| 20024 | 21024 | 22024 | 23024 |
| 20025 | 21025 | 22025 | 23025 |
| 20026 | 21026 | 22026 | 23026 |
| 20027 | 21027 | 22027 | 23027 |
| 20028 | 21028 | 22028 | 23028 |
| 20029 | 21029 | 22029 | 23029 |
| 20030 | 21030 | 22030 | 23030 |
| 20031 | 21031 | 22031 | 23031 |
| 20032 | 21032 | 22032 | 23032 |
| 20033 | 21033 | 22033 | 23033 |
| 20034 | 21034 | 22034 | 23034 |
| 20035 | 21035 | 22035 | 23035 |
| 20036 | 21036 | 22036 | 23036 |
| 20037 | 21037 | 22037 | 23037 |
| 20038 | 21038 | 22038 | 23038 |
| 20039 | 21039 | 22039 | 23039 |
| 20040 | 21040 | 22040 | 23040 |
| 20041 | 21041 | 22041 | 23041 |
| 20042 | 21042 | 22042 | 23042 |
| 20043 | 21043 | 22043 | 23043 |
| 20044 | 21044 | 22044 | 23044 |
| 20045 | 21045 | 22045 | 23045 |
| 20046 | 21046 | 22046 | 23046 |
| 20047 | 21047 | 22047 | 23047 |
| 20048 | 21048 | 22048 | 23048 |
| 20049 | 21049 | 22049 | 23049 |
| 20050 | 21050 | 22050 | 23050 |
| 20051 | 21051 | 22051 | 23051 |
| 20052 | 21052 | 22052 | 23052 |
| 20053 | 21053 | 22053 | 23053 |
| 20054 | 21054 | 22054 | 23054 |
| 20055 | 21055 | 22055 | 23055 |
| 20056 | 21056 | 22056 | 23056 |
| 20057 | 21057 | 22057 | 23057 |
| 20058 | 21058 | 22058 | 23058 |
| 20059 | 21059 | 22059 | 23059 |
| 20060 | 21060 | 22060 | 23060 |
| 20061 | 21061 | 22061 | 23061 |
| 20062 | 21062 | 22062 | 23062 |
| 20063 | 21063 | 22063 | 23063 |
| 20064 | 21064 | 22064 | 23064 |
| 20065 | 21065 | 22065 | 23065 |
| 20066 | 21066 | 22066 | 23066 |
| 20067 | 21067 | 22067 | 23067 |
| 20068 | 21068 | 22068 | 23068 |
| 20069 | 21069 | 22069 | 23069 |
| 20070 | 21070 | 22070 | 23070 |
| 20071 | 21071 | 22071 | 23071 |
| 20072 | 21072 | 22072 | 23072 |
| 20073 | 21073 | 22073 | 23073 |
| 20074 | 21074 | 22074 | 23074 |
| 20075 | 21075 | 22075 | 23075 |
| 20076 | 21076 | 22076 | 23076 |
| 20077 | 21077 | 22077 | 23077 |
| 20078 | 21078 | 22078 | 23078 |
| 20079 | 21079 | 22079 | 23079 |
| 20080 | 21080 | 22080 | 23080 |
| 20081 | 21081 | 22081 | 23081 |
| 20082 | 21082 | 22082 | 23082 |
| 20083 | 21083 | 22083 | 23083 |
| 20084 | 21084 | 22084 | 23084 |
| 20085 | 21085 | 22085 | 23085 |
| 20086 | 21086 | 22086 | 23086 |
| 20087 | 21087 | 22087 | 23087 |
| 20088 | 21088 | 22088 | 23088 |
| 20089 | 21089 | 22089 | 23089 |
| 20090 | 21090 | 22090 | 23090 |
| 20091 | 21091 | 22091 | 23091 |
| 20092 | 21092 | 22092 | 23092 |
| 20093 | 21093 | 22093 | 23093 |
| 20094 | 21094 | 22094 | 23094 |
| 20095 | 21095 | 22095 | 23095 |
| 20096 | 21096 | 22096 | 23096 |
| 20097 | 21097 | 22097 | 23097 |
| 20098 | 21098 | 22098 | 23098 |
| 20099 | 21099 | 22099 | 23099 |
| 20100 | 21100 | 22100 | 23100 |
| 20101 | 21101 | 22101 | 23101 |
| 20102 | 21102 | 22102 | 23102 |
| 20103 | 21103 | 22103 | 23103 |
| 20104 | 21104 | 22104 | 23104 |
| 20105 | 21105 | 22105 | 23105 |
| 20106 | 21106 | 22106 | 23106 |
| 20107 | 21107 | 22107 | 23107 |
| 20108 | 21108 | 22108 | 23108 |
| 20109 | 21109 | 22109 | 23109 |
| 20110 | 21110 | 22110 | 23110 |
| 20111 | 21111 | 22111 | 23111 |
| 20112 | 21112 | 22112 | 23112 |
| 20113 | 21113 | 22113 | 23113 |
| 20114 | 21114 | 22114 | 23114 |
| 20115 | 21115 | 22115 | 23115 |
| 20116 | 21116 | 22116 | 23116 |
| 20117 | 21117 | 22117 | 23117 |
| 20118 | 21118 | 22118 | 23118 |
| 20119 | 21119 | 22119 | 23119 |
| 20120 | 21120 | 22120 | 23120 |
| 20121 | 21121 | 22121 | 23121 |
| 20122 | 21122 | 22122 | 23122 |
| 20123 | 21123 | 22123 | 23123 |
| 20124 | 21124 | 22124 | 23124 |
| 20125 | 21125 | 22125 | 23125 |
| 20126 | 21126 | 22126 | 23126 |
| 20127 | 21127 | 22127 | 23127 |
| 20128 | 21128 | 22128 | 23128 |
| 20129 | 21129 | 22129 | 23129 |
| 20130 | 21130 | 22130 | 23130 |
| 20131 | 21131 | 22131 | 23131 |
| 20132 | 21132 | 22132 | 23132 |
| 20133 | 21133 | 22133 | 23133 |
| 20134 | 21134 | 22134 | 23134 |
| 20135 | 21135 | 22135 | 23135 |
| 20136 | 21136 | 22136 | 23136 |
| 20137 | 21137 | 22137 | 23137 |
| 20138 | 21138 | 22138 | 23138 |
| 20139 | 21139 | 22139 | 23139 |
| 20140 | 21140 | 22140 | 23140 |
| 20141 | 21141 | 22141 | 23141 |
| 20142 | 21142 | 22142 | 23142 |
| 20143 | 21143 | 22143 | 23143 |
| 20144 | 21144 | 22144 | 23144 |
| 20145 | 21145 | 22145 | 23145 |
| 20146 | 21146 | 22146 | 23146 |
| 20147 | 21147 | 22147 | 23147 |
| 20148 | 21148 | 22148 | 23148 |
| 20149 | 21149 | 22149 | 23149 |
| 20150 | 21150 | 22150 | 23150 |
| 20151 | 21151 | 22151 | 23151 |
| 20152 | 21152 | 22152 | 23152 |
| 20153 | 21153 | 22153 | 23153 |
| 20154 | 21154 | 22154 | 23154 |
| 20155 | 21155 | 22155 | 23155 |
| 20156 | 21156 | 22156 | 23156 |
| 20157 | 21157 | 22157 | 23157 |
| 20158 | 21158 | 22158 | 23158 |
| 20159 | 21159 | 22159 | 23159 |
| 20160 | 21160 | 22160 | 23160 |
| 20161 | 21161 | 22161 | 23161 |
| 20162 | 21162 | 22162 | 23162 |
| 20163 | 21163 | 22163 | 23163 |
| 20164 | 21164 | 22164 | 23164 |
| 20165 | 21165 | 22165 | 23165 |
| 20166 | 21166 | 22166 | 23166 |
| 20167 | 21167 | 22167 | 23167 |
| 20168 | 21168 | 22168 | 23168 |
| 20169 | 21169 | 22169 | 23169 |
| 20170 | 21170 | 22170 | 23170 |
| 20171 | 21171 | 22171 | 23171 |
| 20172 | 21172 | 22172 | 23172 |
| 20173 | 21173 | 22173 | 23173 |
| 20174 | 21174 | 22174 | 23174 |
| 20175 | 21175 | 22175 | 23175 |
| 20176 | 21176 | 22176 | 23176 |
| 20177 | 21177 | 22177 | 23177 |
| 20178 | 21178 | 22178 | 23178 |
| 20179 | 21179 | 22179 | 23179 |
| 20180 | 21180 | 22180 | 23180 |
| 20181 | 21181 | 22181 | 23181 |
| 20182 | 21182 | 22182 | 23182 |
| 20183 | 21183 | 22183 | 23183 |
| 20184 | 21184 | 22184 | 23184 |
| 20185 | 21185 | 22185 | 23185 |
| 20186 | 21186 | 22186 | 23186 |
| 20187 | 21187 | 22187 | 23187 |
| 20188 | 21188 | 22188 | 23188 |
| 20189 | 21189 | 22189 | 23189 |
| 20190 | 21190 | 22190 | 23190 |
| 20191 | 21191 | 22191 | 23191 |
| 20192 | 21192 | 22192 | 23192 |
| 20193 | 21193 | 22193 | 23193 |
| 20194 | 21194 | 22194 | 23194 |
| 20195 | 21195 | 22195 | 23195 |
| 20196 | 21196 | 22196 | 23196 |
| 20197 | 21197 | 22197 | 23197 |
| 20198 | 21198 | 22198 | 23198 |
| 20199 | 21199 | 22199 | 23199 |
| 20200 | 21200 | 22200 | 23200 |
| 20201 | 21201 | 22201 | 23201 |
| 20202 | 21202 | 22202 | 23202 |
| 20203 | 21203 | 22203 | 23203 |
| 20204 | 21204 | 22204 | 23204 |
| 20205 | 21205 | 22205 | 23205 |
| 20206 | 21206 | 22206 | 23206 |
| 20207 | 21207 | 22207 | 23207 |
| 20208 | 21208 | 22208 | 23208 |
| 20209 | 21209 | 22209 | 23209 |
| 20210 | 21210 | 22210 | 23210 |
| 20211 | 21211 | 22211 | 23211 |
| 20212 | 21212 | 22212 | 23212 |
| 20213 | 21213 | 22213 | 23213 |
| 20214 | 21214 | 22214 | 23214 |
| 20215 | 21215 | 22215 | 23215 |
| 20216 | 21216 | 22216 | 23216 |
| 20217 | 21217 | 22217 | 23217 |
| 20218 | 21218 | 22218 | 23218 |
| 20219 | 21219 | 22219 | 23219 |
| 20220 | 21220 | 22220 | 23220 |
| 20221 | 21221 | 22221 | 23221 |
| 20222 | 21222 | 22222 | 23222 |
| 20223 | 21223 | 22223 | 23223 |
| 20224 | 21224 | 22224 | 23224 |
| 20225 | 21225 | 22225 | 23225 |
| 20226 | 21226 | 22226 | 23226 |
| 20227 | 21227 | 22227 | 23227 |
| 20228 | 21228 | 22228 | 23228 |
| 20229 | 21229 | 22229 | 23229 |
| 20230 | 21230 | 22230 | 23230 |
| 20231 | 21231 | 22231 | 23231 |
| 20232 | 21232 | 22232 | 23232 |
| 20233 | 21233 | 22233 | 23233 |
| 20234 | 21234 | 22234 | 23234 |
| 20235 | 21235 | 22235 | 23235 |
| 20236 | 21236 | 22236 | 23236 |
| 20237 | 21237 | 22237 | 23237 |
| 20238 | 21238 | 22238 | 23238 |
| 20239 | 21239 | 22239 | 23239 |
| 20240 | 21240 | 22240 | 23240 |
| 20241 | 21241 | 22241 | 23241 |
| 20242 | 21242 | 22242 | 23242 |
| 20243 | 21243 | 22243 | 23243 |
| 20244 | 21244 | 22244 | 23244 |
| 20245 | 21245 | 22245 | 23245 |
| 20246 | 21246 | 22246 | 23246 |
| 20247 | 21247 | 22247 | 23247 |
| 20248 | 21248 | 22248 | 23248 |
| 20249 | 21249 | 22249 | 23249 |
| 20250 | 21250 | 22250 | 23250 |
| 20251 | 21251 | 22251 | 23251 |
| 20252 | 21252 | 22252 | 23252 |
| 20253 | 21253 | 22253 | 23253 |
| 20254 | 21254 | 22254 | 23254 |
| 20255 | 21255 | 22255 | 23255 |
| 20256 | 21256 | 22256 | 23256 |
| 20257 | 21257 | 22257 | 23257 |
| 20258 | 21258 | 22258 | 23258 |
| 20259 | 21259 | 22259 | 23259 |
| 20260 | 21260 | 22260 | 23260 |
| 20261 | 21261 | 22261 | 23261 |
| 20262 | 21262 | 22262 | 23262 |
| 20263 | 21263 | 22263 | 23263 |
| 20264 | 21264 | 22264 | 23264 |
| 20265 | 21265 | 22265 | 23265 |
| 20266 | 21266 | 22266 | 23266 |
| 20267 | 21267 | 22267 | 23267 |
| 20268 | 21268 | 22268 | 23268 |
| 20269 | 21269 | 22269 | 23269 |
| 20270 | 21270 | 22270 | 23270 |
| 20271 | 21271 | 22271 | 23271 |
| 20272 | 21272 | 22272 | 23272 |
| 20273 | 21273 | 22273 | 23273 |
| 20274 | 21274 | 22274 | 23274 |
| 20275 | 21275 | 22275 | 23275 |
| 20276 | 21276 | 22276 | 23276 |
| 20277 | 21277 | 22277 | 23277 |
| 20278 | 21278 | 22278 | 23278 |
| 20279 | 21279 | 22279 | 23279 |
| 20280 | 21280 | 22280 | 23280 |
| 20281 | 21281 | 22281 | 23281 |
| 20282 | 21282 | 22282 | 23282 |
| 20283 | 21283 | 22283 | 23283 |
| 20284 | 21284 | 22284 | 23284 |
| 20285 | 21285 | 22285 | 23285 |
| 20286 | 21286 | 22286 | 23286 |
| 20287 | 21287 | 22287 | 23287 |
| 20288 | 21288 | 22288 | 23288 |
| 20289 | 21289 | 22289 | 23289 |
| 20290 | 21290 | 22290 | 23290 |
| 20291 | 21291 | 22291 | 23291 |
| 20292 | 21292 | 22292 | 23292 |
| 20293 | 21293 | 22293 | 23293 |
| 20294 | 21294 | 22294 | 23294 |
| 20295 | 21295 | 22295 | 23295 |
| 20296 | 21296 | 22296 | 23296 |
| 20297 | 21297 | 22297 | 23297 |
| 20298 | 21298 | 22298 | 23298 |
| 20299 | 21299 | 22299 | 23299 |
| 20300 | 21300 | 22300 | 23300 |
| 20301 | 21301 | 22301 | 23301 |
| 20302 | 21302 | 22302 | 23302 |
| 20303 | 21303 | 22303 | 23303 |
| 20304 | 21304 | 22304 | 23304 |
| 20305 | 21305 | 22305 | 23305 |
| 20306 | 21306 | 22306 | 23306 |
| 20307 | 21307 | 22307 | 23307 |
| 20308 | 21308 | 22308 | 23308 |
| 20309 | 21309 | 22309 | 23309 |
| 20310 | 21310 | 22310 | 23310 |
| 20311 | 21311 | 22311 | 23311 |
| 20312 | 21312 | 22312 | 23312 |
| 20313 | 21313 | 22313 | 23313 |
| 20314 | 21314 | 22314 | 23314 |
| 20315 | 21315 | 22315 | 23315 |
| 20316 | 21316 | 22316 | 23316 |
| 20317 | 21317 | 22317 | 23317 |
| 20318 | 21318 | 22318 | 23318 |
| 20319 | 21319 | 22319 | 23319 |
| 20320 | 21320 | 22320 | 23320 |
| 20321 | 21321 | 22321 | 23321 |
| 20322 | 21322 | 22322 | 23322 |
| 20323 | 21323 | 22323 | 23323 |
| 20324 | 21324 | 22324 | 23324 |
| 20325 | 21325 | 22325 | 23325 |
| 20326 | 21326 | 22326 | 23326 |
| 20327 | 21327 | 22327 | 23327 |
| 20328 | 21328 | 22328 | 23328 |
| 20329 | 21329 | 22329 | 23329 |
| 20330 | 21330 | 22330 | 23330 |
| 20331 | 21331 | 22331 | 23331 |
| 20332 | 21332 | 22332 | 23332 |
| 20333 | 21333 | 22333 | 23333 |
| 20334 | 21334 | 22334 | 23334 |
| 20335 | 21335 | 22335 | 23335 |
| 20336 | 21336 | 22336 | 23336 |
| 20337 | 21337 | 22337 | 23337 |
| 20338 | 21338 | 22338 | 23338 |
| 20339 | 21339 | 22339 | 23339 |
| 20340 | 21340 | 22340 | 23340 |
| 20341 | 21341 | 22341 | 23341 |
| 20342 | 21342 | 22342 | 23342 |
| 20343 | 21343 | 22343 | 23343 |
| 20344 | 21344 | 22344 | 23344 |
| 20345 | 21345 | 22345 | 23345 |
| 20346 | 21346 | 22346 | 23346 |
| 20347 | 21347 | 22347 | 23347 |
| 20348 | 21348 | 22348 | 23348 |
| 20349 | 21349 | 22349 | 23349 |
| 20350 | 21350 | 22350 | 23350 |
| 20351 | 21351 | 22351 | 23351 |
| 20352 | 21352 | 22352 | 23352 |
| 20353 | 21353 | 22353 | 23353 |
| 20354 | 21354 | 22354 | 23354 |
| 20355 | 21355 | 22355 | 23355 |
| 20356 | 21356 | 22356 | 23356 |
| 20357 | 21357 | 22357 | 23357 |
| 20358 | 21358 | 22358 | 23358 |
| 20359 | 21359 | 22359 | 23359 |
| 20360 | 21360 | 22360 | 23360 |
| 20361 | 21361 | 22361 | 23361 |
| 20362 | 21362 | 22362 | 23362 |
| 20363 | 21363 | 22363 | 23363 |
| 20364 | 21364 | 22364 | 23364 |
| 20365 | 21365 | 22365 | 23365 |
| 20366 | 21366 | 22366 | 23366 |
| 20367 | 21367 | 22367 | 23367 |
| 20368 | 21368 | 22368 | 23368 |
| 20369 | 21369 | 22369 | 23369 |
| 20370 | 21370 | 22370 | 23370 |
| 20371 | 21371 | 22371 | 23371 |
| 20372 | 21372 | 22372 | 23372 |
| 20373 | 21373 | 22373 | 23373 |
| 20374 | 21374 | 22374 | 23374 |
| 20375 | 21375 | 22375 | 23375 |
| 20376 | 21376 | 22376 | 23376 |
| 20377 | 21377 | 22377 | 23377 |
| 20378 | 21378 | 22378 | 23378 |
| 20379 | 21379 | 22379 | 23379 |
| 20380 | 21380 | 22380 | 23380 |
| 20381 | 21381 | 22381 | 23381 |
| 20382 | 21382 | 22382 | 23382 |
| 20383 | 21383 | 22383 | 23383 |
| 20384 | 21384 | 22384 | 23384 |
| 20385 | 21385 | 22385 | 23385 |
| 20386 | 21386 | 22386 | 23386 |
| 20387 | 21387 | 22387 | 23387 |
| 20388 | 21388 | 22388 | 23388 |
| 20389 | 21389 | 22389 | 23389 |
| 20390 | 21390 | 22390 | 23390 |
| 20391 | 21391 | 22391 | 23391 |
| 20392 | 21392 | 22392 | 23392 |
| 20393 | 21393 | 22393 | 23393 |
| 20394 | 21394 | 22394 | 23394 |
| 20395 | 21395 | 22395 | 23395 |
| 20396 | 21396 | 22396 | 23396 |
| 20397 | 21397 | 22397 | 23397 |
| 20398 | 21398 | 22398 | 23398 |
| 20399 | 21399 | 22399 | 23399 |
| 20400 | 21400 | 22400 | 23400 |
| 20401 | 21401 | 22401 | 23401 |
| 20402 | 21402 | 22402 | 23402 |
| 20403 | 21403 | 22403 | 23403 |
| 20404 | 21404 | 22404 | 23404 |
| 20405 | 21405 | 22405 | 23405 |
| 20406 | 21406 | 22406 | 23406 |
| 20407 | 21407 | 22407 | 23407 |
| 20408 | 21408 | 22408 | 23408 |
| 20409 | 21409 | 22409 | 23409 |
| 20410 | 21410 | 22410 | 23410 |
| 20411 | 21411 | 22411 | 23411 |
| 20412 | 21412 | 22412 | 23412 |
| 20413 | 21413 | 22413 | 23413 |
| 20414 | 21414 | 22414 | 23414 |
| 20415 | 21415 | 22415 | 23415 |
| 20416 | 21416 | 22416 | 23416 |
| 20417 | 21417 | 22417 | 23417 |
| 20418 | 21418 | 22418 | 23418 |
| 20419 | 21419 | 22419 | 23419 |
| 20420 | 21420 | 22420 | 23420 |
| 20421 | 21421 | 22421 | 23421 |
| 20422 | 21422 | 22422 | 23422 |
| 20423 | 21423 | 22423 | 23423 |
| 20424 | 21424 | 22424 | 23424 |
| 20425 | 21425 | 22425 | 23425 |
| 20426 | 21426 | 22426 | 23426 |
| 20427 | 21427 | 22427 | 23427 |
| 20428 | 21428 | 22428 | 23428 |
| 20429 | 21429 | 22429 | 23429 |
| 20430 | 21430 | 22430 | 23430 |
| 20431 | 21431 | 22431 | 23431 |
| 20432 | 21432 | 22432 | 23432 |
| 20433 | 21433 | 22433 | 23433 |
| 20434 | 21434 | 22434 | 23434 |
| 20435 | 21435 | 22435 | 23435 |
| 20436 | 21436 | 22436 | 23436 |
| 20437 | 21437 | 22437 | 23437 |
| 20438 | 21438 | 22438 | 23438 |
| 20439 | 21439 | 22439 | 23439 |
| 20440 | 21440 | 22440 | 23440 |
| 20441 | 21441 | 22441 | 23441 |
| 20442 | 21442 | 22442 | 23442 |
| 20443 | 21443 | 22443 | 23443 |
| 20444 | 21444 | 22444 | 23444 |
| 20445 | 21445 | 22445 | 23445 |
| 20446 | 21446 | 22446 | 23446 |
| 20447 | 21447 | 22447 | 23447 |
| 20448 | 21448 | 22448 | 23448 |
| 20449 | 21449 | 22449 | 23449 |
| 20450 | 21450 | 22450 | 23450 |
| 20451 | 21451 | 22451 | 23451 |
| 20452 | 21452 | 22452 | 23452 |
| 20453 | 21453 | 22453 | 23453 |
| 20454 | 21454 | 22454 | 23454 |
| 20455 | 21455 | 22455 | 23455 |
| 20456 | 21456 | 22456 | 23456 |
| 20457 | 21457 | 22457 | 23457 |
| 20458 | 21458 | 22458 | 23458 |
| 20459 | 21459 | 22459 | 23459 |
| 20460 | 21460 | 22460 | 23460 |
| 20461 | 21461 | 22461 | 23461 |
| 20462 | 21462 | 22462 | 23462 |
| 20463 | 21463 | 22463 | 23463 |
| 20464 | 21464 | 22464 | 23464 |
| 20465 | 21465 | 22465 | 23465 |
| 20466 | 21466 | 22466 | 23466 |
| 20467 | 21467 | 22467 | 23467 |
| 20468 | 21468 | 22468 | 23468 |
| 20469 | 21469 | 22469 | 23469 |
| 20470 | 21470 | 22470 | 23470 |
| 20471 | 21471 | 22471 | 23471 |
| 20472 | 21472 | 22472 | 23472 |
| 20473 | 21473 | 22473 | 23473 |
| 20474 | 21474 | 22474 | 23474 |
| 20475 | 21475 | 22475 | 23475 |
| 20476 | 21476 | 22476 | 23476 |
| 20477 | 21477 | 22477 | 23477 |
| 20478 | 21478 | 22478 | 23478 |
| 20479 | 21479 | 22479 | 23479 |
| 20480 | 21480 | 22480 | 23480 |
| 20481 | 21481 | 22481 | 23481 |
| 20482 | 21482 | 22482 | 23482 |
| 20483 | 21483 | 22483 | 23483 |
| 20484 | 21484 | 22484 | 23484 |
| 20485 | 21485 | 22485 | 23485 |
| 20486 | 21486 | 22486 | 23486 |
| 20487 | 21487 | 22487 | 23487 |
| 20488 | 21488 | 22488 | 23488 |
| 20489 | 21489 | 22489 | 23489 |
| 20490 | 21490 | 22490 | 23490 |
| 20491 | 21491 | 22491 | 23491 |
| 20492 | 21492 | 22492 | 23492 |
| 20493 | 21493 | 22493 | 23493 |
| 20494 | 21494 | 22494 | 23494 |
| 20495 | 21495 | 22495 | 23495 |
| 20496 | 21496 | 22496 | 23496 |
| 20497 | 21497 | 22497 | 23497 |
| 20498 | 21498 | 22498 | 23498 |
| 20499 | 21499 | 22499 | 23499 |
| 20500 | 21500 | 22500 | 23500 |
| 20501 | 21501 | 22501 | 23501 |
| 20502 | 21502 | 22502 | 23502 |
| 20503 | 21503 | 22503 | 23503 |
| 20504 | 21504 | 22504 | 23504 |
| 20505 | 21505 | 22505 | 23505 |
| 20506 | 21506 | 22506 | 23506 |
| 20507 | 21507 | 22507 | 23507 |
| 20508 | 21508 | 22508 | 23508 |
| 20509 | 21509 | 22509 | 23509 |
| 20510 | 21510 | 22510 | 23510 |
| 20511 | 21511 | 22511 | 23511 |
| 20512 | 21512 | 22512 | 23512 |
| 20513 | 21513 | 22513 | 23513 |
| 20514 | 21514 | 22514 | 23514 |
| 20515 | 21515 | 22515 | 23515 |
| 20516 | 21516 | 22516 | 23516 |
| 20517 | 21517 | 22517 | 23517 |
| 20518 | 21518 | 22518 | 23518 |
| 20519 | 21519 | 22519 | 23519 |
| 20520 | 21520 | 22520 | 23520 |
| 20521 | 21521 | 22521 | 23521 |
| 20522 | 21522 | 22522 | 23522 |
| 20523 | 21523 | 22523 | 23523 |
| 20524 | 21524 | 22524 | 23524 |
| 20525 | 21525 | 22525 | 23525 |
| 20526 | 21526 | 22526 | 23526 |
| 20527 | 21527 | 22527 | 23527 |
| 20528 | 21528 | 22528 | 23528 |
| 20529 | 21529 | 22529 | 23529 |
| 20530 | 21530 | 22530 | 23530 |
| 20531 | 21531 | 22531 | 23531 |
| 20532 | 21532 | 22532 | 23532 |
| 20533 | 21533 | 22533 | 23533 |
| 20534 | 21534 | 22534 | 23534 |
| 20535 | 21535 | 22535 | 23535 |
| 20536 | 21536 | 22536 | 23536 |
| 20537 | 21537 | 22537 | 23537 |
| 20538 | 21538 | 22538 | 23538 |
| 20539 | 21539 | 22539 | 23539 |
| 20540 | 21540 | 22540 | 23540 |
| 20541 | 21541 | 22541 | 23541 |
| 20542 | 21542 | 22542 | 23542 |
| 20543 | 21543 | 22543 | 23543 |
| 20544 | 21544 | 22544 | 23544 |
| 20545 | 21545 | 22545 | 23545 |
| 20546 | 21546 | 22546 | 23546 |
| 20547 | 21547 | 22547 | 23547 |
| 20548 | 21548 | 22548 | 23548 |
| 20549 | 21549 | 22549 | 23549 |
| 20550 | 21550 | 22550 | 23550 |
| 20551 | 21551 | 22551 | 23551 |
| 20552 | 21552 | 22552 | 23552 |
| 20553 | 21553 | 22553 | 23553 |
| 20554 | 21554 | 22554 | 23554 |
| 20555 | 21555 | 22555 | 23555 |
| 20556 | 21556 | 22556 | 23556 |
| 20557 | 21557 | 22557 | 23557 |
| 20558 | 21558 | 22558 | 23558 |
| 20559 | 21559 | 22559 | 23559 |
| 20560 | 21560 | 22560 | 23560 |
| 20561 | 21561 | 22561 | 23561 |
| 20562 | 21562 | 22562 | 23562 |
| 20563 | 21563 | 22563 | 23563 |
| 20564 | 21564 | 22564 | 23564 |
| 20565 | 21565 | 22565 | 23565 |
| 20566 | 21566 | 22566 | 23566 |
| 20567 | 21567 | 22567 | 23567 |
| 20568 | 21568 | 22568 | 23568 |
| 20569 | 21569 | 22569 | 23569 |
| 20570 | 21570 | 22570 | 23570 |
| 20571 | 21571 | 22571 | 23571 |
| 20572 | 21572 | 22572 | 23572 |
| 20573 | 21573 | 22573 | 23573 |
| 20574 | 21574 | 22574 | 23574 |
| 20575 | 21575 | 22575 | 23575 |
| 20576 | 21576 | 22576 | 23576 |
| 20577 | 21577 | 22577 | 23577 |
| 20578 | 21578 | 22578 | 23578 |
| 20579 | 21579 | 22579 | 23579 |
| 20580 | 21580 | 22580 | 23580 |
| 20581 | 21581 | 22581 | 23581 |
| 20582 | 21582 | 22582 | 23582 |
| 20583 | 21583 | 22583 | 23583 |
| 20584 | 21584 | 22584 | 23584 |
| 20585 | 21585 | 22585 | 23585 |
| 20586 | 21586 | 22586 | 23586 |
| 20587 | 21587 | 22587 | 23587 |
| 20588 | 21588 | 22588 | 23588 |
| 20589 | 21589 | 22589 | 23589 |
| 20590 | 21590 | 22590 | 23590 |
| 20591 | 21591 | 22591 | 23591 |
| 20592 | 21592 | 22592 | 23592 |
| 20593 | 21593 | 22593 | 23593 |
| 20594 | 21594 | 22594 | 23594 |
| 20595 | 21595 | 22595 | 23595 |
| 20596 | 21596 | 22596 | 23596 |
| 20597 | 21597 | 22597 | 23597 |
| 20598 | 21598 | 22598 | 23598 |
| 20599 | 21599 | 22599 | 23599 |
| 20600 | 21600 | 22600 | 23600 |
| 20601 | 21601 | 22601 | 23601 |
| 20602 | 21602 | 22602 | 23602 |
| 20603 | 21603 | 22603 | 23603 |
| 20604 | 21604 | 22604 | 23604 |
| 20605 | 21605 | 22605 | 23605 |
| 20606 | 21606 | 22606 | 23606 |
| 20607 | 21607 | 22607 | 23607 |
| 20608 | 21608 | 22608 | 23608 |
| 20609 | 21609 | 22609 | 23609 |
| 20610 | 21610 | 22610 | 23610 |
| 20611 | 21611 | 22611 | 23611 |
| 20612 | 21612 | 22612 | 23612 |
| 20613 | 21613 | 22613 | 23613 |
| 20614 | 21614 | 22614 | 23614 |
| 20615 | 21615 | 22615 | 23615 |
| 20616 | 21616 | 22616 | 23616 |
| 20617 | 21617 | 22617 | 23617 |
| 20618 | 21618 | 22618 | 23618 |
| 20619 | 21619 | 22619 | 23619 |
| 20620 | 21620 | 22620 | 23620 |
| 20621 | 21621 | 22621 | 23621 |
| 20622 | 21622 | 22622 | 23622 |
| 20623 | 21623 | 22623 | 23623 |
| 20624 | 21624 | 22624 | 23624 |
| 20625 | 21625 | 22625 | 23625 |
| 20626 | 21626 | 22626 | 23626 |
| 20627 | 21627 | 22627 | 23627 |
| 20628 | 21628 | 22628 | 23628 |
| 20629 | 21629 | 22629 | 23629 |
| 20630 | 21630 | 22630 | 23630 |
| 20631 | 21631 | 22631 | 23631 |
| 20632 | 21632 | 22632 | 23632 |
| 20633 | 21633 | 22633 | 23633 |
| 20634 | 21634 | 22634 | 23634 |
| 20635 | 21635 | 22635 | 23635 |
| 20636 | 21636 | 22636 | 23636 |
| 20637 | 21637 | 22637 | 23637 |
| 20638 | 21638 | 22638 | 23638 |
| 20639 | 21639 | 22639 | 23639 |
| 20640 | 21640 | 22640 | 23640 |
| 20641 | 21641 | 22641 | 23641 |
| 20642 | 21642 | 22642 | 23642 |
| 20643 | 21643 | 22643 | 23643 |
| 20644 | 21644 | 22644 | 23644 |
| 20645 | 21645 | 22645 | 23645 |
| 20646 | 21646 | 22646 | 23646 |
| 20647 | 21647 | 22647 | 23647 |
| 20648 | 21648 | 22648 | 23648 |
| 20649 | 21649 | 22649 | 23649 |
| 20650 | 21650 | 22650 | 23650 |
| 20651 | 21651 | 22651 | 23651 |
| 20652 | 21652 | 22652 | 23652 |
| 20653 | 21653 | 22653 | 23653 |
| 20654 | 21654 | 22654 | 23654 |
| 20655 | 21655 | 22655 | 23655 |
| 20656 | 21656 | 22656 | 23656 |
| 20657 | 21657 | 22657 | 23657 |
| 20658 | 21658 | 22658 | 23658 |
| 20659 | 21659 | 22659 | 23659 |
| 20660 | 21660 | 22660 | 23660 |
| 20661 | 21661 | 22661 | 23661 |
| 20662 | 21662 | 22662 | 23662 |
| 20663 | 21663 | 22663 | 23663 |
| 20664 | 21664 | 22664 | 23664 |
| 20665 | 21665 | 22665 | 23665 |
| 20666 | 21666 | 22666 | 23666 |
| 20667 | 21667 | 22667 | 23667 |
| 20668 | 21668 | 22668 | 23668 |
| 20669 | 21669 | 22669 | 23669 |
| 20670 | 21670 | 22670 | 23670 |
| 20671 | 21671 | 22671 | 23671 |
| 20672 | 21672 | 22672 | 23672 |
| 20673 | 21673 | 22673 | 23673 |
| 20674 | 21674 | 22674 | 23674 |
| 20675 | 21675 | 22675 | 23675 |
| 20676 | 21676 | 22676 | 23676 |
| 20677 | 21677 | 22677 | 23677 |
| 20678 | 21678 | 22678 | 23678 |
| 20679 | 21679 | 22679 | 23679 |
| 20680 | 21680 | 22680 | 23680 |
| 20681 | 21681 | 22681 | 23681 |
| 20682 | 21682 | 22682 | 23682 |
| 20683 | 21683 | 22683 | 23683 |
| 20684 | 21684 | 22684 | 23684 |
| 20685 | 21685 | 22685 | 23685 |
| 20686 | 21686 | 22686 | 23686 |
| 20687 | 21687 | 22687 | 23687 |
| 20688 | 21688 | 22688 | 23688 |
| 20689 | 21689 | 22689 | 23689 |
| 20690 | 21690 | 22690 | 23690 |
| 20691 | 21691 | 22691 | 23691 |
| 20692 | 21692 | 22692 | 23692 |
| 20693 | 21693 | 22693 | 23693 |
| 20694 | 21694 | 22694 | 23694 |
| 20695 | 21695 | 22695 | 23695 |
| 20696 | 21696 | 22696 | 23696 |
| 20697 | 21697 | 22697 | 23697 |
| 20698 | 21698 | 22698 | 23698 |
| 20699 | 21699 | 22699 | 23699 |
| 20700 | 21700 | 22700 | 23700 |
| 20701 | 21701 | 22701 | 23701 |
| 20702 | 21702 | 22702 | 23702 |
| 20703 | 21703 | 22703 | 23703 |
| 20704 | 21704 | 22704 | 23704 |
| 20705 | 21705 | 22705 | 23705 |
| 20706 | 21706 | 22706 | 23706 |
| 20707 | 21707 | 22707 | 23707 |
| 20708 | 21708 | 22708 | 23708 |
| 20709 | 21709 | 22709 | 23709 |
| 20710 | 21710 | 22710 | 23710 |
| 20711 | 21711 | 22711 | 23711 |
| 20712 | 21712 | 22712 | 23712 |
| 20713 | 21713 | 22713 | 23713 |
| 20714 | 21714 | 22714 | 23714 |
| 20715 | 21715 | 22715 | 23715 |
| 20716 | 21716 | 22716 | 23716 |
| 20717 | 21717 | 22717 | 23717 |
| 20718 | 21718 | 22718 | 23718 |
| 20719 | 21719 | 22719 | 23719 |
| 20720 | 21720 | 22720 | 23720 |
| 20721 | 21721 | 22721 | 23721 |
| 20722 | 21722 | 22722 | 23722 |
| 20723 | 21723 | 22723 | 23723 |
| 20724 | 21724 | 22724 | 23724 |
| 20725 | 21725 | 22725 | 23725 |
| 20726 | 21726 | 22726 | 23726 |
| 20727 | 21727 | 22727 | 23727 |
| 20728 | 21728 | 22728 | 23728 |
| 20729 | 21729 | 22729 | 23729 |
| 20730 | 21730 | 22730 | 23730 |
| 20731 | 21731 | 22731 | 23731 |
| 20732 | 21732 | 22732 | 23732 |
| 20733 | 21733 | 22733 | 23733 |
| 20734 | 21734 | 22734 | 23734 |
| 20735 | 21735 | 22735 | 23735 |
| 20736 | 21736 | 22736 | 23736 |
| 20737 | 21737 | 22737 | 23737 |
| 20738 | 21738 | 22738 | 23738 |
| 20739 | 21739 | 22739 | 23739 |
| 20740 | 21740 | 22740 | 23740 |
| 20741 | 21741 | 22741 | 23741 |
| 20742 | 21742 | 22742 | 23742 |
| 20743 | 21743 | 22743 | 23743 |
| 20744 | 21744 | 22744 | 23744 |
| 20745 | 21745 | 22745 | 23745 |
| 20746 | 21746 | 22746 | 23746 |
| 20747 | 21747 | 22747 | 23747 |
| 20748 | 21748 | 22748 | 23748 |
| 20749 | 21749 | 22749 | 23749 |
| 20750 | 21750 | 22750 | 23750 |
| 20751 | 21751 | 22751 | 23751 |
| 20752 | 21752 | 22752 | 23752 |
| 20753 | 21753 | 22753 | 23753 |
| 20754 | 21754 | 22754 | 23754 |
| 20755 | 21755 | 22755 | 23755 |
| 20756 | 21756 | 22756 | 23756 |
| 20757 | 21757 | 22757 | 23757 |
| 20758 | 21758 | 22758 | 23758 |
| 20759 | 21759 | 22759 | 23759 |
| 20760 | 21760 | 22760 | 23760 |
| 20761 | 21761 | 22761 | 23761 |
| 20762 | 21762 | 22762 | 23762 |
| 20763 | 21763 | 22763 | 23763 |
| 20764 | 21764 | 22764 | 23764 |
| 20765 | 21765 | 22765 | 23765 |
| 20766 | 21766 | 22766 | 23766 |
| 20767 | 21767 | 22767 | 23767 |
| 20768 | 21768 | 22768 | 23768 |
| 20769 | 21769 | 22769 | 23769 |
| 20770 | 21770 | 22770 | 23770 |
| 20771 | 21771 | 22771 | 23771 |
| 20772 | 21772 | 22772 | 23772 |
| 20773 | 21773 | 22773 | 23773 |
| 20774 | 21774 | 22774 | 23774 |
| 20775 | 21775 | 22775 | 23775 |
| 20776 | 21776 | 22776 | 23776 |
| 20777 | 21777 | 22777 | 23777 |
| 20778 | 21778 | 22778 | 23778 |
| 20779 | 21779 | 22779 | 23779 |
| 20780 | 21780 | 22780 | 23780 |
| 20781 | 21781 | 22781 | 23781 |
| 20782 | 21782 | 22782 | 23782 |
| 20783 | 21783 | 22783 | 23783 |
| 20784 | 21784 | 22784 | 23784 |
| 20785 | 21785 | 22785 | 23785 |
| 20786 | 21786 | 22786 | 23786 |
| 20787 | 21787 | 22787 | 23787 |
| 20788 | 21788 | 22788 | 23788 |
| 20789 | 21789 | 22789 | 23789 |
| 20790 | 21790 | 22790 | 23790 |
| 20791 | 21791 | 22791 | 23791 |
| 20792 | 21792 | 22792 | 23792 |
| 20793 | 21793 | 22793 | 23793 |
| 20794 | 21794 | 22794 | 23794 |
| 20795 | 21795 | 22795 | 23795 |
| 20796 | 21796 | 22796 | 23796 |
| 20797 | 21797 | 22797 | 23797 |
| 20798 | 21798 | 22798 | 23798 |
| 20799 | 21799 | 22799 | 23799 |
| 20800 | 21800 | 22800 | 23800 |
| 20801 | 21801 | 22801 | 23801 |
| 20802 | 21802 | 22802 | 23802 |
| 20803 | 21803 | 22803 | 23803 |
| 20804 | 21804 | 22804 | 23804 |
| 20805 | 21805 | 22805 | 23805 |
| 20806 | 21806 | 22806 | 23806 |
| 20807 | 21807 | 22807 | 23807 |
| 20808 | 21808 | 22808 | 23808 |
| 20809 | 21809 | 22809 | 23809 |
| 20810 | 21810 | 22810 | 23810 |
| 20811 | 21811 | 22811 | 23811 |
| 20812 | 21812 | 22812 | 23812 |
| 20813 | 21813 | 22813 | 23813 |
| 20814 | 21814 | 22814 | 23814 |
| 20815 | 21815 | 22815 | 23815 |
| 20816 | 21816 | 22816 | 23816 |
| 20817 | 21817 | 22817 | 23817 |
| 20818 | 21818 | 22818 | 23818 |
| 20819 | 21819 | 22819 | 23819 |
| 20820 | 21820 | 22820 | 23820 |
| 20821 | 21821 | 22821 | 23821 |
| 20822 | 21822 | 22822 | 23822 |
| 20823 | 21823 | 22823 | 23823 |
| 20824 | 21824 | 22824 | 23824 |
| 20825 | 21825 | 22825 | 23825 |
| 20826 | 21826 | 22826 | 23826 |
| 20827 | 21827 | 22827 | 23827 |
| 20828 | 21828 | 22828 | 23828 |
| 20829 | 21829 | 22829 | 23829 |
| 20830 | 21830 | 22830 | 23830 |
| 20831 | 21831 | 22831 | 23831 |
| 20832 | 21832 | 22832 | 23832 |
| 20833 | 21833 | 22833 | 23833 |
| 20834 | 21834 | 22834 | 23834 |
| 20835 | 21835 | 22835 | 23835 |
| 20836 | 21836 | 22836 | 23836 |
| 20837 | 21837 | 22837 | 23837 |
| 20838 | 21838 | 22838 | 23838 |
| 20839 | 21839 | 22839 | 23839 |
| 20840 | 21840 | 22840 | 23840 |
| 20841 | 21841 | 22841 | 23841 |
| 20842 | 21842 | 22842 | 23842 |
| 20843 | 21843 | 22843 | 23843 |
| 20844 | 21844 | 22844 | 23844 |
| 20845 | 21845 | 22845 | 23845 |
| 20846 | 21846 | 22846 | 23846 |
| 20847 | 21847 | 22847 | 23847 |
| 20848 | 21848 | 22848 | 23848 |
| 20849 | 21849 | 22849 | 23849 |
| 20850 | 21850 | 22850 | 23850 |
| 20851 | 21851 | 22851 | 23851 |
| 20852 | 21852 | 22852 | 23852 |
| 20853 | 21853 | 22853 | 23853 |
| 20854 | 21854 | 22854 | 23854 |
| 20855 | 21855 | 22855 | 23855 |
| 20856 | 21856 | 22856 | 23856 |
| 20857 | 21857 | 22857 | 23857 |
| 20858 | 21858 | 22858 | 23858 |
| 20859 | 21859 | 22859 | 23859 |
| 20860 | 21860 | 22860 | 23860 |
| 20861 | 21861 | 22861 | 23861 |
| 20862 | 21862 | 22862 | 23862 |
| 20863 | 21863 | 22863 | 23863 |
| 20864 | 21864 | 22864 | 23864 |
| 20865 | 21865 | 22865 | 23865 |
| 20866 | 21866 | 22866 | 23866 |
| 20867 | 21867 | 22867 | 23867 |
| 20868 | 21868 | 22868 | 23868 |
| 20869 | 21869 | 22869 | 23869 |
| 20870 | 21870 | 22870 | 23870 |
| 20871 | 21871 | 22871 | 23871 |
| 20872 | 21872 | 22872 | 23872 |
| 20873 | 21873 | 22873 | 23873 |
| 20874 | 21874 | 22874 | 23874 |
| 20875 | 21875 | 22875 | 23875 |
| 20876 | 21876 | 22876 | 23876 |
| 20877 | 21877 | 22877 | 23877 |
| 20878 | 21878 | 22878 | 23878 |
| 20879 | 21879 | 22879 | 23879 |
| 20880 | 21880 | 22880 | 23880 |
| 20881 | 21881 | 22881 | 23881 |
| 20882 | 21882 | 22882 | 23882 |
| 20883 | 21883 | 22883 | 23883 |
| 20884 | 21884 | 22884 | 23884 |
| 20885 | 21885 | 22885 | 23885 |
| 20886 | 21886 | 22886 | 23886 |
| 20887 | 21887 | 22887 | 23887 |
| 20888 | 21888 | 22888 | 23888 |
| 20889 | 21889 | 22889 | 23889 |
| 20890 | 21890 | 22890 | 23890 |
| 20891 | 21891 | 22891 | 23891 |
| 20892 | 21892 | 22892 | 23892 |
| 20893 | 21893 | 22893 | 23893 |
| 20894 | 21894 | 22894 | 23894 |
| 20895 | 21895 | 22895 | 23895 |
| 20896 | 21896 | 22896 | 23896 |
| 20897 | 21897 | 22897 | 23897 |
| 20898 | 21898 | 22898 | 23898 |
| 20899 | 21899 | 22899 | 23899 |
| 20900 | 21900 | 22900 | 23900 |
| 20901 | 21901 | 22901 | 23901 |
| 20902 | 21902 | 22902 | 23902 |
| 20903 | 21903 | 22903 | 23903 |
| 20904 | 21904 | 22904 | 23904 |
| 20905 | 21905 | 22905 | 23905 |
| 20906 | 21906 | 22906 | 23906 |
| 20907 | 21907 | 22907 | 23907 |
| 20908 | 21908 | 22908 | 23908 |
| 20909 | 21909 | 22909 | 23909 |
| 20910 | 21910 | 22910 | 23910 |
| 20911 | 21911 | 22911 | 23911 |
| 20912 | 21912 | 22912 | 23912 |
| 20913 | 21913 | 22913 | 23913 |
| 20914 | 21914 | 22914 | 23914 |
| 20915 | 21915 | 22915 | 23915 |
| 20916 | 21916 | 22916 | 23916 |
| 20917 | 21917 | 22917 | 23917 |
| 20918 | 21918 | 22918 | 23918 |
| 20919 | 21919 | 22919 | 23919 |
| 20920 | 21920 | 22920 | 23920 |
| 20921 | 21921 | 22921 | 23921 |
| 20922 | 21922 | 22922 | 23922 |
| 20923 | 21923 | 22923 | 23923 |
| 20924 | 21924 | 22924 | 23924 |
| 20925 | 21925 | 22925 | 23925 |
| 20926 | 21926 | 22926 | 23926 |
| 20927 | 21927 | 22927 | 23927 |
| 20928 | 21928 | 22928 | 23928 |
| 20929 | 21929 | 22929 | 23929 |
| 20930 | 21930 | 22930 | 23930 |
| 20931 | 21931 | 22931 | 23931 |
| 20932 | 21932 | 22932 | 23932 |
| 20933 | 21933 | 22933 | 23933 |
| 20934 | 21934 | 22934 | 23934 |
| 20935 | 21935 | 22935 | 23935 |
| 20936 | 21936 | 22936 | 23936 |
| 20937 | 21937 | 22937 | 23937 |
| 20938 | 21938 | 22938 | 23938 |
| 20939 | 21939 | 22939 | 23939 |
| 20940 | 21940 | 22940 | 23940 |
| 20941 | 21941 | 22941 | 23941 |
| 20942 | 21942 | 22942 | 23942 |
| 20943 | 21943 | 22943 | 23943 |
| 20944 | 21944 | 22944 | 23944 |
| 20945 | 21945 | 22945 | 23945 |
| 20946 | 21946 | 22946 | 23946 |
| 20947 | 21947 | 22947 | 23947 |
| 20948 | 21948 | 22948 | 23948 |
| 20949 | 21949 | 22949 | 23949 |
| 20950 | 21950 | 22950 | 23950 |
| 20951 | 21951 | 22951 | 23951 |
| 20952 | 21952 | 22952 | 23952 |
| 20953 | 21953 | 22953 | 23953 |
| 20954 | 21954 | 22954 | 23954 |
| 20955 | 21955 | 22955 | 23955 |
| 20956 | 21956 | 22956 | 23956 |
| 20957 | 21957 | 22957 | 23957 |
| 20958 | 21958 | 22958 | 23958 |
| 20959 | 21959 | 22959 | 23959 |
| 20960 | 21960 | 22960 | 23960 |
| 20961 | 21961 | 22961 | 23961 |
| 20962 | 21962 | 22962 | 23962 |
| 20963 | 21963 | 22963 | 23963 |
| 20964 | 21964 | 22964 | 23964 |
| 20965 | 21965 | 22965 | 23965 |
| 20966 | 21966 | 22966 | 23966 |
| 20967 | 21967 | 22967 | 23967 |
| 20968 | 21968 | 22968 | 23968 |
| 20969 | 21969 | 22969 | 23969 |
| 20970 | 21970 | 22970 | 23970 |
| 20971 | 21971 | 22971 | 23971 |
| 20972 | 21972 | 22972 | 23972 |
| 20973 | 21973 | 22973 | 23973 |
| 20974 | 21974 | 22974 | 23974 |
| 20975 | 21975 | 22975 | 23975 |
| 20976 | 21976 | 22976 | 23976 |
| 20977 | 21977 | 22977 | 23977 |
| 20978 | 21978 | 22978 | 23978 |
| 20979 | 21979 | 22979 | 23979 |
| 20980 | 21980 | 22980 | 23980 |
| 20981 | 21981 | 22981 | 23981 |
| 20982 | 21982 | 22982 | 23982 |
| 20983 | 21983 | 22983 | 23983 |
| 20984 | 21984 | 22984 | 23984 |
| 20985 | 21985 | 22985 | 23985 |
| 20986 | 21986 | 22986 | 23986 |
| 20987 | 21987 | 22987 | 23987 |
| 20988 | 21988 | 22988 | 23988 |
| 20989 | 21989 | 22989 | 23989 |
| 20990 | 21990 | 22990 | 23990 |
| 20991 | 21991 | 22991 | 23991 |
| 20992 | 21992 | 22992 | 23992 |
| 20993 | 21993 | 22993 | 23993 |
| 20994 | 21994 | 22994 | 23994 |
| 20995 | 21995 | 22995 | 23995 |
| 20996 | 21996 | 22996 | 23996 |
| 20997 | 21997 | 22997 | 23997 |
| 20998 | 21998 | 22998 | 23998 |
| 20999 | 21999 | 22999 | 23999 |
| 21000 | 22000 | 23000 | 24000 |
| 21001 | 22001 | 23001 | 24001 |
| 21002 | 22002 | 23002 | 24002 |

[0133] In some embodiments, the sequences that specifically bind to pistachio comprise an inner sequence selected from the group consisting of the nucleic acid sequences of SEQ ID NOs. 24003 to 25002. In some examples, a short nucleic acid sequence may be affixed to the 5-end of the inner sequence. The short nucleic acid sequence may be the 5′ primer sequence used in the random ssDNA library, i.e. the nucleic acid sequence of SEQ ID NO. 1. Accordingly, the aptamer that specifically binds to pistachio may comprise a nucleic acid sequence selected from the group consisting of SEQ ID NOs. 25003 to 26002. In other examples, a short nucleic acid sequence may be affixed to the 3-end of the inner sequence. The short nucleic acid sequence may be the 3′ primer sequence used in the random ssDNA library, i.e. the nucleic acid sequence of SEQ ID NO. 2. Accordingly, the aptamer that specifically binds to pistachio may comprise a nucleic acid sequence selected from the group consisting of SEQ ID NOs. 26003 to 27002. In other examples, the inner sequence may comprise a 5′ end short sequence (i.e., SEQ ID NO. 1) and a 3′ end short sequence (i.e., SEQ ID NO. 2). Accordingly, the aptamer that specifically binds to pistachio may comprise a nucleic acid sequence selected from the group consisting of SEQ ID NOs. 27003 to 28002. In one embodiment, the aptamer of the present disclosure that specifically binds to pistachio may comprise a nucleic acid sequence selected from the group consisting of SEQ ID NOs. 24003 to 28002 listed in Table 8, or variant thereof.

TABLE 8
Aptamer sequences against pistachio
Aptamer sequence

| | | | 5′-sequence |
|---|---|---|---|
| | 5′-sequence | Inner | and inner |
| Inner | and inner | sequence and | sequence and |
| sequence | sequence | 3′-sequence | 3′-sequence |
| (SEQ ID NO.) | (SEQ ID NO.) | (SEQ ID NO.) | (SEQ ID NO.) |
| 24003 | 25003 | 26003 | 27003 |
| 24004 | 25004 | 26004 | 27004 |
| 24005 | 25005 | 26005 | 27005 |
| 24006 | 25006 | 26006 | 27006 |
| 24007 | 25007 | 26007 | 27007 |
| 24008 | 25008 | 26008 | 27008 |
| 24009 | 25009 | 26009 | 27009 |
| 24010 | 25010 | 26010 | 27010 |
| 24011 | 25011 | 26011 | 27011 |
| 24012 | 25012 | 26012 | 27012 |
| 24013 | 25013 | 26013 | 27013 |
| 24014 | 25014 | 26014 | 27014 |
| 24015 | 25015 | 26015 | 27015 |
| 24016 | 25016 | 26016 | 27016 |
| 24017 | 25017 | 26017 | 27017 |
| 24018 | 25018 | 26018 | 27018 |
| 24019 | 25019 | 26019 | 27019 |
| 24020 | 25020 | 26020 | 27020 |
| 24021 | 25021 | 26021 | 27021 |
| 24022 | 25022 | 26022 | 27022 |
| 24023 | 25023 | 26023 | 27023 |
| 24024 | 25024 | 26024 | 27024 |
| 24025 | 25025 | 26025 | 27025 |
| 24026 | 25026 | 26026 | 27026 |
| 24027 | 25027 | 26027 | 27027 |
| 24028 | 25028 | 26028 | 27028 |
| 24029 | 25029 | 26029 | 27029 |
| 24030 | 25030 | 26030 | 27030 |
| 24031 | 25031 | 26031 | 27031 |
| 24032 | 25032 | 26032 | 27032 |
| 24033 | 25033 | 26033 | 27033 |
| 24034 | 25034 | 26034 | 27034 |
| 24035 | 25035 | 26035 | 27035 |
| 24036 | 25036 | 26036 | 27036 |
| 24037 | 25037 | 26037 | 27037 |
| 24038 | 25038 | 26038 | 27038 |
| 24039 | 25039 | 26039 | 27039 |
| 24040 | 25040 | 26040 | 27040 |
| 24041 | 25041 | 26041 | 27041 |
| 24042 | 25042 | 26042 | 27042 |
| 24043 | 25043 | 26043 | 27043 |
| 24044 | 25044 | 26044 | 27044 |
| 24045 | 25045 | 26045 | 27045 |
| 24046 | 25046 | 26046 | 27046 |
| 24047 | 25047 | 26047 | 27047 |
| 24048 | 25048 | 26048 | 27048 |
| 24049 | 25049 | 26049 | 27049 |
| 24050 | 25050 | 26050 | 27050 |
| 24051 | 25051 | 26051 | 27051 |
| 24052 | 25052 | 26052 | 27052 |
| 24053 | 25053 | 26053 | 27053 |
| 24054 | 25054 | 26054 | 27054 |
| 24055 | 25055 | 26055 | 27055 |
| 24056 | 25056 | 26056 | 27056 |
| 24057 | 25057 | 26057 | 27057 |
| 24058 | 25058 | 26058 | 27058 |
| 24059 | 25059 | 26059 | 27059 |
| 24060 | 25060 | 26060 | 27060 |
| 24061 | 25061 | 26061 | 27061 |
| 24062 | 25062 | 26062 | 27062 |
| 24063 | 25063 | 26063 | 27063 |
| 24064 | 25064 | 26064 | 27064 |
| 24065 | 25065 | 26065 | 27065 |
| 24066 | 25066 | 26066 | 27066 |
| 24067 | 25067 | 26067 | 27067 |
| 24068 | 25068 | 26068 | 27068 |
| 24069 | 25069 | 26069 | 27069 |
| 24070 | 25070 | 26070 | 27070 |
| 24071 | 25071 | 26071 | 27071 |
| 24072 | 25072 | 26072 | 27072 |
| 24073 | 25073 | 26073 | 27073 |
| 24074 | 25074 | 26074 | 27074 |
| 24075 | 25075 | 26075 | 27075 |
| 24076 | 25076 | 26076 | 27076 |
| 24077 | 25077 | 26077 | 27077 |
| 24078 | 25078 | 26078 | 27078 |
| 24079 | 25079 | 26079 | 27079 |
| 24080 | 25080 | 26080 | 27080 |
| 24081 | 25081 | 26081 | 27081 |
| 24082 | 25082 | 26082 | 27082 |
| 24083 | 25083 | 26083 | 27083 |
| 24084 | 25084 | 26084 | 27084 |
| 24085 | 25085 | 26085 | 27085 |
| 24086 | 25086 | 26086 | 27086 |
| 24087 | 25087 | 26087 | 27087 |
| 24088 | 25088 | 26088 | 27088 |
| 24089 | 25089 | 26089 | 27089 |
| 24090 | 25090 | 26090 | 27090 |
| 24091 | 25091 | 26091 | 27091 |
| 24092 | 25092 | 26092 | 27092 |
| 24093 | 25093 | 26093 | 27093 |
| 24094 | 25094 | 26094 | 27094 |
| 24095 | 25095 | 26095 | 27095 |
| 24096 | 25096 | 26096 | 27096 |
| 24097 | 25097 | 26097 | 27097 |
| 24098 | 25098 | 26098 | 27098 |
| 24099 | 25099 | 26099 | 27099 |
| 24100 | 25100 | 26100 | 27100 |
| 24101 | 25101 | 26101 | 27101 |
| 24102 | 25102 | 26102 | 27102 |
| 24103 | 25103 | 26103 | 27103 |
| 24104 | 25104 | 26104 | 27104 |
| 24105 | 25105 | 26105 | 27105 |
| 24106 | 25106 | 26106 | 27106 |
| 24107 | 25107 | 26107 | 27107 |
| 24108 | 25108 | 26108 | 27108 |
| 24109 | 25109 | 26109 | 27109 |
| 24110 | 25110 | 26110 | 27110 |
| 24111 | 25111 | 26111 | 27111 |
| 24112 | 25112 | 26112 | 27112 |
| 24113 | 25113 | 26113 | 27113 |
| 24114 | 25114 | 26114 | 27114 |
| 24115 | 25115 | 26115 | 27115 |
| 24116 | 25116 | 26116 | 27116 |
| 24117 | 25117 | 26117 | 27117 |
| 24118 | 25118 | 26118 | 27118 |
| 24119 | 25119 | 26119 | 27119 |
| 24120 | 25120 | 26120 | 27120 |
| 24121 | 25121 | 26121 | 27121 |
| 24122 | 25122 | 26122 | 27122 |
| 24123 | 25123 | 26123 | 27123 |
| 24124 | 25124 | 26124 | 27124 |
| 24125 | 25125 | 26125 | 27125 |
| 24126 | 25126 | 26126 | 27126 |
| 24127 | 25127 | 26127 | 27127 |
| 24128 | 25128 | 26128 | 27128 |
| 24129 | 25129 | 26129 | 27129 |
| 24130 | 25130 | 26130 | 27130 |
| 24131 | 25131 | 26131 | 27131 |
| 24132 | 25132 | 26132 | 27132 |
| 24133 | 25133 | 26133 | 27133 |
| 24134 | 25134 | 26134 | 27134 |
| 24135 | 25135 | 26135 | 27135 |
| 24136 | 25136 | 26136 | 27136 |
| 24137 | 25137 | 26137 | 27137 |
| 24138 | 25138 | 26138 | 27138 |
| 24139 | 25139 | 26139 | 27139 |
| 24140 | 25140 | 26140 | 27140 |
| 24141 | 25141 | 26141 | 27141 |
| 24142 | 25142 | 26142 | 27142 |
| 24143 | 25143 | 26143 | 27143 |
| 24144 | 25144 | 26144 | 27144 |
| 24145 | 25145 | 26145 | 27145 |
| 24146 | 25146 | 26146 | 27146 |
| 24147 | 25147 | 26147 | 27147 |
| 24148 | 25148 | 26148 | 27148 |
| 24149 | 25149 | 26149 | 27149 |
| 24150 | 25150 | 26150 | 27150 |
| 24151 | 25151 | 26151 | 27151 |
| 24152 | 25152 | 26152 | 27152 |
| 24153 | 25153 | 26153 | 27153 |
| 24154 | 25154 | 26154 | 27154 |
| 24155 | 25155 | 26155 | 27155 |
| 24156 | 25156 | 26156 | 27156 |
| 24157 | 25157 | 26157 | 27157 |
| 24158 | 25158 | 26158 | 27158 |
| 24159 | 25159 | 26159 | 27159 |
| 24160 | 25160 | 26160 | 27160 |
| 24161 | 25161 | 26161 | 27161 |
| 24162 | 25162 | 26162 | 27162 |
| 24163 | 25163 | 26163 | 27163 |
| 24164 | 25164 | 26164 | 27164 |
| 24165 | 25165 | 26165 | 27165 |
| 24166 | 25166 | 26166 | 27166 |
| 24167 | 25167 | 26167 | 27167 |
| 24168 | 25168 | 26168 | 27168 |
| 24169 | 25169 | 26169 | 27169 |
| 24170 | 25170 | 26170 | 27170 |
| 24171 | 25171 | 26171 | 27171 |
| 24172 | 25172 | 26172 | 27172 |
| 24173 | 25173 | 26173 | 27173 |
| 24174 | 25174 | 26174 | 27174 |
| 24175 | 25175 | 26175 | 27175 |
| 24176 | 25176 | 26176 | 27176 |
| 24177 | 25177 | 26177 | 27177 |
| 24178 | 25178 | 26178 | 27178 |
| 24179 | 25179 | 26179 | 27179 |
| 24180 | 25180 | 26180 | 27180 |
| 24181 | 25181 | 26181 | 27181 |
| 24182 | 25182 | 26182 | 27182 |
| 24183 | 25183 | 26183 | 27183 |
| 24184 | 25184 | 26184 | 27184 |
| 24185 | 25185 | 26185 | 27185 |
| 24186 | 25186 | 26186 | 27186 |
| 24187 | 25187 | 26187 | 27187 |
| 24188 | 25188 | 26188 | 27188 |
| 24189 | 25189 | 26189 | 27189 |
| 24190 | 25190 | 26190 | 27190 |
| 24191 | 25191 | 26191 | 27191 |
| 24192 | 25192 | 26192 | 27192 |
| 24193 | 25193 | 26193 | 27193 |
| 24194 | 25194 | 26194 | 27194 |
| 24195 | 25195 | 26195 | 27195 |
| 24196 | 25196 | 26196 | 27196 |
| 24197 | 25197 | 26197 | 27197 |
| 24198 | 25198 | 26198 | 27198 |
| 24199 | 25199 | 26199 | 27199 |
| 24200 | 25200 | 26200 | 27200 |
| 24201 | 25201 | 26201 | 27201 |
| 24202 | 25202 | 26202 | 27202 |
| 24203 | 25203 | 26203 | 27203 |
| 24204 | 25204 | 26204 | 27204 |
| 24205 | 25205 | 26205 | 27205 |
| 24206 | 25206 | 26206 | 27206 |
| 24207 | 25207 | 26207 | 27207 |
| 24208 | 25208 | 26208 | 27208 |
| 24209 | 25209 | 26209 | 27209 |
| 24210 | 25210 | 26210 | 27210 |
| 24211 | 25211 | 26211 | 27211 |
| 24212 | 25212 | 26212 | 27212 |
| 24213 | 25213 | 26213 | 27213 |
| 24214 | 25214 | 26214 | 27214 |
| 24215 | 25215 | 26215 | 27215 |
| 24216 | 25216 | 26216 | 27216 |
| 24217 | 25217 | 26217 | 27217 |
| 24218 | 25218 | 26218 | 27218 |
| 24219 | 25219 | 26219 | 27219 |
| 24220 | 25220 | 26220 | 27220 |
| 24221 | 25221 | 26221 | 27221 |
| 24222 | 25222 | 26222 | 27222 |
| 24223 | 25223 | 26223 | 27223 |
| 24224 | 25224 | 26224 | 27224 |
| 24225 | 25225 | 26225 | 27225 |
| 24226 | 25226 | 26226 | 27226 |
| 24227 | 25227 | 26227 | 27227 |
| 24228 | 25228 | 26228 | 27228 |
| 24229 | 25229 | 26229 | 27229 |
| 24230 | 25230 | 26230 | 27230 |
| 24231 | 25231 | 26231 | 27231 |
| 24232 | 25232 | 26232 | 27232 |
| 24233 | 25233 | 26233 | 27233 |
| 24234 | 25234 | 26234 | 27234 |
| 24235 | 25235 | 26235 | 27235 |
| 24236 | 25236 | 26236 | 27236 |
| 24237 | 25237 | 26237 | 27237 |
| 24238 | 25238 | 26238 | 27238 |
| 24239 | 25239 | 26239 | 27239 |
| 24240 | 25240 | 26240 | 27240 |
| 24241 | 25241 | 26241 | 27241 |
| 24242 | 25242 | 26242 | 27242 |
| 24243 | 25243 | 26243 | 27243 |
| 24244 | 25244 | 26244 | 27244 |
| 24245 | 25245 | 26245 | 27245 |
| 24246 | 25246 | 26246 | 27246 |
| 24247 | 25247 | 26247 | 27247 |
| 24248 | 25248 | 26248 | 27248 |
| 24249 | 25249 | 26249 | 27249 |
| 24250 | 25250 | 26250 | 27250 |
| 24251 | 25251 | 26251 | 27251 |
| 24252 | 25252 | 26252 | 27252 |
| 24253 | 25253 | 26253 | 27253 |
| 24254 | 25254 | 26254 | 27254 |
| 24255 | 25255 | 26255 | 27255 |
| 24256 | 25256 | 26256 | 27256 |
| 24257 | 25257 | 26257 | 27257 |
| 24258 | 25258 | 26258 | 27258 |
| 24259 | 25259 | 26259 | 27259 |
| 24260 | 25260 | 26260 | 27260 |
| 24261 | 25261 | 26261 | 27261 |
| 24262 | 25262 | 26262 | 27262 |
| 24263 | 25263 | 26263 | 27263 |
| 24264 | 25264 | 26264 | 27264 |
| 24265 | 25265 | 26265 | 27265 |
| 24266 | 25266 | 26266 | 27266 |
| 24267 | 25267 | 26267 | 27267 |
| 24268 | 25268 | 26268 | 27268 |
| 24269 | 25269 | 26269 | 27269 |
| 24270 | 25270 | 26270 | 27270 |
| 24271 | 25271 | 26271 | 27271 |
| 24272 | 25272 | 26272 | 27272 |
| 24273 | 25273 | 26273 | 27273 |
| 24274 | 25274 | 26274 | 27274 |
| 24275 | 25275 | 26275 | 27275 |
| 24276 | 25276 | 26276 | 27276 |
| 24277 | 25277 | 26277 | 27277 |
| 24278 | 25278 | 26278 | 27278 |
| 24279 | 25279 | 26279 | 27279 |
| 24280 | 25280 | 26280 | 27280 |
| 24281 | 25281 | 26281 | 27281 |
| 24282 | 25282 | 26282 | 27282 |
| 24283 | 25283 | 26283 | 27283 |
| 24284 | 25284 | 26284 | 27284 |
| 24285 | 25285 | 26285 | 27285 |
| 24286 | 25286 | 26286 | 27286 |
| 24287 | 25287 | 26287 | 27287 |
| 24288 | 25288 | 26288 | 27288 |
| 24289 | 25289 | 26289 | 27289 |
| 24290 | 25290 | 26290 | 27290 |
| 24291 | 25291 | 26291 | 27291 |
| 24292 | 25292 | 26292 | 27292 |
| 24293 | 25293 | 26293 | 27293 |
| 24294 | 25294 | 26294 | 27294 |
| 24295 | 25295 | 26295 | 27295 |
| 24296 | 25296 | 26296 | 27296 |
| 24297 | 25297 | 26297 | 27297 |
| 24298 | 25298 | 26298 | 27298 |
| 24299 | 25299 | 26299 | 27299 |
| 24300 | 25300 | 26300 | 27300 |
| 24301 | 25301 | 26301 | 27301 |
| 24302 | 25302 | 26302 | 27302 |
| 24303 | 25303 | 26303 | 27303 |
| 24304 | 25304 | 26304 | 27304 |
| 24305 | 25305 | 26305 | 27305 |
| 24306 | 25306 | 26306 | 27306 |
| 24307 | 25307 | 26307 | 27307 |
| 24308 | 25308 | 26308 | 27308 |
| 24309 | 25309 | 26309 | 27309 |
| 24310 | 25310 | 26310 | 27310 |
| 24311 | 25311 | 26311 | 27311 |
| 24312 | 25312 | 26312 | 27312 |
| 24313 | 25313 | 26313 | 27313 |
| 24314 | 25314 | 26314 | 27314 |
| 24315 | 25315 | 26315 | 27315 |
| 24316 | 25316 | 26316 | 27316 |
| 24317 | 25317 | 26317 | 27317 |
| 24318 | 25318 | 26318 | 27318 |
| 24319 | 25319 | 26319 | 27319 |
| 24320 | 25320 | 26320 | 27320 |
| 24321 | 25321 | 26321 | 27321 |
| 24322 | 25322 | 26322 | 27322 |
| 24323 | 25323 | 26323 | 27323 |
| 24324 | 25324 | 26324 | 27324 |
| 24325 | 25325 | 26325 | 27325 |
| 24326 | 25326 | 26326 | 27326 |
| 24327 | 25327 | 26327 | 27327 |
| 24328 | 25328 | 26328 | 27328 |
| 24329 | 25329 | 26329 | 27329 |
| 24330 | 25330 | 26330 | 27330 |
| 24331 | 25331 | 26331 | 27331 |
| 24332 | 25332 | 26332 | 27332 |
| 24333 | 25333 | 26333 | 27333 |
| 24334 | 25334 | 26334 | 27334 |
| 24335 | 25335 | 26335 | 27335 |
| 24336 | 25336 | 26336 | 27336 |
| 24337 | 25337 | 26337 | 27337 |
| 24338 | 25338 | 26338 | 27338 |
| 24339 | 25339 | 26339 | 27339 |
| 24340 | 25340 | 26340 | 27340 |
| 24341 | 25341 | 26341 | 27341 |
| 24342 | 25342 | 26342 | 27342 |
| 24343 | 25343 | 26343 | 27343 |
| 24344 | 25344 | 26344 | 27344 |
| 24345 | 25345 | 26345 | 27345 |
| 24346 | 25346 | 26346 | 27346 |
| 24347 | 25347 | 26347 | 27347 |
| 24348 | 25348 | 26348 | 27348 |
| 24349 | 25349 | 26349 | 27349 |
| 24350 | 25350 | 26350 | 27350 |
| 24351 | 25351 | 26351 | 27351 |
| 24352 | 25352 | 26352 | 27352 |
| 24353 | 25353 | 26353 | 27353 |
| 24354 | 25354 | 26354 | 27354 |
| 24355 | 25355 | 26355 | 27355 |
| 24356 | 25356 | 26356 | 27356 |
| 24357 | 25357 | 26357 | 27357 |
| 24358 | 25358 | 26358 | 27358 |
| 24359 | 25359 | 26359 | 27359 |
| 24360 | 25360 | 26360 | 27360 |
| 24361 | 25361 | 26361 | 27361 |
| 24362 | 25362 | 26362 | 27362 |
| 24363 | 25363 | 26363 | 27363 |
| 24364 | 25364 | 26364 | 27364 |
| 24365 | 25365 | 26365 | 27365 |
| 24366 | 25366 | 26366 | 27366 |
| 24367 | 25367 | 26367 | 27367 |
| 24368 | 25368 | 26368 | 27368 |
| 24369 | 25369 | 26369 | 27369 |
| 24370 | 25370 | 26370 | 27370 |
| 24371 | 25371 | 26371 | 27371 |
| 24372 | 25372 | 26372 | 27372 |
| 24373 | 25373 | 26373 | 27373 |
| 24374 | 25374 | 26374 | 27374 |
| 24375 | 25375 | 26375 | 27375 |
| 24376 | 25376 | 26376 | 27376 |
| 24377 | 25377 | 26377 | 27377 |
| 24378 | 25378 | 26378 | 27378 |
| 24379 | 25379 | 26379 | 27379 |
| 24380 | 25380 | 26380 | 27380 |
| 24381 | 25381 | 26381 | 27381 |
| 24382 | 25382 | 26382 | 27382 |
| 24383 | 25383 | 26383 | 27383 |
| 24384 | 25384 | 26384 | 27384 |
| 24385 | 25385 | 26385 | 27385 |
| 24386 | 25386 | 26386 | 27386 |
| 24387 | 25387 | 26387 | 27387 |
| 24388 | 25388 | 26388 | 27388 |
| 24389 | 25389 | 26389 | 27389 |
| 24390 | 25390 | 26390 | 27390 |
| 24391 | 25391 | 26391 | 27391 |
| 24392 | 25392 | 26392 | 27392 |
| 24393 | 25393 | 26393 | 27393 |
| 24394 | 25394 | 26394 | 27394 |
| 24395 | 25395 | 26395 | 27395 |
| 24396 | 25396 | 26396 | 27396 |
| 24397 | 25397 | 26397 | 27397 |
| 24398 | 25398 | 26398 | 27398 |
| 24399 | 25399 | 26399 | 27399 |
| 24400 | 25400 | 26400 | 27400 |
| 24401 | 25401 | 26401 | 27401 |
| 24402 | 25402 | 26402 | 27402 |
| 24403 | 25403 | 26403 | 27403 |
| 24404 | 25404 | 26404 | 27404 |
| 24405 | 25405 | 26405 | 27405 |
| 24406 | 25406 | 26406 | 27406 |
| 24407 | 25407 | 26407 | 27407 |
| 24408 | 25408 | 26408 | 27408 |
| 24409 | 25409 | 26409 | 27409 |
| 24410 | 25410 | 26410 | 27410 |
| 24411 | 25411 | 26411 | 27411 |
| 24412 | 25412 | 26412 | 27412 |
| 24413 | 25413 | 26413 | 27413 |
| 24414 | 25414 | 26414 | 27414 |
| 24415 | 25415 | 26415 | 27415 |
| 24416 | 25416 | 26416 | 27416 |
| 24417 | 25417 | 26417 | 27417 |
| 24418 | 25418 | 26418 | 27418 |
| 24419 | 25419 | 26419 | 27419 |
| 24420 | 25420 | 26420 | 27420 |
| 24421 | 25421 | 26421 | 27421 |
| 24422 | 25422 | 26422 | 27422 |
| 24423 | 25423 | 26423 | 27423 |
| 24424 | 25424 | 26424 | 27424 |
| 24425 | 25425 | 26425 | 27425 |
| 24426 | 25426 | 26426 | 27426 |
| 24427 | 25427 | 26427 | 27427 |
| 24428 | 25428 | 26428 | 27428 |
| 24429 | 25429 | 26429 | 27429 |
| 24430 | 25430 | 26430 | 27430 |
| 24431 | 25431 | 26431 | 27431 |
| 24432 | 25432 | 26432 | 27432 |
| 24433 | 25433 | 26433 | 27433 |
| 24434 | 25434 | 26434 | 27434 |
| 24435 | 25435 | 26435 | 27435 |
| 24436 | 25436 | 26436 | 27436 |
| 24437 | 25437 | 26437 | 27437 |
| 24438 | 25438 | 26438 | 27438 |
| 24439 | 25439 | 26439 | 27439 |
| 24440 | 25440 | 26440 | 27440 |
| 24441 | 25441 | 26441 | 27441 |
| 24442 | 25442 | 26442 | 27442 |
| 24443 | 25443 | 26443 | 27443 |
| 24444 | 25444 | 26444 | 27444 |
| 24445 | 25445 | 26445 | 27445 |
| 24446 | 25446 | 26446 | 27446 |
| 24447 | 25447 | 26447 | 27447 |
| 24448 | 25448 | 26448 | 27448 |
| 24449 | 25449 | 26449 | 27449 |
| 24450 | 25450 | 26450 | 27450 |
| 24451 | 25451 | 26451 | 27451 |
| 24452 | 25452 | 26452 | 27452 |
| 24453 | 25453 | 26453 | 27453 |
| 24454 | 25454 | 26454 | 27454 |
| 24455 | 25455 | 26455 | 27455 |
| 24456 | 25456 | 26456 | 27456 |
| 24457 | 25457 | 26457 | 27457 |
| 24458 | 25458 | 26458 | 27458 |
| 24459 | 25459 | 26459 | 27459 |
| 24460 | 25460 | 26460 | 27460 |
| 24461 | 25461 | 26461 | 27461 |
| 24462 | 25462 | 26462 | 27462 |
| 24463 | 25463 | 26463 | 27463 |
| 24464 | 25464 | 26464 | 27464 |
| 24465 | 25465 | 26465 | 27465 |
| 24466 | 25466 | 26466 | 27466 |
| 24467 | 25467 | 26467 | 27467 |
| 24468 | 25468 | 26468 | 27468 |
| 24469 | 25469 | 26469 | 27469 |
| 24470 | 25470 | 26470 | 27470 |
| 24471 | 25471 | 26471 | 27471 |
| 24472 | 25472 | 26472 | 27472 |
| 24473 | 25473 | 26473 | 27473 |
| 24474 | 25474 | 26474 | 27474 |
| 24475 | 25475 | 26475 | 27475 |
| 24476 | 25476 | 26476 | 27476 |
| 24477 | 25477 | 26477 | 27477 |
| 24478 | 25478 | 26478 | 27478 |
| 24479 | 25479 | 26479 | 27479 |
| 24480 | 25480 | 26480 | 27480 |
| 24481 | 25481 | 26481 | 27481 |
| 24482 | 25482 | 26482 | 27482 |
| 24483 | 25483 | 26483 | 27483 |
| 24484 | 25484 | 26484 | 27484 |
| 24485 | 25485 | 26485 | 27485 |
| 24486 | 25486 | 26486 | 27486 |
| 24487 | 25487 | 26487 | 27487 |
| 24488 | 25488 | 26488 | 27488 |
| 24489 | 25489 | 26489 | 27489 |
| 24490 | 25490 | 26490 | 27490 |
| 24491 | 25491 | 26491 | 27491 |
| 24492 | 25492 | 26492 | 27492 |
| 24493 | 25493 | 26493 | 27493 |
| 24494 | 25494 | 26494 | 27494 |
| 24495 | 25495 | 26495 | 27495 |
| 24496 | 25496 | 26496 | 27496 |
| 24497 | 25497 | 26497 | 27497 |
| 24498 | 25498 | 26498 | 27498 |
| 24499 | 25499 | 26499 | 27499 |
| 24500 | 25500 | 26500 | 27500 |
| 24501 | 25501 | 26501 | 27501 |
| 24502 | 25502 | 26502 | 27502 |
| 24503 | 25503 | 26503 | 27503 |
| 24504 | 25504 | 26504 | 27504 |
| 24505 | 25505 | 26505 | 27505 |
| 24506 | 25506 | 26506 | 27506 |
| 24507 | 25507 | 26507 | 27507 |
| 24508 | 25508 | 26508 | 27508 |
| 24509 | 25509 | 26509 | 27509 |
| 24510 | 25510 | 26510 | 27510 |
| 24511 | 25511 | 26511 | 27511 |
| 24512 | 25512 | 26512 | 27512 |
| 24513 | 25513 | 26513 | 27513 |
| 24514 | 25514 | 26514 | 27514 |
| 24515 | 25515 | 26515 | 27515 |
| 24516 | 25516 | 26516 | 27516 |
| 24517 | 25517 | 26517 | 27517 |
| 24518 | 25518 | 26518 | 27518 |
| 24519 | 25519 | 26519 | 27519 |
| 24520 | 25520 | 26520 | 27520 |
| 24521 | 25521 | 26521 | 27521 |
| 24522 | 25522 | 26522 | 27522 |
| 24523 | 25523 | 26523 | 27523 |
| 24524 | 25524 | 26524 | 27524 |
| 24525 | 25525 | 26525 | 27525 |
| 24526 | 25526 | 26526 | 27526 |
| 24527 | 25527 | 26527 | 27527 |
| 24528 | 25528 | 26528 | 27528 |
| 24529 | 25529 | 26529 | 27529 |
| 24530 | 25530 | 26530 | 27530 |
| 24531 | 25531 | 26531 | 27531 |
| 24532 | 25532 | 26532 | 27532 |
| 24533 | 25533 | 26533 | 27533 |
| 24534 | 25534 | 26534 | 27534 |
| 24535 | 25535 | 26535 | 27535 |
| 24536 | 25536 | 26536 | 27536 |
| 24537 | 25537 | 26537 | 27537 |
| 24538 | 25538 | 26538 | 27538 |
| 24539 | 25539 | 26539 | 27539 |
| 24540 | 25540 | 26540 | 27540 |
| 24541 | 25541 | 26541 | 27541 |
| 24542 | 25542 | 26542 | 27542 |
| 24543 | 25543 | 26543 | 27543 |
| 24544 | 25544 | 26544 | 27544 |
| 24545 | 25545 | 26545 | 27545 |
| 24546 | 25546 | 26546 | 27546 |
| 24547 | 25547 | 26547 | 27547 |
| 24548 | 25548 | 26548 | 27548 |
| 24549 | 25549 | 26549 | 27549 |
| 24550 | 25550 | 26550 | 27550 |
| 24551 | 25551 | 26551 | 27551 |
| 24552 | 25552 | 26552 | 27552 |
| 24553 | 25553 | 26553 | 27553 |
| 24554 | 25554 | 26554 | 27554 |
| 24555 | 25555 | 26555 | 27555 |
| 24556 | 25556 | 26556 | 27556 |
| 24557 | 25557 | 26557 | 27557 |
| 24558 | 25558 | 26558 | 27558 |
| 24559 | 25559 | 26559 | 27559 |
| 24560 | 25560 | 26560 | 27560 |
| 24561 | 25561 | 26561 | 27561 |
| 24562 | 25562 | 26562 | 27562 |
| 24563 | 25563 | 26563 | 27563 |
| 24564 | 25564 | 26564 | 27564 |
| 24565 | 25565 | 26565 | 27565 |
| 24566 | 25566 | 26566 | 27566 |
| 24567 | 25567 | 26567 | 27567 |
| 24568 | 25568 | 26568 | 27568 |
| 24569 | 25569 | 26569 | 27569 |
| 24570 | 25570 | 26570 | 27570 |
| 24571 | 25571 | 26571 | 27571 |
| 24572 | 25572 | 26572 | 27572 |
| 24573 | 25573 | 26573 | 27573 |
| 24574 | 25574 | 26574 | 27574 |
| 24575 | 25575 | 26575 | 27575 |
| 24576 | 25576 | 26576 | 27576 |
| 24577 | 25577 | 26577 | 27577 |
| 24578 | 25578 | 26578 | 27578 |
| 24579 | 25579 | 26579 | 27579 |
| 24580 | 25580 | 26580 | 27580 |
| 24581 | 25581 | 26581 | 27581 |
| 24582 | 25582 | 26582 | 27582 |
| 24583 | 25583 | 26583 | 27583 |
| 24584 | 25584 | 26584 | 27584 |
| 24585 | 25585 | 26585 | 27585 |
| 24586 | 25586 | 26586 | 27586 |
| 24587 | 25587 | 26587 | 27587 |
| 24588 | 25588 | 26588 | 27588 |
| 24589 | 25589 | 26589 | 27589 |
| 24590 | 25590 | 26590 | 27590 |
| 24591 | 25591 | 26591 | 27591 |
| 24592 | 25592 | 26592 | 27592 |
| 24593 | 25593 | 26593 | 27593 |
| 24594 | 25594 | 26594 | 27594 |
| 24595 | 25595 | 26595 | 27595 |
| 24596 | 25596 | 26596 | 27596 |
| 24597 | 25597 | 26597 | 27597 |
| 24598 | 25598 | 26598 | 27598 |
| 24599 | 25599 | 26599 | 27599 |
| 24600 | 25600 | 26600 | 27600 |
| 24601 | 25601 | 26601 | 27601 |
| 24602 | 25602 | 26602 | 27602 |
| 24603 | 25603 | 26603 | 27603 |
| 24604 | 25604 | 26604 | 27604 |
| 24605 | 25605 | 26605 | 27605 |
| 24606 | 25606 | 26606 | 27606 |
| 24607 | 25607 | 26607 | 27607 |
| 24608 | 25608 | 26608 | 27608 |
| 24609 | 25609 | 26609 | 27609 |
| 24610 | 25610 | 26610 | 27610 |
| 24611 | 25611 | 26611 | 27611 |
| 24612 | 25612 | 26612 | 27612 |
| 24613 | 25613 | 26613 | 27613 |
| 24614 | 25614 | 26614 | 27614 |
| 24615 | 25615 | 26615 | 27615 |
| 24616 | 25616 | 26616 | 27616 |
| 24617 | 25617 | 26617 | 27617 |
| 24618 | 25618 | 26618 | 27618 |
| 24619 | 25619 | 26619 | 27619 |
| 24620 | 25620 | 26620 | 27620 |
| 24621 | 25621 | 26621 | 27621 |
| 24622 | 25622 | 26622 | 27622 |
| 24623 | 25623 | 26623 | 27623 |
| 24624 | 25624 | 26624 | 27624 |
| 24625 | 25625 | 26625 | 27625 |
| 24626 | 25626 | 26626 | 27626 |
| 24627 | 25627 | 26627 | 27627 |
| 24628 | 25628 | 26628 | 27628 |
| 24629 | 25629 | 26629 | 27629 |
| 24630 | 25630 | 26630 | 27630 |
| 24631 | 25631 | 26631 | 27631 |
| 24632 | 25632 | 26632 | 27632 |
| 24633 | 25633 | 26633 | 27633 |
| 24634 | 25634 | 26634 | 27634 |
| 24635 | 25635 | 26635 | 27635 |
| 24636 | 25636 | 26636 | 27636 |
| 24637 | 25637 | 26637 | 27637 |
| 24638 | 25638 | 26638 | 27638 |
| 24639 | 25639 | 26639 | 27639 |
| 24640 | 25640 | 26640 | 27640 |
| 24641 | 25641 | 26641 | 27641 |
| 24642 | 25642 | 26642 | 27642 |
| 24643 | 25643 | 26643 | 27643 |
| 24644 | 25644 | 26644 | 27644 |
| 24645 | 25645 | 26645 | 27645 |
| 24646 | 25646 | 26646 | 27646 |
| 24647 | 25647 | 26647 | 27647 |
| 24648 | 25648 | 26648 | 27648 |
| 24649 | 25649 | 26649 | 27649 |
| 24650 | 25650 | 26650 | 27650 |
| 24651 | 25651 | 26651 | 27651 |
| 24652 | 25652 | 26652 | 27652 |
| 24653 | 25653 | 26653 | 27653 |
| 24654 | 25654 | 26654 | 27654 |
| 24655 | 25655 | 26655 | 27655 |
| 24656 | 25656 | 26656 | 27656 |
| 24657 | 25657 | 26657 | 27657 |
| 24658 | 25658 | 26658 | 27658 |
| 24659 | 25659 | 26659 | 27659 |
| 24660 | 25660 | 26660 | 27660 |
| 24661 | 25661 | 26661 | 27661 |
| 24662 | 25662 | 26662 | 27662 |
| 24663 | 25663 | 26663 | 27663 |
| 24664 | 25664 | 26664 | 27664 |
| 24665 | 25665 | 26665 | 27665 |
| 24666 | 25666 | 26666 | 27666 |
| 24667 | 25667 | 26667 | 27667 |
| 24668 | 25668 | 26668 | 27668 |
| 24669 | 25669 | 26669 | 27669 |
| 24670 | 25670 | 26670 | 27670 |
| 24671 | 25671 | 26671 | 27671 |
| 24672 | 25672 | 26672 | 27672 |
| 24673 | 25673 | 26673 | 27673 |
| 24674 | 25674 | 26674 | 27674 |
| 24675 | 25675 | 26675 | 27675 |
| 24676 | 25676 | 26676 | 27676 |
| 24677 | 25677 | 26677 | 27677 |
| 24678 | 25678 | 26678 | 27678 |
| 24679 | 25679 | 26679 | 27679 |
| 24680 | 25680 | 26680 | 27680 |
| 24681 | 25681 | 26681 | 27681 |
| 24682 | 25682 | 26682 | 27682 |
| 24683 | 25683 | 26683 | 27683 |
| 24684 | 25684 | 26684 | 27684 |
| 24685 | 25685 | 26685 | 27685 |
| 24686 | 25686 | 26686 | 27686 |
| 24687 | 25687 | 26687 | 27687 |
| 24688 | 25688 | 26688 | 27688 |
| 24689 | 25689 | 26689 | 27689 |
| 24690 | 25690 | 26690 | 27690 |
| 24691 | 25691 | 26691 | 27691 |
| 24692 | 25692 | 26692 | 27692 |
| 24693 | 25693 | 26693 | 27693 |
| 24694 | 25694 | 26694 | 27694 |
| 24695 | 25695 | 26695 | 27695 |
| 24696 | 25696 | 26696 | 27696 |
| 24697 | 25697 | 26697 | 27697 |
| 24698 | 25698 | 26698 | 27698 |
| 24699 | 25699 | 26699 | 27699 |
| 24700 | 25700 | 26700 | 27700 |
| 24701 | 25701 | 26701 | 27701 |
| 24702 | 25702 | 26702 | 27702 |
| 24703 | 25703 | 26703 | 27703 |
| 24704 | 25704 | 26704 | 27704 |
| 24705 | 25705 | 26705 | 27705 |
| 24706 | 25706 | 26706 | 27706 |
| 24707 | 25707 | 26707 | 27707 |
| 24708 | 25708 | 26708 | 27708 |
| 24709 | 25709 | 26709 | 27709 |
| 24710 | 25710 | 26710 | 27710 |
| 24711 | 25711 | 26711 | 27711 |
| 24712 | 25712 | 26712 | 27712 |
| 24713 | 25713 | 26713 | 27713 |
| 24714 | 25714 | 26714 | 27714 |
| 24715 | 25715 | 26715 | 27715 |
| 24716 | 25716 | 26716 | 27716 |
| 24717 | 25717 | 26717 | 27717 |
| 24718 | 25718 | 26718 | 27718 |
| 24719 | 25719 | 26719 | 27719 |
| 24720 | 25720 | 26720 | 27720 |
| 24721 | 25721 | 26721 | 27721 |
| 24722 | 25722 | 26722 | 27722 |
| 24723 | 25723 | 26723 | 27723 |
| 24724 | 25724 | 26724 | 27724 |
| 24725 | 25725 | 26725 | 27725 |
| 24726 | 25726 | 26726 | 27726 |
| 24727 | 25727 | 26727 | 27727 |
| 24728 | 25728 | 26728 | 27728 |
| 24729 | 25729 | 26729 | 27729 |
| 24730 | 25730 | 26730 | 27730 |
| 24731 | 25731 | 26731 | 27731 |
| 24732 | 25732 | 26732 | 27732 |
| 24733 | 25733 | 26733 | 27733 |
| 24734 | 25734 | 26734 | 27734 |
| 24735 | 25735 | 26735 | 27735 |
| 24736 | 25736 | 26736 | 27736 |
| 24737 | 25737 | 26737 | 27737 |
| 24738 | 25738 | 26738 | 27738 |
| 24739 | 25739 | 26739 | 27739 |
| 24740 | 25740 | 26740 | 27740 |
| 24741 | 25741 | 26741 | 27741 |
| 24742 | 25742 | 26742 | 27742 |
| 24743 | 25743 | 26743 | 27743 |
| 24744 | 25744 | 26744 | 27744 |
| 24745 | 25745 | 26745 | 27745 |
| 24746 | 25746 | 26746 | 27746 |
| 24747 | 25747 | 26747 | 27747 |
| 24748 | 25748 | 26748 | 27748 |
| 24749 | 25749 | 26749 | 27749 |
| 24750 | 25750 | 26750 | 27750 |
| 24751 | 25751 | 26751 | 27751 |
| 24752 | 25752 | 26752 | 27752 |
| 24753 | 25753 | 26753 | 27753 |
| 24754 | 25754 | 26754 | 27754 |
| 24755 | 25755 | 26755 | 27755 |
| 24756 | 25756 | 26756 | 27756 |
| 24757 | 25757 | 26757 | 27757 |
| 24758 | 25758 | 26758 | 27758 |
| 24759 | 25759 | 26759 | 27759 |
| 24760 | 25760 | 26760 | 27760 |
| 24761 | 25761 | 26761 | 27761 |
| 24762 | 25762 | 26762 | 27762 |
| 24763 | 25763 | 26763 | 27763 |
| 24764 | 25764 | 26764 | 27764 |
| 24765 | 25765 | 26765 | 27765 |
| 24766 | 25766 | 26766 | 27766 |
| 24767 | 25767 | 26767 | 27767 |
| 24768 | 25768 | 26768 | 27768 |
| 24769 | 25769 | 26769 | 27769 |
| 24770 | 25770 | 26770 | 27770 |
| 24771 | 25771 | 26771 | 27771 |
| 24772 | 25772 | 26772 | 27772 |
| 24773 | 25773 | 26773 | 27773 |
| 24774 | 25774 | 26774 | 27774 |
| 24775 | 25775 | 26775 | 27775 |
| 24776 | 25776 | 26776 | 27776 |
| 24777 | 25777 | 26777 | 27777 |
| 24778 | 25778 | 26778 | 27778 |
| 24779 | 25779 | 26779 | 27779 |
| 24780 | 25780 | 26780 | 27780 |
| 24781 | 25781 | 26781 | 27781 |
| 24782 | 25782 | 26782 | 27782 |
| 24783 | 25783 | 26783 | 27783 |
| 24784 | 25784 | 26784 | 27784 |
| 24785 | 25785 | 26785 | 27785 |
| 24786 | 25786 | 26786 | 27786 |
| 24787 | 25787 | 26787 | 27787 |
| 24788 | 25788 | 26788 | 27788 |
| 24789 | 25789 | 26789 | 27789 |
| 24790 | 25790 | 26790 | 27790 |
| 24791 | 25791 | 26791 | 27791 |
| 24792 | 25792 | 26792 | 27792 |
| 24793 | 25793 | 26793 | 27793 |
| 24794 | 25794 | 26794 | 27794 |
| 24795 | 25795 | 26795 | 27795 |
| 24796 | 25796 | 26796 | 27796 |
| 24797 | 25797 | 26797 | 27797 |
| 24798 | 25798 | 26798 | 27798 |
| 24799 | 25799 | 26799 | 27799 |
| 24800 | 25800 | 26800 | 27800 |
| 24801 | 25801 | 26801 | 27801 |
| 24802 | 25802 | 26802 | 27802 |
| 24803 | 25803 | 26803 | 27803 |
| 24804 | 25804 | 26804 | 27804 |
| 24805 | 25805 | 26805 | 27805 |
| 24806 | 25806 | 26806 | 27806 |
| 24807 | 25807 | 26807 | 27807 |
| 24808 | 25808 | 26808 | 27808 |
| 24809 | 25809 | 26809 | 27809 |
| 24810 | 25810 | 26810 | 27810 |
| 24811 | 25811 | 26811 | 27811 |
| 24812 | 25812 | 26812 | 27812 |
| 24813 | 25813 | 26813 | 27813 |
| 24814 | 25814 | 26814 | 27814 |
| 24815 | 25815 | 26815 | 27815 |
| 24816 | 25816 | 26816 | 27816 |
| 24817 | 25817 | 26817 | 27817 |
| 24818 | 25818 | 26818 | 27818 |
| 24819 | 25819 | 26819 | 27819 |
| 24820 | 25820 | 26820 | 27820 |
| 24821 | 25821 | 26821 | 27821 |
| 24822 | 25822 | 26822 | 27822 |
| 24823 | 25823 | 26823 | 27823 |
| 24824 | 25824 | 26824 | 27824 |
| 24825 | 25825 | 26825 | 27825 |
| 24826 | 25826 | 26826 | 27826 |
| 24827 | 25827 | 26827 | 27827 |
| 24828 | 25828 | 26828 | 27828 |
| 24829 | 25829 | 26829 | 27829 |
| 24830 | 25830 | 26830 | 27830 |
| 24831 | 25831 | 26831 | 27831 |
| 24832 | 25832 | 26832 | 27832 |
| 24833 | 25833 | 26833 | 27833 |
| 24834 | 25834 | 26834 | 27834 |
| 24835 | 25835 | 26835 | 27835 |
| 24836 | 25836 | 26836 | 27836 |
| 24837 | 25837 | 26837 | 27837 |
| 24838 | 25838 | 26838 | 27838 |
| 24839 | 25839 | 26839 | 27839 |
| 24840 | 25840 | 26840 | 27840 |
| 24841 | 25841 | 26841 | 27841 |
| 24842 | 25842 | 26842 | 27842 |
| 24843 | 25843 | 26843 | 27843 |
| 24844 | 25844 | 26844 | 27844 |
| 24845 | 25845 | 26845 | 27845 |
| 24846 | 25846 | 26846 | 27846 |
| 24847 | 25847 | 26847 | 27847 |
| 24848 | 25848 | 26848 | 27848 |
| 24849 | 25849 | 26849 | 27849 |
| 24850 | 25850 | 26850 | 27850 |
| 24851 | 25851 | 26851 | 27851 |
| 24852 | 25852 | 26852 | 27852 |
| 24853 | 25853 | 26853 | 27853 |
| 24854 | 25854 | 26854 | 27854 |
| 24855 | 25855 | 26855 | 27855 |
| 24856 | 25856 | 26856 | 27856 |
| 24857 | 25857 | 26857 | 27857 |
| 24858 | 25858 | 26858 | 27858 |
| 24859 | 25859 | 26859 | 27859 |
| 24860 | 25860 | 26860 | 27860 |
| 24861 | 25861 | 26861 | 27861 |
| 24862 | 25862 | 26862 | 27862 |
| 24863 | 25863 | 26863 | 27863 |
| 24864 | 25864 | 26864 | 27864 |
| 24865 | 25865 | 26865 | 27865 |
| 24866 | 25866 | 26866 | 27866 |
| 24867 | 25867 | 26867 | 27867 |
| 24868 | 25868 | 26868 | 27868 |
| 24869 | 25869 | 26869 | 27869 |
| 24870 | 25870 | 26870 | 27870 |
| 24871 | 25871 | 26871 | 27871 |
| 24872 | 25872 | 26872 | 27872 |
| 24873 | 25873 | 26873 | 27873 |
| 24874 | 25874 | 26874 | 27874 |
| 24875 | 25875 | 26875 | 27875 |
| 24876 | 25876 | 26876 | 27876 |
| 24877 | 25877 | 26877 | 27877 |
| 24878 | 25878 | 26878 | 27878 |
| 24879 | 25879 | 26879 | 27879 |
| 24880 | 25880 | 26880 | 27880 |
| 24881 | 25881 | 26881 | 27881 |
| 24882 | 25882 | 26882 | 27882 |
| 24883 | 25883 | 26883 | 27883 |
| 24884 | 25884 | 26884 | 27884 |
| 24885 | 25885 | 26885 | 27885 |
| 24886 | 25886 | 26886 | 27886 |
| 24887 | 25887 | 26887 | 27887 |
| 24888 | 25888 | 26888 | 27888 |
| 24889 | 25889 | 26889 | 27889 |
| 24890 | 25890 | 26890 | 27890 |
| 24891 | 25891 | 26891 | 27891 |
| 24892 | 25892 | 26892 | 27892 |
| 24893 | 25893 | 26893 | 27893 |
| 24894 | 25894 | 26894 | 27894 |
| 24895 | 25895 | 26895 | 27895 |
| 24896 | 25896 | 26896 | 27896 |
| 24897 | 25897 | 26897 | 27897 |
| 24898 | 25898 | 26898 | 27898 |
| 24899 | 25899 | 26899 | 27899 |
| 24900 | 25900 | 26900 | 27900 |
| 24901 | 25901 | 26901 | 27901 |
| 24902 | 25902 | 26902 | 27902 |
| 24903 | 25903 | 26903 | 27903 |
| 24904 | 25904 | 26904 | 27904 |
| 24905 | 25905 | 26905 | 27905 |
| 24906 | 25906 | 26906 | 27906 |
| 24907 | 25907 | 26907 | 27907 |
| 24908 | 25908 | 26908 | 27908 |
| 24909 | 25909 | 26909 | 27909 |
| 24910 | 25910 | 26910 | 27910 |
| 24911 | 25911 | 26911 | 27911 |
| 24912 | 25912 | 26912 | 27912 |
| 24913 | 25913 | 26913 | 27913 |
| 24914 | 25914 | 26914 | 27914 |
| 24915 | 25915 | 26915 | 27915 |
| 24916 | 25916 | 26916 | 27916 |
| 24917 | 25917 | 26917 | 27917 |
| 24918 | 25918 | 26918 | 27918 |
| 24919 | 25919 | 26919 | 27919 |
| 24920 | 25920 | 26920 | 27920 |
| 24921 | 25921 | 26921 | 27921 |
| 24922 | 25922 | 26922 | 27922 |
| 24923 | 25923 | 26923 | 27923 |
| 24924 | 25924 | 26924 | 27924 |
| 24925 | 25925 | 26925 | 27925 |
| 24926 | 25926 | 26926 | 27926 |
| 24927 | 25927 | 26927 | 27927 |
| 24928 | 25928 | 26928 | 27928 |
| 24929 | 25929 | 26929 | 27929 |
| 24930 | 25930 | 26930 | 27930 |
| 24931 | 25931 | 26931 | 27931 |
| 24932 | 25932 | 26932 | 27932 |
| 24933 | 25933 | 26933 | 27933 |
| 24934 | 25934 | 26934 | 27934 |
| 24935 | 25935 | 26935 | 27935 |
| 24936 | 25936 | 26936 | 27936 |
| 24937 | 25937 | 26937 | 27937 |
| 24938 | 25938 | 26938 | 27938 |
| 24939 | 25939 | 26939 | 27939 |
| 24940 | 25940 | 26940 | 27940 |
| 24941 | 25941 | 26941 | 27941 |
| 24942 | 25942 | 26942 | 27942 |
| 24943 | 25943 | 26943 | 27943 |
| 24944 | 25944 | 26944 | 27944 |
| 24945 | 25945 | 26945 | 27945 |
| 24946 | 25946 | 26946 | 27946 |
| 24947 | 25947 | 26947 | 27947 |
| 24948 | 25948 | 26948 | 27948 |
| 24949 | 25949 | 26949 | 27949 |
| 24950 | 25950 | 26950 | 27950 |
| 24951 | 25951 | 26951 | 27951 |
| 24952 | 25952 | 26952 | 27952 |
| 24953 | 25953 | 26953 | 27953 |
| 24954 | 25954 | 26954 | 27954 |
| 24955 | 25955 | 26955 | 27955 |
| 24956 | 25956 | 26956 | 27956 |
| 24957 | 25957 | 26957 | 27957 |
| 24958 | 25958 | 26958 | 27958 |
| 24959 | 25959 | 26959 | 27959 |
| 24960 | 25960 | 26960 | 27960 |
| 24961 | 25961 | 26961 | 27961 |
| 24962 | 25962 | 26962 | 27962 |
| 24963 | 25963 | 26963 | 27963 |
| 24964 | 25964 | 26964 | 27964 |
| 24965 | 25965 | 26965 | 27965 |
| 24966 | 25966 | 26966 | 27966 |
| 24967 | 25967 | 26967 | 27967 |
| 24968 | 25968 | 26968 | 27968 |
| 24969 | 25969 | 26969 | 27969 |
| 24970 | 25970 | 26970 | 27970 |
| 24971 | 25971 | 26971 | 27971 |
| 24972 | 25972 | 26972 | 27972 |
| 24973 | 25973 | 26973 | 27973 |
| 24974 | 25974 | 26974 | 27974 |
| 24975 | 25975 | 26975 | 27975 |
| 24976 | 25976 | 26976 | 27976 |
| 24977 | 25977 | 26977 | 27977 |
| 24978 | 25978 | 26978 | 27978 |
| 24979 | 25979 | 26979 | 27979 |
| 24980 | 25980 | 26980 | 27980 |
| 24981 | 25981 | 26981 | 27981 |
| 24982 | 25982 | 26982 | 27982 |
| 24983 | 25983 | 26983 | 27983 |
| 24984 | 25984 | 26984 | 27984 |
| 24985 | 25985 | 26985 | 27985 |
| 24986 | 25986 | 26986 | 27986 |
| 24987 | 25987 | 26987 | 27987 |
| 24988 | 25988 | 26988 | 27988 |
| 24989 | 25989 | 26989 | 27989 |
| 24990 | 25990 | 26990 | 27990 |
| 24991 | 25991 | 26991 | 27991 |
| 24992 | 25992 | 26992 | 27992 |
| 24993 | 25993 | 26993 | 27993 |
| 24994 | 25994 | 26994 | 27994 |
| 24995 | 25995 | 26995 | 27995 |
| 24996 | 25996 | 26996 | 27996 |
| 24997 | 25997 | 26997 | 27997 |
| 24998 | 25998 | 26998 | 27998 |
| 24999 | 25999 | 26999 | 27999 |
| 25000 | 26000 | 27000 | 28000 |
| 25001 | 26001 | 27001 | 28001 |
| 25002 | 26002 | 27002 | 28002 |

[0134] In some embodiments, the sequences that specifically bind to walnut comprise an inner sequence selected from the group consisting of the nucleic acid sequences of SEQ ID NOs. 28003 to 29002. In some examples, a short nucleic acid sequence may be affixed to the 5-end of the inner sequence. The short nucleic acid sequence may be the 5′ primer sequence used in the random ssDNA library, i.e. the nucleic acid sequence of SEQ ID NO. 1. Accordingly, the aptamer that specifically binds to walnut may comprise a nucleic acid sequence selected from the group consisting of SEQ ID NOs. 29003 to 30002. In other examples, a short nucleic acid sequence may be affixed to the 3-end of the inner sequence. The short nucleic acid sequence may be the 3′ primer sequence used in the random ssDNA library, i.e. the nucleic acid sequence of SEQ ID NO. 2. Accordingly, the aptamer that specifically binds to walnut may comprise a nucleic acid sequence selected from the group consisting of SEQ ID NOs. 30003 to 31002. In other examples, the inner sequence may comprise a 5′ end short sequence (i.e., SEQ ID NO. 1) and a 3′ end short sequence (i.e., SEQ ID NO. 2). Accordingly, the aptamer that specifically binds to walnut may comprise a nucleic acid sequence selected from the group consisting of SEQ ID NOs. 31003 to 32002. In one embodiment, the aptamer of the present disclosure that specifically binds to walnut may comprise a nucleic acid sequence selected from the group consisting of SEQ ID NOs. 28003 to 32002 listed in Table 9, or variant thereof.

TABLE 9
Aptamer sequences against walnut
Aptamer sequence

| | | | 5′-sequence |
|---|---|---|---|
| | 5′-sequence | Inner | and inner |
| Inner | and inner | sequence and | sequence and |
| sequence | sequence | 3′-sequence | 3′-sequence |
| (SEQ ID NO.) | (SEQ ID NO.) | (SEQ ID NO.) | (SEQ ID NO.) |
| 28003 | 29003 | 30003 | 31003 |
| 28004 | 29004 | 30004 | 31004 |
| 28005 | 29005 | 30005 | 31005 |
| 28006 | 29006 | 30006 | 31006 |
| 28007 | 29007 | 30007 | 31007 |
| 28008 | 29008 | 30008 | 31008 |
| 28009 | 29009 | 30009 | 31009 |
| 28010 | 29010 | 30010 | 31010 |
| 28011 | 29011 | 30011 | 31011 |
| 28012 | 29012 | 30012 | 31012 |
| 28013 | 29013 | 30013 | 31013 |
| 28014 | 29014 | 30014 | 31014 |
| 28015 | 29015 | 30015 | 31015 |
| 28016 | 29016 | 30016 | 31016 |
| 28017 | 29017 | 30017 | 31017 |
| 28018 | 29018 | 30018 | 31018 |
| 28019 | 29019 | 30019 | 31019 |
| 28020 | 29020 | 30020 | 31020 |
| 28021 | 29021 | 30021 | 31021 |
| 28022 | 29022 | 30022 | 31022 |
| 28023 | 29023 | 30023 | 31023 |
| 28024 | 29024 | 30024 | 31024 |
| 28025 | 29025 | 30025 | 31025 |
| 28026 | 29026 | 30026 | 31026 |
| 28027 | 29027 | 30027 | 31027 |
| 28028 | 29028 | 30028 | 31028 |
| 28029 | 29029 | 30029 | 31029 |
| 28030 | 29030 | 30030 | 31030 |
| 28031 | 29031 | 30031 | 31031 |
| 28032 | 29032 | 30032 | 31032 |
| 28033 | 29033 | 30033 | 31033 |
| 28034 | 29034 | 30034 | 31034 |
| 28035 | 29035 | 30035 | 31035 |
| 28036 | 29036 | 30036 | 31036 |
| 28037 | 29037 | 30037 | 31037 |
| 28038 | 29038 | 30038 | 31038 |
| 28039 | 29039 | 30039 | 31039 |
| 28040 | 29040 | 30040 | 31040 |
| 28041 | 29041 | 30041 | 31041 |
| 28042 | 29042 | 30042 | 31042 |
| 28043 | 29043 | 30043 | 31043 |
| 28044 | 29044 | 30044 | 31044 |
| 28045 | 29045 | 30045 | 31045 |
| 28046 | 29046 | 30046 | 31046 |
| 28047 | 29047 | 30047 | 31047 |
| 28048 | 29048 | 30048 | 31048 |
| 28049 | 29049 | 30049 | 31049 |
| 28050 | 29050 | 30050 | 31050 |
| 28051 | 29051 | 30051 | 31051 |
| 28052 | 29052 | 30052 | 31052 |
| 28053 | 29053 | 30053 | 31053 |
| 28054 | 29054 | 30054 | 31054 |
| 28055 | 29055 | 30055 | 31055 |
| 28056 | 29056 | 30056 | 31056 |
| 28057 | 29057 | 30057 | 31057 |
| 28058 | 29058 | 30058 | 31058 |
| 28059 | 29059 | 30059 | 31059 |
| 28060 | 29060 | 30060 | 31060 |
| 28061 | 29061 | 30061 | 31061 |
| 28062 | 29062 | 30062 | 31062 |
| 28063 | 29063 | 30063 | 31063 |
| 28064 | 29064 | 30064 | 31064 |
| 28065 | 29065 | 30065 | 31065 |
| 28066 | 29066 | 30066 | 31066 |
| 28067 | 29067 | 30067 | 31067 |
| 28068 | 29068 | 30068 | 31068 |
| 28069 | 29069 | 30069 | 31069 |
| 28070 | 29070 | 30070 | 31070 |
| 28071 | 29071 | 30071 | 31071 |
| 28072 | 29072 | 30072 | 31072 |
| 28073 | 29073 | 30073 | 31073 |
| 28074 | 29074 | 30074 | 31074 |
| 28075 | 29075 | 30075 | 31075 |
| 28076 | 29076 | 30076 | 31076 |
| 28077 | 29077 | 30077 | 31077 |
| 28078 | 29078 | 30078 | 31078 |
| 28079 | 29079 | 30079 | 31079 |
| 28080 | 29080 | 30080 | 31080 |
| 28081 | 29081 | 30081 | 31081 |
| 28082 | 29082 | 30082 | 31082 |
| 28083 | 29083 | 30083 | 31083 |
| 28084 | 29084 | 30084 | 31084 |
| 28085 | 29085 | 30085 | 31085 |
| 28086 | 29086 | 30086 | 31086 |
| 28087 | 29087 | 30087 | 31087 |
| 28088 | 29088 | 30088 | 31088 |
| 28089 | 29089 | 30089 | 31089 |
| 28090 | 29090 | 30090 | 31090 |
| 28091 | 29091 | 30091 | 31091 |
| 28092 | 29092 | 30092 | 31092 |
| 28093 | 29093 | 30093 | 31093 |
| 28094 | 29094 | 30094 | 31094 |
| 28095 | 29095 | 30095 | 31095 |
| 28096 | 29096 | 30096 | 31096 |
| 28097 | 29097 | 30097 | 31097 |
| 28098 | 29098 | 30098 | 31098 |
| 28099 | 29099 | 30099 | 31099 |
| 28100 | 29100 | 30100 | 31100 |
| 28101 | 29101 | 30101 | 31101 |
| 28102 | 29102 | 30102 | 31102 |
| 28103 | 29103 | 30103 | 31103 |
| 28104 | 29104 | 30104 | 31104 |
| 28105 | 29105 | 30105 | 31105 |
| 28106 | 29106 | 30106 | 31106 |
| 28107 | 29107 | 30107 | 31107 |
| 28108 | 29108 | 30108 | 31108 |
| 28109 | 29109 | 30109 | 31109 |
| 28110 | 29110 | 30110 | 31110 |
| 28111 | 29111 | 30111 | 31111 |
| 28112 | 29112 | 30112 | 31112 |
| 28113 | 29113 | 30113 | 31113 |
| 28114 | 29114 | 30114 | 31114 |
| 28115 | 29115 | 30115 | 31115 |
| 28116 | 29116 | 30116 | 31116 |
| 28117 | 29117 | 30117 | 31117 |
| 28118 | 29118 | 30118 | 31118 |
| 28119 | 29119 | 30119 | 31119 |
| 28120 | 29120 | 30120 | 31120 |
| 28121 | 29121 | 30121 | 31121 |
| 28122 | 29122 | 30122 | 31122 |
| 28123 | 29123 | 30123 | 31123 |
| 28124 | 29124 | 30124 | 31124 |
| 28125 | 29125 | 30125 | 31125 |
| 28126 | 29126 | 30126 | 31126 |
| 28127 | 29127 | 30127 | 31127 |
| 28128 | 29128 | 30128 | 31128 |
| 28129 | 29129 | 30129 | 31129 |
| 28130 | 29130 | 30130 | 31130 |
| 28131 | 29131 | 30131 | 31131 |
| 28132 | 29132 | 30132 | 31132 |
| 28133 | 29133 | 30133 | 31133 |
| 28134 | 29134 | 30134 | 31134 |
| 28135 | 29135 | 30135 | 31135 |
| 28136 | 29136 | 30136 | 31136 |
| 28137 | 29137 | 30137 | 31137 |
| 28138 | 29138 | 30138 | 31138 |
| 28139 | 29139 | 30139 | 31139 |
| 28140 | 29140 | 30140 | 31140 |
| 28141 | 29141 | 30141 | 31141 |
| 28142 | 29142 | 30142 | 31142 |
| 28143 | 29143 | 30143 | 31143 |
| 28144 | 29144 | 30144 | 31144 |
| 28145 | 29145 | 30145 | 31145 |
| 28146 | 29146 | 30146 | 31146 |
| 28147 | 29147 | 30147 | 31147 |
| 28148 | 29148 | 30148 | 31148 |
| 28149 | 29149 | 30149 | 31149 |
| 28150 | 29150 | 30150 | 31150 |
| 28151 | 29151 | 30151 | 31151 |
| 28152 | 29152 | 30152 | 31152 |
| 28153 | 29153 | 30153 | 31153 |
| 28154 | 29154 | 30154 | 31154 |
| 28155 | 29155 | 30155 | 31155 |
| 28156 | 29156 | 30156 | 31156 |
| 28157 | 29157 | 30157 | 31157 |
| 28158 | 29158 | 30158 | 31158 |
| 28159 | 29159 | 30159 | 31159 |
| 28160 | 29160 | 30160 | 31160 |
| 28161 | 29161 | 30161 | 31161 |
| 28162 | 29162 | 30162 | 31162 |
| 28163 | 29163 | 30163 | 31163 |
| 28164 | 29164 | 30164 | 31164 |
| 28165 | 29165 | 30165 | 31165 |
| 28166 | 29166 | 30166 | 31166 |
| 28167 | 29167 | 30167 | 31167 |
| 28168 | 29168 | 30168 | 31168 |
| 28169 | 29169 | 30169 | 31169 |
| 28170 | 29170 | 30170 | 31170 |
| 28171 | 29171 | 30171 | 31171 |
| 28172 | 29172 | 30172 | 31172 |
| 28173 | 29173 | 30173 | 31173 |
| 28174 | 29174 | 30174 | 31174 |
| 28175 | 29175 | 30175 | 31175 |
| 28176 | 29176 | 30176 | 31176 |
| 28177 | 29177 | 30177 | 31177 |
| 28178 | 29178 | 30178 | 31178 |
| 28179 | 29179 | 30179 | 31179 |
| 28180 | 29180 | 30180 | 31180 |
| 28181 | 29181 | 30181 | 31181 |
| 28182 | 29182 | 30182 | 31182 |
| 28183 | 29183 | 30183 | 31183 |
| 28184 | 29184 | 30184 | 31184 |
| 28185 | 29185 | 30185 | 31185 |
| 28186 | 29186 | 30186 | 31186 |
| 28187 | 29187 | 30187 | 31187 |
| 28188 | 29188 | 30188 | 31188 |
| 28189 | 29189 | 30189 | 31189 |
| 28190 | 29190 | 30190 | 31190 |
| 28191 | 29191 | 30191 | 31191 |
| 28192 | 29192 | 30192 | 31192 |
| 28193 | 29193 | 30193 | 31193 |
| 28194 | 29194 | 30194 | 31194 |
| 28195 | 29195 | 30195 | 31195 |
| 28196 | 29196 | 30196 | 31196 |
| 28197 | 29197 | 30197 | 31197 |
| 28198 | 29198 | 30198 | 31198 |
| 28199 | 29199 | 30199 | 31199 |
| 28200 | 29200 | 30200 | 31200 |
| 28201 | 29201 | 30201 | 31201 |
| 28202 | 29202 | 30202 | 31202 |
| 28203 | 29203 | 30203 | 31203 |
| 28204 | 29204 | 30204 | 31204 |
| 28205 | 29205 | 30205 | 31205 |
| 28206 | 29206 | 30206 | 31206 |
| 28207 | 29207 | 30207 | 31207 |
| 28208 | 29208 | 30208 | 31208 |
| 28209 | 29209 | 30209 | 31209 |
| 28210 | 29210 | 30210 | 31210 |
| 28211 | 29211 | 30211 | 31211 |
| 28212 | 29212 | 30212 | 31212 |
| 28213 | 29213 | 30213 | 31213 |
| 28214 | 29214 | 30214 | 31214 |
| 28215 | 29215 | 30215 | 31215 |
| 28216 | 29216 | 30216 | 31216 |
| 28217 | 29217 | 30217 | 31217 |
| 28218 | 29218 | 30218 | 31218 |
| 28219 | 29219 | 30219 | 31219 |
| 28220 | 29220 | 30220 | 31220 |
| 28221 | 29221 | 30221 | 31221 |
| 28222 | 29222 | 30222 | 31222 |
| 28223 | 29223 | 30223 | 31223 |
| 28224 | 29224 | 30224 | 31224 |
| 28225 | 29225 | 30225 | 31225 |
| 28226 | 29226 | 30226 | 31226 |
| 28227 | 29227 | 30227 | 31227 |
| 28228 | 29228 | 30228 | 31228 |
| 28229 | 29229 | 30229 | 31229 |
| 28230 | 29230 | 30230 | 31230 |
| 28231 | 29231 | 30231 | 31231 |
| 28232 | 29232 | 30232 | 31232 |
| 28233 | 29233 | 30233 | 31233 |
| 28234 | 29234 | 30234 | 31234 |
| 28235 | 29235 | 30235 | 31235 |
| 28236 | 29236 | 30236 | 31236 |
| 28237 | 29237 | 30237 | 31237 |
| 28238 | 29238 | 30238 | 31238 |
| 28239 | 29239 | 30239 | 31239 |
| 28240 | 29240 | 30240 | 31240 |
| 28241 | 29241 | 30241 | 31241 |
| 28242 | 29242 | 30242 | 31242 |
| 28243 | 29243 | 30243 | 31243 |
| 28244 | 29244 | 30244 | 31244 |
| 28245 | 29245 | 30245 | 31245 |
| 28246 | 29246 | 30246 | 31246 |
| 28247 | 29247 | 30247 | 31247 |
| 28248 | 29248 | 30248 | 31248 |
| 28249 | 29249 | 30249 | 31249 |
| 28250 | 29250 | 30250 | 31250 |
| 28251 | 29251 | 30251 | 31251 |
| 28252 | 29252 | 30252 | 31252 |
| 28253 | 29253 | 30253 | 31253 |
| 28254 | 29254 | 30254 | 31254 |
| 28255 | 29255 | 30255 | 31255 |
| 28256 | 29256 | 30256 | 31256 |
| 28257 | 29257 | 30257 | 31257 |
| 28258 | 29258 | 30258 | 31258 |
| 28259 | 29259 | 30259 | 31259 |
| 28260 | 29260 | 30260 | 31260 |
| 28261 | 29261 | 30261 | 31261 |
| 28262 | 29262 | 30262 | 31262 |
| 28263 | 29263 | 30263 | 31263 |
| 28264 | 29264 | 30264 | 31264 |
| 28265 | 29265 | 30265 | 31265 |
| 28266 | 29266 | 30266 | 31266 |
| 28267 | 29267 | 30267 | 31267 |
| 28268 | 29268 | 30268 | 31268 |
| 28269 | 29269 | 30269 | 31269 |
| 28270 | 29270 | 30270 | 31270 |
| 28271 | 29271 | 30271 | 31271 |
| 28272 | 29272 | 30272 | 31272 |
| 28273 | 29273 | 30273 | 31273 |
| 28274 | 29274 | 30274 | 31274 |
| 28275 | 29275 | 30275 | 31275 |
| 28276 | 29276 | 30276 | 31276 |
| 28277 | 29277 | 30277 | 31277 |
| 28278 | 29278 | 30278 | 31278 |
| 28279 | 29279 | 30279 | 31279 |
| 28280 | 29280 | 30280 | 31280 |
| 28281 | 29281 | 30281 | 31281 |
| 28282 | 29282 | 30282 | 31282 |
| 28283 | 29283 | 30283 | 31283 |
| 28284 | 29284 | 30284 | 31284 |
| 28285 | 29285 | 30285 | 31285 |
| 28286 | 29286 | 30286 | 31286 |
| 28287 | 29287 | 30287 | 31287 |
| 28288 | 29288 | 30288 | 31288 |
| 28289 | 29289 | 30289 | 31289 |
| 28290 | 29290 | 30290 | 31290 |
| 28291 | 29291 | 30291 | 31291 |
| 28292 | 29292 | 30292 | 31292 |
| 28293 | 29293 | 30293 | 31293 |
| 28294 | 29294 | 30294 | 31294 |
| 28295 | 29295 | 30295 | 31295 |
| 28296 | 29296 | 30296 | 31296 |
| 28297 | 29297 | 30297 | 31297 |
| 28298 | 29298 | 30298 | 31298 |
| 28299 | 29299 | 30299 | 31299 |
| 28300 | 29300 | 30300 | 31300 |
| 28301 | 29301 | 30301 | 31301 |
| 28302 | 29302 | 30302 | 31302 |
| 28303 | 29303 | 30303 | 31303 |
| 28304 | 29304 | 30304 | 31304 |
| 28305 | 29305 | 30305 | 31305 |
| 28306 | 29306 | 30306 | 31306 |
| 28307 | 29307 | 30307 | 31307 |
| 28308 | 29308 | 30308 | 31308 |
| 28309 | 29309 | 30309 | 31309 |
| 28310 | 29310 | 30310 | 31310 |
| 28311 | 29311 | 30311 | 31311 |
| 28312 | 29312 | 30312 | 31312 |
| 28313 | 29313 | 30313 | 31313 |
| 28314 | 29314 | 30314 | 31314 |
| 28315 | 29315 | 30315 | 31315 |
| 28316 | 29316 | 30316 | 31316 |
| 28317 | 29317 | 30317 | 31317 |
| 28318 | 29318 | 30318 | 31318 |
| 28319 | 29319 | 30319 | 31319 |
| 28320 | 29320 | 30320 | 31320 |
| 28321 | 29321 | 30321 | 31321 |
| 28322 | 29322 | 30322 | 31322 |
| 28323 | 29323 | 30323 | 31323 |
| 28324 | 29324 | 30324 | 31324 |
| 28325 | 29325 | 30325 | 31325 |
| 28326 | 29326 | 30326 | 31326 |
| 28327 | 29327 | 30327 | 31327 |
| 28328 | 29328 | 30328 | 31328 |
| 28329 | 29329 | 30329 | 31329 |
| 28330 | 29330 | 30330 | 31330 |
| 28331 | 29331 | 30331 | 31331 |
| 28332 | 29332 | 30332 | 31332 |
| 28333 | 29333 | 30333 | 31333 |
| 28334 | 29334 | 30334 | 31334 |
| 28335 | 29335 | 30335 | 31335 |
| 28336 | 29336 | 30336 | 31336 |
| 28337 | 29337 | 30337 | 31337 |
| 28338 | 29338 | 30338 | 31338 |
| 28339 | 29339 | 30339 | 31339 |
| 28340 | 29340 | 30340 | 31340 |
| 28341 | 29341 | 30341 | 31341 |
| 28342 | 29342 | 30342 | 31342 |
| 28343 | 29343 | 30343 | 31343 |
| 28344 | 29344 | 30344 | 31344 |
| 28345 | 29345 | 30345 | 31345 |
| 28346 | 29346 | 30346 | 31346 |
| 28347 | 29347 | 30347 | 31347 |
| 28348 | 29348 | 30348 | 31348 |
| 28349 | 29349 | 30349 | 31349 |
| 28350 | 29350 | 30350 | 31350 |
| 28351 | 29351 | 30351 | 31351 |
| 28352 | 29352 | 30352 | 31352 |
| 28353 | 29353 | 30353 | 31353 |
| 28354 | 29354 | 30354 | 31354 |
| 28355 | 29355 | 30355 | 31355 |
| 28356 | 29356 | 30356 | 31356 |
| 28357 | 29357 | 30357 | 31357 |
| 28358 | 29358 | 30358 | 31358 |
| 28359 | 29359 | 30359 | 31359 |
| 28360 | 29360 | 30360 | 31360 |
| 28361 | 29361 | 30361 | 31361 |
| 28362 | 29362 | 30362 | 31362 |
| 28363 | 29363 | 30363 | 31363 |
| 28364 | 29364 | 30364 | 31364 |
| 28365 | 29365 | 30365 | 31365 |
| 28366 | 29366 | 30366 | 31366 |
| 28367 | 29367 | 30367 | 31367 |
| 28368 | 29368 | 30368 | 31368 |
| 28369 | 29369 | 30369 | 31369 |
| 28370 | 29370 | 30370 | 31370 |
| 28371 | 29371 | 30371 | 31371 |
| 28372 | 29372 | 30372 | 31372 |
| 28373 | 29373 | 30373 | 31373 |
| 28374 | 29374 | 30374 | 31374 |
| 28375 | 29375 | 30375 | 31375 |
| 28376 | 29376 | 30376 | 31376 |
| 28377 | 29377 | 30377 | 31377 |
| 28378 | 29378 | 30378 | 31378 |
| 28379 | 29379 | 30379 | 31379 |
| 28380 | 29380 | 30380 | 31380 |
| 28381 | 29381 | 30381 | 31381 |
| 28382 | 29382 | 30382 | 31382 |
| 28383 | 29383 | 30383 | 31383 |
| 28384 | 29384 | 30384 | 31384 |
| 28385 | 29385 | 30385 | 31385 |
| 28386 | 29386 | 30386 | 31386 |
| 28387 | 29387 | 30387 | 31387 |
| 28388 | 29388 | 30388 | 31388 |
| 28389 | 29389 | 30389 | 31389 |
| 28390 | 29390 | 30390 | 31390 |
| 28391 | 29391 | 30391 | 31391 |
| 28392 | 29392 | 30392 | 31392 |
| 28393 | 29393 | 30393 | 31393 |
| 28394 | 29394 | 30394 | 31394 |
| 28395 | 29395 | 30395 | 31395 |
| 28396 | 29396 | 30396 | 31396 |
| 28397 | 29397 | 30397 | 31397 |
| 28398 | 29398 | 30398 | 31398 |
| 28399 | 29399 | 30399 | 31399 |
| 28400 | 29400 | 30400 | 31400 |
| 28401 | 29401 | 30401 | 31401 |
| 28402 | 29402 | 30402 | 31402 |
| 28403 | 29403 | 30403 | 31403 |
| 28404 | 29404 | 30404 | 31404 |
| 28405 | 29405 | 30405 | 31405 |
| 28406 | 29406 | 30406 | 31406 |
| 28407 | 29407 | 30407 | 31407 |
| 28408 | 29408 | 30408 | 31408 |
| 28409 | 29409 | 30409 | 31409 |
| 28410 | 29410 | 30410 | 31410 |
| 28411 | 29411 | 30411 | 31411 |
| 28412 | 29412 | 30412 | 31412 |
| 28413 | 29413 | 30413 | 31413 |
| 28414 | 29414 | 30414 | 31414 |
| 28415 | 29415 | 30415 | 31415 |
| 28416 | 29416 | 30416 | 31416 |
| 28417 | 29417 | 30417 | 31417 |
| 28418 | 29418 | 30418 | 31418 |
| 28419 | 29419 | 30419 | 31419 |
| 28420 | 29420 | 30420 | 31420 |
| 28421 | 29421 | 30421 | 31421 |
| 28422 | 29422 | 30422 | 31422 |
| 28423 | 29423 | 30423 | 31423 |
| 28424 | 29424 | 30424 | 31424 |
| 28425 | 29425 | 30425 | 31425 |
| 28426 | 29426 | 30426 | 31426 |
| 28427 | 29427 | 30427 | 31427 |
| 28428 | 29428 | 30428 | 31428 |
| 28429 | 29429 | 30429 | 31429 |
| 28430 | 29430 | 30430 | 31430 |
| 28431 | 29431 | 30431 | 31431 |
| 28432 | 29432 | 30432 | 31432 |
| 28433 | 29433 | 30433 | 31433 |
| 28434 | 29434 | 30434 | 31434 |
| 28435 | 29435 | 30435 | 31435 |
| 28436 | 29436 | 30436 | 31436 |
| 28437 | 29437 | 30437 | 31437 |
| 28438 | 29438 | 30438 | 31438 |
| 28439 | 29439 | 30439 | 31439 |
| 28440 | 29440 | 30440 | 31440 |
| 28441 | 29441 | 30441 | 31441 |
| 28442 | 29442 | 30442 | 31442 |
| 28443 | 29443 | 30443 | 31443 |
| 28444 | 29444 | 30444 | 31444 |
| 28445 | 29445 | 30445 | 31445 |
| 28446 | 29446 | 30446 | 31446 |
| 28447 | 29447 | 30447 | 31447 |
| 28448 | 29448 | 30448 | 31448 |
| 28449 | 29449 | 30449 | 31449 |
| 28450 | 29450 | 30450 | 31450 |
| 28451 | 29451 | 30451 | 31451 |
| 28452 | 29452 | 30452 | 31452 |
| 28453 | 29453 | 30453 | 31453 |
| 28454 | 29454 | 30454 | 31454 |
| 28455 | 29455 | 30455 | 31455 |
| 28456 | 29456 | 30456 | 31456 |
| 28457 | 29457 | 30457 | 31457 |
| 28458 | 29458 | 30458 | 31458 |
| 28459 | 29459 | 30459 | 31459 |
| 28460 | 29460 | 30460 | 31460 |
| 28461 | 29461 | 30461 | 31461 |
| 28462 | 29462 | 30462 | 31462 |
| 28463 | 29463 | 30463 | 31463 |
| 28464 | 29464 | 30464 | 31464 |
| 28465 | 29465 | 30465 | 31465 |
| 28466 | 29466 | 30466 | 31466 |
| 28467 | 29467 | 30467 | 31467 |
| 28468 | 29468 | 30468 | 31468 |
| 28469 | 29469 | 30469 | 31469 |
| 28470 | 29470 | 30470 | 31470 |
| 28471 | 29471 | 30471 | 31471 |
| 28472 | 29472 | 30472 | 31472 |
| 28473 | 29473 | 30473 | 31473 |
| 28474 | 29474 | 30474 | 31474 |
| 28475 | 29475 | 30475 | 31475 |
| 28476 | 29476 | 30476 | 31476 |
| 28477 | 29477 | 30477 | 31477 |
| 28478 | 29478 | 30478 | 31478 |
| 28479 | 29479 | 30479 | 31479 |
| 28480 | 29480 | 30480 | 31480 |
| 28481 | 29481 | 30481 | 31481 |
| 28482 | 29482 | 30482 | 31482 |
| 28483 | 29483 | 30483 | 31483 |
| 28484 | 29484 | 30484 | 31484 |
| 28485 | 29485 | 30485 | 31485 |
| 28486 | 29486 | 30486 | 31486 |
| 28487 | 29487 | 30487 | 31487 |
| 28488 | 29488 | 30488 | 31488 |
| 28489 | 29489 | 30489 | 31489 |
| 28490 | 29490 | 30490 | 31490 |
| 28491 | 29491 | 30491 | 31491 |
| 28492 | 29492 | 30492 | 31492 |
| 28493 | 29493 | 30493 | 31493 |
| 28494 | 29494 | 30494 | 31494 |
| 28495 | 29495 | 30495 | 31495 |
| 28496 | 29496 | 30496 | 31496 |
| 28497 | 29497 | 30497 | 31497 |
| 28498 | 29498 | 30498 | 31498 |
| 28499 | 29499 | 30499 | 31499 |
| 28500 | 29500 | 30500 | 31500 |
| 28501 | 29501 | 30501 | 31501 |
| 28502 | 29502 | 30502 | 31502 |
| 28503 | 29503 | 30503 | 31503 |
| 28504 | 29504 | 30504 | 31504 |
| 28505 | 29505 | 30505 | 31505 |
| 28506 | 29506 | 30506 | 31506 |
| 28507 | 29507 | 30507 | 31507 |
| 28508 | 29508 | 30508 | 31508 |
| 28509 | 29509 | 30509 | 31509 |
| 28510 | 29510 | 30510 | 31510 |
| 28511 | 29511 | 30511 | 31511 |
| 28512 | 29512 | 30512 | 31512 |
| 28513 | 29513 | 30513 | 31513 |
| 28514 | 29514 | 30514 | 31514 |
| 28515 | 29515 | 30515 | 31515 |
| 28516 | 29516 | 30516 | 31516 |
| 28517 | 29517 | 30517 | 31517 |
| 28518 | 29518 | 30518 | 31518 |
| 28519 | 29519 | 30519 | 31519 |
| 28520 | 29520 | 30520 | 31520 |
| 28521 | 29521 | 30521 | 31521 |
| 28522 | 29522 | 30522 | 31522 |
| 28523 | 29523 | 30523 | 31523 |
| 28524 | 29524 | 30524 | 31524 |
| 28525 | 29525 | 30525 | 31525 |
| 28526 | 29526 | 30526 | 31526 |
| 28527 | 29527 | 30527 | 31527 |
| 28528 | 29528 | 30528 | 31528 |
| 28529 | 29529 | 30529 | 31529 |
| 28530 | 29530 | 30530 | 31530 |
| 28531 | 29531 | 30531 | 31531 |
| 28532 | 29532 | 30532 | 31532 |
| 28533 | 29533 | 30533 | 31533 |
| 28534 | 29534 | 30534 | 31534 |
| 28535 | 29535 | 30535 | 31535 |
| 28536 | 29536 | 30536 | 31536 |
| 28537 | 29537 | 30537 | 31537 |
| 28538 | 29538 | 30538 | 31538 |
| 28539 | 29539 | 30539 | 31539 |
| 28540 | 29540 | 30540 | 31540 |
| 28541 | 29541 | 30541 | 31541 |
| 28542 | 29542 | 30542 | 31542 |
| 28543 | 29543 | 30543 | 31543 |
| 28544 | 29544 | 30544 | 31544 |
| 28545 | 29545 | 30545 | 31545 |
| 28546 | 29546 | 30546 | 31546 |
| 28547 | 29547 | 30547 | 31547 |
| 28548 | 29548 | 30548 | 31548 |
| 28549 | 29549 | 30549 | 31549 |
| 28550 | 29550 | 30550 | 31550 |
| 28551 | 29551 | 30551 | 31551 |
| 28552 | 29552 | 30552 | 31552 |
| 28553 | 29553 | 30553 | 31553 |
| 28554 | 29554 | 30554 | 31554 |
| 28555 | 29555 | 30555 | 31555 |
| 28556 | 29556 | 30556 | 31556 |
| 28557 | 29557 | 30557 | 31557 |
| 28558 | 29558 | 30558 | 31558 |
| 28559 | 29559 | 30559 | 31559 |
| 28560 | 29560 | 30560 | 31560 |
| 28561 | 29561 | 30561 | 31561 |
| 28562 | 29562 | 30562 | 31562 |
| 28563 | 29563 | 30563 | 31563 |
| 28564 | 29564 | 30564 | 31564 |
| 28565 | 29565 | 30565 | 31565 |
| 28566 | 29566 | 30566 | 31566 |
| 28567 | 29567 | 30567 | 31567 |
| 28568 | 29568 | 30568 | 31568 |
| 28569 | 29569 | 30569 | 31569 |
| 28570 | 29570 | 30570 | 31570 |
| 28571 | 29571 | 30571 | 31571 |
| 28572 | 29572 | 30572 | 31572 |
| 28573 | 29573 | 30573 | 31573 |
| 28574 | 29574 | 30574 | 31574 |
| 28575 | 29575 | 30575 | 31575 |
| 28576 | 29576 | 30576 | 31576 |
| 28577 | 29577 | 30577 | 31577 |
| 28578 | 29578 | 30578 | 31578 |
| 28579 | 29579 | 30579 | 31579 |
| 28580 | 29580 | 30580 | 31580 |
| 28581 | 29581 | 30581 | 31581 |
| 28582 | 29582 | 30582 | 31582 |
| 28583 | 29583 | 30583 | 31583 |
| 28584 | 29584 | 30584 | 31584 |
| 28585 | 29585 | 30585 | 31585 |
| 28586 | 29586 | 30586 | 31586 |
| 28587 | 29587 | 30587 | 31587 |
| 28588 | 29588 | 30588 | 31588 |
| 28589 | 29589 | 30589 | 31589 |
| 28590 | 29590 | 30590 | 31590 |
| 28591 | 29591 | 30591 | 31591 |
| 28592 | 29592 | 30592 | 31592 |
| 28593 | 29593 | 30593 | 31593 |
| 28594 | 29594 | 30594 | 31594 |
| 28595 | 29595 | 30595 | 31595 |
| 28596 | 29596 | 30596 | 31596 |
| 28597 | 29597 | 30597 | 31597 |
| 28598 | 29598 | 30598 | 31598 |
| 28599 | 29599 | 30599 | 31599 |
| 28600 | 29600 | 30600 | 31600 |
| 28601 | 29601 | 30601 | 31601 |
| 28602 | 29602 | 30602 | 31602 |
| 28603 | 29603 | 30603 | 31603 |
| 28604 | 29604 | 30604 | 31604 |
| 28605 | 29605 | 30605 | 31605 |
| 28606 | 29606 | 30606 | 31606 |
| 28607 | 29607 | 30607 | 31607 |
| 28608 | 29608 | 30608 | 31608 |
| 28609 | 29609 | 30609 | 31609 |
| 28610 | 29610 | 30610 | 31610 |
| 28611 | 29611 | 30611 | 31611 |
| 28612 | 29612 | 30612 | 31612 |
| 28613 | 29613 | 30613 | 31613 |
| 28614 | 29614 | 30614 | 31614 |
| 28615 | 29615 | 30615 | 31615 |
| 28616 | 29616 | 30616 | 31616 |
| 28617 | 29617 | 30617 | 31617 |
| 28618 | 29618 | 30618 | 31618 |
| 28619 | 29619 | 30619 | 31619 |
| 28620 | 29620 | 30620 | 31620 |
| 28621 | 29621 | 30621 | 31621 |
| 28622 | 29622 | 30622 | 31622 |
| 28623 | 29623 | 30623 | 31623 |
| 28624 | 29624 | 30624 | 31624 |
| 28625 | 29625 | 30625 | 31625 |
| 28626 | 29626 | 30626 | 31626 |
| 28627 | 29627 | 30627 | 31627 |
| 28628 | 29628 | 30628 | 31628 |
| 28629 | 29629 | 30629 | 31629 |
| 28630 | 29630 | 30630 | 31630 |
| 28631 | 29631 | 30631 | 31631 |
| 28632 | 29632 | 30632 | 31632 |
| 28633 | 29633 | 30633 | 31633 |
| 28634 | 29634 | 30634 | 31634 |
| 28635 | 29635 | 30635 | 31635 |
| 28636 | 29636 | 30636 | 31636 |
| 28637 | 29637 | 30637 | 31637 |
| 28638 | 29638 | 30638 | 31638 |
| 28639 | 29639 | 30639 | 31639 |
| 28640 | 29640 | 30640 | 31640 |
| 28641 | 29641 | 30641 | 31641 |
| 28642 | 29642 | 30642 | 31642 |
| 28643 | 29643 | 30643 | 31643 |
| 28644 | 29644 | 30644 | 31644 |
| 28645 | 29645 | 30645 | 31645 |
| 28646 | 29646 | 30646 | 31646 |
| 28647 | 29647 | 30647 | 31647 |
| 28648 | 29648 | 30648 | 31648 |
| 28649 | 29649 | 30649 | 31649 |
| 28650 | 29650 | 30650 | 31650 |
| 28651 | 29651 | 30651 | 31651 |
| 28652 | 29652 | 30652 | 31652 |
| 28653 | 29653 | 30653 | 31653 |
| 28654 | 29654 | 30654 | 31654 |
| 28655 | 29655 | 30655 | 31655 |
| 28656 | 29656 | 30656 | 31656 |
| 28657 | 29657 | 30657 | 31657 |
| 28658 | 29658 | 30658 | 31658 |
| 28659 | 29659 | 30659 | 31659 |
| 28660 | 29660 | 30660 | 31660 |
| 28661 | 29661 | 30661 | 31661 |
| 28662 | 29662 | 30662 | 31662 |
| 28663 | 29663 | 30663 | 31663 |
| 28664 | 29664 | 30664 | 31664 |
| 28665 | 29665 | 30665 | 31665 |
| 28666 | 29666 | 30666 | 31666 |
| 28667 | 29667 | 30667 | 31667 |
| 28668 | 29668 | 30668 | 31668 |
| 28669 | 29669 | 30669 | 31669 |
| 28670 | 29670 | 30670 | 31670 |
| 28671 | 29671 | 30671 | 31671 |
| 28672 | 29672 | 30672 | 31672 |
| 28673 | 29673 | 30673 | 31673 |
| 28674 | 29674 | 30674 | 31674 |
| 28675 | 29675 | 30675 | 31675 |
| 28676 | 29676 | 30676 | 31676 |
| 28677 | 29677 | 30677 | 31677 |
| 28678 | 29678 | 30678 | 31678 |
| 28679 | 29679 | 30679 | 31679 |
| 28680 | 29680 | 30680 | 31680 |
| 28681 | 29681 | 30681 | 31681 |
| 28682 | 29682 | 30682 | 31682 |
| 28683 | 29683 | 30683 | 31683 |
| 28684 | 29684 | 30684 | 31684 |
| 28685 | 29685 | 30685 | 31685 |
| 28686 | 29686 | 30686 | 31686 |
| 28687 | 29687 | 30687 | 31687 |
| 28688 | 29688 | 30688 | 31688 |
| 28689 | 29689 | 30689 | 31689 |
| 28690 | 29690 | 30690 | 31690 |
| 28691 | 29691 | 30691 | 31691 |
| 28692 | 29692 | 30692 | 31692 |
| 28693 | 29693 | 30693 | 31693 |
| 28694 | 29694 | 30694 | 31694 |
| 28695 | 29695 | 30695 | 31695 |
| 28696 | 29696 | 30696 | 31696 |
| 28697 | 29697 | 30697 | 31697 |
| 28698 | 29698 | 30698 | 31698 |
| 28699 | 29699 | 30699 | 31699 |
| 28700 | 29700 | 30700 | 31700 |
| 28701 | 29701 | 30701 | 31701 |
| 28702 | 29702 | 30702 | 31702 |
| 28703 | 29703 | 30703 | 31703 |
| 28704 | 29704 | 30704 | 31704 |
| 28705 | 29705 | 30705 | 31705 |
| 28706 | 29706 | 30706 | 31706 |
| 28707 | 29707 | 30707 | 31707 |
| 28708 | 29708 | 30708 | 31708 |
| 28709 | 29709 | 30709 | 31709 |
| 28710 | 29710 | 30710 | 31710 |
| 28711 | 29711 | 30711 | 31711 |
| 28712 | 29712 | 30712 | 31712 |
| 28713 | 29713 | 30713 | 31713 |
| 28714 | 29714 | 30714 | 31714 |
| 28715 | 29715 | 30715 | 31715 |
| 28716 | 29716 | 30716 | 31716 |
| 28717 | 29717 | 30717 | 31717 |
| 28718 | 29718 | 30718 | 31718 |
| 28719 | 29719 | 30719 | 31719 |
| 28720 | 29720 | 30720 | 31720 |
| 28721 | 29721 | 30721 | 31721 |
| 28722 | 29722 | 30722 | 31722 |
| 28723 | 29723 | 30723 | 31723 |
| 28724 | 29724 | 30724 | 31724 |
| 28725 | 29725 | 30725 | 31725 |
| 28726 | 29726 | 30726 | 31726 |
| 28727 | 29727 | 30727 | 31727 |
| 28728 | 29728 | 30728 | 31728 |
| 28729 | 29729 | 30729 | 31729 |
| 28730 | 29730 | 30730 | 31730 |
| 28731 | 29731 | 30731 | 31731 |
| 28732 | 29732 | 30732 | 31732 |
| 28733 | 29733 | 30733 | 31733 |
| 28734 | 29734 | 30734 | 31734 |
| 28735 | 29735 | 30735 | 31735 |
| 28736 | 29736 | 30736 | 31736 |
| 28737 | 29737 | 30737 | 31737 |
| 28738 | 29738 | 30738 | 31738 |
| 28739 | 29739 | 30739 | 31739 |
| 28740 | 29740 | 30740 | 31740 |
| 28741 | 29741 | 30741 | 31741 |
| 28742 | 29742 | 30742 | 31742 |
| 28743 | 29743 | 30743 | 31743 |
| 28744 | 29744 | 30744 | 31744 |
| 28745 | 29745 | 30745 | 31745 |
| 28746 | 29746 | 30746 | 31746 |
| 28747 | 29747 | 30747 | 31747 |
| 28748 | 29748 | 30748 | 31748 |
| 28749 | 29749 | 30749 | 31749 |
| 28750 | 29750 | 30750 | 31750 |
| 28751 | 29751 | 30751 | 31751 |
| 28752 | 29752 | 30752 | 31752 |
| 28753 | 29753 | 30753 | 31753 |
| 28754 | 29754 | 30754 | 31754 |
| 28755 | 29755 | 30755 | 31755 |
| 28756 | 29756 | 30756 | 31756 |
| 28757 | 29757 | 30757 | 31757 |
| 28758 | 29758 | 30758 | 31758 |
| 28759 | 29759 | 30759 | 31759 |
| 28760 | 29760 | 30760 | 31760 |
| 28761 | 29761 | 30761 | 31761 |
| 28762 | 29762 | 30762 | 31762 |
| 28763 | 29763 | 30763 | 31763 |
| 28764 | 29764 | 30764 | 31764 |
| 28765 | 29765 | 30765 | 31765 |
| 28766 | 29766 | 30766 | 31766 |
| 28767 | 29767 | 30767 | 31767 |
| 28768 | 29768 | 30768 | 31768 |
| 28769 | 29769 | 30769 | 31769 |
| 28770 | 29770 | 30770 | 31770 |
| 28771 | 29771 | 30771 | 31771 |
| 28772 | 29772 | 30772 | 31772 |
| 28773 | 29773 | 30773 | 31773 |
| 28774 | 29774 | 30774 | 31774 |
| 28775 | 29775 | 30775 | 31775 |
| 28776 | 29776 | 30776 | 31776 |
| 28777 | 29777 | 30777 | 31777 |
| 28778 | 29778 | 30778 | 31778 |
| 28779 | 29779 | 30779 | 31779 |
| 28780 | 29780 | 30780 | 31780 |
| 28781 | 29781 | 30781 | 31781 |
| 28782 | 29782 | 30782 | 31782 |
| 28783 | 29783 | 30783 | 31783 |
| 28784 | 29784 | 30784 | 31784 |
| 28785 | 29785 | 30785 | 31785 |
| 28786 | 29786 | 30786 | 31786 |
| 28787 | 29787 | 30787 | 31787 |
| 28788 | 29788 | 30788 | 31788 |
| 28789 | 29789 | 30789 | 31789 |
| 28790 | 29790 | 30790 | 31790 |
| 28791 | 29791 | 30791 | 31791 |
| 28792 | 29792 | 30792 | 31792 |
| 28793 | 29793 | 30793 | 31793 |
| 28794 | 29794 | 30794 | 31794 |
| 28795 | 29795 | 30795 | 31795 |
| 28796 | 29796 | 30796 | 31796 |
| 28797 | 29797 | 30797 | 31797 |
| 28798 | 29798 | 30798 | 31798 |
| 28799 | 29799 | 30799 | 31799 |
| 28800 | 29800 | 30800 | 31800 |
| 28801 | 29801 | 30801 | 31801 |
| 28802 | 29802 | 30802 | 31802 |
| 28803 | 29803 | 30803 | 31803 |
| 28804 | 29804 | 30804 | 31804 |
| 28805 | 29805 | 30805 | 31805 |
| 28806 | 29806 | 30806 | 31806 |
| 28807 | 29807 | 30807 | 31807 |
| 28808 | 29808 | 30808 | 31808 |
| 28809 | 29809 | 30809 | 31809 |
| 28810 | 29810 | 30810 | 31810 |
| 28811 | 29811 | 30811 | 31811 |
| 28812 | 29812 | 30812 | 31812 |
| 28813 | 29813 | 30813 | 31813 |
| 28814 | 29814 | 30814 | 31814 |
| 28815 | 29815 | 30815 | 31815 |
| 28816 | 29816 | 30816 | 31816 |
| 28817 | 29817 | 30817 | 31817 |
| 28818 | 29818 | 30818 | 31818 |
| 28819 | 29819 | 30819 | 31819 |
| 28820 | 29820 | 30820 | 31820 |
| 28821 | 29821 | 30821 | 31821 |
| 28822 | 29822 | 30822 | 31822 |
| 28823 | 29823 | 30823 | 31823 |
| 28824 | 29824 | 30824 | 31824 |
| 28825 | 29825 | 30825 | 31825 |
| 28826 | 29826 | 30826 | 31826 |
| 28827 | 29827 | 30827 | 31827 |
| 28828 | 29828 | 30828 | 31828 |
| 28829 | 29829 | 30829 | 31829 |
| 28830 | 29830 | 30830 | 31830 |
| 28831 | 29831 | 30831 | 31831 |
| 28832 | 29832 | 30832 | 31832 |
| 28833 | 29833 | 30833 | 31833 |
| 28834 | 29834 | 30834 | 31834 |
| 28835 | 29835 | 30835 | 31835 |
| 28836 | 29836 | 30836 | 31836 |
| 28837 | 29837 | 30837 | 31837 |
| 28838 | 29838 | 30838 | 31838 |
| 28839 | 29839 | 30839 | 31839 |
| 28840 | 29840 | 30840 | 31840 |
| 28841 | 29841 | 30841 | 31841 |
| 28842 | 29842 | 30842 | 31842 |
| 28843 | 29843 | 30843 | 31843 |
| 28844 | 29844 | 30844 | 31844 |
| 28845 | 29845 | 30845 | 31845 |
| 28846 | 29846 | 30846 | 31846 |
| 28847 | 29847 | 30847 | 31847 |
| 28848 | 29848 | 30848 | 31848 |
| 28849 | 29849 | 30849 | 31849 |
| 28850 | 29850 | 30850 | 31850 |
| 28851 | 29851 | 30851 | 31851 |
| 28852 | 29852 | 30852 | 31852 |
| 28853 | 29853 | 30853 | 31853 |
| 28854 | 29854 | 30854 | 31854 |
| 28855 | 29855 | 30855 | 31855 |
| 28856 | 29856 | 30856 | 31856 |
| 28857 | 29857 | 30857 | 31857 |
| 28858 | 29858 | 30858 | 31858 |
| 28859 | 29859 | 30859 | 31859 |
| 28860 | 29860 | 30860 | 31860 |
| 28861 | 29861 | 30861 | 31861 |
| 28862 | 29862 | 30862 | 31862 |
| 28863 | 29863 | 30863 | 31863 |
| 28864 | 29864 | 30864 | 31864 |
| 28865 | 29865 | 30865 | 31865 |
| 28866 | 29866 | 30866 | 31866 |
| 28867 | 29867 | 30867 | 31867 |
| 28868 | 29868 | 30868 | 31868 |
| 28869 | 29869 | 30869 | 31869 |
| 28870 | 29870 | 30870 | 31870 |
| 28871 | 29871 | 30871 | 31871 |
| 28872 | 29872 | 30872 | 31872 |
| 28873 | 29873 | 30873 | 31873 |
| 28874 | 29874 | 30874 | 31874 |
| 28875 | 29875 | 30875 | 31875 |
| 28876 | 29876 | 30876 | 31876 |
| 28877 | 29877 | 30877 | 31877 |
| 28878 | 29878 | 30878 | 31878 |
| 28879 | 29879 | 30879 | 31879 |
| 28880 | 29880 | 30880 | 31880 |
| 28881 | 29881 | 30881 | 31881 |
| 28882 | 29882 | 30882 | 31882 |
| 28883 | 29883 | 30883 | 31883 |
| 28884 | 29884 | 30884 | 31884 |
| 28885 | 29885 | 30885 | 31885 |
| 28886 | 29886 | 30886 | 31886 |
| 28887 | 29887 | 30887 | 31887 |
| 28888 | 29888 | 30888 | 31888 |
| 28889 | 29889 | 30889 | 31889 |
| 28890 | 29890 | 30890 | 31890 |
| 28891 | 29891 | 30891 | 31891 |
| 28892 | 29892 | 30892 | 31892 |
| 28893 | 29893 | 30893 | 31893 |
| 28894 | 29894 | 30894 | 31894 |
| 28895 | 29895 | 30895 | 31895 |
| 28896 | 29896 | 30896 | 31896 |
| 28897 | 29897 | 30897 | 31897 |
| 28898 | 29898 | 30898 | 31898 |
| 28899 | 29899 | 30899 | 31899 |
| 28900 | 29900 | 30900 | 31900 |
| 28901 | 29901 | 30901 | 31901 |
| 28902 | 29902 | 30902 | 31902 |
| 28903 | 29903 | 30903 | 31903 |
| 28904 | 29904 | 30904 | 31904 |
| 28905 | 29905 | 30905 | 31905 |
| 28906 | 29906 | 30906 | 31906 |
| 28907 | 29907 | 30907 | 31907 |
| 28908 | 29908 | 30908 | 31908 |
| 28909 | 29909 | 30909 | 31909 |
| 28910 | 29910 | 30910 | 31910 |
| 28911 | 29911 | 30911 | 31911 |
| 28912 | 29912 | 30912 | 31912 |
| 28913 | 29913 | 30913 | 31913 |
| 28914 | 29914 | 30914 | 31914 |
| 28915 | 29915 | 30915 | 31915 |
| 28916 | 29916 | 30916 | 31916 |
| 28917 | 29917 | 30917 | 31917 |
| 28918 | 29918 | 30918 | 31918 |
| 28919 | 29919 | 30919 | 31919 |
| 28920 | 29920 | 30920 | 31920 |
| 28921 | 29921 | 30921 | 31921 |
| 28922 | 29922 | 30922 | 31922 |
| 28923 | 29923 | 30923 | 31923 |
| 28924 | 29924 | 30924 | 31924 |
| 28925 | 29925 | 30925 | 31925 |
| 28926 | 29926 | 30926 | 31926 |
| 28927 | 29927 | 30927 | 31927 |
| 28928 | 29928 | 30928 | 31928 |
| 28929 | 29929 | 30929 | 31929 |
| 28930 | 29930 | 30930 | 31930 |
| 28931 | 29931 | 30931 | 31931 |
| 28932 | 29932 | 30932 | 31932 |
| 28933 | 29933 | 30933 | 31933 |
| 28934 | 29934 | 30934 | 31934 |
| 28935 | 29935 | 30935 | 31935 |
| 28936 | 29936 | 30936 | 31936 |
| 28937 | 29937 | 30937 | 31937 |
| 28938 | 29938 | 30938 | 31938 |
| 28939 | 29939 | 30939 | 31939 |
| 28940 | 29940 | 30940 | 31940 |
| 28941 | 29941 | 30941 | 31941 |
| 28942 | 29942 | 30942 | 31942 |
| 28943 | 29943 | 30943 | 31943 |
| 28944 | 29944 | 30944 | 31944 |
| 28945 | 29945 | 30945 | 31945 |
| 28946 | 29946 | 30946 | 31946 |
| 28947 | 29947 | 30947 | 31947 |
| 28948 | 29948 | 30948 | 31948 |
| 28949 | 29949 | 30949 | 31949 |
| 28950 | 29950 | 30950 | 31950 |
| 28951 | 29951 | 30951 | 31951 |
| 28952 | 29952 | 30952 | 31952 |
| 28953 | 29953 | 30953 | 31953 |
| 28954 | 29954 | 30954 | 31954 |
| 28955 | 29955 | 30955 | 31955 |
| 28956 | 29956 | 30956 | 31956 |
| 28957 | 29957 | 30957 | 31957 |
| 28958 | 29958 | 30958 | 31958 |
| 28959 | 29959 | 30959 | 31959 |
| 28960 | 29960 | 30960 | 31960 |
| 28961 | 29961 | 30961 | 31961 |
| 28962 | 29962 | 30962 | 31962 |
| 28963 | 29963 | 30963 | 31963 |
| 28964 | 29964 | 30964 | 31964 |
| 28965 | 29965 | 30965 | 31965 |
| 28966 | 29966 | 30966 | 31966 |
| 28967 | 29967 | 30967 | 31967 |
| 28968 | 29968 | 30968 | 31968 |
| 28969 | 29969 | 30969 | 31969 |
| 28970 | 29970 | 30970 | 31970 |
| 28971 | 29971 | 30971 | 31971 |
| 28972 | 29972 | 30972 | 31972 |
| 28973 | 29973 | 30973 | 31973 |
| 28974 | 29974 | 30974 | 31974 |
| 28975 | 29975 | 30975 | 31975 |
| 28976 | 29976 | 30976 | 31976 |
| 28977 | 29977 | 30977 | 31977 |
| 28978 | 29978 | 30978 | 31978 |
| 28979 | 29979 | 30979 | 31979 |
| 28980 | 29980 | 30980 | 31980 |
| 28981 | 29981 | 30981 | 31981 |
| 28982 | 29982 | 30982 | 31982 |
| 28983 | 29983 | 30983 | 31983 |
| 28984 | 29984 | 30984 | 31984 |
| 28985 | 29985 | 30985 | 31985 |
| 28986 | 29986 | 30986 | 31986 |
| 28987 | 29987 | 30987 | 31987 |
| 28988 | 29988 | 30988 | 31988 |
| 28989 | 29989 | 30989 | 31989 |
| 28990 | 29990 | 30990 | 31990 |
| 28991 | 29991 | 30991 | 31991 |
| 28992 | 29992 | 30992 | 31992 |
| 28993 | 29993 | 30993 | 31993 |
| 28994 | 29994 | 30994 | 31994 |
| 28995 | 29995 | 30995 | 31995 |
| 28996 | 29996 | 30996 | 31996 |
| 28997 | 29997 | 30997 | 31997 |
| 28998 | 29998 | 30998 | 31998 |
| 28999 | 29999 | 30999 | 31999 |
| 29000 | 30000 | 31000 | 32000 |
| 29001 | 30001 | 31001 | 32001 |
| 29002 | 30002 | 31002 | 32002 |

[0135] In some embodiments, the sequences that specifically bind to all nuts comprise an inner sequence selected from the group consisting of the nucleic acid sequences of SEQ ID NOs. 32003 to 33002. In some examples, a short nucleic acid sequence may be affixed to the 5-end of the inner sequence. The short nucleic acid sequence may be the 5′ primer sequence used in the random ssDNA library, i.e. the nucleic acid sequence of SEQ ID NO. 1. Accordingly, the aptamer that specifically binds to all nuts may comprise a nucleic acid sequence selected from the group consisting of SEQ ID NOs. 33003 to 34002. In other examples, a short nucleic acid sequence may be affixed to the 3-end of the inner sequence. The short nucleic acid sequence may be the 3′ primer sequence used in the random ssDNA library, i.e. the nucleic acid sequence of SEQ ID NO. 2. Accordingly, the aptamer that specifically binds to all nuts may comprise a nucleic acid sequence selected from the group consisting of SEQ ID NOs. 34003 to 35002. In other examples, the inner sequence may comprise a 5′ end short sequence (i.e., SEQ ID NO. 1) and a 3′ end short sequence (i.e., SEQ ID NO. 2). Accordingly, the aptamer that specifically binds to all nuts may comprise a nucleic acid sequence selected from the group consisting of SEQ ID NOs. 35003 to 36002. In one embodiment, the aptamer of the present disclosure that can bind to all nuts may comprise a nucleic acid sequence selected from the group consisting of SEQ ID NOs. 32003 to 36002 listed in Table 10, or variant thereof.

TABLE 10
Aptamer sequences against all nuts
Aptamer sequence

| | | | 5′-sequence |
|---|---|---|---|
| | 5′-sequence | Inner | and inner |
| Inner | and inner | sequence and | sequence and |
| sequence | sequence | 3′-sequence | 3′-sequence |
| (SEQ ID NO.) | (SEQ ID NO.) | (SEQ ID NO.) | (SEQ ID NO.) |
| 32003 | 33003 | 34003 | 35003 |
| 32004 | 33004 | 34004 | 35004 |
| 32005 | 33005 | 34005 | 35005 |
| 32006 | 33006 | 34006 | 35006 |
| 32007 | 33007 | 34007 | 35007 |
| 32008 | 33008 | 34008 | 35008 |
| 32009 | 33009 | 34009 | 35009 |
| 32010 | 33010 | 34010 | 35010 |
| 32011 | 33011 | 34011 | 35011 |
| 32012 | 33012 | 34012 | 35012 |
| 32013 | 33013 | 34013 | 35013 |
| 32014 | 33014 | 34014 | 35014 |
| 32015 | 33015 | 34015 | 35015 |
| 32016 | 33016 | 34016 | 35016 |
| 32017 | 33017 | 34017 | 35017 |
| 32018 | 33018 | 34018 | 35018 |
| 32019 | 33019 | 34019 | 35019 |
| 32020 | 33020 | 34020 | 35020 |
| 32021 | 33021 | 34021 | 35021 |
| 32022 | 33022 | 34022 | 35022 |
| 32023 | 33023 | 34023 | 35023 |
| 32024 | 33024 | 34024 | 35024 |
| 32025 | 33025 | 34025 | 35025 |
| 32026 | 33026 | 34026 | 35026 |
| 32027 | 33027 | 34027 | 35027 |
| 32028 | 33028 | 34028 | 35028 |
| 32029 | 33029 | 34029 | 35029 |
| 32030 | 33030 | 34030 | 35030 |
| 32031 | 33031 | 34031 | 35031 |
| 32032 | 33032 | 34032 | 35032 |
| 32033 | 33033 | 34033 | 35033 |
| 32034 | 33034 | 34034 | 35034 |
| 32035 | 33035 | 34035 | 35035 |
| 32036 | 33036 | 34036 | 35036 |
| 32037 | 33037 | 34037 | 35037 |
| 32038 | 33038 | 34038 | 35038 |
| 32039 | 33039 | 34039 | 35039 |
| 32040 | 33040 | 34040 | 35040 |
| 32041 | 33041 | 34041 | 35041 |
| 32042 | 33042 | 34042 | 35042 |
| 32043 | 33043 | 34043 | 35043 |
| 32044 | 33044 | 34044 | 35044 |
| 32045 | 33045 | 34045 | 35045 |
| 32046 | 33046 | 34046 | 35046 |
| 32047 | 33047 | 34047 | 35047 |
| 32048 | 33048 | 34048 | 35048 |
| 32049 | 33049 | 34049 | 35049 |
| 32050 | 33050 | 34050 | 35050 |
| 32051 | 33051 | 34051 | 35051 |
| 32052 | 33052 | 34052 | 35052 |
| 32053 | 33053 | 34053 | 35053 |
| 32054 | 33054 | 34054 | 35054 |
| 32055 | 33055 | 34055 | 35055 |
| 32056 | 33056 | 34056 | 35056 |
| 32057 | 33057 | 34057 | 35057 |
| 32058 | 33058 | 34058 | 35058 |
| 32059 | 33059 | 34059 | 35059 |
| 32060 | 33060 | 34060 | 35060 |
| 32061 | 33061 | 34061 | 35061 |
| 32062 | 33062 | 34062 | 35062 |
| 32063 | 33063 | 34063 | 35063 |
| 32064 | 33064 | 34064 | 35064 |
| 32065 | 33065 | 34065 | 35065 |
| 32066 | 33066 | 34066 | 35066 |
| 32067 | 33067 | 34067 | 35067 |
| 32068 | 33068 | 34068 | 35068 |
| 32069 | 33069 | 34069 | 35069 |
| 32070 | 33070 | 34070 | 35070 |
| 32071 | 33071 | 34071 | 35071 |
| 32072 | 33072 | 34072 | 35072 |
| 32073 | 33073 | 34073 | 35073 |
| 32074 | 33074 | 34074 | 35074 |
| 32075 | 33075 | 34075 | 35075 |
| 32076 | 33076 | 34076 | 35076 |
| 32077 | 33077 | 34077 | 35077 |
| 32078 | 33078 | 34078 | 35078 |
| 32079 | 33079 | 34079 | 35079 |
| 32080 | 33080 | 34080 | 35080 |
| 32081 | 33081 | 34081 | 35081 |
| 32082 | 33082 | 34082 | 35082 |
| 32083 | 33083 | 34083 | 35083 |
| 32084 | 33084 | 34084 | 35084 |
| 32085 | 33085 | 34085 | 35085 |
| 32086 | 33086 | 34086 | 35086 |
| 32087 | 33087 | 34087 | 35087 |
| 32088 | 33088 | 34088 | 35088 |
| 32089 | 33089 | 34089 | 35089 |
| 32090 | 33090 | 34090 | 35090 |
| 32091 | 33091 | 34091 | 35091 |
| 32092 | 33092 | 34092 | 35092 |
| 32093 | 33093 | 34093 | 35093 |
| 32094 | 33094 | 34094 | 35094 |
| 32095 | 33095 | 34095 | 35095 |
| 32096 | 33096 | 34096 | 35096 |
| 32097 | 33097 | 34097 | 35097 |
| 32098 | 33098 | 34098 | 35098 |
| 32099 | 33099 | 34099 | 35099 |
| 32100 | 33100 | 34100 | 35100 |
| 32101 | 33101 | 34101 | 35101 |
| 32102 | 33102 | 34102 | 35102 |
| 32103 | 33103 | 34103 | 35103 |
| 32104 | 33104 | 34104 | 35104 |
| 32105 | 33105 | 34105 | 35105 |
| 32106 | 33106 | 34106 | 35106 |
| 32107 | 33107 | 34107 | 35107 |
| 32108 | 33108 | 34108 | 35108 |
| 32109 | 33109 | 34109 | 35109 |
| 32110 | 33110 | 34110 | 35110 |
| 32111 | 33111 | 34111 | 35111 |
| 32112 | 33112 | 34112 | 35112 |
| 32113 | 33113 | 34113 | 35113 |
| 32114 | 33114 | 34114 | 35114 |
| 32115 | 33115 | 34115 | 35115 |
| 32116 | 33116 | 34116 | 35116 |
| 32117 | 33117 | 34117 | 35117 |
| 32118 | 33118 | 34118 | 35118 |
| 32119 | 33119 | 34119 | 35119 |
| 32120 | 33120 | 34120 | 35120 |
| 32121 | 33121 | 34121 | 35121 |
| 32122 | 33122 | 34122 | 35122 |
| 32123 | 33123 | 34123 | 35123 |
| 32124 | 33124 | 34124 | 35124 |
| 32125 | 33125 | 34125 | 35125 |
| 32126 | 33126 | 34126 | 35126 |
| 32127 | 33127 | 34127 | 35127 |
| 32128 | 33128 | 34128 | 35128 |
| 32129 | 33129 | 34129 | 35129 |
| 32130 | 33130 | 34130 | 35130 |
| 32131 | 33131 | 34131 | 35131 |
| 32132 | 33132 | 34132 | 35132 |
| 32133 | 33133 | 34133 | 35133 |
| 32134 | 33134 | 34134 | 35134 |
| 32135 | 33135 | 34135 | 35135 |
| 32136 | 33136 | 34136 | 35136 |
| 32137 | 33137 | 34137 | 35137 |
| 32138 | 33138 | 34138 | 35138 |
| 32139 | 33139 | 34139 | 35139 |
| 32140 | 33140 | 34140 | 35140 |
| 32141 | 33141 | 34141 | 35141 |
| 32142 | 33142 | 34142 | 35142 |
| 32143 | 33143 | 34143 | 35143 |
| 32144 | 33144 | 34144 | 35144 |
| 32145 | 33145 | 34145 | 35145 |
| 32146 | 33146 | 34146 | 35146 |
| 32147 | 33147 | 34147 | 35147 |
| 32148 | 33148 | 34148 | 35148 |
| 32149 | 33149 | 34149 | 35149 |
| 32150 | 33150 | 34150 | 35150 |
| 32151 | 33151 | 34151 | 35151 |
| 32152 | 33152 | 34152 | 35152 |
| 32153 | 33153 | 34153 | 35153 |
| 32154 | 33154 | 34154 | 35154 |
| 32155 | 33155 | 34155 | 35155 |
| 32156 | 33156 | 34156 | 35156 |
| 32157 | 33157 | 34157 | 35157 |
| 32158 | 33158 | 34158 | 35158 |
| 32159 | 33159 | 34159 | 35159 |
| 32160 | 33160 | 34160 | 35160 |
| 32161 | 33161 | 34161 | 35161 |
| 32162 | 33162 | 34162 | 35162 |
| 32163 | 33163 | 34163 | 35163 |
| 32164 | 33164 | 34164 | 35164 |
| 32165 | 33165 | 34165 | 35165 |
| 32166 | 33166 | 34166 | 35166 |
| 32167 | 33167 | 34167 | 35167 |
| 32168 | 33168 | 34168 | 35168 |
| 32169 | 33169 | 34169 | 35169 |
| 32170 | 33170 | 34170 | 35170 |
| 32171 | 33171 | 34171 | 35171 |
| 32172 | 33172 | 34172 | 35172 |
| 32173 | 33173 | 34173 | 35173 |
| 32174 | 33174 | 34174 | 35174 |
| 32175 | 33175 | 34175 | 35175 |
| 32176 | 33176 | 34176 | 35176 |
| 32177 | 33177 | 34177 | 35177 |
| 32178 | 33178 | 34178 | 35178 |
| 32179 | 33179 | 34179 | 35179 |
| 32180 | 33180 | 34180 | 35180 |
| 32181 | 33181 | 34181 | 35181 |
| 32182 | 33182 | 34182 | 35182 |
| 32183 | 33183 | 34183 | 35183 |
| 32184 | 33184 | 34184 | 35184 |
| 32185 | 33185 | 34185 | 35185 |
| 32186 | 33186 | 34186 | 35186 |
| 32187 | 33187 | 34187 | 35187 |
| 32188 | 33188 | 34188 | 35188 |
| 32189 | 33189 | 34189 | 35189 |
| 32190 | 33190 | 34190 | 35190 |
| 32191 | 33191 | 34191 | 35191 |
| 32192 | 33192 | 34192 | 35192 |
| 32193 | 33193 | 34193 | 35193 |
| 32194 | 33194 | 34194 | 35194 |
| 32195 | 33195 | 34195 | 35195 |
| 32196 | 33196 | 34196 | 35196 |
| 32197 | 33197 | 34197 | 35197 |
| 32198 | 33198 | 34198 | 35198 |
| 32199 | 33199 | 34199 | 35199 |
| 32200 | 33200 | 34200 | 35200 |
| 32201 | 33201 | 34201 | 35201 |
| 32202 | 33202 | 34202 | 35202 |
| 32203 | 33203 | 34203 | 35203 |
| 32204 | 33204 | 34204 | 35204 |
| 32205 | 33205 | 34205 | 35205 |
| 32206 | 33206 | 34206 | 35206 |
| 32207 | 33207 | 34207 | 35207 |
| 32208 | 33208 | 34208 | 35208 |
| 32209 | 33209 | 34209 | 35209 |
| 32210 | 33210 | 34210 | 35210 |
| 32211 | 33211 | 34211 | 35211 |
| 32212 | 33212 | 34212 | 35212 |
| 32213 | 33213 | 34213 | 35213 |
| 32214 | 33214 | 34214 | 35214 |
| 32215 | 33215 | 34215 | 35215 |
| 32216 | 33216 | 34216 | 35216 |
| 32217 | 33217 | 34217 | 35217 |
| 32218 | 33218 | 34218 | 35218 |
| 32219 | 33219 | 34219 | 35219 |
| 32220 | 33220 | 34220 | 35220 |
| 32221 | 33221 | 34221 | 35221 |
| 32222 | 33222 | 34222 | 35222 |
| 32223 | 33223 | 34223 | 35223 |
| 32224 | 33224 | 34224 | 35224 |
| 32225 | 33225 | 34225 | 35225 |
| 32226 | 33226 | 34226 | 35226 |
| 32227 | 33227 | 34227 | 35227 |
| 32228 | 33228 | 34228 | 35228 |
| 32229 | 33229 | 34229 | 35229 |
| 32230 | 33230 | 34230 | 35230 |
| 32231 | 33231 | 34231 | 35231 |
| 32232 | 33232 | 34232 | 35232 |
| 32233 | 33233 | 34233 | 35233 |
| 32234 | 33234 | 34234 | 35234 |
| 32235 | 33235 | 34235 | 35235 |
| 32236 | 33236 | 34236 | 35236 |
| 32237 | 33237 | 34237 | 35237 |
| 32238 | 33238 | 34238 | 35238 |
| 32239 | 33239 | 34239 | 35239 |
| 32240 | 33240 | 34240 | 35240 |
| 32241 | 33241 | 34241 | 35241 |
| 32242 | 33242 | 34242 | 35242 |
| 32243 | 33243 | 34243 | 35243 |
| 32244 | 33244 | 34244 | 35244 |
| 32245 | 33245 | 34245 | 35245 |
| 32246 | 33246 | 34246 | 35246 |
| 32247 | 33247 | 34247 | 35247 |
| 32248 | 33248 | 34248 | 35248 |
| 32249 | 33249 | 34249 | 35249 |
| 32250 | 33250 | 34250 | 35250 |
| 32251 | 33251 | 34251 | 35251 |
| 32252 | 33252 | 34252 | 35252 |
| 32253 | 33253 | 34253 | 35253 |
| 32254 | 33254 | 34254 | 35254 |
| 32255 | 33255 | 34255 | 35255 |
| 32256 | 33256 | 34256 | 35256 |
| 32257 | 33257 | 34257 | 35257 |
| 32258 | 33258 | 34258 | 35258 |
| 32259 | 33259 | 34259 | 35259 |
| 32260 | 33260 | 34260 | 35260 |
| 32261 | 33261 | 34261 | 35261 |
| 32262 | 33262 | 34262 | 35262 |
| 32263 | 33263 | 34263 | 35263 |
| 32264 | 33264 | 34264 | 35264 |
| 32265 | 33265 | 34265 | 35265 |
| 32266 | 33266 | 34266 | 35266 |
| 32267 | 33267 | 34267 | 35267 |
| 32268 | 33268 | 34268 | 35268 |
| 32269 | 33269 | 34269 | 35269 |
| 32270 | 33270 | 34270 | 35270 |
| 32271 | 33271 | 34271 | 35271 |
| 32272 | 33272 | 34272 | 35272 |
| 32273 | 33273 | 34273 | 35273 |
| 32274 | 33274 | 34274 | 35274 |
| 32275 | 33275 | 34275 | 35275 |
| 32276 | 33276 | 34276 | 35276 |
| 32277 | 33277 | 34277 | 35277 |
| 32278 | 33278 | 34278 | 35278 |
| 32279 | 33279 | 34279 | 35279 |
| 32280 | 33280 | 34280 | 35280 |
| 32281 | 33281 | 34281 | 35281 |
| 32282 | 33282 | 34282 | 35282 |
| 32283 | 33283 | 34283 | 35283 |
| 32284 | 33284 | 34284 | 35284 |
| 32285 | 33285 | 34285 | 35285 |
| 32286 | 33286 | 34286 | 35286 |
| 32287 | 33287 | 34287 | 35287 |
| 32288 | 33288 | 34288 | 35288 |
| 32289 | 33289 | 34289 | 35289 |
| 32290 | 33290 | 34290 | 35290 |
| 32291 | 33291 | 34291 | 35291 |
| 32292 | 33292 | 34292 | 35292 |
| 32293 | 33293 | 34293 | 35293 |
| 32294 | 33294 | 34294 | 35294 |
| 32295 | 33295 | 34295 | 35295 |
| 32296 | 33296 | 34296 | 35296 |
| 32297 | 33297 | 34297 | 35297 |
| 32298 | 33298 | 34298 | 35298 |
| 32299 | 33299 | 34299 | 35299 |
| 32300 | 33300 | 34300 | 35300 |
| 32301 | 33301 | 34301 | 35301 |
| 32302 | 33302 | 34302 | 35302 |
| 32303 | 33303 | 34303 | 35303 |
| 32304 | 33304 | 34304 | 35304 |
| 32305 | 33305 | 34305 | 35305 |
| 32306 | 33306 | 34306 | 35306 |
| 32307 | 33307 | 34307 | 35307 |
| 32308 | 33308 | 34308 | 35308 |
| 32309 | 33309 | 34309 | 35309 |
| 32310 | 33310 | 34310 | 35310 |
| 32311 | 33311 | 34311 | 35311 |
| 32312 | 33312 | 34312 | 35312 |
| 32313 | 33313 | 34313 | 35313 |
| 32314 | 33314 | 34314 | 35314 |
| 32315 | 33315 | 34315 | 35315 |
| 32316 | 33316 | 34316 | 35316 |
| 32317 | 33317 | 34317 | 35317 |
| 32318 | 33318 | 34318 | 35318 |
| 32319 | 33319 | 34319 | 35319 |
| 32320 | 33320 | 34320 | 35320 |
| 32321 | 33321 | 34321 | 35321 |
| 32322 | 33322 | 34322 | 35322 |
| 32323 | 33323 | 34323 | 35323 |
| 32324 | 33324 | 34324 | 35324 |
| 32325 | 33325 | 34325 | 35325 |
| 32326 | 33326 | 34326 | 35326 |
| 32327 | 33327 | 34327 | 35327 |
| 32328 | 33328 | 34328 | 35328 |
| 32329 | 33329 | 34329 | 35329 |
| 32330 | 33330 | 34330 | 35330 |
| 32331 | 33331 | 34331 | 35331 |
| 32332 | 33332 | 34332 | 35332 |
| 32333 | 33333 | 34333 | 35333 |
| 32334 | 33334 | 34334 | 35334 |
| 32335 | 33335 | 34335 | 35335 |
| 32336 | 33336 | 34336 | 35336 |
| 32337 | 33337 | 34337 | 35337 |
| 32338 | 33338 | 34338 | 35338 |
| 32339 | 33339 | 34339 | 35339 |
| 32340 | 33340 | 34340 | 35340 |
| 32341 | 33341 | 34341 | 35341 |
| 32342 | 33342 | 34342 | 35342 |
| 32343 | 33343 | 34343 | 35343 |
| 32344 | 33344 | 34344 | 35344 |
| 32345 | 33345 | 34345 | 35345 |
| 32346 | 33346 | 34346 | 35346 |
| 32347 | 33347 | 34347 | 35347 |
| 32348 | 33348 | 34348 | 35348 |
| 32349 | 33349 | 34349 | 35349 |
| 32350 | 33350 | 34350 | 35350 |
| 32351 | 33351 | 34351 | 35351 |
| 32352 | 33352 | 34352 | 35352 |
| 32353 | 33353 | 34353 | 35353 |
| 32354 | 33354 | 34354 | 35354 |
| 32355 | 33355 | 34355 | 35355 |
| 32356 | 33356 | 34356 | 35356 |
| 32357 | 33357 | 34357 | 35357 |
| 32358 | 33358 | 34358 | 35358 |
| 32359 | 33359 | 34359 | 35359 |
| 32360 | 33360 | 34360 | 35360 |
| 32361 | 33361 | 34361 | 35361 |
| 32362 | 33362 | 34362 | 35362 |
| 32363 | 33363 | 34363 | 35363 |
| 32364 | 33364 | 34364 | 35364 |
| 32365 | 33365 | 34365 | 35365 |
| 32366 | 33366 | 34366 | 35366 |
| 32367 | 33367 | 34367 | 35367 |
| 32368 | 33368 | 34368 | 35368 |
| 32369 | 33369 | 34369 | 35369 |
| 32370 | 33370 | 34370 | 35370 |
| 32371 | 33371 | 34371 | 35371 |
| 32372 | 33372 | 34372 | 35372 |
| 32373 | 33373 | 34373 | 35373 |
| 32374 | 33374 | 34374 | 35374 |
| 32375 | 33375 | 34375 | 35375 |
| 32376 | 33376 | 34376 | 35376 |
| 32377 | 33377 | 34377 | 35377 |
| 32378 | 33378 | 34378 | 35378 |
| 32379 | 33379 | 34379 | 35379 |
| 32380 | 33380 | 34380 | 35380 |
| 32381 | 33381 | 34381 | 35381 |
| 32382 | 33382 | 34382 | 35382 |
| 32383 | 33383 | 34383 | 35383 |
| 32384 | 33384 | 34384 | 35384 |
| 32385 | 33385 | 34385 | 35385 |
| 32386 | 33386 | 34386 | 35386 |
| 32387 | 33387 | 34387 | 35387 |
| 32388 | 33388 | 34388 | 35388 |
| 32389 | 33389 | 34389 | 35389 |
| 32390 | 33390 | 34390 | 35390 |
| 32391 | 33391 | 34391 | 35391 |
| 32392 | 33392 | 34392 | 35392 |
| 32393 | 33393 | 34393 | 35393 |
| 32394 | 33394 | 34394 | 35394 |
| 32395 | 33395 | 34395 | 35395 |
| 32396 | 33396 | 34396 | 35396 |
| 32397 | 33397 | 34397 | 35397 |
| 32398 | 33398 | 34398 | 35398 |
| 32399 | 33399 | 34399 | 35399 |
| 32400 | 33400 | 34400 | 35400 |
| 32401 | 33401 | 34401 | 35401 |
| 32402 | 33402 | 34402 | 35402 |
| 32403 | 33403 | 34403 | 35403 |
| 32404 | 33404 | 34404 | 35404 |
| 32405 | 33405 | 34405 | 35405 |
| 32406 | 33406 | 34406 | 35406 |
| 32407 | 33407 | 34407 | 35407 |
| 32408 | 33408 | 34408 | 35408 |
| 32409 | 33409 | 34409 | 35409 |
| 32410 | 33410 | 34410 | 35410 |
| 32411 | 33411 | 34411 | 35411 |
| 32412 | 33412 | 34412 | 35412 |
| 32413 | 33413 | 34413 | 35413 |
| 32414 | 33414 | 34414 | 35414 |
| 32415 | 33415 | 34415 | 35415 |
| 32416 | 33416 | 34416 | 35416 |
| 32417 | 33417 | 34417 | 35417 |
| 32418 | 33418 | 34418 | 35418 |
| 32419 | 33419 | 34419 | 35419 |
| 32420 | 33420 | 34420 | 35420 |
| 32421 | 33421 | 34421 | 35421 |
| 32422 | 33422 | 34422 | 35422 |
| 32423 | 33423 | 34423 | 35423 |
| 32424 | 33424 | 34424 | 35424 |
| 32425 | 33425 | 34425 | 35425 |
| 32426 | 33426 | 34426 | 35426 |
| 32427 | 33427 | 34427 | 35427 |
| 32428 | 33428 | 34428 | 35428 |
| 32429 | 33429 | 34429 | 35429 |
| 32430 | 33430 | 34430 | 35430 |
| 32431 | 33431 | 34431 | 35431 |
| 32432 | 33432 | 34432 | 35432 |
| 32433 | 33433 | 34433 | 35433 |
| 32434 | 33434 | 34434 | 35434 |
| 32435 | 33435 | 34435 | 35435 |
| 32436 | 33436 | 34436 | 35436 |
| 32437 | 33437 | 34437 | 35437 |
| 32438 | 33438 | 34438 | 35438 |
| 32439 | 33439 | 34439 | 35439 |
| 32440 | 33440 | 34440 | 35440 |
| 32441 | 33441 | 34441 | 35441 |
| 32442 | 33442 | 34442 | 35442 |
| 32443 | 33443 | 34443 | 35443 |
| 32444 | 33444 | 34444 | 35444 |
| 32445 | 33445 | 34445 | 35445 |
| 32446 | 33446 | 34446 | 35446 |
| 32447 | 33447 | 34447 | 35447 |
| 32448 | 33448 | 34448 | 35448 |
| 32449 | 33449 | 34449 | 35449 |
| 32450 | 33450 | 34450 | 35450 |
| 32451 | 33451 | 34451 | 35451 |
| 32452 | 33452 | 34452 | 35452 |
| 32453 | 33453 | 34453 | 35453 |
| 32454 | 33454 | 34454 | 35454 |
| 32455 | 33455 | 34455 | 35455 |
| 32456 | 33456 | 34456 | 35456 |
| 32457 | 33457 | 34457 | 35457 |
| 32458 | 33458 | 34458 | 35458 |
| 32459 | 33459 | 34459 | 35459 |
| 32460 | 33460 | 34460 | 35460 |
| 32461 | 33461 | 34461 | 35461 |
| 32462 | 33462 | 34462 | 35462 |
| 32463 | 33463 | 34463 | 35463 |
| 32464 | 33464 | 34464 | 35464 |
| 32465 | 33465 | 34465 | 35465 |
| 32466 | 33466 | 34466 | 35466 |
| 32467 | 33467 | 34467 | 35467 |
| 32468 | 33468 | 34468 | 35468 |
| 32469 | 33469 | 34469 | 35469 |
| 32470 | 33470 | 34470 | 35470 |
| 32471 | 33471 | 34471 | 35471 |
| 32472 | 33472 | 34472 | 35472 |
| 32473 | 33473 | 34473 | 35473 |
| 32474 | 33474 | 34474 | 35474 |
| 32475 | 33475 | 34475 | 35475 |
| 32476 | 33476 | 34476 | 35476 |
| 32477 | 33477 | 34477 | 35477 |
| 32478 | 33478 | 34478 | 35478 |
| 32479 | 33479 | 34479 | 35479 |
| 32480 | 33480 | 34480 | 35480 |
| 32481 | 33481 | 34481 | 35481 |
| 32482 | 33482 | 34482 | 35482 |
| 32483 | 33483 | 34483 | 35483 |
| 32484 | 33484 | 34484 | 35484 |
| 32485 | 33485 | 34485 | 35485 |
| 32486 | 33486 | 34486 | 35486 |
| 32487 | 33487 | 34487 | 35487 |
| 32488 | 33488 | 34488 | 35488 |
| 32489 | 33489 | 34489 | 35489 |
| 32490 | 33490 | 34490 | 35490 |
| 32491 | 33491 | 34491 | 35491 |
| 32492 | 33492 | 34492 | 35492 |
| 32493 | 33493 | 34493 | 35493 |
| 32494 | 33494 | 34494 | 35494 |
| 32495 | 33495 | 34495 | 35495 |
| 32496 | 33496 | 34496 | 35496 |
| 32497 | 33497 | 34497 | 35497 |
| 32498 | 33498 | 34498 | 35498 |
| 32499 | 33499 | 34499 | 35499 |
| 32500 | 33500 | 34500 | 35500 |
| 32501 | 33501 | 34501 | 35501 |
| 32502 | 33502 | 34502 | 35502 |
| 32503 | 33503 | 34503 | 35503 |
| 32504 | 33504 | 34504 | 35504 |
| 32505 | 33505 | 34505 | 35505 |
| 32506 | 33506 | 34506 | 35506 |
| 32507 | 33507 | 34507 | 35507 |
| 32508 | 33508 | 34508 | 35508 |
| 32509 | 33509 | 34509 | 35509 |
| 32510 | 33510 | 34510 | 35510 |
| 32511 | 33511 | 34511 | 35511 |
| 32512 | 33512 | 34512 | 35512 |
| 32513 | 33513 | 34513 | 35513 |
| 32514 | 33514 | 34514 | 35514 |
| 32515 | 33515 | 34515 | 35515 |
| 32516 | 33516 | 34516 | 35516 |
| 32517 | 33517 | 34517 | 35517 |
| 32518 | 33518 | 34518 | 35518 |
| 32519 | 33519 | 34519 | 35519 |
| 32520 | 33520 | 34520 | 35520 |
| 32521 | 33521 | 34521 | 35521 |
| 32522 | 33522 | 34522 | 35522 |
| 32523 | 33523 | 34523 | 35523 |
| 32524 | 33524 | 34524 | 35524 |
| 32525 | 33525 | 34525 | 35525 |
| 32526 | 33526 | 34526 | 35526 |
| 32527 | 33527 | 34527 | 35527 |
| 32528 | 33528 | 34528 | 35528 |
| 32529 | 33529 | 34529 | 35529 |
| 32530 | 33530 | 34530 | 35530 |
| 32531 | 33531 | 34531 | 35531 |
| 32532 | 33532 | 34532 | 35532 |
| 32533 | 33533 | 34533 | 35533 |
| 32534 | 33534 | 34534 | 35534 |
| 32535 | 33535 | 34535 | 35535 |
| 32536 | 33536 | 34536 | 35536 |
| 32537 | 33537 | 34537 | 35537 |
| 32538 | 33538 | 34538 | 35538 |
| 32539 | 33539 | 34539 | 35539 |
| 32540 | 33540 | 34540 | 35540 |
| 32541 | 33541 | 34541 | 35541 |
| 32542 | 33542 | 34542 | 35542 |
| 32543 | 33543 | 34543 | 35543 |
| 32544 | 33544 | 34544 | 35544 |
| 32545 | 33545 | 34545 | 35545 |
| 32546 | 33546 | 34546 | 35546 |
| 32547 | 33547 | 34547 | 35547 |
| 32548 | 33548 | 34548 | 35548 |
| 32549 | 33549 | 34549 | 35549 |
| 32550 | 33550 | 34550 | 35550 |
| 32551 | 33551 | 34551 | 35551 |
| 32552 | 33552 | 34552 | 35552 |
| 32553 | 33553 | 34553 | 35553 |
| 32554 | 33554 | 34554 | 35554 |
| 32555 | 33555 | 34555 | 35555 |
| 32556 | 33556 | 34556 | 35556 |
| 32557 | 33557 | 34557 | 35557 |
| 32558 | 33558 | 34558 | 35558 |
| 32559 | 33559 | 34559 | 35559 |
| 32560 | 33560 | 34560 | 35560 |
| 32561 | 33561 | 34561 | 35561 |
| 32562 | 33562 | 34562 | 35562 |
| 32563 | 33563 | 34563 | 35563 |
| 32564 | 33564 | 34564 | 35564 |
| 32565 | 33565 | 34565 | 35565 |
| 32566 | 33566 | 34566 | 35566 |
| 32567 | 33567 | 34567 | 35567 |
| 32568 | 33568 | 34568 | 35568 |
| 32569 | 33569 | 34569 | 35569 |
| 32570 | 33570 | 34570 | 35570 |
| 32571 | 33571 | 34571 | 35571 |
| 32572 | 33572 | 34572 | 35572 |
| 32573 | 33573 | 34573 | 35573 |
| 32574 | 33574 | 34574 | 35574 |
| 32575 | 33575 | 34575 | 35575 |
| 32576 | 33576 | 34576 | 35576 |
| 32577 | 33577 | 34577 | 35577 |
| 32578 | 33578 | 34578 | 35578 |
| 32579 | 33579 | 34579 | 35579 |
| 32580 | 33580 | 34580 | 35580 |
| 32581 | 33581 | 34581 | 35581 |
| 32582 | 33582 | 34582 | 35582 |
| 32583 | 33583 | 34583 | 35583 |
| 32584 | 33584 | 34584 | 35584 |
| 32585 | 33585 | 34585 | 35585 |
| 32586 | 33586 | 34586 | 35586 |
| 32587 | 33587 | 34587 | 35587 |
| 32588 | 33588 | 34588 | 35588 |
| 32589 | 33589 | 34589 | 35589 |
| 32590 | 33590 | 34590 | 35590 |
| 32591 | 33591 | 34591 | 35591 |
| 32592 | 33592 | 34592 | 35592 |
| 32593 | 33593 | 34593 | 35593 |
| 32594 | 33594 | 34594 | 35594 |
| 32595 | 33595 | 34595 | 35595 |
| 32596 | 33596 | 34596 | 35596 |
| 32597 | 33597 | 34597 | 35597 |
| 32598 | 33598 | 34598 | 35598 |
| 32599 | 33599 | 34599 | 35599 |
| 32600 | 33600 | 34600 | 35600 |
| 32601 | 33601 | 34601 | 35601 |
| 32602 | 33602 | 34602 | 35602 |
| 32603 | 33603 | 34603 | 35603 |
| 32604 | 33604 | 34604 | 35604 |
| 32605 | 33605 | 34605 | 35605 |
| 32606 | 33606 | 34606 | 35606 |
| 32607 | 33607 | 34607 | 35607 |
| 32608 | 33608 | 34608 | 35608 |
| 32609 | 33609 | 34609 | 35609 |
| 32610 | 33610 | 34610 | 35610 |
| 32611 | 33611 | 34611 | 35611 |
| 32612 | 33612 | 34612 | 35612 |
| 32613 | 33613 | 34613 | 35613 |
| 32614 | 33614 | 34614 | 35614 |
| 32615 | 33615 | 34615 | 35615 |
| 32616 | 33616 | 34616 | 35616 |
| 32617 | 33617 | 34617 | 35617 |
| 32618 | 33618 | 34618 | 35618 |
| 32619 | 33619 | 34619 | 35619 |
| 32620 | 33620 | 34620 | 35620 |
| 32621 | 33621 | 34621 | 35621 |
| 32622 | 33622 | 34622 | 35622 |
| 32623 | 33623 | 34623 | 35623 |
| 32624 | 33624 | 34624 | 35624 |
| 32625 | 33625 | 34625 | 35625 |
| 32626 | 33626 | 34626 | 35626 |
| 32627 | 33627 | 34627 | 35627 |
| 32628 | 33628 | 34628 | 35628 |
| 32629 | 33629 | 34629 | 35629 |
| 32630 | 33630 | 34630 | 35630 |
| 32631 | 33631 | 34631 | 35631 |
| 32632 | 33632 | 34632 | 35632 |
| 32633 | 33633 | 34633 | 35633 |
| 32634 | 33634 | 34634 | 35634 |
| 32635 | 33635 | 34635 | 35635 |
| 32636 | 33636 | 34636 | 35636 |
| 32637 | 33637 | 34637 | 35637 |
| 32638 | 33638 | 34638 | 35638 |
| 32639 | 33639 | 34639 | 35639 |
| 32640 | 33640 | 34640 | 35640 |
| 32641 | 33641 | 34641 | 35641 |
| 32642 | 33642 | 34642 | 35642 |
| 32643 | 33643 | 34643 | 35643 |
| 32644 | 33644 | 34644 | 35644 |
| 32645 | 33645 | 34645 | 35645 |
| 32646 | 33646 | 34646 | 35646 |
| 32647 | 33647 | 34647 | 35647 |
| 32648 | 33648 | 34648 | 35648 |
| 32649 | 33649 | 34649 | 35649 |
| 32650 | 33650 | 34650 | 35650 |
| 32651 | 33651 | 34651 | 35651 |
| 32652 | 33652 | 34652 | 35652 |
| 32653 | 33653 | 34653 | 35653 |
| 32654 | 33654 | 34654 | 35654 |
| 32655 | 33655 | 34655 | 35655 |
| 32656 | 33656 | 34656 | 35656 |
| 32657 | 33657 | 34657 | 35657 |
| 32658 | 33658 | 34658 | 35658 |
| 32659 | 33659 | 34659 | 35659 |
| 32660 | 33660 | 34660 | 35660 |
| 32661 | 33661 | 34661 | 35661 |
| 32662 | 33662 | 34662 | 35662 |
| 32663 | 33663 | 34663 | 35663 |
| 32664 | 33664 | 34664 | 35664 |
| 32665 | 33665 | 34665 | 35665 |
| 32666 | 33666 | 34666 | 35666 |
| 32667 | 33667 | 34667 | 35667 |
| 32668 | 33668 | 34668 | 35668 |
| 32669 | 33669 | 34669 | 35669 |
| 32670 | 33670 | 34670 | 35670 |
| 32671 | 33671 | 34671 | 35671 |
| 32672 | 33672 | 34672 | 35672 |
| 32673 | 33673 | 34673 | 35673 |
| 32674 | 33674 | 34674 | 35674 |
| 32675 | 33675 | 34675 | 35675 |
| 32676 | 33676 | 34676 | 35676 |
| 32677 | 33677 | 34677 | 35677 |
| 32678 | 33678 | 34678 | 35678 |
| 32679 | 33679 | 34679 | 35679 |
| 32680 | 33680 | 34680 | 35680 |
| 32681 | 33681 | 34681 | 35681 |
| 32682 | 33682 | 34682 | 35682 |
| 32683 | 33683 | 34683 | 35683 |
| 32684 | 33684 | 34684 | 35684 |
| 32685 | 33685 | 34685 | 35685 |
| 32686 | 33686 | 34686 | 35686 |
| 32687 | 33687 | 34687 | 35687 |
| 32688 | 33688 | 34688 | 35688 |
| 32689 | 33689 | 34689 | 35689 |
| 32690 | 33690 | 34690 | 35690 |
| 32691 | 33691 | 34691 | 35691 |
| 32692 | 33692 | 34692 | 35692 |
| 32693 | 33693 | 34693 | 35693 |
| 32694 | 33694 | 34694 | 35694 |
| 32695 | 33695 | 34695 | 35695 |
| 32696 | 33696 | 34696 | 35696 |
| 32697 | 33697 | 34697 | 35697 |
| 32698 | 33698 | 34698 | 35698 |
| 32699 | 33699 | 34699 | 35699 |
| 32700 | 33700 | 34700 | 35700 |
| 32701 | 33701 | 34701 | 35701 |
| 32702 | 33702 | 34702 | 35702 |
| 32703 | 33703 | 34703 | 35703 |
| 32704 | 33704 | 34704 | 35704 |
| 32705 | 33705 | 34705 | 35705 |
| 32706 | 33706 | 34706 | 35706 |
| 32707 | 33707 | 34707 | 35707 |
| 32708 | 33708 | 34708 | 35708 |
| 32709 | 33709 | 34709 | 35709 |
| 32710 | 33710 | 34710 | 35710 |
| 32711 | 33711 | 34711 | 35711 |
| 32712 | 33712 | 34712 | 35712 |
| 32713 | 33713 | 34713 | 35713 |
| 32714 | 33714 | 34714 | 35714 |
| 32715 | 33715 | 34715 | 35715 |
| 32716 | 33716 | 34716 | 35716 |
| 32717 | 33717 | 34717 | 35717 |
| 32718 | 33718 | 34718 | 35718 |
| 32719 | 33719 | 34719 | 35719 |
| 32720 | 33720 | 34720 | 35720 |
| 32721 | 33721 | 34721 | 35721 |
| 32722 | 33722 | 34722 | 35722 |
| 32723 | 33723 | 34723 | 35723 |
| 32724 | 33724 | 34724 | 35724 |
| 32725 | 33725 | 34725 | 35725 |
| 32726 | 33726 | 34726 | 35726 |
| 32727 | 33727 | 34727 | 35727 |
| 32728 | 33728 | 34728 | 35728 |
| 32729 | 33729 | 34729 | 35729 |
| 32730 | 33730 | 34730 | 35730 |
| 32731 | 33731 | 34731 | 35731 |
| 32732 | 33732 | 34732 | 35732 |
| 32733 | 33733 | 34733 | 35733 |
| 32734 | 33734 | 34734 | 35734 |
| 32735 | 33735 | 34735 | 35735 |
| 32736 | 33736 | 34736 | 35736 |
| 32737 | 33737 | 34737 | 35737 |
| 32738 | 33738 | 34738 | 35738 |
| 32739 | 33739 | 34739 | 35739 |
| 32740 | 33740 | 34740 | 35740 |
| 32741 | 33741 | 34741 | 35741 |
| 32742 | 33742 | 34742 | 35742 |
| 32743 | 33743 | 34743 | 35743 |
| 32744 | 33744 | 34744 | 35744 |
| 32745 | 33745 | 34745 | 35745 |
| 32746 | 33746 | 34746 | 35746 |
| 32747 | 33747 | 34747 | 35747 |
| 32748 | 33748 | 34748 | 35748 |
| 32749 | 33749 | 34749 | 35749 |
| 32750 | 33750 | 34750 | 35750 |
| 32751 | 33751 | 34751 | 35751 |
| 32752 | 33752 | 34752 | 35752 |
| 32753 | 33753 | 34753 | 35753 |
| 32754 | 33754 | 34754 | 35754 |
| 32755 | 33755 | 34755 | 35755 |
| 32756 | 33756 | 34756 | 35756 |
| 32757 | 33757 | 34757 | 35757 |
| 32758 | 33758 | 34758 | 35758 |
| 32759 | 33759 | 34759 | 35759 |
| 32760 | 33760 | 34760 | 35760 |
| 32761 | 33761 | 34761 | 35761 |
| 32762 | 33762 | 34762 | 35762 |
| 32763 | 33763 | 34763 | 35763 |
| 32764 | 33764 | 34764 | 35764 |
| 32765 | 33765 | 34765 | 35765 |
| 32766 | 33766 | 34766 | 35766 |
| 32767 | 33767 | 34767 | 35767 |
| 32768 | 33768 | 34768 | 35768 |
| 32769 | 33769 | 34769 | 35769 |
| 32770 | 33770 | 34770 | 35770 |
| 32771 | 33771 | 34771 | 35771 |
| 32772 | 33772 | 34772 | 35772 |
| 32773 | 33773 | 34773 | 35773 |
| 32774 | 33774 | 34774 | 35774 |
| 32775 | 33775 | 34775 | 35775 |
| 32776 | 33776 | 34776 | 35776 |
| 32777 | 33777 | 34777 | 35777 |
| 32778 | 33778 | 34778 | 35778 |
| 32779 | 33779 | 34779 | 35779 |
| 32780 | 33780 | 34780 | 35780 |
| 32781 | 33781 | 34781 | 35781 |
| 32782 | 33782 | 34782 | 35782 |
| 32783 | 33783 | 34783 | 35783 |
| 32784 | 33784 | 34784 | 35784 |
| 32785 | 33785 | 34785 | 35785 |
| 32786 | 33786 | 34786 | 35786 |
| 32787 | 33787 | 34787 | 35787 |
| 32788 | 33788 | 34788 | 35788 |
| 32789 | 33789 | 34789 | 35789 |
| 32790 | 33790 | 34790 | 35790 |
| 32791 | 33791 | 34791 | 35791 |
| 32792 | 33792 | 34792 | 35792 |
| 32793 | 33793 | 34793 | 35793 |
| 32794 | 33794 | 34794 | 35794 |
| 32795 | 33795 | 34795 | 35795 |
| 32796 | 33796 | 34796 | 35796 |
| 32797 | 33797 | 34797 | 35797 |
| 32798 | 33798 | 34798 | 35798 |
| 32799 | 33799 | 34799 | 35799 |
| 32800 | 33800 | 34800 | 35800 |
| 32801 | 33801 | 34801 | 35801 |
| 32802 | 33802 | 34802 | 35802 |
| 32803 | 33803 | 34803 | 35803 |
| 32804 | 33804 | 34804 | 35804 |
| 32805 | 33805 | 34805 | 35805 |
| 32806 | 33806 | 34806 | 35806 |
| 32807 | 33807 | 34807 | 35807 |
| 32808 | 33808 | 34808 | 35808 |
| 32809 | 33809 | 34809 | 35809 |
| 32810 | 33810 | 34810 | 35810 |
| 32811 | 33811 | 34811 | 35811 |
| 32812 | 33812 | 34812 | 35812 |
| 32813 | 33813 | 34813 | 35813 |
| 32814 | 33814 | 34814 | 35814 |
| 32815 | 33815 | 34815 | 35815 |
| 32816 | 33816 | 34816 | 35816 |
| 32817 | 33817 | 34817 | 35817 |
| 32818 | 33818 | 34818 | 35818 |
| 32819 | 33819 | 34819 | 35819 |
| 32820 | 33820 | 34820 | 35820 |
| 32821 | 33821 | 34821 | 35821 |
| 32822 | 33822 | 34822 | 35822 |
| 32823 | 33823 | 34823 | 35823 |
| 32824 | 33824 | 34824 | 35824 |
| 32825 | 33825 | 34825 | 35825 |
| 32826 | 33826 | 34826 | 35826 |
| 32827 | 33827 | 34827 | 35827 |
| 32828 | 33828 | 34828 | 35828 |
| 32829 | 33829 | 34829 | 35829 |
| 32830 | 33830 | 34830 | 35830 |
| 32831 | 33831 | 34831 | 35831 |
| 32832 | 33832 | 34832 | 35832 |
| 32833 | 33833 | 34833 | 35833 |
| 32834 | 33834 | 34834 | 35834 |
| 32835 | 33835 | 34835 | 35835 |
| 32836 | 33836 | 34836 | 35836 |
| 32837 | 33837 | 34837 | 35837 |
| 32838 | 33838 | 34838 | 35838 |
| 32839 | 33839 | 34839 | 35839 |
| 32840 | 33840 | 34840 | 35840 |
| 32841 | 33841 | 34841 | 35841 |
| 32842 | 33842 | 34842 | 35842 |
| 32843 | 33843 | 34843 | 35843 |
| 32844 | 33844 | 34844 | 35844 |
| 32845 | 33845 | 34845 | 35845 |
| 32846 | 33846 | 34846 | 35846 |
| 32847 | 33847 | 34847 | 35847 |
| 32848 | 33848 | 34848 | 35848 |
| 32849 | 33849 | 34849 | 35849 |
| 32850 | 33850 | 34850 | 35850 |
| 32851 | 33851 | 34851 | 35851 |
| 32852 | 33852 | 34852 | 35852 |
| 32853 | 33853 | 34853 | 35853 |
| 32854 | 33854 | 34854 | 35854 |
| 32855 | 33855 | 34855 | 35855 |
| 32856 | 33856 | 34856 | 35856 |
| 32857 | 33857 | 34857 | 35857 |
| 32858 | 33858 | 34858 | 35858 |
| 32859 | 33859 | 34859 | 35859 |
| 32860 | 33860 | 34860 | 35860 |
| 32861 | 33861 | 34861 | 35861 |
| 32862 | 33862 | 34862 | 35862 |
| 32863 | 33863 | 34863 | 35863 |
| 32864 | 33864 | 34864 | 35864 |
| 32865 | 33865 | 34865 | 35865 |
| 32866 | 33866 | 34866 | 35866 |
| 32867 | 33867 | 34867 | 35867 |
| 32868 | 33868 | 34868 | 35868 |
| 32869 | 33869 | 34869 | 35869 |
| 32870 | 33870 | 34870 | 35870 |
| 32871 | 33871 | 34871 | 35871 |
| 32872 | 33872 | 34872 | 35872 |
| 32873 | 33873 | 34873 | 35873 |
| 32874 | 33874 | 34874 | 35874 |
| 32875 | 33875 | 34875 | 35875 |
| 32876 | 33876 | 34876 | 35876 |
| 32877 | 33877 | 34877 | 35877 |
| 32878 | 33878 | 34878 | 35878 |
| 32879 | 33879 | 34879 | 35879 |
| 32880 | 33880 | 34880 | 35880 |
| 32881 | 33881 | 34881 | 35881 |
| 32882 | 33882 | 34882 | 35882 |
| 32883 | 33883 | 34883 | 35883 |
| 32884 | 33884 | 34884 | 35884 |
| 32885 | 33885 | 34885 | 35885 |
| 32886 | 33886 | 34886 | 35886 |
| 32887 | 33887 | 34887 | 35887 |
| 32888 | 33888 | 34888 | 35888 |
| 32889 | 33889 | 34889 | 35889 |
| 32890 | 33890 | 34890 | 35890 |
| 32891 | 33891 | 34891 | 35891 |
| 32892 | 33892 | 34892 | 35892 |
| 32893 | 33893 | 34893 | 35893 |
| 32894 | 33894 | 34894 | 35894 |
| 32895 | 33895 | 34895 | 35895 |
| 32896 | 33896 | 34896 | 35896 |
| 32897 | 33897 | 34897 | 35897 |
| 32898 | 33898 | 34898 | 35898 |
| 32899 | 33899 | 34899 | 35899 |
| 32900 | 33900 | 34900 | 35900 |
| 32901 | 33901 | 34901 | 35901 |
| 32902 | 33902 | 34902 | 35902 |
| 32903 | 33903 | 34903 | 35903 |
| 32904 | 33904 | 34904 | 35904 |
| 32905 | 33905 | 34905 | 35905 |
| 32906 | 33906 | 34906 | 35906 |
| 32907 | 33907 | 34907 | 35907 |
| 32908 | 33908 | 34908 | 35908 |
| 32909 | 33909 | 34909 | 35909 |
| 32910 | 33910 | 34910 | 35910 |
| 32911 | 33911 | 34911 | 35911 |
| 32912 | 33912 | 34912 | 35912 |
| 32913 | 33913 | 34913 | 35913 |
| 32914 | 33914 | 34914 | 35914 |
| 32915 | 33915 | 34915 | 35915 |
| 32916 | 33916 | 34916 | 35916 |
| 32917 | 33917 | 34917 | 35917 |
| 32918 | 33918 | 34918 | 35918 |
| 32919 | 33919 | 34919 | 35919 |
| 32920 | 33920 | 34920 | 35920 |
| 32921 | 33921 | 34921 | 35921 |
| 32922 | 33922 | 34922 | 35922 |
| 32923 | 33923 | 34923 | 35923 |
| 32924 | 33924 | 34924 | 35924 |
| 32925 | 33925 | 34925 | 35925 |
| 32926 | 33926 | 34926 | 35926 |
| 32927 | 33927 | 34927 | 35927 |
| 32928 | 33928 | 34928 | 35928 |
| 32929 | 33929 | 34929 | 35929 |
| 32930 | 33930 | 34930 | 35930 |
| 32931 | 33931 | 34931 | 35931 |
| 32932 | 33932 | 34932 | 35932 |
| 32933 | 33933 | 34933 | 35933 |
| 32934 | 33934 | 34934 | 35934 |
| 32935 | 33935 | 34935 | 35935 |
| 32936 | 33936 | 34936 | 35936 |
| 32937 | 33937 | 34937 | 35937 |
| 32938 | 33938 | 34938 | 35938 |
| 32939 | 33939 | 34939 | 35939 |
| 32940 | 33940 | 34940 | 35940 |
| 32941 | 33941 | 34941 | 35941 |
| 32942 | 33942 | 34942 | 35942 |
| 32943 | 33943 | 34943 | 35943 |
| 32944 | 33944 | 34944 | 35944 |
| 32945 | 33945 | 34945 | 35945 |
| 32946 | 33946 | 34946 | 35946 |
| 32947 | 33947 | 34947 | 35947 |
| 32948 | 33948 | 34948 | 35948 |
| 32949 | 33949 | 34949 | 35949 |
| 32950 | 33950 | 34950 | 35950 |
| 32951 | 33951 | 34951 | 35951 |
| 32952 | 33952 | 34952 | 35952 |
| 32953 | 33953 | 34953 | 35953 |
| 32954 | 33954 | 34954 | 35954 |
| 32955 | 33955 | 34955 | 35955 |
| 32956 | 33956 | 34956 | 35956 |
| 32957 | 33957 | 34957 | 35957 |
| 32958 | 33958 | 34958 | 35958 |
| 32959 | 33959 | 34959 | 35959 |
| 32960 | 33960 | 34960 | 35960 |
| 32961 | 33961 | 34961 | 35961 |
| 32962 | 33962 | 34962 | 35962 |
| 32963 | 33963 | 34963 | 35963 |
| 32964 | 33964 | 34964 | 35964 |
| 32965 | 33965 | 34965 | 35965 |
| 32966 | 33966 | 34966 | 35966 |
| 32967 | 33967 | 34967 | 35967 |
| 32968 | 33968 | 34968 | 35968 |
| 32969 | 33969 | 34969 | 35969 |
| 32970 | 33970 | 34970 | 35970 |
| 32971 | 33971 | 34971 | 35971 |
| 32972 | 33972 | 34972 | 35972 |
| 32973 | 33973 | 34973 | 35973 |
| 32974 | 33974 | 34974 | 35974 |
| 32975 | 33975 | 34975 | 35975 |
| 32976 | 33976 | 34976 | 35976 |
| 32977 | 33977 | 34977 | 35977 |
| 32978 | 33978 | 34978 | 35978 |
| 32979 | 33979 | 34979 | 35979 |
| 32980 | 33980 | 34980 | 35980 |
| 32981 | 33981 | 34981 | 35981 |
| 32982 | 33982 | 34982 | 35982 |
| 32983 | 33983 | 34983 | 35983 |
| 32984 | 33984 | 34984 | 35984 |
| 32985 | 33985 | 34985 | 35985 |
| 32986 | 33986 | 34986 | 35986 |
| 32987 | 33987 | 34987 | 35987 |
| 32988 | 33988 | 34988 | 35988 |
| 32989 | 33989 | 34989 | 35989 |
| 32990 | 33990 | 34990 | 35990 |
| 32991 | 33991 | 34991 | 35991 |
| 32992 | 33992 | 34992 | 35992 |
| 32993 | 33993 | 34993 | 35993 |
| 32994 | 33994 | 34994 | 35994 |
| 32995 | 33995 | 34995 | 35995 |
| 32996 | 33996 | 34996 | 35996 |
| 32997 | 33997 | 34997 | 35997 |
| 32998 | 33998 | 34998 | 35998 |
| 32999 | 33999 | 34999 | 35999 |
| 33000 | 34000 | 35000 | 36000 |
| 33001 | 34001 | 35001 | 36001 |
| 33002 | 34002 | 35002 | 36002 |

[0136] In some embodiments, the sequences that can bind to control materials during detection assay can be selected through the present disclosure. As a non-limiting sequence, the sequences that bind to peanut control material are selected by the present method, which comprise an inner sequence selected from the group consisting of the nucleic acid sequences of SEQ ID NOs. 36003 to 37002. In some examples, a short nucleic acid sequence may be affixed to the 5-end of the inner sequence. The short nucleic acid sequence may be the 5′ primer sequence used in the random ssDNA library, i.e. the nucleic acid sequence of SEQ ID NO. 1. Accordingly, the aptamer that specifically binds to peanut control material may comprise a nucleic acid sequence selected from the group consisting of SEQ ID NOs. 37003 to 38002. In other examples, a short nucleic acid sequence may be affixed to the 3-end of the inner sequence. The short nucleic acid sequence may be the 3′ primer sequence used in the random ssDNA library, i.e. the nucleic acid sequence of SEQ ID NO. 2. Accordingly, the aptamer that specifically binds to peanut control material may comprise a nucleic acid sequence selected from the group consisting of SEQ ID NOs. 38003 to 39002. In other examples, the inner sequence may comprise a 5′ end short sequence (i.e., SEQ ID NO. 1) and a 3′ end short sequence (i.e., SEQ ID NO. 2). Accordingly, the aptamer that specifically binds to peanut control material may comprise a nucleic acid sequence selected from the group consisting of SEQ ID NOs. 39003 to 40002. In one embodiment, the aptamer of the present disclosure that can be used to detect peanut control material may comprise a nucleic acid sequence selected from the group consisting of SEQ ID NOs. 36003 to 40002 listed in Table 11, or variant thereof.

TABLE 11
Aptamer peanut control sequences
Aptamer sequence

| | | | 5′-sequence |
|---|---|---|---|
| | 5′-sequence | Inner | and inner |
| Inner | and inner | sequence and | sequence and |
| Sequence | sequence | 3′-sequence | 3′-sequence |
| (SEQ ID NO.) | (SEQ ID NO.) | (SEQ ID NO.) | (SEQ ID NO.) |
| 36003 | 37003 | 38003 | 39003 |
| 36004 | 37004 | 38004 | 39004 |
| 36005 | 37005 | 38005 | 39005 |
| 36006 | 37006 | 38006 | 39006 |
| 36007 | 37007 | 38007 | 39007 |
| 36008 | 37008 | 38008 | 39008 |
| 36009 | 37009 | 38009 | 39009 |
| 36010 | 37010 | 38010 | 39010 |
| 36011 | 37011 | 38011 | 39011 |
| 36012 | 37012 | 38012 | 39012 |
| 36013 | 37013 | 38013 | 39013 |
| 36014 | 37014 | 38014 | 39014 |
| 36015 | 37015 | 38015 | 39015 |
| 36016 | 37016 | 38016 | 39016 |
| 36017 | 37017 | 38017 | 39017 |
| 36018 | 37018 | 38018 | 39018 |
| 36019 | 37019 | 38019 | 39019 |
| 36020 | 37020 | 38020 | 39020 |
| 36021 | 37021 | 38021 | 39021 |
| 36022 | 37022 | 38022 | 39022 |
| 36023 | 37023 | 38023 | 39023 |
| 36024 | 37024 | 38024 | 39024 |
| 36025 | 37025 | 38025 | 39025 |
| 36026 | 37026 | 38026 | 39026 |
| 36027 | 37027 | 38027 | 39027 |
| 36028 | 37028 | 38028 | 39028 |
| 36029 | 37029 | 38029 | 39029 |
| 36030 | 37030 | 38030 | 39030 |
| 36031 | 37031 | 38031 | 39031 |
| 36032 | 37032 | 38032 | 39032 |
| 36033 | 37033 | 38033 | 39033 |
| 36034 | 37034 | 38034 | 39034 |
| 36035 | 37035 | 38035 | 39035 |
| 36036 | 37036 | 38036 | 39036 |
| 36037 | 37037 | 38037 | 39037 |
| 36038 | 37038 | 38038 | 39038 |
| 36039 | 37039 | 38039 | 39039 |
| 36040 | 37040 | 38040 | 39040 |
| 36041 | 37041 | 38041 | 39041 |
| 36042 | 37042 | 38042 | 39042 |
| 36043 | 37043 | 38043 | 39043 |
| 36044 | 37044 | 38044 | 39044 |
| 36045 | 37045 | 38045 | 39045 |
| 36046 | 37046 | 38046 | 39046 |
| 36047 | 37047 | 38047 | 39047 |
| 36048 | 37048 | 38048 | 39048 |
| 36049 | 37049 | 38049 | 39049 |
| 36050 | 37050 | 38050 | 39050 |
| 36051 | 37051 | 38051 | 39051 |
| 36052 | 37052 | 38052 | 39052 |
| 36053 | 37053 | 38053 | 39053 |
| 36054 | 37054 | 38054 | 39054 |
| 36055 | 37055 | 38055 | 39055 |
| 36056 | 37056 | 38056 | 39056 |
| 36057 | 37057 | 38057 | 39057 |
| 36058 | 37058 | 38058 | 39058 |
| 36059 | 37059 | 38059 | 39059 |
| 36060 | 37060 | 38060 | 39060 |
| 36061 | 37061 | 38061 | 39061 |
| 36062 | 37062 | 38062 | 39062 |
| 36063 | 37063 | 38063 | 39063 |
| 36064 | 37064 | 38064 | 39064 |
| 36065 | 37065 | 38065 | 39065 |
| 36066 | 37066 | 38066 | 39066 |
| 36067 | 37067 | 38067 | 39067 |
| 36068 | 37068 | 38068 | 39068 |
| 36069 | 37069 | 38069 | 39069 |
| 36070 | 37070 | 38070 | 39070 |
| 36071 | 37071 | 38071 | 39071 |
| 36072 | 37072 | 38072 | 39072 |
| 36073 | 37073 | 38073 | 39073 |
| 36074 | 37074 | 38074 | 39074 |
| 36075 | 37075 | 38075 | 39075 |
| 36076 | 37076 | 38076 | 39076 |
| 36077 | 37077 | 38077 | 39077 |
| 36078 | 37078 | 38078 | 39078 |
| 36079 | 37079 | 38079 | 39079 |
| 36080 | 37080 | 38080 | 39080 |
| 36081 | 37081 | 38081 | 39081 |
| 36082 | 37082 | 38082 | 39082 |
| 36083 | 37083 | 38083 | 39083 |
| 36084 | 37084 | 38084 | 39084 |
| 36085 | 37085 | 38085 | 39085 |
| 36086 | 37086 | 38086 | 39086 |
| 36087 | 37087 | 38087 | 39087 |
| 36088 | 37088 | 38088 | 39088 |
| 36089 | 37089 | 38089 | 39089 |
| 36090 | 37090 | 38090 | 39090 |
| 36091 | 37091 | 38091 | 39091 |
| 36092 | 37092 | 38092 | 39092 |
| 36093 | 37093 | 38093 | 39093 |
| 36094 | 37094 | 38094 | 39094 |
| 36095 | 37095 | 38095 | 39095 |
| 36096 | 37096 | 38096 | 39096 |
| 36097 | 37097 | 38097 | 39097 |
| 36098 | 37098 | 38098 | 39098 |
| 36099 | 37099 | 38099 | 39099 |
| 36100 | 37100 | 38100 | 39100 |
| 36101 | 37101 | 38101 | 39101 |
| 36102 | 37102 | 38102 | 39102 |
| 36103 | 37103 | 38103 | 39103 |
| 36104 | 37104 | 38104 | 39104 |
| 36105 | 37105 | 38105 | 39105 |
| 36106 | 37106 | 38106 | 39106 |
| 36107 | 37107 | 38107 | 39107 |
| 36108 | 37108 | 38108 | 39108 |
| 36109 | 37109 | 38109 | 39109 |
| 36110 | 37110 | 38110 | 39110 |
| 36111 | 37111 | 38111 | 39111 |
| 36112 | 37112 | 38112 | 39112 |
| 36113 | 37113 | 38113 | 39113 |
| 36114 | 37114 | 38114 | 39114 |
| 36115 | 37115 | 38115 | 39115 |
| 36116 | 37116 | 38116 | 39116 |
| 36117 | 37117 | 38117 | 39117 |
| 36118 | 37118 | 38118 | 39118 |
| 36119 | 37119 | 38119 | 39119 |
| 36120 | 37120 | 38120 | 39120 |
| 36121 | 37121 | 38121 | 39121 |
| 36122 | 37122 | 38122 | 39122 |
| 36123 | 37123 | 38123 | 39123 |
| 36124 | 37124 | 38124 | 39124 |
| 36125 | 37125 | 38125 | 39125 |
| 36126 | 37126 | 38126 | 39126 |
| 36127 | 37127 | 38127 | 39127 |
| 36128 | 37128 | 38128 | 39128 |
| 36129 | 37129 | 38129 | 39129 |
| 36130 | 37130 | 38130 | 39130 |
| 36131 | 37131 | 38131 | 39131 |
| 36132 | 37132 | 38132 | 39132 |
| 36133 | 37133 | 38133 | 39133 |
| 36134 | 37134 | 38134 | 39134 |
| 36135 | 37135 | 38135 | 39135 |
| 36136 | 37136 | 38136 | 39136 |
| 36137 | 37137 | 38137 | 39137 |
| 36138 | 37138 | 38138 | 39138 |
| 36139 | 37139 | 38139 | 39139 |
| 36140 | 37140 | 38140 | 39140 |
| 36141 | 37141 | 38141 | 39141 |
| 36142 | 37142 | 38142 | 39142 |
| 36143 | 37143 | 38143 | 39143 |
| 36144 | 37144 | 38144 | 39144 |
| 36145 | 37145 | 38145 | 39145 |
| 36146 | 37146 | 38146 | 39146 |
| 36147 | 37147 | 38147 | 39147 |
| 36148 | 37148 | 38148 | 39148 |
| 36149 | 37149 | 38149 | 39149 |
| 36150 | 37150 | 38150 | 39150 |
| 36151 | 37151 | 38151 | 39151 |
| 36152 | 37152 | 38152 | 39152 |
| 36153 | 37153 | 38153 | 39153 |
| 36154 | 37154 | 38154 | 39154 |
| 36155 | 37155 | 38155 | 39155 |
| 36156 | 37156 | 38156 | 39156 |
| 36157 | 37157 | 38157 | 39157 |
| 36158 | 37158 | 38158 | 39158 |
| 36159 | 37159 | 38159 | 39159 |
| 36160 | 37160 | 38160 | 39160 |
| 36161 | 37161 | 38161 | 39161 |
| 36162 | 37162 | 38162 | 39162 |
| 36163 | 37163 | 38163 | 39163 |
| 36164 | 37164 | 38164 | 39164 |
| 36165 | 37165 | 38165 | 39165 |
| 36166 | 37166 | 38166 | 39166 |
| 36167 | 37167 | 38167 | 39167 |
| 36168 | 37168 | 38168 | 39168 |
| 36169 | 37169 | 38169 | 39169 |
| 36170 | 37170 | 38170 | 39170 |
| 36171 | 37171 | 38171 | 39171 |
| 36172 | 37172 | 38172 | 39172 |
| 36173 | 37173 | 38173 | 39173 |
| 36174 | 37174 | 38174 | 39174 |
| 36175 | 37175 | 38175 | 39175 |
| 36176 | 37176 | 38176 | 39176 |
| 36177 | 37177 | 38177 | 39177 |
| 36178 | 37178 | 38178 | 39178 |
| 36179 | 37179 | 38179 | 39179 |
| 36180 | 37180 | 38180 | 39180 |
| 36181 | 37181 | 38181 | 39181 |
| 36182 | 37182 | 38182 | 39182 |
| 36183 | 37183 | 38183 | 39183 |
| 36184 | 37184 | 38184 | 39184 |
| 36185 | 37185 | 38185 | 39185 |
| 36186 | 37186 | 38186 | 39186 |
| 36187 | 37187 | 38187 | 39187 |
| 36188 | 37188 | 38188 | 39188 |
| 36189 | 37189 | 38189 | 39189 |
| 36190 | 37190 | 38190 | 39190 |
| 36191 | 37191 | 38191 | 39191 |
| 36192 | 37192 | 38192 | 39192 |
| 36193 | 37193 | 38193 | 39193 |
| 36194 | 37194 | 38194 | 39194 |
| 36195 | 37195 | 38195 | 39195 |
| 36196 | 37196 | 38196 | 39196 |
| 36197 | 37197 | 38197 | 39197 |
| 36198 | 37198 | 38198 | 39198 |
| 36199 | 37199 | 38199 | 39199 |
| 36200 | 37200 | 38200 | 39200 |
| 36201 | 37201 | 38201 | 39201 |
| 36202 | 37202 | 38202 | 39202 |
| 36203 | 37203 | 38203 | 39203 |
| 36204 | 37204 | 38204 | 39204 |
| 36205 | 37205 | 38205 | 39205 |
| 36206 | 37206 | 38206 | 39206 |
| 36207 | 37207 | 38207 | 39207 |
| 36208 | 37208 | 38208 | 39208 |
| 36209 | 37209 | 38209 | 39209 |
| 36210 | 37210 | 38210 | 39210 |
| 36211 | 37211 | 38211 | 39211 |
| 36212 | 37212 | 38212 | 39212 |
| 36213 | 37213 | 38213 | 39213 |
| 36214 | 37214 | 38214 | 39214 |
| 36215 | 37215 | 38215 | 39215 |
| 36216 | 37216 | 38216 | 39216 |
| 36217 | 37217 | 38217 | 39217 |
| 36218 | 37218 | 38218 | 39218 |
| 36219 | 37219 | 38219 | 39219 |
| 36220 | 37220 | 38220 | 39220 |
| 36221 | 37221 | 38221 | 39221 |
| 36222 | 37222 | 38222 | 39222 |
| 36223 | 37223 | 38223 | 39223 |
| 36224 | 37224 | 38224 | 39224 |
| 36225 | 37225 | 38225 | 39225 |
| 36226 | 37226 | 38226 | 39226 |
| 36227 | 37227 | 38227 | 39227 |
| 36228 | 37228 | 38228 | 39228 |
| 36229 | 37229 | 38229 | 39229 |
| 36230 | 37230 | 38230 | 39230 |
| 36231 | 37231 | 38231 | 39231 |
| 36232 | 37232 | 38232 | 39232 |
| 36233 | 37233 | 38233 | 39233 |
| 36234 | 37234 | 38234 | 39234 |
| 36235 | 37235 | 38235 | 39235 |
| 36236 | 37236 | 38236 | 39236 |
| 36237 | 37237 | 38237 | 39237 |
| 36238 | 37238 | 38238 | 39238 |
| 36239 | 37239 | 38239 | 39239 |
| 36240 | 37240 | 38240 | 39240 |
| 36241 | 37241 | 38241 | 39241 |
| 36242 | 37242 | 38242 | 39242 |
| 36243 | 37243 | 38243 | 39243 |
| 36244 | 37244 | 38244 | 39244 |
| 36245 | 37245 | 38245 | 39245 |
| 36246 | 37246 | 38246 | 39246 |
| 36247 | 37247 | 38247 | 39247 |
| 36248 | 37248 | 38248 | 39248 |
| 36249 | 37249 | 38249 | 39249 |
| 36250 | 37250 | 38250 | 39250 |
| 36251 | 37251 | 38251 | 39251 |
| 36252 | 37252 | 38252 | 39252 |
| 36253 | 37253 | 38253 | 39253 |
| 36254 | 37254 | 38254 | 39254 |
| 36255 | 37255 | 38255 | 39255 |
| 36256 | 37256 | 38256 | 39256 |
| 36257 | 37257 | 38257 | 39257 |
| 36258 | 37258 | 38258 | 39258 |
| 36259 | 37259 | 38259 | 39259 |
| 36260 | 37260 | 38260 | 39260 |
| 36261 | 37261 | 38261 | 39261 |
| 36262 | 37262 | 38262 | 39262 |
| 36263 | 37263 | 38263 | 39263 |
| 36264 | 37264 | 38264 | 39264 |
| 36265 | 37265 | 38265 | 39265 |
| 36266 | 37266 | 38266 | 39266 |
| 36267 | 37267 | 38267 | 39267 |
| 36268 | 37268 | 38268 | 39268 |
| 36269 | 37269 | 38269 | 39269 |
| 36270 | 37270 | 38270 | 39270 |
| 36271 | 37271 | 38271 | 39271 |
| 36272 | 37272 | 38272 | 39272 |
| 36273 | 37273 | 38273 | 39273 |
| 36274 | 37274 | 38274 | 39274 |
| 36275 | 37275 | 38275 | 39275 |
| 36276 | 37276 | 38276 | 39276 |
| 36277 | 37277 | 38277 | 39277 |
| 36278 | 37278 | 38278 | 39278 |
| 36279 | 37279 | 38279 | 39279 |
| 36280 | 37280 | 38280 | 39280 |
| 36281 | 37281 | 38281 | 39281 |
| 36282 | 37282 | 38282 | 39282 |
| 36283 | 37283 | 38283 | 39283 |
| 36284 | 37284 | 38284 | 39284 |
| 36285 | 37285 | 38285 | 39285 |
| 36286 | 37286 | 38286 | 39286 |
| 36287 | 37287 | 38287 | 39287 |
| 36288 | 37288 | 38288 | 39288 |
| 36289 | 37289 | 38289 | 39289 |
| 36290 | 37290 | 38290 | 39290 |
| 36291 | 37291 | 38291 | 39291 |
| 36292 | 37292 | 38292 | 39292 |
| 36293 | 37293 | 38293 | 39293 |
| 36294 | 37294 | 38294 | 39294 |
| 36295 | 37295 | 38295 | 39295 |
| 36296 | 37296 | 38296 | 39296 |
| 36297 | 37297 | 38297 | 39297 |
| 36298 | 37298 | 38298 | 39298 |
| 36299 | 37299 | 38299 | 39299 |
| 36300 | 37300 | 38300 | 39300 |
| 36301 | 37301 | 38301 | 39301 |
| 36302 | 37302 | 38302 | 39302 |
| 36303 | 37303 | 38303 | 39303 |
| 36304 | 37304 | 38304 | 39304 |
| 36305 | 37305 | 38305 | 39305 |
| 36306 | 37306 | 38306 | 39306 |
| 36307 | 37307 | 38307 | 39307 |
| 36308 | 37308 | 38308 | 39308 |
| 36309 | 37309 | 38309 | 39309 |
| 36310 | 37310 | 38310 | 39310 |
| 36311 | 37311 | 38311 | 39311 |
| 36312 | 37312 | 38312 | 39312 |
| 36313 | 37313 | 38313 | 39313 |
| 36314 | 37314 | 38314 | 39314 |
| 36315 | 37315 | 38315 | 39315 |
| 36316 | 37316 | 38316 | 39316 |
| 36317 | 37317 | 38317 | 39317 |
| 36318 | 37318 | 38318 | 39318 |
| 36319 | 37319 | 38319 | 39319 |
| 36320 | 37320 | 38320 | 39320 |
| 36321 | 37321 | 38321 | 39321 |
| 36322 | 37322 | 38322 | 39322 |
| 36323 | 37323 | 38323 | 39323 |
| 36324 | 37324 | 38324 | 39324 |
| 36325 | 37325 | 38325 | 39325 |
| 36326 | 37326 | 38326 | 39326 |
| 36327 | 37327 | 38327 | 39327 |
| 36328 | 37328 | 38328 | 39328 |
| 36329 | 37329 | 38329 | 39329 |
| 36330 | 37330 | 38330 | 39330 |
| 36331 | 37331 | 38331 | 39331 |
| 36332 | 37332 | 38332 | 39332 |
| 36333 | 37333 | 38333 | 39333 |
| 36334 | 37334 | 38334 | 39334 |
| 36335 | 37335 | 38335 | 39335 |
| 36336 | 37336 | 38336 | 39336 |
| 36337 | 37337 | 38337 | 39337 |
| 36338 | 37338 | 38338 | 39338 |
| 36339 | 37339 | 38339 | 39339 |
| 36340 | 37340 | 38340 | 39340 |
| 36341 | 37341 | 38341 | 39341 |
| 36342 | 37342 | 38342 | 39342 |
| 36343 | 37343 | 38343 | 39343 |
| 36344 | 37344 | 38344 | 39344 |
| 36345 | 37345 | 38345 | 39345 |
| 36346 | 37346 | 38346 | 39346 |
| 36347 | 37347 | 38347 | 39347 |
| 36348 | 37348 | 38348 | 39348 |
| 36349 | 37349 | 38349 | 39349 |
| 36350 | 37350 | 38350 | 39350 |
| 36351 | 37351 | 38351 | 39351 |
| 36352 | 37352 | 38352 | 39352 |
| 36353 | 37353 | 38353 | 39353 |
| 36354 | 37354 | 38354 | 39354 |
| 36355 | 37355 | 38355 | 39355 |
| 36356 | 37356 | 38356 | 39356 |
| 36357 | 37357 | 38357 | 39357 |
| 36358 | 37358 | 38358 | 39358 |
| 36359 | 37359 | 38359 | 39359 |
| 36360 | 37360 | 38360 | 39360 |
| 36361 | 37361 | 38361 | 39361 |
| 36362 | 37362 | 38362 | 39362 |
| 36363 | 37363 | 38363 | 39363 |
| 36364 | 37364 | 38364 | 39364 |
| 36365 | 37365 | 38365 | 39365 |
| 36366 | 37366 | 38366 | 39366 |
| 36367 | 37367 | 38367 | 39367 |
| 36368 | 37368 | 38368 | 39368 |
| 36369 | 37369 | 38369 | 39369 |
| 36370 | 37370 | 38370 | 39370 |
| 36371 | 37371 | 38371 | 39371 |
| 36372 | 37372 | 38372 | 39372 |
| 36373 | 37373 | 38373 | 39373 |
| 36374 | 37374 | 38374 | 39374 |
| 36375 | 37375 | 38375 | 39375 |
| 36376 | 37376 | 38376 | 39376 |
| 36377 | 37377 | 38377 | 39377 |
| 36378 | 37378 | 38378 | 39378 |
| 36379 | 37379 | 38379 | 39379 |
| 36380 | 37380 | 38380 | 39380 |
| 36381 | 37381 | 38381 | 39381 |
| 36382 | 37382 | 38382 | 39382 |
| 36383 | 37383 | 38383 | 39383 |
| 36384 | 37384 | 38384 | 39384 |
| 36385 | 37385 | 38385 | 39385 |
| 36386 | 37386 | 38386 | 39386 |
| 36387 | 37387 | 38387 | 39387 |
| 36388 | 37388 | 38388 | 39388 |
| 36389 | 37389 | 38389 | 39389 |
| 36390 | 37390 | 38390 | 39390 |
| 36391 | 37391 | 38391 | 39391 |
| 36392 | 37392 | 38392 | 39392 |
| 36393 | 37393 | 38393 | 39393 |
| 36394 | 37394 | 38394 | 39394 |
| 36395 | 37395 | 38395 | 39395 |
| 36396 | 37396 | 38396 | 39396 |
| 36397 | 37397 | 38397 | 39397 |
| 36398 | 37398 | 38398 | 39398 |
| 36399 | 37399 | 38399 | 39399 |
| 36400 | 37400 | 38400 | 39400 |
| 36401 | 37401 | 38401 | 39401 |
| 36402 | 37402 | 38402 | 39402 |
| 36403 | 37403 | 38403 | 39403 |
| 36404 | 37404 | 38404 | 39404 |
| 36405 | 37405 | 38405 | 39405 |
| 36406 | 37406 | 38406 | 39406 |
| 36407 | 37407 | 38407 | 39407 |
| 36408 | 37408 | 38408 | 39408 |
| 36409 | 37409 | 38409 | 39409 |
| 36410 | 37410 | 38410 | 39410 |
| 36411 | 37411 | 38411 | 39411 |
| 36412 | 37412 | 38412 | 39412 |
| 36413 | 37413 | 38413 | 39413 |
| 36414 | 37414 | 38414 | 39414 |
| 36415 | 37415 | 38415 | 39415 |
| 36416 | 37416 | 38416 | 39416 |
| 36417 | 37417 | 38417 | 39417 |
| 36418 | 37418 | 38418 | 39418 |
| 36419 | 37419 | 38419 | 39419 |
| 36420 | 37420 | 38420 | 39420 |
| 36421 | 37421 | 38421 | 39421 |
| 36422 | 37422 | 38422 | 39422 |
| 36423 | 37423 | 38423 | 39423 |
| 36424 | 37424 | 38424 | 39424 |
| 36425 | 37425 | 38425 | 39425 |
| 36426 | 37426 | 38426 | 39426 |
| 36427 | 37427 | 38427 | 39427 |
| 36428 | 37428 | 38428 | 39428 |
| 36429 | 37429 | 38429 | 39429 |
| 36430 | 37430 | 38430 | 39430 |
| 36431 | 37431 | 38431 | 39431 |
| 36432 | 37432 | 38432 | 39432 |
| 36433 | 37433 | 38433 | 39433 |
| 36434 | 37434 | 38434 | 39434 |
| 36435 | 37435 | 38435 | 39435 |
| 36436 | 37436 | 38436 | 39436 |
| 36437 | 37437 | 38437 | 39437 |
| 36438 | 37438 | 38438 | 39438 |
| 36439 | 37439 | 38439 | 39439 |
| 36440 | 37440 | 38440 | 39440 |
| 36441 | 37441 | 38441 | 39441 |
| 36442 | 37442 | 38442 | 39442 |
| 36443 | 37443 | 38443 | 39443 |
| 36444 | 37444 | 38444 | 39444 |
| 36445 | 37445 | 38445 | 39445 |
| 36446 | 37446 | 38446 | 39446 |
| 36447 | 37447 | 38447 | 39447 |
| 36448 | 37448 | 38448 | 39448 |
| 36449 | 37449 | 38449 | 39449 |
| 36450 | 37450 | 38450 | 39450 |
| 36451 | 37451 | 38451 | 39451 |
| 36452 | 37452 | 38452 | 39452 |
| 36453 | 37453 | 38453 | 39453 |
| 36454 | 37454 | 38454 | 39454 |
| 36455 | 37455 | 38455 | 39455 |
| 36456 | 37456 | 38456 | 39456 |
| 36457 | 37457 | 38457 | 39457 |
| 36458 | 37458 | 38458 | 39458 |
| 36459 | 37459 | 38459 | 39459 |
| 36460 | 37460 | 38460 | 39460 |
| 36461 | 37461 | 38461 | 39461 |
| 36462 | 37462 | 38462 | 39462 |
| 36463 | 37463 | 38463 | 39463 |
| 36464 | 37464 | 38464 | 39464 |
| 36465 | 37465 | 38465 | 39465 |
| 36466 | 37466 | 38466 | 39466 |
| 36467 | 37467 | 38467 | 39467 |
| 36468 | 37468 | 38468 | 39468 |
| 36469 | 37469 | 38469 | 39469 |
| 36470 | 37470 | 38470 | 39470 |
| 36471 | 37471 | 38471 | 39471 |
| 36472 | 37472 | 38472 | 39472 |
| 36473 | 37473 | 38473 | 39473 |
| 36474 | 37474 | 38474 | 39474 |
| 36475 | 37475 | 38475 | 39475 |
| 36476 | 37476 | 38476 | 39476 |
| 36477 | 37477 | 38477 | 39477 |
| 36478 | 37478 | 38478 | 39478 |
| 36479 | 37479 | 38479 | 39479 |
| 36480 | 37480 | 38480 | 39480 |
| 36481 | 37481 | 38481 | 39481 |
| 36482 | 37482 | 38482 | 39482 |
| 36483 | 37483 | 38483 | 39483 |
| 36484 | 37484 | 38484 | 39484 |
| 36485 | 37485 | 38485 | 39485 |
| 36486 | 37486 | 38486 | 39486 |
| 36487 | 37487 | 38487 | 39487 |
| 36488 | 37488 | 38488 | 39488 |
| 36489 | 37489 | 38489 | 39489 |
| 36490 | 37490 | 38490 | 39490 |
| 36491 | 37491 | 38491 | 39491 |
| 36492 | 37492 | 38492 | 39492 |
| 36493 | 37493 | 38493 | 39493 |
| 36494 | 37494 | 38494 | 39494 |
| 36495 | 37495 | 38495 | 39495 |
| 36496 | 37496 | 38496 | 39496 |
| 36497 | 37497 | 38497 | 39497 |
| 36498 | 37498 | 38498 | 39498 |
| 36499 | 37499 | 38499 | 39499 |
| 36500 | 37500 | 38500 | 39500 |
| 36501 | 37501 | 38501 | 39501 |
| 36502 | 37502 | 38502 | 39502 |
| 36503 | 37503 | 38503 | 39503 |
| 36504 | 37504 | 38504 | 39504 |
| 36505 | 37505 | 38505 | 39505 |
| 36506 | 37506 | 38506 | 39506 |
| 36507 | 37507 | 38507 | 39507 |
| 36508 | 37508 | 38508 | 39508 |
| 36509 | 37509 | 38509 | 39509 |
| 36510 | 37510 | 38510 | 39510 |
| 36511 | 37511 | 38511 | 39511 |
| 36512 | 37512 | 38512 | 39512 |
| 36513 | 37513 | 38513 | 39513 |
| 36514 | 37514 | 38514 | 39514 |
| 36515 | 37515 | 38515 | 39515 |
| 36516 | 37516 | 38516 | 39516 |
| 36517 | 37517 | 38517 | 39517 |
| 36518 | 37518 | 38518 | 39518 |
| 36519 | 37519 | 38519 | 39519 |
| 36520 | 37520 | 38520 | 39520 |
| 36521 | 37521 | 38521 | 39521 |
| 36522 | 37522 | 38522 | 39522 |
| 36523 | 37523 | 38523 | 39523 |
| 36524 | 37524 | 38524 | 39524 |
| 36525 | 37525 | 38525 | 39525 |
| 36526 | 37526 | 38526 | 39526 |
| 36527 | 37527 | 38527 | 39527 |
| 36528 | 37528 | 38528 | 39528 |
| 36529 | 37529 | 38529 | 39529 |
| 36530 | 37530 | 38530 | 39530 |
| 36531 | 37531 | 38531 | 39531 |
| 36532 | 37532 | 38532 | 39532 |
| 36533 | 37533 | 38533 | 39533 |
| 36534 | 37534 | 38534 | 39534 |
| 36535 | 37535 | 38535 | 39535 |
| 36536 | 37536 | 38536 | 39536 |
| 36537 | 37537 | 38537 | 39537 |
| 36538 | 37538 | 38538 | 39538 |
| 36539 | 37539 | 38539 | 39539 |
| 36540 | 37540 | 38540 | 39540 |
| 36541 | 37541 | 38541 | 39541 |
| 36542 | 37542 | 38542 | 39542 |
| 36543 | 37543 | 38543 | 39543 |
| 36544 | 37544 | 38544 | 39544 |
| 36545 | 37545 | 38545 | 39545 |
| 36546 | 37546 | 38546 | 39546 |
| 36547 | 37547 | 38547 | 39547 |
| 36548 | 37548 | 38548 | 39548 |
| 36549 | 37549 | 38549 | 39549 |
| 36550 | 37550 | 38550 | 39550 |
| 36551 | 37551 | 38551 | 39551 |
| 36552 | 37552 | 38552 | 39552 |
| 36553 | 37553 | 38553 | 39553 |
| 36554 | 37554 | 38554 | 39554 |
| 36555 | 37555 | 38555 | 39555 |
| 36556 | 37556 | 38556 | 39556 |
| 36557 | 37557 | 38557 | 39557 |
| 36558 | 37558 | 38558 | 39558 |
| 36559 | 37559 | 38559 | 39559 |
| 36560 | 37560 | 38560 | 39560 |
| 36561 | 37561 | 38561 | 39561 |
| 36562 | 37562 | 38562 | 39562 |
| 36563 | 37563 | 38563 | 39563 |
| 36564 | 37564 | 38564 | 39564 |
| 36565 | 37565 | 38565 | 39565 |
| 36566 | 37566 | 38566 | 39566 |
| 36567 | 37567 | 38567 | 39567 |
| 36568 | 37568 | 38568 | 39568 |
| 36569 | 37569 | 38569 | 39569 |
| 36570 | 37570 | 38570 | 39570 |
| 36571 | 37571 | 38571 | 39571 |
| 36572 | 37572 | 38572 | 39572 |
| 36573 | 37573 | 38573 | 39573 |
| 36574 | 37574 | 38574 | 39574 |
| 36575 | 37575 | 38575 | 39575 |
| 36576 | 37576 | 38576 | 39576 |
| 36577 | 37577 | 38577 | 39577 |
| 36578 | 37578 | 38578 | 39578 |
| 36579 | 37579 | 38579 | 39579 |
| 36580 | 37580 | 38580 | 39580 |
| 36581 | 37581 | 38581 | 39581 |
| 36582 | 37582 | 38582 | 39582 |
| 36583 | 37583 | 38583 | 39583 |
| 36584 | 37584 | 38584 | 39584 |
| 36585 | 37585 | 38585 | 39585 |
| 36586 | 37586 | 38586 | 39586 |
| 36587 | 37587 | 38587 | 39587 |
| 36588 | 37588 | 38588 | 39588 |
| 36589 | 37589 | 38589 | 39589 |
| 36590 | 37590 | 38590 | 39590 |
| 36591 | 37591 | 38591 | 39591 |
| 36592 | 37592 | 38592 | 39592 |
| 36593 | 37593 | 38593 | 39593 |
| 36594 | 37594 | 38594 | 39594 |
| 36595 | 37595 | 38595 | 39595 |
| 36596 | 37596 | 38596 | 39596 |
| 36597 | 37597 | 38597 | 39597 |
| 36598 | 37598 | 38598 | 39598 |
| 36599 | 37599 | 38599 | 39599 |
| 36600 | 37600 | 38600 | 39600 |
| 36601 | 37601 | 38601 | 39601 |
| 36602 | 37602 | 38602 | 39602 |
| 36603 | 37603 | 38603 | 39603 |
| 36604 | 37604 | 38604 | 39604 |
| 36605 | 37605 | 38605 | 39605 |
| 36606 | 37606 | 38606 | 39606 |
| 36607 | 37607 | 38607 | 39607 |
| 36608 | 37608 | 38608 | 39608 |
| 36609 | 37609 | 38609 | 39609 |
| 36610 | 37610 | 38610 | 39610 |
| 36611 | 37611 | 38611 | 39611 |
| 36612 | 37612 | 38612 | 39612 |
| 36613 | 37613 | 38613 | 39613 |
| 36614 | 37614 | 38614 | 39614 |
| 36615 | 37615 | 38615 | 39615 |
| 36616 | 37616 | 38616 | 39616 |
| 36617 | 37617 | 38617 | 39617 |
| 36618 | 37618 | 38618 | 39618 |
| 36619 | 37619 | 38619 | 39619 |
| 36620 | 37620 | 38620 | 39620 |
| 36621 | 37621 | 38621 | 39621 |
| 36622 | 37622 | 38622 | 39622 |
| 36623 | 37623 | 38623 | 39623 |
| 36624 | 37624 | 38624 | 39624 |
| 36625 | 37625 | 38625 | 39625 |
| 36626 | 37626 | 38626 | 39626 |
| 36627 | 37627 | 38627 | 39627 |
| 36628 | 37628 | 38628 | 39628 |
| 36629 | 37629 | 38629 | 39629 |
| 36630 | 37630 | 38630 | 39630 |
| 36631 | 37631 | 38631 | 39631 |
| 36632 | 37632 | 38632 | 39632 |
| 36633 | 37633 | 38633 | 39633 |
| 36634 | 37634 | 38634 | 39634 |
| 36635 | 37635 | 38635 | 39635 |
| 36636 | 37636 | 38636 | 39636 |
| 36637 | 37637 | 38637 | 39637 |
| 36638 | 37638 | 38638 | 39638 |
| 36639 | 37639 | 38639 | 39639 |
| 36640 | 37640 | 38640 | 39640 |
| 36641 | 37641 | 38641 | 39641 |
| 36642 | 37642 | 38642 | 39642 |
| 36643 | 37643 | 38643 | 39643 |
| 36644 | 37644 | 38644 | 39644 |
| 36645 | 37645 | 38645 | 39645 |
| 36646 | 37646 | 38646 | 39646 |
| 36647 | 37647 | 38647 | 39647 |
| 36648 | 37648 | 38648 | 39648 |
| 36649 | 37649 | 38649 | 39649 |
| 36650 | 37650 | 38650 | 39650 |
| 36651 | 37651 | 38651 | 39651 |
| 36652 | 37652 | 38652 | 39652 |
| 36653 | 37653 | 38653 | 39653 |
| 36654 | 37654 | 38654 | 39654 |
| 36655 | 37655 | 38655 | 39655 |
| 36656 | 37656 | 38656 | 39656 |
| 36657 | 37657 | 38657 | 39657 |
| 36658 | 37658 | 38658 | 39658 |
| 36659 | 37659 | 38659 | 39659 |
| 36660 | 37660 | 38660 | 39660 |
| 36661 | 37661 | 38661 | 39661 |
| 36662 | 37662 | 38662 | 39662 |
| 36663 | 37663 | 38663 | 39663 |
| 36664 | 37664 | 38664 | 39664 |
| 36665 | 37665 | 38665 | 39665 |
| 36666 | 37666 | 38666 | 39666 |
| 36667 | 37667 | 38667 | 39667 |
| 36668 | 37668 | 38668 | 39668 |
| 36669 | 37669 | 38669 | 39669 |
| 36670 | 37670 | 38670 | 39670 |
| 36671 | 37671 | 38671 | 39671 |
| 36672 | 37672 | 38672 | 39672 |
| 36673 | 37673 | 38673 | 39673 |
| 36674 | 37674 | 38674 | 39674 |
| 36675 | 37675 | 38675 | 39675 |
| 36676 | 37676 | 38676 | 39676 |
| 36677 | 37677 | 38677 | 39677 |
| 36678 | 37678 | 38678 | 39678 |
| 36679 | 37679 | 38679 | 39679 |
| 36680 | 37680 | 38680 | 39680 |
| 36681 | 37681 | 38681 | 39681 |
| 36682 | 37682 | 38682 | 39682 |
| 36683 | 37683 | 38683 | 39683 |
| 36684 | 37684 | 38684 | 39684 |
| 36685 | 37685 | 38685 | 39685 |
| 36686 | 37686 | 38686 | 39686 |
| 36687 | 37687 | 38687 | 39687 |
| 36688 | 37688 | 38688 | 39688 |
| 36689 | 37689 | 38689 | 39689 |
| 36690 | 37690 | 38690 | 39690 |
| 36691 | 37691 | 38691 | 39691 |
| 36692 | 37692 | 38692 | 39692 |
| 36693 | 37693 | 38693 | 39693 |
| 36694 | 37694 | 38694 | 39694 |
| 36695 | 37695 | 38695 | 39695 |
| 36696 | 37696 | 38696 | 39696 |
| 36697 | 37697 | 38697 | 39697 |
| 36698 | 37698 | 38698 | 39698 |
| 36699 | 37699 | 38699 | 39699 |
| 36700 | 37700 | 38700 | 39700 |
| 36701 | 37701 | 38701 | 39701 |
| 36702 | 37702 | 38702 | 39702 |
| 36703 | 37703 | 38703 | 39703 |
| 36704 | 37704 | 38704 | 39704 |
| 36705 | 37705 | 38705 | 39705 |
| 36706 | 37706 | 38706 | 39706 |
| 36707 | 37707 | 38707 | 39707 |
| 36708 | 37708 | 38708 | 39708 |
| 36709 | 37709 | 38709 | 39709 |
| 36710 | 37710 | 38710 | 39710 |
| 36711 | 37711 | 38711 | 39711 |
| 36712 | 37712 | 38712 | 39712 |
| 36713 | 37713 | 38713 | 39713 |
| 36714 | 37714 | 38714 | 39714 |
| 36715 | 37715 | 38715 | 39715 |
| 36716 | 37716 | 38716 | 39716 |
| 36717 | 37717 | 38717 | 39717 |
| 36718 | 37718 | 38718 | 39718 |
| 36719 | 37719 | 38719 | 39719 |
| 36720 | 37720 | 38720 | 39720 |
| 36721 | 37721 | 38721 | 39721 |
| 36722 | 37722 | 38722 | 39722 |
| 36723 | 37723 | 38723 | 39723 |
| 36724 | 37724 | 38724 | 39724 |
| 36725 | 37725 | 38725 | 39725 |
| 36726 | 37726 | 38726 | 39726 |
| 36727 | 37727 | 38727 | 39727 |
| 36728 | 37728 | 38728 | 39728 |
| 36729 | 37729 | 38729 | 39729 |
| 36730 | 37730 | 38730 | 39730 |
| 36731 | 37731 | 38731 | 39731 |
| 36732 | 37732 | 38732 | 39732 |
| 36733 | 37733 | 38733 | 39733 |
| 36734 | 37734 | 38734 | 39734 |
| 36735 | 37735 | 38735 | 39735 |
| 36736 | 37736 | 38736 | 39736 |
| 36737 | 37737 | 38737 | 39737 |
| 36738 | 37738 | 38738 | 39738 |
| 36739 | 37739 | 38739 | 39739 |
| 36740 | 37740 | 38740 | 39740 |
| 36741 | 37741 | 38741 | 39741 |
| 36742 | 37742 | 38742 | 39742 |
| 36743 | 37743 | 38743 | 39743 |
| 36744 | 37744 | 38744 | 39744 |
| 36745 | 37745 | 38745 | 39745 |
| 36746 | 37746 | 38746 | 39746 |
| 36747 | 37747 | 38747 | 39747 |
| 36748 | 37748 | 38748 | 39748 |
| 36749 | 37749 | 38749 | 39749 |
| 36750 | 37750 | 38750 | 39750 |
| 36751 | 37751 | 38751 | 39751 |
| 36752 | 37752 | 38752 | 39752 |
| 36753 | 37753 | 38753 | 39753 |
| 36754 | 37754 | 38754 | 39754 |
| 36755 | 37755 | 38755 | 39755 |
| 36756 | 37756 | 38756 | 39756 |
| 36757 | 37757 | 38757 | 39757 |
| 36758 | 37758 | 38758 | 39758 |
| 36759 | 37759 | 38759 | 39759 |
| 36760 | 37760 | 38760 | 39760 |
| 36761 | 37761 | 38761 | 39761 |
| 36762 | 37762 | 38762 | 39762 |
| 36763 | 37763 | 38763 | 39763 |
| 36764 | 37764 | 38764 | 39764 |
| 36765 | 37765 | 38765 | 39765 |
| 36766 | 37766 | 38766 | 39766 |
| 36767 | 37767 | 38767 | 39767 |
| 36768 | 37768 | 38768 | 39768 |
| 36769 | 37769 | 38769 | 39769 |
| 36770 | 37770 | 38770 | 39770 |
| 36771 | 37771 | 38771 | 39771 |
| 36772 | 37772 | 38772 | 39772 |
| 36773 | 37773 | 38773 | 39773 |
| 36774 | 37774 | 38774 | 39774 |
| 36775 | 37775 | 38775 | 39775 |
| 36776 | 37776 | 38776 | 39776 |
| 36777 | 37777 | 38777 | 39777 |
| 36778 | 37778 | 38778 | 39778 |
| 36779 | 37779 | 38779 | 39779 |
| 36780 | 37780 | 38780 | 39780 |
| 36781 | 37781 | 38781 | 39781 |
| 36782 | 37782 | 38782 | 39782 |
| 36783 | 37783 | 38783 | 39783 |
| 36784 | 37784 | 38784 | 39784 |
| 36785 | 37785 | 38785 | 39785 |
| 36786 | 37786 | 38786 | 39786 |
| 36787 | 37787 | 38787 | 39787 |
| 36788 | 37788 | 38788 | 39788 |
| 36789 | 37789 | 38789 | 39789 |
| 36790 | 37790 | 38790 | 39790 |
| 36791 | 37791 | 38791 | 39791 |
| 36792 | 37792 | 38792 | 39792 |
| 36793 | 37793 | 38793 | 39793 |
| 36794 | 37794 | 38794 | 39794 |
| 36795 | 37795 | 38795 | 39795 |
| 36796 | 37796 | 38796 | 39796 |
| 36797 | 37797 | 38797 | 39797 |
| 36798 | 37798 | 38798 | 39798 |
| 36799 | 37799 | 38799 | 39799 |
| 36800 | 37800 | 38800 | 39800 |
| 36801 | 37801 | 38801 | 39801 |
| 36802 | 37802 | 38802 | 39802 |
| 36803 | 37803 | 38803 | 39803 |
| 36804 | 37804 | 38804 | 39804 |
| 36805 | 37805 | 38805 | 39805 |
| 36806 | 37806 | 38806 | 39806 |
| 36807 | 37807 | 38807 | 39807 |
| 36808 | 37808 | 38808 | 39808 |
| 36809 | 37809 | 38809 | 39809 |
| 36810 | 37810 | 38810 | 39810 |
| 36811 | 37811 | 38811 | 39811 |
| 36812 | 37812 | 38812 | 39812 |
| 36813 | 37813 | 38813 | 39813 |
| 36814 | 37814 | 38814 | 39814 |
| 36815 | 37815 | 38815 | 39815 |
| 36816 | 37816 | 38816 | 39816 |
| 36817 | 37817 | 38817 | 39817 |
| 36818 | 37818 | 38818 | 39818 |
| 36819 | 37819 | 38819 | 39819 |
| 36820 | 37820 | 38820 | 39820 |
| 36821 | 37821 | 38821 | 39821 |
| 36822 | 37822 | 38822 | 39822 |
| 36823 | 37823 | 38823 | 39823 |
| 36824 | 37824 | 38824 | 39824 |
| 36825 | 37825 | 38825 | 39825 |
| 36826 | 37826 | 38826 | 39826 |
| 36827 | 37827 | 38827 | 39827 |
| 36828 | 37828 | 38828 | 39828 |
| 36829 | 37829 | 38829 | 39829 |
| 36830 | 37830 | 38830 | 39830 |
| 36831 | 37831 | 38831 | 39831 |
| 36832 | 37832 | 38832 | 39832 |
| 36833 | 37833 | 38833 | 39833 |
| 36834 | 37834 | 38834 | 39834 |
| 36835 | 37835 | 38835 | 39835 |
| 36836 | 37836 | 38836 | 39836 |
| 36837 | 37837 | 38837 | 39837 |
| 36838 | 37838 | 38838 | 39838 |
| 36839 | 37839 | 38839 | 39839 |
| 36840 | 37840 | 38840 | 39840 |
| 36841 | 37841 | 38841 | 39841 |
| 36842 | 37842 | 38842 | 39842 |
| 36843 | 37843 | 38843 | 39843 |
| 36844 | 37844 | 38844 | 39844 |
| 36845 | 37845 | 38845 | 39845 |
| 36846 | 37846 | 38846 | 39846 |
| 36847 | 37847 | 38847 | 39847 |
| 36848 | 37848 | 38848 | 39848 |
| 36849 | 37849 | 38849 | 39849 |
| 36850 | 37850 | 38850 | 39850 |
| 36851 | 37851 | 38851 | 39851 |
| 36852 | 37852 | 38852 | 39852 |
| 36853 | 37853 | 38853 | 39853 |
| 36854 | 37854 | 38854 | 39854 |
| 36855 | 37855 | 38855 | 39855 |
| 36856 | 37856 | 38856 | 39856 |
| 36857 | 37857 | 38857 | 39857 |
| 36858 | 37858 | 38858 | 39858 |
| 36859 | 37859 | 38859 | 39859 |
| 36860 | 37860 | 38860 | 39860 |
| 36861 | 37861 | 38861 | 39861 |
| 36862 | 37862 | 38862 | 39862 |
| 36863 | 37863 | 38863 | 39863 |
| 36864 | 37864 | 38864 | 39864 |
| 36865 | 37865 | 38865 | 39865 |
| 36866 | 37866 | 38866 | 39866 |
| 36867 | 37867 | 38867 | 39867 |
| 36868 | 37868 | 38868 | 39868 |
| 36869 | 37869 | 38869 | 39869 |
| 36870 | 37870 | 38870 | 39870 |
| 36871 | 37871 | 38871 | 39871 |
| 36872 | 37872 | 38872 | 39872 |
| 36873 | 37873 | 38873 | 39873 |
| 36874 | 37874 | 38874 | 39874 |
| 36875 | 37875 | 38875 | 39875 |
| 36876 | 37876 | 38876 | 39876 |
| 36877 | 37877 | 38877 | 39877 |
| 36878 | 37878 | 38878 | 39878 |
| 36879 | 37879 | 38879 | 39879 |
| 36880 | 37880 | 38880 | 39880 |
| 36881 | 37881 | 38881 | 39881 |
| 36882 | 37882 | 38882 | 39882 |
| 36883 | 37883 | 38883 | 39883 |
| 36884 | 37884 | 38884 | 39884 |
| 36885 | 37885 | 38885 | 39885 |
| 36886 | 37886 | 38886 | 39886 |
| 36887 | 37887 | 38887 | 39887 |
| 36888 | 37888 | 38888 | 39888 |
| 36889 | 37889 | 38889 | 39889 |
| 36890 | 37890 | 38890 | 39890 |
| 36891 | 37891 | 38891 | 39891 |
| 36892 | 37892 | 38892 | 39892 |
| 36893 | 37893 | 38893 | 39893 |
| 36894 | 37894 | 38894 | 39894 |
| 36895 | 37895 | 38895 | 39895 |
| 36896 | 37896 | 38896 | 39896 |
| 36897 | 37897 | 38897 | 39897 |
| 36898 | 37898 | 38898 | 39898 |
| 36899 | 37899 | 38899 | 39899 |
| 36900 | 37900 | 38900 | 39900 |
| 36901 | 37901 | 38901 | 39901 |
| 36902 | 37902 | 38902 | 39902 |
| 36903 | 37903 | 38903 | 39903 |
| 36904 | 37904 | 38904 | 39904 |
| 36905 | 37905 | 38905 | 39905 |
| 36906 | 37906 | 38906 | 39906 |
| 36907 | 37907 | 38907 | 39907 |
| 36908 | 37908 | 38908 | 39908 |
| 36909 | 37909 | 38909 | 39909 |
| 36910 | 37910 | 38910 | 39910 |
| 36911 | 37911 | 38911 | 39911 |
| 36912 | 37912 | 38912 | 39912 |
| 36913 | 37913 | 38913 | 39913 |
| 36914 | 37914 | 38914 | 39914 |
| 36915 | 37915 | 38915 | 39915 |
| 36916 | 37916 | 38916 | 39916 |
| 36917 | 37917 | 38917 | 39917 |
| 36918 | 37918 | 38918 | 39918 |
| 36919 | 37919 | 38919 | 39919 |
| 36920 | 37920 | 38920 | 39920 |
| 36921 | 37921 | 38921 | 39921 |
| 36922 | 37922 | 38922 | 39922 |
| 36923 | 37923 | 38923 | 39923 |
| 36924 | 37924 | 38924 | 39924 |
| 36925 | 37925 | 38925 | 39925 |
| 36926 | 37926 | 38926 | 39926 |
| 36927 | 37927 | 38927 | 39927 |
| 36928 | 37928 | 38928 | 39928 |
| 36929 | 37929 | 38929 | 39929 |
| 36930 | 37930 | 38930 | 39930 |
| 36931 | 37931 | 38931 | 39931 |
| 36932 | 37932 | 38932 | 39932 |
| 36933 | 37933 | 38933 | 39933 |
| 36934 | 37934 | 38934 | 39934 |
| 36935 | 37935 | 38935 | 39935 |
| 36936 | 37936 | 38936 | 39936 |
| 36937 | 37937 | 38937 | 39937 |
| 36938 | 37938 | 38938 | 39938 |
| 36939 | 37939 | 38939 | 39939 |
| 36940 | 37940 | 38940 | 39940 |
| 36941 | 37941 | 38941 | 39941 |
| 36942 | 37942 | 38942 | 39942 |
| 36943 | 37943 | 38943 | 39943 |
| 36944 | 37944 | 38944 | 39944 |
| 36945 | 37945 | 38945 | 39945 |
| 36946 | 37946 | 38946 | 39946 |
| 36947 | 37947 | 38947 | 39947 |
| 36948 | 37948 | 38948 | 39948 |
| 36949 | 37949 | 38949 | 39949 |
| 36950 | 37950 | 38950 | 39950 |
| 36951 | 37951 | 38951 | 39951 |
| 36952 | 37952 | 38952 | 39952 |
| 36953 | 37953 | 38953 | 39953 |
| 36954 | 37954 | 38954 | 39954 |
| 36955 | 37955 | 38955 | 39955 |
| 36956 | 37956 | 38956 | 39956 |
| 36957 | 37957 | 38957 | 39957 |
| 36958 | 37958 | 38958 | 39958 |
| 36959 | 37959 | 38959 | 39959 |
| 36960 | 37960 | 38960 | 39960 |
| 36961 | 37961 | 38961 | 39961 |
| 36962 | 37962 | 38962 | 39962 |
| 36963 | 37963 | 38963 | 39963 |
| 36964 | 37964 | 38964 | 39964 |
| 36965 | 37965 | 38965 | 39965 |
| 36966 | 37966 | 38966 | 39966 |
| 36967 | 37967 | 38967 | 39967 |
| 36968 | 37968 | 38968 | 39968 |
| 36969 | 37969 | 38969 | 39969 |
| 36970 | 37970 | 38970 | 39970 |
| 36971 | 37971 | 38971 | 39971 |
| 36972 | 37972 | 38972 | 39972 |
| 36973 | 37973 | 38973 | 39973 |
| 36974 | 37974 | 38974 | 39974 |
| 36975 | 37975 | 38975 | 39975 |
| 36976 | 37976 | 38976 | 39976 |
| 36977 | 37977 | 38977 | 39977 |
| 36978 | 37978 | 38978 | 39978 |
| 36979 | 37979 | 38979 | 39979 |
| 36980 | 37980 | 38980 | 39980 |
| 36981 | 37981 | 38981 | 39981 |
| 36982 | 37982 | 38982 | 39982 |
| 36983 | 37983 | 38983 | 39983 |
| 36984 | 37984 | 38984 | 39984 |
| 36985 | 37985 | 38985 | 39985 |
| 36986 | 37986 | 38986 | 39986 |
| 36987 | 37987 | 38987 | 39987 |
| 36988 | 37988 | 38988 | 39988 |
| 36989 | 37989 | 38989 | 39989 |
| 36990 | 37990 | 38990 | 39990 |
| 36991 | 37991 | 38991 | 39991 |
| 36992 | 37992 | 38992 | 39992 |
| 36993 | 37993 | 38993 | 39993 |
| 36994 | 37994 | 38994 | 39994 |
| 36995 | 37995 | 38995 | 39995 |
| 36996 | 37996 | 38996 | 39996 |
| 36997 | 37997 | 38997 | 39997 |
| 36998 | 37998 | 38998 | 39998 |
| 36999 | 37999 | 38999 | 39999 |
| 37000 | 38000 | 39000 | 40000 |
| 37001 | 38001 | 39001 | 40001 |
| 37002 | 38002 | 39002 | 40002 |

[0137] In some embodiments, the sequences that specifically bind to gluten comprise an inner sequence selected from the group consisting of the nucleic acid sequences of SEQ ID NOs. 40003 to 41002. In some examples, a short nucleic acid sequence may be affixed to the 5-end of the inner sequence. The short nucleic acid sequence may be the 5′ primer sequence used in the random ssDNA library, i.e. the nucleic acid sequence of SEQ ID NO. 1. Accordingly, the aptamer that specifically binds to gluten may comprise a nucleic acid sequence selected from the group consisting of SEQ ID NOs. 41003 to 42002. In other examples, a short nucleic acid sequence may be affixed to the 3-end of the inner sequence. The short nucleic acid sequence may be the 3′ primer sequence used in the random ssDNA library, i.e. the nucleic acid sequence of SEQ ID NO. 2. Accordingly, the aptamer that specifically binds to gluten may comprise a nucleic acid sequence selected from the group consisting of SEQ ID NOs. 42003 to 43002. In other examples, the inner sequence may comprise a 5′ end short sequence (i.e., SEQ ID NO. 1) and a 3′ end short sequence (i.e., SEQ ID NO. 2). Accordingly, the aptamer that specifically binds to gluten may comprise a nucleic acid sequence selected from the group consisting of SEQ ID NOs. 43003 to 44002. In one embodiment, the aptamer of the present disclosure that specifically binds to gluten may comprise a nucleic acid sequence selected from the group consisting of SEQ ID NOs. 40003 to 44002 listed in Table 12, or variant thereof.

TABLE 12
Aptamer sequences against gluten
Aptamer sequence

| | | | 5′-sequence |
|---|---|---|---|
| | 5′-sequence | Inner | and inner |
| Inner | and inner | sequence and | sequence and |
| Sequence | sequence | 3′-sequence | 3′-sequence |
| (SEQ ID NO.) | (SEQ ID NO.) | (SEQ ID NO.) | (SEQ ID NO.) |
| 40003 | 41003 | 42003 | 43003 |
| 40004 | 41004 | 42004 | 43004 |
| 40005 | 41005 | 42005 | 43005 |
| 40006 | 41006 | 42006 | 43006 |
| 40007 | 41007 | 42007 | 43007 |
| 40008 | 41008 | 42008 | 43008 |
| 40009 | 41009 | 42009 | 43009 |
| 40010 | 41010 | 42010 | 43010 |
| 40011 | 41011 | 42011 | 43011 |
| 40012 | 41012 | 42012 | 43012 |
| 40013 | 41013 | 42013 | 43013 |
| 40014 | 41014 | 42014 | 43014 |
| 40015 | 41015 | 42015 | 43015 |
| 40016 | 41016 | 42016 | 43016 |
| 40017 | 41017 | 42017 | 43017 |
| 40018 | 41018 | 42018 | 43018 |
| 40019 | 41019 | 42019 | 43019 |
| 40020 | 41020 | 42020 | 43020 |
| 40021 | 41021 | 42021 | 43021 |
| 40022 | 41022 | 42022 | 43022 |
| 40023 | 41023 | 42023 | 43023 |
| 40024 | 41024 | 42024 | 43024 |
| 40025 | 41025 | 42025 | 43025 |
| 40026 | 41026 | 42026 | 43026 |
| 40027 | 41027 | 42027 | 43027 |
| 40028 | 41028 | 42028 | 43028 |
| 40029 | 41029 | 42029 | 43029 |
| 40030 | 41030 | 42030 | 43030 |
| 40031 | 41031 | 42031 | 43031 |
| 40032 | 41032 | 42032 | 43032 |
| 40033 | 41033 | 42033 | 43033 |
| 40034 | 41034 | 42034 | 43034 |
| 40035 | 41035 | 42035 | 43035 |
| 40036 | 41036 | 42036 | 43036 |
| 40037 | 41037 | 42037 | 43037 |
| 40038 | 41038 | 42038 | 43038 |
| 40039 | 41039 | 42039 | 43039 |
| 40040 | 41040 | 42040 | 43040 |
| 40041 | 41041 | 42041 | 43041 |
| 40042 | 41042 | 42042 | 43042 |
| 40043 | 41043 | 42043 | 43043 |
| 40044 | 41044 | 42044 | 43044 |
| 40045 | 41045 | 42045 | 43045 |
| 40046 | 41046 | 42046 | 43046 |
| 40047 | 41047 | 42047 | 43047 |
| 40048 | 41048 | 42048 | 43048 |
| 40049 | 41049 | 42049 | 43049 |
| 40050 | 41050 | 42050 | 43050 |
| 40051 | 41051 | 42051 | 43051 |
| 40052 | 41052 | 42052 | 43052 |
| 40053 | 41053 | 42053 | 43053 |
| 40054 | 41054 | 42054 | 43054 |
| 40055 | 41055 | 42055 | 43055 |
| 40056 | 41056 | 42056 | 43056 |
| 40057 | 41057 | 42057 | 43057 |
| 40058 | 41058 | 42058 | 43058 |
| 40059 | 41059 | 42059 | 43059 |
| 40060 | 41060 | 42060 | 43060 |
| 40061 | 41061 | 42061 | 43061 |
| 40062 | 41062 | 42062 | 43062 |
| 40063 | 41063 | 42063 | 43063 |
| 40064 | 41064 | 42064 | 43064 |
| 40065 | 41065 | 42065 | 43065 |
| 40066 | 41066 | 42066 | 43066 |
| 40067 | 41067 | 42067 | 43067 |
| 40068 | 41068 | 42068 | 43068 |
| 40069 | 41069 | 42069 | 43069 |
| 40070 | 41070 | 42070 | 43070 |
| 40071 | 41071 | 42071 | 43071 |
| 40072 | 41072 | 42072 | 43072 |
| 40073 | 41073 | 42073 | 43073 |
| 40074 | 41074 | 42074 | 43074 |
| 40075 | 41075 | 42075 | 43075 |
| 40076 | 41076 | 42076 | 43076 |
| 40077 | 41077 | 42077 | 43077 |
| 40078 | 41078 | 42078 | 43078 |
| 40079 | 41079 | 42079 | 43079 |
| 40080 | 41080 | 42080 | 43080 |
| 40081 | 41081 | 42081 | 43081 |
| 40082 | 41082 | 42082 | 43082 |
| 40083 | 41083 | 42083 | 43083 |
| 40084 | 41084 | 42084 | 43084 |
| 40085 | 41085 | 42085 | 43085 |
| 40086 | 41086 | 42086 | 43086 |
| 40087 | 41087 | 42087 | 43087 |
| 40088 | 41088 | 42088 | 43088 |
| 40089 | 41089 | 42089 | 43089 |
| 40090 | 41090 | 42090 | 43090 |
| 40091 | 41091 | 42091 | 43091 |
| 40092 | 41092 | 42092 | 43092 |
| 40093 | 41093 | 42093 | 43093 |
| 40094 | 41094 | 42094 | 43094 |
| 40095 | 41095 | 42095 | 43095 |
| 40096 | 41096 | 42096 | 43096 |
| 40097 | 41097 | 42097 | 43097 |
| 40098 | 41098 | 42098 | 43098 |
| 40099 | 41099 | 42099 | 43099 |
| 40100 | 41100 | 42100 | 43100 |
| 40101 | 41101 | 42101 | 43101 |
| 40102 | 41102 | 42102 | 43102 |
| 40103 | 41103 | 42103 | 43103 |
| 40104 | 41104 | 42104 | 43104 |
| 40105 | 41105 | 42105 | 43105 |
| 40106 | 41106 | 42106 | 43106 |
| 40107 | 41107 | 42107 | 43107 |
| 40108 | 41108 | 42108 | 43108 |
| 40109 | 41109 | 42109 | 43109 |
| 40110 | 41110 | 42110 | 43110 |
| 40111 | 41111 | 42111 | 43111 |
| 40112 | 41112 | 42112 | 43112 |
| 40113 | 41113 | 42113 | 43113 |
| 40114 | 41114 | 42114 | 43114 |
| 40115 | 41115 | 42115 | 43115 |
| 40116 | 41116 | 42116 | 43116 |
| 40117 | 41117 | 42117 | 43117 |
| 40118 | 41118 | 42118 | 43118 |
| 40119 | 41119 | 42119 | 43119 |
| 40120 | 41120 | 42120 | 43120 |
| 40121 | 41121 | 42121 | 43121 |
| 40122 | 41122 | 42122 | 43122 |
| 40123 | 41123 | 42123 | 43123 |
| 40124 | 41124 | 42124 | 43124 |
| 40125 | 41125 | 42125 | 43125 |
| 40126 | 41126 | 42126 | 43126 |
| 40127 | 41127 | 42127 | 43127 |
| 40128 | 41128 | 42128 | 43128 |
| 40129 | 41129 | 42129 | 43129 |
| 40130 | 41130 | 42130 | 43130 |
| 40131 | 41131 | 42131 | 43131 |
| 40132 | 41132 | 42132 | 43132 |
| 40133 | 41133 | 42133 | 43133 |
| 40134 | 41134 | 42134 | 43134 |
| 40135 | 41135 | 42135 | 43135 |
| 40136 | 41136 | 42136 | 43136 |
| 40137 | 41137 | 42137 | 43137 |
| 40138 | 41138 | 42138 | 43138 |
| 40139 | 41139 | 42139 | 43139 |
| 40140 | 41140 | 42140 | 43140 |
| 40141 | 41141 | 42141 | 43141 |
| 40142 | 41142 | 42142 | 43142 |
| 40143 | 41143 | 42143 | 43143 |
| 40144 | 41144 | 42144 | 43144 |
| 40145 | 41145 | 42145 | 43145 |
| 40146 | 41146 | 42146 | 43146 |
| 40147 | 41147 | 42147 | 43147 |
| 40148 | 41148 | 42148 | 43148 |
| 40149 | 41149 | 42149 | 43149 |
| 40150 | 41150 | 42150 | 43150 |
| 40151 | 41151 | 42151 | 43151 |
| 40152 | 41152 | 42152 | 43152 |
| 40153 | 41153 | 42153 | 43153 |
| 40154 | 41154 | 42154 | 43154 |
| 40155 | 41155 | 42155 | 43155 |
| 40156 | 41156 | 42156 | 43156 |
| 40157 | 41157 | 42157 | 43157 |
| 40158 | 41158 | 42158 | 43158 |
| 40159 | 41159 | 42159 | 43159 |
| 40160 | 41160 | 42160 | 43160 |
| 40161 | 41161 | 42161 | 43161 |
| 40162 | 41162 | 42162 | 43162 |
| 40163 | 41163 | 42163 | 43163 |
| 40164 | 41164 | 42164 | 43164 |
| 40165 | 41165 | 42165 | 43165 |
| 40166 | 41166 | 42166 | 43166 |
| 40167 | 41167 | 42167 | 43167 |
| 40168 | 41168 | 42168 | 43168 |
| 40169 | 41169 | 42169 | 43169 |
| 40170 | 41170 | 42170 | 43170 |
| 40171 | 41171 | 42171 | 43171 |
| 40172 | 41172 | 42172 | 43172 |
| 40173 | 41173 | 42173 | 43173 |
| 40174 | 41174 | 42174 | 43174 |
| 40175 | 41175 | 42175 | 43175 |
| 40176 | 41176 | 42176 | 43176 |
| 40177 | 41177 | 42177 | 43177 |
| 40178 | 41178 | 42178 | 43178 |
| 40179 | 41179 | 42179 | 43179 |
| 40180 | 41180 | 42180 | 43180 |
| 40181 | 41181 | 42181 | 43181 |
| 40182 | 41182 | 42182 | 43182 |
| 40183 | 41183 | 42183 | 43183 |
| 40184 | 41184 | 42184 | 43184 |
| 40185 | 41185 | 42185 | 43185 |
| 40186 | 41186 | 42186 | 43186 |
| 40187 | 41187 | 42187 | 43187 |
| 40188 | 41188 | 42188 | 43188 |
| 40189 | 41189 | 42189 | 43189 |
| 40190 | 41190 | 42190 | 43190 |
| 40191 | 41191 | 42191 | 43191 |
| 40192 | 41192 | 42192 | 43192 |
| 40193 | 41193 | 42193 | 43193 |
| 40194 | 41194 | 42194 | 43194 |
| 40195 | 41195 | 42195 | 43195 |
| 40196 | 41196 | 42196 | 43196 |
| 40197 | 41197 | 42197 | 43197 |
| 40198 | 41198 | 42198 | 43198 |
| 40199 | 41199 | 42199 | 43199 |
| 40200 | 41200 | 42200 | 43200 |
| 40201 | 41201 | 42201 | 43201 |
| 40202 | 41202 | 42202 | 43202 |
| 40203 | 41203 | 42203 | 43203 |
| 40204 | 41204 | 42204 | 43204 |
| 40205 | 41205 | 42205 | 43205 |
| 40206 | 41206 | 42206 | 43206 |
| 40207 | 41207 | 42207 | 43207 |
| 40208 | 41208 | 42208 | 43208 |
| 40209 | 41209 | 42209 | 43209 |
| 40210 | 41210 | 42210 | 43210 |
| 40211 | 41211 | 42211 | 43211 |
| 40212 | 41212 | 42212 | 43212 |
| 40213 | 41213 | 42213 | 43213 |
| 40214 | 41214 | 42214 | 43214 |
| 40215 | 41215 | 42215 | 43215 |
| 40216 | 41216 | 42216 | 43216 |
| 40217 | 41217 | 42217 | 43217 |
| 40218 | 41218 | 42218 | 43218 |
| 40219 | 41219 | 42219 | 43219 |
| 40220 | 41220 | 42220 | 43220 |
| 40221 | 41221 | 42221 | 43221 |
| 40222 | 41222 | 42222 | 43222 |
| 40223 | 41223 | 42223 | 43223 |
| 40224 | 41224 | 42224 | 43224 |
| 40225 | 41225 | 42225 | 43225 |
| 40226 | 41226 | 42226 | 43226 |
| 40227 | 41227 | 42227 | 43227 |
| 40228 | 41228 | 42228 | 43228 |
| 40229 | 41229 | 42229 | 43229 |
| 40230 | 41230 | 42230 | 43230 |
| 40231 | 41231 | 42231 | 43231 |
| 40232 | 41232 | 42232 | 43232 |
| 40233 | 41233 | 42233 | 43233 |
| 40234 | 41234 | 42234 | 43234 |
| 40235 | 41235 | 42235 | 43235 |
| 40236 | 41236 | 42236 | 43236 |
| 40237 | 41237 | 42237 | 43237 |
| 40238 | 41238 | 42238 | 43238 |
| 40239 | 41239 | 42239 | 43239 |
| 40240 | 41240 | 42240 | 43240 |
| 40241 | 41241 | 42241 | 43241 |
| 40242 | 41242 | 42242 | 43242 |
| 40243 | 41243 | 42243 | 43243 |
| 40244 | 41244 | 42244 | 43244 |
| 40245 | 41245 | 42245 | 43245 |
| 40246 | 41246 | 42246 | 43246 |
| 40247 | 41247 | 42247 | 43247 |
| 40248 | 41248 | 42248 | 43248 |
| 40249 | 41249 | 42249 | 43249 |
| 40250 | 41250 | 42250 | 43250 |
| 40251 | 41251 | 42251 | 43251 |
| 40252 | 41252 | 42252 | 43252 |
| 40253 | 41253 | 42253 | 43253 |
| 40254 | 41254 | 42254 | 43254 |
| 40255 | 41255 | 42255 | 43255 |
| 40256 | 41256 | 42256 | 43256 |
| 40257 | 41257 | 42257 | 43257 |
| 40258 | 41258 | 42258 | 43258 |
| 40259 | 41259 | 42259 | 43259 |
| 40260 | 41260 | 42260 | 43260 |
| 40261 | 41261 | 42261 | 43261 |
| 40262 | 41262 | 42262 | 43262 |
| 40263 | 41263 | 42263 | 43263 |
| 40264 | 41264 | 42264 | 43264 |
| 40265 | 41265 | 42265 | 43265 |
| 40266 | 41266 | 42266 | 43266 |
| 40267 | 41267 | 42267 | 43267 |
| 40268 | 41268 | 42268 | 43268 |
| 40269 | 41269 | 42269 | 43269 |
| 40270 | 41270 | 42270 | 43270 |
| 40271 | 41271 | 42271 | 43271 |
| 40272 | 41272 | 42272 | 43272 |
| 40273 | 41273 | 42273 | 43273 |
| 40274 | 41274 | 42274 | 43274 |
| 40275 | 41275 | 42275 | 43275 |
| 40276 | 41276 | 42276 | 43276 |
| 40277 | 41277 | 42277 | 43277 |
| 40278 | 41278 | 42278 | 43278 |
| 40279 | 41279 | 42279 | 43279 |
| 40280 | 41280 | 42280 | 43280 |
| 40281 | 41281 | 42281 | 43281 |
| 40282 | 41282 | 42282 | 43282 |
| 40283 | 41283 | 42283 | 43283 |
| 40284 | 41284 | 42284 | 43284 |
| 40285 | 41285 | 42285 | 43285 |
| 40286 | 41286 | 42286 | 43286 |
| 40287 | 41287 | 42287 | 43287 |
| 40288 | 41288 | 42288 | 43288 |
| 40289 | 41289 | 42289 | 43289 |
| 40290 | 41290 | 42290 | 43290 |
| 40291 | 41291 | 42291 | 43291 |
| 40292 | 41292 | 42292 | 43292 |
| 40293 | 41293 | 42293 | 43293 |
| 40294 | 41294 | 42294 | 43294 |
| 40295 | 41295 | 42295 | 43295 |
| 40296 | 41296 | 42296 | 43296 |
| 40297 | 41297 | 42297 | 43297 |
| 40298 | 41298 | 42298 | 43298 |
| 40299 | 41299 | 42299 | 43299 |
| 40300 | 41300 | 42300 | 43300 |
| 40301 | 41301 | 42301 | 43301 |
| 40302 | 41302 | 42302 | 43302 |
| 40303 | 41303 | 42303 | 43303 |
| 40304 | 41304 | 42304 | 43304 |
| 40305 | 41305 | 42305 | 43305 |
| 40306 | 41306 | 42306 | 43306 |
| 40307 | 41307 | 42307 | 43307 |
| 40308 | 41308 | 42308 | 43308 |
| 40309 | 41309 | 42309 | 43309 |
| 40310 | 41310 | 42310 | 43310 |
| 40311 | 41311 | 42311 | 43311 |
| 40312 | 41312 | 42312 | 43312 |
| 40313 | 41313 | 42313 | 43313 |
| 40314 | 41314 | 42314 | 43314 |
| 40315 | 41315 | 42315 | 43315 |
| 40316 | 41316 | 42316 | 43316 |
| 40317 | 41317 | 42317 | 43317 |
| 40318 | 41318 | 42318 | 43318 |
| 40319 | 41319 | 42319 | 43319 |
| 40320 | 41320 | 42320 | 43320 |
| 40321 | 41321 | 42321 | 43321 |
| 40322 | 41322 | 42322 | 43322 |
| 40323 | 41323 | 42323 | 43323 |
| 40324 | 41324 | 42324 | 43324 |
| 40325 | 41325 | 42325 | 43325 |
| 40326 | 41326 | 42326 | 43326 |
| 40327 | 41327 | 42327 | 43327 |
| 40328 | 41328 | 42328 | 43328 |
| 40329 | 41329 | 42329 | 43329 |
| 40330 | 41330 | 42330 | 43330 |
| 40331 | 41331 | 42331 | 43331 |
| 40332 | 41332 | 42332 | 43332 |
| 40333 | 41333 | 42333 | 43333 |
| 40334 | 41334 | 42334 | 43334 |
| 40335 | 41335 | 42335 | 43335 |
| 40336 | 41336 | 42336 | 43336 |
| 40337 | 41337 | 42337 | 43337 |
| 40338 | 41338 | 42338 | 43338 |
| 40339 | 41339 | 42339 | 43339 |
| 40340 | 41340 | 42340 | 43340 |
| 40341 | 41341 | 42341 | 43341 |
| 40342 | 41342 | 42342 | 43342 |
| 40343 | 41343 | 42343 | 43343 |
| 40344 | 41344 | 42344 | 43344 |
| 40345 | 41345 | 42345 | 43345 |
| 40346 | 41346 | 42346 | 43346 |
| 40347 | 41347 | 42347 | 43347 |
| 40348 | 41348 | 42348 | 43348 |
| 40349 | 41349 | 42349 | 43349 |
| 40350 | 41350 | 42350 | 43350 |
| 40351 | 41351 | 42351 | 43351 |
| 40352 | 41352 | 42352 | 43352 |
| 40353 | 41353 | 42353 | 43353 |
| 40354 | 41354 | 42354 | 43354 |
| 40355 | 41355 | 42355 | 43355 |
| 40356 | 41356 | 42356 | 43356 |
| 40357 | 41357 | 42357 | 43357 |
| 40358 | 41358 | 42358 | 43358 |
| 40359 | 41359 | 42359 | 43359 |
| 40360 | 41360 | 42360 | 43360 |
| 40361 | 41361 | 42361 | 43361 |
| 40362 | 41362 | 42362 | 43362 |
| 40363 | 41363 | 42363 | 43363 |
| 40364 | 41364 | 42364 | 43364 |
| 40365 | 41365 | 42365 | 43365 |
| 40366 | 41366 | 42366 | 43366 |
| 40367 | 41367 | 42367 | 43367 |
| 40368 | 41368 | 42368 | 43368 |
| 40369 | 41369 | 42369 | 43369 |
| 40370 | 41370 | 42370 | 43370 |
| 40371 | 41371 | 42371 | 43371 |
| 40372 | 41372 | 42372 | 43372 |
| 40373 | 41373 | 42373 | 43373 |
| 40374 | 41374 | 42374 | 43374 |
| 40375 | 41375 | 42375 | 43375 |
| 40376 | 41376 | 42376 | 43376 |
| 40377 | 41377 | 42377 | 43377 |
| 40378 | 41378 | 42378 | 43378 |
| 40379 | 41379 | 42379 | 43379 |
| 40380 | 41380 | 42380 | 43380 |
| 40381 | 41381 | 42381 | 43381 |
| 40382 | 41382 | 42382 | 43382 |
| 40383 | 41383 | 42383 | 43383 |
| 40384 | 41384 | 42384 | 43384 |
| 40385 | 41385 | 42385 | 43385 |
| 40386 | 41386 | 42386 | 43386 |
| 40387 | 41387 | 42387 | 43387 |
| 40388 | 41388 | 42388 | 43388 |
| 40389 | 41389 | 42389 | 43389 |
| 40390 | 41390 | 42390 | 43390 |
| 40391 | 41391 | 42391 | 43391 |
| 40392 | 41392 | 42392 | 43392 |
| 40393 | 41393 | 42393 | 43393 |
| 40394 | 41394 | 42394 | 43394 |
| 40395 | 41395 | 42395 | 43395 |
| 40396 | 41396 | 42396 | 43396 |
| 40397 | 41397 | 42397 | 43397 |
| 40398 | 41398 | 42398 | 43398 |
| 40399 | 41399 | 42399 | 43399 |
| 40400 | 41400 | 42400 | 43400 |
| 40401 | 41401 | 42401 | 43401 |
| 40402 | 41402 | 42402 | 43402 |
| 40403 | 41403 | 42403 | 43403 |
| 40404 | 41404 | 42404 | 43404 |
| 40405 | 41405 | 42405 | 43405 |
| 40406 | 41406 | 42406 | 43406 |
| 40407 | 41407 | 42407 | 43407 |
| 40408 | 41408 | 42408 | 43408 |
| 40409 | 41409 | 42409 | 43409 |
| 40410 | 41410 | 42410 | 43410 |
| 40411 | 41411 | 42411 | 43411 |
| 40412 | 41412 | 42412 | 43412 |
| 40413 | 41413 | 42413 | 43413 |
| 40414 | 41414 | 42414 | 43414 |
| 40415 | 41415 | 42415 | 43415 |
| 40416 | 41416 | 42416 | 43416 |
| 40417 | 41417 | 42417 | 43417 |
| 40418 | 41418 | 42418 | 43418 |
| 40419 | 41419 | 42419 | 43419 |
| 40420 | 41420 | 42420 | 43420 |
| 40421 | 41421 | 42421 | 43421 |
| 40422 | 41422 | 42422 | 43422 |
| 40423 | 41423 | 42423 | 43423 |
| 40424 | 41424 | 42424 | 43424 |
| 40425 | 41425 | 42425 | 43425 |
| 40426 | 41426 | 42426 | 43426 |
| 40427 | 41427 | 42427 | 43427 |
| 40428 | 41428 | 42428 | 43428 |
| 40429 | 41429 | 42429 | 43429 |
| 40430 | 41430 | 42430 | 43430 |
| 40431 | 41431 | 42431 | 43431 |
| 40432 | 41432 | 42432 | 43432 |
| 40433 | 41433 | 42433 | 43433 |
| 40434 | 41434 | 42434 | 43434 |
| 40435 | 41435 | 42435 | 43435 |
| 40436 | 41436 | 42436 | 43436 |
| 40437 | 41437 | 42437 | 43437 |
| 40438 | 41438 | 42438 | 43438 |
| 40439 | 41439 | 42439 | 43439 |
| 40440 | 41440 | 42440 | 43440 |
| 40441 | 41441 | 42441 | 43441 |
| 40442 | 41442 | 42442 | 43442 |
| 40443 | 41443 | 42443 | 43443 |
| 40444 | 41444 | 42444 | 43444 |
| 40445 | 41445 | 42445 | 43445 |
| 40446 | 41446 | 42446 | 43446 |
| 40447 | 41447 | 42447 | 43447 |
| 40448 | 41448 | 42448 | 43448 |
| 40449 | 41449 | 42449 | 43449 |
| 40450 | 41450 | 42450 | 43450 |
| 40451 | 41451 | 42451 | 43451 |
| 40452 | 41452 | 42452 | 43452 |
| 40453 | 41453 | 42453 | 43453 |
| 40454 | 41454 | 42454 | 43454 |
| 40455 | 41455 | 42455 | 43455 |
| 40456 | 41456 | 42456 | 43456 |
| 40457 | 41457 | 42457 | 43457 |
| 40458 | 41458 | 42458 | 43458 |
| 40459 | 41459 | 42459 | 43459 |
| 40460 | 41460 | 42460 | 43460 |
| 40461 | 41461 | 42461 | 43461 |
| 40462 | 41462 | 42462 | 43462 |
| 40463 | 41463 | 42463 | 43463 |
| 40464 | 41464 | 42464 | 43464 |
| 40465 | 41465 | 42465 | 43465 |
| 40466 | 41466 | 42466 | 43466 |
| 40467 | 41467 | 42467 | 43467 |
| 40468 | 41468 | 42468 | 43468 |
| 40469 | 41469 | 42469 | 43469 |
| 40470 | 41470 | 42470 | 43470 |
| 40471 | 41471 | 42471 | 43471 |
| 40472 | 41472 | 42472 | 43472 |
| 40473 | 41473 | 42473 | 43473 |
| 40474 | 41474 | 42474 | 43474 |
| 40475 | 41475 | 42475 | 43475 |
| 40476 | 41476 | 42476 | 43476 |
| 40477 | 41477 | 42477 | 43477 |
| 40478 | 41478 | 42478 | 43478 |
| 40479 | 41479 | 42479 | 43479 |
| 40480 | 41480 | 42480 | 43480 |
| 40481 | 41481 | 42481 | 43481 |
| 40482 | 41482 | 42482 | 43482 |
| 40483 | 41483 | 42483 | 43483 |
| 40484 | 41484 | 42484 | 43484 |
| 40485 | 41485 | 42485 | 43485 |
| 40486 | 41486 | 42486 | 43486 |
| 40487 | 41487 | 42487 | 43487 |
| 40488 | 41488 | 42488 | 43488 |
| 40489 | 41489 | 42489 | 43489 |
| 40490 | 41490 | 42490 | 43490 |
| 40491 | 41491 | 42491 | 43491 |
| 40492 | 41492 | 42492 | 43492 |
| 40493 | 41493 | 42493 | 43493 |
| 40494 | 41494 | 42494 | 43494 |
| 40495 | 41495 | 42495 | 43495 |
| 40496 | 41496 | 42496 | 43496 |
| 40497 | 41497 | 42497 | 43497 |
| 40498 | 41498 | 42498 | 43498 |
| 40499 | 41499 | 42499 | 43499 |
| 40500 | 41500 | 42500 | 43500 |
| 40501 | 41501 | 42501 | 43501 |
| 40502 | 41502 | 42502 | 43502 |
| 40503 | 41503 | 42503 | 43503 |
| 40504 | 41504 | 42504 | 43504 |
| 40505 | 41505 | 42505 | 43505 |
| 40506 | 41506 | 42506 | 43506 |
| 40507 | 41507 | 42507 | 43507 |
| 40508 | 41508 | 42508 | 43508 |
| 40509 | 41509 | 42509 | 43509 |
| 40510 | 41510 | 42510 | 43510 |
| 40511 | 41511 | 42511 | 43511 |
| 40512 | 41512 | 42512 | 43512 |
| 40513 | 41513 | 42513 | 43513 |
| 40514 | 41514 | 42514 | 43514 |
| 40515 | 41515 | 42515 | 43515 |
| 40516 | 41516 | 42516 | 43516 |
| 40517 | 41517 | 42517 | 43517 |
| 40518 | 41518 | 42518 | 43518 |
| 40519 | 41519 | 42519 | 43519 |
| 40520 | 41520 | 42520 | 43520 |
| 40521 | 41521 | 42521 | 43521 |
| 40522 | 41522 | 42522 | 43522 |
| 40523 | 41523 | 42523 | 43523 |
| 40524 | 41524 | 42524 | 43524 |
| 40525 | 41525 | 42525 | 43525 |
| 40526 | 41526 | 42526 | 43526 |
| 40527 | 41527 | 42527 | 43527 |
| 40528 | 41528 | 42528 | 43528 |
| 40529 | 41529 | 42529 | 43529 |
| 40530 | 41530 | 42530 | 43530 |
| 40531 | 41531 | 42531 | 43531 |
| 40532 | 41532 | 42532 | 43532 |
| 40533 | 41533 | 42533 | 43533 |
| 40534 | 41534 | 42534 | 43534 |
| 40535 | 41535 | 42535 | 43535 |
| 40536 | 41536 | 42536 | 43536 |
| 40537 | 41537 | 42537 | 43537 |
| 40538 | 41538 | 42538 | 43538 |
| 40539 | 41539 | 42539 | 43539 |
| 40540 | 41540 | 42540 | 43540 |
| 40541 | 41541 | 42541 | 43541 |
| 40542 | 41542 | 42542 | 43542 |
| 40543 | 41543 | 42543 | 43543 |
| 40544 | 41544 | 42544 | 43544 |
| 40545 | 41545 | 42545 | 43545 |
| 40546 | 41546 | 42546 | 43546 |
| 40547 | 41547 | 42547 | 43547 |
| 40548 | 41548 | 42548 | 43548 |
| 40549 | 41549 | 42549 | 43549 |
| 40550 | 41550 | 42550 | 43550 |
| 40551 | 41551 | 42551 | 43551 |
| 40552 | 41552 | 42552 | 43552 |
| 40553 | 41553 | 42553 | 43553 |
| 40554 | 41554 | 42554 | 43554 |
| 40555 | 41555 | 42555 | 43555 |
| 40556 | 41556 | 42556 | 43556 |
| 40557 | 41557 | 42557 | 43557 |
| 40558 | 41558 | 42558 | 43558 |
| 40559 | 41559 | 42559 | 43559 |
| 40560 | 41560 | 42560 | 43560 |
| 40561 | 41561 | 42561 | 43561 |
| 40562 | 41562 | 42562 | 43562 |
| 40563 | 41563 | 42563 | 43563 |
| 40564 | 41564 | 42564 | 43564 |
| 40565 | 41565 | 42565 | 43565 |
| 40566 | 41566 | 42566 | 43566 |
| 40567 | 41567 | 42567 | 43567 |
| 40568 | 41568 | 42568 | 43568 |
| 40569 | 41569 | 42569 | 43569 |
| 40570 | 41570 | 42570 | 43570 |
| 40571 | 41571 | 42571 | 43571 |
| 40572 | 41572 | 42572 | 43572 |
| 40573 | 41573 | 42573 | 43573 |
| 40574 | 41574 | 42574 | 43574 |
| 40575 | 41575 | 42575 | 43575 |
| 40576 | 41576 | 42576 | 43576 |
| 40577 | 41577 | 42577 | 43577 |
| 40578 | 41578 | 42578 | 43578 |
| 40579 | 41579 | 42579 | 43579 |
| 40580 | 41580 | 42580 | 43580 |
| 40581 | 41581 | 42581 | 43581 |
| 40582 | 41582 | 42582 | 43582 |
| 40583 | 41583 | 42583 | 43583 |
| 40584 | 41584 | 42584 | 43584 |
| 40585 | 41585 | 42585 | 43585 |
| 40586 | 41586 | 42586 | 43586 |
| 40587 | 41587 | 42587 | 43587 |
| 40588 | 41588 | 42588 | 43588 |
| 40589 | 41589 | 42589 | 43589 |
| 40590 | 41590 | 42590 | 43590 |
| 40591 | 41591 | 42591 | 43591 |
| 40592 | 41592 | 42592 | 43592 |
| 40593 | 41593 | 42593 | 43593 |
| 40594 | 41594 | 42594 | 43594 |
| 40595 | 41595 | 42595 | 43595 |
| 40596 | 41596 | 42596 | 43596 |
| 40597 | 41597 | 42597 | 43597 |
| 40598 | 41598 | 42598 | 43598 |
| 40599 | 41599 | 42599 | 43599 |
| 40600 | 41600 | 42600 | 43600 |
| 40601 | 41601 | 42601 | 43601 |
| 40602 | 41602 | 42602 | 43602 |
| 40603 | 41603 | 42603 | 43603 |
| 40604 | 41604 | 42604 | 43604 |
| 40605 | 41605 | 42605 | 43605 |
| 40606 | 41606 | 42606 | 43606 |
| 40607 | 41607 | 42607 | 43607 |
| 40608 | 41608 | 42608 | 43608 |
| 40609 | 41609 | 42609 | 43609 |
| 40610 | 41610 | 42610 | 43610 |
| 40611 | 41611 | 42611 | 43611 |
| 40612 | 41612 | 42612 | 43612 |
| 40613 | 41613 | 42613 | 43613 |
| 40614 | 41614 | 42614 | 43614 |
| 40615 | 41615 | 42615 | 43615 |
| 40616 | 41616 | 42616 | 43616 |
| 40617 | 41617 | 42617 | 43617 |
| 40618 | 41618 | 42618 | 43618 |
| 40619 | 41619 | 42619 | 43619 |
| 40620 | 41620 | 42620 | 43620 |
| 40621 | 41621 | 42621 | 43621 |
| 40622 | 41622 | 42622 | 43622 |
| 40623 | 41623 | 42623 | 43623 |
| 40624 | 41624 | 42624 | 43624 |
| 40625 | 41625 | 42625 | 43625 |
| 40626 | 41626 | 42626 | 43626 |
| 40627 | 41627 | 42627 | 43627 |
| 40628 | 41628 | 42628 | 43628 |
| 40629 | 41629 | 42629 | 43629 |
| 40630 | 41630 | 42630 | 43630 |
| 40631 | 41631 | 42631 | 43631 |
| 40632 | 41632 | 42632 | 43632 |
| 40633 | 41633 | 42633 | 43633 |
| 40634 | 41634 | 42634 | 43634 |
| 40635 | 41635 | 42635 | 43635 |
| 40636 | 41636 | 42636 | 43636 |
| 40637 | 41637 | 42637 | 43637 |
| 40638 | 41638 | 42638 | 43638 |
| 40639 | 41639 | 42639 | 43639 |
| 40640 | 41640 | 42640 | 43640 |
| 40641 | 41641 | 42641 | 43641 |
| 40642 | 41642 | 42642 | 43642 |
| 40643 | 41643 | 42643 | 43643 |
| 40644 | 41644 | 42644 | 43644 |
| 40645 | 41645 | 42645 | 43645 |
| 40646 | 41646 | 42646 | 43646 |
| 40647 | 41647 | 42647 | 43647 |
| 40648 | 41648 | 42648 | 43648 |
| 40649 | 41649 | 42649 | 43649 |
| 40650 | 41650 | 42650 | 43650 |
| 40651 | 41651 | 42651 | 43651 |
| 40652 | 41652 | 42652 | 43652 |
| 40653 | 41653 | 42653 | 43653 |
| 40654 | 41654 | 42654 | 43654 |
| 40655 | 41655 | 42655 | 43655 |
| 40656 | 41656 | 42656 | 43656 |
| 40657 | 41657 | 42657 | 43657 |
| 40658 | 41658 | 42658 | 43658 |
| 40659 | 41659 | 42659 | 43659 |
| 40660 | 41660 | 42660 | 43660 |
| 40661 | 41661 | 42661 | 43661 |
| 40662 | 41662 | 42662 | 43662 |
| 40663 | 41663 | 42663 | 43663 |
| 40664 | 41664 | 42664 | 43664 |
| 40665 | 41665 | 42665 | 43665 |
| 40666 | 41666 | 42666 | 43666 |
| 40667 | 41667 | 42667 | 43667 |
| 40668 | 41668 | 42668 | 43668 |
| 40669 | 41669 | 42669 | 43669 |
| 40670 | 41670 | 42670 | 43670 |
| 40671 | 41671 | 42671 | 43671 |
| 40672 | 41672 | 42672 | 43672 |
| 40673 | 41673 | 42673 | 43673 |
| 40674 | 41674 | 42674 | 43674 |
| 40675 | 41675 | 42675 | 43675 |
| 40676 | 41676 | 42676 | 43676 |
| 40677 | 41677 | 42677 | 43677 |
| 40678 | 41678 | 42678 | 43678 |
| 40679 | 41679 | 42679 | 43679 |
| 40680 | 41680 | 42680 | 43680 |
| 40681 | 41681 | 42681 | 43681 |
| 40682 | 41682 | 42682 | 43682 |
| 40683 | 41683 | 42683 | 43683 |
| 40684 | 41684 | 42684 | 43684 |
| 40685 | 41685 | 42685 | 43685 |
| 40686 | 41686 | 42686 | 43686 |
| 40687 | 41687 | 42687 | 43687 |
| 40688 | 41688 | 42688 | 43688 |
| 40689 | 41689 | 42689 | 43689 |
| 40690 | 41690 | 42690 | 43690 |
| 40691 | 41691 | 42691 | 43691 |
| 40692 | 41692 | 42692 | 43692 |
| 40693 | 41693 | 42693 | 43693 |
| 40694 | 41694 | 42694 | 43694 |
| 40695 | 41695 | 42695 | 43695 |
| 40696 | 41696 | 42696 | 43696 |
| 40697 | 41697 | 42697 | 43697 |
| 40698 | 41698 | 42698 | 43698 |
| 40699 | 41699 | 42699 | 43699 |
| 40700 | 41700 | 42700 | 43700 |
| 40701 | 41701 | 42701 | 43701 |
| 40702 | 41702 | 42702 | 43702 |
| 40703 | 41703 | 42703 | 43703 |
| 40704 | 41704 | 42704 | 43704 |
| 40705 | 41705 | 42705 | 43705 |
| 40706 | 41706 | 42706 | 43706 |
| 40707 | 41707 | 42707 | 43707 |
| 40708 | 41708 | 42708 | 43708 |
| 40709 | 41709 | 42709 | 43709 |
| 40710 | 41710 | 42710 | 43710 |
| 40711 | 41711 | 42711 | 43711 |
| 40712 | 41712 | 42712 | 43712 |
| 40713 | 41713 | 42713 | 43713 |
| 40714 | 41714 | 42714 | 43714 |
| 40715 | 41715 | 42715 | 43715 |
| 40716 | 41716 | 42716 | 43716 |
| 40717 | 41717 | 42717 | 43717 |
| 40718 | 41718 | 42718 | 43718 |
| 40719 | 41719 | 42719 | 43719 |
| 40720 | 41720 | 42720 | 43720 |
| 40721 | 41721 | 42721 | 43721 |
| 40722 | 41722 | 42722 | 43722 |
| 40723 | 41723 | 42723 | 43723 |
| 40724 | 41724 | 42724 | 43724 |
| 40725 | 41725 | 42725 | 43725 |
| 40726 | 41726 | 42726 | 43726 |
| 40727 | 41727 | 42727 | 43727 |
| 40728 | 41728 | 42728 | 43728 |
| 40729 | 41729 | 42729 | 43729 |
| 40730 | 41730 | 42730 | 43730 |
| 40731 | 41731 | 42731 | 43731 |
| 40732 | 41732 | 42732 | 43732 |
| 40733 | 41733 | 42733 | 43733 |
| 40734 | 41734 | 42734 | 43734 |
| 40735 | 41735 | 42735 | 43735 |
| 40736 | 41736 | 42736 | 43736 |
| 40737 | 41737 | 42737 | 43737 |
| 40738 | 41738 | 42738 | 43738 |
| 40739 | 41739 | 42739 | 43739 |
| 40740 | 41740 | 42740 | 43740 |
| 40741 | 41741 | 42741 | 43741 |
| 40742 | 41742 | 42742 | 43742 |
| 40743 | 41743 | 42743 | 43743 |
| 40744 | 41744 | 42744 | 43744 |
| 40745 | 41745 | 42745 | 43745 |
| 40746 | 41746 | 42746 | 43746 |
| 40747 | 41747 | 42747 | 43747 |
| 40748 | 41748 | 42748 | 43748 |
| 40749 | 41749 | 42749 | 43749 |
| 40750 | 41750 | 42750 | 43750 |
| 40751 | 41751 | 42751 | 43751 |
| 40752 | 41752 | 42752 | 43752 |
| 40753 | 41753 | 42753 | 43753 |
| 40754 | 41754 | 42754 | 43754 |
| 40755 | 41755 | 42755 | 43755 |
| 40756 | 41756 | 42756 | 43756 |
| 40757 | 41757 | 42757 | 43757 |
| 40758 | 41758 | 42758 | 43758 |
| 40759 | 41759 | 42759 | 43759 |
| 40760 | 41760 | 42760 | 43760 |
| 40761 | 41761 | 42761 | 43761 |
| 40762 | 41762 | 42762 | 43762 |
| 40763 | 41763 | 42763 | 43763 |
| 40764 | 41764 | 42764 | 43764 |
| 40765 | 41765 | 42765 | 43765 |
| 40766 | 41766 | 42766 | 43766 |
| 40767 | 41767 | 42767 | 43767 |
| 40768 | 41768 | 42768 | 43768 |
| 40769 | 41769 | 42769 | 43769 |
| 40770 | 41770 | 42770 | 43770 |
| 40771 | 41771 | 42771 | 43771 |
| 40772 | 41772 | 42772 | 43772 |
| 40773 | 41773 | 42773 | 43773 |
| 40774 | 41774 | 42774 | 43774 |
| 40775 | 41775 | 42775 | 43775 |
| 40776 | 41776 | 42776 | 43776 |
| 40777 | 41777 | 42777 | 43777 |
| 40778 | 41778 | 42778 | 43778 |
| 40779 | 41779 | 42779 | 43779 |
| 40780 | 41780 | 42780 | 43780 |
| 40781 | 41781 | 42781 | 43781 |
| 40782 | 41782 | 42782 | 43782 |
| 40783 | 41783 | 42783 | 43783 |
| 40784 | 41784 | 42784 | 43784 |
| 40785 | 41785 | 42785 | 43785 |
| 40786 | 41786 | 42786 | 43786 |
| 40787 | 41787 | 42787 | 43787 |
| 40788 | 41788 | 42788 | 43788 |
| 40789 | 41789 | 42789 | 43789 |
| 40790 | 41790 | 42790 | 43790 |
| 40791 | 41791 | 42791 | 43791 |
| 40792 | 41792 | 42792 | 43792 |
| 40793 | 41793 | 42793 | 43793 |
| 40794 | 41794 | 42794 | 43794 |
| 40795 | 41795 | 42795 | 43795 |
| 40796 | 41796 | 42796 | 43796 |
| 40797 | 41797 | 42797 | 43797 |
| 40798 | 41798 | 42798 | 43798 |
| 40799 | 41799 | 42799 | 43799 |
| 40800 | 41800 | 42800 | 43800 |
| 40801 | 41801 | 42801 | 43801 |
| 40802 | 41802 | 42802 | 43802 |
| 40803 | 41803 | 42803 | 43803 |
| 40804 | 41804 | 42804 | 43804 |
| 40805 | 41805 | 42805 | 43805 |
| 40806 | 41806 | 42806 | 43806 |
| 40807 | 41807 | 42807 | 43807 |
| 40808 | 41808 | 42808 | 43808 |
| 40809 | 41809 | 42809 | 43809 |
| 40810 | 41810 | 42810 | 43810 |
| 40811 | 41811 | 42811 | 43811 |
| 40812 | 41812 | 42812 | 43812 |
| 40813 | 41813 | 42813 | 43813 |
| 40814 | 41814 | 42814 | 43814 |
| 40815 | 41815 | 42815 | 43815 |
| 40816 | 41816 | 42816 | 43816 |
| 40817 | 41817 | 42817 | 43817 |
| 40818 | 41818 | 42818 | 43818 |
| 40819 | 41819 | 42819 | 43819 |
| 40820 | 41820 | 42820 | 43820 |
| 40821 | 41821 | 42821 | 43821 |
| 40822 | 41822 | 42822 | 43822 |
| 40823 | 41823 | 42823 | 43823 |
| 40824 | 41824 | 42824 | 43824 |
| 40825 | 41825 | 42825 | 43825 |
| 40826 | 41826 | 42826 | 43826 |
| 40827 | 41827 | 42827 | 43827 |
| 40828 | 41828 | 42828 | 43828 |
| 40829 | 41829 | 42829 | 43829 |
| 40830 | 41830 | 42830 | 43830 |
| 40831 | 41831 | 42831 | 43831 |
| 40832 | 41832 | 42832 | 43832 |
| 40833 | 41833 | 42833 | 43833 |
| 40834 | 41834 | 42834 | 43834 |
| 40835 | 41835 | 42835 | 43835 |
| 40836 | 41836 | 42836 | 43836 |
| 40837 | 41837 | 42837 | 43837 |
| 40838 | 41838 | 42838 | 43838 |
| 40839 | 41839 | 42839 | 43839 |
| 40840 | 41840 | 42840 | 43840 |
| 40841 | 41841 | 42841 | 43841 |
| 40842 | 41842 | 42842 | 43842 |
| 40843 | 41843 | 42843 | 43843 |
| 40844 | 41844 | 42844 | 43844 |
| 40845 | 41845 | 42845 | 43845 |
| 40846 | 41846 | 42846 | 43846 |
| 40847 | 41847 | 42847 | 43847 |
| 40848 | 41848 | 42848 | 43848 |
| 40849 | 41849 | 42849 | 43849 |
| 40850 | 41850 | 42850 | 43850 |
| 40851 | 41851 | 42851 | 43851 |
| 40852 | 41852 | 42852 | 43852 |
| 40853 | 41853 | 42853 | 43853 |
| 40854 | 41854 | 42854 | 43854 |
| 40855 | 41855 | 42855 | 43855 |
| 40856 | 41856 | 42856 | 43856 |
| 40857 | 41857 | 42857 | 43857 |
| 40858 | 41858 | 42858 | 43858 |
| 40859 | 41859 | 42859 | 43859 |
| 40860 | 41860 | 42860 | 43860 |
| 40861 | 41861 | 42861 | 43861 |
| 40862 | 41862 | 42862 | 43862 |
| 40863 | 41863 | 42863 | 43863 |
| 40864 | 41864 | 42864 | 43864 |
| 40865 | 41865 | 42865 | 43865 |
| 40866 | 41866 | 42866 | 43866 |
| 40867 | 41867 | 42867 | 43867 |
| 40868 | 41868 | 42868 | 43868 |
| 40869 | 41869 | 42869 | 43869 |
| 40870 | 41870 | 42870 | 43870 |
| 40871 | 41871 | 42871 | 43871 |
| 40872 | 41872 | 42872 | 43872 |
| 40873 | 41873 | 42873 | 43873 |
| 40874 | 41874 | 42874 | 43874 |
| 40875 | 41875 | 42875 | 43875 |
| 40876 | 41876 | 42876 | 43876 |
| 40877 | 41877 | 42877 | 43877 |
| 40878 | 41878 | 42878 | 43878 |
| 40879 | 41879 | 42879 | 43879 |
| 40880 | 41880 | 42880 | 43880 |
| 40881 | 41881 | 42881 | 43881 |
| 40882 | 41882 | 42882 | 43882 |
| 40883 | 41883 | 42883 | 43883 |
| 40884 | 41884 | 42884 | 43884 |
| 40885 | 41885 | 42885 | 43885 |
| 40886 | 41886 | 42886 | 43886 |
| 40887 | 41887 | 42887 | 43887 |
| 40888 | 41888 | 42888 | 43888 |
| 40889 | 41889 | 42889 | 43889 |
| 40890 | 41890 | 42890 | 43890 |
| 40891 | 41891 | 42891 | 43891 |
| 40892 | 41892 | 42892 | 43892 |
| 40893 | 41893 | 42893 | 43893 |
| 40894 | 41894 | 42894 | 43894 |
| 40895 | 41895 | 42895 | 43895 |
| 40896 | 41896 | 42896 | 43896 |
| 40897 | 41897 | 42897 | 43897 |
| 40898 | 41898 | 42898 | 43898 |
| 40899 | 41899 | 42899 | 43899 |
| 40900 | 41900 | 42900 | 43900 |
| 40901 | 41901 | 42901 | 43901 |
| 40902 | 41902 | 42902 | 43902 |
| 40903 | 41903 | 42903 | 43903 |
| 40904 | 41904 | 42904 | 43904 |
| 40905 | 41905 | 42905 | 43905 |
| 40906 | 41906 | 42906 | 43906 |
| 40907 | 41907 | 42907 | 43907 |
| 40908 | 41908 | 42908 | 43908 |
| 40909 | 41909 | 42909 | 43909 |
| 40910 | 41910 | 42910 | 43910 |
| 40911 | 41911 | 42911 | 43911 |
| 40912 | 41912 | 42912 | 43912 |
| 40913 | 41913 | 42913 | 43913 |
| 40914 | 41914 | 42914 | 43914 |
| 40915 | 41915 | 42915 | 43915 |
| 40916 | 41916 | 42916 | 43916 |
| 40917 | 41917 | 42917 | 43917 |
| 40918 | 41918 | 42918 | 43918 |
| 40919 | 41919 | 42919 | 43919 |
| 40920 | 41920 | 42920 | 43920 |
| 40921 | 41921 | 42921 | 43921 |
| 40922 | 41922 | 42922 | 43922 |
| 40923 | 41923 | 42923 | 43923 |
| 40924 | 41924 | 42924 | 43924 |
| 40925 | 41925 | 42925 | 43925 |
| 40926 | 41926 | 42926 | 43926 |
| 40927 | 41927 | 42927 | 43927 |
| 40928 | 41928 | 42928 | 43928 |
| 40929 | 41929 | 42929 | 43929 |
| 40930 | 41930 | 42930 | 43930 |
| 40931 | 41931 | 42931 | 43931 |
| 40932 | 41932 | 42932 | 43932 |
| 40933 | 41933 | 42933 | 43933 |
| 40934 | 41934 | 42934 | 43934 |
| 40935 | 41935 | 42935 | 43935 |
| 40936 | 41936 | 42936 | 43936 |
| 40937 | 41937 | 42937 | 43937 |
| 40938 | 41938 | 42938 | 43938 |
| 40939 | 41939 | 42939 | 43939 |
| 40940 | 41940 | 42940 | 43940 |
| 40941 | 41941 | 42941 | 43941 |
| 40942 | 41942 | 42942 | 43942 |
| 40943 | 41943 | 42943 | 43943 |
| 40944 | 41944 | 42944 | 43944 |
| 40945 | 41945 | 42945 | 43945 |
| 40946 | 41946 | 42946 | 43946 |
| 40947 | 41947 | 42947 | 43947 |
| 40948 | 41948 | 42948 | 43948 |
| 40949 | 41949 | 42949 | 43949 |
| 40950 | 41950 | 42950 | 43950 |
| 40951 | 41951 | 42951 | 43951 |
| 40952 | 41952 | 42952 | 43952 |
| 40953 | 41953 | 42953 | 43953 |
| 40954 | 41954 | 42954 | 43954 |
| 40955 | 41955 | 42955 | 43955 |
| 40956 | 41956 | 42956 | 43956 |
| 40957 | 41957 | 42957 | 43957 |
| 40958 | 41958 | 42958 | 43958 |
| 40959 | 41959 | 42959 | 43959 |
| 40960 | 41960 | 42960 | 43960 |
| 40961 | 41961 | 42961 | 43961 |
| 40962 | 41962 | 42962 | 43962 |
| 40963 | 41963 | 42963 | 43963 |
| 40964 | 41964 | 42964 | 43964 |
| 40965 | 41965 | 42965 | 43965 |
| 40966 | 41966 | 42966 | 43966 |
| 40967 | 41967 | 42967 | 43967 |
| 40968 | 41968 | 42968 | 43968 |
| 40969 | 41969 | 42969 | 43969 |
| 40970 | 41970 | 42970 | 43970 |
| 40971 | 41971 | 42971 | 43971 |
| 40972 | 41972 | 42972 | 43972 |
| 40973 | 41973 | 42973 | 43973 |
| 40974 | 41974 | 42974 | 43974 |
| 40975 | 41975 | 42975 | 43975 |
| 40976 | 41976 | 42976 | 43976 |
| 40977 | 41977 | 42977 | 43977 |
| 40978 | 41978 | 42978 | 43978 |
| 40979 | 41979 | 42979 | 43979 |
| 40980 | 41980 | 42980 | 43980 |
| 40981 | 41981 | 42981 | 43981 |
| 40982 | 41982 | 42982 | 43982 |
| 40983 | 41983 | 42983 | 43983 |
| 40984 | 41984 | 42984 | 43984 |
| 40985 | 41985 | 42985 | 43985 |
| 40986 | 41986 | 42986 | 43986 |
| 40987 | 41987 | 42987 | 43987 |
| 40988 | 41988 | 42988 | 43988 |
| 40989 | 41989 | 42989 | 43989 |
| 40990 | 41990 | 42990 | 43990 |
| 40991 | 41991 | 42991 | 43991 |
| 40992 | 41992 | 42992 | 43992 |
| 40993 | 41993 | 42993 | 43993 |
| 40994 | 41994 | 42994 | 43994 |
| 40995 | 41995 | 42995 | 43995 |
| 40996 | 41996 | 42996 | 43996 |
| 40997 | 41997 | 42997 | 43997 |
| 40998 | 41998 | 42998 | 43998 |
| 40999 | 41999 | 42999 | 43999 |
| 41000 | 42000 | 43000 | 44000 |
| 41001 | 42001 | 43001 | 44001 |
| 41002 | 42002 | 43002 | 44002 |

[0138] In some embodiments, the sequences that specifically bind to whey comprise an inner sequence selected from the group consisting of the nucleic acid sequences of SEQ ID NOs. 44003 to 45002. In some examples, a short nucleic acid sequence may be affixed to the 5-end of the inner sequence. The short nucleic acid sequence may be the 5′ primer sequence used in the random ssDNA library, i.e. the nucleic acid sequence of SEQ ID NO. 1. Accordingly, the aptamer that specifically binds to whey may comprise a nucleic acid sequence selected from the group consisting of SEQ ID NOs. 45003 to 46002. In other examples, a short nucleic acid sequence may be affixed to the 3-end of the inner sequence. The short nucleic acid sequence may be the 3′ primer sequence used in the random ssDNA library, i.e. the nucleic acid sequence of SEQ ID NO. 2. Accordingly, the aptamer that specifically binds to whey may comprise a nucleic acid sequence selected from the group consisting of SEQ ID NOs. 46003 to 47002. In other examples, the inner sequence may comprise a 5′ end short sequence (i.e., SEQ ID NO. 1) and a 3′ end short sequence (i.e., SEQ ID NO. 2). Accordingly, the aptamer that specifically binds to whey may comprise a nucleic acid sequence selected from the group consisting of SEQ ID NOs. 47003 to 48002. In one embodiment, the aptamer of the present disclosure that specifically binds to whey may comprise a nucleic acid sequence selected from the group consisting of SEQ ID NOs. 44003 to 48002 listed in Table 13, or variant thereof.

TABLE 13
Aptamer sequences against whey
Aptamer sequence

| | | | 5′-sequence |
|---|---|---|---|
| | 5′-sequence | Inner | and inner |
| Inner | and inner | sequence | sequence and |
| sequence | sequence | 3′-sequence | 3′-sequence |
| (SEQ ID NO.) | (SEQ ID NO.) | (SEQ ID NO.) | (SEQ ID NO.) |
| 44003 | 45003 | 46003 | 47003 |
| 44004 | 45004 | 46004 | 47004 |
| 44005 | 45005 | 46005 | 47005 |
| 44006 | 45006 | 46006 | 47006 |
| 44007 | 45007 | 46007 | 47007 |
| 44008 | 45008 | 46008 | 47008 |
| 44009 | 45009 | 46009 | 47009 |
| 44010 | 45010 | 46010 | 47010 |
| 44011 | 45011 | 46011 | 47011 |
| 44012 | 45012 | 46012 | 47012 |
| 44013 | 45013 | 46013 | 47013 |
| 44014 | 45014 | 46014 | 47014 |
| 44015 | 45015 | 46015 | 47015 |
| 44016 | 45016 | 46016 | 47016 |
| 44017 | 45017 | 46017 | 47017 |
| 44018 | 45018 | 46018 | 47018 |
| 44019 | 45019 | 46019 | 47019 |
| 44020 | 45020 | 46020 | 47020 |
| 44021 | 45021 | 46021 | 47021 |
| 44022 | 45022 | 46022 | 47022 |
| 44023 | 45023 | 46023 | 47023 |
| 44024 | 45024 | 46024 | 47024 |
| 44025 | 45025 | 46025 | 47025 |
| 44026 | 45026 | 46026 | 47026 |
| 44027 | 45027 | 46027 | 47027 |
| 44028 | 45028 | 46028 | 47028 |
| 44029 | 45029 | 46029 | 47029 |
| 44030 | 45030 | 46030 | 47030 |
| 44031 | 45031 | 46031 | 47031 |
| 44032 | 45032 | 46032 | 47032 |
| 44033 | 45033 | 46033 | 47033 |
| 44034 | 45034 | 46034 | 47034 |
| 44035 | 45035 | 46035 | 47035 |
| 44036 | 45036 | 46036 | 47036 |
| 44037 | 45037 | 46037 | 47037 |
| 44038 | 45038 | 46038 | 47038 |
| 44039 | 45039 | 46039 | 47039 |
| 44040 | 45040 | 46040 | 47040 |
| 44041 | 45041 | 46041 | 47041 |
| 44042 | 45042 | 46042 | 47042 |
| 44043 | 45043 | 46043 | 47043 |
| 44044 | 45044 | 46044 | 47044 |
| 44045 | 45045 | 46045 | 47045 |
| 44046 | 45046 | 46046 | 47046 |
| 44047 | 45047 | 46047 | 47047 |
| 44048 | 45048 | 46048 | 47048 |
| 44049 | 45049 | 46049 | 47049 |
| 44050 | 45050 | 46050 | 47050 |
| 44051 | 45051 | 46051 | 47051 |
| 44052 | 45052 | 46052 | 47052 |
| 44053 | 45053 | 46053 | 47053 |
| 44054 | 45054 | 46054 | 47054 |
| 44055 | 45055 | 46055 | 47055 |
| 44056 | 45056 | 46056 | 47056 |
| 44057 | 45057 | 46057 | 47057 |
| 44058 | 45058 | 46058 | 47058 |
| 44059 | 45059 | 46059 | 47059 |
| 44060 | 45060 | 46060 | 47060 |
| 44061 | 45061 | 46061 | 47061 |
| 44062 | 45062 | 46062 | 47062 |
| 44063 | 45063 | 46063 | 47063 |
| 44064 | 45064 | 46064 | 47064 |
| 44065 | 45065 | 46065 | 47065 |
| 44066 | 45066 | 46066 | 47066 |
| 44067 | 45067 | 46067 | 47067 |
| 44068 | 45068 | 46068 | 47068 |
| 44069 | 45069 | 46069 | 47069 |
| 44070 | 45070 | 46070 | 47070 |
| 44071 | 45071 | 46071 | 47071 |
| 44072 | 45072 | 46072 | 47072 |
| 44073 | 45073 | 46073 | 47073 |
| 44074 | 45074 | 46074 | 47074 |
| 44075 | 45075 | 46075 | 47075 |
| 44076 | 45076 | 46076 | 47076 |
| 44077 | 45077 | 46077 | 47077 |
| 44078 | 45078 | 46078 | 47078 |
| 44079 | 45079 | 46079 | 47079 |
| 44080 | 45080 | 46080 | 47080 |
| 44081 | 45081 | 46081 | 47081 |
| 44082 | 45082 | 46082 | 47082 |
| 44083 | 45083 | 46083 | 47083 |
| 44084 | 45084 | 46084 | 47084 |
| 44085 | 45085 | 46085 | 47085 |
| 44086 | 45086 | 46086 | 47086 |
| 44087 | 45087 | 46087 | 47087 |
| 44088 | 45088 | 46088 | 47088 |
| 44089 | 45089 | 46089 | 47089 |
| 44090 | 45090 | 46090 | 47090 |
| 44091 | 45091 | 46091 | 47091 |
| 44092 | 45092 | 46092 | 47092 |
| 44093 | 45093 | 46093 | 47093 |
| 44094 | 45094 | 46094 | 47094 |
| 44095 | 45095 | 46095 | 47095 |
| 44096 | 45096 | 46096 | 47096 |
| 44097 | 45097 | 46097 | 47097 |
| 44098 | 45098 | 46098 | 47098 |
| 44099 | 45099 | 46099 | 47099 |
| 44100 | 45100 | 46100 | 47100 |
| 44101 | 45101 | 46101 | 47101 |
| 44102 | 45102 | 46102 | 47102 |
| 44103 | 45103 | 46103 | 47103 |
| 44104 | 45104 | 46104 | 47104 |
| 44105 | 45105 | 46105 | 47105 |
| 44106 | 45106 | 46106 | 47106 |
| 44107 | 45107 | 46107 | 47107 |
| 44108 | 45108 | 46108 | 47108 |
| 44109 | 45109 | 46109 | 47109 |
| 44110 | 45110 | 46110 | 47110 |
| 44111 | 45111 | 46111 | 47111 |
| 44112 | 45112 | 46112 | 47112 |
| 44113 | 45113 | 46113 | 47113 |
| 44114 | 45114 | 46114 | 47114 |
| 44115 | 45115 | 46115 | 47115 |
| 44116 | 45116 | 46116 | 47116 |
| 44117 | 45117 | 46117 | 47117 |
| 44118 | 45118 | 46118 | 47118 |
| 44119 | 45119 | 46119 | 47119 |
| 44120 | 45120 | 46120 | 47120 |
| 44121 | 45121 | 46121 | 47121 |
| 44122 | 45122 | 46122 | 47122 |
| 44123 | 45123 | 46123 | 47123 |
| 44124 | 45124 | 46124 | 47124 |
| 44125 | 45125 | 46125 | 47125 |
| 44126 | 45126 | 46126 | 47126 |
| 44127 | 45127 | 46127 | 47127 |
| 44128 | 45128 | 46128 | 47128 |
| 44129 | 45129 | 46129 | 47129 |
| 44130 | 45130 | 46130 | 47130 |
| 44131 | 45131 | 46131 | 47131 |
| 44132 | 45132 | 46132 | 47132 |
| 44133 | 45133 | 46133 | 47133 |
| 44134 | 45134 | 46134 | 47134 |
| 44135 | 45135 | 46135 | 47135 |
| 44136 | 45136 | 46136 | 47136 |
| 44137 | 45137 | 46137 | 47137 |
| 44138 | 45138 | 46138 | 47138 |
| 44139 | 45139 | 46139 | 47139 |
| 44140 | 45140 | 46140 | 47140 |
| 44141 | 45141 | 46141 | 47141 |
| 44142 | 45142 | 46142 | 47142 |
| 44143 | 45143 | 46143 | 47143 |
| 44144 | 45144 | 46144 | 47144 |
| 44145 | 45145 | 46145 | 47145 |
| 44146 | 45146 | 46146 | 47146 |
| 44147 | 45147 | 46147 | 47147 |
| 44148 | 45148 | 46148 | 47148 |
| 44149 | 45149 | 46149 | 47149 |
| 44150 | 45150 | 46150 | 47150 |
| 44151 | 45151 | 46151 | 47151 |
| 44152 | 45152 | 46152 | 47152 |
| 44153 | 45153 | 46153 | 47153 |
| 44154 | 45154 | 46154 | 47154 |
| 44155 | 45155 | 46155 | 47155 |
| 44156 | 45156 | 46156 | 47156 |
| 44157 | 45157 | 46157 | 47157 |
| 44158 | 45158 | 46158 | 47158 |
| 44159 | 45159 | 46159 | 47159 |
| 44160 | 45160 | 46160 | 47160 |
| 44161 | 45161 | 46161 | 47161 |
| 44162 | 45162 | 46162 | 47162 |
| 44163 | 45163 | 46163 | 47163 |
| 44164 | 45164 | 46164 | 47164 |
| 44165 | 45165 | 46165 | 47165 |
| 44166 | 45166 | 46166 | 47166 |
| 44167 | 45167 | 46167 | 47167 |
| 44168 | 45168 | 46168 | 47168 |
| 44169 | 45169 | 46169 | 47169 |
| 44170 | 45170 | 46170 | 47170 |
| 44171 | 45171 | 46171 | 47171 |
| 44172 | 45172 | 46172 | 47172 |
| 44173 | 45173 | 46173 | 47173 |
| 44174 | 45174 | 46174 | 47174 |
| 44175 | 45175 | 46175 | 47175 |
| 44176 | 45176 | 46176 | 47176 |
| 44177 | 45177 | 46177 | 47177 |
| 44178 | 45178 | 46178 | 47178 |
| 44179 | 45179 | 46179 | 47179 |
| 44180 | 45180 | 46180 | 47180 |
| 44181 | 45181 | 46181 | 47181 |
| 44182 | 45182 | 46182 | 47182 |
| 44183 | 45183 | 46183 | 47183 |
| 44184 | 45184 | 46184 | 47184 |
| 44185 | 45185 | 46185 | 47185 |
| 44186 | 45186 | 46186 | 47186 |
| 44187 | 45187 | 46187 | 47187 |
| 44188 | 45188 | 46188 | 47188 |
| 44189 | 45189 | 46189 | 47189 |
| 44190 | 45190 | 46190 | 47190 |
| 44191 | 45191 | 46191 | 47191 |
| 44192 | 45192 | 46192 | 47192 |
| 44193 | 45193 | 46193 | 47193 |
| 44194 | 45194 | 46194 | 47194 |
| 44195 | 45195 | 46195 | 47195 |
| 44196 | 45196 | 46196 | 47196 |
| 44197 | 45197 | 46197 | 47197 |
| 44198 | 45198 | 46198 | 47198 |
| 44199 | 45199 | 46199 | 47199 |
| 44200 | 45200 | 46200 | 47200 |
| 44201 | 45201 | 46201 | 47201 |
| 44202 | 45202 | 46202 | 47202 |
| 44203 | 45203 | 46203 | 47203 |
| 44204 | 45204 | 46204 | 47204 |
| 44205 | 45205 | 46205 | 47205 |
| 44206 | 45206 | 46206 | 47206 |
| 44207 | 45207 | 46207 | 47207 |
| 44208 | 45208 | 46208 | 47208 |
| 44209 | 45209 | 46209 | 47209 |
| 44210 | 45210 | 46210 | 47210 |
| 44211 | 45211 | 46211 | 47211 |
| 44212 | 45212 | 46212 | 47212 |
| 44213 | 45213 | 46213 | 47213 |
| 44214 | 45214 | 46214 | 47214 |
| 44215 | 45215 | 46215 | 47215 |
| 44216 | 45216 | 46216 | 47216 |
| 44217 | 45217 | 46217 | 47217 |
| 44218 | 45218 | 46218 | 47218 |
| 44219 | 45219 | 46219 | 47219 |
| 44220 | 45220 | 46220 | 47220 |
| 44221 | 45221 | 46221 | 47221 |
| 44222 | 45222 | 46222 | 47222 |
| 44223 | 45223 | 46223 | 47223 |
| 44224 | 45224 | 46224 | 47224 |
| 44225 | 45225 | 46225 | 47225 |
| 44226 | 45226 | 46226 | 47226 |
| 44227 | 45227 | 46227 | 47227 |
| 44228 | 45228 | 46228 | 47228 |
| 44229 | 45229 | 46229 | 47229 |
| 44230 | 45230 | 46230 | 47230 |
| 44231 | 45231 | 46231 | 47231 |
| 44232 | 45232 | 46232 | 47232 |
| 44233 | 45233 | 46233 | 47233 |
| 44234 | 45234 | 46234 | 47234 |
| 44235 | 45235 | 46235 | 47235 |
| 44236 | 45236 | 46236 | 47236 |
| 44237 | 45237 | 46237 | 47237 |
| 44238 | 45238 | 46238 | 47238 |
| 44239 | 45239 | 46239 | 47239 |
| 44240 | 45240 | 46240 | 47240 |
| 44241 | 45241 | 46241 | 47241 |
| 44242 | 45242 | 46242 | 47242 |
| 44243 | 45243 | 46243 | 47243 |
| 44244 | 45244 | 46244 | 47244 |
| 44245 | 45245 | 46245 | 47245 |
| 44246 | 45246 | 46246 | 47246 |
| 44247 | 45247 | 46247 | 47247 |
| 44248 | 45248 | 46248 | 47248 |
| 44249 | 45249 | 46249 | 47249 |
| 44250 | 45250 | 46250 | 47250 |
| 44251 | 45251 | 46251 | 47251 |
| 44252 | 45252 | 46252 | 47252 |
| 44253 | 45253 | 46253 | 47253 |
| 44254 | 45254 | 46254 | 47254 |
| 44255 | 45255 | 46255 | 47255 |
| 44256 | 45256 | 46256 | 47256 |
| 44257 | 45257 | 46257 | 47257 |
| 44258 | 45258 | 46258 | 47258 |
| 44259 | 45259 | 46259 | 47259 |
| 44260 | 45260 | 46260 | 47260 |
| 44261 | 45261 | 46261 | 47261 |
| 44262 | 45262 | 46262 | 47262 |
| 44263 | 45263 | 46263 | 47263 |
| 44264 | 45264 | 46264 | 47264 |
| 44265 | 45265 | 46265 | 47265 |
| 44266 | 45266 | 46266 | 47266 |
| 44267 | 45267 | 46267 | 47267 |
| 44268 | 45268 | 46268 | 47268 |
| 44269 | 45269 | 46269 | 47269 |
| 44270 | 45270 | 46270 | 47270 |
| 44271 | 45271 | 46271 | 47271 |
| 44272 | 45272 | 46272 | 47272 |
| 44273 | 45273 | 46273 | 47273 |
| 44274 | 45274 | 46274 | 47274 |
| 44275 | 45275 | 46275 | 47275 |
| 44276 | 45276 | 46276 | 47276 |
| 44277 | 45277 | 46277 | 47277 |
| 44278 | 45278 | 46278 | 47278 |
| 44279 | 45279 | 46279 | 47279 |
| 44280 | 45280 | 46280 | 47280 |
| 44281 | 45281 | 46281 | 47281 |
| 44282 | 45282 | 46282 | 47282 |
| 44283 | 45283 | 46283 | 47283 |
| 44284 | 45284 | 46284 | 47284 |
| 44285 | 45285 | 46285 | 47285 |
| 44286 | 45286 | 46286 | 47286 |
| 44287 | 45287 | 46287 | 47287 |
| 44288 | 45288 | 46288 | 47288 |
| 44289 | 45289 | 46289 | 47289 |
| 44290 | 45290 | 46290 | 47290 |
| 44291 | 45291 | 46291 | 47291 |
| 44292 | 45292 | 46292 | 47292 |
| 44293 | 45293 | 46293 | 47293 |
| 44294 | 45294 | 46294 | 47294 |
| 44295 | 45295 | 46295 | 47295 |
| 44296 | 45296 | 46296 | 47296 |
| 44297 | 45297 | 46297 | 47297 |
| 44298 | 45298 | 46298 | 47298 |
| 44299 | 45299 | 46299 | 47299 |
| 44300 | 45300 | 46300 | 47300 |
| 44301 | 45301 | 46301 | 47301 |
| 44302 | 45302 | 46302 | 47302 |
| 44303 | 45303 | 46303 | 47303 |
| 44304 | 45304 | 46304 | 47304 |
| 44305 | 45305 | 46305 | 47305 |
| 44306 | 45306 | 46306 | 47306 |
| 44307 | 45307 | 46307 | 47307 |
| 44308 | 45308 | 46308 | 47308 |
| 44309 | 45309 | 46309 | 47309 |
| 44310 | 45310 | 46310 | 47310 |
| 44311 | 45311 | 46311 | 47311 |
| 44312 | 45312 | 46312 | 47312 |
| 44313 | 45313 | 46313 | 47313 |
| 44314 | 45314 | 46314 | 47314 |
| 44315 | 45315 | 46315 | 47315 |
| 44316 | 45316 | 46316 | 47316 |
| 44317 | 45317 | 46317 | 47317 |
| 44318 | 45318 | 46318 | 47318 |
| 44319 | 45319 | 46319 | 47319 |
| 44320 | 45320 | 46320 | 47320 |
| 44321 | 45321 | 46321 | 47321 |
| 44322 | 45322 | 46322 | 47322 |
| 44323 | 45323 | 46323 | 47323 |
| 44324 | 45324 | 46324 | 47324 |
| 44325 | 45325 | 46325 | 47325 |
| 44326 | 45326 | 46326 | 47326 |
| 44327 | 45327 | 46327 | 47327 |
| 44328 | 45328 | 46328 | 47328 |
| 44329 | 45329 | 46329 | 47329 |
| 44330 | 45330 | 46330 | 47330 |
| 44331 | 45331 | 46331 | 47331 |
| 44332 | 45332 | 46332 | 47332 |
| 44333 | 45333 | 46333 | 47333 |
| 44334 | 45334 | 46334 | 47334 |
| 44335 | 45335 | 46335 | 47335 |
| 44336 | 45336 | 46336 | 47336 |
| 44337 | 45337 | 46337 | 47337 |
| 44338 | 45338 | 46338 | 47338 |
| 44339 | 45339 | 46339 | 47339 |
| 44340 | 45340 | 46340 | 47340 |
| 44341 | 45341 | 46341 | 47341 |
| 44342 | 45342 | 46342 | 47342 |
| 44343 | 45343 | 46343 | 47343 |
| 44344 | 45344 | 46344 | 47344 |
| 44345 | 45345 | 46345 | 47345 |
| 44346 | 45346 | 46346 | 47346 |
| 44347 | 45347 | 46347 | 47347 |
| 44348 | 45348 | 46348 | 47348 |
| 44349 | 45349 | 46349 | 47349 |
| 44350 | 45350 | 46350 | 47350 |
| 44351 | 45351 | 46351 | 47351 |
| 44352 | 45352 | 46352 | 47352 |
| 44353 | 45353 | 46353 | 47353 |
| 44354 | 45354 | 46354 | 47354 |
| 44355 | 45355 | 46355 | 47355 |
| 44356 | 45356 | 46356 | 47356 |
| 44357 | 45357 | 46357 | 47357 |
| 44358 | 45358 | 46358 | 47358 |
| 44359 | 45359 | 46359 | 47359 |
| 44360 | 45360 | 46360 | 47360 |
| 44361 | 45361 | 46361 | 47361 |
| 44362 | 45362 | 46362 | 47362 |
| 44363 | 45363 | 46363 | 47363 |
| 44364 | 45364 | 46364 | 47364 |
| 44365 | 45365 | 46365 | 47365 |
| 44366 | 45366 | 46366 | 47366 |
| 44367 | 45367 | 46367 | 47367 |
| 44368 | 45368 | 46368 | 47368 |
| 44369 | 45369 | 46369 | 47369 |
| 44370 | 45370 | 46370 | 47370 |
| 44371 | 45371 | 46371 | 47371 |
| 44372 | 45372 | 46372 | 47372 |
| 44373 | 45373 | 46373 | 47373 |
| 44374 | 45374 | 46374 | 47374 |
| 44375 | 45375 | 46375 | 47375 |
| 44376 | 45376 | 46376 | 47376 |
| 44377 | 45377 | 46377 | 47377 |
| 44378 | 45378 | 46378 | 47378 |
| 44379 | 45379 | 46379 | 47379 |
| 44380 | 45380 | 46380 | 47380 |
| 44381 | 45381 | 46381 | 47381 |
| 44382 | 45382 | 46382 | 47382 |
| 44383 | 45383 | 46383 | 47383 |
| 44384 | 45384 | 46384 | 47384 |
| 44385 | 45385 | 46385 | 47385 |
| 44386 | 45386 | 46386 | 47386 |
| 44387 | 45387 | 46387 | 47387 |
| 44388 | 45388 | 46388 | 47388 |
| 44389 | 45389 | 46389 | 47389 |
| 44390 | 45390 | 46390 | 47390 |
| 44391 | 45391 | 46391 | 47391 |
| 44392 | 45392 | 46392 | 47392 |
| 44393 | 45393 | 46393 | 47393 |
| 44394 | 45394 | 46394 | 47394 |
| 44395 | 45395 | 46395 | 47395 |
| 44396 | 45396 | 46396 | 47396 |
| 44397 | 45397 | 46397 | 47397 |
| 44398 | 45398 | 46398 | 47398 |
| 44399 | 45399 | 46399 | 47399 |
| 44400 | 45400 | 46400 | 47400 |
| 44401 | 45401 | 46401 | 47401 |
| 44402 | 45402 | 46402 | 47402 |
| 44403 | 45403 | 46403 | 47403 |
| 44404 | 45404 | 46404 | 47404 |
| 44405 | 45405 | 46405 | 47405 |
| 44406 | 45406 | 46406 | 47406 |
| 44407 | 45407 | 46407 | 47407 |
| 44408 | 45408 | 46408 | 47408 |
| 44409 | 45409 | 46409 | 47409 |
| 44410 | 45410 | 46410 | 47410 |
| 44411 | 45411 | 46411 | 47411 |
| 44412 | 45412 | 46412 | 47412 |
| 44413 | 45413 | 46413 | 47413 |
| 44414 | 45414 | 46414 | 47414 |
| 44415 | 45415 | 46415 | 47415 |
| 44416 | 45416 | 46416 | 47416 |
| 44417 | 45417 | 46417 | 47417 |
| 44418 | 45418 | 46418 | 47418 |
| 44419 | 45419 | 46419 | 47419 |
| 44420 | 45420 | 46420 | 47420 |
| 44421 | 45421 | 46421 | 47421 |
| 44422 | 45422 | 46422 | 47422 |
| 44423 | 45423 | 46423 | 47423 |
| 44424 | 45424 | 46424 | 47424 |
| 44425 | 45425 | 46425 | 47425 |
| 44426 | 45426 | 46426 | 47426 |
| 44427 | 45427 | 46427 | 47427 |
| 44428 | 45428 | 46428 | 47428 |
| 44429 | 45429 | 46429 | 47429 |
| 44430 | 45430 | 46430 | 47430 |
| 44431 | 45431 | 46431 | 47431 |
| 44432 | 45432 | 46432 | 47432 |
| 44433 | 45433 | 46433 | 47433 |
| 44434 | 45434 | 46434 | 47434 |
| 44435 | 45435 | 46435 | 47435 |
| 44436 | 45436 | 46436 | 47436 |
| 44437 | 45437 | 46437 | 47437 |
| 44438 | 45438 | 46438 | 47438 |
| 44439 | 45439 | 46439 | 47439 |
| 44440 | 45440 | 46440 | 47440 |
| 44441 | 45441 | 46441 | 47441 |
| 44442 | 45442 | 46442 | 47442 |
| 44443 | 45443 | 46443 | 47443 |
| 44444 | 45444 | 46444 | 47444 |
| 44445 | 45445 | 46445 | 47445 |
| 44446 | 45446 | 46446 | 47446 |
| 44447 | 45447 | 46447 | 47447 |
| 44448 | 45448 | 46448 | 47448 |
| 44449 | 45449 | 46449 | 47449 |
| 44450 | 45450 | 46450 | 47450 |
| 44451 | 45451 | 46451 | 47451 |
| 44452 | 45452 | 46452 | 47452 |
| 44453 | 45453 | 46453 | 47453 |
| 44454 | 45454 | 46454 | 47454 |
| 44455 | 45455 | 46455 | 47455 |
| 44456 | 45456 | 46456 | 47456 |
| 44457 | 45457 | 46457 | 47457 |
| 44458 | 45458 | 46458 | 47458 |
| 44459 | 45459 | 46459 | 47459 |
| 44460 | 45460 | 46460 | 47460 |
| 44461 | 45461 | 46461 | 47461 |
| 44462 | 45462 | 46462 | 47462 |
| 44463 | 45463 | 46463 | 47463 |
| 44464 | 45464 | 46464 | 47464 |
| 44465 | 45465 | 46465 | 47465 |
| 44466 | 45466 | 46466 | 47466 |
| 44467 | 45467 | 46467 | 47467 |
| 44468 | 45468 | 46468 | 47468 |
| 44469 | 45469 | 46469 | 47469 |
| 44470 | 45470 | 46470 | 47470 |
| 44471 | 45471 | 46471 | 47471 |
| 44472 | 45472 | 46472 | 47472 |
| 44473 | 45473 | 46473 | 47473 |
| 44474 | 45474 | 46474 | 47474 |
| 44475 | 45475 | 46475 | 47475 |
| 44476 | 45476 | 46476 | 47476 |
| 44477 | 45477 | 46477 | 47477 |
| 44478 | 45478 | 46478 | 47478 |
| 44479 | 45479 | 46479 | 47479 |
| 44480 | 45480 | 46480 | 47480 |
| 44481 | 45481 | 46481 | 47481 |
| 44482 | 45482 | 46482 | 47482 |
| 44483 | 45483 | 46483 | 47483 |
| 44484 | 45484 | 46484 | 47484 |
| 44485 | 45485 | 46485 | 47485 |
| 44486 | 45486 | 46486 | 47486 |
| 44487 | 45487 | 46487 | 47487 |
| 44488 | 45488 | 46488 | 47488 |
| 44489 | 45489 | 46489 | 47489 |
| 44490 | 45490 | 46490 | 47490 |
| 44491 | 45491 | 46491 | 47491 |
| 44492 | 45492 | 46492 | 47492 |
| 44493 | 45493 | 46493 | 47493 |
| 44494 | 45494 | 46494 | 47494 |
| 44495 | 45495 | 46495 | 47495 |
| 44496 | 45496 | 46496 | 47496 |
| 44497 | 45497 | 46497 | 47497 |
| 44498 | 45498 | 46498 | 47498 |
| 44499 | 45499 | 46499 | 47499 |
| 44500 | 45500 | 46500 | 47500 |
| 44501 | 45501 | 46501 | 47501 |
| 44502 | 45502 | 46502 | 47502 |
| 44503 | 45503 | 46503 | 47503 |
| 44504 | 45504 | 46504 | 47504 |
| 44505 | 45505 | 46505 | 47505 |
| 44506 | 45506 | 46506 | 47506 |
| 44507 | 45507 | 46507 | 47507 |
| 44508 | 45508 | 46508 | 47508 |
| 44509 | 45509 | 46509 | 47509 |
| 44510 | 45510 | 46510 | 47510 |
| 44511 | 45511 | 46511 | 47511 |
| 44512 | 45512 | 46512 | 47512 |
| 44513 | 45513 | 46513 | 47513 |
| 44514 | 45514 | 46514 | 47514 |
| 44515 | 45515 | 46515 | 47515 |
| 44516 | 45516 | 46516 | 47516 |
| 44517 | 45517 | 46517 | 47517 |
| 44518 | 45518 | 46518 | 47518 |
| 44519 | 45519 | 46519 | 47519 |
| 44520 | 45520 | 46520 | 47520 |
| 44521 | 45521 | 46521 | 47521 |
| 44522 | 45522 | 46522 | 47522 |
| 44523 | 45523 | 46523 | 47523 |
| 44524 | 45524 | 46524 | 47524 |
| 44525 | 45525 | 46525 | 47525 |
| 44526 | 45526 | 46526 | 47526 |
| 44527 | 45527 | 46527 | 47527 |
| 44528 | 45528 | 46528 | 47528 |
| 44529 | 45529 | 46529 | 47529 |
| 44530 | 45530 | 46530 | 47530 |
| 44531 | 45531 | 46531 | 47531 |
| 44532 | 45532 | 46532 | 47532 |
| 44533 | 45533 | 46533 | 47533 |
| 44534 | 45534 | 46534 | 47534 |
| 44535 | 45535 | 46535 | 47535 |
| 44536 | 45536 | 46536 | 47536 |
| 44537 | 45537 | 46537 | 47537 |
| 44538 | 45538 | 46538 | 47538 |
| 44539 | 45539 | 46539 | 47539 |
| 44540 | 45540 | 46540 | 47540 |
| 44541 | 45541 | 46541 | 47541 |
| 44542 | 45542 | 46542 | 47542 |
| 44543 | 45543 | 46543 | 47543 |
| 44544 | 45544 | 46544 | 47544 |
| 44545 | 45545 | 46545 | 47545 |
| 44546 | 45546 | 46546 | 47546 |
| 44547 | 45547 | 46547 | 47547 |
| 44548 | 45548 | 46548 | 47548 |
| 44549 | 45549 | 46549 | 47549 |
| 44550 | 45550 | 46550 | 47550 |
| 44551 | 45551 | 46551 | 47551 |
| 44552 | 45552 | 46552 | 47552 |
| 44553 | 45553 | 46553 | 47553 |
| 44554 | 45554 | 46554 | 47554 |
| 44555 | 45555 | 46555 | 47555 |
| 44556 | 45556 | 46556 | 47556 |
| 44557 | 45557 | 46557 | 47557 |
| 44558 | 45558 | 46558 | 47558 |
| 44559 | 45559 | 46559 | 47559 |
| 44560 | 45560 | 46560 | 47560 |
| 44561 | 45561 | 46561 | 47561 |
| 44562 | 45562 | 46562 | 47562 |
| 44563 | 45563 | 46563 | 47563 |
| 44564 | 45564 | 46564 | 47564 |
| 44565 | 45565 | 46565 | 47565 |
| 44566 | 45566 | 46566 | 47566 |
| 44567 | 45567 | 46567 | 47567 |
| 44568 | 45568 | 46568 | 47568 |
| 44569 | 45569 | 46569 | 47569 |
| 44570 | 45570 | 46570 | 47570 |
| 44571 | 45571 | 46571 | 47571 |
| 44572 | 45572 | 46572 | 47572 |
| 44573 | 45573 | 46573 | 47573 |
| 44574 | 45574 | 46574 | 47574 |
| 44575 | 45575 | 46575 | 47575 |
| 44576 | 45576 | 46576 | 47576 |
| 44577 | 45577 | 46577 | 47577 |
| 44578 | 45578 | 46578 | 47578 |
| 44579 | 45579 | 46579 | 47579 |
| 44580 | 45580 | 46580 | 47580 |
| 44581 | 45581 | 46581 | 47581 |
| 44582 | 45582 | 46582 | 47582 |
| 44583 | 45583 | 46583 | 47583 |
| 44584 | 45584 | 46584 | 47584 |
| 44585 | 45585 | 46585 | 47585 |
| 44586 | 45586 | 46586 | 47586 |
| 44587 | 45587 | 46587 | 47587 |
| 44588 | 45588 | 46588 | 47588 |
| 44589 | 45589 | 46589 | 47589 |
| 44590 | 45590 | 46590 | 47590 |
| 44591 | 45591 | 46591 | 47591 |
| 44592 | 45592 | 46592 | 47592 |
| 44593 | 45593 | 46593 | 47593 |
| 44594 | 45594 | 46594 | 47594 |
| 44595 | 45595 | 46595 | 47595 |
| 44596 | 45596 | 46596 | 47596 |
| 44597 | 45597 | 46597 | 47597 |
| 44598 | 45598 | 46598 | 47598 |
| 44599 | 45599 | 46599 | 47599 |
| 44600 | 45600 | 46600 | 47600 |
| 44601 | 45601 | 46601 | 47601 |
| 44602 | 45602 | 46602 | 47602 |
| 44603 | 45603 | 46603 | 47603 |
| 44604 | 45604 | 46604 | 47604 |
| 44605 | 45605 | 46605 | 47605 |
| 44606 | 45606 | 46606 | 47606 |
| 44607 | 45607 | 46607 | 47607 |
| 44608 | 45608 | 46608 | 47608 |
| 44609 | 45609 | 46609 | 47609 |
| 44610 | 45610 | 46610 | 47610 |
| 44611 | 45611 | 46611 | 47611 |
| 44612 | 45612 | 46612 | 47612 |
| 44613 | 45613 | 46613 | 47613 |
| 44614 | 45614 | 46614 | 47614 |
| 44615 | 45615 | 46615 | 47615 |
| 44616 | 45616 | 46616 | 47616 |
| 44617 | 45617 | 46617 | 47617 |
| 44618 | 45618 | 46618 | 47618 |
| 44619 | 45619 | 46619 | 47619 |
| 44620 | 45620 | 46620 | 47620 |
| 44621 | 45621 | 46621 | 47621 |
| 44622 | 45622 | 46622 | 47622 |
| 44623 | 45623 | 46623 | 47623 |
| 44624 | 45624 | 46624 | 47624 |
| 44625 | 45625 | 46625 | 47625 |
| 44626 | 45626 | 46626 | 47626 |
| 44627 | 45627 | 46627 | 47627 |
| 44628 | 45628 | 46628 | 47628 |
| 44629 | 45629 | 46629 | 47629 |
| 44630 | 45630 | 46630 | 47630 |
| 44631 | 45631 | 46631 | 47631 |
| 44632 | 45632 | 46632 | 47632 |
| 44633 | 45633 | 46633 | 47633 |
| 44634 | 45634 | 46634 | 47634 |
| 44635 | 45635 | 46635 | 47635 |
| 44636 | 45636 | 46636 | 47636 |
| 44637 | 45637 | 46637 | 47637 |
| 44638 | 45638 | 46638 | 47638 |
| 44639 | 45639 | 46639 | 47639 |
| 44640 | 45640 | 46640 | 47640 |
| 44641 | 45641 | 46641 | 47641 |
| 44642 | 45642 | 46642 | 47642 |
| 44643 | 45643 | 46643 | 47643 |
| 44644 | 45644 | 46644 | 47644 |
| 44645 | 45645 | 46645 | 47645 |
| 44646 | 45646 | 46646 | 47646 |
| 44647 | 45647 | 46647 | 47647 |
| 44648 | 45648 | 46648 | 47648 |
| 44649 | 45649 | 46649 | 47649 |
| 44650 | 45650 | 46650 | 47650 |
| 44651 | 45651 | 46651 | 47651 |
| 44652 | 45652 | 46652 | 47652 |
| 44653 | 45653 | 46653 | 47653 |
| 44654 | 45654 | 46654 | 47654 |
| 44655 | 45655 | 46655 | 47655 |
| 44656 | 45656 | 46656 | 47656 |
| 44657 | 45657 | 46657 | 47657 |
| 44658 | 45658 | 46658 | 47658 |
| 44659 | 45659 | 46659 | 47659 |
| 44660 | 45660 | 46660 | 47660 |
| 44661 | 45661 | 46661 | 47661 |
| 44662 | 45662 | 46662 | 47662 |
| 44663 | 45663 | 46663 | 47663 |
| 44664 | 45664 | 46664 | 47664 |
| 44665 | 45665 | 46665 | 47665 |
| 44666 | 45666 | 46666 | 47666 |
| 44667 | 45667 | 46667 | 47667 |
| 44668 | 45668 | 46668 | 47668 |
| 44669 | 45669 | 46669 | 47669 |
| 44670 | 45670 | 46670 | 47670 |
| 44671 | 45671 | 46671 | 47671 |
| 44672 | 45672 | 46672 | 47672 |
| 44673 | 45673 | 46673 | 47673 |
| 44674 | 45674 | 46674 | 47674 |
| 44675 | 45675 | 46675 | 47675 |
| 44676 | 45676 | 46676 | 47676 |
| 44677 | 45677 | 46677 | 47677 |
| 44678 | 45678 | 46678 | 47678 |
| 44679 | 45679 | 46679 | 47679 |
| 44680 | 45680 | 46680 | 47680 |
| 44681 | 45681 | 46681 | 47681 |
| 44682 | 45682 | 46682 | 47682 |
| 44683 | 45683 | 46683 | 47683 |
| 44684 | 45684 | 46684 | 47684 |
| 44685 | 45685 | 46685 | 47685 |
| 44686 | 45686 | 46686 | 47686 |
| 44687 | 45687 | 46687 | 47687 |
| 44688 | 45688 | 46688 | 47688 |
| 44689 | 45689 | 46689 | 47689 |
| 44690 | 45690 | 46690 | 47690 |
| 44691 | 45691 | 46691 | 47691 |
| 44692 | 45692 | 46692 | 47692 |
| 44693 | 45693 | 46693 | 47693 |
| 44694 | 45694 | 46694 | 47694 |
| 44695 | 45695 | 46695 | 47695 |
| 44696 | 45696 | 46696 | 47696 |
| 44697 | 45697 | 46697 | 47697 |
| 44698 | 45698 | 46698 | 47698 |
| 44699 | 45699 | 46699 | 47699 |
| 44700 | 45700 | 46700 | 47700 |
| 44701 | 45701 | 46701 | 47701 |
| 44702 | 45702 | 46702 | 47702 |
| 44703 | 45703 | 46703 | 47703 |
| 44704 | 45704 | 46704 | 47704 |
| 44705 | 45705 | 46705 | 47705 |
| 44706 | 45706 | 46706 | 47706 |
| 44707 | 45707 | 46707 | 47707 |
| 44708 | 45708 | 46708 | 47708 |
| 44709 | 45709 | 46709 | 47709 |
| 44710 | 45710 | 46710 | 47710 |
| 44711 | 45711 | 46711 | 47711 |
| 44712 | 45712 | 46712 | 47712 |
| 44713 | 45713 | 46713 | 47713 |
| 44714 | 45714 | 46714 | 47714 |
| 44715 | 45715 | 46715 | 47715 |
| 44716 | 45716 | 46716 | 47716 |
| 44717 | 45717 | 46717 | 47717 |
| 44718 | 45718 | 46718 | 47718 |
| 44719 | 45719 | 46719 | 47719 |
| 44720 | 45720 | 46720 | 47720 |
| 44721 | 45721 | 46721 | 47721 |
| 44722 | 45722 | 46722 | 47722 |
| 44723 | 45723 | 46723 | 47723 |
| 44724 | 45724 | 46724 | 47724 |
| 44725 | 45725 | 46725 | 47725 |
| 44726 | 45726 | 46726 | 47726 |
| 44727 | 45727 | 46727 | 47727 |
| 44728 | 45728 | 46728 | 47728 |
| 44729 | 45729 | 46729 | 47729 |
| 44730 | 45730 | 46730 | 47730 |
| 44731 | 45731 | 46731 | 47731 |
| 44732 | 45732 | 46732 | 47732 |
| 44733 | 45733 | 46733 | 47733 |
| 44734 | 45734 | 46734 | 47734 |
| 44735 | 45735 | 46735 | 47735 |
| 44736 | 45736 | 46736 | 47736 |
| 44737 | 45737 | 46737 | 47737 |
| 44738 | 45738 | 46738 | 47738 |
| 44739 | 45739 | 46739 | 47739 |
| 44740 | 45740 | 46740 | 47740 |
| 44741 | 45741 | 46741 | 47741 |
| 44742 | 45742 | 46742 | 47742 |
| 44743 | 45743 | 46743 | 47743 |
| 44744 | 45744 | 46744 | 47744 |
| 44745 | 45745 | 46745 | 47745 |
| 44746 | 45746 | 46746 | 47746 |
| 44747 | 45747 | 46747 | 47747 |
| 44748 | 45748 | 46748 | 47748 |
| 44749 | 45749 | 46749 | 47749 |
| 44750 | 45750 | 46750 | 47750 |
| 44751 | 45751 | 46751 | 47751 |
| 44752 | 45752 | 46752 | 47752 |
| 44753 | 45753 | 46753 | 47753 |
| 44754 | 45754 | 46754 | 47754 |
| 44755 | 45755 | 46755 | 47755 |
| 44756 | 45756 | 46756 | 47756 |
| 44757 | 45757 | 46757 | 47757 |
| 44758 | 45758 | 46758 | 47758 |
| 44759 | 45759 | 46759 | 47759 |
| 44760 | 45760 | 46760 | 47760 |
| 44761 | 45761 | 46761 | 47761 |
| 44762 | 45762 | 46762 | 47762 |
| 44763 | 45763 | 46763 | 47763 |
| 44764 | 45764 | 46764 | 47764 |
| 44765 | 45765 | 46765 | 47765 |
| 44766 | 45766 | 46766 | 47766 |
| 44767 | 45767 | 46767 | 47767 |
| 44768 | 45768 | 46768 | 47768 |
| 44769 | 45769 | 46769 | 47769 |
| 44770 | 45770 | 46770 | 47770 |
| 44771 | 45771 | 46771 | 47771 |
| 44772 | 45772 | 46772 | 47772 |
| 44773 | 45773 | 46773 | 47773 |
| 44774 | 45774 | 46774 | 47774 |
| 44775 | 45775 | 46775 | 47775 |
| 44776 | 45776 | 46776 | 47776 |
| 44777 | 45777 | 46777 | 47777 |
| 44778 | 45778 | 46778 | 47778 |
| 44779 | 45779 | 46779 | 47779 |
| 44780 | 45780 | 46780 | 47780 |
| 44781 | 45781 | 46781 | 47781 |
| 44782 | 45782 | 46782 | 47782 |
| 44783 | 45783 | 46783 | 47783 |
| 44784 | 45784 | 46784 | 47784 |
| 44785 | 45785 | 46785 | 47785 |
| 44786 | 45786 | 46786 | 47786 |
| 44787 | 45787 | 46787 | 47787 |
| 44788 | 45788 | 46788 | 47788 |
| 44789 | 45789 | 46789 | 47789 |
| 44790 | 45790 | 46790 | 47790 |
| 44791 | 45791 | 46791 | 47791 |
| 44792 | 45792 | 46792 | 47792 |
| 44793 | 45793 | 46793 | 47793 |
| 44794 | 45794 | 46794 | 47794 |
| 44795 | 45795 | 46795 | 47795 |
| 44796 | 45796 | 46796 | 47796 |
| 44797 | 45797 | 46797 | 47797 |
| 44798 | 45798 | 46798 | 47798 |
| 44799 | 45799 | 46799 | 47799 |
| 44800 | 45800 | 46800 | 47800 |
| 44801 | 45801 | 46801 | 47801 |
| 44802 | 45802 | 46802 | 47802 |
| 44803 | 45803 | 46803 | 47803 |
| 44804 | 45804 | 46804 | 47804 |
| 44805 | 45805 | 46805 | 47805 |
| 44806 | 45806 | 46806 | 47806 |
| 44807 | 45807 | 46807 | 47807 |
| 44808 | 45808 | 46808 | 47808 |
| 44809 | 45809 | 46809 | 47809 |
| 44810 | 45810 | 46810 | 47810 |
| 44811 | 45811 | 46811 | 47811 |
| 44812 | 45812 | 46812 | 47812 |
| 44813 | 45813 | 46813 | 47813 |
| 44814 | 45814 | 46814 | 47814 |
| 44815 | 45815 | 46815 | 47815 |
| 44816 | 45816 | 46816 | 47816 |
| 44817 | 45817 | 46817 | 47817 |
| 44818 | 45818 | 46818 | 47818 |
| 44819 | 45819 | 46819 | 47819 |
| 44820 | 45820 | 46820 | 47820 |
| 44821 | 45821 | 46821 | 47821 |
| 44822 | 45822 | 46822 | 47822 |
| 44823 | 45823 | 46823 | 47823 |
| 44824 | 45824 | 46824 | 47824 |
| 44825 | 45825 | 46825 | 47825 |
| 44826 | 45826 | 46826 | 47826 |
| 44827 | 45827 | 46827 | 47827 |
| 44828 | 45828 | 46828 | 47828 |
| 44829 | 45829 | 46829 | 47829 |
| 44830 | 45830 | 46830 | 47830 |
| 44831 | 45831 | 46831 | 47831 |
| 44832 | 45832 | 46832 | 47832 |
| 44833 | 45833 | 46833 | 47833 |
| 44834 | 45834 | 46834 | 47834 |
| 44835 | 45835 | 46835 | 47835 |
| 44836 | 45836 | 46836 | 47836 |
| 44837 | 45837 | 46837 | 47837 |
| 44838 | 45838 | 46838 | 47838 |
| 44839 | 45839 | 46839 | 47839 |
| 44840 | 45840 | 46840 | 47840 |
| 44841 | 45841 | 46841 | 47841 |
| 44842 | 45842 | 46842 | 47842 |
| 44843 | 45843 | 46843 | 47843 |
| 44844 | 45844 | 46844 | 47844 |
| 44845 | 45845 | 46845 | 47845 |
| 44846 | 45846 | 46846 | 47846 |
| 44847 | 45847 | 46847 | 47847 |
| 44848 | 45848 | 46848 | 47848 |
| 44849 | 45849 | 46849 | 47849 |
| 44850 | 45850 | 46850 | 47850 |
| 44851 | 45851 | 46851 | 47851 |
| 44852 | 45852 | 46852 | 47852 |
| 44853 | 45853 | 46853 | 47853 |
| 44854 | 45854 | 46854 | 47854 |
| 44855 | 45855 | 46855 | 47855 |
| 44856 | 45856 | 46856 | 47856 |
| 44857 | 45857 | 46857 | 47857 |
| 44858 | 45858 | 46858 | 47858 |
| 44859 | 45859 | 46859 | 47859 |
| 44860 | 45860 | 46860 | 47860 |
| 44861 | 45861 | 46861 | 47861 |
| 44862 | 45862 | 46862 | 47862 |
| 44863 | 45863 | 46863 | 47863 |
| 44864 | 45864 | 46864 | 47864 |
| 44865 | 45865 | 46865 | 47865 |
| 44866 | 45866 | 46866 | 47866 |
| 44867 | 45867 | 46867 | 47867 |
| 44868 | 45868 | 46868 | 47868 |
| 44869 | 45869 | 46869 | 47869 |
| 44870 | 45870 | 46870 | 47870 |
| 44871 | 45871 | 46871 | 47871 |
| 44872 | 45872 | 46872 | 47872 |
| 44873 | 45873 | 46873 | 47873 |
| 44874 | 45874 | 46874 | 47874 |
| 44875 | 45875 | 46875 | 47875 |
| 44876 | 45876 | 46876 | 47876 |
| 44877 | 45877 | 46877 | 47877 |
| 44878 | 45878 | 46878 | 47878 |
| 44879 | 45879 | 46879 | 47879 |
| 44880 | 45880 | 46880 | 47880 |
| 44881 | 45881 | 46881 | 47881 |
| 44882 | 45882 | 46882 | 47882 |
| 44883 | 45883 | 46883 | 47883 |
| 44884 | 45884 | 46884 | 47884 |
| 44885 | 45885 | 46885 | 47885 |
| 44886 | 45886 | 46886 | 47886 |
| 44887 | 45887 | 46887 | 47887 |
| 44888 | 45888 | 46888 | 47888 |
| 44889 | 45889 | 46889 | 47889 |
| 44890 | 45890 | 46890 | 47890 |
| 44891 | 45891 | 46891 | 47891 |
| 44892 | 45892 | 46892 | 47892 |
| 44893 | 45893 | 46893 | 47893 |
| 44894 | 45894 | 46894 | 47894 |
| 44895 | 45895 | 46895 | 47895 |
| 44896 | 45896 | 46896 | 47896 |
| 44897 | 45897 | 46897 | 47897 |
| 44898 | 45898 | 46898 | 47898 |
| 44899 | 45899 | 46899 | 47899 |
| 44900 | 45900 | 46900 | 47900 |
| 44901 | 45901 | 46901 | 47901 |
| 44902 | 45902 | 46902 | 47902 |
| 44903 | 45903 | 46903 | 47903 |
| 44904 | 45904 | 46904 | 47904 |
| 44905 | 45905 | 46905 | 47905 |
| 44906 | 45906 | 46906 | 47906 |
| 44907 | 45907 | 46907 | 47907 |
| 44908 | 45908 | 46908 | 47908 |
| 44909 | 45909 | 46909 | 47909 |
| 44910 | 45910 | 46910 | 47910 |
| 44911 | 45911 | 46911 | 47911 |
| 44912 | 45912 | 46912 | 47912 |
| 44913 | 45913 | 46913 | 47913 |
| 44914 | 45914 | 46914 | 47914 |
| 44915 | 45915 | 46915 | 47915 |
| 44916 | 45916 | 46916 | 47916 |
| 44917 | 45917 | 46917 | 47917 |
| 44918 | 45918 | 46918 | 47918 |
| 44919 | 45919 | 46919 | 47919 |
| 44920 | 45920 | 46920 | 47920 |
| 44921 | 45921 | 46921 | 47921 |
| 44922 | 45922 | 46922 | 47922 |
| 44923 | 45923 | 46923 | 47923 |
| 44924 | 45924 | 46924 | 47924 |
| 44925 | 45925 | 46925 | 47925 |
| 44926 | 45926 | 46926 | 47926 |
| 44927 | 45927 | 46927 | 47927 |
| 44928 | 45928 | 46928 | 47928 |
| 44929 | 45929 | 46929 | 47929 |
| 44930 | 45930 | 46930 | 47930 |
| 44931 | 45931 | 46931 | 47931 |
| 44932 | 45932 | 46932 | 47932 |
| 44933 | 45933 | 46933 | 47933 |
| 44934 | 45934 | 46934 | 47934 |
| 44935 | 45935 | 46935 | 47935 |
| 44936 | 45936 | 46936 | 47936 |
| 44937 | 45937 | 46937 | 47937 |
| 44938 | 45938 | 46938 | 47938 |
| 44939 | 45939 | 46939 | 47939 |
| 44940 | 45940 | 46940 | 47940 |
| 44941 | 45941 | 46941 | 47941 |
| 44942 | 45942 | 46942 | 47942 |
| 44943 | 45943 | 46943 | 47943 |
| 44944 | 45944 | 46944 | 47944 |
| 44945 | 45945 | 46945 | 47945 |
| 44946 | 45946 | 46946 | 47946 |
| 44947 | 45947 | 46947 | 47947 |
| 44948 | 45948 | 46948 | 47948 |
| 44949 | 45949 | 46949 | 47949 |
| 44950 | 45950 | 46950 | 47950 |
| 44951 | 45951 | 46951 | 47951 |
| 44952 | 45952 | 46952 | 47952 |
| 44953 | 45953 | 46953 | 47953 |
| 44954 | 45954 | 46954 | 47954 |
| 44955 | 45955 | 46955 | 47955 |
| 44956 | 45956 | 46956 | 47956 |
| 44957 | 45957 | 46957 | 47957 |
| 44958 | 45958 | 46958 | 47958 |
| 44959 | 45959 | 46959 | 47959 |
| 44960 | 45960 | 46960 | 47960 |
| 44961 | 45961 | 46961 | 47961 |
| 44962 | 45962 | 46962 | 47962 |
| 44963 | 45963 | 46963 | 47963 |
| 44964 | 45964 | 46964 | 47964 |
| 44965 | 45965 | 46965 | 47965 |
| 44966 | 45966 | 46966 | 47966 |
| 44967 | 45967 | 46967 | 47967 |
| 44968 | 45968 | 46968 | 47968 |
| 44969 | 45969 | 46969 | 47969 |
| 44970 | 45970 | 46970 | 47970 |
| 44971 | 45971 | 46971 | 47971 |
| 44972 | 45972 | 46972 | 47972 |
| 44973 | 45973 | 46973 | 47973 |
| 44974 | 45974 | 46974 | 47974 |
| 44975 | 45975 | 46975 | 47975 |
| 44976 | 45976 | 46976 | 47976 |
| 44977 | 45977 | 46977 | 47977 |
| 44978 | 45978 | 46978 | 47978 |
| 44979 | 45979 | 46979 | 47979 |
| 44980 | 45980 | 46980 | 47980 |
| 44981 | 45981 | 46981 | 47981 |
| 44982 | 45982 | 46982 | 47982 |
| 44983 | 45983 | 46983 | 47983 |
| 44984 | 45984 | 46984 | 47984 |
| 44985 | 45985 | 46985 | 47985 |
| 44986 | 45986 | 46986 | 47986 |
| 44987 | 45987 | 46987 | 47987 |
| 44988 | 45988 | 46988 | 47988 |
| 44989 | 45989 | 46989 | 47989 |
| 44990 | 45990 | 46990 | 47990 |
| 44991 | 45991 | 46991 | 47991 |
| 44992 | 45992 | 46992 | 47992 |
| 44993 | 45993 | 46993 | 47993 |
| 44994 | 45994 | 46994 | 47994 |
| 44995 | 45995 | 46995 | 47995 |
| 44996 | 45996 | 46996 | 47996 |
| 44997 | 45997 | 46997 | 47997 |
| 44998 | 45998 | 46998 | 47998 |
| 44999 | 45999 | 46999 | 47999 |
| 45000 | 46000 | 47000 | 48000 |
| 45001 | 46001 | 47001 | 48001 |
| 45002 | 46002 | 47002 | 48002 |

[0139] In some embodiments, the sequences that specifically bind to casein comprise an inner sequence selected from the group consisting of the nucleic acid sequences of SEQ ID NOs. 48003 to 49002. In some examples, a short nucleic acid sequence may be affixed to the 5-end of the inner sequence. The short nucleic acid sequence may be the 5′ primer sequence used in the random ssDNA library, i.e. the nucleic acid sequence of SEQ ID NO. 1. Accordingly, the aptamer that specifically binds to casein may comprise a nucleic acid sequence selected from the group consisting of SEQ ID NOs. 49003 to 50002. In other examples, a short nucleic acid sequence may be affixed to the 3-end of the inner sequence. The short nucleic acid sequence may be the 3′ primer sequence used in the random ssDNA library, i.e. the nucleic acid sequence of SEQ ID NO. 2. Accordingly, the aptamer that specifically binds to casein may comprise a nucleic acid sequence selected from the group consisting of SEQ ID NOs. 50003 to 51002. In other examples, the inner sequence may comprise a 5′ end short sequence (i.e., SEQ ID NO. 1) and a 3′ end short sequence (i.e., SEQ ID NO. 2). Accordingly, the aptamer that specifically binds to casein may comprise a nucleic acid sequence selected from the group consisting of SEQ ID NOs. 51003 to 52002. In one embodiment, the aptamer of the present disclosure that specifically binds to casein may comprise a nucleic acid sequence selected from the group consisting of SEQ ID NOs. 48003 to 52002 listed in Table 14, or variant thereof.

TABLE 14
Aptamer sequences against casein
Aptamer sequence

| | | | 5′-sequence |
|---|---|---|---|
| | 5′-sequence | Inner | and inner |
| Inner | and inner | sequence and | sequence and |
| sequence | sequence | 3′-sequence | 3′-sequence |
| (SEQ ID NO.) | (SEQ ID NO.) | (SEQ ID NO.) | (SEQ ID NO.) |
| 48003 | 49003 | 50003 | 51003 |
| 48004 | 49004 | 50004 | 51004 |
| 48005 | 49005 | 50005 | 51005 |
| 48006 | 49006 | 50006 | 51006 |
| 48007 | 49007 | 50007 | 51007 |
| 48008 | 49008 | 50008 | 51008 |
| 48009 | 49009 | 50009 | 51009 |
| 48010 | 49010 | 50010 | 51010 |
| 48011 | 49011 | 50011 | 51011 |
| 48012 | 49012 | 50012 | 51012 |
| 48013 | 49013 | 50013 | 51013 |
| 48014 | 49014 | 50014 | 51014 |
| 48015 | 49015 | 50015 | 51015 |
| 48016 | 49016 | 50016 | 51016 |
| 48017 | 49017 | 50017 | 51017 |
| 48018 | 49018 | 50018 | 51018 |
| 48019 | 49019 | 50019 | 51019 |
| 48020 | 49020 | 50020 | 51020 |
| 48021 | 49021 | 50021 | 51021 |
| 48022 | 49022 | 50022 | 51022 |
| 48023 | 49023 | 50023 | 51023 |
| 48024 | 49024 | 50024 | 51024 |
| 48025 | 49025 | 50025 | 51025 |
| 48026 | 49026 | 50026 | 51026 |
| 48027 | 49027 | 50027 | 51027 |
| 48028 | 49028 | 50028 | 51028 |
| 48029 | 49029 | 50029 | 51029 |
| 48030 | 49030 | 50030 | 51030 |
| 48031 | 49031 | 50031 | 51031 |
| 48032 | 49032 | 50032 | 51032 |
| 48033 | 49033 | 50033 | 51033 |
| 48034 | 49034 | 50034 | 51034 |
| 48035 | 49035 | 50035 | 51035 |
| 48036 | 49036 | 50036 | 51036 |
| 48037 | 49037 | 50037 | 51037 |
| 48038 | 49038 | 50038 | 51038 |
| 48039 | 49039 | 50039 | 51039 |
| 48040 | 49040 | 50040 | 51040 |
| 48041 | 49041 | 50041 | 51041 |
| 48042 | 49042 | 50042 | 51042 |
| 48043 | 49043 | 50043 | 51043 |
| 48044 | 49044 | 50044 | 51044 |
| 48045 | 49045 | 50045 | 51045 |
| 48046 | 49046 | 50046 | 51046 |
| 48047 | 49047 | 50047 | 51047 |
| 48048 | 49048 | 50048 | 51048 |
| 48049 | 49049 | 50049 | 51049 |
| 48050 | 49050 | 50050 | 51050 |
| 48051 | 49051 | 50051 | 51051 |
| 48052 | 49052 | 50052 | 51052 |
| 48053 | 49053 | 50053 | 51053 |
| 48054 | 49054 | 50054 | 51054 |
| 48055 | 49055 | 50055 | 51055 |
| 48056 | 49056 | 50056 | 51056 |
| 48057 | 49057 | 50057 | 51057 |
| 48058 | 49058 | 50058 | 51058 |
| 48059 | 49059 | 50059 | 51059 |
| 48060 | 49060 | 50060 | 51060 |
| 48061 | 49061 | 50061 | 51061 |
| 48062 | 49062 | 50062 | 51062 |
| 48063 | 49063 | 50063 | 51063 |
| 48064 | 49064 | 50064 | 51064 |
| 48065 | 49065 | 50065 | 51065 |
| 48066 | 49066 | 50066 | 51066 |
| 48067 | 49067 | 50067 | 51067 |
| 48068 | 49068 | 50068 | 51068 |
| 48069 | 49069 | 50069 | 51069 |
| 48070 | 49070 | 50070 | 51070 |
| 48071 | 49071 | 50071 | 51071 |
| 48072 | 49072 | 50072 | 51072 |
| 48073 | 49073 | 50073 | 51073 |
| 48074 | 49074 | 50074 | 51074 |
| 48075 | 49075 | 50075 | 51075 |
| 48076 | 49076 | 50076 | 51076 |
| 48077 | 49077 | 50077 | 51077 |
| 48078 | 49078 | 50078 | 51078 |
| 48079 | 49079 | 50079 | 51079 |
| 48080 | 49080 | 50080 | 51080 |
| 48081 | 49081 | 50081 | 51081 |
| 48082 | 49082 | 50082 | 51082 |
| 48083 | 49083 | 50083 | 51083 |
| 48084 | 49084 | 50084 | 51084 |
| 48085 | 49085 | 50085 | 51085 |
| 48086 | 49086 | 50086 | 51086 |
| 48087 | 49087 | 50087 | 51087 |
| 48088 | 49088 | 50088 | 51088 |
| 48089 | 49089 | 50089 | 51089 |
| 48090 | 49090 | 50090 | 51090 |
| 48091 | 49091 | 50091 | 51091 |
| 48092 | 49092 | 50092 | 51092 |
| 48093 | 49093 | 50093 | 51093 |
| 48094 | 49094 | 50094 | 51094 |
| 48095 | 49095 | 50095 | 51095 |
| 48096 | 49096 | 50096 | 51096 |
| 48097 | 49097 | 50097 | 51097 |
| 48098 | 49098 | 50098 | 51098 |
| 48099 | 49099 | 50099 | 51099 |
| 48100 | 49100 | 50100 | 51100 |
| 48101 | 49101 | 50101 | 51101 |
| 48102 | 49102 | 50102 | 51102 |
| 48103 | 49103 | 50103 | 51103 |
| 48104 | 49104 | 50104 | 51104 |
| 48105 | 49105 | 50105 | 51105 |
| 48106 | 49106 | 50106 | 51106 |
| 48107 | 49107 | 50107 | 51107 |
| 48108 | 49108 | 50108 | 51108 |
| 48109 | 49109 | 50109 | 51109 |
| 48110 | 49110 | 50110 | 51110 |
| 48111 | 49111 | 50111 | 51111 |
| 48112 | 49112 | 50112 | 51112 |
| 48113 | 49113 | 50113 | 51113 |
| 48114 | 49114 | 50114 | 51114 |
| 48115 | 49115 | 50115 | 51115 |
| 48116 | 49116 | 50116 | 51116 |
| 48117 | 49117 | 50117 | 51117 |
| 48118 | 49118 | 50118 | 51118 |
| 48119 | 49119 | 50119 | 51119 |
| 48120 | 49120 | 50120 | 51120 |
| 48121 | 49121 | 50121 | 51121 |
| 48122 | 49122 | 50122 | 51122 |
| 48123 | 49123 | 50123 | 51123 |
| 48124 | 49124 | 50124 | 51124 |
| 48125 | 49125 | 50125 | 51125 |
| 48126 | 49126 | 50126 | 51126 |
| 48127 | 49127 | 50127 | 51127 |
| 48128 | 49128 | 50128 | 51128 |
| 48129 | 49129 | 50129 | 51129 |
| 48130 | 49130 | 50130 | 51130 |
| 48131 | 49131 | 50131 | 51131 |
| 48132 | 49132 | 50132 | 51132 |
| 48133 | 49133 | 50133 | 51133 |
| 48134 | 49134 | 50134 | 51134 |
| 48135 | 49135 | 50135 | 51135 |
| 48136 | 49136 | 50136 | 51136 |
| 48137 | 49137 | 50137 | 51137 |
| 48138 | 49138 | 50138 | 51138 |
| 48139 | 49139 | 50139 | 51139 |
| 48140 | 49140 | 50140 | 51140 |
| 48141 | 49141 | 50141 | 51141 |
| 48142 | 49142 | 50142 | 51142 |
| 48143 | 49143 | 50143 | 51143 |
| 48144 | 49144 | 50144 | 51144 |
| 48145 | 49145 | 50145 | 51145 |
| 48146 | 49146 | 50146 | 51146 |
| 48147 | 49147 | 50147 | 51147 |
| 48148 | 49148 | 50148 | 51148 |
| 48149 | 49149 | 50149 | 51149 |
| 48150 | 49150 | 50150 | 51150 |
| 48151 | 49151 | 50151 | 51151 |
| 48152 | 49152 | 50152 | 51152 |
| 48153 | 49153 | 50153 | 51153 |
| 48154 | 49154 | 50154 | 51154 |
| 48155 | 49155 | 50155 | 51155 |
| 48156 | 49156 | 50156 | 51156 |
| 48157 | 49157 | 50157 | 51157 |
| 48158 | 49158 | 50158 | 51158 |
| 48159 | 49159 | 50159 | 51159 |
| 48160 | 49160 | 50160 | 51160 |
| 48161 | 49161 | 50161 | 51161 |
| 48162 | 49162 | 50162 | 51162 |
| 48163 | 49163 | 50163 | 51163 |
| 48164 | 49164 | 50164 | 51164 |
| 48165 | 49165 | 50165 | 51165 |
| 48166 | 49166 | 50166 | 51166 |
| 48167 | 49167 | 50167 | 51167 |
| 48168 | 49168 | 50168 | 51168 |
| 48169 | 49169 | 50169 | 51169 |
| 48170 | 49170 | 50170 | 51170 |
| 48171 | 49171 | 50171 | 51171 |
| 48172 | 49172 | 50172 | 51172 |
| 48173 | 49173 | 50173 | 51173 |
| 48174 | 49174 | 50174 | 51174 |
| 48175 | 49175 | 50175 | 51175 |
| 48176 | 49176 | 50176 | 51176 |
| 48177 | 49177 | 50177 | 51177 |
| 48178 | 49178 | 50178 | 51178 |
| 48179 | 49179 | 50179 | 51179 |
| 48180 | 49180 | 50180 | 51180 |
| 48181 | 49181 | 50181 | 51181 |
| 48182 | 49182 | 50182 | 51182 |
| 48183 | 49183 | 50183 | 51183 |
| 48184 | 49184 | 50184 | 51184 |
| 48185 | 49185 | 50185 | 51185 |
| 48186 | 49186 | 50186 | 51186 |
| 48187 | 49187 | 50187 | 51187 |
| 48188 | 49188 | 50188 | 51188 |
| 48189 | 49189 | 50189 | 51189 |
| 48190 | 49190 | 50190 | 51190 |
| 48191 | 49191 | 50191 | 51191 |
| 48192 | 49192 | 50192 | 51192 |
| 48193 | 49193 | 50193 | 51193 |
| 48194 | 49194 | 50194 | 51194 |
| 48195 | 49195 | 50195 | 51195 |
| 48196 | 49196 | 50196 | 51196 |
| 48197 | 49197 | 50197 | 51197 |
| 48198 | 49198 | 50198 | 51198 |
| 48199 | 49199 | 50199 | 51199 |
| 48200 | 49200 | 50200 | 51200 |
| 48201 | 49201 | 50201 | 51201 |
| 48202 | 49202 | 50202 | 51202 |
| 48203 | 49203 | 50203 | 51203 |
| 48204 | 49204 | 50204 | 51204 |
| 48205 | 49205 | 50205 | 51205 |
| 48206 | 49206 | 50206 | 51206 |
| 48207 | 49207 | 50207 | 51207 |
| 48208 | 49208 | 50208 | 51208 |
| 48209 | 49209 | 50209 | 51209 |
| 48210 | 49210 | 50210 | 51210 |
| 48211 | 49211 | 50211 | 51211 |
| 48212 | 49212 | 50212 | 51212 |
| 48213 | 49213 | 50213 | 51213 |
| 48214 | 49214 | 50214 | 51214 |
| 48215 | 49215 | 50215 | 51215 |
| 48216 | 49216 | 50216 | 51216 |
| 48217 | 49217 | 50217 | 51217 |
| 48218 | 49218 | 50218 | 51218 |
| 48219 | 49219 | 50219 | 51219 |
| 48220 | 49220 | 50220 | 51220 |
| 48221 | 49221 | 50221 | 51221 |
| 48222 | 49222 | 50222 | 51222 |
| 48223 | 49223 | 50223 | 51223 |
| 48224 | 49224 | 50224 | 51224 |
| 48225 | 49225 | 50225 | 51225 |
| 48226 | 49226 | 50226 | 51226 |
| 48227 | 49227 | 50227 | 51227 |
| 48228 | 49228 | 50228 | 51228 |
| 48229 | 49229 | 50229 | 51229 |
| 48230 | 49230 | 50230 | 51230 |
| 48231 | 49231 | 50231 | 51231 |
| 48232 | 49232 | 50232 | 51232 |
| 48233 | 49233 | 50233 | 51233 |
| 48234 | 49234 | 50234 | 51234 |
| 48235 | 49235 | 50235 | 51235 |
| 48236 | 49236 | 50236 | 51236 |
| 48237 | 49237 | 50237 | 51237 |
| 48238 | 49238 | 50238 | 51238 |
| 48239 | 49239 | 50239 | 51239 |
| 48240 | 49240 | 50240 | 51240 |
| 48241 | 49241 | 50241 | 51241 |
| 48242 | 49242 | 50242 | 51242 |
| 48243 | 49243 | 50243 | 51243 |
| 48244 | 49244 | 50244 | 51244 |
| 48245 | 49245 | 50245 | 51245 |
| 48246 | 49246 | 50246 | 51246 |
| 48247 | 49247 | 50247 | 51247 |
| 48248 | 49248 | 50248 | 51248 |
| 48249 | 49249 | 50249 | 51249 |
| 48250 | 49250 | 50250 | 51250 |
| 48251 | 49251 | 50251 | 51251 |
| 48252 | 49252 | 50252 | 51252 |
| 48253 | 49253 | 50253 | 51253 |
| 48254 | 49254 | 50254 | 51254 |
| 48255 | 49255 | 50255 | 51255 |
| 48256 | 49256 | 50256 | 51256 |
| 48257 | 49257 | 50257 | 51257 |
| 48258 | 49258 | 50258 | 51258 |
| 48259 | 49259 | 50259 | 51259 |
| 48260 | 49260 | 50260 | 51260 |
| 48261 | 49261 | 50261 | 51261 |
| 48262 | 49262 | 50262 | 51262 |
| 48263 | 49263 | 50263 | 51263 |
| 48264 | 49264 | 50264 | 51264 |
| 48265 | 49265 | 50265 | 51265 |
| 48266 | 49266 | 50266 | 51266 |
| 48267 | 49267 | 50267 | 51267 |
| 48268 | 49268 | 50268 | 51268 |
| 48269 | 49269 | 50269 | 51269 |
| 48270 | 49270 | 50270 | 51270 |
| 48271 | 49271 | 50271 | 51271 |
| 48272 | 49272 | 50272 | 51272 |
| 48273 | 49273 | 50273 | 51273 |
| 48274 | 49274 | 50274 | 51274 |
| 48275 | 49275 | 50275 | 51275 |
| 48276 | 49276 | 50276 | 51276 |
| 48277 | 49277 | 50277 | 51277 |
| 48278 | 49278 | 50278 | 51278 |
| 48279 | 49279 | 50279 | 51279 |
| 48280 | 49280 | 50280 | 51280 |
| 48281 | 49281 | 50281 | 51281 |
| 48282 | 49282 | 50282 | 51282 |
| 48283 | 49283 | 50283 | 51283 |
| 48284 | 49284 | 50284 | 51284 |
| 48285 | 49285 | 50285 | 51285 |
| 48286 | 49286 | 50286 | 51286 |
| 48287 | 49287 | 50287 | 51287 |
| 48288 | 49288 | 50288 | 51288 |
| 48289 | 49289 | 50289 | 51289 |
| 48290 | 49290 | 50290 | 51290 |
| 48291 | 49291 | 50291 | 51291 |
| 48292 | 49292 | 50292 | 51292 |
| 48293 | 49293 | 50293 | 51293 |
| 48294 | 49294 | 50294 | 51294 |
| 48295 | 49295 | 50295 | 51295 |
| 48296 | 49296 | 50296 | 51296 |
| 48297 | 49297 | 50297 | 51297 |
| 48298 | 49298 | 50298 | 51298 |
| 48299 | 49299 | 50299 | 51299 |
| 48300 | 49300 | 50300 | 51300 |
| 48301 | 49301 | 50301 | 51301 |
| 48302 | 49302 | 50302 | 51302 |
| 48303 | 49303 | 50303 | 51303 |
| 48304 | 49304 | 50304 | 51304 |
| 48305 | 49305 | 50305 | 51305 |
| 48306 | 49306 | 50306 | 51306 |
| 48307 | 49307 | 50307 | 51307 |
| 48308 | 49308 | 50308 | 51308 |
| 48309 | 49309 | 50309 | 51309 |
| 48310 | 49310 | 50310 | 51310 |
| 48311 | 49311 | 50311 | 51311 |
| 48312 | 49312 | 50312 | 51312 |
| 48313 | 49313 | 50313 | 51313 |
| 48314 | 49314 | 50314 | 51314 |
| 48315 | 49315 | 50315 | 51315 |
| 48316 | 49316 | 50316 | 51316 |
| 48317 | 49317 | 50317 | 51317 |
| 48318 | 49318 | 50318 | 51318 |
| 48319 | 49319 | 50319 | 51319 |
| 48320 | 49320 | 50320 | 51320 |
| 48321 | 49321 | 50321 | 51321 |
| 48322 | 49322 | 50322 | 51322 |
| 48323 | 49323 | 50323 | 51323 |
| 48324 | 49324 | 50324 | 51324 |
| 48325 | 49325 | 50325 | 51325 |
| 48326 | 49326 | 50326 | 51326 |
| 48327 | 49327 | 50327 | 51327 |
| 48328 | 49328 | 50328 | 51328 |
| 48329 | 49329 | 50329 | 51329 |
| 48330 | 49330 | 50330 | 51330 |
| 48331 | 49331 | 50331 | 51331 |
| 48332 | 49332 | 50332 | 51332 |
| 48333 | 49333 | 50333 | 51333 |
| 48334 | 49334 | 50334 | 51334 |
| 48335 | 49335 | 50335 | 51335 |
| 48336 | 49336 | 50336 | 51336 |
| 48337 | 49337 | 50337 | 51337 |
| 48338 | 49338 | 50338 | 51338 |
| 48339 | 49339 | 50339 | 51339 |
| 48340 | 49340 | 50340 | 51340 |
| 48341 | 49341 | 50341 | 51341 |
| 48342 | 49342 | 50342 | 51342 |
| 48343 | 49343 | 50343 | 51343 |
| 48344 | 49344 | 50344 | 51344 |
| 48345 | 49345 | 50345 | 51345 |
| 48346 | 49346 | 50346 | 51346 |
| 48347 | 49347 | 50347 | 51347 |
| 48348 | 49348 | 50348 | 51348 |
| 48349 | 49349 | 50349 | 51349 |
| 48350 | 49350 | 50350 | 51350 |
| 48351 | 49351 | 50351 | 51351 |
| 48352 | 49352 | 50352 | 51352 |
| 48353 | 49353 | 50353 | 51353 |
| 48354 | 49354 | 50354 | 51354 |
| 48355 | 49355 | 50355 | 51355 |
| 48356 | 49356 | 50356 | 51356 |
| 48357 | 49357 | 50357 | 51357 |
| 48358 | 49358 | 50358 | 51358 |
| 48359 | 49359 | 50359 | 51359 |
| 48360 | 49360 | 50360 | 51360 |
| 48361 | 49361 | 50361 | 51361 |
| 48362 | 49362 | 50362 | 51362 |
| 48363 | 49363 | 50363 | 51363 |
| 48364 | 49364 | 50364 | 51364 |
| 48365 | 49365 | 50365 | 51365 |
| 48366 | 49366 | 50366 | 51366 |
| 48367 | 49367 | 50367 | 51367 |
| 48368 | 49368 | 50368 | 51368 |
| 48369 | 49369 | 50369 | 51369 |
| 48370 | 49370 | 50370 | 51370 |
| 48371 | 49371 | 50371 | 51371 |
| 48372 | 49372 | 50372 | 51372 |
| 48373 | 49373 | 50373 | 51373 |
| 48374 | 49374 | 50374 | 51374 |
| 48375 | 49375 | 50375 | 51375 |
| 48376 | 49376 | 50376 | 51376 |
| 48377 | 49377 | 50377 | 51377 |
| 48378 | 49378 | 50378 | 51378 |
| 48379 | 49379 | 50379 | 51379 |
| 48380 | 49380 | 50380 | 51380 |
| 48381 | 49381 | 50381 | 51381 |
| 48382 | 49382 | 50382 | 51382 |
| 48383 | 49383 | 50383 | 51383 |
| 48384 | 49384 | 50384 | 51384 |
| 48385 | 49385 | 50385 | 51385 |
| 48386 | 49386 | 50386 | 51386 |
| 48387 | 49387 | 50387 | 51387 |
| 48388 | 49388 | 50388 | 51388 |
| 48389 | 49389 | 50389 | 51389 |
| 48390 | 49390 | 50390 | 51390 |
| 48391 | 49391 | 50391 | 51391 |
| 48392 | 49392 | 50392 | 51392 |
| 48393 | 49393 | 50393 | 51393 |
| 48394 | 49394 | 50394 | 51394 |
| 48395 | 49395 | 50395 | 51395 |
| 48396 | 49396 | 50396 | 51396 |
| 48397 | 49397 | 50397 | 51397 |
| 48398 | 49398 | 50398 | 51398 |
| 48399 | 49399 | 50399 | 51399 |
| 48400 | 49400 | 50400 | 51400 |
| 48401 | 49401 | 50401 | 51401 |
| 48402 | 49402 | 50402 | 51402 |
| 48403 | 49403 | 50403 | 51403 |
| 48404 | 49404 | 50404 | 51404 |
| 48405 | 49405 | 50405 | 51405 |
| 48406 | 49406 | 50406 | 51406 |
| 48407 | 49407 | 50407 | 51407 |
| 48408 | 49408 | 50408 | 51408 |
| 48409 | 49409 | 50409 | 51409 |
| 48410 | 49410 | 50410 | 51410 |
| 48411 | 49411 | 50411 | 51411 |
| 48412 | 49412 | 50412 | 51412 |
| 48413 | 49413 | 50413 | 51413 |
| 48414 | 49414 | 50414 | 51414 |
| 48415 | 49415 | 50415 | 51415 |
| 48416 | 49416 | 50416 | 51416 |
| 48417 | 49417 | 50417 | 51417 |
| 48418 | 49418 | 50418 | 51418 |
| 48419 | 49419 | 50419 | 51419 |
| 48420 | 49420 | 50420 | 51420 |
| 48421 | 49421 | 50421 | 51421 |
| 48422 | 49422 | 50422 | 51422 |
| 48423 | 49423 | 50423 | 51423 |
| 48424 | 49424 | 50424 | 51424 |
| 48425 | 49425 | 50425 | 51425 |
| 48426 | 49426 | 50426 | 51426 |
| 48427 | 49427 | 50427 | 51427 |
| 48428 | 49428 | 50428 | 51428 |
| 48429 | 49429 | 50429 | 51429 |
| 48430 | 49430 | 50430 | 51430 |
| 48431 | 49431 | 50431 | 51431 |
| 48432 | 49432 | 50432 | 51432 |
| 48433 | 49433 | 50433 | 51433 |
| 48434 | 49434 | 50434 | 51434 |
| 48435 | 49435 | 50435 | 51435 |
| 48436 | 49436 | 50436 | 51436 |
| 48437 | 49437 | 50437 | 51437 |
| 48438 | 49438 | 50438 | 51438 |
| 48439 | 49439 | 50439 | 51439 |
| 48440 | 49440 | 50440 | 51440 |
| 48441 | 49441 | 50441 | 51441 |
| 48442 | 49442 | 50442 | 51442 |
| 48443 | 49443 | 50443 | 51443 |
| 48444 | 49444 | 50444 | 51444 |
| 48445 | 49445 | 50445 | 51445 |
| 48446 | 49446 | 50446 | 51446 |
| 48447 | 49447 | 50447 | 51447 |
| 48448 | 49448 | 50448 | 51448 |
| 48449 | 49449 | 50449 | 51449 |
| 48450 | 49450 | 50450 | 51450 |
| 48451 | 49451 | 50451 | 51451 |
| 48452 | 49452 | 50452 | 51452 |
| 48453 | 49453 | 50453 | 51453 |
| 48454 | 49454 | 50454 | 51454 |
| 48455 | 49455 | 50455 | 51455 |
| 48456 | 49456 | 50456 | 51456 |
| 48457 | 49457 | 50457 | 51457 |
| 48458 | 49458 | 50458 | 51458 |
| 48459 | 49459 | 50459 | 51459 |
| 48460 | 49460 | 50460 | 51460 |
| 48461 | 49461 | 50461 | 51461 |
| 48462 | 49462 | 50462 | 51462 |
| 48463 | 49463 | 50463 | 51463 |
| 48464 | 49464 | 50464 | 51464 |
| 48465 | 49465 | 50465 | 51465 |
| 48466 | 49466 | 50466 | 51466 |
| 48467 | 49467 | 50467 | 51467 |
| 48468 | 49468 | 50468 | 51468 |
| 48469 | 49469 | 50469 | 51469 |
| 48470 | 49470 | 50470 | 51470 |
| 48471 | 49471 | 50471 | 51471 |
| 48472 | 49472 | 50472 | 51472 |
| 48473 | 49473 | 50473 | 51473 |
| 48474 | 49474 | 50474 | 51474 |
| 48475 | 49475 | 50475 | 51475 |
| 48476 | 49476 | 50476 | 51476 |
| 48477 | 49477 | 50477 | 51477 |
| 48478 | 49478 | 50478 | 51478 |
| 48479 | 49479 | 50479 | 51479 |
| 48480 | 49480 | 50480 | 51480 |
| 48481 | 49481 | 50481 | 51481 |
| 48482 | 49482 | 50482 | 51482 |
| 48483 | 49483 | 50483 | 51483 |
| 48484 | 49484 | 50484 | 51484 |
| 48485 | 49485 | 50485 | 51485 |
| 48486 | 49486 | 50486 | 51486 |
| 48487 | 49487 | 50487 | 51487 |
| 48488 | 49488 | 50488 | 51488 |
| 48489 | 49489 | 50489 | 51489 |
| 48490 | 49490 | 50490 | 51490 |
| 48491 | 49491 | 50491 | 51491 |
| 48492 | 49492 | 50492 | 51492 |
| 48493 | 49493 | 50493 | 51493 |
| 48494 | 49494 | 50494 | 51494 |
| 48495 | 49495 | 50495 | 51495 |
| 48496 | 49496 | 50496 | 51496 |
| 48497 | 49497 | 50497 | 51497 |
| 48498 | 49498 | 50498 | 51498 |
| 48499 | 49499 | 50499 | 51499 |
| 48500 | 49500 | 50500 | 51500 |
| 48501 | 49501 | 50501 | 51501 |
| 48502 | 49502 | 50502 | 51502 |
| 48503 | 49503 | 50503 | 51503 |
| 48504 | 49504 | 50504 | 51504 |
| 48505 | 49505 | 50505 | 51505 |
| 48506 | 49506 | 50506 | 51506 |
| 48507 | 49507 | 50507 | 51507 |
| 48508 | 49508 | 50508 | 51508 |
| 48509 | 49509 | 50509 | 51509 |
| 48510 | 49510 | 50510 | 51510 |
| 48511 | 49511 | 50511 | 51511 |
| 48512 | 49512 | 50512 | 51512 |
| 48513 | 49513 | 50513 | 51513 |
| 48514 | 49514 | 50514 | 51514 |
| 48515 | 49515 | 50515 | 51515 |
| 48516 | 49516 | 50516 | 51516 |
| 48517 | 49517 | 50517 | 51517 |
| 48518 | 49518 | 50518 | 51518 |
| 48519 | 49519 | 50519 | 51519 |
| 48520 | 49520 | 50520 | 51520 |
| 48521 | 49521 | 50521 | 51521 |
| 48522 | 49522 | 50522 | 51522 |
| 48523 | 49523 | 50523 | 51523 |
| 48524 | 49524 | 50524 | 51524 |
| 48525 | 49525 | 50525 | 51525 |
| 48526 | 49526 | 50526 | 51526 |
| 48527 | 49527 | 50527 | 51527 |
| 48528 | 49528 | 50528 | 51528 |
| 48529 | 49529 | 50529 | 51529 |
| 48530 | 49530 | 50530 | 51530 |
| 48531 | 49531 | 50531 | 51531 |
| 48532 | 49532 | 50532 | 51532 |
| 48533 | 49533 | 50533 | 51533 |
| 48534 | 49534 | 50534 | 51534 |
| 48535 | 49535 | 50535 | 51535 |
| 48536 | 49536 | 50536 | 51536 |
| 48537 | 49537 | 50537 | 51537 |
| 48538 | 49538 | 50538 | 51538 |
| 48539 | 49539 | 50539 | 51539 |
| 48540 | 49540 | 50540 | 51540 |
| 48541 | 49541 | 50541 | 51541 |
| 48542 | 49542 | 50542 | 51542 |
| 48543 | 49543 | 50543 | 51543 |
| 48544 | 49544 | 50544 | 51544 |
| 48545 | 49545 | 50545 | 51545 |
| 48546 | 49546 | 50546 | 51546 |
| 48547 | 49547 | 50547 | 51547 |
| 48548 | 49548 | 50548 | 51548 |
| 48549 | 49549 | 50549 | 51549 |
| 48550 | 49550 | 50550 | 51550 |
| 48551 | 49551 | 50551 | 51551 |
| 48552 | 49552 | 50552 | 51552 |
| 48553 | 49553 | 50553 | 51553 |
| 48554 | 49554 | 50554 | 51554 |
| 48555 | 49555 | 50555 | 51555 |
| 48556 | 49556 | 50556 | 51556 |
| 48557 | 49557 | 50557 | 51557 |
| 48558 | 49558 | 50558 | 51558 |
| 48559 | 49559 | 50559 | 51559 |
| 48560 | 49560 | 50560 | 51560 |
| 48561 | 49561 | 50561 | 51561 |
| 48562 | 49562 | 50562 | 51562 |
| 48563 | 49563 | 50563 | 51563 |
| 48564 | 49564 | 50564 | 51564 |
| 48565 | 49565 | 50565 | 51565 |
| 48566 | 49566 | 50566 | 51566 |
| 48567 | 49567 | 50567 | 51567 |
| 48568 | 49568 | 50568 | 51568 |
| 48569 | 49569 | 50569 | 51569 |
| 48570 | 49570 | 50570 | 51570 |
| 48571 | 49571 | 50571 | 51571 |
| 48572 | 49572 | 50572 | 51572 |
| 48573 | 49573 | 50573 | 51573 |
| 48574 | 49574 | 50574 | 51574 |
| 48575 | 49575 | 50575 | 51575 |
| 48576 | 49576 | 50576 | 51576 |
| 48577 | 49577 | 50577 | 51577 |
| 48578 | 49578 | 50578 | 51578 |
| 48579 | 49579 | 50579 | 51579 |
| 48580 | 49580 | 50580 | 51580 |
| 48581 | 49581 | 50581 | 51581 |
| 48582 | 49582 | 50582 | 51582 |
| 48583 | 49583 | 50583 | 51583 |
| 48584 | 49584 | 50584 | 51584 |
| 48585 | 49585 | 50585 | 51585 |
| 48586 | 49586 | 50586 | 51586 |
| 48587 | 49587 | 50587 | 51587 |
| 48588 | 49588 | 50588 | 51588 |
| 48589 | 49589 | 50589 | 51589 |
| 48590 | 49590 | 50590 | 51590 |
| 48591 | 49591 | 50591 | 51591 |
| 48592 | 49592 | 50592 | 51592 |
| 48593 | 49593 | 50593 | 51593 |
| 48594 | 49594 | 50594 | 51594 |
| 48595 | 49595 | 50595 | 51595 |
| 48596 | 49596 | 50596 | 51596 |
| 48597 | 49597 | 50597 | 51597 |
| 48598 | 49598 | 50598 | 51598 |
| 48599 | 49599 | 50599 | 51599 |
| 48600 | 49600 | 50600 | 51600 |
| 48601 | 49601 | 50601 | 51601 |
| 48602 | 49602 | 50602 | 51602 |
| 48603 | 49603 | 50603 | 51603 |
| 48604 | 49604 | 50604 | 51604 |
| 48605 | 49605 | 50605 | 51605 |
| 48606 | 49606 | 50606 | 51606 |
| 48607 | 49607 | 50607 | 51607 |
| 48608 | 49608 | 50608 | 51608 |
| 48609 | 49609 | 50609 | 51609 |
| 48610 | 49610 | 50610 | 51610 |
| 48611 | 49611 | 50611 | 51611 |
| 48612 | 49612 | 50612 | 51612 |
| 48613 | 49613 | 50613 | 51613 |
| 48614 | 49614 | 50614 | 51614 |
| 48615 | 49615 | 50615 | 51615 |
| 48616 | 49616 | 50616 | 51616 |
| 48617 | 49617 | 50617 | 51617 |
| 48618 | 49618 | 50618 | 51618 |
| 48619 | 49619 | 50619 | 51619 |
| 48620 | 49620 | 50620 | 51620 |
| 48621 | 49621 | 50621 | 51621 |
| 48622 | 49622 | 50622 | 51622 |
| 48623 | 49623 | 50623 | 51623 |
| 48624 | 49624 | 50624 | 51624 |
| 48625 | 49625 | 50625 | 51625 |
| 48626 | 49626 | 50626 | 51626 |
| 48627 | 49627 | 50627 | 51627 |
| 48628 | 49628 | 50628 | 51628 |
| 48629 | 49629 | 50629 | 51629 |
| 48630 | 49630 | 50630 | 51630 |
| 48631 | 49631 | 50631 | 51631 |
| 48632 | 49632 | 50632 | 51632 |
| 48633 | 49633 | 50633 | 51633 |
| 48634 | 49634 | 50634 | 51634 |
| 48635 | 49635 | 50635 | 51635 |
| 48636 | 49636 | 50636 | 51636 |
| 48637 | 49637 | 50637 | 51637 |
| 48638 | 49638 | 50638 | 51638 |
| 48639 | 49639 | 50639 | 51639 |
| 48640 | 49640 | 50640 | 51640 |
| 48641 | 49641 | 50641 | 51641 |
| 48642 | 49642 | 50642 | 51642 |
| 48643 | 49643 | 50643 | 51643 |
| 48644 | 49644 | 50644 | 51644 |
| 48645 | 49645 | 50645 | 51645 |
| 48646 | 49646 | 50646 | 51646 |
| 48647 | 49647 | 50647 | 51647 |
| 48648 | 49648 | 50648 | 51648 |
| 48649 | 49649 | 50649 | 51649 |
| 48650 | 49650 | 50650 | 51650 |
| 48651 | 49651 | 50651 | 51651 |
| 48652 | 49652 | 50652 | 51652 |
| 48653 | 49653 | 50653 | 51653 |
| 48654 | 49654 | 50654 | 51654 |
| 48655 | 49655 | 50655 | 51655 |
| 48656 | 49656 | 50656 | 51656 |
| 48657 | 49657 | 50657 | 51657 |
| 48658 | 49658 | 50658 | 51658 |
| 48659 | 49659 | 50659 | 51659 |
| 48660 | 49660 | 50660 | 51660 |
| 48661 | 49661 | 50661 | 51661 |
| 48662 | 49662 | 50662 | 51662 |
| 48663 | 49663 | 50663 | 51663 |
| 48664 | 49664 | 50664 | 51664 |
| 48665 | 49665 | 50665 | 51665 |
| 48666 | 49666 | 50666 | 51666 |
| 48667 | 49667 | 50667 | 51667 |
| 48668 | 49668 | 50668 | 51668 |
| 48669 | 49669 | 50669 | 51669 |
| 48670 | 49670 | 50670 | 51670 |
| 48671 | 49671 | 50671 | 51671 |
| 48672 | 49672 | 50672 | 51672 |
| 48673 | 49673 | 50673 | 51673 |
| 48674 | 49674 | 50674 | 51674 |
| 48675 | 49675 | 50675 | 51675 |
| 48676 | 49676 | 50676 | 51676 |
| 48677 | 49677 | 50677 | 51677 |
| 48678 | 49678 | 50678 | 51678 |
| 48679 | 49679 | 50679 | 51679 |
| 48680 | 49680 | 50680 | 51680 |
| 48681 | 49681 | 50681 | 51681 |
| 48682 | 49682 | 50682 | 51682 |
| 48683 | 49683 | 50683 | 51683 |
| 48684 | 49684 | 50684 | 51684 |
| 48685 | 49685 | 50685 | 51685 |
| 48686 | 49686 | 50686 | 51686 |
| 48687 | 49687 | 50687 | 51687 |
| 48688 | 49688 | 50688 | 51688 |
| 48689 | 49689 | 50689 | 51689 |
| 48690 | 49690 | 50690 | 51690 |
| 48691 | 49691 | 50691 | 51691 |
| 48692 | 49692 | 50692 | 51692 |
| 48693 | 49693 | 50693 | 51693 |
| 48694 | 49694 | 50694 | 51694 |
| 48695 | 49695 | 50695 | 51695 |
| 48696 | 49696 | 50696 | 51696 |
| 48697 | 49697 | 50697 | 51697 |
| 48698 | 49698 | 50698 | 51698 |
| 48699 | 49699 | 50699 | 51699 |
| 48700 | 49700 | 50700 | 51700 |
| 48701 | 49701 | 50701 | 51701 |
| 48702 | 49702 | 50702 | 51702 |
| 48703 | 49703 | 50703 | 51703 |
| 48704 | 49704 | 50704 | 51704 |
| 48705 | 49705 | 50705 | 51705 |
| 48706 | 49706 | 50706 | 51706 |
| 48707 | 49707 | 50707 | 51707 |
| 48708 | 49708 | 50708 | 51708 |
| 48709 | 49709 | 50709 | 51709 |
| 48710 | 49710 | 50710 | 51710 |
| 48711 | 49711 | 50711 | 51711 |
| 48712 | 49712 | 50712 | 51712 |
| 48713 | 49713 | 50713 | 51713 |
| 48714 | 49714 | 50714 | 51714 |
| 48715 | 49715 | 50715 | 51715 |
| 48716 | 49716 | 50716 | 51716 |
| 48717 | 49717 | 50717 | 51717 |
| 48718 | 49718 | 50718 | 51718 |
| 48719 | 49719 | 50719 | 51719 |
| 48720 | 49720 | 50720 | 51720 |
| 48721 | 49721 | 50721 | 51721 |
| 48722 | 49722 | 50722 | 51722 |
| 48723 | 49723 | 50723 | 51723 |
| 48724 | 49724 | 50724 | 51724 |
| 48725 | 49725 | 50725 | 51725 |
| 48726 | 49726 | 50726 | 51726 |
| 48727 | 49727 | 50727 | 51727 |
| 48728 | 49728 | 50728 | 51728 |
| 48729 | 49729 | 50729 | 51729 |
| 48730 | 49730 | 50730 | 51730 |
| 48731 | 49731 | 50731 | 51731 |
| 48732 | 49732 | 50732 | 51732 |
| 48733 | 49733 | 50733 | 51733 |
| 48734 | 49734 | 50734 | 51734 |
| 48735 | 49735 | 50735 | 51735 |
| 48736 | 49736 | 50736 | 51736 |
| 48737 | 49737 | 50737 | 51737 |
| 48738 | 49738 | 50738 | 51738 |
| 48739 | 49739 | 50739 | 51739 |
| 48740 | 49740 | 50740 | 51740 |
| 48741 | 49741 | 50741 | 51741 |
| 48742 | 49742 | 50742 | 51742 |
| 48743 | 49743 | 50743 | 51743 |
| 48744 | 49744 | 50744 | 51744 |
| 48745 | 49745 | 50745 | 51745 |
| 48746 | 49746 | 50746 | 51746 |
| 48747 | 49747 | 50747 | 51747 |
| 48748 | 49748 | 50748 | 51748 |
| 48749 | 49749 | 50749 | 51749 |
| 48750 | 49750 | 50750 | 51750 |
| 48751 | 49751 | 50751 | 51751 |
| 48752 | 49752 | 50752 | 51752 |
| 48753 | 49753 | 50753 | 51753 |
| 48754 | 49754 | 50754 | 51754 |
| 48755 | 49755 | 50755 | 51755 |
| 48756 | 49756 | 50756 | 51756 |
| 48757 | 49757 | 50757 | 51757 |
| 48758 | 49758 | 50758 | 51758 |
| 48759 | 49759 | 50759 | 51759 |
| 48760 | 49760 | 50760 | 51760 |
| 48761 | 49761 | 50761 | 51761 |
| 48762 | 49762 | 50762 | 51762 |
| 48763 | 49763 | 50763 | 51763 |
| 48764 | 49764 | 50764 | 51764 |
| 48765 | 49765 | 50765 | 51765 |
| 48766 | 49766 | 50766 | 51766 |
| 48767 | 49767 | 50767 | 51767 |
| 48768 | 49768 | 50768 | 51768 |
| 48769 | 49769 | 50769 | 51769 |
| 48770 | 49770 | 50770 | 51770 |
| 48771 | 49771 | 50771 | 51771 |
| 48772 | 49772 | 50772 | 51772 |
| 48773 | 49773 | 50773 | 51773 |
| 48774 | 49774 | 50774 | 51774 |
| 48775 | 49775 | 50775 | 51775 |
| 48776 | 49776 | 50776 | 51776 |
| 48777 | 49777 | 50777 | 51777 |
| 48778 | 49778 | 50778 | 51778 |
| 48779 | 49779 | 50779 | 51779 |
| 48780 | 49780 | 50780 | 51780 |
| 48781 | 49781 | 50781 | 51781 |
| 48782 | 49782 | 50782 | 51782 |
| 48783 | 49783 | 50783 | 51783 |
| 48784 | 49784 | 50784 | 51784 |
| 48785 | 49785 | 50785 | 51785 |
| 48786 | 49786 | 50786 | 51786 |
| 48787 | 49787 | 50787 | 51787 |
| 48788 | 49788 | 50788 | 51788 |
| 48789 | 49789 | 50789 | 51789 |
| 48790 | 49790 | 50790 | 51790 |
| 48791 | 49791 | 50791 | 51791 |
| 48792 | 49792 | 50792 | 51792 |
| 48793 | 49793 | 50793 | 51793 |
| 48794 | 49794 | 50794 | 51794 |
| 48795 | 49795 | 50795 | 51795 |
| 48796 | 49796 | 50796 | 51796 |
| 48797 | 49797 | 50797 | 51797 |
| 48798 | 49798 | 50798 | 51798 |
| 48799 | 49799 | 50799 | 51799 |
| 48800 | 49800 | 50800 | 51800 |
| 48801 | 49801 | 50801 | 51801 |
| 48802 | 49802 | 50802 | 51802 |
| 48803 | 49803 | 50803 | 51803 |
| 48804 | 49804 | 50804 | 51804 |
| 48805 | 49805 | 50805 | 51805 |
| 48806 | 49806 | 50806 | 51806 |
| 48807 | 49807 | 50807 | 51807 |
| 48808 | 49808 | 50808 | 51808 |
| 48809 | 49809 | 50809 | 51809 |
| 48810 | 49810 | 50810 | 51810 |
| 48811 | 49811 | 50811 | 51811 |
| 48812 | 49812 | 50812 | 51812 |
| 48813 | 49813 | 50813 | 51813 |
| 48814 | 49814 | 50814 | 51814 |
| 48815 | 49815 | 50815 | 51815 |
| 48816 | 49816 | 50816 | 51816 |
| 48817 | 49817 | 50817 | 51817 |
| 48818 | 49818 | 50818 | 51818 |
| 48819 | 49819 | 50819 | 51819 |
| 48820 | 49820 | 50820 | 51820 |
| 48821 | 49821 | 50821 | 51821 |
| 48822 | 49822 | 50822 | 51822 |
| 48823 | 49823 | 50823 | 51823 |
| 48824 | 49824 | 50824 | 51824 |
| 48825 | 49825 | 50825 | 51825 |
| 48826 | 49826 | 50826 | 51826 |
| 48827 | 49827 | 50827 | 51827 |
| 48828 | 49828 | 50828 | 51828 |
| 48829 | 49829 | 50829 | 51829 |
| 48830 | 49830 | 50830 | 51830 |
| 48831 | 49831 | 50831 | 51831 |
| 48832 | 49832 | 50832 | 51832 |
| 48833 | 49833 | 50833 | 51833 |
| 48834 | 49834 | 50834 | 51834 |
| 48835 | 49835 | 50835 | 51835 |
| 48836 | 49836 | 50836 | 51836 |
| 48837 | 49837 | 50837 | 51837 |
| 48838 | 49838 | 50838 | 51838 |
| 48839 | 49839 | 50839 | 51839 |
| 48840 | 49840 | 50840 | 51840 |
| 48841 | 49841 | 50841 | 51841 |
| 48842 | 49842 | 50842 | 51842 |
| 48843 | 49843 | 50843 | 51843 |
| 48844 | 49844 | 50844 | 51844 |
| 48845 | 49845 | 50845 | 51845 |
| 48846 | 49846 | 50846 | 51846 |
| 48847 | 49847 | 50847 | 51847 |
| 48848 | 49848 | 50848 | 51848 |
| 48849 | 49849 | 50849 | 51849 |
| 48850 | 49850 | 50850 | 51850 |
| 48851 | 49851 | 50851 | 51851 |
| 48852 | 49852 | 50852 | 51852 |
| 48853 | 49853 | 50853 | 51853 |
| 48854 | 49854 | 50854 | 51854 |
| 48855 | 49855 | 50855 | 51855 |
| 48856 | 49856 | 50856 | 51856 |
| 48857 | 49857 | 50857 | 51857 |
| 48858 | 49858 | 50858 | 51858 |
| 48859 | 49859 | 50859 | 51859 |
| 48860 | 49860 | 50860 | 51860 |
| 48861 | 49861 | 50861 | 51861 |
| 48862 | 49862 | 50862 | 51862 |
| 48863 | 49863 | 50863 | 51863 |
| 48864 | 49864 | 50864 | 51864 |
| 48865 | 49865 | 50865 | 51865 |
| 48866 | 49866 | 50866 | 51866 |
| 48867 | 49867 | 50867 | 51867 |
| 48868 | 49868 | 50868 | 51868 |
| 48869 | 49869 | 50869 | 51869 |
| 48870 | 49870 | 50870 | 51870 |
| 48871 | 49871 | 50871 | 51871 |
| 48872 | 49872 | 50872 | 51872 |
| 48873 | 49873 | 50873 | 51873 |
| 48874 | 49874 | 50874 | 51874 |
| 48875 | 49875 | 50875 | 51875 |
| 48876 | 49876 | 50876 | 51876 |
| 48877 | 49877 | 50877 | 51877 |
| 48878 | 49878 | 50878 | 51878 |
| 48879 | 49879 | 50879 | 51879 |
| 48880 | 49880 | 50880 | 51880 |
| 48881 | 49881 | 50881 | 51881 |
| 48882 | 49882 | 50882 | 51882 |
| 48883 | 49883 | 50883 | 51883 |
| 48884 | 49884 | 50884 | 51884 |
| 48885 | 49885 | 50885 | 51885 |
| 48886 | 49886 | 50886 | 51886 |
| 48887 | 49887 | 50887 | 51887 |
| 48888 | 49888 | 50888 | 51888 |
| 48889 | 49889 | 50889 | 51889 |
| 48890 | 49890 | 50890 | 51890 |
| 48891 | 49891 | 50891 | 51891 |
| 48892 | 49892 | 50892 | 51892 |
| 48893 | 49893 | 50893 | 51893 |
| 48894 | 49894 | 50894 | 51894 |
| 48895 | 49895 | 50895 | 51895 |
| 48896 | 49896 | 50896 | 51896 |
| 48897 | 49897 | 50897 | 51897 |
| 48898 | 49898 | 50898 | 51898 |
| 48899 | 49899 | 50899 | 51899 |
| 48900 | 49900 | 50900 | 51900 |
| 48901 | 49901 | 50901 | 51901 |
| 48902 | 49902 | 50902 | 51902 |
| 48903 | 49903 | 50903 | 51903 |
| 48904 | 49904 | 50904 | 51904 |
| 48905 | 49905 | 50905 | 51905 |
| 48906 | 49906 | 50906 | 51906 |
| 48907 | 49907 | 50907 | 51907 |
| 48908 | 49908 | 50908 | 51908 |
| 48909 | 49909 | 50909 | 51909 |
| 48910 | 49910 | 50910 | 51910 |
| 48911 | 49911 | 50911 | 51911 |
| 48912 | 49912 | 50912 | 51912 |
| 48913 | 49913 | 50913 | 51913 |
| 48914 | 49914 | 50914 | 51914 |
| 48915 | 49915 | 50915 | 51915 |
| 48916 | 49916 | 50916 | 51916 |
| 48917 | 49917 | 50917 | 51917 |
| 48918 | 49918 | 50918 | 51918 |
| 48919 | 49919 | 50919 | 51919 |
| 48920 | 49920 | 50920 | 51920 |
| 48921 | 49921 | 50921 | 51921 |
| 48922 | 49922 | 50922 | 51922 |
| 48923 | 49923 | 50923 | 51923 |
| 48924 | 49924 | 50924 | 51924 |
| 48925 | 49925 | 50925 | 51925 |
| 48926 | 49926 | 50926 | 51926 |
| 48927 | 49927 | 50927 | 51927 |
| 48928 | 49928 | 50928 | 51928 |
| 48929 | 49929 | 50929 | 51929 |
| 48930 | 49930 | 50930 | 51930 |
| 48931 | 49931 | 50931 | 51931 |
| 48932 | 49932 | 50932 | 51932 |
| 48933 | 49933 | 50933 | 51933 |
| 48934 | 49934 | 50934 | 51934 |
| 48935 | 49935 | 50935 | 51935 |
| 48936 | 49936 | 50936 | 51936 |
| 48937 | 49937 | 50937 | 51937 |
| 48938 | 49938 | 50938 | 51938 |
| 48939 | 49939 | 50939 | 51939 |
| 48940 | 49940 | 50940 | 51940 |
| 48941 | 49941 | 50941 | 51941 |
| 48942 | 49942 | 50942 | 51942 |
| 48943 | 49943 | 50943 | 51943 |
| 48944 | 49944 | 50944 | 51944 |
| 48945 | 49945 | 50945 | 51945 |
| 48946 | 49946 | 50946 | 51946 |
| 48947 | 49947 | 50947 | 51947 |
| 48948 | 49948 | 50948 | 51948 |
| 48949 | 49949 | 50949 | 51949 |
| 48950 | 49950 | 50950 | 51950 |
| 48951 | 49951 | 50951 | 51951 |
| 48952 | 49952 | 50952 | 51952 |
| 48953 | 49953 | 50953 | 51953 |
| 48954 | 49954 | 50954 | 51954 |
| 48955 | 49955 | 50955 | 51955 |
| 48956 | 49956 | 50956 | 51956 |
| 48957 | 49957 | 50957 | 51957 |
| 48958 | 49958 | 50958 | 51958 |
| 48959 | 49959 | 50959 | 51959 |
| 48960 | 49960 | 50960 | 51960 |
| 48961 | 49961 | 50961 | 51961 |
| 48962 | 49962 | 50962 | 51962 |
| 48963 | 49963 | 50963 | 51963 |
| 48964 | 49964 | 50964 | 51964 |
| 48965 | 49965 | 50965 | 51965 |
| 48966 | 49966 | 50966 | 51966 |
| 48967 | 49967 | 50967 | 51967 |
| 48968 | 49968 | 50968 | 51968 |
| 48969 | 49969 | 50969 | 51969 |
| 48970 | 49970 | 50970 | 51970 |
| 48971 | 49971 | 50971 | 51971 |
| 48972 | 49972 | 50972 | 51972 |
| 48973 | 49973 | 50973 | 51973 |
| 48974 | 49974 | 50974 | 51974 |
| 48975 | 49975 | 50975 | 51975 |
| 48976 | 49976 | 50976 | 51976 |
| 48977 | 49977 | 50977 | 51977 |
| 48978 | 49978 | 50978 | 51978 |
| 48979 | 49979 | 50979 | 51979 |
| 48980 | 49980 | 50980 | 51980 |
| 48981 | 49981 | 50981 | 51981 |
| 48982 | 49982 | 50982 | 51982 |
| 48983 | 49983 | 50983 | 51983 |
| 48984 | 49984 | 50984 | 51984 |
| 48985 | 49985 | 50985 | 51985 |
| 48986 | 49986 | 50986 | 51986 |
| 48987 | 49987 | 50987 | 51987 |
| 48988 | 49988 | 50988 | 51988 |
| 48989 | 49989 | 50989 | 51989 |
| 48990 | 49990 | 50990 | 51990 |
| 48991 | 49991 | 50991 | 51991 |
| 48992 | 49992 | 50992 | 51992 |
| 48993 | 49993 | 50993 | 51993 |
| 48994 | 49994 | 50994 | 51994 |
| 48995 | 49995 | 50995 | 51995 |
| 48996 | 49996 | 50996 | 51996 |
| 48997 | 49997 | 50997 | 51997 |
| 48998 | 49998 | 50998 | 51998 |
| 48999 | 49999 | 50999 | 51999 |
| 49000 | 50000 | 51000 | 52000 |
| 49001 | 50001 | 51001 | 52001 |
| 49002 | 50002 | 51002 | 52002 |

[0140] In some embodiments, the SPN of the present disclosure comprises an aptamer selected by the present method and a short oligonucleotide anchor sequence that may be coated to a solid support. The short anchor oligonucleotide comprises a nucleic acid sequence complementary to a portion of the same aptamer sequence. In some embodiments, a SPN for detecting peanut allergen comprises an aptamer sequence selected from the group consisting of SEQ ID Nos. 3 to 4002 and one or more short anchor sequences that are complementary to the aptamer sequence. As a non-limiting example, the complementary sequence may comprise a nucleic acid sequence selected from SEQ ID NOs. 52003 to 52042 (as shown in Table 15). In some embodiments, the anchor oligonucleotide may be modified to contain a spacer at one end of the sequence. As a non-limiting example, the anchor sequence is modified to contain either a 12-Carbon atom spacer or a 6-Carbon atom spacer at the 5′ end of the sequence (Table 15), or a polyA tail at one end of the sequence. The short complementary sequences may be covalently attached to the solid support (e.g., a glass or plastic chip) directly or through a linker. Accordingly, the length of the linker (carbon atoms or polyA tail) from the solid surface can prevent steric hindrance and reduce the probability of interference due to auto-fluorescence of matrices.

TABLE 15
Short complementary anchor sequences

| SEQ ID NO. | Sequence (5′-3′) |
|---|---|
| 52003 | 6C-AAAAATCAAGTGGTC |
| 52004 | 12C-AAAAATCAAGTGGTC |
| 52005 | 6C-AAAAATCAAGTG |
| 52006 | 12C-AAAAATCAAGTG |
| 52007 | 6C-AAAAAAGTGGTC |
| 52008 | 12C-AAAAAAGTGGTC |
| 52009 | 6C-AAAAATCAAGAGGTC |
| 52010 | 12C-AAAAATCAAGAGGTC |
| 52011 | 6C-AAAAATCAACAGGTC |
| 52012 | 12C-AAAAATCAACAGGTC |
| 52013 | 6C-AAAAAAGTGGTCATG |
| 52014 | 12C-AAAAAAGTGGTCATG |
| 52015 | 6C-AAAAATGGTCATGTA |
| 52016 | 12C-AAAAATGGTCATGTA |
| 52017 | 6C-AAAAATGGTCAT |
| 52018 | 12C-AAAAATGGTCAT |
| 52019 | 6C-AAAAATCATGTA |
| 52020 | 12C-AAAAATCATGTA |
| 52021 | 6C-AAAAATGGTCTTGTA |
| 52022 | 12C-AAAAATGGTCTTGTA |
| 52023 | 6C-AAAAATGGTGTTGTA |
| 52024 | 12C-AAAAATGGTGTTGTA |
| 52025 | 6C-AAAAATCATGTACTA |
| 52026 | 12C-AAAAATCATGTACTA |
| 52027 | 6C-AAAAACTCTTCCCTA |
| 52028 | 12C-AAAAACTCTTCCCTA |
| 52029 | 6C-AAAAACTCTTCC |
| 52030 | 12C-AAAAACTCTTCC |
| 52031 | 6C-AAAAATTCCCTA |
| 52032 | 12C-AAAAATTCCCTA |
| 52033 | 6C-AAAAACTCTTGCCTA |
| 52034 | 12C-AAAAACTCTTGCCTA |
| 52035 | 6C-AAAAACTCTAGCCTA |
| 52036 | 12C-AAAAACTCTAGCCTA |
| 52037 | 6C-AAAAAGATCAGGCCA |
| 52038 | 6C-AAAAACACTTGCGGT |
| 52039 | 6C-AAAAACACGGACACG |
| 52040 | 6C-AAAAAGGCCATGCTT |
| 52041 | 6C-AAAAAGCTGCTCATC |
| 52042 | 6C-AAAAAGAAGACACAC |

### Detection Kits

[0141] In some embodiments, the present disclosure provides a detection kit for allergen detection. The kit comprises (a) a SPN comprising an aptamer sequence that specifically binds to a target of interest, wherein the aptamer does not bind to its complementary sequence in the presence of the target of interest; and (b) a solid support of which the surface is coated with short nucleic acid sequences that are complementary to the sequence of the aptamer. The detection kit may further comprise one or more buffer solutions and other reagents. The buffers are suitable for preparing sample solutions, SPN solutions, and/or other solutions necessary for running a detection assay (e.g., wash buffers). One or more of these kit components may be separated into individual containers, or they may be provided in their aggregated state. In some embodiments, the kit may comprise multiple SPNs specific to multiple allergen targets. For example, the kit may comprise a panel of SPNs specific to peanut and common tree nuts including almond, brazil nut, cashew, hazel nut, pecan, pistachio and walnut.

[0142] In some embodiments, the detection kit may further comprise one or more control aptamer sequences; the control sequences may be used to measure total protein and normalize the baseline. For example, a detection kit comprising SPNs specific to peanut for peanut detection may comprise peanut control sequences that can measure total protein and normalize the baseline during peanut detection. As a non-limiting example, a peanut detection kit may comprise one or more peanut specific aptamers comprising nucleic acid sequences selected from SEQ ID NOs. 3-4002 and one or more peanut control aptamers comprising nucleic acid sequences selected from SEQ ID NOs. 36003 to 40002.

### Detection Assays

[0143] In some embodiments, the present disclosure provides a method for detecting the presence and/or absence of an allergen in a food sample, the method comprising the steps of (i) preparing a sample to be tested solution and a SPN solution; (ii) mixing the sample and SPN solutions and incubating the mixture to induce the binding of the target to the SPN; (iii) contacting the mixture to a solid support that is coated with short oligonucleotides comprising sequences complementary to the SPN; and (iv) measuring a signal and detecting the presence and/or absence of the allergen of interest. The SPN may be labeled with a fluorophore at one end of the sequence, e.g., Cy5 and Alexa Fluor 647.

[0144] In some embodiments, the solid support is a glass chip (e.g., a borosilicate glass chip) wherein the surface of the glass chip is divided into several panels including at least one reactive panel and at least two control panels. The reactive panel of the glass chip are covalently coated with short oligonucleotides comprising sequences complementary to the SPN to which the SPN can hybridize to form a double stranded nucleic acid when the SPN is free from the binding of the target of interest. The reactive panel may be flanked by two control panels at each side. The control panels may be coated with random sequences that do not bind to the SPN nor the target.

[0145] The chip can be any size suitable for the use in a detection device/system, e.g., 10×10 mm. In some embodiments, the detection chip may be a plastic chip.

[0146] In some embodiments, the food sample may be processed with a homogenization buffer that contains a SPN specific to an allergen of interest (e.g., peanut). The food slurry passes over a reactive panel on a glass chip, embedded in a cartridge designed to position the chip to face a laser and an optical sensor. Wash buffer is flowed over the reactive panel, thereby removing any non-specific binding interactions from the panel. Multiple steps of the assay are read by the optical sensor and analyzed by an algorithm to provide an “allergen detected” or “allergen not detected” response. In the absence of the target allergen, the SPN is free to bind to the complementary oligonucleotides on the reactive panel, resulting in a high fluorescence signal. In the presence of the target allergen, the SPN:complement binding interface is occluded, thereby resulting in a decrease in fluorescence signal on the reactive panel.

### EQUIVALENTS AND SCOPE

[0147] Those skilled in the art will recognize or be able to ascertain using no more than routine experimentation, many equivalents to the specific embodiments in accordance with the disclosure described herein. The scope of the present disclosure is not intended to be limited to the above Description, but rather is as set forth in the appended claims.

[0148] In the claims, articles such as “a,” “an,” and “the” may mean one or more than one unless indicated to the contrary or otherwise evident from the context. Claims or descriptions that include “or” between one or more members of a group are considered satisfied if one, more than one, or all of the group members are present in, employed in, or otherwise relevant to a given product or process unless indicated to the contrary or otherwise evident from the context. The disclosure includes embodiments in which exactly one member of the group is present in, employed in, or otherwise relevant to a given product or process. The disclosure includes embodiments in which more than one, or the entire group members are present in, employed in, or otherwise relevant to a given product or process.

[0149] It is also noted that the term “comprising” is intended to be open and permits but does not require the inclusion of additional elements or steps. When the term “comprising” is used herein, the term “consisting of” is thus also encompassed and disclosed.

[0150] Where ranges are given, endpoints are included. Furthermore, it is to be understood that unless otherwise indicated or otherwise evident from the context and understanding of one of ordinary skill in the art, values that are expressed as ranges can assume any specific value or subrange within the stated ranges in different embodiments of the disclosure, to the tenth of the unit of the lower limit of the range, unless the context clearly dictates otherwise.

[0151] In addition, it is to be understood that any particular embodiment of the present disclosure that falls within the prior art may be explicitly excluded from any one or more of the claims. Since such embodiments are deemed to be known to one of ordinary skill in the art, they may be excluded even if the exclusion is not set forth explicitly herein. Any particular embodiment of the compositions of the disclosure (e.g., any antibiotic, therapeutic or active ingredient; any method of production; any method of use; etc.) can be excluded from any one or more claims, for any reason, whether or not related to the existence of prior art.

[0152] It is to be understood that the words which have been used are words of description rather than limitation, and that changes may be made within the purview of the appended claims without departing from the true scope and spirit of the disclosure in its broader aspects.

[0153] While the present disclosure has been described at some length and with some particularity with respect to the several described embodiments, it is not intended that it should be limited to any such particulars or embodiments or any particular embodiment, but it is to be construed with references to the appended claims so as to provide the broadest possible interpretation of such claims in view of the prior art and, therefore, to effectively encompass the intended scope of the disclosure.

### EXAMPLES

### Example 1: Positive Graphene Oxide (GO)-SELEX Selection

[0154] As illustrated in FIG. 1, to begin a round of SELEX, the ssDNA molecules from either a random DNA library (round 1) or from the previous round (enriched library) is diluted at a concentration in water (e.g., 20 ng/μL). A target protein solution is prepared in the appropriate extraction buffer and diluted to a desired concentration depending on the round. A volume of the diluted ssDNA molecules solution (e.g., 100 μL) and a volume of the target protein solution (e.g., 300 μL) is mixed and the resulting mixture is incubated at room temperature with shaking for a set of time depending on the round. A graphene oxide (GO) solution diluted to a defined amount in the extraction buffer (e.g., 600 μL) is added to the ssDNA molecules and target mixture. Graphene oxide (GO) can adsorb the unbound sequences and let the sequences bound to the target free. The unbound sequences and GO are then removed by centrifugation. The ssDNA/target/GO mixture is incubated for 20 minutes at room temperature with shaking, during which any ssDNA that is not bound to the target material will be adsorbed onto the GO surface. After 20 minutes, the mixture is centrifuged at 10,000 g for 3 minutes, and the supernatant, containing ssDNA bound to the target protein and excess target protein, is collected. The pellet containing the GO and ssDNA adsorbed onto the GO surface is discarded.

[0155] To separate the bound ssDNAs from the target, 10% Strataclean resin is added to the collected supernatant which contains target protein and ssDNA complexes. The resulting mixture is heated to 80° C. for 3 minutes, followed by centrifugation at 10,000 g for 3 minutes. The pellet containing the resin bound target proteins is discarded and the supernatant is collected. The strataclean step is repeated for at least one more round. The concentration of ssDNAs in the final supernatant is measured and compared to the initial concentration prior to addition of target proteins and GO. The ssDNA ratio after each round of selection is used to determine if further round selection is necessary. For example, if the ratio is below 50%, the same conditions are repeated in the next round until recovery improves.

[0156] The collected final ssDNA pool is then amplified by PCR using a biotinylated reverse primer and a Cy5-tagged forward primer. The PCR amplified DNAs are cleaned for removal of any residual reagent (e.g., PCR Clean Up Kit) and measured for the concentration of DNA molecules. The clean PCR product is added to streptavidin coated magnetic beads. The biotinylated complimentary strand binds the streptavidin coated beads, then base is added to denature the dsDNA molecules. Using a magnet, the beads, with the biotinylated complimentary strand still bound, are pulled out of solution and the desired ssDNA strands with the Cy5-tag are collected. The isolated ssDNA pool is concentrated, measured and prepared for next selection round.

### Example 2: Positive On-Glass Selection

[0157] The ssDNA pool from Example 1 is diluted to 0.2 ng/μL in the extraction buffer. The same target solution is prepared and diluted to stringent conditions. 50 μL of the ssDNA solution is mixed with 50 μL of target protein and incubated for 1 minute at room temperature with shaking. This ssDNA/protein mixture is then added to two wells of a 16-well slide containing short complimentary anchors to the primer regions of the ssDNA molecules. After incubation for 1 minute at room temperature with shaking, the ssDNA/protein mixture is transferred to the next two wells of the same slide. This process is repeated for a total of eight incubations. Following the final incubation, the ssDNA/protein mixture is collected. The cleaning, amplification, and strand separation steps are the same as in the positive GO-SELEX selection (See Example 1). This on-glass selection can be repeated multiple times until the recovery ratio is acceptable.

### Example 3: Non-Binding On-Glass Counter Selection

[0158] The ssDNA molecules from the final round of positive on-glass SELEX (Example 2) are diluted to a concentration of 0.1 ng/μL in extraction buffer. 50 μL of the ssDNA solution is added to two wells of a new 16-well slide as described above. Without any protein present, all sequences in the pool that are capable of binding the complimentary sequences should bind. After incubation for 1 minute at room temperature with shaking, the ssDNA solution is transferred to the next two wells of the same slide and incubated for another 1 minute. This process is repeated for a total of eight incubations. Following the final incubation, the ssDNA is collected and saved for sequencing.

### Example 4: Binding On-Glass Counter Selection

[0159] The ssDNA molecules from the final round of positive on-glass SELEX (Example 2) are diluted to a concentration of 0.1 ng/μL in extraction buffer. The counter proteins of interest are dissociated in extraction buffer and diluted to 10000 ppm. 50 uL of the ssDNA solution is mixed with 50 μL of the counter target mixture and the mixture is incubated for 1 minute at room temperature with shaking. This ssDNA/protein mixture is then added to two wells of a fresh 16-well slide as previously described. Any ssDNA in the mixture that also has the capability to bind these undesired counter targets will bind the proteins and not bind the short complimentary sequences on the glass. After incubation for 1 minute at room temperature with shaking, the ssDNA/protein mixture is transferred to the next two wells of the same slide. This process is repeated for a total of eight incubations. Following the final incubation, the ssDNA is collected, cleaned as previously described, and saved for sequencing.

### Example 5: Selection of Aptamers that Bind to Gluten

[0160] Gluten is found in wheat, buckwheat, barley, and rye, which is composed of two primary fractions, the water and alcohol soluble gliadins, and the insoluble glutenins (Journal of AOAC International 2013; 96, 1-8). Due to these solubility differences, aptamers that recognize the gliadin fraction are selected using the combined SELEX methods.

Gluten Extraction from Food

[0161] Several different extraction methods are used and compared (Fallahbaghery et al., J. Agric. Food Chem. 2017; 65, 2857-2866; and Ito et al., Anal Bioanal Chem. 2016; 408, 5973-5984). Surfactants, salts, and reducing agents are tested. The surfactants tested include 0.1% Tween 20 or 1% SDS. The salts tested include 25 mM NaCl and 5 mM MgCl₂ or 2 mM guanidinium HCl. The only reducing agent tested is 100 mM sodium sulfite, as other reducing agents present a serious health hazard for a consumer device.

[0162] In order to select the ideal extraction buffer, 24 different buffers were tested, and their extraction efficiency was measured by ELISA. The first round of testing was performed simply on wheat, while further rounds of testing used four different wheat-incurred foods: oatmeal, wine, ground pork, and ice cream. From this testing, the best gluten extraction buffer comprises 20 mM HEPES, 30% EtOH, 0.1% Tween20, 2 mM guanidinium HCl, 25 mM NaCl, and 5 mM MgCl₂.

Determining the Ratio of GO and ssDNA Molecules

[0163] The optimal ratio of GO to ssDNA molecules in the extraction buffer is determined to achieve the maximal recovery of ssDNA molecules during the selection process. The optimal ratio is 10-fold excess of GO to ssDNA, but the affinity of ssDNAs to GO varies depending on salt content of the buffer. A dilution curve of GO using the same amount of ssDNA revealed that a 2000:1 mass ratio of GO to ssDNA is needed in the gluten extraction buffer.

[0164] Every target protein has distinct cross-reactivity concerns. For gluten, several counter proteins classes are tested, including tree nuts, commonly used wheat replacements (arrowroot, rice flour, buckwheat), and the other major allergens (egg, milk, soy).

### Example 6: Selection of Sequences as Peanut Control

[0165] Control sequences can be used in a detection assay, for example in an allergen detection assay to measure the total protein. Signals from control sequences may be incorporated into the assay algorithm in place of, or in addition to the fiducials. In this example, control sequences for peanut detection (i.e. peanut control sequences) were selected from the ssDNA library using SELEX methods as described herein. The criteria for control sequences include: 1) having similar response to a corresponding matrix, e.g., food type, as the target such as AraH1 (peanut allergen); 2) having no or litter response to the target material, e.g., peanut; 3) having no binding to either the aptamer against the target (AraH1) or its anchor sequences.

[0166] To select peanut control sequences, repeated selections with different binding materials were performed. Before each round of selection, a counter selection against 10,000 ppm peanut was performed and the collected sequences from each round of the counter selection were used. Table 16 lists the repeated selections with different binding materials.

TABLE 16
Materials and selections for peanut control sequences

| Round | Selection Materials | SELEX step |
|---|---|---|
| 1 | 1000 ppm Actin | GO-SELEX |
| 2 | 1000 ppm BSA | GO-SELEX |
| 3 | 1000 ppm Soy flour | GO-SELEX |
| 4 | 1000 ppm Tannin | GO-SELEX |

| | |
|---|---|
| 5-12 | Repeat rounds 1-4 twice |

| | | |
|---|---|---|
| 13 | 100 ppm Actin | Glass-SELEX |
| 14 | 100 ppm BSA | Glass-SELEX |
| 15 | 100 ppm Soy flour | Glass-SELEX |
| 16 | 100 ppm Tannin | Glass-SELEX |
| 17 | 100 ppm Peanut | Glass-SELEX |
| 18 | No protein | Glass-SELEX |

[0167] Sequences collected from Rounds 16, 17 and 18 were sequenced and tested. The heat maps, predicted binding to an aptamer specific to the peanut allergen protein AraH1 (AraH1 probe) and the anchor sequences, and folded structures of each sequence were analyzed. Table 11 lists the top 1000 hits from the selection. 13 control sequences (Table 17) were picked and further characterized,

TABLE 17
Control aptamers for peanut control materials

| Control | | SEQ |
|---|---|---|
| sequence | Sequence (5′-3′) | ID NO |
| PC14 | TAGGGAAGAGAAGGACATATGATGTCGTGACTG | 39016 |
| | GCTAGCTGGACATGCACTGCTTGACTAGTACAT | |
| | GACCACTTGA | |
| PC36 | TAGGGAAGAGAAGGACATATGATGCACTGGCTG | 39038 |
| | ACCTACACGTGGACGATGTGTTGACTAGTACAT | |
| | GACCACTTGA | |
| PC41 | TAGGGAAGAGAAGGACATATGATGCACGCCGAT | 39043 |
| | GCCCTCATGTGGCCGTGGATTGACTAGTACATG | |
| | ACCACTTGA | |
| PC48 | TAGGGAAGAGAAGGACATATGATGACGACACGA | 39050 |
| | CCTTCAAGCATGGCCTAGCGTTGACTAGTACAT | |
| | GACCACTTGA | |
| PC54 | TAGGGAAGAGAAGGACATATGATGGACGCAACG | 39056 |
| | TACCGTATCGTGGCCATGTGTTGACTAGTACAT | |
| | GACCACTTGA | |
| PC55 | TAGGGAAGAGAAGGACATATGATGCACGTACGC | 39057 |
| | CTTGCCTATCTGTGCTCATGTTGACTAGTACAT | |
| | GACCACTTGA | |
| PC58 | TAGGGAAGAGAAGGACATATGATGGCATGCGCT | 39060 |
| | GGGTAGTGATCACGTACGGTTTGACTAGTACAT | |
| | GACCACTTGA | |
| PC60 | TAGGGAAGAGAAGGACATATGATCGTACCGCAA | 39062 |
| | GTGACGTGTCCGTGCCGTGATTGACTAGTACAT | |
| | GACCACTTGA | |
| PC66 | TAGGGAAGAGAAGGACATATGATGTCATGCGCG | 39068 |
| | TACCATCGAGGGGGCGTGGATTGACTAGTACAT | |
| | GACCACTTGA | |
| PC77 | TAGGGAAGAGAAGGACATATGATGGACTGAACG | 39079 |
| | TACTGCCAGGTGAGCATGCATTGACTAGTACAT | |
| | GACCACTTGA | |
| PC85 | TAGGGAAGAGAAGGACATATGATCGATGGTACG | 39087 |
| | AACGCCACGTCATGCGGTCATTGACTAGTACAT | |
| | GACCACTTGA | |
| PC87 | TAGGGAAGAGAAGGACATATGATGCGTGTCAGC | 39089 |
| | AATACGTCCTCATCTGCCCGTTGACTAGTACAT | |
| | GACCACTTGA | |
| PC96 | TAGGGAAGAGAAGGACATATGATGGACAACGTG | 39098 |
| | GCTGGTAGGTATCGTGGGCATTGACTAGTACAT | |
| | GACCACTTGA | |

[0168] None of these peanut control sequences bind to the aptamer specific to AraH1 (AraH1 probe) up to the concentration of 100 nM.

[0169] The binding of the control sequences to an anchor sequence (AAAAATCAAGTGGTC; SEQ ID NO. 52003), the interference of each sequence with the binding of the AraH1 probe to peanut, and the affinity of each sequence to peanut, were evaluated. The data showed that three sequences PC36, PC60 and PC87 have minimal response to 5000 ppm peanut when tested at a concentration of 100 nM.

[0170] Two food types including sugar free wafer and strawberry poptart were compared for response to AraH1 aptamer and peanut control sequences PC36, PC60 and PC87 (each at a concentration of 100 nM). The foods were spiked with either 0 ppm or 5000 ppm peanut. The data indicate the AraH1 aptamer creates high signal for wafer but a lower signal for poptart.

TABLE 18
signals of AraH1 aptamer and peanut control sequences

| | poptart | | | | wafer | | | | Ration |
|---|---|---|---|---|---|---|---|---|---|
| | 0 | 5000 | % of | T- | 0 | 5000 | % of | T- | (Wafer:poptart) |
| sequence | ppm | ppm | change | test | ppm | ppm | change | test | 0 ppm |
| AraH1 | 1.9 | 1.8 | 93% | 0.032 | 6.8 | 1.7 | 26% | 0.003 | 3.5 |
| aptamer | | | | | | | | | |
| PC36 | 5.9 | 6.5 | 109% | 0.612 | 23.3 | 15.8 | 68% | 0.069 | 3.9 |
| PC60 | 5.4 | 5.3 | 100% | 0.981 | 9.5 | 7.6 | 80% | 0.981 | 1.8 |
| PC87 | 103.9 | 102.3 | 99% | 0.920 | 127.6 | 132.5 | 104% | 0.791 | 1.2 |

1. A method for identifying an aptamer that specifically binds to a target of interest comprising:
(a) preparing an input DNA library comprising a plurality of single stranded DNA (ssDNA) molecules, each of which comprises a central randomized nucleic acid sequence flanked by a constant sequence at the 5′ end and a constant sequence at the 3′ end, the constant 5′ end and the constant 3′ end functioning as primers;
(b) selecting, from the input DNA library, a first pool of ssDNA molecules that substantially bind to the target;
(c) selecting a second pool of ssDNA molecules, from the first target binding pool of ssDNA molecules, that do not substantially hybridize to their complementary sequences in the presence of the target;
(d) counter-selecting a third pool of ssDNA molecules, from the second positive binding pool of ssDNA molecules obtained, that do not hybridize to the complementary sequences in the absence of the target, and a fourth pool of sequences that substantially bind to counter targets; and
(e) subtracting the ssDNA molecules in the third and fourth pools from the second positive binding pool of ssDNA molecules, and identifying ssDNA molecules that specifically bind to the target of interest.

2. The method of claim 1, wherein the first pool of ssDNA molecules that substantially bind to the target material is selected through the steps of:
(i) contacting the input ssDNA library with a target material wherein complexes are formed between the target and a plurality of ssDNA molecules present in the input library;
(ii) partitioning the ssDNA:target complexes formed in step (i) from unbound ssDNA molecules using a Graphene Oxide (GO) solution, and isolating the ssDNA molecules in the complexes to produce a subset of ssDNA molecules for the target;
(iii) contacting the subset of ssDNA molecules in (ii) with the same target wherein complexes are formed between the target and a second plurality of ssDNA molecules present in the subset of ssDNA molecules to generate a second subset group of ssDNA molecules for the target; and
(iv) optionally repeating steps (ii) to (iii), one, two, three, four or more rounds to produce a respective third, fourth, fifth, sixth or more subset group of ssDNA molecules, thereby producing the enriched pool of ssDNA molecules that substantially bind to the target after the final round.

3. The method of claim 2, wherein the second positive binding pool of ssDNA molecules is selected through an on-chip positive selection process using the first target binding pool of ssDNA molecules, the same target and a solid support that is coated with short oligonucleotides that are complementary to the constant sequence of the ssDNA molecules, the on-chip positive selection process comprising the steps of:
(i) mixing the first target binding pool of ssDNA molecules with the same target in a buffer solution and inducing them to bind to each other;
(ii) contacting the mixture of step (i) with the solid support of which the surface is covalently coated with short oligonucleotides that are complementary to the constant sequence of the ssDNA molecules;
(iii) collecting a flow-through containing ssDNA:target complexes that are not bound to the solid support;
(iv) optionally contacting the collected flow-through again with the solid support coated with the complementary oligonucleotides for two, three, four, five, six, seven, eight, or more times; and
(v) removing the target and collecting an enriched subset of ssDNA molecules after the final incubation.

4. (canceled)

5. The method of claim 3, wherein the third pool of ssDNA molecules is selected by an on-chip non-binding counter process using the second positive binding pool of ssDNA molecules and a solid support that is coated with short oligonucleotides that are complementary to the constant sequence of the ssDNA molecules.

6. The method of claim 3, wherein the fourth pool of ssDNA molecules is selected through an on-chip counter binding process using the second positive binding pool of ssDNA molecules, one or more counter targets and a solid support that is coated with short oligonucleotides that are complementary to the constant sequence of the ssDNA molecules.

7. The method of claim 1, wherein the method further comprises:
(f) amplifying and sequencing the ssDNA molecules in each pool obtained in steps (b) to (d); and
(g) generating a sequence map for each pool of ssDNA molecules and analyzing the sequence information and selecting a final pool of ssDNA molecules that specifically and preferentially bind to the target of interest in the presence of the complementary sequences.

8. The method of claim 7, wherein the step (g) comprises:
(i) amplifying all the ssDNA molecules in the first, second, third and fourth pools, and barcoding each sequence from each pool;
(ii) pooling together the sequences from each pool and running sequencing together;
(iii) analyzing the data from (ii) and separating data for each sequence into the original pool according to the barcode information;
(iv) generating heat maps for each individual pool that represent the frequency of each sequence in the pool; and
(v) subtracting the sequences in the heat maps of the third pool of ssDNA molecules and the sequences in the fourth pool of ssDNA molecules, from the heat maps of the second positive binding pool of ssDNA molecules,
wherein the final pool of the sequences after step (v) represents aptamer candidates that specifically bind to the target of interest and preferentially bind to the target of the interest in competing the binding of various short complementary sequences.

9. The method of claim 8, wherein the method further comprises subtracting any sequences from an artifact pool of ssDNA molecules from the first target binding pool of ssDNA molecules, wherein the artifact pool of ssDNA molecules is generated by PCR amplification and strand separation of the input DNA library, representing the sequences that are over-amplified by PCR amplification.

10. The method of claim 9, wherein the sequences of the final pool are analyzed for sequence similarities and secondary structures.

11. The method of claim 7, wherein the sequences of ssDNA molecules in each pool are amplified by PCR using a pair of Cy5 labeled primers and biotinylated primers.

12. The method of claim 1, wherein the target is an allergen.

13. An aptamer that binds to an allergen with high specificity and affinity, wherein the aptamer does not hybridize to its complementary sequences in the presence of the target allergen.

14. (canceled)

15. The aptamer of claim 13, wherein the allergen is peanut and the aptamer specific to peanut comprises a nucleic acid sequence selected from the group consisting of SEQ ID NOs.3 to 4002.

16. (canceled)

17. The aptamer of claim 13, wherein the allergen is almond and the aptamer specific to almond comprises a nucleic acid sequence selected from the group consisting of SEQ ID NOs. 4003 to 8002.

18. (canceled)

19. The aptamer of claim 13, wherein the allergen is brazil nut and the aptamer specific to brazil nut comprises a nucleic acid sequence selected from the group consisting of SEQ ID NOs. 8003 to 12002.

20. (canceled)

21. The aptamer of claim 13, wherein the allergen is cashew and the aptamer specific to cashew comprises a nucleic acid sequence selected from the group consisting of SEQ ID NOs. 12003 to 16002.

22. (canceled)

23. The aptamer of claim 13, wherein the allergen is hazelnut and the aptamer specific to hazelnut comprises a nucleic acid sequence selected from the group consisting of SEQ ID NOs. 16003 to 20002.

24. (canceled)

25. The aptamer of claim 13, wherein the allergen is pecan and the aptamer specific to pecan comprises a nucleic acid sequence selected from the group consisting of SEQ ID NOs. 20003 to 24002.

26. (canceled)

27. The aptamer of claim 13, wherein the allergen is pistachio and the aptamer specific to pistachio comprises a nucleic acid sequence selected from the group consisting of SEQ ID NOs. 24003 to 28002.

28. (canceled)

29. The aptamer of claim 13, wherein the allergen is walnut and the aptamer specific to walnut comprises a nucleic acid sequence selected from the group consisting of SEQ ID NOs. 28003 to 32002.

30. (canceled)

31. The aptamer of claim 13, wherein the allergen is a mix of nuts and the aptamer specific to the mixed nuts comprises a nucleic acid sequence selected from the group consisting of SEQ ID NOs. 32003 to 36002.

32. (canceled)

33. The aptamer of claim 31, wherein the mixed nuts comprise peanut, almond, brazil nut, cashew, hazelnut, pistachio, pecan and walnut.

34. The aptamer of claim 13, wherein the allergen is gluten and the aptamer specific to gluten comprises a nucleic acid sequence selected from the group consisting of SEQ ID NOs. 40003 to 44002.

35. (canceled)

36. The aptamer of claim 13, wherein the allergen is whey and the aptamer specific to whey comprises a nucleic acid sequence selected from the group consisting of SEQ ID NOs. 44003 to 48002.

37. (canceled)

38. The aptamer of claim 13, wherein the allergen is casein and the aptamer specific to casein comprises a nucleic acid sequence selected from the group consisting of SEQ ID NOs. 48003 to 52002.

39. (canceled)

40. (canceled)

41. A control aptamer that recognizes a panel of control materials that are used for peanut allergen comprising a nucleic acid sequence selected from the group consisting of SEQ ID NOs. 36003 to 40002.

42. (canceled)

43. A signaling polynucleotide (SPN) comprising an aptamer sequence that binds to an allergen with high specificity and affinity, wherein the aptamer sequence does not hybridize to its complementary sequences in the presence of the target allergen, and a fluorophore conjugated to one end of the aptamer sequence, and a short oligonucleotide sequence that is complementary to the aptamer sequence or a portion of the aptamer sequence.

44. The SPN of claim 43, wherein the fluorophore is Cy5, Texas red or Alexa Fluor 647.

45. (canceled)

46. The SPN of claim 44,
wherein the allergen is peanut and the aptamer specific to peanut comprises a nucleic acid sequence selected from the group consisting of SEQ ID NOs. 3 to 4002;
wherein the allergen is almond and the aptamer specific to almond comprises a nucleic acid sequence selected from the group consisting of SEQ ID NOs. 4003 to 8002;
wherein the allergen is brazil nut and the aptamer specific to brazil nut comprises a nucleic acid sequence selected from the group consisting of SEQ ID NOs. 8003 to 12002;
wherein the allergen is cashew and the aptamer specific to cashew comprises a nucleic acid sequence selected from the group consisting of SEQ ID NOs. 12003 to 16002;
wherein the allergen is hazelnut and the aptamer specific to hazelnut comprises a nucleic acid sequence selected from the group consisting of SEQ ID NOs. 16003 to 20002;
wherein the allergen is pecan and the aptamer specific to pecan comprises a nucleic acid sequence selected from the group consisting of SEQ ID NOs. 20003 to 24002;
wherein the allergen is pistachio and the aptamer specific to pistachio comprises a nucleic acid sequence selected from the group consisting of SEQ ID NOs. 24003 to 28002;
wherein the allergen is walnut and the aptamer specific to walnut comprises a nucleic acid sequence selected from the group consisting of SEQ ID NOs. 28003 to 32002;
wherein the allergen is a mix of nuts and the aptamer against the nuts comprises a nucleic acid sequence selected from the group consisting of SEQ ID NOs. 32003 to 36002;
wherein the allergen is gluten and the aptamer specific to gluten comprises a nucleic acid sequence selected from the group consisting of SEQ ID NOs. 40003 to 44002;
wherein the allergen is whey and the aptamer specific to whey comprises a nucleic acid sequence selected from the group consisting of SEQ ID NOs. 44003 to 48002; or
wherein the allergen is casein and the aptamer specific to casein comprises a nucleic acid sequence selected from the group consisting of SEQ ID NOs. 48003 to 52002.

47. (canceled)

48. (canceled)

49. (canceled)

50. (canceled)

51. (canceled)

52. (canceled)

53. (canceled)

54. (canceled)

55. The SPN of claim 46, wherein the mixed nuts comprise peanut, almond, brazil nut, cashew, hazelnut, pistachio, pecan and walnut.

56. (canceled)

57. (canceled)

58. (canceled)

59. (canceled)

60. The SPN of claim 43, wherein the short complementary sequence comprises a nucleic acid sequence selected from the group consisting of SEQ ID NOs. 52003 to 52042.

61. A detection sensor comprising:
(i) signaling polynucleotide (SPN), wherein the SPN comprises an aptamer sequence that binds to an allergen with high specificity and affinity and that does not hybridize to its complementary sequences in the presence of the target allergen, and
(ii) a short nucleic acid sequence that is printed on a solid surface, wherein the short nucleic acid sequence is complementary to the SPN.

62. (canceled)

63. (canceled)

64. The detection sensor of claim 61, wherein the allergen is peanut, almond, brazil nut, cashew, hazelnut, pecan, pistachio, gluten, whey or casein.

65. The detection sensor of claim 61 further comprising a control nucleic acid sequence, wherein the control sequence has the features including: i) no binding affinity to the target of interest; ii) no binding affinity to the target specific aptamer and iii) no binding affinity to the short anchor sequences on the solid surface.

66. A detection kit comprising,
(a) a signaling polynucleotide (SPN) comprising an aptamer sequence that binds to a target of interest with high specificity and affinity and that does not hybridize to its complementary sequences in the presence of the target of interest;
(b) a solid support of which the surface is coated with short nucleic acid sequences that are complementary to the sequence of the aptamer; and
(c) one or more buffer solutions.

67. (canceled)

68. The detection kit of claim 66 further comprising a SPN comprising an aptamer sequence that binds to a control material.

69. A method for detecting the presence, and/or absence of an allergen in a food sample comprising:
(a) preparing a food sample solution wherein the solution comprising a SPN comprising an aptamer that specifically binds to said allergen an allergen and that is labeled with a fluorophore;
(b) contacting the mixture of the sample and SPN to a solid support that is coated with short nucleic acid sequences that are complementary to the aptamer sequence; and
(c) measuring fluorescence signals and detecting the presence and/or absence of the allergen of interest in the food sample.

70. The method of claim 69 further comprising a step of
(d) measuring the total protein from the food sample using a SPN comprising an aptamer that bind to the allergen control material.

71. The method of claim 69, wherein the allergen is peanut.

72. The method of claim 71, wherein the SPN that specifically binds to peanut comprising a nucleic acid sequence selected the group consisting of SEQ ID NOs. 3 to 4002.

73. The method of claim 72, wherein the SPN that binds to peanut control material comprising a nucleic acid sequence selected the group consisting of SEQ ID NOs. 36003 to 40002.

The application's sequence listing, which the Patent Office published only in electronic form, follows.

SEQUENCE LISTING (52042 sequences)

SEQ ID NO: 1 - DNA, 23 bp, Artificial Sequence
  Description of Artificial Sequence: Synthetic 5' primer
tagggaagagaaggacatatgat

SEQ ID NO: 2 - DNA, 23 bp, Artificial Sequence
  Description of Artificial Sequence: Synthetic 3' primer
ttgactagtacatgaccacttga

SEQ ID NO: 3 - DNA, 30 bp, Artificial Sequence
  Description of Artificial Sequence: Synthetic Peanut, inner sequence
cgcaccgtcgatacgtcatgcacgctgaca

SEQ ID NO: 4 - DNA, 30 bp, Artificial Sequence
  Description of Artificial Sequence: Synthetic Peanut, inner sequence
ccgtagcgacatcaagcggtggtgtgcgtg

SEQ ID NO: 5 - DNA, 30 bp, Artificial Sequence
  Description of Artificial Sequence: Synthetic Peanut, inner sequence
gtcatgcacgaacactatcatggcggcatg

SEQ ID NO: 6 - DNA, 30 bp, Artificial Sequence
  Description of Artificial Sequence: Synthetic Peanut, inner sequence
gtcattccgcatcctacacgtgggcacgta

SEQ ID NO: 7 - DNA, 30 bp, Artificial Sequence
  Description of Artificial Sequence: Synthetic Peanut, inner sequence
ccgcacgtagccctatcagtggtgcatgca

SEQ ID NO: 8 - DNA, 30 bp, Artificial Sequence
  Description of Artificial Sequence: Synthetic Peanut, inner sequence
gcacgactcgcaccctatcatgaggccatg

SEQ ID NO: 9 - DNA, 30 bp, Artificial Sequence
  Description of Artificial Sequence: Synthetic Peanut, inner sequence
gtcatgccatcccttcgagtgtgacaggta

SEQ ID NO: 10 - DNA, 30 bp, Artificial Sequence
  Description of Artificial Sequence: Synthetic Peanut, inner sequence
ggcatgcgatgaacgaggcatgatgcgtca

SEQ ID NO: 11 - DNA, 30 bp, Artificial Sequence
  Description of Artificial Sequence: Synthetic Peanut, inner sequence
ccatcgcgtcactatcatgtgtgtcacgta

SEQ ID NO: 12 - DNA, 30 bp, Artificial Sequence
  Description of Artificial Sequence: Synthetic Peanut, inner sequence
ggcatgcacgcacctacacgtgggtatgga

SEQ ID NO: 13 - DNA, 30 bp, Artificial Sequence
  Description of Artificial Sequence: Synthetic Peanut, inner sequence
cgcaccgtcaagcgggaaggcactttggtg

SEQ ID NO: 14 - DNA, 30 bp, Artificial Sequence
  Description of Artificial Sequence: Synthetic Peanut, inner sequence
ggacgcagcttgcctactggtggtcacgta

SEQ ID NO: 15 - DNA, 30 bp, Artificial Sequence
  Description of Artificial Sequence: Synthetic Peanut, inner sequence
gtcgtgactggctagctggacatgcactgc

SEQ ID NO: 16 - DNA, 30 bp, Artificial Sequence
  Description of Artificial Sequence: Synthetic Peanut, inner sequence
gcgacagcgacatacgatctgctctgcgtc

SEQ ID NO: 17 - DNA, 30 bp, Artificial Sequence
  Description of Artificial Sequence: Synthetic Peanut, inner sequence
tggccgatcgaccctatcaagtgcagcatg

SEQ ID NO: 18 - DNA, 30 bp, Artificial Sequence
  Description of Artificial Sequence: Synthetic Peanut, inner sequence
cgcaccgagagtgatcgtggttcgcagtca

SEQ ID NO: 19 - DNA, 30 bp, Artificial Sequence
  Description of Artificial Sequence: Synthetic Peanut, inner sequence
ggacggatcgaacctacaagttgtcgtgga

SEQ ID NO: 20 - DNA, 30 bp, Artificial Sequence
  Description of Artificial Sequence: Synthetic Peanut, inner sequence
ggccacagcgtacctcaacgtggacgtgca

SEQ ID NO: 21 - DNA, 30 bp, Artificial Sequence
  Description of Artificial Sequence: Synthetic Peanut, inner sequence
gtcactgtgcctgaccgtcaagttgcggca

SEQ ID NO: 22 - DNA, 30 bp, Artificial Sequence
  Description of Artificial Sequence: Synthetic Peanut, inner sequence
gcactgagcgtacgtatcagcgggcacgta

SEQ ID NO: 23 - DNA, 30 bp, Artificial Sequence
  Description of Artificial Sequence: Synthetic Peanut, inner sequence
ggcacaaacggaccgacaagtgcgcatgga

SEQ ID NO: 24 - DNA, 30 bp, Artificial Sequence
  Description of Artificial Sequence: Synthetic Peanut, inner sequence
ggcctgatcgaacctagagagtggcgtgga

SEQ ID NO: 25 - DNA, 30 bp, Artificial Sequence
  Description of Artificial Sequence: Synthetic Peanut, inner sequence
gcgtgtcagcaatacgtcctcatctgcccg

SEQ ID NO: 26 - DNA, 30 bp, Artificial Sequence
  Description of Artificial Sequence: Synthetic Peanut, inner sequence
ggcctgcgatggatgtgggttgtgctcgtc

SEQ ID NO: 27 - DNA, 30 bp, Artificial Sequence
  Description of Artificial Sequence: Synthetic Peanut, inner sequence
ggcctgcgatggatgtgtgcgtgtattagc

SEQ ID NO: 28 - DNA, 30 bp, Artificial Sequence
  Description of Artificial Sequence: Synthetic Peanut, inner sequence
gtacgcatcgtcccgtcatgtggttccgta

SEQ ID NO: 29 - DNA, 30 bp, Artificial Sequence
  Description of Artificial Sequence: Synthetic Peanut, inner sequence
ggacgcatcgccccttcgagtggacaggta

SEQ ID NO: 30 - DNA, 30 bp, Artificial Sequence
  Description of Artificial Sequence: Synthetic Peanut, inner sequence
ggcatgcacgcacctacacgtgggcacgta

SEQ ID NO: 31 - DNA, 30 bp, Artificial Sequence
  Description of Artificial Sequence: Synthetic Peanut, inner sequence
gtgctgaacgtaccgattcaagtgtgcgtg

SEQ ID NO: 32 - DNA, 30 bp, Artificial Sequence
  Description of Artificial Sequence: Synthetic Peanut, inner sequence
gtcacggaacgaagcctatcaagtgcgaca

SEQ ID NO: 33 - DNA, 30 bp, Artificial Sequence
  Description of Artificial Sequence: Synthetic Peanut, inner sequence
gcactgcacgcaccctatcatgtaggcatg

SEQ ID NO: 34 - DNA, 30 bp, Artificial Sequence
  Description of Artificial Sequence: Synthetic Peanut, inner sequence
gtcatgcgcggacattcaagttggcgtgga

SEQ ID NO: 35 - DNA, 30 bp, Artificial Sequence
  Description of Artificial Sequence: Synthetic Peanut, inner sequence
ccgtagcgacatcaagcggtggtgtgcgta

SEQ ID NO: 36 - DNA, 30 bp, Artificial Sequence
  Description of Artificial Sequence: Synthetic Peanut, inner sequence
cgcatcgtacgtactcctcgtcactgcgtg

SEQ ID NO: 37 - DNA, 30 bp, Artificial Sequence
  Description of Artificial Sequence: Synthetic Peanut, inner sequence
ggccaagctgaccgtaaaggcaggcgtgta

SEQ ID NO: 38 - DNA, 30 bp, Artificial Sequence
  Description of Artificial Sequence: Synthetic Peanut, inner sequence
ggcacggaggatggacgttctgccttggtc

SEQ ID NO: 39 - DNA, 30 bp, Artificial Sequence
  Description of Artificial Sequence: Synthetic Peanut, inner sequence
ggcatgcgctgggtagtgatcacgtacggt

SEQ ID NO: 40 - DNA, 30 bp, Artificial Sequence
  Description of Artificial Sequence: Synthetic Peanut, inner sequence
cgtaccgcaagtgacgtgtccgtgccgtga

SEQ ID NO: 41 - DNA, 30 bp, Artificial Sequence
  Description of Artificial Sequence: Synthetic Peanut, inner sequence
ccgatcgcacgtcaaggcaggctgtacgag

SEQ ID NO: 42 - DNA, 30 bp, Artificial Sequence
  Description of Artificial Sequence: Synthetic Peanut, inner sequence
gacctgactgtgcctatcgagtgcgtgatg

SEQ ID NO: 43 - DNA, 30 bp, Artificial Sequence
  Description of Artificial Sequence: Synthetic Peanut, inner sequence
gacggtgcgtcctaaagtgctcagtgcgtg

SEQ ID NO: 44 - DNA, 30 bp, Artificial Sequence
  Description of Artificial Sequence: Synthetic Peanut, inner sequence
ggacggaacgtgagggcaagtacgtgctcg

SEQ ID NO: 45 - DNA, 30 bp, Artificial Sequence
  Description of Artificial Sequence: Synthetic Peanut, inner sequence
gcactggctgacctacacgtggacgatgtg

SEQ ID NO: 46 - DNA, 30 bp, Artificial Sequence
  Description of Artificial Sequence: Synthetic Peanut, inner sequence
ggacgcagcggaacgttcgagtggtacgta

SEQ ID NO: 47 - DNA, 30 bp, Artificial Sequence
  Description of Artificial Sequence: Synthetic Peanut, inner sequence
gtactgcactgccctacacgtgggaatgga

SEQ ID NO: 48 - DNA, 30 bp, Artificial Sequence
  Description of Artificial Sequence: Synthetic Peanut, inner sequence
ggccaatgcgccccttcatgttgtcgtgta

SEQ ID NO: 49 - DNA, 30 bp, Artificial Sequence
  Description of Artificial Sequence: Synthetic Peanut, inner sequence
cgtaccgacaagggagcacgtacgcggtca

SEQ ID NO: 50 - DNA, 30 bp, Artificial Sequence
  Description of Artificial Sequence: Synthetic Peanut, inner sequence
gcattgggcgaacgaccatcagtgtgcatg

SEQ ID NO: 51 - DNA, 30 bp, Artificial Sequence
  Description of Artificial Sequence: Synthetic Peanut, inner sequence
cgcatgggacgtactgaccggatcgtgtca

SEQ ID NO: 52 - DNA, 30 bp, Artificial Sequence
  Description of Artificial Sequence: Synthetic Peanut, inner sequence
ggacgcaacgtaccgtatcgtggccatgtg

SEQ ID NO: 53 - DNA, 30 bp, Artificial Sequence
  Description of Artificial Sequence: Synthetic Peanut, inner sequence
gcacgtacgccttgcctatctgtgctcatg

SEQ ID NO: 54 - DNA, 30 bp, Artificial Sequence
  Description of Artificial Sequence: Synthetic Peanut, inner sequence
gcattggacgatcgtgccctacacgtgggc

SEQ ID NO: 55 - DNA, 30 bp, Artificial Sequence
  Description of Artificial Sequence: Synthetic Peanut, inner sequence
ggacgcacgcagaccttcaagtcggccatg

SEQ ID NO: 56 - DNA, 30 bp, Artificial Sequence
  Description of Artificial Sequence: Synthetic Peanut, inner sequence
cacgtgcggaggacaacgccctactgcgtg

SEQ ID NO: 57 - DNA, 30 bp, Artificial Sequence
  Description of Artificial Sequence: Synthetic Peanut, inner sequence
tggccaacgctacctatggacgtgtgcgtg

SEQ ID NO: 58 - DNA, 30 bp, Artificial Sequence
  Description of Artificial Sequence: Synthetic Peanut, inner sequence
gtacggaacggaacaacaagggcaggcatg

SEQ ID NO: 59 - DNA, 30 bp, Artificial Sequence
  Description of Artificial Sequence: Synthetic Peanut, inner sequence
gacgacacgaccttcaagcatggcctagcg

SEQ ID NO: 60 - DNA, 30 bp, Artificial Sequence
  Description of Artificial Sequence: Synthetic Peanut, inner sequence
cgcgacgagtaggcatgtcttctgtgtgca

SEQ ID NO: 61 - DNA, 30 bp, Artificial Sequence
  Description of Artificial Sequence: Synthetic Peanut, inner sequence
gccgacgatgacctggacgtgtggttgtcc

SEQ ID NO: 62 - DNA, 30 bp, Artificial Sequence
  Description of Artificial Sequence: Synthetic Peanut, inner sequence
gccatcgtacgatcgtacccggcatgcacg

SEQ ID NO: 63 - DNA, 30 bp, Artificial Sequence
  Description of Artificial Sequence: Synthetic Peanut, inner sequence
tggacaacgatgccctgtcgtgtgcgcggt

SEQ ID NO: 64 - DNA, 30 bp, Artificial Sequence
  Description of Artificial Sequence: Synthetic Peanut, inner sequence
cgcaacggtgacgagcagtgagtgcatgta

SEQ ID NO: 65 - DNA, 30 bp, Artificial Sequence
  Description of Artificial Sequence: Synthetic Peanut, inner sequence
cacacgtatggtcggcgatggactgtggca

SEQ ID NO: 66 - DNA, 30 bp, Artificial Sequence
  Description of Artificial Sequence: Synthetic Peanut, inner sequence
ggactgaacgtactgccaggtgagcatgca

SEQ ID NO: 67 - DNA, 30 bp, Artificial Sequence
  Description of Artificial Sequence: Synthetic Peanut, inner sequence
cgatggtacgaacgccacgtcatgcggtca

SEQ ID NO: 68 - DNA, 30 bp, Artificial Sequence
  Description of Artificial Sequence: Synthetic Peanut, inner sequence
cgcaacgtcagtgtgcatggatgcgtcctg

SEQ ID NO: 69 - DNA, 30 bp, Artificial Sequence
  Description of Artificial Sequence: Synthetic Peanut, inner sequence
cacgtggcagtgggaagtgtgcactacgca

SEQ ID NO: 70 - DNA, 29 bp, Artificial Sequence
  Description of Artificial Sequence: Synthetic Peanut, inner sequence
gcacgccgatgccctcatgtggccgtgga

SEQ ID NO: 71 - DNA, 30 bp, Artificial Sequence
  Description of Artificial Sequence: Synthetic Peanut, inner sequence
ccgtagcgacatcaagcggtgttgtgcgtg

SEQ ID NO: 72 - DNA, 30 bp, Artificial Sequence
  Description of Artificial Sequence: Synthetic Peanut, inner sequence
catgcaatacgtcagcgtaccgtgtgcaca

SEQ ID NO: 73 - DNA, 30 bp, Artificial Sequence
  Description of Artificial Sequence: Synthetic Peanut, inner sequence
cgcaccggacgtgacgacgtagtgtggcca

SEQ ID NO: 74 - DNA, 30 bp, Artificial Sequence
  Description of Artificial Sequence: Synthetic Peanut, inner sequence
gtacgcacgatgagcgccaagtgacatgga

SEQ ID NO: 75 - DNA, 30 bp, Artificial Sequence
  Description of Artificial Sequence: Synthetic Peanut, inner sequence
cgatgtgcagagtggtggacaagctgcgca

SEQ ID NO: 76 - DNA, 30 bp, Artificial Sequence
  Description of Artificial Sequence: Synthetic Peanut, inner sequence
catgtgtcgactcgccctatcatgcggtca

SEQ ID NO: 77 - DNA, 30 bp, Artificial Sequence
  Description of Artificial Sequence: Synthetic Peanut, inner sequence
gtgcgagcagaccgacgcgagtggtacgtg

SEQ ID NO: 78 - DNA, 30 bp, Artificial Sequence
  Description of Artificial Sequence: Synthetic Peanut, inner sequence
ggcatgcacgaacactatcatggcggcatg

SEQ ID NO: 79 - DNA, 30 bp, Artificial Sequence
  Description of Artificial Sequence: Synthetic Peanut, inner sequence
ggcatgatcgaccgcatagtcacgtacgca

SEQ ID NO: 80 - DNA, 30 bp, Artificial Sequence
  Description of Artificial Sequence: Synthetic Peanut, inner sequence
gcacgcaacgaacctacgagtgatcgtgta

SEQ ID NO: 81 - DNA, 30 bp, Artificial Sequence
  Description of Artificial Sequence: Synthetic Peanut, inner sequence
ggacgcaacgtaccgtatcgtggccatgta

SEQ ID NO: 82 - DNA, 30 bp, Artificial Sequence
  Description of Artificial Sequence: Synthetic Peanut, inner sequence
ccgcatcggaccgatcaaggcaggcttgga

SEQ ID NO: 83 - DNA, 30 bp, Artificial Sequence
  Description of Artificial Sequence: Synthetic Peanut, inner sequence
cggaccggtgacgagtgctagtacggcatg

SEQ ID NO: 84 - DNA, 30 bp, Artificial Sequence
  Description of Artificial Sequence: Synthetic Peanut, inner sequence
cgtgcgcgagacatggtccatcggttcgtg

SEQ ID NO: 85 - DNA, 30 bp, Artificial Sequence
  Description of Artificial Sequence: Synthetic Peanut, inner sequence
ggcatgcgatggatgtgggttgtgctcgtc

SEQ ID NO: 86 - DNA, 30 bp, Artificial Sequence
  Description of Artificial Sequence: Synthetic Peanut, inner sequence
cacgacagcgttagcaggccatgcgacacg

SEQ ID NO: 87 - DNA, 30 bp, Artificial Sequence
  Description of Artificial Sequence: Synthetic Peanut, inner sequence
cacgcaaggacagcacacctgactggcgtg

SEQ ID NO: 88 - DNA, 30 bp, Artificial Sequence
  Description of Artificial Sequence: Synthetic Peanut, inner sequence
acgtgtggcatgcgactgtccgtgttcatg

SEQ ID NO: 89 - DNA, 30 bp, Artificial Sequence
  Description of Artificial Sequence: Synthetic Peanut, inner sequence
ggccatgtcgacctatggtgatgtgcgacg

SEQ ID NO: 90 - DNA, 30 bp, Artificial Sequence
  Description of Artificial Sequence: Synthetic Peanut, inner sequence
acgtgacggatcgatggacctcagtgcgtg

SEQ ID NO: 91 - DNA, 30 bp, Artificial Sequence
  Description of Artificial Sequence: Synthetic Peanut, inner sequence
cgcaaccggcacgtgagcactgtacgatcg

SEQ ID NO: 92 - DNA, 30 bp, Artificial Sequence
  Description of Artificial Sequence: Synthetic Peanut, inner sequence
gacgcacgacgaccggtcaagttcggcatg

SEQ ID NO: 93 - DNA, 30 bp, Artificial Sequence
  Description of Artificial Sequence: Synthetic Peanut, inner sequence
gtacgcgacgtccctgagagtgtgcaggta

SEQ ID NO: 94 - DNA, 30 bp, Artificial Sequence
  Description of Artificial Sequence: Synthetic Peanut, inner sequence
ggactgcgcgtgacctatcaatggcatgta

SEQ ID NO: 95 - DNA, 30 bp, Artificial Sequence
  Description of Artificial Sequence: Synthetic Peanut, inner sequence
ggcagtgtcgtgcccgtcaatgtgtgcatg

SEQ ID NO: 96 - DNA, 30 bp, Artificial Sequence
  Description of Artificial Sequence: Synthetic Peanut, inner sequence
cgcacgatcgtcctgccctcacgtggcgca

SEQ ID NO: 97 - DNA, 30 bp, Artificial Sequence
  Description of Artificial Sequence: Synthetic Peanut, inner sequence
ggacgagcggaaggtgaggcatggtgcgta

SEQ ID NO: 98 - DNA, 30 bp, Artificial Sequence
  Description of Artificial Sequence: Synthetic Peanut, inner sequence
cgaccgtgacgcaggataacgtactgcgca

SEQ ID NO: 99 - DNA, 30 bp, Artificial Sequence
  Description of Artificial Sequence: Synthetic Peanut, inner sequence
tcgatcgatccgtcaagcaggcacgtgtca

SEQ ID NO: 100 - DNA, 30 bp, Artificial Sequence
  Description of Artificial Sequence: Synthetic Peanut, inner sequence
gtacgcgctggtcccgtatcatgtgcgtca

SEQ ID NO: 101 - DNA, 30 bp, Artificial Sequence
  Description of Artificial Sequence: Synthetic Peanut, inner sequence
cgcaccacacgcacgttatgcacctgcgct

SEQ ID NO: 102 - DNA, 30 bp, Artificial Sequence
  Description of Artificial Sequence: Synthetic Peanut, inner sequence
ggcatgcgaatggatgtgacgatgtgcgtg

SEQ ID NO: 103 - DNA, 30 bp, Artificial Sequence
  Description of Artificial Sequence: Synthetic Peanut, inner sequence
cgaaccgcatgtaaggtcacgcacgtcgta

SEQ ID NO: 104 - DNA, 30 bp, Artificial Sequence
  Description of Artificial Sequence: Synthetic Peanut, inner sequence
cgcaccgtagatacgtcatgcacgctgaca

SEQ ID NO: 105 - DNA, 30 bp, Artificial Sequence
  Description of Artificial Sequence: Synthetic Peanut, inner sequence
cgtaccgaacgcggtcttgtgcactacgtg

SEQ ID NO: 106 - DNA, 30 bp, Artificial Sequence
  Description of Artificial Sequence: Synthetic Peanut, inner sequence
gtactgcactgccctacacgtgggtatgga

SEQ ID NO: 107 - DNA, 30 bp, Artificial Sequence
  Description of Artificial Sequence: Synthetic Peanut, inner sequence
gcatcacagtcactatcttccgtgggcacg

SEQ ID NO: 108 - DNA, 30 bp, Artificial Sequence
  Description of Artificial Sequence: Synthetic Peanut, inner sequence
gcaacggcagcgtacgtgctttacgtcacg

SEQ ID NO: 109 - DNA, 30 bp, Artificial Sequence
  Description of Artificial Sequence: Synthetic Peanut, inner sequence
gtgcgccgatatcccttcacagttggcatg

SEQ ID NO: 110 - DNA, 30 bp, Artificial Sequence
  Description of Artificial Sequence: Synthetic Peanut, inner sequence
caggcacaacgcacgtgacaccgctgcgca

SEQ ID NO: 111 - DNA, 30 bp, Artificial Sequence
  Description of Artificial Sequence: Synthetic Peanut, inner sequence
ggacaacgtggctggtaggtatcgtgggca

SEQ ID NO: 112 - DNA, 30 bp, Artificial Sequence
  Description of Artificial Sequence: Synthetic Peanut, inner sequence
tggccagaacgacaagtgcatgcgcagtga

SEQ ID NO: 113 - DNA, 30 bp, Artificial Sequence
  Description of Artificial Sequence: Synthetic Peanut, inner sequence
cgcacccggcaagacggaatgtggttggcg

SEQ ID NO: 114 - DNA, 30 bp, Artificial Sequence
  Description of Artificial Sequence: Synthetic Peanut, inner sequence
cgcaccgtcgatacgtcattcacgctgaca

SEQ ID NO: 115 - DNA, 30 bp, Artificial Sequence
  Description of Artificial Sequence: Synthetic Peanut, inner sequence
cgatgctacacgtgacggcatgcgcttggc

SEQ ID NO: 116 - DNA, 30 bp, Artificial Sequence
  Description of Artificial Sequence: Synthetic Peanut, inner sequence
ggcctgcgatggaatgtgcgaatgtacgca

SEQ ID NO: 117 - DNA, 30 bp, Artificial Sequence
  Description of Artificial Sequence: Synthetic Peanut, inner sequence
gcaatgggtggccacctcgtcacgcgtggt

SEQ ID NO: 118 - DNA, 30 bp, Artificial Sequence
  Description of Artificial Sequence: Synthetic Peanut, inner sequence
ccgcacgcgacagaacgtgttcatgcactg

SEQ ID NO: 119 - DNA, 30 bp, Artificial Sequence
  Description of Artificial Sequence: Synthetic Peanut, inner sequence
gtcatgcgatggatgtgggttgtgctcgtc

SEQ ID NO: 120 - DNA, 30 bp, Artificial Sequence
  Description of Artificial Sequence: Synthetic Peanut, inner sequence
ggatggccgaactgtgccgtggagtgcatg

SEQ ID NO: 121 - DNA, 30 bp, Artificial Sequence
  Description of Artificial Sequence: Synthetic Peanut, inner sequence
ccgtagcgacatcaagctgtggtgtgcgtg

SEQ ID NO: 122 - DNA, 30 bp, Artificial Sequence
  Description of Artificial Sequence: Synthetic Peanut, inner sequence
ggacgcgtcgaccttcaagtgtgccgtgga

SEQ ID NO: 123 - DNA, 30 bp, Artificial Sequence
  Description of Artificial Sequence: Synthetic Peanut, inner sequence
ccgtagcgacatcaagcggtggtgtgcatg

SEQ ID NO: 124 - DNA, 30 bp, Artificial Sequence
  Description of Artificial Sequence: Synthetic Peanut, inner sequence
cacgtgcatgctaacgtacggccagggaca

SEQ ID NO: 125 - DNA, 30 bp, Artificial Sequence
  Description of Artificial Sequence: Synthetic Peanut, inner sequence
ggcctgactgtgcctatcgagtgcgtgatg

SEQ ID NO: 126 - DNA, 30 bp, Artificial Sequence
  Description of Artificial Sequence: Synthetic Peanut, inner sequence
gatgcacgcaacgtacccttcatgtggcca

SEQ ID NO: 127 - DNA, 30 bp, Artificial Sequence
  Description of Artificial Sequence: Synthetic Peanut, inner sequence
ctcatgcggaccgaactggatgtgtgcatg

SEQ ID NO: 128 - DNA, 30 bp, Artificial Sequence
  Description of Artificial Sequence: Synthetic Peanut, inner sequence
ggcctgcgatggatgtgggctagtatgggc

SEQ ID NO: 129 - DNA, 30 bp, Artificial Sequence
  Description of Artificial Sequence: Synthetic Peanut, inner sequence
cacgatccgaccaggcgtgacgtggccatg

SEQ ID NO: 130 - DNA, 30 bp, Artificial Sequence
  Description of Artificial Sequence: Synthetic Peanut, inner sequence
cgatccgtcaaggtagtgatgtgctacgtg

SEQ ID NO: 131 - DNA, 30 bp, Artificial Sequence
  Description of Artificial Sequence: Synthetic Peanut, inner sequence
tgtggccaaacgcgcatacacgtgctcatg

SEQ ID NO: 132 - DNA, 30 bp, Artificial Sequence
  Description of Artificial Sequence: Synthetic Peanut, inner sequence
ccgtagcgacatcaagcggtggtgtgcgtc

SEQ ID NO: 133 - DNA, 30 bp, Artificial Sequence
  Description of Artificial Sequence: Synthetic Peanut, inner sequence
atggccgcagctgacctagcatgtgtgtca

SEQ ID NO: 134 - DNA, 30 bp, Artificial Sequence
  Description of Artificial Sequence: Synthetic Peanut, inner sequence
gacacgccgatgagcctagcctgtacgacg

SEQ ID NO: 135 - DNA, 30 bp, Artificial Sequence
  Description of Artificial Sequence: Synthetic Peanut, inner sequence
cgaccgtgacgtgtgcagtagtacggcgtg

SEQ ID NO: 136 - DNA, 30 bp, Artificial Sequence
  Description of Artificial Sequence: Synthetic Peanut, inner sequence
gccgtcgcgacctagcaagtgcgatgtgga

SEQ ID NO: 137 - DNA, 30 bp, Artificial Sequence
  Description of Artificial Sequence: Synthetic Peanut, inner sequence
cgcaccgtcgatacgtcatgcactctgaca

SEQ ID NO: 138 - DNA, 30 bp, Artificial Sequence
  Description of Artificial Sequence: Synthetic Peanut, inner sequence
cgtgccaggacatgacgtgcacgctgcgca

SEQ ID NO: 139 - DNA, 30 bp, Artificial Sequence
  Description of Artificial Sequence: Synthetic Peanut, inner sequence
ggcctgcgatggatgaggtgctgcactagt

SEQ ID NO: 140 - DNA, 30 bp, Artificial Sequence
  Description of Artificial Sequence: Synthetic Peanut, inner sequence
catgtgcgtggagaacgtccctatgcgaca

SEQ ID NO: 141 - DNA, 30 bp, Artificial Sequence
  Description of Artificial Sequence: Synthetic Peanut, inner sequence
ccgtagcgacatcaagcgttggtgtgcgtg

SEQ ID NO: 142 - DNA, 30 bp, Artificial Sequence
  Description of Artificial Sequence: Synthetic Peanut, inner sequence
catatgccgatcgacactagcaagtgtgca

SEQ ID NO: 143 - DNA, 30 bp, Artificial Sequence
  Description of Artificial Sequence: Synthetic Peanut, inner sequence
catgtgtgcacaaccgatgtatgctgcgtg

SEQ ID NO: 144 - DNA, 30 bp, Artificial Sequence
  Description of Artificial Sequence: Synthetic Peanut, inner sequence
ccgtagcgacatcaagcggcggtgtgcgtg

SEQ ID NO: 145 - DNA, 30 bp, Artificial Sequence
  Description of Artificial Sequence: Synthetic Peanut, inner sequence
gtacgactcgcaccctatcatgaggccatg

SEQ ID NO: 146 - DNA, 30 bp, Artificial Sequence
  Description of Artificial Sequence: Synthetic Peanut, inner sequence
gtctgagcgcaacctcgtggactgtgcgtg

SEQ ID NO: 147 - DNA, 30 bp, Artificial Sequence
  Description of Artificial Sequence: Synthetic Peanut, inner sequence
gtgcgacctgacctagcaagcggtagtgta

SEQ ID NO: 148 - DNA, 28 bp, Artificial Sequence
  Description of Artificial Sequence: Synthetic Peanut, inner sequence
ggacgcagctgacctagcatgtgtgtca

SEQ ID NO: 149 - DNA, 30 bp, Artificial Sequence
  Description of Artificial Sequence: Synthetic Peanut, inner sequence
cgtaccgtcgatacgtcatgcacgctgaca

SEQ ID NO: 150 - DNA, 31 bp, Artificial Sequence
  Description of Artificial Sequence: Synthetic Peanut, inner sequence
ggcctgcgatggatggggtcagcacgttggc

SEQ ID NO: 151 - DNA, 30 bp, Artificial Sequence
  Description of Artificial Sequence: Synthetic Peanut, inner sequence
ccgtagcgacatcaagcggtggcgtgcgtg

SEQ ID NO: 152 - DNA, 30 bp, Artificial Sequence
  Description of Artificial Sequence: Synthetic Peanut, inner sequence
cgtaacgcgatgtcaggcacgagttgcaca

SEQ ID NO: 153 - DNA, 30 bp, Artificial Sequence
  Description of Artificial Sequence: Synthetic Peanut, inner sequence
cgcaccatgaaaggggtgaggtacgtcgcg

SEQ ID NO: 154 - DNA, 30 bp, Artificial Sequence
  Description of Artificial Sequence: Synthetic Peanut, inner sequence
gcatcggatgacgcaactgaccgagtggga

SEQ ID NO: 155 - DNA, 30 bp, Artificial Sequence
  Description of Artificial Sequence: Synthetic Peanut, inner sequence
cgtaccgcaagggggagagtgcgtgttggt

SEQ ID NO: 156 - DNA, 30 bp, Artificial Sequence
  Description of Artificial Sequence: Synthetic Peanut, inner sequence
gacgctgcgttccctatcatgtgcggcatg

SEQ ID NO: 157 - DNA, 30 bp, Artificial Sequence
  Description of Artificial Sequence: Synthetic Peanut, inner sequence
ccagccgaaccgcagatggtgcatgtcgca

SEQ ID NO: 158 - DNA, 30 bp, Artificial Sequence
  Description of Artificial Sequence: Synthetic Peanut, inner sequence
cgcaccgggacgagacgtgctagtgtgtca

SEQ ID NO: 159 - DNA, 30 bp, Artificial Sequence
  Description of Artificial Sequence: Synthetic Peanut, inner sequence
cgtgtcgtaggggatgagctgagcttggtc

SEQ ID NO: 160 - DNA, 30 bp, Artificial Sequence
  Description of Artificial Sequence: Synthetic Peanut, inner sequence
catgcacgacgtcatacacggcactgctgc

SEQ ID NO: 161 - DNA, 30 bp, Artificial Sequence
  Description of Artificial Sequence: Synthetic Peanut, inner sequence
gtcatgcacgcacctacacgtgggtatgga

SEQ ID NO: 162 - DNA, 30 bp, Artificial Sequence
  Description of Artificial Sequence: Synthetic Peanut, inner sequence
cacgtacggtaagacgtcacaacatgcaca

SEQ ID NO: 163 - DNA, 30 bp, Artificial Sequence
  Description of Artificial Sequence: Synthetic Peanut, inner sequence
gcacgcactcaaccgccaagtgccgtcgtg

SEQ ID NO: 164 - DNA, 30 bp, Artificial Sequence
  Description of Artificial Sequence: Synthetic Peanut, inner sequence
ggatcgcacgctgcactatcacgttgggca

SEQ ID NO: 165 - DNA, 30 bp, Artificial Sequence
  Description of Artificial Sequence: Synthetic Peanut, inner sequence
cgacccaacgtggcggtgacagtcgttgca

SEQ ID NO: 166 - DNA, 30 bp, Artificial Sequence
  Description of Artificial Sequence: Synthetic Peanut, inner sequence
gtgcgcacgatggatgtggatggccagtct

SEQ ID NO: 167 - DNA, 30 bp, Artificial Sequence
  Description of Artificial Sequence: Synthetic Peanut, inner sequence
tgcaccgtcgatacgtcatgcacgctgaca

SEQ ID NO: 168 - DNA, 30 bp, Artificial Sequence
  Description of Artificial Sequence: Synthetic Peanut, inner sequence
ccgagcggaacgtcaagtcggcagtacgca

SEQ ID NO: 169 - DNA, 30 bp, Artificial Sequence
  Description of Artificial Sequence: Synthetic Peanut, inner sequence
cgcaacgtaacggtacgcctacgcttcacg

SEQ ID NO: 170 - DNA, 30 bp, Artificial Sequence
  Description of Artificial Sequence: Synthetic Peanut, inner sequence
cacggcagcgacgtccacatgtcctgcgca

SEQ ID NO: 171 - DNA, 30 bp, Artificial Sequence
  Description of Artificial Sequence: Synthetic Peanut, inner sequence
gcactgccgacctaacgagtgcgttgtgtg

SEQ ID NO: 172 - DNA, 30 bp, Artificial Sequence
  Description of Artificial Sequence: Synthetic Peanut, inner sequence
cgacacgacaaggcatggactgactgcatg

SEQ ID NO: 173 - DNA, 30 bp, Artificial Sequence
  Description of Artificial Sequence: Synthetic Peanut, inner sequence
gcgtagcgacatcaagcggtggtgtgcgtg

SEQ ID NO: 174 - DNA, 30 bp, Artificial Sequence
  Description of Artificial Sequence: Synthetic Peanut, inner sequence
ccgtagcgacatcaagcggtggtgtgcgcg

SEQ ID NO: 175 - DNA, 30 bp, Artificial Sequence
  Description of Artificial Sequence: Synthetic Peanut, inner sequence
gtacaagcggaccgtcaacgtggttgtgga

SEQ ID NO: 176 - DNA, 30 bp, Artificial Sequence
  Description of Artificial Sequence: Synthetic Peanut, inner sequence
cacaccgtcgatacgtcatgcacgctgaca

SEQ ID NO: 177 - DNA, 30 bp, Artificial Sequence
  Description of Artificial Sequence: Synthetic Peanut, inner sequence
cgcaccgtcgatacttcatgcacgctgaca

SEQ ID NO: 178 - DNA, 30 bp, Artificial Sequence
  Description of Artificial Sequence: Synthetic Peanut, inner sequence
cgtgacagcgtgcaatgtgctgcttggcca

SEQ ID NO: 179 - DNA, 30 bp, Artificial Sequence
  Description of Artificial Sequence: Synthetic Peanut, inner sequence
cggaccgcgaaagtcaggctgtgctttggc

SEQ ID NO: 180 - DNA, 30 bp, Artificial Sequence
  Description of Artificial Sequence: Synthetic Peanut, inner sequence
cacgcacacaaccgacagtgagttggcgta

SEQ ID NO: 181 - DNA, 30 bp, Artificial Sequence
  Description of Artificial Sequence: Synthetic Peanut, inner sequence
cacgtggacggaagcacggtagcatacgtg

SEQ ID NO: 182 - DNA, 30 bp, Artificial Sequence
  Description of Artificial Sequence: Synthetic Peanut, inner sequence
gtcgtgtcgtacgcctatcgagtgtgcatg

SEQ ID NO: 183 - DNA, 30 bp, Artificial Sequence
  Description of Artificial Sequence: Synthetic Peanut, inner sequence
ccatgccggaccggagcgtggccatgcaca

SEQ ID NO: 184 - DNA, 30 bp, Artificial Sequence
  Description of Artificial Sequence: Synthetic Peanut, inner sequence
ccgtagcgacatcaagcggtggtgcgcgtg

SEQ ID NO: 185 - DNA, 30 bp, Artificial Sequence
  Description of Artificial Sequence: Synthetic Peanut, inner sequence
gcatagccgtaacgtaccgccgtggccatg

SEQ ID NO: 186 - DNA, 30 bp, Artificial Sequence
  Description of Artificial Sequence: Synthetic Peanut, inner sequence
cgtgtggcctgactccccttcaatgcgtca

SEQ ID NO: 187 - DNA, 30 bp, Artificial Sequence
  Description of Artificial Sequence: Synthetic Peanut, inner sequence
ggacgcgatggatgtggacggtgtggtagt

SEQ ID NO: 188 - DNA, 30 bp, Artificial Sequence
  Description of Artificial Sequence: Synthetic Peanut, inner sequence
gaacggaacgcagcgtcaagtcggtgcatg

SEQ ID NO: 189 - DNA, 30 bp, Artificial Sequence
  Description of Artificial Sequence: Synthetic Peanut, inner sequence
ccatgtgaacgcactgtggctagctggtca

SEQ ID NO: 190 - DNA, 30 bp, Artificial Sequence
  Description of Artificial Sequence: Synthetic Peanut, inner sequence
cgcaccgtcgatacgccatgcacgctgaca

SEQ ID NO: 191 - DNA, 30 bp, Artificial Sequence
  Description of Artificial Sequence: Synthetic Peanut, inner sequence
gtcatgctcgcactatcaggtgtgcatgga

SEQ ID NO: 192 - DNA, 30 bp, Artificial Sequence
  Description of Artificial Sequence: Synthetic Peanut, inner sequence
ccgtagcgacatcaagcggtggtgttcgtg

SEQ ID NO: 193 - DNA, 29 bp, Artificial Sequence
  Description of Artificial Sequence: Synthetic Peanut, inner sequence
gcacgtcgaaacacgtagccatgcacggt

SEQ ID NO: 194 - DNA, 30 bp, Artificial Sequence
  Description of Artificial Sequence: Synthetic Peanut, inner sequence
ccgtagcgacatcaagcgggggtgtgcgtg

SEQ ID NO: 195 - DNA, 30 bp, Artificial Sequence
  Description of Artificial Sequence: Synthetic Peanut, inner sequence
cgcgtgacgataaggtgtgctgcgctccgt

SEQ ID NO: 196 - DNA, 30 bp, Artificial Sequence
  Description of Artificial Sequence: Synthetic Peanut, inner sequence
gtcgcgatgagctagcatgtgcgttgtgta

SEQ ID NO: 197 - DNA, 30 bp, Artificial Sequence
  Description of Artificial Sequence: Synthetic Peanut, inner sequence
gcaactgcacgcattggaccgcacgtcaca

SEQ ID NO: 198 - DNA, 30 bp, Artificial Sequence
  Description of Artificial Sequence: Synthetic Peanut, inner sequence
ccgatcggacgtaggaatgcacgtggcagt

SEQ ID NO: 199 - DNA, 30 bp, Artificial Sequence
  Description of Artificial Sequence: Synthetic Peanut, inner sequence
cacgtgcgtagttacgctggtcactgcggt

SEQ ID NO: 200 - DNA, 30 bp, Artificial Sequence
  Description of Artificial Sequence: Synthetic Peanut, inner sequence
ggacgcacatcccgttcatgtgtgcatgta

SEQ ID NO: 201 - DNA, 30 bp, Artificial Sequence
  Description of Artificial Sequence: Synthetic Peanut, inner sequence
gcacgactcgcaccctatcatgtaggcatg

SEQ ID NO: 202 - DNA, 30 bp, Artificial Sequence
  Description of Artificial Sequence: Synthetic Peanut, inner sequence
cacgatgctgtcgaacgtgtgtcgctgcgc

SEQ ID NO: 203 - DNA, 30 bp, Artificial Sequence
  Description of Artificial Sequence: Synthetic Peanut, inner sequence
gacgcactcgaacgtacatgtgagcatgga

SEQ ID NO: 204 - DNA, 30 bp, Artificial Sequence
  Description of Artificial Sequence: Synthetic Peanut, inner sequence
ccgtagcgacatcaagcggtggtgtgcgtt

SEQ ID NO: 205 - DNA, 30 bp, Artificial Sequence
  Description of Artificial Sequence: Synthetic Peanut, inner sequence
tgacgcagcggaacgttcgagtggtacgta

SEQ ID NO: 206 - DNA, 30 bp, Artificial Sequence
  Description of Artificial Sequence: Synthetic Peanut, inner sequence
cgcatggcggtgacatgttgcgtctacccg

SEQ ID NO: 207 - DNA, 30 bp, Artificial Sequence
  Description of Artificial Sequence: Synthetic Peanut, inner sequence
gtcatgcgcgtaccatcgagggggcgtgga

SEQ ID NO: 208 - DNA, 30 bp, Artificial Sequence
  Description of Artificial Sequence: Synthetic Peanut, inner sequence
gtgccgaacgaacccttcacagtgtgcatg

SEQ ID NO: 209 - DNA, 30 bp, Artificial Sequence
  Description of Artificial Sequence: Synthetic Peanut, inner sequence
ccacgatgcccgatgcgtacgccatgcaca

SEQ ID NO: 210 - DNA, 30 bp, Artificial Sequence
  Description of Artificial Sequence: Synthetic Peanut, inner sequence
catgctgacggtcaagcaccactctgcgcg

SEQ ID NO: 211 - DNA, 30 bp, Artificial Sequence
  Description of Artificial Sequence: Synthetic Peanut, inner sequence
ggcagcgcagaccgagtgagagtgggtgtg

SEQ ID NO: 212 - DNA, 30 bp, Artificial Sequence
  Description of Artificial Sequence: Synthetic Peanut, inner sequence
ccgtagcgacatcaagcggttgtgtgcgtg

SEQ ID NO: 213 - DNA, 30 bp, Artificial Sequence
  Description of Artificial Sequence: Synthetic Peanut, inner sequence
cgacgcaatcggacactggacatgcgcaga

SEQ ID NO: 214 - DNA, 30 bp, Artificial Sequence
  Description of Artificial Sequence: Synthetic Peanut, inner sequence
cgtaccagcaagcggacaagtagtgcgaca

SEQ ID NO: 215 - DNA, 30 bp, Artificial Sequence
  Description of Artificial Sequence: Synthetic Peanut, inner sequence
tgtcgtgcgatggatgtggcatgctctggc

SEQ ID NO: 216 - DNA, 31 bp, Artificial Sequence
  Description of Artificial Sequence: Synthetic Peanut, inner sequence
gtgcgcacgatggatgtgggttgtgctcgtc

SEQ ID NO: 217 - DNA, 30 bp, Artificial Sequence
  Description of Artificial Sequence: Synthetic Peanut, inner sequence
acgtcgcagccaacgtggaacacatgcgca

SEQ ID NO: 218 - DNA, 30 bp, Artificial Sequence
  Description of Artificial Sequence: Synthetic Peanut, inner sequence
ggacgcaatcgtcacttcaagtacggcatg

SEQ ID NO: 219 - DNA, 30 bp, Artificial Sequence
  Description of Artificial Sequence: Synthetic Peanut, inner sequence
cgcacactacgacagtgaccacgctgcacg

SEQ ID NO: 220 - DNA, 30 bp, Artificial Sequence
  Description of Artificial Sequence: Synthetic Peanut, inner sequence
ggacgcagcgtaacgttcgagtggtacgta

SEQ ID NO: 221 - DNA, 31 bp, Artificial Sequence
  Description of Artificial Sequence: Synthetic Peanut, inner sequence
gtgctgacgaaccctagcaagtgcatgcgtg

SEQ ID NO: 222 - DNA, 30 bp, Artificial Sequence
  Description of Artificial Sequence: Synthetic Peanut, inner sequence
cgcaacgcagggcatggttgtcgtgtcgta

SEQ ID NO: 223 - DNA, 30 bp, Artificial Sequence
  Description of Artificial Sequence: Synthetic Peanut, inner sequence
cgcaccgtcgatacgtaatgcacgctgaca

SEQ ID NO: 224 - DNA, 30 bp, Artificial Sequence
  Description of Artificial Sequence: Synthetic Peanut, inner sequence
cgtgacgtcgaaagggtgatcgtgcgcatg

SEQ ID NO: 225 - DNA, 30 bp, Artificial Sequence
  Description of Artificial Sequence: Synthetic Peanut, inner sequence
cacgcagtggacgtacgtgtcgtaggcatg

SEQ ID NO: 226 - DNA, 30 bp, Artificial Sequence
  Description of Artificial Sequence: Synthetic Peanut, inner sequence
cgcaccgtatgaggagtgtgtctgtgcgcg

SEQ ID NO: 227 - DNA, 30 bp, Artificial Sequence
  Description of Artificial Sequence: Synthetic Peanut, inner sequence
ccgtagcgacatcaatcggtggtgtgcgtg

SEQ ID NO: 228 - DNA, 30 bp, Artificial Sequence
  Description of Artificial Sequence: Synthetic Peanut, inner sequence
acgtagcgacatcaagcggtggtgtgcgtg

SEQ ID NO: 229 - DNA, 30 bp, Artificial Sequence
  Description of Artificial Sequence: Synthetic Peanut, inner sequence
cgtaccgcaagtgcatcgtgctgggcagca

SEQ ID NO: 230 - DNA, 30 bp, Artificial Sequence
  Description of Artificial Sequence: Synthetic Peanut, inner sequence
gtgctcgcaagacctacacgtggacgtgga

SEQ ID NO: 231 - DNA, 30 bp, Artificial Sequence
  Description of Artificial Sequence: Synthetic Peanut, inner sequence
cgcaccgtcgatacgtcatgcacgctgtca

SEQ ID NO: 232 - DNA, 30 bp, Artificial Sequence
  Description of Artificial Sequence: Synthetic Peanut, inner sequence
ccgtagcgacatcaagcggaggtgtgcgtg

SEQ ID NO: 233 - DNA, 30 bp, Artificial Sequence
  Description of Artificial Sequence: Synthetic Peanut, inner sequence
gacgacgatggcaaggggtgcacgtgctgt

SEQ ID NO: 234 - DNA, 30 bp, Artificial Sequence
  Description of Artificial Sequence: Synthetic Peanut, inner sequence
catgcacaacggcagaacggcttgatcgcg

SEQ ID NO: 235 - DNA, 30 bp, Artificial Sequence
  Description of Artificial Sequence: Synthetic Peanut, inner sequence
cgtgtggcacaagcagggatgatatgcgca

SEQ ID NO: 236 - DNA, 30 bp, Artificial Sequence
  Description of Artificial Sequence: Synthetic Peanut, inner sequence
cgcaccgtctatacgtcatgcacgctgaca

SEQ ID NO: 237 - DNA, 30 bp, Artificial Sequence
  Description of Artificial Sequence: Synthetic Peanut, inner sequence
gcatcggtccgagcgtaacgagcagtggga

SEQ ID NO: 238 - DNA, 30 bp, Artificial Sequence
  Description of Artificial Sequence: Synthetic Peanut, inner sequence
ggcatgcgatggatgtggtgtacccagtcc

SEQ ID NO: 239 - DNA, 30 bp, Artificial Sequence
  Description of Artificial Sequence: Synthetic Peanut, inner sequence
gcactgatcgatacctgagtggcgtacgtg

SEQ ID NO: 240 - DNA, 30 bp, Artificial Sequence
  Description of Artificial Sequence: Synthetic Peanut, inner sequence
ggcattgcgcgcctagcaagttgacgtgta

SEQ ID NO: 241 - DNA, 28 bp, Artificial Sequence
  Description of Artificial Sequence: Synthetic Peanut, inner sequence
ggacgcaacgtaccgtatcgtggccatg

SEQ ID NO: 242 - DNA, 30 bp, Artificial Sequence
  Description of Artificial Sequence: Synthetic Peanut, inner sequence
cgcaccgtcgatacgtcatgcacgcttaca

SEQ ID NO: 243 - DNA, 30 bp, Artificial Sequence
  Description of Artificial Sequence: Synthetic Peanut, inner sequence
ggacgactcgcaccctatcatgaggccatg

SEQ ID NO: 244 - DNA, 30 bp, Artificial Sequence
  Description of Artificial Sequence: Synthetic Peanut, inner sequence
ccgtagcgacatcaagcggtggtttgcgtg

SEQ ID NO: 245 - DNA, 30 bp, Artificial Sequence
  Description of Artificial Sequence: Synthetic Peanut, inner sequence
ggcactgaacgcacgacctacacgtggaca

SEQ ID NO: 246 - DNA, 30 bp, Artificial Sequence
  Description of Artificial Sequence: Synthetic Peanut, inner sequence
cgcaccgtcgatacgtcatgcacgctgacc

SEQ ID NO: 247 - DNA, 30 bp, Artificial Sequence
  Description of Artificial Sequence: Synthetic Peanut, inner sequence
ggacggaacgcagcgtcaagtcggtgcatg

SEQ ID NO: 248 - DNA, 30 bp, Artificial Sequence
  Description of Artificial Sequence: Synthetic Peanut, inner sequence
ggcaccgtcgatacgtcatgcacgctgaca

SEQ ID NO: 249 - DNA, 30 bp, Artificial Sequence
  Description of Artificial Sequence: Synthetic Peanut, inner sequence
cgtgtgcggcgaggaacggtgtgttgcgtg

SEQ ID NO: 250 - DNA, 31 bp, Artificial Sequence
  Description of Artificial Sequence: Synthetic Peanut, inner sequence
ggacgcatcgccccttcgagtgtgacaggta

SEQ ID NO: 251 - DNA, 29 bp, Artificial Sequence
  Description of Artificial Sequence: Synthetic Peanut, inner sequence
gtcatgccatcccttcgagtggacaggta

SEQ ID NO: 252 - DNA, 30 bp, Artificial Sequence
  Description of Artificial Sequence: Synthetic Peanut, inner sequence
gcgtagcgagaatggtcaagtgtgtgcgtg

SEQ ID NO: 253 - DNA, 30 bp, Artificial Sequence
  Description of Artificial Sequence: Synthetic Peanut, inner sequence
acattggcatgccttacctacacgtggcca

SEQ ID NO: 254 - DNA, 30 bp, Artificial Sequence
  Description of Artificial Sequence: Synthetic Peanut, inner sequence
catgcgtgaacgtagctatcatgtggcgca

SEQ ID NO: 255 - DNA, 30 bp, Artificial Sequence
  Description of Artificial Sequence: Synthetic Peanut, inner sequence
cgacacgcagtttgagcccgacgatgcacg

SEQ ID NO: 256 - DNA, 30 bp, Artificial Sequence
  Description of Artificial Sequence: Synthetic Peanut, inner sequence
cgcaccgtcgctacgtcatgcacgctgaca

SEQ ID NO: 257 - DNA, 30 bp, Artificial Sequence
  Description of Artificial Sequence: Synthetic Peanut, inner sequence
ggccgaacgaccgatcgagtggcgcatgga

SEQ ID NO: 258 - DNA, 31 bp, Artificial Sequence
  Description of Artificial Sequence: Synthetic Peanut, inner sequence
ggcatgcgatggatggggtcagcacgttggc

SEQ ID NO: 259 - DNA, 29 bp, Artificial Sequence
  Description of Artificial Sequence: Synthetic Peanut, inner sequence
cgaccagcgcaagtaagtggcgtgatgca

SEQ ID NO: 260 - DNA, 30 bp, Artificial Sequence
  Description of Artificial Sequence: Synthetic Peanut, inner sequence
gtgcatcgatggcgtatgctggtgatgtgc

SEQ ID NO: 261 - DNA, 30 bp, Artificial Sequence
  Description of Artificial Sequence: Synthetic Peanut, inner sequence
cgtagcgcagaaggacacatggactgcacg

SEQ ID NO: 262 - DNA, 30 bp, Artificial Sequence
  Description of Artificial Sequence: Synthetic Peanut, inner sequence
ccgcgcgcatcccttcacagtggtgatgca

SEQ ID NO: 263 - DNA, 30 bp, Artificial Sequence
  Description of Artificial Sequence: Synthetic Peanut, inner sequence
cgcaccgtcgatacgtcacgcacgctgaca

SEQ ID NO: 264 - DNA, 30 bp, Artificial Sequence
  Description of Artificial Sequence: Synthetic Peanut, inner sequence
gtgccaaacgaccaaagcgggcagtgcgta

SEQ ID NO: 265 - DNA, 30 bp, Artificial Sequence
  Description of Artificial Sequence: Synthetic Peanut, inner sequence
ggcatgcgatggatgtgtgcgtgtattagc

SEQ ID NO: 266 - DNA, 30 bp, Artificial Sequence
  Description of Artificial Sequence: Synthetic Peanut, inner sequence
gtgctgcatgagcggtgtgcgtgtacgacg

SEQ ID NO: 267 - DNA, 30 bp, Artificial Sequence
  Description of Artificial Sequence: Synthetic Peanut, inner sequence
cgcaccgtcgatccgtcatgcacgctgaca

SEQ ID NO: 268 - DNA, 30 bp, Artificial Sequence
  Description of Artificial Sequence: Synthetic Peanut, inner sequence
cgacacgtaccaagcgggacaatgtgcagt

SEQ ID NO: 269 - DNA, 30 bp, Artificial Sequence
  Description of Artificial Sequence: Synthetic Peanut, inner sequence
cgaacacgaacagtggatggacgcgtcacg

SEQ ID NO: 270 - DNA, 30 bp, Artificial Sequence
  Description of Artificial Sequence: Synthetic Peanut, inner sequence
gtgcgcggcttgccttcacgtgatcgtgta

SEQ ID NO: 271 - DNA, 30 bp, Artificial Sequence
  Description of Artificial Sequence: Synthetic Peanut, inner sequence
ggactgacgagccgttcatgtggttgtgga

SEQ ID NO: 272 - DNA, 30 bp, Artificial Sequence
  Description of Artificial Sequence: Synthetic Peanut, inner sequence
ccgtagcgacatcaagaggtggtgtgcgtg

SEQ ID NO: 273 - DNA, 30 bp, Artificial Sequence
  Description of Artificial Sequence: Synthetic Peanut, inner sequence
gtacgacgcggaccttcaagtaggcgtgta

SEQ ID NO: 274 - DNA, 30 bp, Artificial Sequence
  Description of Artificial Sequence: Synthetic Peanut, inner sequence
cgcaccgtcgatacgtcatgtacgctgaca

SEQ ID NO: 275 - DNA, 30 bp, Artificial Sequence
  Description of Artificial Sequence: Synthetic Peanut, inner sequence
catggccacgacgcatcaggacatgacgca

SEQ ID NO: 276 - DNA, 30 bp, Artificial Sequence
  Description of Artificial Sequence: Synthetic Peanut, inner sequence
ggcaggcaggacggcgtacagtacgacaca

SEQ ID NO: 277 - DNA, 30 bp, Artificial Sequence
  Description of Artificial Sequence: Synthetic Peanut, inner sequence
cgcaccgtcgatacgtcatgcatgctgaca

SEQ ID NO: 278 - DNA, 30 bp, Artificial Sequence
  Description of Artificial Sequence: Synthetic Peanut, inner sequence
catgcgcaagtcgaagcatcgtcacacgtg

SEQ ID NO: 279 - DNA, 30 bp, Artificial Sequence
  Description of Artificial Sequence: Synthetic Peanut, inner sequence
ggacacagcgtacctcaacgtggacgtgca

SEQ ID NO: 280 - DNA, 30 bp, Artificial Sequence
  Description of Artificial Sequence: Synthetic Peanut, inner sequence
gtcgccacggacctgtcatggatgggcaca

SEQ ID NO: 281 - DNA, 30 bp, Artificial Sequence
  Description of Artificial Sequence: Synthetic Peanut, inner sequence
gccacgtcgtcacgcagcatgtacggcaca

SEQ ID NO: 282 - DNA, 30 bp, Artificial Sequence
  Description of Artificial Sequence: Synthetic Peanut, inner sequence
gcacatggccaactcgaccacatgtgagca

SEQ ID NO: 283 - DNA, 30 bp, Artificial Sequence
  Description of Artificial Sequence: Synthetic Peanut, inner sequence
ccgtagcgacatcaagcggtggggtgcgtg

SEQ ID NO: 284 - DNA, 30 bp, Artificial Sequence
  Description of Artificial Sequence: Synthetic Peanut, inner sequence
cctgcgatgggtgtgggggtgcactgcgtc

SEQ ID NO: 285 - DNA, 30 bp, Artificial Sequence
  Description of Artificial Sequence: Synthetic Peanut, inner sequence
cacatggcctgcgtaccgacacgtggttcg

SEQ ID NO: 286 - DNA, 30 bp, Artificial Sequence
  Description of Artificial Sequence: Synthetic Peanut, inner sequence
gtgctgagctgggagtggtggtgctttggc

SEQ ID NO: 287 - DNA, 30 bp, Artificial Sequence
  Description of Artificial Sequence: Synthetic Peanut, inner sequence
tggacggcgcgatcacgttcatgcggttca

SEQ ID NO: 288 - DNA, 30 bp, Artificial Sequence
  Description of Artificial Sequence: Synthetic Peanut, inner sequence
ggacgagcggaacgatcgagtggttgcgta

SEQ ID NO: 289 - DNA, 30 bp, Artificial Sequence
  Description of Artificial Sequence: Synthetic Peanut, inner sequence
ctcaccgtcgatacgtcatgcacgctgaca

SEQ ID NO: 290 - DNA, 30 bp, Artificial Sequence
  Description of Artificial Sequence: Synthetic Peanut, inner sequence
cgtgccgacgatgacctatcgatgtggaca

SEQ ID NO: 291 - DNA, 30 bp, Artificial Sequence
  Description of Artificial Sequence: Synthetic Peanut, inner sequence
cgcaccgtcgatacgtcatgaacgctgaca

SEQ ID NO: 292 - DNA, 30 bp, Artificial Sequence
  Description of Artificial Sequence: Synthetic Peanut, inner sequence
cgcacagtcgatacgtcatgcacgctgaca

SEQ ID NO: 293 - DNA, 30 bp, Artificial Sequence
  Description of Artificial Sequence: Synthetic Peanut, inner sequence
gtgctgcacggacatatcacgtggcatgga

SEQ ID NO: 294 - DNA, 30 bp, Artificial Sequence
  Description of Artificial Sequence: Synthetic Peanut, inner sequence
gcgcacgtagccctatcagtggtgcatgca

SEQ ID NO: 295 - DNA, 30 bp, Artificial Sequence
  Description of Artificial Sequence: Synthetic Peanut, inner sequence
cacgcacgcatacaacggcaccatggcgtg

SEQ ID NO: 296 - DNA, 30 bp, Artificial Sequence
  Description of Artificial Sequence: Synthetic Peanut, inner sequence
gcgcaagcagaggatgcatgctcttgccgt

SEQ ID NO: 297 - DNA, 30 bp, Artificial Sequence
  Description of Artificial Sequence: Synthetic Peanut, inner sequence
cgaccaaaccgatgggcatacacgtgcaca

SEQ ID NO: 298 - DNA, 30 bp, Artificial Sequence
  Description of Artificial Sequence: Synthetic Peanut, inner sequence
gcatcatgcgtcctctgccactgtgtgtca

SEQ ID NO: 299 - DNA, 30 bp, Artificial Sequence
  Description of Artificial Sequence: Synthetic Peanut, inner sequence
tggccgatgcgtcccttcaatgtgtgcatg

SEQ ID NO: 300 - DNA, 30 bp, Artificial Sequence
  Description of Artificial Sequence: Synthetic Peanut, inner sequence
tggcgtgcacgaaacgcatcgacatgcaca

SEQ ID NO: 301 - DNA, 30 bp, Artificial Sequence
  Description of Artificial Sequence: Synthetic Peanut, inner sequence
cacatagggcacgaatctgggtgtgcgtca

SEQ ID NO: 302 - DNA, 30 bp, Artificial Sequence
  Description of Artificial Sequence: Synthetic Peanut, inner sequence
cgacaccagagtgcatgcctgtacgacacg

SEQ ID NO: 303 - DNA, 30 bp, Artificial Sequence
  Description of Artificial Sequence: Synthetic Peanut, inner sequence
gtcattccgcatcctacacgtgtgcacgta

SEQ ID NO: 304 - DNA, 30 bp, Artificial Sequence
  Description of Artificial Sequence: Synthetic Peanut, inner sequence
ccattgggcattacgtgcgctcacttcgcg

SEQ ID NO: 305 - DNA, 30 bp, Artificial Sequence
  Description of Artificial Sequence: Synthetic Peanut, inner sequence
gtacgtatcggcccggtcaagttcggcatg

SEQ ID NO: 306 - DNA, 30 bp, Artificial Sequence
  Description of Artificial Sequence: Synthetic Peanut, inner sequence
cgaccgatacgcgcatagtgtgtgtggaca

SEQ ID NO: 307 - DNA, 30 bp, Artificial Sequence
  Description of Artificial Sequence: Synthetic Peanut, inner sequence
cgatgcacaagcaatgggcctaacgacacg

SEQ ID NO: 308 - DNA, 30 bp, Artificial Sequence
  Description of Artificial Sequence: Synthetic Peanut, inner sequence
tggccaagcgacctagcaagtgtgctcatg

SEQ ID NO: 309 - DNA, 30 bp, Artificial Sequence
  Description of Artificial Sequence: Synthetic Peanut, inner sequence
cacgcagtgacattgcaggcagagtgcgtc

SEQ ID NO: 310 - DNA, 30 bp, Artificial Sequence
  Description of Artificial Sequence: Synthetic Peanut, inner sequence
ggcatgcacgcacctacacgtgggaatgga

SEQ ID NO: 311 - DNA, 30 bp, Artificial Sequence
  Description of Artificial Sequence: Synthetic Peanut, inner sequence
gtgctgcctgacccacgtggacttgcacta

SEQ ID NO: 312 - DNA, 30 bp, Artificial Sequence
  Description of Artificial Sequence: Synthetic Peanut, inner sequence
ggccgaaacgcagcctagcgagtgtcgtca

SEQ ID NO: 313 - DNA, 30 bp, Artificial Sequence
  Description of Artificial Sequence: Synthetic Peanut, inner sequence
cgcaccagacaagcacgtcacggcgacacg

SEQ ID NO: 314 - DNA, 30 bp, Artificial Sequence
  Description of Artificial Sequence: Synthetic Peanut, inner sequence
gcatacgtacgccacgacacgatctggcca

SEQ ID NO: 315 - DNA, 30 bp, Artificial Sequence
  Description of Artificial Sequence: Synthetic Peanut, inner sequence
cgcaccgcatgacgtgaatggtgaggtatg

SEQ ID NO: 316 - DNA, 30 bp, Artificial Sequence
  Description of Artificial Sequence: Synthetic Peanut, inner sequence
ggcatgcgatggaatgtgcgaatgtacgca

SEQ ID NO: 317 - DNA, 30 bp, Artificial Sequence
  Description of Artificial Sequence: Synthetic Peanut, inner sequence
cgcaccgtcgatacgtcatgcacgttgaca

SEQ ID NO: 318 - DNA, 30 bp, Artificial Sequence
  Description of Artificial Sequence: Synthetic Peanut, inner sequence
ccgcactgacctgacgtggtagtgtcgacg

SEQ ID NO: 319 - DNA, 30 bp, Artificial Sequence
  Description of Artificial Sequence: Synthetic Peanut, inner sequence
gcatggcaagaacgcactgtgttgtggcca

SEQ ID NO: 320 - DNA, 30 bp, Artificial Sequence
  Description of Artificial Sequence: Synthetic Peanut, inner sequence
gtcattccgcatcctacacgttggcacgta

SEQ ID NO: 321 - DNA, 30 bp, Artificial Sequence
  Description of Artificial Sequence: Synthetic Peanut, inner sequence
ggcctgcgatgaacgaggcatgatgcgtca

SEQ ID NO: 322 - DNA, 30 bp, Artificial Sequence
  Description of Artificial Sequence: Synthetic Peanut, inner sequence
gcacgccgatggatgaggtcagtgtgctgt

SEQ ID NO: 323 - DNA, 30 bp, Artificial Sequence
  Description of Artificial Sequence: Synthetic Peanut, inner sequence
gcactgcacgcaccctatcatgaggccatg

SEQ ID NO: 324 - DNA, 30 bp, Artificial Sequence
  Description of Artificial Sequence: Synthetic Peanut, inner sequence
ccgtagcgacataaagcggtggtgtgcgtg

SEQ ID NO: 325 - DNA, 30 bp, Artificial Sequence
  Description of Artificial Sequence: Synthetic Peanut, inner sequence
cacgcgacggtacgtgatgggtgaggcata

SEQ ID NO: 326 - DNA, 30 bp, Artificial Sequence
  Description of Artificial Sequence: Synthetic Peanut, inner sequence
cgaaccgtcgatacgtcatgcacgctgaca

SEQ ID NO: 327 - DNA, 30 bp, Artificial Sequence
  Description of Artificial Sequence: Synthetic Peanut, inner sequence
gtgctgcgatggatgtgggttgtgctcgtc

SEQ ID NO: 328 - DNA, 30 bp, Artificial Sequence
  Description of Artificial Sequence: Synthetic Peanut, inner sequence
gtcagtcgatggatgtgggttgtgctcgtc

SEQ ID NO: 329 - DNA, 30 bp, Artificial Sequence
  Description of Artificial Sequence: Synthetic Peanut, inner sequence
tgactgaacgtaacgtcgagcggttgtgga

SEQ ID NO: 330 - DNA, 30 bp, Artificial Sequence
  Description of Artificial Sequence: Synthetic Peanut, inner sequence
cgtgccaagcgtgtatcaggcatcgacacg

SEQ ID NO: 331 - DNA, 30 bp, Artificial Sequence
  Description of Artificial Sequence: Synthetic Peanut, inner sequence
cgcaacgtcgatacgtcatgcacgctgaca

SEQ ID NO: 332 - DNA, 30 bp, Artificial Sequence
  Description of Artificial Sequence: Synthetic Peanut, inner sequence
cgcaccgtcgatacgtcctgcacgctgaca

SEQ ID NO: 333 - DNA, 30 bp, Artificial Sequence
  Description of Artificial Sequence: Synthetic Peanut, inner sequence
gcacatccagtgcaaccaatggcatgcgtg

SEQ ID NO: 334 - DNA, 29 bp, Artificial Sequence
  Description of Artificial Sequence: Synthetic Peanut, inner sequence
ggccgatcgaccctatcaagtgcagcatg

SEQ ID NO: 335 - DNA, 30 bp, Artificial Sequence
  Description of Artificial Sequence: Synthetic Peanut, inner sequence
cacgtacaacagtgccgttcacagtgcgtg

SEQ ID NO: 336 - DNA, 30 bp, Artificial Sequence
  Description of Artificial Sequence: Synthetic Peanut, inner sequence
cgtaccgggggagtgcgacatgacgacgtg

SEQ ID NO: 337 - DNA, 30 bp, Artificial Sequence
  Description of Artificial Sequence: Synthetic Peanut, inner sequence
cgcaacacgtgacgcactttggtctacgca

SEQ ID NO: 338 - DNA, 30 bp, Artificial Sequence
  Description of Artificial Sequence: Synthetic Peanut, inner sequence
cgtgtgcaggcaggcacaggcgtagtggca

SEQ ID NO: 339 - DNA, 30 bp, Artificial Sequence
  Description of Artificial Sequence: Synthetic Peanut, inner sequence
cgacacgcgtaacgtctagtccgctgctgc

SEQ ID NO: 340 - DNA, 30 bp, Artificial Sequence
  Description of Artificial Sequence: Synthetic Peanut, inner sequence
gtcattccgcatcctacacgtggtcacgta

SEQ ID NO: 341 - DNA, 30 bp, Artificial Sequence
  Description of Artificial Sequence: Synthetic Peanut, inner sequence
ccgtgagcgtacctacacgtgcggcttgga

SEQ ID NO: 342 - DNA, 30 bp, Artificial Sequence
  Description of Artificial Sequence: Synthetic Peanut, inner sequence
cacatgcgcattgccttcgttcactgcaca

SEQ ID NO: 343 - DNA, 30 bp, Artificial Sequence
  Description of Artificial Sequence: Synthetic Peanut, inner sequence
ccgtagcgacctcaagcggtggtgtgcgtg

SEQ ID NO: 344 - DNA, 30 bp, Artificial Sequence
  Description of Artificial Sequence: Synthetic Peanut, inner sequence
ggacgcatcgtcccgtcatgtggttccgta

SEQ ID NO: 345 - DNA, 30 bp, Artificial Sequence
  Description of Artificial Sequence: Synthetic Peanut, inner sequence
tgcgcaaggacactgcacgtatgcctgcca

SEQ ID NO: 346 - DNA, 30 bp, Artificial Sequence
  Description of Artificial Sequence: Synthetic Peanut, inner sequence
gtcatgaaacgagcctacacgtggtgcatg

SEQ ID NO: 347 - DNA, 30 bp, Artificial Sequence
  Description of Artificial Sequence: Synthetic Peanut, inner sequence
ccgacgcatgaccgaacggggtgatgtgcc

SEQ ID NO: 348 - DNA, 30 bp, Artificial Sequence
  Description of Artificial Sequence: Synthetic Peanut, inner sequence
gtgctacgatggctgtgggcgtgatgcgta

SEQ ID NO: 349 - DNA, 30 bp, Artificial Sequence
  Description of Artificial Sequence: Synthetic Peanut, inner sequence
gtcgtgcgtgccctatcaggtggttgtgga

SEQ ID NO: 350 - DNA, 30 bp, Artificial Sequence
  Description of Artificial Sequence: Synthetic Peanut, inner sequence
cgtagcgcaccaggacatgtcgtcggcatg

SEQ ID NO: 351 - DNA, 30 bp, Artificial Sequence
  Description of Artificial Sequence: Synthetic Peanut, inner sequence
cgcaccttcgatacgtcatgcacgctgaca

SEQ ID NO: 352 - DNA, 30 bp, Artificial Sequence
  Description of Artificial Sequence: Synthetic Peanut, inner sequence
ccgcagcgacatcaagcggtggtgtgcgtg

SEQ ID NO: 353 - DNA, 30 bp, Artificial Sequence
  Description of Artificial Sequence: Synthetic Peanut, inner sequence
gggcaacacgcaggatgtgatgcatgcgga

SEQ ID NO: 354 - DNA, 30 bp, Artificial Sequence
  Description of Artificial Sequence: Synthetic Peanut, inner sequence
ccgaacgcaccgtccaagttgccatgcgcg

SEQ ID NO: 355 - DNA, 30 bp, Artificial Sequence
  Description of Artificial Sequence: Synthetic Peanut, inner sequence
ggcatgaacgacctgggcatgcgtggtcca

SEQ ID NO: 356 - DNA, 30 bp, Artificial Sequence
  Description of Artificial Sequence: Synthetic Peanut, inner sequence
cgcacaaagggacgtggacgagcctacgtg

SEQ ID NO: 357 - DNA, 30 bp, Artificial Sequence
  Description of Artificial Sequence: Synthetic Peanut, inner sequence
gcgatgacagacgcagctttgggatgcacg

SEQ ID NO: 358 - DNA, 30 bp, Artificial Sequence
  Description of Artificial Sequence: Synthetic Peanut, inner sequence
ccgtagcgacatcaagcggtggtgtgtgtg

SEQ ID NO: 359 - DNA, 30 bp, Artificial Sequence
  Description of Artificial Sequence: Synthetic Peanut, inner sequence
gtcatgcgatgaacgaggcatgatgcgtca

SEQ ID NO: 360 - DNA, 30 bp, Artificial Sequence
  Description of Artificial Sequence: Synthetic Peanut, inner sequence
gcacatcaggccgtatcgtgactcgtggga

SEQ ID NO: 361 - DNA, 30 bp, Artificial Sequence
  Description of Artificial Sequence: Synthetic Peanut, inner sequence
catacgccctgcctgcactatggccatgca

SEQ ID NO: 362 - DNA, 30 bp, Artificial Sequence
  Description of Artificial Sequence: Synthetic Peanut, inner sequence
gtacgatgctgcccgacatgtggacgtgga

SEQ ID NO: 363 - DNA, 30 bp, Artificial Sequence
  Description of Artificial Sequence: Synthetic Peanut, inner sequence
gcaactggcacgcacaagcactgctgcgca

SEQ ID NO: 364 - DNA, 30 bp, Artificial Sequence
  Description of Artificial Sequence: Synthetic Peanut, inner sequence
cggcacggaaacatgtaggcatgctcgacg

SEQ ID NO: 365 - DNA, 30 bp, Artificial Sequence
  Description of Artificial Sequence: Synthetic Peanut, inner sequence
ggacgcagcttgcctactggttgtcacgta

SEQ ID NO: 366 - DNA, 30 bp, Artificial Sequence
  Description of Artificial Sequence: Synthetic Peanut, inner sequence
gacgtgccatcgtaagttcgacactgccgt

SEQ ID NO: 367 - DNA, 30 bp, Artificial Sequence
  Description of Artificial Sequence: Synthetic Peanut, inner sequence
cgcaccgccgatacgtcatgcacgctgaca

SEQ ID NO: 368 - DNA, 30 bp, Artificial Sequence
  Description of Artificial Sequence: Synthetic Peanut, inner sequence
cacgcaccaagtaacacgcgtactgacgca

SEQ ID NO: 369 - DNA, 30 bp, Artificial Sequence
  Description of Artificial Sequence: Synthetic Peanut, inner sequence
gtcatgccatcccttcgagtgtgacaggca

SEQ ID NO: 370 - DNA, 30 bp, Artificial Sequence
  Description of Artificial Sequence: Synthetic Peanut, inner sequence
gttcgcgcgacacctatcaatgtggacgtg

SEQ ID NO: 371 - DNA, 30 bp, Artificial Sequence
  Description of Artificial Sequence: Synthetic Peanut, inner sequence
ggcgtgcggaccggtcagtcgtcatgcaca

SEQ ID NO: 372 - DNA, 30 bp, Artificial Sequence
  Description of Artificial Sequence: Synthetic Peanut, inner sequence
catgtgcatggtacgtacacaatgcgcacg

SEQ ID NO: 373 - DNA, 30 bp, Artificial Sequence
  Description of Artificial Sequence: Synthetic Peanut, inner sequence
gcacgtggtctgaccggctcggtgtgcatg

SEQ ID NO: 374 - DNA, 30 bp, Artificial Sequence
  Description of Artificial Sequence: Synthetic Peanut, inner sequence
ccgtgctcatccccaagtgtgccatggtga

SEQ ID NO: 375 - DNA, 30 bp, Artificial Sequence
  Description of Artificial Sequence: Synthetic Peanut, inner sequence
gtcatgcacgaacactatcatggctgcatg

SEQ ID NO: 376 - DNA, 30 bp, Artificial Sequence
  Description of Artificial Sequence: Synthetic Peanut, inner sequence
ggacggaacggcactatcatgcggtgtgta

SEQ ID NO: 377 - DNA, 30 bp, Artificial Sequence
  Description of Artificial Sequence: Synthetic Peanut, inner sequence
aatgcggcatgaacggacctacacgtgggc

SEQ ID NO: 378 - DNA, 30 bp, Artificial Sequence
  Description of Artificial Sequence: Synthetic Peanut, inner sequence
cgtgcacaagtcggaccacgttgctgctca

SEQ ID NO: 379 - DNA, 30 bp, Artificial Sequence
  Description of Artificial Sequence: Synthetic Peanut, inner sequence
gtactgcacgcaccctatcatgtaggcatg

SEQ ID NO: 380 - DNA, 30 bp, Artificial Sequence
  Description of Artificial Sequence: Synthetic Peanut, inner sequence
cggaccgtcgatacgtcatgcacgctgaca

SEQ ID NO: 381 - DNA, 30 bp, Artificial Sequence
  Description of Artificial Sequence: Synthetic Peanut, inner sequence
cgtgacgcaacgtgtgcaatgttgtacgca

SEQ ID NO: 382 - DNA, 30 bp, Artificial Sequence
  Description of Artificial Sequence: Synthetic Peanut, inner sequence
cgcagcaactgcaacggtatgcactgcgtg

SEQ ID NO: 383 - DNA, 30 bp, Artificial Sequence
  Description of Artificial Sequence: Synthetic Peanut, inner sequence
gtgcgaccgaccctatcaggtgctcatgta

SEQ ID NO: 384 - DNA, 30 bp, Artificial Sequence
  Description of Artificial Sequence: Synthetic Peanut, inner sequence
catgcgacacggtgataggatgcatgcaca

SEQ ID NO: 385 - DNA, 30 bp, Artificial Sequence
  Description of Artificial Sequence: Synthetic Peanut, inner sequence
cgaccgaggacgtggtgtgtgggctgcgca

SEQ ID NO: 386 - DNA, 30 bp, Artificial Sequence
  Description of Artificial Sequence: Synthetic Peanut, inner sequence
acgcacgtagccctatcagtggtgcatgca

SEQ ID NO: 387 - DNA, 30 bp, Artificial Sequence
  Description of Artificial Sequence: Synthetic Peanut, inner sequence
ccgtctgaccgatgtggtgcatgtggcagg

SEQ ID NO: 388 - DNA, 30 bp, Artificial Sequence
  Description of Artificial Sequence: Synthetic Peanut, inner sequence
ccgtgcacgtggagcaaggactgtgtggca

SEQ ID NO: 389 - DNA, 30 bp, Artificial Sequence
  Description of Artificial Sequence: Synthetic Peanut, inner sequence
ccgaacgaaccgcacgtggactgagcgacg

SEQ ID NO: 390 - DNA, 30 bp, Artificial Sequence
  Description of Artificial Sequence: Synthetic Peanut, inner sequence
gcaccgatagctcgtaccgtcacgtggcca

SEQ ID NO: 391 - DNA, 30 bp, Artificial Sequence
  Description of Artificial Sequence: Synthetic Peanut, inner sequence
ccacacggaccgaaactgcactgttgggcg

SEQ ID NO: 392 - DNA, 30 bp, Artificial Sequence
  Description of Artificial Sequence: Synthetic Peanut, inner sequence
cgtaccgtcaaggcaggcatggttgggcaa

SEQ ID NO: 393 - DNA, 30 bp, Artificial Sequence
  Description of Artificial Sequence: Synthetic Peanut, inner sequence
ggacgaacgtaacgatgggggcagtacgca

SEQ ID NO: 394 - DNA, 30 bp, Artificial Sequence
  Description of Artificial Sequence: Synthetic Peanut, inner sequence
ggtccgaacgcacctcatgtgtgtcgtgta

SEQ ID NO: 395 - DNA, 30 bp, Artificial Sequence
  Description of Artificial Sequence: Synthetic Peanut, inner sequence
gtgactgagctggcgtagctggacgtgtgc

SEQ ID NO: 396 - DNA, 30 bp, Artificial Sequence
  Description of Artificial Sequence: Synthetic Peanut, inner sequence
gacgtacgctggatgtgacgaatgtgcggt

SEQ ID NO: 397 - DNA, 30 bp, Artificial Sequence
  Description of Artificial Sequence: Synthetic Peanut, inner sequence
ccgtatcgacatcaagcggtggtgtgcgtg

SEQ ID NO: 398 - DNA, 30 bp, Artificial Sequence
  Description of Artificial Sequence: Synthetic Peanut, inner sequence
gtcatgcacgaacactatcatggcggcacg

SEQ ID NO: 399 - DNA, 30 bp, Artificial Sequence
  Description of Artificial Sequence: Synthetic Peanut, inner sequence
cgcaccgtgtggtaacgtgtccgaggcata

SEQ ID NO: 400 - DNA, 30 bp, Artificial Sequence
  Description of Artificial Sequence: Synthetic Peanut, inner sequence
cgtgctgagcgagcctatctgtggttcgtg

SEQ ID NO: 401 - DNA, 30 bp, Artificial Sequence
  Description of Artificial Sequence: Synthetic Peanut, inner sequence
gtcgtagcgcacactagcaagtgtcacgta

SEQ ID NO: 402 - DNA, 30 bp, Artificial Sequence
  Description of Artificial Sequence: Synthetic Peanut, inner sequence
gcgaacagacacggtagcacatcctgcaca

SEQ ID NO: 403 - DNA, 30 bp, Artificial Sequence
  Description of Artificial Sequence: Synthetic Peanut, inner sequence
cgcacgcaaggggtgtggtaccacgtcgca

SEQ ID NO: 404 - DNA, 30 bp, Artificial Sequence
  Description of Artificial Sequence: Synthetic Peanut, inner sequence
cgcacagagtgacgcacgtacgcctgtccg

SEQ ID NO: 405 - DNA, 30 bp, Artificial Sequence
  Description of Artificial Sequence: Synthetic Peanut, inner sequence
cgacgaaccgaaccgtatcactgcgtggca

SEQ ID NO: 406 - DNA, 30 bp, Artificial Sequence
  Description of Artificial Sequence: Synthetic Peanut, inner sequence
ggcatgcacgcacctacacgtgggcatgga

SEQ ID NO: 407 - DNA, 30 bp, Artificial Sequence
  Description of Artificial Sequence: Synthetic Peanut, inner sequence
cgcaccgtcgatacgacatgcacgctgaca

SEQ ID NO: 408 - DNA, 30 bp, Artificial Sequence
  Description of Artificial Sequence: Synthetic Peanut, inner sequence
gccgtgcggacctagggctgtatcgacgtg

SEQ ID NO: 409 - DNA, 30 bp, Artificial Sequence
  Description of Artificial Sequence: Synthetic Peanut, inner sequence
cgcattgtcgtgaactggccgtggtggaca

SEQ ID NO: 410 - DNA, 30 bp, Artificial Sequence
  Description of Artificial Sequence: Synthetic Peanut, inner sequence
acgtatgccacagcgttccgtaagtgcaca

SEQ ID NO: 411 - DNA, 30 bp, Artificial Sequence
  Description of Artificial Sequence: Synthetic Peanut, inner sequence
ccacacagcaatgtgtctacgatgtgcgca

SEQ ID NO: 412 - DNA, 30 bp, Artificial Sequence
  Description of Artificial Sequence: Synthetic Peanut, inner sequence
catgcacaccgagcatacatcgtctgcgca

SEQ ID NO: 413 - DNA, 30 bp, Artificial Sequence
  Description of Artificial Sequence: Synthetic Peanut, inner sequence
ggacaacgtggcccaacatgtggttcgtgt

SEQ ID NO: 414 - DNA, 30 bp, Artificial Sequence
  Description of Artificial Sequence: Synthetic Peanut, inner sequence
gcacgactcgcaccctatcatgatgccatg

SEQ ID NO: 415 - DNA, 30 bp, Artificial Sequence
  Description of Artificial Sequence: Synthetic Peanut, inner sequence
gcatgtgtccaagctgatctgtggtgtgta

SEQ ID NO: 416 - DNA, 30 bp, Artificial Sequence
  Description of Artificial Sequence: Synthetic Peanut, inner sequence
cacgtagcatggaaggtgatatgcgtcaca

SEQ ID NO: 417 - DNA, 30 bp, Artificial Sequence
  Description of Artificial Sequence: Synthetic Peanut, inner sequence
cgacacgcagggcacgtaacgcttaacgcg

SEQ ID NO: 418 - DNA, 30 bp, Artificial Sequence
  Description of Artificial Sequence: Synthetic Peanut, inner sequence
cgcgagcacggtggacacgtacactgcacg

SEQ ID NO: 419 - DNA, 30 bp, Artificial Sequence
  Description of Artificial Sequence: Synthetic Peanut, inner sequence
gtcatgcacgaacactatcattgcggcatg

SEQ ID NO: 420 - DNA, 30 bp, Artificial Sequence
  Description of Artificial Sequence: Synthetic Peanut, inner sequence
cgcaccgtcgatacgtcatgcacgctgata

SEQ ID NO: 421 - DNA, 30 bp, Artificial Sequence
  Description of Artificial Sequence: Synthetic Peanut, inner sequence
cgtgccgtagggactgggcgacatgcatgt

SEQ ID NO: 422 - DNA, 30 bp, Artificial Sequence
  Description of Artificial Sequence: Synthetic Peanut, inner sequence
ccgagcgcgagaggacacgtcacgtacgca

SEQ ID NO: 423 - DNA, 28 bp, Artificial Sequence
  Description of Artificial Sequence: Synthetic Peanut, inner sequence
cgcaccgtcgatacgtcatgcacgcacc

SEQ ID NO: 424 - DNA, 30 bp, Artificial Sequence
  Description of Artificial Sequence: Synthetic Peanut, inner sequence
gccgcaacgactgaggggtgtatgtacgcg

SEQ ID NO: 425 - DNA, 30 bp, Artificial Sequence
  Description of Artificial Sequence: Synthetic Peanut, inner sequence
cgccacaaacacatgcgtacgcactgcgtg

SEQ ID NO: 426 - DNA, 30 bp, Artificial Sequence
  Description of Artificial Sequence: Synthetic Peanut, inner sequence
cgcaacggaccaaagtgtggctgtgtgtgc

SEQ ID NO: 427 - DNA, 25 bp, Artificial Sequence
  Description of Artificial Sequence: Synthetic Peanut, inner sequence
ggcctgcgatggatgtgtgcgtgta

SEQ ID NO: 428 - DNA, 30 bp, Artificial Sequence
  Description of Artificial Sequence: Synthetic Peanut, inner sequence
cacgtgctaggacgatacatgtgccacaca

SEQ ID NO: 429 - DNA, 30 bp, Artificial Sequence
  Description of Artificial Sequence: Synthetic Peanut, inner sequence
acgatgtcgtgaacggaccgtcatgtggca

SEQ ID NO: 430 - DNA, 30 bp, Artificial Sequence
  Description of Artificial Sequence: Synthetic Peanut, inner sequence
ccgacgacgtcccgcaagttcgtggccatg

SEQ ID NO: 431 - DNA, 30 bp, Artificial Sequence
  Description of Artificial Sequence: Synthetic Peanut, inner sequence
gtgctgcgatggattgggagtgtctttggc

SEQ ID NO: 432 - DNA, 30 bp, Artificial Sequence
  Description of Artificial Sequence: Synthetic Peanut, inner sequence
ccgacgagtcacgtagtcatgccttgtcga

SEQ ID NO: 433 - DNA, 30 bp, Artificial Sequence
  Description of Artificial Sequence: Synthetic Peanut, inner sequence
ggcatcgacgtacccaagatcacgtgcgtg

SEQ ID NO: 434 - DNA, 30 bp, Artificial Sequence
  Description of Artificial Sequence: Synthetic Peanut, inner sequence
cgcaaccagacaaagcgttgtgtacgcacg

SEQ ID NO: 435 - DNA, 30 bp, Artificial Sequence
  Description of Artificial Sequence: Synthetic Peanut, inner sequence
cgtacacggggcaggtagtgttcatgcaca

SEQ ID NO: 436 - DNA, 30 bp, Artificial Sequence
  Description of Artificial Sequence: Synthetic Peanut, inner sequence
ggccaccgaggcacgaatgcgtaacgtggt

SEQ ID NO: 437 - DNA, 30 bp, Artificial Sequence
  Description of Artificial Sequence: Synthetic Peanut, inner sequence
ggacgcagcttgcctactggtgggcacgta

SEQ ID NO: 438 - DNA, 30 bp, Artificial Sequence
  Description of Artificial Sequence: Synthetic Peanut, inner sequence
gtcatgaacgaccgaggagtgcgtcacgta

SEQ ID NO: 439 - DNA, 30 bp, Artificial Sequence
  Description of Artificial Sequence: Synthetic Peanut, inner sequence
gcacatggaccgaaacgtgacgcggggtca

SEQ ID NO: 440 - DNA, 30 bp, Artificial Sequence
  Description of Artificial Sequence: Synthetic Peanut, inner sequence
catgtcgcggcaagcgtaacgtgctacgga

SEQ ID NO: 441 - DNA, 30 bp, Artificial Sequence
  Description of Artificial Sequence: Synthetic Peanut, inner sequence
gtcgtgcgtgccctatcaagtcggtctgta

SEQ ID NO: 442 - DNA, 30 bp, Artificial Sequence
  Description of Artificial Sequence: Synthetic Peanut, inner sequence
ccgtagcgacatccagcggtggtgtgcgtg

SEQ ID NO: 443 - DNA, 30 bp, Artificial Sequence
  Description of Artificial Sequence: Synthetic Peanut, inner sequence
ccgtagcgacatcaagcgctggtgtgcgtg

SEQ ID NO: 444 - DNA, 30 bp, Artificial Sequence
  Description of Artificial Sequence: Synthetic Peanut, inner sequence
cgatgcaaggccaacatcagcgtgcgtgtg

SEQ ID NO: 445 - DNA, 30 bp, Artificial Sequence
  Description of Artificial Sequence: Synthetic Peanut, inner sequence
catgcggcagatcgaagtgtccactgcgcg

SEQ ID NO: 446 - DNA, 30 bp, Artificial Sequence
  Description of Artificial Sequence: Synthetic Peanut, inner sequence
gtcatgccatcccttcgagtgtgccaggta

SEQ ID NO: 447 - DNA, 30 bp, Artificial Sequence
  Description of Artificial Sequence: Synthetic Peanut, inner sequence
cacgcactacgacacactgcgtacggcacg

SEQ ID NO: 448 - DNA, 30 bp, Artificial Sequence
  Description of Artificial Sequence: Synthetic Peanut, inner sequence
ccgatcgacctcgtgtgcatggctggcgca

SEQ ID NO: 449 - DNA, 30 bp, Artificial Sequence
  Description of Artificial Sequence: Synthetic Peanut, inner sequence
cgcaccgttgatacgtcatgcacgctgaca

SEQ ID NO: 450 - DNA, 30 bp, Artificial Sequence
  Description of Artificial Sequence: Synthetic Peanut, inner sequence
ggcctagcacgtcacaatgggcatgccgcg

SEQ ID NO: 451 - DNA, 30 bp, Artificial Sequence
  Description of Artificial Sequence: Synthetic Peanut, inner sequence
ccgtcacacagcacatgcgtccgtgccgca

SEQ ID NO: 452 - DNA, 30 bp, Artificial Sequence
  Description of Artificial Sequence: Synthetic Peanut, inner sequence
cgcaccgtcgataagtcatgcacgctgaca

SEQ ID NO: 453 - DNA, 29 bp, Artificial Sequence
  Description of Artificial Sequence: Synthetic Peanut, inner sequence
ggcctgcgatggatgtggacgtacgtggc

SEQ ID NO: 454 - DNA, 30 bp, Artificial Sequence
  Description of Artificial Sequence: Synthetic Peanut, inner sequence
ggacgcagcttgcctactggtggtcacgca

SEQ ID NO: 455 - DNA, 30 bp, Artificial Sequence
  Description of Artificial Sequence: Synthetic Peanut, inner sequence
ggacagcgatggatgtgggttgtgctcgtc

SEQ ID NO: 456 - DNA, 30 bp, Artificial Sequence
  Description of Artificial Sequence: Synthetic Peanut, inner sequence
cgacatggcgaaagggatgtgtgacgcgtg

SEQ ID NO: 457 - DNA, 30 bp, Artificial Sequence
  Description of Artificial Sequence: Synthetic Peanut, inner sequence
ccgtagcgccatcaagcggtggtgtgcgtg

SEQ ID NO: 458 - DNA, 30 bp, Artificial Sequence
  Description of Artificial Sequence: Synthetic Peanut, inner sequence
acgtcaacatggcgcagttcgtaacgcaca

SEQ ID NO: 459 - DNA, 30 bp, Artificial Sequence
  Description of Artificial Sequence: Synthetic Peanut, inner sequence
cgcgccgaaaggacgaacgatgtgtgcgtg

SEQ ID NO: 460 - DNA, 30 bp, Artificial Sequence
  Description of Artificial Sequence: Synthetic Peanut, inner sequence
gcacgaacgacgctgtcatcgcacgtcaca

SEQ ID NO: 461 - DNA, 30 bp, Artificial Sequence
  Description of Artificial Sequence: Synthetic Peanut, inner sequence
gtacgcatcgccccttcgagtggacaggta

SEQ ID NO: 462 - DNA, 30 bp, Artificial Sequence
  Description of Artificial Sequence: Synthetic Peanut, inner sequence
ggactgcgatggatgtgggttgtgctcgtc

SEQ ID NO: 463 - DNA, 30 bp, Artificial Sequence
  Description of Artificial Sequence: Synthetic Peanut, inner sequence
cgcaccgtcgatacggcatgcacgctgaca

SEQ ID NO: 464 - DNA, 30 bp, Artificial Sequence
  Description of Artificial Sequence: Synthetic Peanut, inner sequence
ggcattcgatgcactacaagttgttgtgta

SEQ ID NO: 465 - DNA, 30 bp, Artificial Sequence
  Description of Artificial Sequence: Synthetic Peanut, inner sequence
gcgtgcagcatatggaaggacgtggccgcg

SEQ ID NO: 466 - DNA, 30 bp, Artificial Sequence
  Description of Artificial Sequence: Synthetic Peanut, inner sequence
cgcaccgtcgatatgtcatgcacgctgaca

SEQ ID NO: 467 - DNA, 30 bp, Artificial Sequence
  Description of Artificial Sequence: Synthetic Peanut, inner sequence
ccgtagcgacatcacgcggtggtgtgcgtg

SEQ ID NO: 468 - DNA, 30 bp, Artificial Sequence
  Description of Artificial Sequence: Synthetic Peanut, inner sequence
gtgctgaggcatccctaggacacgtggcca

SEQ ID NO: 469 - DNA, 30 bp, Artificial Sequence
  Description of Artificial Sequence: Synthetic Peanut, inner sequence
cacgtgcacgatgcaagtacacatgcacca

SEQ ID NO: 470 - DNA, 30 bp, Artificial Sequence
  Description of Artificial Sequence: Synthetic Peanut, inner sequence
ggacggaacgcagccacgtgtgtcgatgta

SEQ ID NO: 471 - DNA, 30 bp, Artificial Sequence
  Description of Artificial Sequence: Synthetic Peanut, inner sequence
gacgcgatgcacttggtccgtactcacgtg

SEQ ID NO: 472 - DNA, 30 bp, Artificial Sequence
  Description of Artificial Sequence: Synthetic Peanut, inner sequence
ggacggatcgaacctagagagtggcgtgga

SEQ ID NO: 473 - DNA, 30 bp, Artificial Sequence
  Description of Artificial Sequence: Synthetic Peanut, inner sequence
ccgtggcgtaacgaaggggaggtatgcacg

SEQ ID NO: 474 - DNA, 30 bp, Artificial Sequence
  Description of Artificial Sequence: Synthetic Peanut, inner sequence
acgcactgaccgttagcatggtcctgcaca

SEQ ID NO: 475 - DNA, 30 bp, Artificial Sequence
  Description of Artificial Sequence: Synthetic Peanut, inner sequence
ccggagcgcactgtcagcgtggtgtacgtg

SEQ ID NO: 476 - DNA, 30 bp, Artificial Sequence
  Description of Artificial Sequence: Synthetic Peanut, inner sequence
cgaaccgcaaggaggctggtacgttcggca

SEQ ID NO: 477 - DNA, 30 bp, Artificial Sequence
  Description of Artificial Sequence: Synthetic Peanut, inner sequence
cgcaccgtcgatacgtcatgcacgccgaca

SEQ ID NO: 478 - DNA, 30 bp, Artificial Sequence
  Description of Artificial Sequence: Synthetic Peanut, inner sequence
cgtaccgaacaagtgacattgcgcacggtc

SEQ ID NO: 479 - DNA, 30 bp, Artificial Sequence
  Description of Artificial Sequence: Synthetic Peanut, inner sequence
gcacaaacgaccgaggcatgtagcgacgtg

SEQ ID NO: 480 - DNA, 30 bp, Artificial Sequence
  Description of Artificial Sequence: Synthetic Peanut, inner sequence
cgtgcatgctgtcgggacgcacactgtgtg

SEQ ID NO: 481 - DNA, 30 bp, Artificial Sequence
  Description of Artificial Sequence: Synthetic Peanut, inner sequence
cgcaccggtgagggcatggttcggcacgca

SEQ ID NO: 482 - DNA, 30 bp, Artificial Sequence
  Description of Artificial Sequence: Synthetic Peanut, inner sequence
cgtgccaccagagtgacgcatgcatgatgc

SEQ ID NO: 483 - DNA, 30 bp, Artificial Sequence
  Description of Artificial Sequence: Synthetic Peanut, inner sequence
cgacagatcggcatcaccagtcattgcgca

SEQ ID NO: 484 - DNA, 30 bp, Artificial Sequence
  Description of Artificial Sequence: Synthetic Peanut, inner sequence
cgaaccggaaggtggcgcatgggtgaggga

SEQ ID NO: 485 - DNA, 30 bp, Artificial Sequence
  Description of Artificial Sequence: Synthetic Peanut, inner sequence
ggacgcaacgaacctacgagtgatcgtgta

SEQ ID NO: 486 - DNA, 30 bp, Artificial Sequence
  Description of Artificial Sequence: Synthetic Peanut, inner sequence
tcgtagcgacatcaagcggtggtgtgcgtg

SEQ ID NO: 487 - DNA, 30 bp, Artificial Sequence
  Description of Artificial Sequence: Synthetic Peanut, inner sequence
gtgcgagtcgaccgtacaagtgcaggcatg

SEQ ID NO: 488 - DNA, 30 bp, Artificial Sequence
  Description of Artificial Sequence: Synthetic Peanut, inner sequence
cgcaccgtcgatacgtcatgcacactgaca

SEQ ID NO: 489 - DNA, 31 bp, Artificial Sequence
  Description of Artificial Sequence: Synthetic Peanut, inner sequence
ggcctgcgatggatgtggacggtgtggtagt

SEQ ID NO: 490 - DNA, 30 bp, Artificial Sequence
  Description of Artificial Sequence: Synthetic Peanut, inner sequence
cgcacacgggaggcatcgtaacgtgcagca

SEQ ID NO: 491 - DNA, 30 bp, Artificial Sequence
  Description of Artificial Sequence: Synthetic Peanut, inner sequence
acgtcaaacgcgacaatgcatgcgtacacg

SEQ ID NO: 492 - DNA, 30 bp, Artificial Sequence
  Description of Artificial Sequence: Synthetic Peanut, inner sequence
cacgctgcatgatcacgcacttccgtcacg

SEQ ID NO: 493 - DNA, 30 bp, Artificial Sequence
  Description of Artificial Sequence: Synthetic Peanut, inner sequence
gtcattccgcatcctacacttgggcacgta

SEQ ID NO: 494 - DNA, 30 bp, Artificial Sequence
  Description of Artificial Sequence: Synthetic Peanut, inner sequence
cgacacagcatcgaacttatggcatgcacg

SEQ ID NO: 495 - DNA, 30 bp, Artificial Sequence
  Description of Artificial Sequence: Synthetic Peanut, inner sequence
cgaacgcagtgcagtgacatccagtgcaca

SEQ ID NO: 496 - DNA, 30 bp, Artificial Sequence
  Description of Artificial Sequence: Synthetic Peanut, inner sequence
gtcgtgcgatctgaccgtgcaagttgggca

SEQ ID NO: 497 - DNA, 30 bp, Artificial Sequence
  Description of Artificial Sequence: Synthetic Peanut, inner sequence
cgcaccgtcgatacgtcatgcaagctgaca

SEQ ID NO: 498 - DNA, 30 bp, Artificial Sequence
  Description of Artificial Sequence: Synthetic Peanut, inner sequence
cgcaccgtcgatacgtcatgcacgatgaca

SEQ ID NO: 499 - DNA, 30 bp, Artificial Sequence
  Description of Artificial Sequence: Synthetic Peanut, inner sequence
ggcctgcgatggatgtgcgttgtgtctgtc

SEQ ID NO: 500 - DNA, 30 bp, Artificial Sequence
  Description of Artificial Sequence: Synthetic Peanut, inner sequence
ccgcacacgacacttggtcatccgctgtcg

SEQ ID NO: 501 - DNA, 30 bp, Artificial Sequence
  Description of Artificial Sequence: Synthetic Peanut, inner sequence
cacgaacagtaggcattgcacggcgacgcg

SEQ ID NO: 502 - DNA, 30 bp, Artificial Sequence
  Description of Artificial Sequence: Synthetic Peanut, inner sequence
gcaacggcggaatcacgtgggatgtgcgca

SEQ ID NO: 503 - DNA, 31 bp, Artificial Sequence
  Description of Artificial Sequence: Synthetic Peanut, inner sequence
gtactgcgatggcttagcaaagtgcgacatg

SEQ ID NO: 504 - DNA, 30 bp, Artificial Sequence
  Description of Artificial Sequence: Synthetic Peanut, inner sequence
cgaagatggacgcatcagcccgacgtgtca

SEQ ID NO: 505 - DNA, 30 bp, Artificial Sequence
  Description of Artificial Sequence: Synthetic Peanut, inner sequence
gcacgacagagcgacactgtgtccgacgca

SEQ ID NO: 506 - DNA, 30 bp, Artificial Sequence
  Description of Artificial Sequence: Synthetic Peanut, inner sequence
ggacgcaacgtaccgtatcgtggccatgca

SEQ ID NO: 507 - DNA, 30 bp, Artificial Sequence
  Description of Artificial Sequence: Synthetic Peanut, inner sequence
cgccccgtcgatacgtcatgcacgctgaca

SEQ ID NO: 508 - DNA, 30 bp, Artificial Sequence
  Description of Artificial Sequence: Synthetic Peanut, inner sequence
cgtgcacagccataacgtacccccgtcacg

SEQ ID NO: 509 - DNA, 30 bp, Artificial Sequence
  Description of Artificial Sequence: Synthetic Peanut, inner sequence
cgcaccgtcgatacgtcaggcacgctgaca

SEQ ID NO: 510 - DNA, 30 bp, Artificial Sequence
  Description of Artificial Sequence: Synthetic Peanut, inner sequence
cacggatgggcgaaacggcttgactgcgtc

SEQ ID NO: 511 - DNA, 30 bp, Artificial Sequence
  Description of Artificial Sequence: Synthetic Peanut, inner sequence
ccgaccgcgttgcctagtgatcggtggcca

SEQ ID NO: 512 - DNA, 30 bp, Artificial Sequence
  Description of Artificial Sequence: Synthetic Peanut, inner sequence
cgcaccgtcgatacgtcatgcacgctggca

SEQ ID NO: 513 - DNA, 30 bp, Artificial Sequence
  Description of Artificial Sequence: Synthetic Peanut, inner sequence
cgcaccggcaagtgctacggtctagtcgtg

SEQ ID NO: 514 - DNA, 30 bp, Artificial Sequence
  Description of Artificial Sequence: Synthetic Peanut, inner sequence
cgcaacgaactgatgcaacgcgtaggcatg

SEQ ID NO: 515 - DNA, 30 bp, Artificial Sequence
  Description of Artificial Sequence: Synthetic Peanut, inner sequence
gtcacgcagcgtatcccttcgagtggtgtg

SEQ ID NO: 516 - DNA, 26 bp, Artificial Sequence
  Description of Artificial Sequence: Synthetic Peanut, inner sequence
gacgtgagcacgtaatggcctgcgcg

SEQ ID NO: 517 - DNA, 30 bp, Artificial Sequence
  Description of Artificial Sequence: Synthetic Peanut, inner sequence
gtcatgcacgcacctacacgtgggcacgta

SEQ ID NO: 518 - DNA, 30 bp, Artificial Sequence
  Description of Artificial Sequence: Synthetic Peanut, inner sequence
gtacgtggctgccctgtgcgaatgtacgca

SEQ ID NO: 519 - DNA, 30 bp, Artificial Sequence
  Description of Artificial Sequence: Synthetic Peanut, inner sequence
cacgcagggcacgtggcgttcaccttgcca

SEQ ID NO: 520 - DNA, 30 bp, Artificial Sequence
  Description of Artificial Sequence: Synthetic Peanut, inner sequence
cgtgccaacgacctacgtgccatgcggtca

SEQ ID NO: 521 - DNA, 30 bp, Artificial Sequence
  Description of Artificial Sequence: Synthetic Peanut, inner sequence
ccgcacgtagccctatcagttgtgcatgca

SEQ ID NO: 522 - DNA, 30 bp, Artificial Sequence
  Description of Artificial Sequence: Synthetic Peanut, inner sequence
tcggaccgcaagtcaggcacgtacgacggt

SEQ ID NO: 523 - DNA, 30 bp, Artificial Sequence
  Description of Artificial Sequence: Synthetic Peanut, inner sequence
gcacgcagcttgccgtagggtggcatggga

SEQ ID NO: 524 - DNA, 30 bp, Artificial Sequence
  Description of Artificial Sequence: Synthetic Peanut, inner sequence
gttgcgaacggaccgttgcgtggttaggga

SEQ ID NO: 525 - DNA, 30 bp, Artificial Sequence
  Description of Artificial Sequence: Synthetic Peanut, inner sequence
cacgcagtgtgtgacgtgtgtgtgttcacg

SEQ ID NO: 526 - DNA, 30 bp, Artificial Sequence
  Description of Artificial Sequence: Synthetic Peanut, inner sequence
cgtcacgccgaggtacgtccttccgccacg

SEQ ID NO: 527 - DNA, 30 bp, Artificial Sequence
  Description of Artificial Sequence: Synthetic Peanut, inner sequence
ggacaggctgagcgaacaagtgcatgcacg

SEQ ID NO: 528 - DNA, 30 bp, Artificial Sequence
  Description of Artificial Sequence: Synthetic Peanut, inner sequence
gtcacgacgaaggcctagcaacgtgcgtca

SEQ ID NO: 529 - DNA, 30 bp, Artificial Sequence
  Description of Artificial Sequence: Synthetic Peanut, inner sequence
ccatcatggacgacgatggcttagcgtggt

SEQ ID NO: 530 - DNA, 30 bp, Artificial Sequence
  Description of Artificial Sequence: Synthetic Peanut, inner sequence
gtacacacgtaccgccagatcaagtgcaca

SEQ ID NO: 531 - DNA, 30 bp, Artificial Sequence
  Description of Artificial Sequence: Synthetic Peanut, inner sequence
cgatacgcaacgccacgaacatgcctcacg

SEQ ID NO: 532 - DNA, 30 bp, Artificial Sequence
  Description of Artificial Sequence: Synthetic Peanut, inner sequence
cgcaatggacgaattgaccgtgcgtggcca

SEQ ID NO: 533 - DNA, 30 bp, Artificial Sequence
  Description of Artificial Sequence: Synthetic Peanut, inner sequence
cgcagcagtgtgcgtacaatgtcatgcgcg

SEQ ID NO: 534 - DNA, 30 bp, Artificial Sequence
  Description of Artificial Sequence: Synthetic Peanut, inner sequence
cgaacgcgacgatggctcgtgcacttgaca

SEQ ID NO: 535 - DNA, 30 bp, Artificial Sequence
  Description of Artificial Sequence: Synthetic Peanut, inner sequence
ccgacgcaaggcaggtacatgtggtgcggt

SEQ ID NO: 536 - DNA, 30 bp, Artificial Sequence
  Description of Artificial Sequence: Synthetic Peanut, inner sequence
caggcacggagacgctgtgtatacgacgca

SEQ ID NO: 537 - DNA, 30 bp, Artificial Sequence
  Description of Artificial Sequence: Synthetic Peanut, inner sequence
cacgataggcacggcgtatcacagttcggt

SEQ ID NO: 538 - DNA, 30 bp, Artificial Sequence
  Description of Artificial Sequence: Synthetic Peanut, inner sequence
cacgtgttgcgaggcacctgccactgcacg

SEQ ID NO: 539 - DNA, 30 bp, Artificial Sequence
  Description of Artificial Sequence: Synthetic Peanut, inner sequence
cgcatcggaccgtacgtgtactcgtgctgt

SEQ ID NO: 540 - DNA, 30 bp, Artificial Sequence
  Description of Artificial Sequence: Synthetic Peanut, inner sequence
ggccgaacgtaacgcctcgtggtcctggca

SEQ ID NO: 541 - DNA, 30 bp, Artificial Sequence
  Description of Artificial Sequence: Synthetic Peanut, inner sequence
gtgcatcgcgaccatgggctggacctgtcc

SEQ ID NO: 542 - DNA, 30 bp, Artificial Sequence
  Description of Artificial Sequence: Synthetic Peanut, inner sequence
catgctcagtgggaacgtggcccgtgcacg

SEQ ID NO: 543 - DNA, 30 bp, Artificial Sequence
  Description of Artificial Sequence: Synthetic Peanut, inner sequence
cgcaccgtcaatacgtcatgcacgctgaca

SEQ ID NO: 544 - DNA, 30 bp, Artificial Sequence
  Description of Artificial Sequence: Synthetic Peanut, inner sequence
cgcgcacatgatcgtcactcctgctgcacc

SEQ ID NO: 545 - DNA, 30 bp, Artificial Sequence
  Description of Artificial Sequence: Synthetic Peanut, inner sequence
cgcaccgacgagtgggcttaacgtgtcacg

SEQ ID NO: 546 - DNA, 30 bp, Artificial Sequence
  Description of Artificial Sequence: Synthetic Peanut, inner sequence
cacacaaggcacacgtgacatatcgtcgcg

SEQ ID NO: 547 - DNA, 30 bp, Artificial Sequence
  Description of Artificial Sequence: Synthetic Peanut, inner sequence
catgatgcaggctaagtcgcactcgccacg

SEQ ID NO: 548 - DNA, 30 bp, Artificial Sequence
  Description of Artificial Sequence: Synthetic Peanut, inner sequence
ccatatggcagtgcgatggcttcgctggtc

SEQ ID NO: 549 - DNA, 29 bp, Artificial Sequence
  Description of Artificial Sequence: Synthetic Peanut, inner sequence
cgtacgacacgacagacatgcacgacgca

SEQ ID NO: 550 - DNA, 30 bp, Artificial Sequence
  Description of Artificial Sequence: Synthetic Peanut, inner sequence
cgtgagggcaaatgcacgacaacacgcgca

SEQ ID NO: 551 - DNA, 30 bp, Artificial Sequence
  Description of Artificial Sequence: Synthetic Peanut, inner sequence
cgtgcgatgtgcgtatcgagtgcgtgtgga

SEQ ID NO: 552 - DNA, 30 bp, Artificial Sequence
  Description of Artificial Sequence: Synthetic Peanut, inner sequence
gtgcacaacgtaccgctcacgtggccacgt

SEQ ID NO: 553 - DNA, 30 bp, Artificial Sequence
  Description of Artificial Sequence: Synthetic Peanut, inner sequence
ccgcacgtagccctatcagtggcgcatgca

SEQ ID NO: 554 - DNA, 30 bp, Artificial Sequence
  Description of Artificial Sequence: Synthetic Peanut, inner sequence
cgtgccgcacaaagcatgacctcgttgtgc

SEQ ID NO: 555 - DNA, 30 bp, Artificial Sequence
  Description of Artificial Sequence: Synthetic Peanut, inner sequence
cgacatggaacgcaggtctgcacgttgacc

SEQ ID NO: 556 - DNA, 30 bp, Artificial Sequence
  Description of Artificial Sequence: Synthetic Peanut, inner sequence
gcatgccgtgtcgtcccaaccagctgggca

SEQ ID NO: 557 - DNA, 30 bp, Artificial Sequence
  Description of Artificial Sequence: Synthetic Peanut, inner sequence
cgacacgagatcaagccgtcatgatgcggt

SEQ ID NO: 558 - DNA, 30 bp, Artificial Sequence
  Description of Artificial Sequence: Synthetic Peanut, inner sequence
cgtggcagcaacaccggtacgcagttcgtg

SEQ ID NO: 559 - DNA, 30 bp, Artificial Sequence
  Description of Artificial Sequence: Synthetic Peanut, inner sequence
ccgcacgtagccctatcagtgttgcatgca

SEQ ID NO: 560 - DNA, 30 bp, Artificial Sequence
  Description of Artificial Sequence: Synthetic Peanut, inner sequence
gtcattccgcatcctacacgtgggtatgga

SEQ ID NO: 561 - DNA, 30 bp, Artificial Sequence
  Description of Artificial Sequence: Synthetic Peanut, inner sequence
cccaccgtcgatacgtcatgcacgctgaca

SEQ ID NO: 562 - DNA, 30 bp, Artificial Sequence
  Description of Artificial Sequence: Synthetic Peanut, inner sequence
cgcggacagacaccacgtatgtcacggaca

SEQ ID NO: 563 - DNA, 30 bp, Artificial Sequence
  Description of Artificial Sequence: Synthetic Peanut, inner sequence
tggcctgacgtgccctgacatgctgcgtca

SEQ ID NO: 564 - DNA, 30 bp, Artificial Sequence
  Description of Artificial Sequence: Synthetic Peanut, inner sequence
ccgtgtggacgacaactactgccatgcgca

SEQ ID NO: 565 - DNA, 30 bp, Artificial Sequence
  Description of Artificial Sequence: Synthetic Peanut, inner sequence
cgcaccaatgcacacgtgacatgatgcacg

SEQ ID NO: 566 - DNA, 30 bp, Artificial Sequence
  Description of Artificial Sequence: Synthetic Peanut, inner sequence
gcgcagcagggaagcaggccacactacgtg

SEQ ID NO: 567 - DNA, 30 bp, Artificial Sequence
  Description of Artificial Sequence: Synthetic Peanut, inner sequence
tcgatgaccgcgagtgggacgtgcacgtgc

SEQ ID NO: 568 - DNA, 30 bp, Artificial Sequence
  Description of Artificial Sequence: Synthetic Peanut, inner sequence
cacaccgcggaagtgacgtgcaccaacgtg

SEQ ID NO: 569 - DNA, 30 bp, Artificial Sequence
  Description of Artificial Sequence: Synthetic Peanut, inner sequence
cacgtacgcacaacgtggcttgacggtgta

SEQ ID NO: 570 - DNA, 30 bp, Artificial Sequence
  Description of Artificial Sequence: Synthetic Peanut, inner sequence
gcactgagcgtaccgaggaggcggtgtgtc

SEQ ID NO: 571 - DNA, 30 bp, Artificial Sequence
  Description of Artificial Sequence: Synthetic Peanut, inner sequence
cgacgcacacggcaagaccacactgcgatc

SEQ ID NO: 572 - DNA, 30 bp, Artificial Sequence
  Description of Artificial Sequence: Synthetic Peanut, inner sequence
gacgcaacgacctgagtggacacggacgta

SEQ ID NO: 573 - DNA, 30 bp, Artificial Sequence
  Description of Artificial Sequence: Synthetic Peanut, inner sequence
ggcctgcgatggatgtgtgcgtgtacgacg

SEQ ID NO: 574 - DNA, 30 bp, Artificial Sequence
  Description of Artificial Sequence: Synthetic Peanut, inner sequence
cacatcacgcactctgagcgtaacgtgggt

SEQ ID NO: 575 - DNA, 30 bp, Artificial Sequence
  Description of Artificial Sequence: Synthetic Peanut, inner sequence
acgtcccacacgacacgtggtatgtgcatg

SEQ ID NO: 576 - DNA, 30 bp, Artificial Sequence
  Description of Artificial Sequence: Synthetic Peanut, inner sequence
cgcatcgtcgatacgtcatgcacgctgaca

SEQ ID NO: 577 - DNA, 30 bp, Artificial Sequence
  Description of Artificial Sequence: Synthetic Peanut, inner sequence
ggcctgcgatggatgtggggatgcactgtc

SEQ ID NO: 578 - DNA, 30 bp, Artificial Sequence
  Description of Artificial Sequence: Synthetic Peanut, inner sequence
cacggcagggtatgtgacacagcctgcacg

SEQ ID NO: 579 - DNA, 30 bp, Artificial Sequence
  Description of Artificial Sequence: Synthetic Peanut, inner sequence
ggccgaaacgacgtggtgagtacgcagcca

SEQ ID NO: 580 - DNA, 30 bp, Artificial Sequence
  Description of Artificial Sequence: Synthetic Peanut, inner sequence
ccgtagcgacatcaagcggtggtgtgagtg

SEQ ID NO: 581 - DNA, 30 bp, Artificial Sequence
  Description of Artificial Sequence: Synthetic Peanut, inner sequence
gcgttcgataccctatgtggcctgtacgtg

SEQ ID NO: 582 - DNA, 30 bp, Artificial Sequence
  Description of Artificial Sequence: Synthetic Peanut, inner sequence
gtgcttggatccctatcaggtggacgtgta

SEQ ID NO: 583 - DNA, 30 bp, Artificial Sequence
  Description of Artificial Sequence: Synthetic Peanut, inner sequence
cgcaccgtcgatacgtcatgcccgctgaca

SEQ ID NO: 584 - DNA, 30 bp, Artificial Sequence
  Description of Artificial Sequence: Synthetic Peanut, inner sequence
cgtgggacgcgaaggatgtgacactgcgtg

SEQ ID NO: 585 - DNA, 30 bp, Artificial Sequence
  Description of Artificial Sequence: Synthetic Peanut, inner sequence
cgaaccgcaacggtggtcctgcccttgaca

SEQ ID NO: 586 - DNA, 30 bp, Artificial Sequence
  Description of Artificial Sequence: Synthetic Peanut, inner sequence
gcgcctgaacgtagcgaaaggtggtgcatg

SEQ ID NO: 587 - DNA, 30 bp, Artificial Sequence
  Description of Artificial Sequence: Synthetic Peanut, inner sequence
cacaacgcacacgggctgactgactgcgtg

SEQ ID NO: 588 - DNA, 30 bp, Artificial Sequence
  Description of Artificial Sequence: Synthetic Peanut, inner sequence
cgcaacggcaggcagagtgaatgtggcgtg

SEQ ID NO: 589 - DNA, 30 bp, Artificial Sequence
  Description of Artificial Sequence: Synthetic Peanut, inner sequence
cgacgcggaaggcacggactgaccgtcaca

SEQ ID NO: 590 - DNA, 30 bp, Artificial Sequence
  Description of Artificial Sequence: Synthetic Peanut, inner sequence
cacgtggcacggtgctatacggcattcgca

SEQ ID NO: 591 - DNA, 30 bp, Artificial Sequence
  Description of Artificial Sequence: Synthetic Peanut, inner sequence
gccatgcacgaacactatcatggcggcatg

SEQ ID NO: 592 - DNA, 30 bp, Artificial Sequence
  Description of Artificial Sequence: Synthetic Peanut, inner sequence
ggcagcaggacatcacacatgcacttcgca

SEQ ID NO: 593 - DNA, 30 bp, Artificial Sequence
  Description of Artificial Sequence: Synthetic Peanut, inner sequence
cgtgcagtggcaacggtccgacgcaacaca

SEQ ID NO: 594 - DNA, 30 bp, Artificial Sequence
  Description of Artificial Sequence: Synthetic Peanut, inner sequence
cgataccgccactacgacatgcacggcgta

SEQ ID NO: 595 - DNA, 30 bp, Artificial Sequence
  Description of Artificial Sequence: Synthetic Peanut, inner sequence
ccgtagcgacatcaagcgatggtgtgcgtg

SEQ ID NO: 596 - DNA, 30 bp, Artificial Sequence
  Description of Artificial Sequence: Synthetic Peanut, inner sequence
cgtatggctgggatcgtacctacgtggaca

SEQ ID NO: 597 - DNA, 30 bp, Artificial Sequence
  Description of Artificial Sequence: Synthetic Peanut, inner sequence
cgcacactgtgagggcatgtggcacgcagt

SEQ ID NO: 598 - DNA, 30 bp, Artificial Sequence
  Description of Artificial Sequence: Synthetic Peanut, inner sequence
cgcaccgtcgatacgtcatgcacgctgacg

SEQ ID NO: 599 - DNA, 30 bp, Artificial Sequence
  Description of Artificial Sequence: Synthetic Peanut, inner sequence
cgcaccgtcgatacgtcaagcacgctgaca

SEQ ID NO: 600 - DNA, 30 bp, Artificial Sequence
  Description of Artificial Sequence: Synthetic Peanut, inner sequence
gcacatggccaacatgcagcaccgtccgca

SEQ ID NO: 601 - DNA, 30 bp, Artificial Sequence
  Description of Artificial Sequence: Synthetic Peanut, inner sequence
cgaccatgcaacgaggtgatgtctgtcgcg

SEQ ID NO: 602 - DNA, 30 bp, Artificial Sequence
  Description of Artificial Sequence: Synthetic Peanut, inner sequence
cacacacgcaatgtcatcatgttgtgcaca

SEQ ID NO: 603 - DNA, 30 bp, Artificial Sequence
  Description of Artificial Sequence: Synthetic Peanut, inner sequence
cgcaccgtcgacacgtcatgcacgctgaca

SEQ ID NO: 604 - DNA, 30 bp, Artificial Sequence
  Description of Artificial Sequence: Synthetic Peanut, inner sequence
cacgcggcacgatacgtcaggtccgatgca

SEQ ID NO: 605 - DNA, 30 bp, Artificial Sequence
  Description of Artificial Sequence: Synthetic Peanut, inner sequence
cgacgcgtagcaaggatgccctgatgcaca

SEQ ID NO: 606 - DNA, 30 bp, Artificial Sequence
  Description of Artificial Sequence: Synthetic Peanut, inner sequence
cgtaccgcagctagacacggcatgggcaca

SEQ ID NO: 607 - DNA, 30 bp, Artificial Sequence
  Description of Artificial Sequence: Synthetic Peanut, inner sequence
gtgacgcagcaacatcaacaggctgtcgca

SEQ ID NO: 608 - DNA, 30 bp, Artificial Sequence
  Description of Artificial Sequence: Synthetic Peanut, inner sequence
cgtaccgaacaggggacgtacgtagacacg

SEQ ID NO: 609 - DNA, 30 bp, Artificial Sequence
  Description of Artificial Sequence: Synthetic Peanut, inner sequence
gcgtacacggatcagcacagctactgcaca

SEQ ID NO: 610 - DNA, 30 bp, Artificial Sequence
  Description of Artificial Sequence: Synthetic Peanut, inner sequence
ggcaacgcacatcgtatcacgcatcggacc

SEQ ID NO: 611 - DNA, 30 bp, Artificial Sequence
  Description of Artificial Sequence: Synthetic Peanut, inner sequence
gtcattccgcatcctacacgtgggcacgca

SEQ ID NO: 612 - DNA, 30 bp, Artificial Sequence
  Description of Artificial Sequence: Synthetic Peanut, inner sequence
cacgatacgtcaaggcatcactccgtcgca

SEQ ID NO: 613 - DNA, 30 bp, Artificial Sequence
  Description of Artificial Sequence: Synthetic Peanut, inner sequence
gtcgtgaggcgaaccgtcatgcactgcgtg

SEQ ID NO: 614 - DNA, 30 bp, Artificial Sequence
  Description of Artificial Sequence: Synthetic Peanut, inner sequence
catgcacgctagagcacatcacgctgcgcg

SEQ ID NO: 615 - DNA, 30 bp, Artificial Sequence
  Description of Artificial Sequence: Synthetic Peanut, inner sequence
gcactactcgcaccctatcatgaggccatg

SEQ ID NO: 616 - DNA, 30 bp, Artificial Sequence
  Description of Artificial Sequence: Synthetic Peanut, inner sequence
ggcgtacgatggatgtgcgttgtgtctgtc

SEQ ID NO: 617 - DNA, 30 bp, Artificial Sequence
  Description of Artificial Sequence: Synthetic Peanut, inner sequence
gtcgtgcacgaacactatcatggcggcatg

SEQ ID NO: 618 - DNA, 30 bp, Artificial Sequence
  Description of Artificial Sequence: Synthetic Peanut, inner sequence
acgcaacggtgactgcatcgtacgtgcaca

SEQ ID NO: 619 - DNA, 30 bp, Artificial Sequence
  Description of Artificial Sequence: Synthetic Peanut, inner sequence
ccgtagcgacatcaagcggtagtgtgcgtg

SEQ ID NO: 620 - DNA, 30 bp, Artificial Sequence
  Description of Artificial Sequence: Synthetic Peanut, inner sequence
cgtacgtaccgcgcctacatgtggcaggga

SEQ ID NO: 621 - DNA, 30 bp, Artificial Sequence
  Description of Artificial Sequence: Synthetic Peanut, inner sequence
ggacacagcgtaccattcaagtgatgcacg

SEQ ID NO: 622 - DNA, 30 bp, Artificial Sequence
  Description of Artificial Sequence: Synthetic Peanut, inner sequence
gtcatgcacgaacactatcatgtcggcatg

SEQ ID NO: 623 - DNA, 30 bp, Artificial Sequence
  Description of Artificial Sequence: Synthetic Peanut, inner sequence
gcacgtggcagcgagcacacttacggcaca

SEQ ID NO: 624 - DNA, 30 bp, Artificial Sequence
  Description of Artificial Sequence: Synthetic Peanut, inner sequence
cgcaccgcaccgacagtggggacgtatgca

SEQ ID NO: 625 - DNA, 30 bp, Artificial Sequence
  Description of Artificial Sequence: Synthetic Peanut, inner sequence
ggacggaacggaacaacaagggcaggcatg

SEQ ID NO: 626 - DNA, 30 bp, Artificial Sequence
  Description of Artificial Sequence: Synthetic Peanut, inner sequence
cgacgagcaggcagaacgtcttccgtcacg

SEQ ID NO: 627 - DNA, 30 bp, Artificial Sequence
  Description of Artificial Sequence: Synthetic Peanut, inner sequence
gccacacagatgacgtatcgtacgtcgcgt

SEQ ID NO: 628 - DNA, 30 bp, Artificial Sequence
  Description of Artificial Sequence: Synthetic Peanut, inner sequence
ggacgcgatgaccgtatcgtggttgtgtca

SEQ ID NO: 629 - DNA, 30 bp, Artificial Sequence
  Description of Artificial Sequence: Synthetic Peanut, inner sequence
gcacaccacgaacataaggtggcatgcaca

SEQ ID NO: 630 - DNA, 30 bp, Artificial Sequence
  Description of Artificial Sequence: Synthetic Peanut, inner sequence
gcatgtgacggcgatctgaccgcgtggaca

SEQ ID NO: 631 - DNA, 30 bp, Artificial Sequence
  Description of Artificial Sequence: Synthetic Peanut, inner sequence
ggccgacctggatgtgagcatgcatctagt

SEQ ID NO: 632 - DNA, 30 bp, Artificial Sequence
  Description of Artificial Sequence: Synthetic Peanut, inner sequence
ggcatgcacgcacctacacgttggcacgta

SEQ ID NO: 633 - DNA, 30 bp, Artificial Sequence
  Description of Artificial Sequence: Synthetic Peanut, inner sequence
ggccgaaacggatgtggccttgtgctacgc

SEQ ID NO: 634 - DNA, 30 bp, Artificial Sequence
  Description of Artificial Sequence: Synthetic Peanut, inner sequence
ccgtagcgacatcaagcggtggagtgcgtg

SEQ ID NO: 635 - DNA, 30 bp, Artificial Sequence
  Description of Artificial Sequence: Synthetic Peanut, inner sequence
ggccaagctggatgtgttcaggtcacgacg

SEQ ID NO: 636 - DNA, 30 bp, Artificial Sequence
  Description of Artificial Sequence: Synthetic Peanut, inner sequence
gtgctgcgatgggacgtggtaaggtgcatg

SEQ ID NO: 637 - DNA, 30 bp, Artificial Sequence
  Description of Artificial Sequence: Synthetic Peanut, inner sequence
ggcatgcacgcacctacacgttggtatgga

SEQ ID NO: 638 - DNA, 30 bp, Artificial Sequence
  Description of Artificial Sequence: Synthetic Peanut, inner sequence
cgcggaccggcaacgtgatggcaatgcaca

SEQ ID NO: 639 - DNA, 30 bp, Artificial Sequence
  Description of Artificial Sequence: Synthetic Peanut, inner sequence
cacgcacgaacgagactgctaccatgtgca

SEQ ID NO: 640 - DNA, 30 bp, Artificial Sequence
  Description of Artificial Sequence: Synthetic Peanut, inner sequence
tcgtgtgccgtaacagccctacagtgcgtc

SEQ ID NO: 641 - DNA, 30 bp, Artificial Sequence
  Description of Artificial Sequence: Synthetic Peanut, inner sequence
cgtgcatgcacagtgccgtacagttgtgcg

SEQ ID NO: 642 - DNA, 29 bp, Artificial Sequence
  Description of Artificial Sequence: Synthetic Peanut, inner sequence
ggcctgcgatggatgtggttgtgctcgtc

SEQ ID NO: 643 - DNA, 30 bp, Artificial Sequence
  Description of Artificial Sequence: Synthetic Peanut, inner sequence
cgtgccaggcagatcgatgtgttgccgatg

SEQ ID NO: 644 - DNA, 30 bp, Artificial Sequence
  Description of Artificial Sequence: Synthetic Peanut, inner sequence
ccgtagcgacatcaagcggtggtgtgcttg

SEQ ID NO: 645 - DNA, 30 bp, Artificial Sequence
  Description of Artificial Sequence: Synthetic Peanut, inner sequence
tggccgaagcgcacctacacgtgtcaggta

SEQ ID NO: 646 - DNA, 30 bp, Artificial Sequence
  Description of Artificial Sequence: Synthetic Peanut, inner sequence
agcaccgtcgatacgtcatgcacgctgaca

SEQ ID NO: 647 - DNA, 30 bp, Artificial Sequence
  Description of Artificial Sequence: Synthetic Peanut, inner sequence
gcacgactcgcaccctatcatgagtccatg

SEQ ID NO: 648 - DNA, 29 bp, Artificial Sequence
  Description of Artificial Sequence: Synthetic Peanut, inner sequence
gtgcgaccgaccctatcaagtgcagcatg

SEQ ID NO: 649 - DNA, 30 bp, Artificial Sequence
  Description of Artificial Sequence: Synthetic Peanut, inner sequence
cgatgcgcagtcaaccactgtgatgcgacg

SEQ ID NO: 650 - DNA, 30 bp, Artificial Sequence
  Description of Artificial Sequence: Synthetic Peanut, inner sequence
cacgtggcaaggacgtggaggtggtgagca

SEQ ID NO: 651 - DNA, 30 bp, Artificial Sequence
  Description of Artificial Sequence: Synthetic Peanut, inner sequence
cacgcgagggagcaccgttgcttacgcaca

SEQ ID NO: 652 - DNA, 31 bp, Artificial Sequence
  Description of Artificial Sequence: Synthetic Peanut, inner sequence
tggcgtgcacaggagcagtcatacgtacgca

SEQ ID NO: 653 - DNA, 30 bp, Artificial Sequence
  Description of Artificial Sequence: Synthetic Peanut, inner sequence
ccgcacgtagccctatcattggtgcatgca

SEQ ID NO: 654 - DNA, 30 bp, Artificial Sequence
  Description of Artificial Sequence: Synthetic Peanut, inner sequence
ggccaaacggaacgtagcacgggggacgta

SEQ ID NO: 655 - DNA, 30 bp, Artificial Sequence
  Description of Artificial Sequence: Synthetic Peanut, inner sequence
cgtgcgtgcggggaaggcgtgtgttacgca

SEQ ID NO: 656 - DNA, 30 bp, Artificial Sequence
  Description of Artificial Sequence: Synthetic Peanut, inner sequence
cgacgggcacacgtgatcttgtaccgcgca

SEQ ID NO: 657 - DNA, 30 bp, Artificial Sequence
  Description of Artificial Sequence: Synthetic Peanut, inner sequence
ggacgcgatgggcgtgggtatgcacttggc

SEQ ID NO: 658 - DNA, 30 bp, Artificial Sequence
  Description of Artificial Sequence: Synthetic Peanut, inner sequence
ccgttacggaacaggtgatcgtcctgcaca

SEQ ID NO: 659 - DNA, 31 bp, Artificial Sequence
  Description of Artificial Sequence: Synthetic Peanut, inner sequence
ggccgtacgatggatgtgggttgtgctcgtc

SEQ ID NO: 660 - DNA, 30 bp, Artificial Sequence
  Description of Artificial Sequence: Synthetic Peanut, inner sequence
cgatggcaagctcgtccatacaatgcgtca

SEQ ID NO: 661 - DNA, 30 bp, Artificial Sequence
  Description of Artificial Sequence: Synthetic Peanut, inner sequence
gtcattccgcatcctacatgtgggcacgta

SEQ ID NO: 662 - DNA, 30 bp, Artificial Sequence
  Description of Artificial Sequence: Synthetic Peanut, inner sequence
ggcatgcacgcacctacacgtgtgtatgga

SEQ ID NO: 663 - DNA, 30 bp, Artificial Sequence
  Description of Artificial Sequence: Synthetic Peanut, inner sequence
tgcgtcacatggccgtatcttagcgtgtcg

SEQ ID NO: 664 - DNA, 30 bp, Artificial Sequence
  Description of Artificial Sequence: Synthetic Peanut, inner sequence
cgatgcgctgtggaaggagtgtggcacgta

SEQ ID NO: 665 - DNA, 30 bp, Artificial Sequence
  Description of Artificial Sequence: Synthetic Peanut, inner sequence
gacatgacgtgaccgaacgtgtacggggca

SEQ ID NO: 666 - DNA, 30 bp, Artificial Sequence
  Description of Artificial Sequence: Synthetic Peanut, inner sequence
cgcaccgtcaagcgggaaggcactttggcg

SEQ ID NO: 667 - DNA, 30 bp, Artificial Sequence
  Description of Artificial Sequence: Synthetic Peanut, inner sequence
cgcatcgcaggtacggctggtagctaggca

SEQ ID NO: 668 - DNA, 30 bp, Artificial Sequence
  Description of Artificial Sequence: Synthetic Peanut, inner sequence
cgcaccatggcacagtcacgcacgcgtcga

SEQ ID NO: 669 - DNA, 30 bp, Artificial Sequence
  Description of Artificial Sequence: Synthetic Peanut, inner sequence
cgaccagggcagggacagggacagtgcatg

SEQ ID NO: 670 - DNA, 30 bp, Artificial Sequence
  Description of Artificial Sequence: Synthetic Peanut, inner sequence
cgtaccgcaagtcggtcgtgcattacggtc

SEQ ID NO: 671 - DNA, 30 bp, Artificial Sequence
  Description of Artificial Sequence: Synthetic Peanut, inner sequence
tggacagcgctgatcaggcaacgtggtgca

SEQ ID NO: 672 - DNA, 30 bp, Artificial Sequence
  Description of Artificial Sequence: Synthetic Peanut, inner sequence
cgttgcgcaagtgacgtcgtgtctgcgaca

SEQ ID NO: 673 - DNA, 30 bp, Artificial Sequence
  Description of Artificial Sequence: Synthetic Peanut, inner sequence
ggacgcaccgaaccgcaagccaagtgagca

SEQ ID NO: 674 - DNA, 30 bp, Artificial Sequence
  Description of Artificial Sequence: Synthetic Peanut, inner sequence
cgcaacggcatgcctcttccatgctgcgca

SEQ ID NO: 675 - DNA, 30 bp, Artificial Sequence
  Description of Artificial Sequence: Synthetic Peanut, inner sequence
cgtgcacgagtacggcaatgtctttgcgtg

SEQ ID NO: 676 - DNA, 30 bp, Artificial Sequence
  Description of Artificial Sequence: Synthetic Peanut, inner sequence
gcgtgcagcgtgtcccgatggatgtcgtca

SEQ ID NO: 677 - DNA, 30 bp, Artificial Sequence
  Description of Artificial Sequence: Synthetic Peanut, inner sequence
cgtaccgtgactgggcatgcactcacgtca

SEQ ID NO: 678 - DNA, 30 bp, Artificial Sequence
  Description of Artificial Sequence: Synthetic Peanut, inner sequence
ccgtagctacatcaagcggtggtgtgcgtg

SEQ ID NO: 679 - DNA, 30 bp, Artificial Sequence
  Description of Artificial Sequence: Synthetic Peanut, inner sequence
cgtggctgacaagtgcgtgatgactgcgta

SEQ ID NO: 680 - DNA, 30 bp, Artificial Sequence
  Description of Artificial Sequence: Synthetic Peanut, inner sequence
gtcatgcgctgggtagtgatcacgtacggt

SEQ ID NO: 681 - DNA, 30 bp, Artificial Sequence
  Description of Artificial Sequence: Synthetic Peanut, inner sequence
cgacacgagtacgtcatcgttgcaggcatg

SEQ ID NO: 682 - DNA, 30 bp, Artificial Sequence
  Description of Artificial Sequence: Synthetic Peanut, inner sequence
ccaccgatggaccgtagtcgtaccgtcacg

SEQ ID NO: 683 - DNA, 30 bp, Artificial Sequence
  Description of Artificial Sequence: Synthetic Peanut, inner sequence
cgcaccgtcgatacgtcatacacgctgaca

SEQ ID NO: 684 - DNA, 30 bp, Artificial Sequence
  Description of Artificial Sequence: Synthetic Peanut, inner sequence
gtccttccgcatcctacacgtgggcacgta

SEQ ID NO: 685 - DNA, 30 bp, Artificial Sequence
  Description of Artificial Sequence: Synthetic Peanut, inner sequence
cctcacgtagccctatcagtggtgcatgca

SEQ ID NO: 686 - DNA, 30 bp, Artificial Sequence
  Description of Artificial Sequence: Synthetic Peanut, inner sequence
cccatcgcatgactgaacgcgtccgtgggc

SEQ ID NO: 687 - DNA, 30 bp, Artificial Sequence
  Description of Artificial Sequence: Synthetic Peanut, inner sequence
gcattggcgtgacatcgtaccgacggcatg

SEQ ID NO: 688 - DNA, 30 bp, Artificial Sequence
  Description of Artificial Sequence: Synthetic Peanut, inner sequence
catgcaaggcgacgtgcagcatccttcgca

SEQ ID NO: 689 - DNA, 29 bp, Artificial Sequence
  Description of Artificial Sequence: Synthetic Peanut, inner sequence
cgacatgacccaggcgacgtgactgcatg

SEQ ID NO: 690 - DNA, 30 bp, Artificial Sequence
  Description of Artificial Sequence: Synthetic Peanut, inner sequence
cacgtcaggcaaagggacgtatgcccaccg

SEQ ID NO: 691 - DNA, 30 bp, Artificial Sequence
  Description of Artificial Sequence: Synthetic Peanut, inner sequence
tgcaccggcactgacggactgagctgcacg

SEQ ID NO: 692 - DNA, 30 bp, Artificial Sequence
  Description of Artificial Sequence: Synthetic Peanut, inner sequence
ggccggaacgaaacgcggggccatgcacta

SEQ ID NO: 693 - DNA, 30 bp, Artificial Sequence
  Description of Artificial Sequence: Synthetic Peanut, inner sequence
gcatgacgagaacgcacatgccgatgcaca

SEQ ID NO: 694 - DNA, 30 bp, Artificial Sequence
  Description of Artificial Sequence: Synthetic Peanut, inner sequence
cacgtgagaggcacgacaagctgtttggca

SEQ ID NO: 695 - DNA, 30 bp, Artificial Sequence
  Description of Artificial Sequence: Synthetic Peanut, inner sequence
catgtgtgcggcactgactatcgagtggga

SEQ ID NO: 696 - DNA, 30 bp, Artificial Sequence
  Description of Artificial Sequence: Synthetic Peanut, inner sequence
gcgctgcgaagaccggtaatgacgtggaca

SEQ ID NO: 697 - DNA, 30 bp, Artificial Sequence
  Description of Artificial Sequence: Synthetic Peanut, inner sequence
acgacaaggcaacgtgtcctacgtgttggt

SEQ ID NO: 698 - DNA, 30 bp, Artificial Sequence
  Description of Artificial Sequence: Synthetic Peanut, inner sequence
gacctaagcgcaccctagcatgtgttcatg

SEQ ID NO: 699 - DNA, 30 bp, Artificial Sequence
  Description of Artificial Sequence: Synthetic Peanut, inner sequence
ccgacgacatgaccgatgtggcattgcgta

SEQ ID NO: 700 - DNA, 30 bp, Artificial Sequence
  Description of Artificial Sequence: Synthetic Peanut, inner sequence
cgcaccgcctcacgtacggcatgttgcaca

SEQ ID NO: 701 - DNA, 30 bp, Artificial Sequence
  Description of Artificial Sequence: Synthetic Peanut, inner sequence
tgcgtcgtatgtgcggctcggatgtgtgtc

SEQ ID NO: 702 - DNA, 30 bp, Artificial Sequence
  Description of Artificial Sequence: Synthetic Peanut, inner sequence
ggcatgcgatggatgaggtgctgcactagt

SEQ ID NO: 703 - DNA, 30 bp, Artificial Sequence
  Description of Artificial Sequence: Synthetic Peanut, inner sequence
gtacgcggctggatacaagtacggcatgga

SEQ ID NO: 704 - DNA, 30 bp, Artificial Sequence
  Description of Artificial Sequence: Synthetic Peanut, inner sequence
cgatacgacgaggctcacacaggctgcgca

SEQ ID NO: 705 - DNA, 30 bp, Artificial Sequence
  Description of Artificial Sequence: Synthetic Peanut, inner sequence
cgcaccgtcgatacgtcatgcacgctgact

SEQ ID NO: 706 - DNA, 30 bp, Artificial Sequence
  Description of Artificial Sequence: Synthetic Peanut, inner sequence
ccacgacatggaacgtagcgtcacttcgcg

SEQ ID NO: 707 - DNA, 30 bp, Artificial Sequence
  Description of Artificial Sequence: Synthetic Peanut, inner sequence
gtcatgcacgaacactattatggcggcatg

SEQ ID NO: 708 - DNA, 31 bp, Artificial Sequence
  Description of Artificial Sequence: Synthetic Peanut, inner sequence
catgccatgacgtccatgggtcctacgcgca

SEQ ID NO: 709 - DNA, 30 bp, Artificial Sequence
  Description of Artificial Sequence: Synthetic Peanut, inner sequence
cgaccaggacgaatcgtactggcctgcgca

SEQ ID NO: 710 - DNA, 30 bp, Artificial Sequence
  Description of Artificial Sequence: Synthetic Peanut, inner sequence
ccatgtggcgcatgtgttcagtgctgcgtg

SEQ ID NO: 711 - DNA, 30 bp, Artificial Sequence
  Description of Artificial Sequence: Synthetic Peanut, inner sequence
ccatccgatgcgtcacgcaactgtgccatg

SEQ ID NO: 712 - DNA, 30 bp, Artificial Sequence
  Description of Artificial Sequence: Synthetic Peanut, inner sequence
cgcacctacagtcagtcacgatgctacgtg

SEQ ID NO: 713 - DNA, 30 bp, Artificial Sequence
  Description of Artificial Sequence: Synthetic Peanut, inner sequence
cgaaccgaacaggcacgacctcacggggtg

SEQ ID NO: 714 - DNA, 30 bp, Artificial Sequence
  Description of Artificial Sequence: Synthetic Peanut, inner sequence
gtacacgatgcaccttcaagttgtgatgta

SEQ ID NO: 715 - DNA, 30 bp, Artificial Sequence
  Description of Artificial Sequence: Synthetic Peanut, inner sequence
gcccaatctgacctatcaacgtgtcgtgga

SEQ ID NO: 716 - DNA, 30 bp, Artificial Sequence
  Description of Artificial Sequence: Synthetic Peanut, inner sequence
catgcaggacgcacgactagacatggcgta

SEQ ID NO: 717 - DNA, 30 bp, Artificial Sequence
  Description of Artificial Sequence: Synthetic Peanut, inner sequence
cgcaccgtcgatacgtcatgcacgctcaca

SEQ ID NO: 718 - DNA, 30 bp, Artificial Sequence
  Description of Artificial Sequence: Synthetic Peanut, inner sequence
gcgtgcagaggatgtgcccttcgtcccgca

SEQ ID NO: 719 - DNA, 30 bp, Artificial Sequence
  Description of Artificial Sequence: Synthetic Peanut, inner sequence
gcatcagcaggcgcgatcgaacctggcaca

SEQ ID NO: 720 - DNA, 30 bp, Artificial Sequence
  Description of Artificial Sequence: Synthetic Peanut, inner sequence
cgagcgcacgtgaggcactgtatcgtcacg

SEQ ID NO: 721 - DNA, 30 bp, Artificial Sequence
  Description of Artificial Sequence: Synthetic Peanut, inner sequence
ccacatggtcgcatcgaacggtggtacgca

SEQ ID NO: 722 - DNA, 30 bp, Artificial Sequence
  Description of Artificial Sequence: Synthetic Peanut, inner sequence
tggcatgggacgatgcgccttccctgcatg

SEQ ID NO: 723 - DNA, 30 bp, Artificial Sequence
  Description of Artificial Sequence: Synthetic Peanut, inner sequence
gcacaacacgtagggaacagtacgtacgca

SEQ ID NO: 724 - DNA, 30 bp, Artificial Sequence
  Description of Artificial Sequence: Synthetic Peanut, inner sequence
ggacgcagcttgcctactgttggtcacgta

SEQ ID NO: 725 - DNA, 30 bp, Artificial Sequence
  Description of Artificial Sequence: Synthetic Peanut, inner sequence
cgcgtcagcagcgaatggcatgtctcgacc

SEQ ID NO: 726 - DNA, 30 bp, Artificial Sequence
  Description of Artificial Sequence: Synthetic Peanut, inner sequence
cacgtgatgcgagggcgtatggtctgccgt

SEQ ID NO: 727 - DNA, 30 bp, Artificial Sequence
  Description of Artificial Sequence: Synthetic Peanut, inner sequence
gtcatgcacgcacactatcatggcggcatg

SEQ ID NO: 728 - DNA, 30 bp, Artificial Sequence
  Description of Artificial Sequence: Synthetic Peanut, inner sequence
gcacgaatcgcaccctatcatgaggccatg

SEQ ID NO: 729 - DNA, 30 bp, Artificial Sequence
  Description of Artificial Sequence: Synthetic Peanut, inner sequence
acgaacggagcagaggtccacgcatgcacg

SEQ ID NO: 730 - DNA, 30 bp, Artificial Sequence
  Description of Artificial Sequence: Synthetic Peanut, inner sequence
cacgtgcggaggacaacgccatactgcgtg

SEQ ID NO: 731 - DNA, 30 bp, Artificial Sequence
  Description of Artificial Sequence: Synthetic Peanut, inner sequence
cgtgacaggcaggaaacatcgatgtgcgcc

SEQ ID NO: 732 - DNA, 30 bp, Artificial Sequence
  Description of Artificial Sequence: Synthetic Peanut, inner sequence
cgtgccacaagtcgacacgcatatcacgcg

SEQ ID NO: 733 - DNA, 30 bp, Artificial Sequence
  Description of Artificial Sequence: Synthetic Peanut, inner sequence
cacgtacggcacaacgactggaggtgagca

SEQ ID NO: 734 - DNA, 30 bp, Artificial Sequence
  Description of Artificial Sequence: Synthetic Peanut, inner sequence
gccgtagcgaaccgctgtcattgtgcgatg

SEQ ID NO: 735 - DNA, 30 bp, Artificial Sequence
  Description of Artificial Sequence: Synthetic Peanut, inner sequence
cacgcacaggtgatgcatggatcacgcgca

SEQ ID NO: 736 - DNA, 30 bp, Artificial Sequence
  Description of Artificial Sequence: Synthetic Peanut, inner sequence
cgacgcacgaaacgaacatgttgtcacgca

SEQ ID NO: 737 - DNA, 30 bp, Artificial Sequence
  Description of Artificial Sequence: Synthetic Peanut, inner sequence
cgcgccaacaacagggaacgtaacgccatg

SEQ ID NO: 738 - DNA, 30 bp, Artificial Sequence
  Description of Artificial Sequence: Synthetic Peanut, inner sequence
ccatgtgaacgtgcgtaccgaaagtgcgtc

SEQ ID NO: 739 - DNA, 30 bp, Artificial Sequence
  Description of Artificial Sequence: Synthetic Peanut, inner sequence
cgacgcatgaccagtggcgatgtatgcacg

SEQ ID NO: 740 - DNA, 30 bp, Artificial Sequence
  Description of Artificial Sequence: Synthetic Peanut, inner sequence
gtgcgatcgtacctatcaatggtcatcgta

SEQ ID NO: 741 - DNA, 30 bp, Artificial Sequence
  Description of Artificial Sequence: Synthetic Peanut, inner sequence
ggccgaatgaccgtctcatgtgagcatgga

SEQ ID NO: 742 - DNA, 30 bp, Artificial Sequence
  Description of Artificial Sequence: Synthetic Peanut, inner sequence
ccgtagagacatcaagcggtggtgtgcgtg

SEQ ID NO: 743 - DNA, 30 bp, Artificial Sequence
  Description of Artificial Sequence: Synthetic Peanut, inner sequence
cgtgacacgcaccattacgtccagctgcgc

SEQ ID NO: 744 - DNA, 30 bp, Artificial Sequence
  Description of Artificial Sequence: Synthetic Peanut, inner sequence
acgacgaacggtagcagcactgacgacaca

SEQ ID NO: 745 - DNA, 30 bp, Artificial Sequence
  Description of Artificial Sequence: Synthetic Peanut, inner sequence
cacgcgtgctggtctgcatgtccatgcgca

SEQ ID NO: 746 - DNA, 30 bp, Artificial Sequence
  Description of Artificial Sequence: Synthetic Peanut, inner sequence
ggcatgcacgcaccctatcatgtaggcatg

SEQ ID NO: 747 - DNA, 30 bp, Artificial Sequence
  Description of Artificial Sequence: Synthetic Peanut, inner sequence
cacgcagtcgaaactcagtgtcactgcacg

SEQ ID NO: 748 - DNA, 30 bp, Artificial Sequence
  Description of Artificial Sequence: Synthetic Peanut, inner sequence
cgacccgcagacgttgtgtggtggtgcgta

SEQ ID NO: 749 - DNA, 30 bp, Artificial Sequence
  Description of Artificial Sequence: Synthetic Peanut, inner sequence
cgtatgccaaacgcaacctacagctgtggt

SEQ ID NO: 750 - DNA, 30 bp, Artificial Sequence
  Description of Artificial Sequence: Synthetic Peanut, inner sequence
ggcctgcgatggatgtggtgctgcactagt

SEQ ID NO: 751 - DNA, 30 bp, Artificial Sequence
  Description of Artificial Sequence: Synthetic Peanut, inner sequence
aggcacacgtgaaggcacatcgactacgca

SEQ ID NO: 752 - DNA, 30 bp, Artificial Sequence
  Description of Artificial Sequence: Synthetic Peanut, inner sequence
cacgcatggaaggcacgtcaaccacgggca

SEQ ID NO: 753 - DNA, 30 bp, Artificial Sequence
  Description of Artificial Sequence: Synthetic Peanut, inner sequence
gacatgcacgaacactatcatggcggcatg

SEQ ID NO: 754 - DNA, 30 bp, Artificial Sequence
  Description of Artificial Sequence: Synthetic Peanut, inner sequence
cgcaccggcgatacgtcatgcacgctgaca

SEQ ID NO: 755 - DNA, 30 bp, Artificial Sequence
  Description of Artificial Sequence: Synthetic Peanut, inner sequence
cctgaccgcaatggttagggaccaggcacg

SEQ ID NO: 756 - DNA, 30 bp, Artificial Sequence
  Description of Artificial Sequence: Synthetic Peanut, inner sequence
ccgtagcggcatcaagcggtggtgtgcgtg

SEQ ID NO: 757 - DNA, 30 bp, Artificial Sequence
  Description of Artificial Sequence: Synthetic Peanut, inner sequence
cgcaacggtacatcagctgcaacgtggcca

SEQ ID NO: 758 - DNA, 30 bp, Artificial Sequence
  Description of Artificial Sequence: Synthetic Peanut, inner sequence
tggacgcacaatacacgtcaaggcggcatg

SEQ ID NO: 759 - DNA, 30 bp, Artificial Sequence
  Description of Artificial Sequence: Synthetic Peanut, inner sequence
ccacgcagcacacggtaatggctctgcacg

SEQ ID NO: 760 - DNA, 30 bp, Artificial Sequence
  Description of Artificial Sequence: Synthetic Peanut, inner sequence
ccgttacgaccgcaagactgtgtgtacgtg

SEQ ID NO: 761 - DNA, 30 bp, Artificial Sequence
  Description of Artificial Sequence: Synthetic Peanut, inner sequence
catgtgtgcagcgaatgccctgacgtggac

SEQ ID NO: 762 - DNA, 30 bp, Artificial Sequence
  Description of Artificial Sequence: Synthetic Peanut, inner sequence
gcgatccgacggagacacgtccacttcgcg

SEQ ID NO: 763 - DNA, 30 bp, Artificial Sequence
  Description of Artificial Sequence: Synthetic Peanut, inner sequence
gcaacgaacgtacctgtgtcgtgacgcgtc

SEQ ID NO: 764 - DNA, 30 bp, Artificial Sequence
  Description of Artificial Sequence: Synthetic Peanut, inner sequence
gcctgctcaaccctacaacgtggccacgta

SEQ ID NO: 765 - DNA, 30 bp, Artificial Sequence
  Description of Artificial Sequence: Synthetic Peanut, inner sequence
cgatgcagcgagtgacgtagcagctacgga

SEQ ID NO: 766 - DNA, 30 bp, Artificial Sequence
  Description of Artificial Sequence: Synthetic Peanut, inner sequence
cgaggcaggcaaacagcagtacagctcggt

SEQ ID NO: 767 - DNA, 30 bp, Artificial Sequence
  Description of Artificial Sequence: Synthetic Peanut, inner sequence
cgtacgccaccattgaccgtagcatgcacg

SEQ ID NO: 768 - DNA, 30 bp, Artificial Sequence
  Description of Artificial Sequence: Synthetic Peanut, inner sequence
ggcatgcacgcacatacacgtgggtatgga

SEQ ID NO: 769 - DNA, 30 bp, Artificial Sequence
  Description of Artificial Sequence: Synthetic Peanut, inner sequence
cgacacggctgacaatagcgttctgacgca

SEQ ID NO: 770 - DNA, 30 bp, Artificial Sequence
  Description of Artificial Sequence: Synthetic Peanut, inner sequence
cgcaccgtacatgcaggactgtcatcgtga

SEQ ID NO: 771 - DNA, 30 bp, Artificial Sequence
  Description of Artificial Sequence: Synthetic Peanut, inner sequence
cgagccgaagcggttggggacgatggcaca

SEQ ID NO: 772 - DNA, 30 bp, Artificial Sequence
  Description of Artificial Sequence: Synthetic Peanut, inner sequence
tcgcacgtagccctatcagtggtgcatgca

SEQ ID NO: 773 - DNA, 30 bp, Artificial Sequence
  Description of Artificial Sequence: Synthetic Peanut, inner sequence
tcgataccgtgccagtgggtgtgcttagca

SEQ ID NO: 774 - DNA, 30 bp, Artificial Sequence
  Description of Artificial Sequence: Synthetic Peanut, inner sequence
gtcatgccatcccttcgattgtgacaggta

SEQ ID NO: 775 - DNA, 30 bp, Artificial Sequence
  Description of Artificial Sequence: Synthetic Peanut, inner sequence
cgatcggaacggtgggcggagtgcagtgtg

SEQ ID NO: 776 - DNA, 30 bp, Artificial Sequence
  Description of Artificial Sequence: Synthetic Peanut, inner sequence
ccatcgcgtcactatcatgtgtgtcacgca

SEQ ID NO: 777 - DNA, 30 bp, Artificial Sequence
  Description of Artificial Sequence: Synthetic Peanut, inner sequence
gacgcgcgcacctatcaatggcatgcacta

SEQ ID NO: 778 - DNA, 30 bp, Artificial Sequence
  Description of Artificial Sequence: Synthetic Peanut, inner sequence
ccgtagtgacatcaagcggtggtgtgcgtg

SEQ ID NO: 779 - DNA, 30 bp, Artificial Sequence
  Description of Artificial Sequence: Synthetic Peanut, inner sequence
ggacgcgaacaacgttgacgtaacggcaca

SEQ ID NO: 780 - DNA, 30 bp, Artificial Sequence
  Description of Artificial Sequence: Synthetic Peanut, inner sequence
tcacgactcgcaccctatcatgaggccatg

SEQ ID NO: 781 - DNA, 30 bp, Artificial Sequence
  Description of Artificial Sequence: Synthetic Peanut, inner sequence
tgcgacaagcacgatacactgcgctgcgca

SEQ ID NO: 782 - DNA, 30 bp, Artificial Sequence
  Description of Artificial Sequence: Synthetic Peanut, inner sequence
ggcctgcgatggatgtgcgttgtgctcggc

SEQ ID NO: 783 - DNA, 30 bp, Artificial Sequence
  Description of Artificial Sequence: Synthetic Peanut, inner sequence
catggccgacacgtaccttcaagtgtgaca

SEQ ID NO: 784 - DNA, 30 bp, Artificial Sequence
  Description of Artificial Sequence: Synthetic Peanut, inner sequence
catgcgcaagcccggtacgcacactggacg

SEQ ID NO: 785 - DNA, 30 bp, Artificial Sequence
  Description of Artificial Sequence: Synthetic Peanut, inner sequence
cgcagcgtgaggaaggtactgtgcaacgcg

SEQ ID NO: 786 - DNA, 30 bp, Artificial Sequence
  Description of Artificial Sequence: Synthetic Peanut, inner sequence
cgacaagcaggcaatgtgactcacgcgtga

SEQ ID NO: 787 - DNA, 30 bp, Artificial Sequence
  Description of Artificial Sequence: Synthetic Peanut, inner sequence
ggacgcagcttgcctacttgtggtcacgta

SEQ ID NO: 788 - DNA, 30 bp, Artificial Sequence
  Description of Artificial Sequence: Synthetic Peanut, inner sequence
cgcaccgacgatacgtcatgcacgctgaca

SEQ ID NO: 789 - DNA, 30 bp, Artificial Sequence
  Description of Artificial Sequence: Synthetic Peanut, inner sequence
gcacgactcacaccctatcatgaggccatg

SEQ ID NO: 790 - DNA, 30 bp, Artificial Sequence
  Description of Artificial Sequence: Synthetic Peanut, inner sequence
cggcacaggaggcgtgaagcatgcaccatg

SEQ ID NO: 791 - DNA, 30 bp, Artificial Sequence
  Description of Artificial Sequence: Synthetic Peanut, inner sequence
gacatgcactgaccgatcgatggtcacgta

SEQ ID NO: 792 - DNA, 30 bp, Artificial Sequence
  Description of Artificial Sequence: Synthetic Peanut, inner sequence
cggcacggagtcgcagcatagccgtacgca

SEQ ID NO: 793 - DNA, 30 bp, Artificial Sequence
  Description of Artificial Sequence: Synthetic Peanut, inner sequence
gtgtgaccgacccgtaagtgtgcatgcgac

SEQ ID NO: 794 - DNA, 30 bp, Artificial Sequence
  Description of Artificial Sequence: Synthetic Peanut, inner sequence
ccgagcagaccattgcgacgatgatgcgca

SEQ ID NO: 795 - DNA, 30 bp, Artificial Sequence
  Description of Artificial Sequence: Synthetic Peanut, inner sequence
catcgcaatgacatggacgttgcctggaca

SEQ ID NO: 796 - DNA, 30 bp, Artificial Sequence
  Description of Artificial Sequence: Synthetic Peanut, inner sequence
ccactggccacgtggatgatgcactgcgca

SEQ ID NO: 797 - DNA, 30 bp, Artificial Sequence
  Description of Artificial Sequence: Synthetic Peanut, inner sequence
cgatgaggcatagcgagtacacactgcgtg

SEQ ID NO: 798 - DNA, 30 bp, Artificial Sequence
  Description of Artificial Sequence: Synthetic Peanut, inner sequence
cacgtaccacggtgacatgagtgcgccacg

SEQ ID NO: 799 - DNA, 30 bp, Artificial Sequence
  Description of Artificial Sequence: Synthetic Peanut, inner sequence
cgatgacgtgcgagacgacatgcatacgca

SEQ ID NO: 800 - DNA, 30 bp, Artificial Sequence
  Description of Artificial Sequence: Synthetic Peanut, inner sequence
ggcgcgaacgtacctatcaagttggtcgta

SEQ ID NO: 801 - DNA, 30 bp, Artificial Sequence
  Description of Artificial Sequence: Synthetic Peanut, inner sequence
gtacgcacgcagaccttcaagtcggccatg

SEQ ID NO: 802 - DNA, 30 bp, Artificial Sequence
  Description of Artificial Sequence: Synthetic Peanut, inner sequence
cgcaacagaacaggtggtgacgcactgacg

SEQ ID NO: 803 - DNA, 30 bp, Artificial Sequence
  Description of Artificial Sequence: Synthetic Peanut, inner sequence
cgcacgctagaggcacatgcacgctacacg

SEQ ID NO: 804 - DNA, 30 bp, Artificial Sequence
  Description of Artificial Sequence: Synthetic Peanut, inner sequence
gccacgcacatcatggacttcctctgcacg

SEQ ID NO: 805 - DNA, 30 bp, Artificial Sequence
  Description of Artificial Sequence: Synthetic Peanut, inner sequence
gcacgactagcaccctatcatgaggccatg

SEQ ID NO: 806 - DNA, 30 bp, Artificial Sequence
  Description of Artificial Sequence: Synthetic Peanut, inner sequence
cgcaccgtcgatacatcatgcacgctgaca

SEQ ID NO: 807 - DNA, 30 bp, Artificial Sequence
  Description of Artificial Sequence: Synthetic Peanut, inner sequence
ccgaactgacggtcaagggtgcatggcgta

SEQ ID NO: 808 - DNA, 30 bp, Artificial Sequence
  Description of Artificial Sequence: Synthetic Peanut, inner sequence
cacgtggacagatcgtaccgttagtgtgtc

SEQ ID NO: 809 - DNA, 30 bp, Artificial Sequence
  Description of Artificial Sequence: Synthetic Peanut, inner sequence
gacaccacgtggaccatactgtacgtgtgc

SEQ ID NO: 810 - DNA, 29 bp, Artificial Sequence
  Description of Artificial Sequence: Synthetic Peanut, inner sequence
gcaccgtcgatacgtcatgcacgctgaca

SEQ ID NO: 811 - DNA, 30 bp, Artificial Sequence
  Description of Artificial Sequence: Synthetic Peanut, inner sequence
cctgaacgaacgtgggtaggtacgcagcca

SEQ ID NO: 812 - DNA, 30 bp, Artificial Sequence
  Description of Artificial Sequence: Synthetic Peanut, inner sequence
gtcatgcatgcccaatgtcattggtacgca

SEQ ID NO: 813 - DNA, 30 bp, Artificial Sequence
  Description of Artificial Sequence: Synthetic Peanut, inner sequence
ggacgcggatgagcttcgagtgacgtgtac

SEQ ID NO: 814 - DNA, 30 bp, Artificial Sequence
  Description of Artificial Sequence: Synthetic Peanut, inner sequence
cgcacagacacggaaggacactgcgatgtg

SEQ ID NO: 815 - DNA, 30 bp, Artificial Sequence
  Description of Artificial Sequence: Synthetic Peanut, inner sequence
cgcaggacggacgaggcttaccgtagcgca

SEQ ID NO: 816 - DNA, 30 bp, Artificial Sequence
  Description of Artificial Sequence: Synthetic Peanut, inner sequence
ggactgcgcgtaccgtcaagtgcgaatgga

SEQ ID NO: 817 - DNA, 30 bp, Artificial Sequence
  Description of Artificial Sequence: Synthetic Peanut, inner sequence
catgcgcaggccaactgtacgacaccgatg

SEQ ID NO: 818 - DNA, 30 bp, Artificial Sequence
  Description of Artificial Sequence: Synthetic Peanut, inner sequence
cgccacgaggcaacaacgtgtgctgcgaca

SEQ ID NO: 819 - DNA, 30 bp, Artificial Sequence
  Description of Artificial Sequence: Synthetic Peanut, inner sequence
cgatccgtggtgcagggagtgtgctgcgta

SEQ ID NO: 820 - DNA, 30 bp, Artificial Sequence
  Description of Artificial Sequence: Synthetic Peanut, inner sequence
cacgcataggcaggtgagcttgtccgcatc

SEQ ID NO: 821 - DNA, 30 bp, Artificial Sequence
  Description of Artificial Sequence: Synthetic Peanut, inner sequence
gcaacgtgacgacaagcaaggccgtacgcg

SEQ ID NO: 822 - DNA, 26 bp, Artificial Sequence
  Description of Artificial Sequence: Synthetic Peanut, inner sequence
ggcacaaacggaccgacaagtgcgca

SEQ ID NO: 823 - DNA, 30 bp, Artificial Sequence
  Description of Artificial Sequence: Synthetic Peanut, inner sequence
cgatgccacgacgcaccttcgtcatgcaca

SEQ ID NO: 824 - DNA, 30 bp, Artificial Sequence
  Description of Artificial Sequence: Synthetic Peanut, inner sequence
cacacgcaaagtacgtccggacactgcacg

SEQ ID NO: 825 - DNA, 30 bp, Artificial Sequence
  Description of Artificial Sequence: Synthetic Peanut, inner sequence
cgcaacaggctgagcacatgtacgtacaca

SEQ ID NO: 826 - DNA, 30 bp, Artificial Sequence
  Description of Artificial Sequence: Synthetic Peanut, inner sequence
gtcgtgtcgtgactgcatacgagtgacgca

SEQ ID NO: 827 - DNA, 30 bp, Artificial Sequence
  Description of Artificial Sequence: Synthetic Peanut, inner sequence
ggactgcgatggatgtgtgcgtgtattagc

SEQ ID NO: 828 - DNA, 30 bp, Artificial Sequence
  Description of Artificial Sequence: Synthetic Peanut, inner sequence
ggccacagcgtacctcaacgtgtacgtgca

SEQ ID NO: 829 - DNA, 30 bp, Artificial Sequence
  Description of Artificial Sequence: Synthetic Peanut, inner sequence
cgcaacgggagggaaacgtcctgcgacgcg

SEQ ID NO: 830 - DNA, 30 bp, Artificial Sequence
  Description of Artificial Sequence: Synthetic Peanut, inner sequence
acgtgtggctgcatttcgtcccgtgtggca

SEQ ID NO: 831 - DNA, 30 bp, Artificial Sequence
  Description of Artificial Sequence: Synthetic Peanut, inner sequence
cgtaccgcaagggggagagtgcgtgttggc

SEQ ID NO: 832 - DNA, 30 bp, Artificial Sequence
  Description of Artificial Sequence: Synthetic Peanut, inner sequence
gcggtgcggaacatgtacgccatcttgcca

SEQ ID NO: 833 - DNA, 30 bp, Artificial Sequence
  Description of Artificial Sequence: Synthetic Peanut, inner sequence
catgcagcagggttacgtgttcactgcgcc

SEQ ID NO: 834 - DNA, 30 bp, Artificial Sequence
  Description of Artificial Sequence: Synthetic Peanut, inner sequence
gtgcgacacgtgttcccgttcaagttgggc

SEQ ID NO: 835 - DNA, 30 bp, Artificial Sequence
  Description of Artificial Sequence: Synthetic Peanut, inner sequence
cgcaacgcacatccgaacgacgtgtgcatg

SEQ ID NO: 836 - DNA, 30 bp, Artificial Sequence
  Description of Artificial Sequence: Synthetic Peanut, inner sequence
tgtcacagggacgtatcgcaccgctgtggt

SEQ ID NO: 837 - DNA, 30 bp, Artificial Sequence
  Description of Artificial Sequence: Synthetic Peanut, inner sequence
cgcaccgtcgatacgttatgcacgctgaca

SEQ ID NO: 838 - DNA, 30 bp, Artificial Sequence
  Description of Artificial Sequence: Synthetic Peanut, inner sequence
cgatgctaggatggacgtgacggctacgcg

SEQ ID NO: 839 - DNA, 30 bp, Artificial Sequence
  Description of Artificial Sequence: Synthetic Peanut, inner sequence
cgacaggcaggtcaaggtcatcgctgcaca

SEQ ID NO: 840 - DNA, 30 bp, Artificial Sequence
  Description of Artificial Sequence: Synthetic Peanut, inner sequence
cgcactgtcgatacgtcatgcacgctgaca

SEQ ID NO: 841 - DNA, 30 bp, Artificial Sequence
  Description of Artificial Sequence: Synthetic Peanut, inner sequence
gacgcactcaaccgatcagtggcatgcgtg

SEQ ID NO: 842 - DNA, 30 bp, Artificial Sequence
  Description of Artificial Sequence: Synthetic Peanut, inner sequence
cgcacggcaaggaagggtgcgtacttgtgt

SEQ ID NO: 843 - DNA, 30 bp, Artificial Sequence
  Description of Artificial Sequence: Synthetic Peanut, inner sequence
cgatgaccgtgtggtgaatgtgcctacgca

SEQ ID NO: 844 - DNA, 30 bp, Artificial Sequence
  Description of Artificial Sequence: Synthetic Peanut, inner sequence
ccatcatgcaccgtaacggaccactgcgca

SEQ ID NO: 845 - DNA, 31 bp, Artificial Sequence
  Description of Artificial Sequence: Synthetic Peanut, inner sequence
cgcaccgtcgatacgtcatgcacgctgacca

SEQ ID NO: 846 - DNA, 30 bp, Artificial Sequence
  Description of Artificial Sequence: Synthetic Peanut, inner sequence
gcacgtggcttacccgctggcatgacgacg

SEQ ID NO: 847 - DNA, 30 bp, Artificial Sequence
  Description of Artificial Sequence: Synthetic Peanut, inner sequence
cgatgcacaccaaacaggccacgctacgtg

SEQ ID NO: 848 - DNA, 30 bp, Artificial Sequence
  Description of Artificial Sequence: Synthetic Peanut, inner sequence
gcacggcacgtaacggttggttcaggcaca

SEQ ID NO: 849 - DNA, 30 bp, Artificial Sequence
  Description of Artificial Sequence: Synthetic Peanut, inner sequence
cgacacgaagctcaagggcgatacggcatg

SEQ ID NO: 850 - DNA, 30 bp, Artificial Sequence
  Description of Artificial Sequence: Synthetic Peanut, inner sequence
ccgacctcgcaccgtatcaagctggccatg

SEQ ID NO: 851 - DNA, 30 bp, Artificial Sequence
  Description of Artificial Sequence: Synthetic Peanut, inner sequence
ccgtgcaggagcattatggcacgtgcggca

SEQ ID NO: 852 - DNA, 30 bp, Artificial Sequence
  Description of Artificial Sequence: Synthetic Peanut, inner sequence
cgccaacacggtacacatcatggctacgcg

SEQ ID NO: 853 - DNA, 30 bp, Artificial Sequence
  Description of Artificial Sequence: Synthetic Peanut, inner sequence
cgcaccgtcgatacgtcttgcacgctgaca

SEQ ID NO: 854 - DNA, 30 bp, Artificial Sequence
  Description of Artificial Sequence: Synthetic Peanut, inner sequence
gcgtgacgtaacgacagatcatgcgtcagt

SEQ ID NO: 855 - DNA, 30 bp, Artificial Sequence
  Description of Artificial Sequence: Synthetic Peanut, inner sequence
cgcggcagacgaccttgcgttccatgcaca

SEQ ID NO: 856 - DNA, 30 bp, Artificial Sequence
  Description of Artificial Sequence: Synthetic Peanut, inner sequence
cacgcacgtcggagaggtacgttcgccacc

SEQ ID NO: 857 - DNA, 30 bp, Artificial Sequence
  Description of Artificial Sequence: Synthetic Peanut, inner sequence
gtcattccgcatcctacacgtgggtacgta

SEQ ID NO: 858 - DNA, 30 bp, Artificial Sequence
  Description of Artificial Sequence: Synthetic Peanut, inner sequence
cgcgacgaagtggaggtaatgtccgtgcca

SEQ ID NO: 859 - DNA, 30 bp, Artificial Sequence
  Description of Artificial Sequence: Synthetic Peanut, inner sequence
cacatgcatcgtaccgtcacagcacgacca

SEQ ID NO: 860 - DNA, 30 bp, Artificial Sequence
  Description of Artificial Sequence: Synthetic Peanut, inner sequence
ccgtcgcgacatcaagcggtggtgtgcgtg

SEQ ID NO: 861 - DNA, 30 bp, Artificial Sequence
  Description of Artificial Sequence: Synthetic Peanut, inner sequence
tgcgcaaggtcacggtcctacgccttcacg

SEQ ID NO: 862 - DNA, 30 bp, Artificial Sequence
  Description of Artificial Sequence: Synthetic Peanut, inner sequence
cgtaccggagcggcgcacagtgatggcatg

SEQ ID NO: 863 - DNA, 30 bp, Artificial Sequence
  Description of Artificial Sequence: Synthetic Peanut, inner sequence
ggcatgcgatgggtagtgatcacgtacggt

SEQ ID NO: 864 - DNA, 33 bp, Artificial Sequence
  Description of Artificial Sequence: Synthetic Peanut, inner sequence
ccgcatcggaccgatcaaggcaggctgtacgtg

SEQ ID NO: 865 - DNA, 30 bp, Artificial Sequence
  Description of Artificial Sequence: Synthetic Peanut, inner sequence
cgcagcggaagtaccgtacgtatcgtgcca

SEQ ID NO: 866 - DNA, 30 bp, Artificial Sequence
  Description of Artificial Sequence: Synthetic Peanut, inner sequence
cgcaccgtcgatacgtcatgcaccctgaca

SEQ ID NO: 867 - DNA, 30 bp, Artificial Sequence
  Description of Artificial Sequence: Synthetic Peanut, inner sequence
gtgcgcaacgaccctacacgtggtggtgta

SEQ ID NO: 868 - DNA, 30 bp, Artificial Sequence
  Description of Artificial Sequence: Synthetic Peanut, inner sequence
catggcacggaacgcgcagtcacatgcatg

SEQ ID NO: 869 - DNA, 30 bp, Artificial Sequence
  Description of Artificial Sequence: Synthetic Peanut, inner sequence
ggccgaacgtaccggtcaagtggatgcgta

SEQ ID NO: 870 - DNA, 30 bp, Artificial Sequence
  Description of Artificial Sequence: Synthetic Peanut, inner sequence
cgcatgtgaggcactagatgcacttgcgca

SEQ ID NO: 871 - DNA, 30 bp, Artificial Sequence
  Description of Artificial Sequence: Synthetic Peanut, inner sequence
gtcatgcacgaacactataatggcggcatg

SEQ ID NO: 872 - DNA, 30 bp, Artificial Sequence
  Description of Artificial Sequence: Synthetic Peanut, inner sequence
gcgacggtgtgcggtggtatgtcctgcaca

SEQ ID NO: 873 - DNA, 29 bp, Artificial Sequence
  Description of Artificial Sequence: Synthetic Peanut, inner sequence
gtcatgccatcccttcgagtgtgcaggta

SEQ ID NO: 874 - DNA, 30 bp, Artificial Sequence
  Description of Artificial Sequence: Synthetic Peanut, inner sequence
gccaagcggaccaaagtgtgccatgacgca

SEQ ID NO: 875 - DNA, 30 bp, Artificial Sequence
  Description of Artificial Sequence: Synthetic Peanut, inner sequence
gtcatgccgaactgcccattgccatgcagc

SEQ ID NO: 876 - DNA, 30 bp, Artificial Sequence
  Description of Artificial Sequence: Synthetic Peanut, inner sequence
cgacacacggaaccacgtgactgcgccacc

SEQ ID NO: 877 - DNA, 30 bp, Artificial Sequence
  Description of Artificial Sequence: Synthetic Peanut, inner sequence
ccgcacgtagctctatcagtggtgcatgca

SEQ ID NO: 878 - DNA, 30 bp, Artificial Sequence
  Description of Artificial Sequence: Synthetic Peanut, inner sequence
gccaagcgagacgacatgtggtactgcgtg

SEQ ID NO: 879 - DNA, 29 bp, Artificial Sequence
  Description of Artificial Sequence: Synthetic Peanut, inner sequence
ggcatgcgatggatgtggtggtgctgtca

SEQ ID NO: 880 - DNA, 30 bp, Artificial Sequence
  Description of Artificial Sequence: Synthetic Peanut, inner sequence
gccatgcgtgtccctagtcatgacggcata

SEQ ID NO: 881 - DNA, 30 bp, Artificial Sequence
  Description of Artificial Sequence: Synthetic Peanut, inner sequence
cgtaccgcgctggtcacacgtgctgtgtca

SEQ ID NO: 882 - DNA, 30 bp, Artificial Sequence
  Description of Artificial Sequence: Synthetic Peanut, inner sequence
cgtgcagcaggatgacgagcattgggcgtg

SEQ ID NO: 883 - DNA, 30 bp, Artificial Sequence
  Description of Artificial Sequence: Synthetic Peanut, inner sequence
acgcacaacggaaggtctcactgcgtcacg

SEQ ID NO: 884 - DNA, 30 bp, Artificial Sequence
  Description of Artificial Sequence: Synthetic Peanut, inner sequence
gcacgactcgcacactatcatgaggccatg

SEQ ID NO: 885 - DNA, 27 bp, Artificial Sequence
  Description of Artificial Sequence: Synthetic Peanut, inner sequence
ggccaagctgacctagcatgtgtgtca

SEQ ID NO: 886 - DNA, 30 bp, Artificial Sequence
  Description of Artificial Sequence: Synthetic Peanut, inner sequence
cgtgcgcaacgtcgtacgtacatgtgcgta

SEQ ID NO: 887 - DNA, 30 bp, Artificial Sequence
  Description of Artificial Sequence: Synthetic Peanut, inner sequence
tgacgcagcataccctaaggacatggcgtg

SEQ ID NO: 888 - DNA, 30 bp, Artificial Sequence
  Description of Artificial Sequence: Synthetic Peanut, inner sequence
cacacagcgacatgtggtcctacctgcaca

SEQ ID NO: 889 - DNA, 30 bp, Artificial Sequence
  Description of Artificial Sequence: Synthetic Peanut, inner sequence
gtacgacgcgagctagcaaggaggcgtgta

SEQ ID NO: 890 - DNA, 30 bp, Artificial Sequence
  Description of Artificial Sequence: Synthetic Peanut, inner sequence
cgatacgcagatcggacgtatgcagcggca

SEQ ID NO: 891 - DNA, 30 bp, Artificial Sequence
  Description of Artificial Sequence: Synthetic Peanut, inner sequence
gcacgactcgcaccctctcatgaggccatg

SEQ ID NO: 892 - DNA, 30 bp, Artificial Sequence
  Description of Artificial Sequence: Synthetic Peanut, inner sequence
ccgtagcgatatcaagcggtggtgtgcgtg

SEQ ID NO: 893 - DNA, 26 bp, Artificial Sequence
  Description of Artificial Sequence: Synthetic Peanut, inner sequence
ggcatgcacgcacctacacgtggaca

SEQ ID NO: 894 - DNA, 30 bp, Artificial Sequence
  Description of Artificial Sequence: Synthetic Peanut, inner sequence
ccgagacacacgacaggaccatccgtcacg

SEQ ID NO: 895 - DNA, 30 bp, Artificial Sequence
  Description of Artificial Sequence: Synthetic Peanut, inner sequence
cgcagacagaccgtcagtgtgtagtgcgca

SEQ ID NO: 896 - DNA, 30 bp, Artificial Sequence
  Description of Artificial Sequence: Synthetic Peanut, inner sequence
cgaaccgggcaagggtaggtaccatgcacg

SEQ ID NO: 897 - DNA, 30 bp, Artificial Sequence
  Description of Artificial Sequence: Synthetic Peanut, inner sequence
cgcacgcatagggatgacgttccctcgtca

SEQ ID NO: 898 - DNA, 30 bp, Artificial Sequence
  Description of Artificial Sequence: Synthetic Peanut, inner sequence
cgtaccagggggacgtacctgccgtggaca

SEQ ID NO: 899 - DNA, 30 bp, Artificial Sequence
  Description of Artificial Sequence: Synthetic Peanut, inner sequence
cgtagcggcacgcagtcctgtgtaggcaca

SEQ ID NO: 900 - DNA, 30 bp, Artificial Sequence
  Description of Artificial Sequence: Synthetic Peanut, inner sequence
ggacgcagcttgcctactggtggtaacgta

SEQ ID NO: 901 - DNA, 30 bp, Artificial Sequence
  Description of Artificial Sequence: Synthetic Peanut, inner sequence
ggcacaaacggaccgacaagtgcgcatggt

SEQ ID NO: 902 - DNA, 30 bp, Artificial Sequence
  Description of Artificial Sequence: Synthetic Peanut, inner sequence
cgcaccgagcgtggagagcacattggcaca

SEQ ID NO: 903 - DNA, 30 bp, Artificial Sequence
  Description of Artificial Sequence: Synthetic Peanut, inner sequence
cgcaccgtccatacgtcatgcacgctgaca

SEQ ID NO: 904 - DNA, 30 bp, Artificial Sequence
  Description of Artificial Sequence: Synthetic Peanut, inner sequence
gccacaaagcgtgaccgaactgtgtgcatg

SEQ ID NO: 905 - DNA, 30 bp, Artificial Sequence
  Description of Artificial Sequence: Synthetic Peanut, inner sequence
gcacacagcagtacgacatgccacgttgcg

SEQ ID NO: 906 - DNA, 30 bp, Artificial Sequence
  Description of Artificial Sequence: Synthetic Peanut, inner sequence
ccgatcggcatcgctggtcaggacgtagca

SEQ ID NO: 907 - DNA, 30 bp, Artificial Sequence
  Description of Artificial Sequence: Synthetic Peanut, inner sequence
cgacacgcagtaatgaccagatgccacgtg

SEQ ID NO: 908 - DNA, 30 bp, Artificial Sequence
  Description of Artificial Sequence: Synthetic Peanut, inner sequence
caccacgcatcattgtccgccaactgcaca

SEQ ID NO: 909 - DNA, 30 bp, Artificial Sequence
  Description of Artificial Sequence: Synthetic Peanut, inner sequence
ggcatgcgatgaacgaggcatgattcgtca

SEQ ID NO: 910 - DNA, 30 bp, Artificial Sequence
  Description of Artificial Sequence: Synthetic Peanut, inner sequence
cgtacacacaggaacgaggcatacgacgca

SEQ ID NO: 911 - DNA, 30 bp, Artificial Sequence
  Description of Artificial Sequence: Synthetic Peanut, inner sequence
gtacgtatcgaacggtcaagtcggtgtgta

SEQ ID NO: 912 - DNA, 30 bp, Artificial Sequence
  Description of Artificial Sequence: Synthetic Peanut, inner sequence
ggccgaacgtaacgcgggggcatgtggatg

SEQ ID NO: 913 - DNA, 30 bp, Artificial Sequence
  Description of Artificial Sequence: Synthetic Peanut, inner sequence
cagtagcgacatcaagcggtggtgtgcgtg

SEQ ID NO: 914 - DNA, 30 bp, Artificial Sequence
  Description of Artificial Sequence: Synthetic Peanut, inner sequence
gtcgtgtgcgtgccctacaagtcaggcatg

SEQ ID NO: 915 - DNA, 30 bp, Artificial Sequence
  Description of Artificial Sequence: Synthetic Peanut, inner sequence
cgaaccgcgtggacgtgttgctgggcatca

SEQ ID NO: 916 - DNA, 30 bp, Artificial Sequence
  Description of Artificial Sequence: Synthetic Peanut, inner sequence
catgtggccaacgaggcgctacacgtgggc

SEQ ID NO: 917 - DNA, 30 bp, Artificial Sequence
  Description of Artificial Sequence: Synthetic Peanut, inner sequence
ccgcacgcgaacgaggtggtacatggcgta

SEQ ID NO: 918 - DNA, 30 bp, Artificial Sequence
  Description of Artificial Sequence: Synthetic Peanut, inner sequence
cgcaacacgaggatgtgcaatatggtcgcg

SEQ ID NO: 919 - DNA, 30 bp, Artificial Sequence
  Description of Artificial Sequence: Synthetic Peanut, inner sequence
ggacgcatcgcccgtcaatgtgacgccatg

SEQ ID NO: 920 - DNA, 30 bp, Artificial Sequence
  Description of Artificial Sequence: Synthetic Peanut, inner sequence
ccgcacgtatccctatcagtggtgcatgca

SEQ ID NO: 921 - DNA, 30 bp, Artificial Sequence
  Description of Artificial Sequence: Synthetic Peanut, inner sequence
gtgctgccagcccgtagcaagtcaggcatg

SEQ ID NO: 922 - DNA, 30 bp, Artificial Sequence
  Description of Artificial Sequence: Synthetic Peanut, inner sequence
catgctgaatgcgtagtgctgccttgcgca

SEQ ID NO: 923 - DNA, 30 bp, Artificial Sequence
  Description of Artificial Sequence: Synthetic Peanut, inner sequence
cgcacacgtacgtaacggcatggacatcgt

SEQ ID NO: 924 - DNA, 30 bp, Artificial Sequence
  Description of Artificial Sequence: Synthetic Peanut, inner sequence
gtcgtgactggctagctgtacatgcactgc

SEQ ID NO: 925 - DNA, 30 bp, Artificial Sequence
  Description of Artificial Sequence: Synthetic Peanut, inner sequence
acgtgggcggagacgaagcactgcagcacg

SEQ ID NO: 926 - DNA, 30 bp, Artificial Sequence
  Description of Artificial Sequence: Synthetic Peanut, inner sequence
cgaaccagactgggcaggcacaaaggcacg

SEQ ID NO: 927 - DNA, 30 bp, Artificial Sequence
  Description of Artificial Sequence: Synthetic Peanut, inner sequence
catggccgcgtgaacgtgcactaatgcgca

SEQ ID NO: 928 - DNA, 30 bp, Artificial Sequence
  Description of Artificial Sequence: Synthetic Peanut, inner sequence
catgatgtcacgaactgagctcacgtggcc

SEQ ID NO: 929 - DNA, 30 bp, Artificial Sequence
  Description of Artificial Sequence: Synthetic Peanut, inner sequence
ggcacaaacagcagaaggacgcgatgcacg

SEQ ID NO: 930 - DNA, 30 bp, Artificial Sequence
  Description of Artificial Sequence: Synthetic Peanut, inner sequence
cgcacctgtcaaggcggaatggcacgtggc

SEQ ID NO: 931 - DNA, 30 bp, Artificial Sequence
  Description of Artificial Sequence: Synthetic Peanut, inner sequence
cgcacccaactggtcgtgaccctcggcaca

SEQ ID NO: 932 - DNA, 30 bp, Artificial Sequence
  Description of Artificial Sequence: Synthetic Peanut, inner sequence
gcacggatcgaaaccgtaccgagtggcgca

SEQ ID NO: 933 - DNA, 30 bp, Artificial Sequence
  Description of Artificial Sequence: Synthetic Peanut, inner sequence
gcatgcacgtcacatcacaacgactgcacg

SEQ ID NO: 934 - DNA, 30 bp, Artificial Sequence
  Description of Artificial Sequence: Synthetic Peanut, inner sequence
catgcgggacggatgtagtatggctgcacg

SEQ ID NO: 935 - DNA, 30 bp, Artificial Sequence
  Description of Artificial Sequence: Synthetic Peanut, inner sequence
ggccaacgctggacaggctgtgactacgca

SEQ ID NO: 936 - DNA, 30 bp, Artificial Sequence
  Description of Artificial Sequence: Synthetic Peanut, inner sequence
catgcgcagggaagatggtgcgttgacgca

SEQ ID NO: 937 - DNA, 30 bp, Artificial Sequence
  Description of Artificial Sequence: Synthetic Peanut, inner sequence
gaccgcagcgacgtatcatgtggtggtgta

SEQ ID NO: 938 - DNA, 30 bp, Artificial Sequence
  Description of Artificial Sequence: Synthetic Peanut, inner sequence
cgcaagtgcacactgcagtatgtccgcaca

SEQ ID NO: 939 - DNA, 30 bp, Artificial Sequence
  Description of Artificial Sequence: Synthetic Peanut, inner sequence
cgatgccacgaataacgggccatgtgcgta

SEQ ID NO: 940 - DNA, 30 bp, Artificial Sequence
  Description of Artificial Sequence: Synthetic Peanut, inner sequence
cggaccgaagtggcacatgtctgttccacg

SEQ ID NO: 941 - DNA, 30 bp, Artificial Sequence
  Description of Artificial Sequence: Synthetic Peanut, inner sequence
catggcgacgacatgctgatcacctacgca

SEQ ID NO: 942 - DNA, 30 bp, Artificial Sequence
  Description of Artificial Sequence: Synthetic Peanut, inner sequence
cacggaccaggagacgagacacggtgcgcg

SEQ ID NO: 943 - DNA, 30 bp, Artificial Sequence
  Description of Artificial Sequence: Synthetic Peanut, inner sequence
acacgactcgcaccctatcatgaggccatg

SEQ ID NO: 944 - DNA, 30 bp, Artificial Sequence
  Description of Artificial Sequence: Synthetic Peanut, inner sequence
catgcacaggcaatggtatgctcctgcacc

SEQ ID NO: 945 - DNA, 30 bp, Artificial Sequence
  Description of Artificial Sequence: Synthetic Peanut, inner sequence
ccacacgtagccctatcagtggtgcatgca

SEQ ID NO: 946 - DNA, 30 bp, Artificial Sequence
  Description of Artificial Sequence: Synthetic Peanut, inner sequence
ctcatgctgtacgtctcgttccattgggca

SEQ ID NO: 947 - DNA, 30 bp, Artificial Sequence
  Description of Artificial Sequence: Synthetic Peanut, inner sequence
gcggggacacgcagcacaagtacgtgcaca

SEQ ID NO: 948 - DNA, 30 bp, Artificial Sequence
  Description of Artificial Sequence: Synthetic Peanut, inner sequence
cgatgtgcgtactcgtcccttcgagtggga

SEQ ID NO: 949 - DNA, 30 bp, Artificial Sequence
  Description of Artificial Sequence: Synthetic Peanut, inner sequence
cacatcgtacgccgatctggatgtggctca

SEQ ID NO: 950 - DNA, 30 bp, Artificial Sequence
  Description of Artificial Sequence: Synthetic Peanut, inner sequence
ggtctgcgcgtaccgtcaagtgcgaatgga

SEQ ID NO: 951 - DNA, 30 bp, Artificial Sequence
  Description of Artificial Sequence: Synthetic Peanut, inner sequence
ggccgatgaccgtcaagtgttgtgcgctgt

SEQ ID NO: 952 - DNA, 30 bp, Artificial Sequence
  Description of Artificial Sequence: Synthetic Peanut, inner sequence
catgcgccaagagcaacggtgtggatggca

SEQ ID NO: 953 - DNA, 30 bp, Artificial Sequence
  Description of Artificial Sequence: Synthetic Peanut, inner sequence
cggtccggaacgtaacgtgcacacggggca

SEQ ID NO: 954 - DNA, 30 bp, Artificial Sequence
  Description of Artificial Sequence: Synthetic Peanut, inner sequence
cgcacatgccgtatatgaccgcgctgcatc

SEQ ID NO: 955 - DNA, 30 bp, Artificial Sequence
  Description of Artificial Sequence: Synthetic Peanut, inner sequence
gtcattacgcatcctacacgtgggcacgta

SEQ ID NO: 956 - DNA, 30 bp, Artificial Sequence
  Description of Artificial Sequence: Synthetic Peanut, inner sequence
cacgtgcagcatgcctgagctgacctggcc

SEQ ID NO: 957 - DNA, 30 bp, Artificial Sequence
  Description of Artificial Sequence: Synthetic Peanut, inner sequence
cggatggaccaacaacggactgcgtggaca

SEQ ID NO: 958 - DNA, 30 bp, Artificial Sequence
  Description of Artificial Sequence: Synthetic Peanut, inner sequence
cacgcacgcaaggacgaactggtatgcgta

SEQ ID NO: 959 - DNA, 30 bp, Artificial Sequence
  Description of Artificial Sequence: Synthetic Peanut, inner sequence
gctgcacagcaaggtacgtcattccgcaca

SEQ ID NO: 960 - DNA, 30 bp, Artificial Sequence
  Description of Artificial Sequence: Synthetic Peanut, inner sequence
cgtacgcagtgggccttacgtctcggcacg

SEQ ID NO: 961 - DNA, 30 bp, Artificial Sequence
  Description of Artificial Sequence: Synthetic Peanut, inner sequence
ccgtggcaatgacggtgtcacgtacgcggt

SEQ ID NO: 962 - DNA, 30 bp, Artificial Sequence
  Description of Artificial Sequence: Synthetic Peanut, inner sequence
ggcatgcacgcacctacacgtgggtatggt

SEQ ID NO: 963 - DNA, 30 bp, Artificial Sequence
  Description of Artificial Sequence: Synthetic Peanut, inner sequence
tcaccgcaacgtaagtgtgtgccgtacgca

SEQ ID NO: 964 - DNA, 30 bp, Artificial Sequence
  Description of Artificial Sequence: Synthetic Peanut, inner sequence
ccaaccaggccatgatgcgtgtcatgcatg

SEQ ID NO: 965 - DNA, 30 bp, Artificial Sequence
  Description of Artificial Sequence: Synthetic Peanut, inner sequence
cgcaccgtagatacgtaatgcacgctgaca

SEQ ID NO: 966 - DNA, 30 bp, Artificial Sequence
  Description of Artificial Sequence: Synthetic Peanut, inner sequence
gcgatgacagacgcagctttggtatgcacg

SEQ ID NO: 967 - DNA, 30 bp, Artificial Sequence
  Description of Artificial Sequence: Synthetic Peanut, inner sequence
cgaacgcagtgaagtgacatccagtgcaca

SEQ ID NO: 968 - DNA, 30 bp, Artificial Sequence
  Description of Artificial Sequence: Synthetic Peanut, inner sequence
ggcctgatcgaacctagagagtggcgtggg

SEQ ID NO: 969 - DNA, 30 bp, Artificial Sequence
  Description of Artificial Sequence: Synthetic Peanut, inner sequence
acgtgcaggtgcaacatgtccaacggcaca

SEQ ID NO: 970 - DNA, 30 bp, Artificial Sequence
  Description of Artificial Sequence: Synthetic peanut, inner  sequence
ccacaacgcacacgtagtctggtatgcatg

SEQ ID NO: 971 - DNA, 31 bp, Artificial Sequence
  Description of Artificial Sequence: Synthetic peanut, inner  sequence
cgacactgtgcctgaccgtcaagttgcggca

SEQ ID NO: 972 - DNA, 30 bp, Artificial Sequence
  Description of Artificial Sequence: Synthetic peanut, inner  sequence
ccgatctggcgtagctggaacatgtgcgta

SEQ ID NO: 973 - DNA, 30 bp, Artificial Sequence
  Description of Artificial Sequence: Synthetic peanut, inner  sequence
cgtgccgtaacagcaacgtacgtggccaca

SEQ ID NO: 974 - DNA, 30 bp, Artificial Sequence
  Description of Artificial Sequence: Synthetic peanut, inner  sequence
cggacaacgtcacgcaagggtcacggcatg

SEQ ID NO: 975 - DNA, 29 bp, Artificial Sequence
  Description of Artificial Sequence: Synthetic peanut, inner  sequence
gtcatgccatcccttcgagtgtgacggta

SEQ ID NO: 976 - DNA, 30 bp, Artificial Sequence
  Description of Artificial Sequence: Synthetic peanut, inner  sequence
cgtgacgtggcagacacgtacaattgcgcg

SEQ ID NO: 977 - DNA, 30 bp, Artificial Sequence
  Description of Artificial Sequence: Synthetic peanut, inner  sequence
gtcacggctcggatgtgtgcatcgtacgta

SEQ ID NO: 978 - DNA, 30 bp, Artificial Sequence
  Description of Artificial Sequence: Synthetic peanut, inner  sequence
cacagcatgacacaggtacgacgatgcgtg

SEQ ID NO: 979 - DNA, 30 bp, Artificial Sequence
  Description of Artificial Sequence: Synthetic peanut, inner  sequence
ggcctgcacgcacctacacgtgggtatgga

SEQ ID NO: 980 - DNA, 30 bp, Artificial Sequence
  Description of Artificial Sequence: Synthetic peanut, inner  sequence
gcgcaatgcgatacgtcgtggccatgcaca

SEQ ID NO: 981 - DNA, 30 bp, Artificial Sequence
  Description of Artificial Sequence: Synthetic peanut, inner  sequence
cgcagcacagacatggacggtacacgcgcg

SEQ ID NO: 982 - DNA, 30 bp, Artificial Sequence
  Description of Artificial Sequence: Synthetic peanut, inner  sequence
catgcacggttcgccgggatacgttgcgca

SEQ ID NO: 983 - DNA, 30 bp, Artificial Sequence
  Description of Artificial Sequence: Synthetic peanut, inner  sequence
cgagtgcagcgaggtcctgggcagtgcgtg

SEQ ID NO: 984 - DNA, 30 bp, Artificial Sequence
  Description of Artificial Sequence: Synthetic peanut, inner  sequence
acactgctcgaccgaacgtgagacgtgtgc

SEQ ID NO: 985 - DNA, 30 bp, Artificial Sequence
  Description of Artificial Sequence: Synthetic peanut, inner  sequence
gtactgcactgccctacacgtgggcacgta

SEQ ID NO: 986 - DNA, 30 bp, Artificial Sequence
  Description of Artificial Sequence: Synthetic peanut, inner  sequence
cgcatgcagagggcattctccacctccgcg

SEQ ID NO: 987 - DNA, 30 bp, Artificial Sequence
  Description of Artificial Sequence: Synthetic peanut, inner  sequence
catgccgagtgacgaagcagttgcgcctcg

SEQ ID NO: 988 - DNA, 30 bp, Artificial Sequence
  Description of Artificial Sequence: Synthetic peanut, inner  sequence
gtcgtgcatggcttagctggtcgtcttggc

SEQ ID NO: 989 - DNA, 30 bp, Artificial Sequence
  Description of Artificial Sequence: Synthetic peanut, inner  sequence
tgcgcagcgcgatgtcgtacctcttgcgtg

SEQ ID NO: 990 - DNA, 30 bp, Artificial Sequence
  Description of Artificial Sequence: Synthetic peanut, inner  sequence
gcatgcagccatgagtgcacatcgtcctgc

SEQ ID NO: 991 - DNA, 30 bp, Artificial Sequence
  Description of Artificial Sequence: Synthetic peanut, inner  sequence
gtcattccgcatcctacacgcgggcacgta

SEQ ID NO: 992 - DNA, 30 bp, Artificial Sequence
  Description of Artificial Sequence: Synthetic peanut, inner  sequence
gcgacagcgacatacgatatgctctgcgtc

SEQ ID NO: 993 - DNA, 30 bp, Artificial Sequence
  Description of Artificial Sequence: Synthetic peanut, inner  sequence
cacgcacgtcaataacacggtcaccgcgca

SEQ ID NO: 994 - DNA, 30 bp, Artificial Sequence
  Description of Artificial Sequence: Synthetic peanut, inner  sequence
ggcacagagcgaccatcaagtgcgtgtgta

SEQ ID NO: 995 - DNA, 30 bp, Artificial Sequence
  Description of Artificial Sequence: Synthetic peanut, inner  sequence
cacacacatcgaccctgagcccactgcgtg

SEQ ID NO: 996 - DNA, 30 bp, Artificial Sequence
  Description of Artificial Sequence: Synthetic peanut, inner  sequence
cgcaccgagagtcacgcacgccacggctgt

SEQ ID NO: 997 - DNA, 30 bp, Artificial Sequence
  Description of Artificial Sequence: Synthetic peanut, inner  sequence
cgcgtgcaaggagcgtgatcggttggcaca

SEQ ID NO: 998 - DNA, 30 bp, Artificial Sequence
  Description of Artificial Sequence: Synthetic peanut, inner  sequence
ccgcacgtagtcctatcagtggtgcatgca

SEQ ID NO: 999 - DNA, 30 bp, Artificial Sequence
  Description of Artificial Sequence: Synthetic peanut, inner  sequence
tgagcgcacaaacgatcggcatgatacgca

SEQ ID NO: 1000 - DNA, 30 bp, Artificial Sequence
  Description of Artificial Sequence: Synthetic peanut, inner  sequence
cggtgacggtaagcatcgtgcaccttgcca

SEQ ID NO: 1001 - DNA, 30 bp, Artificial Sequence
  Description of Artificial Sequence: Synthetic peanut, inner  sequence
tcgacccacgcgaaacggcaatgcgtcacg

SEQ ID NO: 1002 - DNA, 30 bp, Artificial Sequence
  Description of Artificial Sequence: Synthetic peanut, inner  sequence
gcataggcagaccttccgtacacgtgcgtc

SEQ ID NO: 1003 - DNA, 53 bp, Artificial Sequence
  Description of Artificial Sequence: Synthetic peanut, 5' sequence and inner sequence
tagggaagagaaggacatatgatcgcaccgtcgatacgtcatgcacgctgaca

SEQ ID NO: 1004 - DNA, 53 bp, Artificial Sequence
  Description of Artificial Sequence: Synthetic peanut, 5' sequence and inner sequence
tagggaagagaaggacatatgatccgtagcgacatcaagcggtggtgtgcgtg

SEQ ID NO: 1005 - DNA, 53 bp, Artificial Sequence
  Description of Artificial Sequence: Synthetic peanut, 5' sequence and inner sequence
tagggaagagaaggacatatgatgtcatgcacgaacactatcatggcggcatg

SEQ ID NO: 1006 - DNA, 53 bp, Artificial Sequence
  Description of Artificial Sequence: Synthetic peanut, 5' sequence and inner sequence
tagggaagagaaggacatatgatgtcattccgcatcctacacgtgggcacgta

SEQ ID NO: 1007 - DNA, 53 bp, Artificial Sequence
  Description of Artificial Sequence: Synthetic peanut, 5' sequence and inner sequence
tagggaagagaaggacatatgatccgcacgtagccctatcagtggtgcatgca

SEQ ID NO: 1008 - DNA, 53 bp, Artificial Sequence
  Description of Artificial Sequence: Synthetic peanut, 5' sequence and inner sequence
tagggaagagaaggacatatgatgcacgactcgcaccctatcatgaggccatg

SEQ ID NO: 1009 - DNA, 53 bp, Artificial Sequence
  Description of Artificial Sequence: Synthetic peanut, 5' sequence and inner sequence
tagggaagagaaggacatatgatgtcatgccatcccttcgagtgtgacaggta

SEQ ID NO: 1010 - DNA, 53 bp, Artificial Sequence
  Description of Artificial Sequence: Synthetic peanut, 5' sequence and inner sequence
tagggaagagaaggacatatgatggcatgcgatgaacgaggcatgatgcgtca

SEQ ID NO: 1011 - DNA, 53 bp, Artificial Sequence
  Description of Artificial Sequence: Synthetic peanut, 5' sequence and inner sequence
tagggaagagaaggacatatgatccatcgcgtcactatcatgtgtgtcacgta

SEQ ID NO: 1012 - DNA, 53 bp, Artificial Sequence
  Description of Artificial Sequence: Synthetic peanut, 5' sequence and inner sequence
tagggaagagaaggacatatgatggcatgcacgcacctacacgtgggtatgga

SEQ ID NO: 1013 - DNA, 53 bp, Artificial Sequence
  Description of Artificial Sequence: Synthetic peanut, 5' sequence and inner sequence
tagggaagagaaggacatatgatcgcaccgtcaagcgggaaggcactttggtg

SEQ ID NO: 1014 - DNA, 53 bp, Artificial Sequence
  Description of Artificial Sequence: Synthetic peanut, 5' sequence and inner sequence
tagggaagagaaggacatatgatggacgcagcttgcctactggtggtcacgta

SEQ ID NO: 1015 - DNA, 53 bp, Artificial Sequence
  Description of Artificial Sequence: Synthetic peanut, 5' sequence and inner sequence
tagggaagagaaggacatatgatgtcgtgactggctagctggacatgcactgc

SEQ ID NO: 1016 - DNA, 53 bp, Artificial Sequence
  Description of Artificial Sequence: Synthetic peanut, 5' sequence and inner sequence
tagggaagagaaggacatatgatgcgacagcgacatacgatctgctctgcgtc

SEQ ID NO: 1017 - DNA, 53 bp, Artificial Sequence
  Description of Artificial Sequence: Synthetic peanut, 5' sequence and inner sequence
tagggaagagaaggacatatgattggccgatcgaccctatcaagtgcagcatg

SEQ ID NO: 1018 - DNA, 53 bp, Artificial Sequence
  Description of Artificial Sequence: Synthetic peanut, 5' sequence and inner sequence
tagggaagagaaggacatatgatcgcaccgagagtgatcgtggttcgcagtca

SEQ ID NO: 1019 - DNA, 53 bp, Artificial Sequence
  Description of Artificial Sequence: Synthetic peanut, 5' sequence and inner sequence
tagggaagagaaggacatatgatggacggatcgaacctacaagttgtcgtgga

SEQ ID NO: 1020 - DNA, 53 bp, Artificial Sequence
  Description of Artificial Sequence: Synthetic peanut, 5' sequence and inner sequence
tagggaagagaaggacatatgatggccacagcgtacctcaacgtggacgtgca

SEQ ID NO: 1021 - DNA, 53 bp, Artificial Sequence
  Description of Artificial Sequence: Synthetic peanut, 5' sequence and inner sequence
tagggaagagaaggacatatgatgtcactgtgcctgaccgtcaagttgcggca

SEQ ID NO: 1022 - DNA, 53 bp, Artificial Sequence
  Description of Artificial Sequence: Synthetic peanut, 5' sequence and inner sequence
tagggaagagaaggacatatgatgcactgagcgtacgtatcagcgggcacgta

SEQ ID NO: 1023 - DNA, 53 bp, Artificial Sequence
  Description of Artificial Sequence: Synthetic peanut, 5' sequence and inner sequence
tagggaagagaaggacatatgatggcacaaacggaccgacaagtgcgcatgga

SEQ ID NO: 1024 - DNA, 53 bp, Artificial Sequence
  Description of Artificial Sequence: Synthetic peanut, 5' sequence and inner sequence
tagggaagagaaggacatatgatggcctgatcgaacctagagagtggcgtgga

SEQ ID NO: 1025 - DNA, 53 bp, Artificial Sequence
  Description of Artificial Sequence: Synthetic peanut, 5' sequence and inner sequence
tagggaagagaaggacatatgatgcgtgtcagcaatacgtcctcatctgcccg

SEQ ID NO: 1026 - DNA, 53 bp, Artificial Sequence
  Description of Artificial Sequence: Synthetic peanut, 5' sequence and inner sequence
tagggaagagaaggacatatgatggcctgcgatggatgtgggttgtgctcgtc

SEQ ID NO: 1027 - DNA, 53 bp, Artificial Sequence
  Description of Artificial Sequence: Synthetic peanut, 5' sequence and inner sequence
tagggaagagaaggacatatgatggcctgcgatggatgtgtgcgtgtattagc

SEQ ID NO: 1028 - DNA, 53 bp, Artificial Sequence
  Description of Artificial Sequence: Synthetic peanut, 5' sequence and inner sequence
tagggaagagaaggacatatgatgtacgcatcgtcccgtcatgtggttccgta

SEQ ID NO: 1029 - DNA, 53 bp, Artificial Sequence
  Description of Artificial Sequence: Synthetic peanut, 5' sequence and inner sequence
tagggaagagaaggacatatgatggacgcatcgccccttcgagtggacaggta

SEQ ID NO: 1030 - DNA, 53 bp, Artificial Sequence
  Description of Artificial Sequence: Synthetic peanut, 5' sequence and inner sequence
tagggaagagaaggacatatgatggcatgcacgcacctacacgtgggcacgta

SEQ ID NO: 1031 - DNA, 53 bp, Artificial Sequence
  Description of Artificial Sequence: Synthetic peanut, 5' sequence and inner sequence
tagggaagagaaggacatatgatgtgctgaacgtaccgattcaagtgtgcgtg

SEQ ID NO: 1032 - DNA, 53 bp, Artificial Sequence
  Description of Artificial Sequence: Synthetic peanut, 5' sequence and inner sequence
tagggaagagaaggacatatgatgtcacggaacgaagcctatcaagtgcgaca

SEQ ID NO: 1033 - DNA, 53 bp, Artificial Sequence
  Description of Artificial Sequence: Synthetic peanut, 5' sequence and inner sequence
tagggaagagaaggacatatgatgcactgcacgcaccctatcatgtaggcatg

SEQ ID NO: 1034 - DNA, 53 bp, Artificial Sequence
  Description of Artificial Sequence: Synthetic peanut, 5' sequence and inner sequence
tagggaagagaaggacatatgatgtcatgcgcggacattcaagttggcgtgga

SEQ ID NO: 1035 - DNA, 53 bp, Artificial Sequence
  Description of Artificial Sequence: Synthetic peanut, 5' sequence and inner sequence
tagggaagagaaggacatatgatccgtagcgacatcaagcggtggtgtgcgta

SEQ ID NO: 1036 - DNA, 53 bp, Artificial Sequence
  Description of Artificial Sequence: Synthetic peanut, 5' sequence and inner sequence
tagggaagagaaggacatatgatcgcatcgtacgtactcctcgtcactgcgtg

SEQ ID NO: 1037 - DNA, 53 bp, Artificial Sequence
  Description of Artificial Sequence: Synthetic peanut, 5' sequence and inner sequence
tagggaagagaaggacatatgatggccaagctgaccgtaaaggcaggcgtgta

SEQ ID NO: 1038 - DNA, 53 bp, Artificial Sequence
  Description of Artificial Sequence: Synthetic peanut, 5' sequence and inner sequence
tagggaagagaaggacatatgatggcacggaggatggacgttctgccttggtc

SEQ ID NO: 1039 - DNA, 53 bp, Artificial Sequence
  Description of Artificial Sequence: Synthetic peanut, 5' sequence and inner sequence
tagggaagagaaggacatatgatggcatgcgctgggtagtgatcacgtacggt

SEQ ID NO: 1040 - DNA, 53 bp, Artificial Sequence
  Description of Artificial Sequence: Synthetic peanut, 5' sequence and inner sequence
tagggaagagaaggacatatgatcgtaccgcaagtgacgtgtccgtgccgtga

SEQ ID NO: 1041 - DNA, 53 bp, Artificial Sequence
  Description of Artificial Sequence: Synthetic peanut, 5' sequence and inner sequence
tagggaagagaaggacatatgatccgatcgcacgtcaaggcaggctgtacgag

SEQ ID NO: 1042 - DNA, 53 bp, Artificial Sequence
  Description of Artificial Sequence: Synthetic peanut, 5' sequence and inner sequence
tagggaagagaaggacatatgatgacctgactgtgcctatcgagtgcgtgatg

SEQ ID NO: 1043 - DNA, 53 bp, Artificial Sequence
  Description of Artificial Sequence: Synthetic peanut, 5' sequence and inner sequence
tagggaagagaaggacatatgatgacggtgcgtcctaaagtgctcagtgcgtg

SEQ ID NO: 1044 - DNA, 53 bp, Artificial Sequence
  Description of Artificial Sequence: Synthetic peanut, 5' sequence and inner sequence
tagggaagagaaggacatatgatggacggaacgtgagggcaagtacgtgctcg

SEQ ID NO: 1045 - DNA, 53 bp, Artificial Sequence
  Description of Artificial Sequence: Synthetic peanut, 5' sequence and inner sequence
tagggaagagaaggacatatgatgcactggctgacctacacgtggacgatgtg

SEQ ID NO: 1046 - DNA, 53 bp, Artificial Sequence
  Description of Artificial Sequence: Synthetic peanut, 5' sequence and inner sequence
tagggaagagaaggacatatgatggacgcagcggaacgttcgagtggtacgta

SEQ ID NO: 1047 - DNA, 53 bp, Artificial Sequence
  Description of Artificial Sequence: Synthetic peanut, 5' sequence and inner sequence
tagggaagagaaggacatatgatgtactgcactgccctacacgtgggaatgga

SEQ ID NO: 1048 - DNA, 53 bp, Artificial Sequence
  Description of Artificial Sequence: Synthetic peanut, 5' sequence and inner sequence
tagggaagagaaggacatatgatggccaatgcgccccttcatgttgtcgtgta

SEQ ID NO: 1049 - DNA, 53 bp, Artificial Sequence
  Description of Artificial Sequence: Synthetic peanut, 5' sequence and inner sequence
tagggaagagaaggacatatgatcgtaccgacaagggagcacgtacgcggtca

SEQ ID NO: 1050 - DNA, 53 bp, Artificial Sequence
  Description of Artificial Sequence: Synthetic peanut, 5' sequence and inner sequence
tagggaagagaaggacatatgatgcattgggcgaacgaccatcagtgtgcatg

SEQ ID NO: 1051 - DNA, 53 bp, Artificial Sequence
  Description of Artificial Sequence: Synthetic peanut, 5' sequence and inner sequence
tagggaagagaaggacatatgatcgcatgggacgtactgaccggatcgtgtca

SEQ ID NO: 1052 - DNA, 53 bp, Artificial Sequence
  Description of Artificial Sequence: Synthetic peanut, 5' sequence and inner sequence
tagggaagagaaggacatatgatggacgcaacgtaccgtatcgtggccatgtg

SEQ ID NO: 1053 - DNA, 53 bp, Artificial Sequence
  Description of Artificial Sequence: Synthetic peanut, 5' sequence and inner sequence
tagggaagagaaggacatatgatgcacgtacgccttgcctatctgtgctcatg

SEQ ID NO: 1054 - DNA, 53 bp, Artificial Sequence
  Description of Artificial Sequence: Synthetic peanut, 5' sequence and inner sequence
tagggaagagaaggacatatgatgcattggacgatcgtgccctacacgtgggc

SEQ ID NO: 1055 - DNA, 53 bp, Artificial Sequence
  Description of Artificial Sequence: Synthetic peanut, 5' sequence and inner sequence
tagggaagagaaggacatatgatggacgcacgcagaccttcaagtcggccatg

SEQ ID NO: 1056 - DNA, 53 bp, Artificial Sequence
  Description of Artificial Sequence: Synthetic peanut, 5' sequence and inner sequence
tagggaagagaaggacatatgatcacgtgcggaggacaacgccctactgcgtg

SEQ ID NO: 1057 - DNA, 53 bp, Artificial Sequence
  Description of Artificial Sequence: Synthetic peanut, 5' sequence and inner sequence
tagggaagagaaggacatatgattggccaacgctacctatggacgtgtgcgtg

SEQ ID NO: 1058 - DNA, 53 bp, Artificial Sequence
  Description of Artificial Sequence: Synthetic peanut, 5' sequence and inner sequence
tagggaagagaaggacatatgatgtacggaacggaacaacaagggcaggcatg

SEQ ID NO: 1059 - DNA, 53 bp, Artificial Sequence
  Description of Artificial Sequence: Synthetic peanut, 5' sequence and inner sequence
tagggaagagaaggacatatgatgacgacacgaccttcaagcatggcctagcg

SEQ ID NO: 1060 - DNA, 53 bp, Artificial Sequence
  Description of Artificial Sequence: Synthetic peanut, 5' sequence and inner sequence
tagggaagagaaggacatatgatcgcgacgagtaggcatgtcttctgtgtgca

SEQ ID NO: 1061 - DNA, 53 bp, Artificial Sequence
  Description of Artificial Sequence: Synthetic peanut, 5' sequence and inner sequence
tagggaagagaaggacatatgatgccgacgatgacctggacgtgtggttgtcc

SEQ ID NO: 1062 - DNA, 53 bp, Artificial Sequence
  Description of Artificial Sequence: Synthetic peanut, 5' sequence and inner sequence
tagggaagagaaggacatatgatgccatcgtacgatcgtacccggcatgcacg

SEQ ID NO: 1063 - DNA, 53 bp, Artificial Sequence
  Description of Artificial Sequence: Synthetic peanut, 5' sequence and inner sequence
tagggaagagaaggacatatgattggacaacgatgccctgtcgtgtgcgcggt

SEQ ID NO: 1064 - DNA, 53 bp, Artificial Sequence
  Description of Artificial Sequence: Synthetic peanut, 5' sequence and inner sequence
tagggaagagaaggacatatgatcgcaacggtgacgagcagtgagtgcatgta

SEQ ID NO: 1065 - DNA, 53 bp, Artificial Sequence
  Description of Artificial Sequence: Synthetic peanut, 5' sequence and inner sequence
tagggaagagaaggacatatgatcacacgtatggtcggcgatggactgtggca

SEQ ID NO: 1066 - DNA, 53 bp, Artificial Sequence
  Description of Artificial Sequence: Synthetic peanut, 5' sequence and inner sequence
tagggaagagaaggacatatgatggactgaacgtactgccaggtgagcatgca

SEQ ID NO: 1067 - DNA, 53 bp, Artificial Sequence
  Description of Artificial Sequence: Synthetic peanut, 5' sequence and inner sequence
tagggaagagaaggacatatgatcgatggtacgaacgccacgtcatgcggtca

SEQ ID NO: 1068 - DNA, 53 bp, Artificial Sequence
  Description of Artificial Sequence: Synthetic peanut, 5' sequence and inner sequence
tagggaagagaaggacatatgatcgcaacgtcagtgtgcatggatgcgtcctg

SEQ ID NO: 1069 - DNA, 53 bp, Artificial Sequence
  Description of Artificial Sequence: Synthetic peanut, 5' sequence and inner sequence
tagggaagagaaggacatatgatcacgtggcagtgggaagtgtgcactacgca

SEQ ID NO: 1070 - DNA, 52 bp, Artificial Sequence
  Description of Artificial Sequence: Synthetic peanut, 5' sequence and inner sequence
tagggaagagaaggacatatgatgcacgccgatgccctcatgtggccgtgga

SEQ ID NO: 1071 - DNA, 53 bp, Artificial Sequence
  Description of Artificial Sequence: Synthetic peanut, 5' sequence and inner sequence
tagggaagagaaggacatatgatccgtagcgacatcaagcggtgttgtgcgtg

SEQ ID NO: 1072 - DNA, 53 bp, Artificial Sequence
  Description of Artificial Sequence: Synthetic peanut, 5' sequence and inner sequence
tagggaagagaaggacatatgatcatgcaatacgtcagcgtaccgtgtgcaca

SEQ ID NO: 1073 - DNA, 53 bp, Artificial Sequence
  Description of Artificial Sequence: Synthetic peanut, 5' sequence and inner sequence
tagggaagagaaggacatatgatcgcaccggacgtgacgacgtagtgtggcca

SEQ ID NO: 1074 - DNA, 53 bp, Artificial Sequence
  Description of Artificial Sequence: Synthetic peanut, 5' sequence and inner sequence
tagggaagagaaggacatatgatgtacgcacgatgagcgccaagtgacatgga

SEQ ID NO: 1075 - DNA, 53 bp, Artificial Sequence
  Description of Artificial Sequence: Synthetic peanut, 5' sequence and inner sequence
tagggaagagaaggacatatgatcgatgtgcagagtggtggacaagctgcgca

SEQ ID NO: 1076 - DNA, 53 bp, Artificial Sequence
  Description of Artificial Sequence: Synthetic peanut, 5' sequence and inner sequence
tagggaagagaaggacatatgatcatgtgtcgactcgccctatcatgcggtca

SEQ ID NO: 1077 - DNA, 53 bp, Artificial Sequence
  Description of Artificial Sequence: Synthetic peanut, 5' sequence and inner sequence
tagggaagagaaggacatatgatgtgcgagcagaccgacgcgagtggtacgtg

SEQ ID NO: 1078 - DNA, 53 bp, Artificial Sequence
  Description of Artificial Sequence: Synthetic peanut, 5' sequence and inner sequence
tagggaagagaaggacatatgatggcatgcacgaacactatcatggcggcatg

SEQ ID NO: 1079 - DNA, 53 bp, Artificial Sequence
  Description of Artificial Sequence: Synthetic peanut, 5' sequence and inner sequence
tagggaagagaaggacatatgatggcatgatcgaccgcatagtcacgtacgca

SEQ ID NO: 1080 - DNA, 53 bp, Artificial Sequence
  Description of Artificial Sequence: Synthetic peanut, 5' sequence and inner sequence
tagggaagagaaggacatatgatgcacgcaacgaacctacgagtgatcgtgta

SEQ ID NO: 1081 - DNA, 53 bp, Artificial Sequence
  Description of Artificial Sequence: Synthetic peanut, 5' sequence and inner sequence
tagggaagagaaggacatatgatggacgcaacgtaccgtatcgtggccatgta

SEQ ID NO: 1082 - DNA, 53 bp, Artificial Sequence
  Description of Artificial Sequence: Synthetic peanut, 5' sequence and inner sequence
tagggaagagaaggacatatgatccgcatcggaccgatcaaggcaggcttgga

SEQ ID NO: 1083 - DNA, 53 bp, Artificial Sequence
  Description of Artificial Sequence: Synthetic peanut, 5' sequence and inner sequence
tagggaagagaaggacatatgatcggaccggtgacgagtgctagtacggcatg

SEQ ID NO: 1084 - DNA, 53 bp, Artificial Sequence
  Description of Artificial Sequence: Synthetic peanut, 5' sequence and inner sequence
tagggaagagaaggacatatgatcgtgcgcgagacatggtccatcggttcgtg

SEQ ID NO: 1085 - DNA, 53 bp, Artificial Sequence
  Description of Artificial Sequence: Synthetic peanut, 5' sequence and inner sequence
tagggaagagaaggacatatgatggcatgcgatggatgtgggttgtgctcgtc

SEQ ID NO: 1086 - DNA, 53 bp, Artificial Sequence
  Description of Artificial Sequence: Synthetic peanut, 5' sequence and inner sequence
tagggaagagaaggacatatgatcacgacagcgttagcaggccatgcgacacg

SEQ ID NO: 1087 - DNA, 53 bp, Artificial Sequence
  Description of Artificial Sequence: Synthetic peanut, 5' sequence and inner sequence
tagggaagagaaggacatatgatcacgcaaggacagcacacctgactggcgtg

SEQ ID NO: 1088 - DNA, 53 bp, Artificial Sequence
  Description of Artificial Sequence: Synthetic peanut, 5' sequence and inner sequence
tagggaagagaaggacatatgatacgtgtggcatgcgactgtccgtgttcatg

SEQ ID NO: 1089 - DNA, 53 bp, Artificial Sequence
  Description of Artificial Sequence: Synthetic peanut, 5' sequence and inner sequence
tagggaagagaaggacatatgatggccatgtcgacctatggtgatgtgcgacg

SEQ ID NO: 1090 - DNA, 53 bp, Artificial Sequence
  Description of Artificial Sequence: Synthetic peanut, 5' sequence and inner sequence
tagggaagagaaggacatatgatacgtgacggatcgatggacctcagtgcgtg

SEQ ID NO: 1091 - DNA, 53 bp, Artificial Sequence
  Description of Artificial Sequence: Synthetic peanut, 5' sequence and inner sequence
tagggaagagaaggacatatgatcgcaaccggcacgtgagcactgtacgatcg

SEQ ID NO: 1092 - DNA, 53 bp, Artificial Sequence
  Description of Artificial Sequence: Synthetic peanut, 5' sequence and inner sequence
tagggaagagaaggacatatgatgacgcacgacgaccggtcaagttcggcatg

SEQ ID NO: 1093 - DNA, 53 bp, Artificial Sequence
  Description of Artificial Sequence: Synthetic peanut, 5' sequence and inner sequence
tagggaagagaaggacatatgatgtacgcgacgtccctgagagtgtgcaggta

SEQ ID NO: 1094 - DNA, 53 bp, Artificial Sequence
  Description of Artificial Sequence: Synthetic peanut, 5' sequence and inner sequence
tagggaagagaaggacatatgatggactgcgcgtgacctatcaatggcatgta

SEQ ID NO: 1095 - DNA, 53 bp, Artificial Sequence
  Description of Artificial Sequence: Synthetic peanut, 5' sequence and inner sequence
tagggaagagaaggacatatgatggcagtgtcgtgcccgtcaatgtgtgcatg

SEQ ID NO: 1096 - DNA, 53 bp, Artificial Sequence
  Description of Artificial Sequence: Synthetic peanut, 5' sequence and inner sequence
tagggaagagaaggacatatgatcgcacgatcgtcctgccctcacgtggcgca

SEQ ID NO: 1097 - DNA, 53 bp, Artificial Sequence
  Description of Artificial Sequence: Synthetic peanut, 5' sequence and inner sequence
tagggaagagaaggacatatgatggacgagcggaaggtgaggcatggtgcgta

SEQ ID NO: 1098 - DNA, 53 bp, Artificial Sequence
  Description of Artificial Sequence: Synthetic peanut, 5' sequence and inner sequence
tagggaagagaaggacatatgatcgaccgtgacgcaggataacgtactgcgca

SEQ ID NO: 1099 - DNA, 53 bp, Artificial Sequence
  Description of Artificial Sequence: Synthetic peanut, 5' sequence and inner sequence
tagggaagagaaggacatatgattcgatcgatccgtcaagcaggcacgtgtca

SEQ ID NO: 1100 - DNA, 53 bp, Artificial Sequence
  Description of Artificial Sequence: Synthetic peanut, 5' sequence and inner sequence
tagggaagagaaggacatatgatgtacgcgctggtcccgtatcatgtgcgtca

SEQ ID NO: 1101 - DNA, 53 bp, Artificial Sequence
  Description of Artificial Sequence: Synthetic peanut, 5' sequence and inner sequence
tagggaagagaaggacatatgatcgcaccacacgcacgttatgcacctgcgct

SEQ ID NO: 1102 - DNA, 53 bp, Artificial Sequence
  Description of Artificial Sequence: Synthetic peanut, 5' sequence and inner sequence
tagggaagagaaggacatatgatggcatgcgaatggatgtgacgatgtgcgtg

SEQ ID NO: 1103 - DNA, 53 bp, Artificial Sequence
  Description of Artificial Sequence: Synthetic peanut, 5' sequence and inner sequence
tagggaagagaaggacatatgatcgaaccgcatgtaaggtcacgcacgtcgta

SEQ ID NO: 1104 - DNA, 53 bp, Artificial Sequence
  Description of Artificial Sequence: Synthetic peanut, 5' sequence and inner sequence
tagggaagagaaggacatatgatcgcaccgtagatacgtcatgcacgctgaca

SEQ ID NO: 1105 - DNA, 53 bp, Artificial Sequence
  Description of Artificial Sequence: Synthetic peanut, 5' sequence and inner sequence
tagggaagagaaggacatatgatcgtaccgaacgcggtcttgtgcactacgtg

SEQ ID NO: 1106 - DNA, 53 bp, Artificial Sequence
  Description of Artificial Sequence: Synthetic peanut, 5' sequence and inner sequence
tagggaagagaaggacatatgatgtactgcactgccctacacgtgggtatgga

SEQ ID NO: 1107 - DNA, 53 bp, Artificial Sequence
  Description of Artificial Sequence: Synthetic peanut, 5' sequence and inner sequence
tagggaagagaaggacatatgatgcatcacagtcactatcttccgtgggcacg

SEQ ID NO: 1108 - DNA, 53 bp, Artificial Sequence
  Description of Artificial Sequence: Synthetic peanut, 5' sequence and inner sequence
tagggaagagaaggacatatgatgcaacggcagcgtacgtgctttacgtcacg

SEQ ID NO: 1109 - DNA, 53 bp, Artificial Sequence
  Description of Artificial Sequence: Synthetic peanut, 5' sequence and inner sequence
tagggaagagaaggacatatgatgtgcgccgatatcccttcacagttggcatg

SEQ ID NO: 1110 - DNA, 53 bp, Artificial Sequence
  Description of Artificial Sequence: Synthetic peanut, 5' sequence and inner sequence
tagggaagagaaggacatatgatcaggcacaacgcacgtgacaccgctgcgca

SEQ ID NO: 1111 - DNA, 53 bp, Artificial Sequence
  Description of Artificial Sequence: Synthetic peanut, 5' sequence and inner sequence
tagggaagagaaggacatatgatggacaacgtggctggtaggtatcgtgggca

SEQ ID NO: 1112 - DNA, 53 bp, Artificial Sequence
  Description of Artificial Sequence: Synthetic peanut, 5' sequence and inner sequence
tagggaagagaaggacatatgattggccagaacgacaagtgcatgcgcagtga

SEQ ID NO: 1113 - DNA, 53 bp, Artificial Sequence
  Description of Artificial Sequence: Synthetic peanut, 5' sequence and inner sequence
tagggaagagaaggacatatgatcgcacccggcaagacggaatgtggttggcg

SEQ ID NO: 1114 - DNA, 53 bp, Artificial Sequence
  Description of Artificial Sequence: Synthetic peanut, 5' sequence and inner sequence
tagggaagagaaggacatatgatcgcaccgtcgatacgtcattcacgctgaca

SEQ ID NO: 1115 - DNA, 53 bp, Artificial Sequence
  Description of Artificial Sequence: Synthetic peanut, 5' sequence and inner sequence
tagggaagagaaggacatatgatcgatgctacacgtgacggcatgcgcttggc

SEQ ID NO: 1116 - DNA, 53 bp, Artificial Sequence
  Description of Artificial Sequence: Synthetic peanut, 5' sequence and inner sequence
tagggaagagaaggacatatgatggcctgcgatggaatgtgcgaatgtacgca

SEQ ID NO: 1117 - DNA, 53 bp, Artificial Sequence
  Description of Artificial Sequence: Synthetic peanut, 5' sequence and inner sequence
tagggaagagaaggacatatgatgcaatgggtggccacctcgtcacgcgtggt

SEQ ID NO: 1118 - DNA, 53 bp, Artificial Sequence
  Description of Artificial Sequence: Synthetic peanut, 5' sequence and inner sequence
tagggaagagaaggacatatgatccgcacgcgacagaacgtgttcatgcactg

SEQ ID NO: 1119 - DNA, 53 bp, Artificial Sequence
  Description of Artificial Sequence: Synthetic peanut, 5' sequence and inner sequence
tagggaagagaaggacatatgatgtcatgcgatggatgtgggttgtgctcgtc

SEQ ID NO: 1120 - DNA, 53 bp, Artificial Sequence
  Description of Artificial Sequence: Synthetic peanut, 5' sequence and inner sequence
tagggaagagaaggacatatgatggatggccgaactgtgccgtggagtgcatg

SEQ ID NO: 1121 - DNA, 53 bp, Artificial Sequence
  Description of Artificial Sequence: Synthetic peanut, 5' sequence and inner sequence
tagggaagagaaggacatatgatccgtagcgacatcaagctgtggtgtgcgtg

SEQ ID NO: 1122 - DNA, 53 bp, Artificial Sequence
  Description of Artificial Sequence: Synthetic peanut, 5' sequence and inner sequence
tagggaagagaaggacatatgatggacgcgtcgaccttcaagtgtgccgtgga

SEQ ID NO: 1123 - DNA, 53 bp, Artificial Sequence
  Description of Artificial Sequence: Synthetic peanut, 5' sequence and inner sequence
tagggaagagaaggacatatgatccgtagcgacatcaagcggtggtgtgcatg

SEQ ID NO: 1124 - DNA, 53 bp, Artificial Sequence
  Description of Artificial Sequence: Synthetic peanut, 5' sequence and inner sequence
tagggaagagaaggacatatgatcacgtgcatgctaacgtacggccagggaca

SEQ ID NO: 1125 - DNA, 53 bp, Artificial Sequence
  Description of Artificial Sequence: Synthetic peanut, 5' sequence and inner sequence
tagggaagagaaggacatatgatggcctgactgtgcctatcgagtgcgtgatg

SEQ ID NO: 1126 - DNA, 53 bp, Artificial Sequence
  Description of Artificial Sequence: Synthetic peanut, 5' sequence and inner sequence
tagggaagagaaggacatatgatgatgcacgcaacgtacccttcatgtggcca

SEQ ID NO: 1127 - DNA, 53 bp, Artificial Sequence
  Description of Artificial Sequence: Synthetic peanut, 5' sequence and inner sequence
tagggaagagaaggacatatgatctcatgcggaccgaactggatgtgtgcatg

SEQ ID NO: 1128 - DNA, 53 bp, Artificial Sequence
  Description of Artificial Sequence: Synthetic peanut, 5' sequence and inner sequence
tagggaagagaaggacatatgatggcctgcgatggatgtgggctagtatgggc

SEQ ID NO: 1129 - DNA, 53 bp, Artificial Sequence
  Description of Artificial Sequence: Synthetic peanut, 5' sequence and inner sequence
tagggaagagaaggacatatgatcacgatccgaccaggcgtgacgtggccatg

SEQ ID NO: 1130 - DNA, 53 bp, Artificial Sequence
  Description of Artificial Sequence: Synthetic peanut, 5' sequence and inner sequence
tagggaagagaaggacatatgatcgatccgtcaaggtagtgatgtgctacgtg

SEQ ID NO: 1131 - DNA, 53 bp, Artificial Sequence
  Description of Artificial Sequence: Synthetic peanut, 5' sequence and inner sequence
tagggaagagaaggacatatgattgtggccaaacgcgcatacacgtgctcatg

SEQ ID NO: 1132 - DNA, 53 bp, Artificial Sequence
  Description of Artificial Sequence: Synthetic peanut, 5' sequence and inner sequence
tagggaagagaaggacatatgatccgtagcgacatcaagcggtggtgtgcgtc

SEQ ID NO: 1133 - DNA, 53 bp, Artificial Sequence
  Description of Artificial Sequence: Synthetic peanut, 5' sequence and inner sequence
tagggaagagaaggacatatgatatggccgcagctgacctagcatgtgtgtca

SEQ ID NO: 1134 - DNA, 53 bp, Artificial Sequence
  Description of Artificial Sequence: Synthetic peanut, 5' sequence and inner sequence
tagggaagagaaggacatatgatgacacgccgatgagcctagcctgtacgacg

SEQ ID NO: 1135 - DNA, 53 bp, Artificial Sequence
  Description of Artificial Sequence: Synthetic peanut, 5' sequence and inner sequence
tagggaagagaaggacatatgatcgaccgtgacgtgtgcagtagtacggcgtg

SEQ ID NO: 1136 - DNA, 53 bp, Artificial Sequence
  Description of Artificial Sequence: Synthetic peanut, 5' sequence and inner sequence
tagggaagagaaggacatatgatgccgtcgcgacctagcaagtgcgatgtgga

SEQ ID NO: 1137 - DNA, 53 bp, Artificial Sequence
  Description of Artificial Sequence: Synthetic peanut, 5' sequence and inner sequence
tagggaagagaaggacatatgatcgcaccgtcgatacgtcatgcactctgaca

SEQ ID NO: 1138 - DNA, 53 bp, Artificial Sequence
  Description of Artificial Sequence: Synthetic peanut, 5' sequence and inner sequence
tagggaagagaaggacatatgatcgtgccaggacatgacgtgcacgctgcgca

SEQ ID NO: 1139 - DNA, 53 bp, Artificial Sequence
  Description of Artificial Sequence: Synthetic peanut, 5' sequence and inner sequence
tagggaagagaaggacatatgatggcctgcgatggatgaggtgctgcactagt

SEQ ID NO: 1140 - DNA, 53 bp, Artificial Sequence
  Description of Artificial Sequence: Synthetic peanut, 5' sequence and inner sequence
tagggaagagaaggacatatgatcatgtgcgtggagaacgtccctatgcgaca

SEQ ID NO: 1141 - DNA, 53 bp, Artificial Sequence
  Description of Artificial Sequence: Synthetic peanut, 5' sequence and inner sequence
tagggaagagaaggacatatgatccgtagcgacatcaagcgttggtgtgcgtg

SEQ ID NO: 1142 - DNA, 53 bp, Artificial Sequence
  Description of Artificial Sequence: Synthetic peanut, 5' sequence and inner sequence
tagggaagagaaggacatatgatcatatgccgatcgacactagcaagtgtgca

SEQ ID NO: 1143 - DNA, 53 bp, Artificial Sequence
  Description of Artificial Sequence: Synthetic peanut, 5' sequence and inner sequence
tagggaagagaaggacatatgatcatgtgtgcacaaccgatgtatgctgcgtg

SEQ ID NO: 1144 - DNA, 53 bp, Artificial Sequence
  Description of Artificial Sequence: Synthetic peanut, 5' sequence and inner sequence
tagggaagagaaggacatatgatccgtagcgacatcaagcggcggtgtgcgtg

SEQ ID NO: 1145 - DNA, 53 bp, Artificial Sequence
  Description of Artificial Sequence: Synthetic peanut, 5' sequence and inner sequence
tagggaagagaaggacatatgatgtacgactcgcaccctatcatgaggccatg

SEQ ID NO: 1146 - DNA, 53 bp, Artificial Sequence
  Description of Artificial Sequence: Synthetic peanut, 5' sequence and inner sequence
tagggaagagaaggacatatgatgtctgagcgcaacctcgtggactgtgcgtg

SEQ ID NO: 1147 - DNA, 53 bp, Artificial Sequence
  Description of Artificial Sequence: Synthetic peanut, 5' sequence and inner sequence
tagggaagagaaggacatatgatgtgcgacctgacctagcaagcggtagtgta

SEQ ID NO: 1148 - DNA, 51 bp, Artificial Sequence
  Description of Artificial Sequence: Synthetic peanut, 5' sequence and inner sequence
tagggaagagaaggacatatgatggacgcagctgacctagcatgtgtgtca

SEQ ID NO: 1149 - DNA, 53 bp, Artificial Sequence
  Description of Artificial Sequence: Synthetic peanut, 5' sequence and inner sequence
tagggaagagaaggacatatgatcgtaccgtcgatacgtcatgcacgctgaca

SEQ ID NO: 1150 - DNA, 54 bp, Artificial Sequence
  Description of Artificial Sequence: Synthetic peanut, 5' sequence and inner sequence
tagggaagagaaggacatatgatggcctgcgatggatggggtcagcacgttggc

SEQ ID NO: 1151 - DNA, 53 bp, Artificial Sequence
  Description of Artificial Sequence: Synthetic peanut, 5' sequence and inner sequence
tagggaagagaaggacatatgatccgtagcgacatcaagcggtggcgtgcgtg

SEQ ID NO: 1152 - DNA, 53 bp, Artificial Sequence
  Description of Artificial Sequence: Synthetic peanut, 5' sequence and inner sequence
tagggaagagaaggacatatgatcgtaacgcgatgtcaggcacgagttgcaca

SEQ ID NO: 1153 - DNA, 53 bp, Artificial Sequence
  Description of Artificial Sequence: Synthetic peanut, 5' sequence and inner sequence
tagggaagagaaggacatatgatcgcaccatgaaaggggtgaggtacgtcgcg

SEQ ID NO: 1154 - DNA, 53 bp, Artificial Sequence
  Description of Artificial Sequence: Synthetic peanut, 5' sequence and inner sequence
tagggaagagaaggacatatgatgcatcggatgacgcaactgaccgagtggga

SEQ ID NO: 1155 - DNA, 53 bp, Artificial Sequence
  Description of Artificial Sequence: Synthetic peanut, 5' sequence and inner sequence
tagggaagagaaggacatatgatcgtaccgcaagggggagagtgcgtgttggt

SEQ ID NO: 1156 - DNA, 53 bp, Artificial Sequence
  Description of Artificial Sequence: Synthetic peanut, 5' sequence and inner sequence
tagggaagagaaggacatatgatgacgctgcgttccctatcatgtgcggcatg

SEQ ID NO: 1157 - DNA, 53 bp, Artificial Sequence
  Description of Artificial Sequence: Synthetic peanut, 5' sequence and inner sequence
tagggaagagaaggacatatgatccagccgaaccgcagatggtgcatgtcgca

SEQ ID NO: 1158 - DNA, 53 bp, Artificial Sequence
  Description of Artificial Sequence: Synthetic peanut, 5' sequence and inner sequence
tagggaagagaaggacatatgatcgcaccgggacgagacgtgctagtgtgtca

SEQ ID NO: 1159 - DNA, 53 bp, Artificial Sequence
  Description of Artificial Sequence: Synthetic peanut, 5' sequence and inner sequence
tagggaagagaaggacatatgatcgtgtcgtaggggatgagctgagcttggtc

SEQ ID NO: 1160 - DNA, 53 bp, Artificial Sequence
  Description of Artificial Sequence: Synthetic peanut, 5' sequence and inner sequence
tagggaagagaaggacatatgatcatgcacgacgtcatacacggcactgctgc

SEQ ID NO: 1161 - DNA, 53 bp, Artificial Sequence
  Description of Artificial Sequence: Synthetic peanut, 5' sequence and inner sequence
tagggaagagaaggacatatgatgtcatgcacgcacctacacgtgggtatgga

SEQ ID NO: 1162 - DNA, 53 bp, Artificial Sequence
  Description of Artificial Sequence: Synthetic peanut, 5' sequence and inner sequence
tagggaagagaaggacatatgatcacgtacggtaagacgtcacaacatgcaca

SEQ ID NO: 1163 - DNA, 53 bp, Artificial Sequence
  Description of Artificial Sequence: Synthetic peanut, 5' sequence and inner sequence
tagggaagagaaggacatatgatgcacgcactcaaccgccaagtgccgtcgtg

SEQ ID NO: 1164 - DNA, 53 bp, Artificial Sequence
  Description of Artificial Sequence: Synthetic peanut, 5' sequence and inner sequence
tagggaagagaaggacatatgatggatcgcacgctgcactatcacgttgggca

SEQ ID NO: 1165 - DNA, 53 bp, Artificial Sequence
  Description of Artificial Sequence: Synthetic peanut, 5' sequence and inner sequence
tagggaagagaaggacatatgatcgacccaacgtggcggtgacagtcgttgca

SEQ ID NO: 1166 - DNA, 53 bp, Artificial Sequence
  Description of Artificial Sequence: Synthetic peanut, 5' sequence and inner sequence
tagggaagagaaggacatatgatgtgcgcacgatggatgtggatggccagtct

SEQ ID NO: 1167 - DNA, 53 bp, Artificial Sequence
  Description of Artificial Sequence: Synthetic peanut, 5' sequence and inner sequence
tagggaagagaaggacatatgattgcaccgtcgatacgtcatgcacgctgaca

SEQ ID NO: 1168 - DNA, 53 bp, Artificial Sequence
  Description of Artificial Sequence: Synthetic peanut, 5' sequence and inner sequence
tagggaagagaaggacatatgatccgagcggaacgtcaagtcggcagtacgca

SEQ ID NO: 1169 - DNA, 53 bp, Artificial Sequence
  Description of Artificial Sequence: Synthetic peanut, 5' sequence and inner sequence
tagggaagagaaggacatatgatcgcaacgtaacggtacgcctacgcttcacg

SEQ ID NO: 1170 - DNA, 53 bp, Artificial Sequence
  Description of Artificial Sequence: Synthetic peanut, 5' sequence and inner sequence
tagggaagagaaggacatatgatcacggcagcgacgtccacatgtcctgcgca

SEQ ID NO: 1171 - DNA, 53 bp, Artificial Sequence
  Description of Artificial Sequence: Synthetic peanut, 5' sequence and inner sequence
tagggaagagaaggacatatgatgcactgccgacctaacgagtgcgttgtgtg

SEQ ID NO: 1172 - DNA, 53 bp, Artificial Sequence
  Description of Artificial Sequence: Synthetic peanut, 5' sequence and inner sequence
tagggaagagaaggacatatgatcgacacgacaaggcatggactgactgcatg

SEQ ID NO: 1173 - DNA, 53 bp, Artificial Sequence
  Description of Artificial Sequence: Synthetic peanut, 5' sequence and inner sequence
tagggaagagaaggacatatgatgcgtagcgacatcaagcggtggtgtgcgtg

SEQ ID NO: 1174 - DNA, 53 bp, Artificial Sequence
  Description of Artificial Sequence: Synthetic peanut, 5' sequence and inner sequence
tagggaagagaaggacatatgatccgtagcgacatcaagcggtggtgtgcgcg

SEQ ID NO: 1175 - DNA, 53 bp, Artificial Sequence
  Description of Artificial Sequence: Synthetic peanut, 5' sequence and inner sequence
tagggaagagaaggacatatgatgtacaagcggaccgtcaacgtggttgtgga

SEQ ID NO: 1176 - DNA, 53 bp, Artificial Sequence
  Description of Artificial Sequence: Synthetic peanut, 5' sequence and inner sequence
tagggaagagaaggacatatgatcacaccgtcgatacgtcatgcacgctgaca

SEQ ID NO: 1177 - DNA, 53 bp, Artificial Sequence
  Description of Artificial Sequence: Synthetic peanut, 5' sequence and inner sequence
tagggaagagaaggacatatgatcgcaccgtcgatacttcatgcacgctgaca

SEQ ID NO: 1178 - DNA, 53 bp, Artificial Sequence
  Description of Artificial Sequence: Synthetic peanut, 5' sequence and inner sequence
tagggaagagaaggacatatgatcgtgacagcgtgcaatgtgctgcttggcca

SEQ ID NO: 1179 - DNA, 53 bp, Artificial Sequence
  Description of Artificial Sequence: Synthetic peanut, 5' sequence and inner sequence
tagggaagagaaggacatatgatcggaccgcgaaagtcaggctgtgctttggc

SEQ ID NO: 1180 - DNA, 53 bp, Artificial Sequence
  Description of Artificial Sequence: Synthetic peanut, 5' sequence and inner sequence
tagggaagagaaggacatatgatcacgcacacaaccgacagtgagttggcgta

SEQ ID NO: 1181 - DNA, 53 bp, Artificial Sequence
  Description of Artificial Sequence: Synthetic peanut, 5' sequence and inner sequence
tagggaagagaaggacatatgatcacgtggacggaagcacggtagcatacgtg

SEQ ID NO: 1182 - DNA, 53 bp, Artificial Sequence
  Description of Artificial Sequence: Synthetic peanut, 5' sequence and inner sequence
tagggaagagaaggacatatgatgtcgtgtcgtacgcctatcgagtgtgcatg

SEQ ID NO: 1183 - DNA, 53 bp, Artificial Sequence
  Description of Artificial Sequence: Synthetic peanut, 5' sequence and inner sequence
tagggaagagaaggacatatgatccatgccggaccggagcgtggccatgcaca

SEQ ID NO: 1184 - DNA, 53 bp, Artificial Sequence
  Description of Artificial Sequence: Synthetic peanut, 5' sequence and inner sequence
tagggaagagaaggacatatgatccgtagcgacatcaagcggtggtgcgcgtg

SEQ ID NO: 1185 - DNA, 53 bp, Artificial Sequence
  Description of Artificial Sequence: Synthetic peanut, 5' sequence and inner sequence
tagggaagagaaggacatatgatgcatagccgtaacgtaccgccgtggccatg

SEQ ID NO: 1186 - DNA, 53 bp, Artificial Sequence
  Description of Artificial Sequence: Synthetic peanut, 5' sequence and inner sequence
tagggaagagaaggacatatgatcgtgtggcctgactccccttcaatgcgtca

SEQ ID NO: 1187 - DNA, 53 bp, Artificial Sequence
  Description of Artificial Sequence: Synthetic peanut, 5' sequence and inner sequence
tagggaagagaaggacatatgatggacgcgatggatgtggacggtgtggtagt

SEQ ID NO: 1188 - DNA, 53 bp, Artificial Sequence
  Description of Artificial Sequence: Synthetic peanut, 5' sequence and inner sequence
tagggaagagaaggacatatgatgaacggaacgcagcgtcaagtcggtgcatg

SEQ ID NO: 1189 - DNA, 53 bp, Artificial Sequence
  Description of Artificial Sequence: Synthetic peanut, 5' sequence and inner sequence
tagggaagagaaggacatatgatccatgtgaacgcactgtggctagctggtca

SEQ ID NO: 1190 - DNA, 53 bp, Artificial Sequence
  Description of Artificial Sequence: Synthetic peanut, 5' sequence and inner sequence
tagggaagagaaggacatatgatcgcaccgtcgatacgccatgcacgctgaca

SEQ ID NO: 1191 - DNA, 53 bp, Artificial Sequence
  Description of Artificial Sequence: Synthetic peanut, 5' sequence and inner sequence
tagggaagagaaggacatatgatgtcatgctcgcactatcaggtgtgcatgga

SEQ ID NO: 1192 - DNA, 53 bp, Artificial Sequence
  Description of Artificial Sequence: Synthetic peanut, 5' sequence and inner sequence
tagggaagagaaggacatatgatccgtagcgacatcaagcggtggtgttcgtg

SEQ ID NO: 1193 - DNA, 52 bp, Artificial Sequence
  Description of Artificial Sequence: Synthetic peanut, 5' sequence and inner sequence
tagggaagagaaggacatatgatgcacgtcgaaacacgtagccatgcacggt

SEQ ID NO: 1194 - DNA, 53 bp, Artificial Sequence
  Description of Artificial Sequence: Synthetic peanut, 5' sequence and inner sequence
tagggaagagaaggacatatgatccgtagcgacatcaagcgggggtgtgcgtg

SEQ ID NO: 1195 - DNA, 53 bp, Artificial Sequence
  Description of Artificial Sequence: Synthetic peanut, 5' sequence and inner sequence
tagggaagagaaggacatatgatcgcgtgacgataaggtgtgctgcgctccgt

SEQ ID NO: 1196 - DNA, 53 bp, Artificial Sequence
  Description of Artificial Sequence: Synthetic peanut, 5' sequence and inner sequence
tagggaagagaaggacatatgatgtcgcgatgagctagcatgtgcgttgtgta

SEQ ID NO: 1197 - DNA, 53 bp, Artificial Sequence
  Description of Artificial Sequence: Synthetic peanut, 5' sequence and inner sequence
tagggaagagaaggacatatgatgcaactgcacgcattggaccgcacgtcaca

SEQ ID NO: 1198 - DNA, 53 bp, Artificial Sequence
  Description of Artificial Sequence: Synthetic peanut, 5' sequence and inner sequence
tagggaagagaaggacatatgatccgatcggacgtaggaatgcacgtggcagt

SEQ ID NO: 1199 - DNA, 53 bp, Artificial Sequence
  Description of Artificial Sequence: Synthetic peanut, 5' sequence and inner sequence
tagggaagagaaggacatatgatcacgtgcgtagttacgctggtcactgcggt

SEQ ID NO: 1200 - DNA, 53 bp, Artificial Sequence
  Description of Artificial Sequence: Synthetic peanut, 5' sequence and inner sequence
tagggaagagaaggacatatgatggacgcacatcccgttcatgtgtgcatgta

SEQ ID NO: 1201 - DNA, 53 bp, Artificial Sequence
  Description of Artificial Sequence: Synthetic peanut, 5' sequence and inner sequence
tagggaagagaaggacatatgatgcacgactcgcaccctatcatgtaggcatg

SEQ ID NO: 1202 - DNA, 53 bp, Artificial Sequence
  Description of Artificial Sequence: Synthetic peanut, 5' sequence and inner sequence
tagggaagagaaggacatatgatcacgatgctgtcgaacgtgtgtcgctgcgc

SEQ ID NO: 1203 - DNA, 53 bp, Artificial Sequence
  Description of Artificial Sequence: Synthetic peanut, 5' sequence and inner sequence
tagggaagagaaggacatatgatgacgcactcgaacgtacatgtgagcatgga

SEQ ID NO: 1204 - DNA, 53 bp, Artificial Sequence
  Description of Artificial Sequence: Synthetic peanut, 5' sequence and inner sequence
tagggaagagaaggacatatgatccgtagcgacatcaagcggtggtgtgcgtt

SEQ ID NO: 1205 - DNA, 53 bp, Artificial Sequence
  Description of Artificial Sequence: Synthetic peanut, 5' sequence and inner sequence
tagggaagagaaggacatatgattgacgcagcggaacgttcgagtggtacgta

SEQ ID NO: 1206 - DNA, 53 bp, Artificial Sequence
  Description of Artificial Sequence: Synthetic peanut, 5' sequence and inner sequence
tagggaagagaaggacatatgatcgcatggcggtgacatgttgcgtctacccg

SEQ ID NO: 1207 - DNA, 53 bp, Artificial Sequence
  Description of Artificial Sequence: Synthetic peanut, 5' sequence and inner sequence
tagggaagagaaggacatatgatgtcatgcgcgtaccatcgagggggcgtgga

SEQ ID NO: 1208 - DNA, 53 bp, Artificial Sequence
  Description of Artificial Sequence: Synthetic peanut, 5' sequence and inner sequence
tagggaagagaaggacatatgatgtgccgaacgaacccttcacagtgtgcatg

SEQ ID NO: 1209 - DNA, 53 bp, Artificial Sequence
  Description of Artificial Sequence: Synthetic peanut, 5' sequence and inner sequence
tagggaagagaaggacatatgatccacgatgcccgatgcgtacgccatgcaca

SEQ ID NO: 1210 - DNA, 53 bp, Artificial Sequence
  Description of Artificial Sequence: Synthetic peanut, 5' sequence and inner sequence
tagggaagagaaggacatatgatcatgctgacggtcaagcaccactctgcgcg

SEQ ID NO: 1211 - DNA, 53 bp, Artificial Sequence
  Description of Artificial Sequence: Synthetic peanut, 5' sequence and inner sequence
tagggaagagaaggacatatgatggcagcgcagaccgagtgagagtgggtgtg

SEQ ID NO: 1212 - DNA, 53 bp, Artificial Sequence
  Description of Artificial Sequence: Synthetic peanut, 5' sequence and inner sequence
tagggaagagaaggacatatgatccgtagcgacatcaagcggttgtgtgcgtg

SEQ ID NO: 1213 - DNA, 53 bp, Artificial Sequence
  Description of Artificial Sequence: Synthetic peanut, 5' sequence and inner sequence
tagggaagagaaggacatatgatcgacgcaatcggacactggacatgcgcaga

SEQ ID NO: 1214 - DNA, 53 bp, Artificial Sequence
  Description of Artificial Sequence: Synthetic peanut, 5' sequence and inner sequence
tagggaagagaaggacatatgatcgtaccagcaagcggacaagtagtgcgaca

SEQ ID NO: 1215 - DNA, 53 bp, Artificial Sequence
  Description of Artificial Sequence: Synthetic peanut, 5' sequence and inner sequence
tagggaagagaaggacatatgattgtcgtgcgatggatgtggcatgctctggc

SEQ ID NO: 1216 - DNA, 54 bp, Artificial Sequence
  Description of Artificial Sequence: Synthetic peanut, 5' sequence and inner sequence
tagggaagagaaggacatatgatgtgcgcacgatggatgtgggttgtgctcgtc

SEQ ID NO: 1217 - DNA, 53 bp, Artificial Sequence
  Description of Artificial Sequence: Synthetic peanut, 5' sequence and inner sequence
tagggaagagaaggacatatgatacgtcgcagccaacgtggaacacatgcgca

SEQ ID NO: 1218 - DNA, 53 bp, Artificial Sequence
  Description of Artificial Sequence: Synthetic peanut, 5' sequence and inner sequence
tagggaagagaaggacatatgatggacgcaatcgtcacttcaagtacggcatg

SEQ ID NO: 1219 - DNA, 53 bp, Artificial Sequence
  Description of Artificial Sequence: Synthetic peanut, 5' sequence and inner sequence
tagggaagagaaggacatatgatcgcacactacgacagtgaccacgctgcacg

SEQ ID NO: 1220 - DNA, 53 bp, Artificial Sequence
  Description of Artificial Sequence: Synthetic peanut, 5' sequence and inner sequence
tagggaagagaaggacatatgatggacgcagcgtaacgttcgagtggtacgta

SEQ ID NO: 1221 - DNA, 54 bp, Artificial Sequence
  Description of Artificial Sequence: Synthetic peanut, 5' sequence and inner sequence
tagggaagagaaggacatatgatgtgctgacgaaccctagcaagtgcatgcgtg

SEQ ID NO: 1222 - DNA, 53 bp, Artificial Sequence
  Description of Artificial Sequence: Synthetic peanut, 5' sequence and inner sequence
tagggaagagaaggacatatgatcgcaacgcagggcatggttgtcgtgtcgta

SEQ ID NO: 1223 - DNA, 53 bp, Artificial Sequence
  Description of Artificial Sequence: Synthetic peanut, 5' sequence and inner sequence
tagggaagagaaggacatatgatcgcaccgtcgatacgtaatgcacgctgaca

SEQ ID NO: 1224 - DNA, 53 bp, Artificial Sequence
  Description of Artificial Sequence: Synthetic peanut, 5' sequence and inner sequence
tagggaagagaaggacatatgatcgtgacgtcgaaagggtgatcgtgcgcatg

SEQ ID NO: 1225 - DNA, 53 bp, Artificial Sequence
  Description of Artificial Sequence: Synthetic peanut, 5' sequence and inner sequence
tagggaagagaaggacatatgatcacgcagtggacgtacgtgtcgtaggcatg

SEQ ID NO: 1226 - DNA, 53 bp, Artificial Sequence
  Description of Artificial Sequence: Synthetic peanut, 5' sequence and inner sequence
tagggaagagaaggacatatgatcgcaccgtatgaggagtgtgtctgtgcgcg

SEQ ID NO: 1227 - DNA, 53 bp, Artificial Sequence
  Description of Artificial Sequence: Synthetic peanut, 5' sequence and inner sequence
tagggaagagaaggacatatgatccgtagcgacatcaatcggtggtgtgcgtg

SEQ ID NO: 1228 - DNA, 53 bp, Artificial Sequence
  Description of Artificial Sequence: Synthetic peanut, 5' sequence and inner sequence
tagggaagagaaggacatatgatacgtagcgacatcaagcggtggtgtgcgtg

SEQ ID NO: 1229 - DNA, 53 bp, Artificial Sequence
  Description of Artificial Sequence: Synthetic peanut, 5' sequence and inner sequence
tagggaagagaaggacatatgatcgtaccgcaagtgcatcgtgctgggcagca

SEQ ID NO: 1230 - DNA, 53 bp, Artificial Sequence
  Description of Artificial Sequence: Synthetic peanut, 5' sequence and inner sequence
tagggaagagaaggacatatgatgtgctcgcaagacctacacgtggacgtgga

SEQ ID NO: 1231 - DNA, 53 bp, Artificial Sequence
  Description of Artificial Sequence: Synthetic peanut, 5' sequence and inner sequence
tagggaagagaaggacatatgatcgcaccgtcgatacgtcatgcacgctgtca

SEQ ID NO: 1232 - DNA, 53 bp, Artificial Sequence
  Description of Artificial Sequence: Synthetic peanut, 5' sequence and inner sequence
tagggaagagaaggacatatgatccgtagcgacatcaagcggaggtgtgcgtg

SEQ ID NO: 1233 - DNA, 53 bp, Artificial Sequence
  Description of Artificial Sequence: Synthetic peanut, 5' sequence and inner sequence
tagggaagagaaggacatatgatgacgacgatggcaaggggtgcacgtgctgt

SEQ ID NO: 1234 - DNA, 53 bp, Artificial Sequence
  Description of Artificial Sequence: Synthetic peanut, 5' sequence and inner sequence
tagggaagagaaggacatatgatcatgcacaacggcagaacggcttgatcgcg

SEQ ID NO: 1235 - DNA, 53 bp, Artificial Sequence
  Description of Artificial Sequence: Synthetic peanut, 5' sequence and inner sequence
tagggaagagaaggacatatgatcgtgtggcacaagcagggatgatatgcgca

SEQ ID NO: 1236 - DNA, 53 bp, Artificial Sequence
  Description of Artificial Sequence: Synthetic peanut, 5' sequence and inner sequence
tagggaagagaaggacatatgatcgcaccgtctatacgtcatgcacgctgaca

SEQ ID NO: 1237 - DNA, 53 bp, Artificial Sequence
  Description of Artificial Sequence: Synthetic peanut, 5' sequence and inner sequence
tagggaagagaaggacatatgatgcatcggtccgagcgtaacgagcagtggga

SEQ ID NO: 1238 - DNA, 53 bp, Artificial Sequence
  Description of Artificial Sequence: Synthetic peanut, 5' sequence and inner sequence
tagggaagagaaggacatatgatggcatgcgatggatgtggtgtacccagtcc

SEQ ID NO: 1239 - DNA, 53 bp, Artificial Sequence
  Description of Artificial Sequence: Synthetic peanut, 5' sequence and inner sequence
tagggaagagaaggacatatgatgcactgatcgatacctgagtggcgtacgtg

SEQ ID NO: 1240 - DNA, 53 bp, Artificial Sequence
  Description of Artificial Sequence: Synthetic peanut, 5' sequence and inner sequence
tagggaagagaaggacatatgatggcattgcgcgcctagcaagttgacgtgta

SEQ ID NO: 1241 - DNA, 51 bp, Artificial Sequence
  Description of Artificial Sequence: Synthetic peanut, 5' sequence and inner sequence
tagggaagagaaggacatatgatggacgcaacgtaccgtatcgtggccatg

SEQ ID NO: 1242 - DNA, 53 bp, Artificial Sequence
  Description of Artificial Sequence: Synthetic peanut, 5' sequence and inner sequence
tagggaagagaaggacatatgatcgcaccgtcgatacgtcatgcacgcttaca

SEQ ID NO: 1243 - DNA, 53 bp, Artificial Sequence
  Description of Artificial Sequence: Synthetic peanut, 5' sequence and inner sequence
tagggaagagaaggacatatgatggacgactcgcaccctatcatgaggccatg

SEQ ID NO: 1244 - DNA, 53 bp, Artificial Sequence
  Description of Artificial Sequence: Synthetic peanut, 5' sequence and inner sequence
tagggaagagaaggacatatgatccgtagcgacatcaagcggtggtttgcgtg

SEQ ID NO: 1245 - DNA, 53 bp, Artificial Sequence
  Description of Artificial Sequence: Synthetic peanut, 5' sequence and inner sequence
tagggaagagaaggacatatgatggcactgaacgcacgacctacacgtggaca

SEQ ID NO: 1246 - DNA, 53 bp, Artificial Sequence
  Description of Artificial Sequence: Synthetic peanut, 5' sequence and inner sequence
tagggaagagaaggacatatgatcgcaccgtcgatacgtcatgcacgctgacc

SEQ ID NO: 1247 - DNA, 53 bp, Artificial Sequence
  Description of Artificial Sequence: Synthetic peanut, 5' sequence and inner sequence
tagggaagagaaggacatatgatggacggaacgcagcgtcaagtcggtgcatg

SEQ ID NO: 1248 - DNA, 53 bp, Artificial Sequence
  Description of Artificial Sequence: Synthetic peanut, 5' sequence and inner sequence
tagggaagagaaggacatatgatggcaccgtcgatacgtcatgcacgctgaca

SEQ ID NO: 1249 - DNA, 53 bp, Artificial Sequence
  Description of Artificial Sequence: Synthetic peanut, 5' sequence and inner sequence
tagggaagagaaggacatatgatcgtgtgcggcgaggaacggtgtgttgcgtg

SEQ ID NO: 1250 - DNA, 54 bp, Artificial Sequence
  Description of Artificial Sequence: Synthetic peanut, 5' sequence and inner sequence
tagggaagagaaggacatatgatggacgcatcgccccttcgagtgtgacaggta

SEQ ID NO: 1251 - DNA, 52 bp, Artificial Sequence
  Description of Artificial Sequence: Synthetic peanut, 5' sequence and inner sequence
tagggaagagaaggacatatgatgtcatgccatcccttcgagtggacaggta

SEQ ID NO: 1252 - DNA, 53 bp, Artificial Sequence
  Description of Artificial Sequence: Synthetic peanut, 5' sequence and inner sequence
tagggaagagaaggacatatgatgcgtagcgagaatggtcaagtgtgtgcgtg

SEQ ID NO: 1253 - DNA, 53 bp, Artificial Sequence
  Description of Artificial Sequence: Synthetic peanut, 5' sequence and inner sequence
tagggaagagaaggacatatgatacattggcatgccttacctacacgtggcca

SEQ ID NO: 1254 - DNA, 53 bp, Artificial Sequence
  Description of Artificial Sequence: Synthetic peanut, 5' sequence and inner sequence
tagggaagagaaggacatatgatcatgcgtgaacgtagctatcatgtggcgca

SEQ ID NO: 1255 - DNA, 53 bp, Artificial Sequence
  Description of Artificial Sequence: Synthetic peanut, 5' sequence and inner sequence
tagggaagagaaggacatatgatcgacacgcagtttgagcccgacgatgcacg

SEQ ID NO: 1256 - DNA, 53 bp, Artificial Sequence
  Description of Artificial Sequence: Synthetic peanut, 5' sequence and inner sequence
tagggaagagaaggacatatgatcgcaccgtcgctacgtcatgcacgctgaca

SEQ ID NO: 1257 - DNA, 53 bp, Artificial Sequence
  Description of Artificial Sequence: Synthetic peanut, 5' sequence and inner sequence
tagggaagagaaggacatatgatggccgaacgaccgatcgagtggcgcatgga

SEQ ID NO: 1258 - DNA, 54 bp, Artificial Sequence
  Description of Artificial Sequence: Synthetic peanut, 5' sequence and inner sequence
tagggaagagaaggacatatgatggcatgcgatggatggggtcagcacgttggc

SEQ ID NO: 1259 - DNA, 52 bp, Artificial Sequence
  Description of Artificial Sequence: Synthetic peanut, 5' sequence and inner sequence
tagggaagagaaggacatatgatcgaccagcgcaagtaagtggcgtgatgca

SEQ ID NO: 1260 - DNA, 53 bp, Artificial Sequence
  Description of Artificial Sequence: Synthetic peanut, 5' sequence and inner sequence
tagggaagagaaggacatatgatgtgcatcgatggcgtatgctggtgatgtgc

SEQ ID NO: 1261 - DNA, 53 bp, Artificial Sequence
  Description of Artificial Sequence: Synthetic peanut, 5' sequence and inner sequence
tagggaagagaaggacatatgatcgtagcgcagaaggacacatggactgcacg

SEQ ID NO: 1262 - DNA, 53 bp, Artificial Sequence
  Description of Artificial Sequence: Synthetic peanut, 5' sequence and inner sequence
tagggaagagaaggacatatgatccgcgcgcatcccttcacagtggtgatgca

SEQ ID NO: 1263 - DNA, 53 bp, Artificial Sequence
  Description of Artificial Sequence: Synthetic peanut, 5' sequence and inner sequence
tagggaagagaaggacatatgatcgcaccgtcgatacgtcacgcacgctgaca

SEQ ID NO: 1264 - DNA, 53 bp, Artificial Sequence
  Description of Artificial Sequence: Synthetic peanut, 5' sequence and inner sequence
tagggaagagaaggacatatgatgtgccaaacgaccaaagcgggcagtgcgta

SEQ ID NO: 1265 - DNA, 53 bp, Artificial Sequence
  Description of Artificial Sequence: Synthetic peanut, 5' sequence and inner sequence
tagggaagagaaggacatatgatggcatgcgatggatgtgtgcgtgtattagc

SEQ ID NO: 1266 - DNA, 53 bp, Artificial Sequence
  Description of Artificial Sequence: Synthetic peanut, 5' sequence and inner sequence
tagggaagagaaggacatatgatgtgctgcatgagcggtgtgcgtgtacgacg

SEQ ID NO: 1267 - DNA, 53 bp, Artificial Sequence
  Description of Artificial Sequence: Synthetic peanut, 5' sequence and inner sequence
tagggaagagaaggacatatgatcgcaccgtcgatccgtcatgcacgctgaca

SEQ ID NO: 1268 - DNA, 53 bp, Artificial Sequence
  Description of Artificial Sequence: Synthetic peanut, 5' sequence and inner sequence
tagggaagagaaggacatatgatcgacacgtaccaagcgggacaatgtgcagt

SEQ ID NO: 1269 - DNA, 53 bp, Artificial Sequence
  Description of Artificial Sequence: Synthetic peanut, 5' sequence and inner sequence
tagggaagagaaggacatatgatcgaacacgaacagtggatggacgcgtcacg

SEQ ID NO: 1270 - DNA, 53 bp, Artificial Sequence
  Description of Artificial Sequence: Synthetic peanut, 5' sequence and inner sequence
tagggaagagaaggacatatgatgtgcgcggcttgccttcacgtgatcgtgta

SEQ ID NO: 1271 - DNA, 53 bp, Artificial Sequence
  Description of Artificial Sequence: Synthetic peanut, 5' sequence and inner sequence
tagggaagagaaggacatatgatggactgacgagccgttcatgtggttgtgga

SEQ ID NO: 1272 - DNA, 53 bp, Artificial Sequence
  Description of Artificial Sequence: Synthetic peanut, 5' sequence and inner sequence
tagggaagagaaggacatatgatccgtagcgacatcaagaggtggtgtgcgtg

SEQ ID NO: 1273 - DNA, 53 bp, Artificial Sequence
  Description of Artificial Sequence: Synthetic peanut, 5' sequence and inner sequence
tagggaagagaaggacatatgatgtacgacgcggaccttcaagtaggcgtgta

SEQ ID NO: 1274 - DNA, 53 bp, Artificial Sequence
  Description of Artificial Sequence: Synthetic peanut, 5' sequence and inner sequence
tagggaagagaaggacatatgatcgcaccgtcgatacgtcatgtacgctgaca

SEQ ID NO: 1275 - DNA, 53 bp, Artificial Sequence
  Description of Artificial Sequence: Synthetic peanut, 5' sequence and inner sequence
tagggaagagaaggacatatgatcatggccacgacgcatcaggacatgacgca

SEQ ID NO: 1276 - DNA, 53 bp, Artificial Sequence
  Description of Artificial Sequence: Synthetic peanut, 5' sequence and inner sequence
tagggaagagaaggacatatgatggcaggcaggacggcgtacagtacgacaca

SEQ ID NO: 1277 - DNA, 53 bp, Artificial Sequence
  Description of Artificial Sequence: Synthetic peanut, 5' sequence and inner sequence
tagggaagagaaggacatatgatcgcaccgtcgatacgtcatgcatgctgaca

SEQ ID NO: 1278 - DNA, 53 bp, Artificial Sequence
  Description of Artificial Sequence: Synthetic peanut, 5' sequence and inner sequence
tagggaagagaaggacatatgatcatgcgcaagtcgaagcatcgtcacacgtg

SEQ ID NO: 1279 - DNA, 53 bp, Artificial Sequence
  Description of Artificial Sequence: Synthetic peanut, 5' sequence and inner sequence
tagggaagagaaggacatatgatggacacagcgtacctcaacgtggacgtgca

SEQ ID NO: 1280 - DNA, 53 bp, Artificial Sequence
  Description of Artificial Sequence: Synthetic peanut, 5' sequence and inner sequence
tagggaagagaaggacatatgatgtcgccacggacctgtcatggatgggcaca

SEQ ID NO: 1281 - DNA, 53 bp, Artificial Sequence
  Description of Artificial Sequence: Synthetic peanut, 5' sequence and inner sequence
tagggaagagaaggacatatgatgccacgtcgtcacgcagcatgtacggcaca

SEQ ID NO: 1282 - DNA, 53 bp, Artificial Sequence
  Description of Artificial Sequence: Synthetic peanut, 5' sequence and inner sequence
tagggaagagaaggacatatgatgcacatggccaactcgaccacatgtgagca

SEQ ID NO: 1283 - DNA, 53 bp, Artificial Sequence
  Description of Artificial Sequence: Synthetic peanut, 5' sequence and inner sequence
tagggaagagaaggacatatgatccgtagcgacatcaagcggtggggtgcgtg

SEQ ID NO: 1284 - DNA, 53 bp, Artificial Sequence
  Description of Artificial Sequence: Synthetic peanut, 5' sequence and inner sequence
tagggaagagaaggacatatgatcctgcgatgggtgtgggggtgcactgcgtc

SEQ ID NO: 1285 - DNA, 53 bp, Artificial Sequence
  Description of Artificial Sequence: Synthetic peanut, 5' sequence and inner sequence
tagggaagagaaggacatatgatcacatggcctgcgtaccgacacgtggttcg

SEQ ID NO: 1286 - DNA, 53 bp, Artificial Sequence
  Description of Artificial Sequence: Synthetic peanut, 5' sequence and inner sequence
tagggaagagaaggacatatgatgtgctgagctgggagtggtggtgctttggc

SEQ ID NO: 1287 - DNA, 53 bp, Artificial Sequence
  Description of Artificial Sequence: Synthetic peanut, 5' sequence and inner sequence
tagggaagagaaggacatatgattggacggcgcgatcacgttcatgcggttca

SEQ ID NO: 1288 - DNA, 53 bp, Artificial Sequence
  Description of Artificial Sequence: Synthetic peanut, 5' sequence and inner sequence
tagggaagagaaggacatatgatggacgagcggaacgatcgagtggttgcgta

SEQ ID NO: 1289 - DNA, 53 bp, Artificial Sequence
  Description of Artificial Sequence: Synthetic peanut, 5' sequence and inner sequence
tagggaagagaaggacatatgatctcaccgtcgatacgtcatgcacgctgaca

SEQ ID NO: 1290 - DNA, 53 bp, Artificial Sequence
  Description of Artificial Sequence: Synthetic peanut, 5' sequence and inner sequence
tagggaagagaaggacatatgatcgtgccgacgatgacctatcgatgtggaca

SEQ ID NO: 1291 - DNA, 53 bp, Artificial Sequence
  Description of Artificial Sequence: Synthetic peanut, 5' sequence and inner sequence
tagggaagagaaggacatatgatcgcaccgtcgatacgtcatgaacgctgaca

SEQ ID NO: 1292 - DNA, 53 bp, Artificial Sequence
  Description of Artificial Sequence: Synthetic peanut, 5' sequence and inner sequence
tagggaagagaaggacatatgatcgcacagtcgatacgtcatgcacgctgaca

SEQ ID NO: 1293 - DNA, 53 bp, Artificial Sequence
  Description of Artificial Sequence: Synthetic peanut, 5' sequence and inner sequence
tagggaagagaaggacatatgatgtgctgcacggacatatcacgtggcatgga

SEQ ID NO: 1294 - DNA, 53 bp, Artificial Sequence
  Description of Artificial Sequence: Synthetic peanut, 5' sequence and inner sequence
tagggaagagaaggacatatgatgcgcacgtagccctatcagtggtgcatgca

SEQ ID NO: 1295 - DNA, 53 bp, Artificial Sequence
  Description of Artificial Sequence: Synthetic peanut, 5' sequence and inner sequence
tagggaagagaaggacatatgatcacgcacgcatacaacggcaccatggcgtg

SEQ ID NO: 1296 - DNA, 53 bp, Artificial Sequence
  Description of Artificial Sequence: Synthetic peanut, 5' sequence and inner sequence
tagggaagagaaggacatatgatgcgcaagcagaggatgcatgctcttgccgt

SEQ ID NO: 1297 - DNA, 53 bp, Artificial Sequence
  Description of Artificial Sequence: Synthetic peanut, 5' sequence and inner sequence
tagggaagagaaggacatatgatcgaccaaaccgatgggcatacacgtgcaca

SEQ ID NO: 1298 - DNA, 53 bp, Artificial Sequence
  Description of Artificial Sequence: Synthetic peanut, 5' sequence and inner sequence
tagggaagagaaggacatatgatgcatcatgcgtcctctgccactgtgtgtca

SEQ ID NO: 1299 - DNA, 53 bp, Artificial Sequence
  Description of Artificial Sequence: Synthetic peanut, 5' sequence and inner sequence
tagggaagagaaggacatatgattggccgatgcgtcccttcaatgtgtgcatg

SEQ ID NO: 1300 - DNA, 53 bp, Artificial Sequence
  Description of Artificial Sequence: Synthetic peanut, 5' sequence and inner sequence
tagggaagagaaggacatatgattggcgtgcacgaaacgcatcgacatgcaca

SEQ ID NO: 1301 - DNA, 53 bp, Artificial Sequence
  Description of Artificial Sequence: Synthetic peanut, 5' sequence and inner sequence
tagggaagagaaggacatatgatcacatagggcacgaatctgggtgtgcgtca

SEQ ID NO: 1302 - DNA, 53 bp, Artificial Sequence
  Description of Artificial Sequence: Synthetic peanut, 5' sequence and inner sequence
tagggaagagaaggacatatgatcgacaccagagtgcatgcctgtacgacacg

SEQ ID NO: 1303 - DNA, 53 bp, Artificial Sequence
  Description of Artificial Sequence: Synthetic peanut, 5' sequence and inner sequence
tagggaagagaaggacatatgatgtcattccgcatcctacacgtgtgcacgta

SEQ ID NO: 1304 - DNA, 53 bp, Artificial Sequence
  Description of Artificial Sequence: Synthetic peanut, 5' sequence and inner sequence
tagggaagagaaggacatatgatccattgggcattacgtgcgctcacttcgcg

SEQ ID NO: 1305 - DNA, 53 bp, Artificial Sequence
  Description of Artificial Sequence: Synthetic peanut, 5' sequence and inner sequence
tagggaagagaaggacatatgatgtacgtatcggcccggtcaagttcggcatg

SEQ ID NO: 1306 - DNA, 53 bp, Artificial Sequence
  Description of Artificial Sequence: Synthetic peanut, 5' sequence and inner sequence
tagggaagagaaggacatatgatcgaccgatacgcgcatagtgtgtgtggaca

SEQ ID NO: 1307 - DNA, 53 bp, Artificial Sequence
  Description of Artificial Sequence: Synthetic peanut, 5' sequence and inner sequence
tagggaagagaaggacatatgatcgatgcacaagcaatgggcctaacgacacg

SEQ ID NO: 1308 - DNA, 53 bp, Artificial Sequence
  Description of Artificial Sequence: Synthetic peanut, 5' sequence and inner sequence
tagggaagagaaggacatatgattggccaagcgacctagcaagtgtgctcatg

SEQ ID NO: 1309 - DNA, 53 bp, Artificial Sequence
  Description of Artificial Sequence: Synthetic peanut, 5' sequence and inner sequence
tagggaagagaaggacatatgatcacgcagtgacattgcaggcagagtgcgtc

SEQ ID NO: 1310 - DNA, 53 bp, Artificial Sequence
  Description of Artificial Sequence: Synthetic peanut, 5' sequence and inner sequence
tagggaagagaaggacatatgatggcatgcacgcacctacacgtgggaatgga

SEQ ID NO: 1311 - DNA, 53 bp, Artificial Sequence
  Description of Artificial Sequence: Synthetic peanut, 5' sequence and inner sequence
tagggaagagaaggacatatgatgtgctgcctgacccacgtggacttgcacta

SEQ ID NO: 1312 - DNA, 53 bp, Artificial Sequence
  Description of Artificial Sequence: Synthetic peanut, 5' sequence and inner sequence
tagggaagagaaggacatatgatggccgaaacgcagcctagcgagtgtcgtca

SEQ ID NO: 1313 - DNA, 53 bp, Artificial Sequence
  Description of Artificial Sequence: Synthetic peanut, 5' sequence and inner sequence
tagggaagagaaggacatatgatcgcaccagacaagcacgtcacggcgacacg

SEQ ID NO: 1314 - DNA, 53 bp, Artificial Sequence
  Description of Artificial Sequence: Synthetic peanut, 5' sequence and inner sequence
tagggaagagaaggacatatgatgcatacgtacgccacgacacgatctggcca

SEQ ID NO: 1315 - DNA, 53 bp, Artificial Sequence
  Description of Artificial Sequence: Synthetic peanut, 5' sequence and inner sequence
tagggaagagaaggacatatgatcgcaccgcatgacgtgaatggtgaggtatg

SEQ ID NO: 1316 - DNA, 53 bp, Artificial Sequence
  Description of Artificial Sequence: Synthetic peanut, 5' sequence and inner sequence
tagggaagagaaggacatatgatggcatgcgatggaatgtgcgaatgtacgca

SEQ ID NO: 1317 - DNA, 53 bp, Artificial Sequence
  Description of Artificial Sequence: Synthetic peanut, 5' sequence and inner sequence
tagggaagagaaggacatatgatcgcaccgtcgatacgtcatgcacgttgaca

SEQ ID NO: 1318 - DNA, 53 bp, Artificial Sequence
  Description of Artificial Sequence: Synthetic peanut, 5' sequence and inner sequence
tagggaagagaaggacatatgatccgcactgacctgacgtggtagtgtcgacg

SEQ ID NO: 1319 - DNA, 53 bp, Artificial Sequence
  Description of Artificial Sequence: Synthetic peanut, 5' sequence and inner sequence
tagggaagagaaggacatatgatgcatggcaagaacgcactgtgttgtggcca

SEQ ID NO: 1320 - DNA, 53 bp, Artificial Sequence
  Description of Artificial Sequence: Synthetic peanut, 5' sequence and inner sequence
tagggaagagaaggacatatgatgtcattccgcatcctacacgttggcacgta

SEQ ID NO: 1321 - DNA, 53 bp, Artificial Sequence
  Description of Artificial Sequence: Synthetic peanut, 5' sequence and inner sequence
tagggaagagaaggacatatgatggcctgcgatgaacgaggcatgatgcgtca

SEQ ID NO: 1322 - DNA, 53 bp, Artificial Sequence
  Description of Artificial Sequence: Synthetic peanut, 5' sequence and inner sequence
tagggaagagaaggacatatgatgcacgccgatggatgaggtcagtgtgctgt

SEQ ID NO: 1323 - DNA, 53 bp, Artificial Sequence
  Description of Artificial Sequence: Synthetic peanut, 5' sequence and inner sequence
tagggaagagaaggacatatgatgcactgcacgcaccctatcatgaggccatg

SEQ ID NO: 1324 - DNA, 53 bp, Artificial Sequence
  Description of Artificial Sequence: Synthetic peanut, 5' sequence and inner sequence
tagggaagagaaggacatatgatccgtagcgacataaagcggtggtgtgcgtg

SEQ ID NO: 1325 - DNA, 53 bp, Artificial Sequence
  Description of Artificial Sequence: Synthetic peanut, 5' sequence and inner sequence
tagggaagagaaggacatatgatcacgcgacggtacgtgatgggtgaggcata

SEQ ID NO: 1326 - DNA, 53 bp, Artificial Sequence
  Description of Artificial Sequence: Synthetic peanut, 5' sequence and inner sequence
tagggaagagaaggacatatgatcgaaccgtcgatacgtcatgcacgctgaca

SEQ ID NO: 1327 - DNA, 53 bp, Artificial Sequence
  Description of Artificial Sequence: Synthetic peanut, 5' sequence and inner sequence
tagggaagagaaggacatatgatgtgctgcgatggatgtgggttgtgctcgtc

SEQ ID NO: 1328 - DNA, 53 bp, Artificial Sequence
  Description of Artificial Sequence: Synthetic peanut, 5' sequence and inner sequence
tagggaagagaaggacatatgatgtcagtcgatggatgtgggttgtgctcgtc

SEQ ID NO: 1329 - DNA, 53 bp, Artificial Sequence
  Description of Artificial Sequence: Synthetic peanut, 5' sequence and inner sequence
tagggaagagaaggacatatgattgactgaacgtaacgtcgagcggttgtgga

SEQ ID NO: 1330 - DNA, 53 bp, Artificial Sequence
  Description of Artificial Sequence: Synthetic peanut, 5' sequence and inner sequence
tagggaagagaaggacatatgatcgtgccaagcgtgtatcaggcatcgacacg

SEQ ID NO: 1331 - DNA, 53 bp, Artificial Sequence
  Description of Artificial Sequence: Synthetic peanut, 5' sequence and inner sequence
tagggaagagaaggacatatgatcgcaacgtcgatacgtcatgcacgctgaca

SEQ ID NO: 1332 - DNA, 53 bp, Artificial Sequence
  Description of Artificial Sequence: Synthetic peanut, 5' sequence and inner sequence
tagggaagagaaggacatatgatcgcaccgtcgatacgtcctgcacgctgaca

SEQ ID NO: 1333 - DNA, 53 bp, Artificial Sequence
  Description of Artificial Sequence: Synthetic peanut, 5' sequence and inner sequence
tagggaagagaaggacatatgatgcacatccagtgcaaccaatggcatgcgtg

SEQ ID NO: 1334 - DNA, 52 bp, Artificial Sequence
  Description of Artificial Sequence: Synthetic peanut, 5' sequence and inner sequence
tagggaagagaaggacatatgatggccgatcgaccctatcaagtgcagcatg

SEQ ID NO: 1335 - DNA, 53 bp, Artificial Sequence
  Description of Artificial Sequence: Synthetic peanut, 5' sequence and inner sequence
tagggaagagaaggacatatgatcacgtacaacagtgccgttcacagtgcgtg

SEQ ID NO: 1336 - DNA, 53 bp, Artificial Sequence
  Description of Artificial Sequence: Synthetic peanut, 5' sequence and inner sequence
tagggaagagaaggacatatgatcgtaccgggggagtgcgacatgacgacgtg

SEQ ID NO: 1337 - DNA, 53 bp, Artificial Sequence
  Description of Artificial Sequence: Synthetic peanut, 5' sequence and inner sequence
tagggaagagaaggacatatgatcgcaacacgtgacgcactttggtctacgca

SEQ ID NO: 1338 - DNA, 53 bp, Artificial Sequence
  Description of Artificial Sequence: Synthetic peanut, 5' sequence and inner sequence
tagggaagagaaggacatatgatcgtgtgcaggcaggcacaggcgtagtggca

SEQ ID NO: 1339 - DNA, 53 bp, Artificial Sequence
  Description of Artificial Sequence: Synthetic peanut, 5' sequence and inner sequence
tagggaagagaaggacatatgatcgacacgcgtaacgtctagtccgctgctgc

SEQ ID NO: 1340 - DNA, 53 bp, Artificial Sequence
  Description of Artificial Sequence: Synthetic peanut, 5' sequence and inner sequence
tagggaagagaaggacatatgatgtcattccgcatcctacacgtggtcacgta

SEQ ID NO: 1341 - DNA, 53 bp, Artificial Sequence
  Description of Artificial Sequence: Synthetic peanut, 5' sequence and inner sequence
tagggaagagaaggacatatgatccgtgagcgtacctacacgtgcggcttgga

SEQ ID NO: 1342 - DNA, 53 bp, Artificial Sequence
  Description of Artificial Sequence: Synthetic peanut, 5' sequence and inner sequence
tagggaagagaaggacatatgatcacatgcgcattgccttcgttcactgcaca

SEQ ID NO: 1343 - DNA, 53 bp, Artificial Sequence
  Description of Artificial Sequence: Synthetic peanut, 5' sequence and inner sequence
tagggaagagaaggacatatgatccgtagcgacctcaagcggtggtgtgcgtg

SEQ ID NO: 1344 - DNA, 53 bp, Artificial Sequence
  Description of Artificial Sequence: Synthetic peanut, 5' sequence and inner sequence
tagggaagagaaggacatatgatggacgcatcgtcccgtcatgtggttccgta

SEQ ID NO: 1345 - DNA, 53 bp, Artificial Sequence
  Description of Artificial Sequence: Synthetic peanut, 5' sequence and inner sequence
tagggaagagaaggacatatgattgcgcaaggacactgcacgtatgcctgcca

SEQ ID NO: 1346 - DNA, 53 bp, Artificial Sequence
  Description of Artificial Sequence: Synthetic peanut, 5' sequence and inner sequence
tagggaagagaaggacatatgatgtcatgaaacgagcctacacgtggtgcatg

SEQ ID NO: 1347 - DNA, 53 bp, Artificial Sequence
  Description of Artificial Sequence: Synthetic peanut, 5' sequence and inner sequence
tagggaagagaaggacatatgatccgacgcatgaccgaacggggtgatgtgcc

SEQ ID NO: 1348 - DNA, 53 bp, Artificial Sequence
  Description of Artificial Sequence: Synthetic peanut, 5' sequence and inner sequence
tagggaagagaaggacatatgatgtgctacgatggctgtgggcgtgatgcgta

SEQ ID NO: 1349 - DNA, 53 bp, Artificial Sequence
  Description of Artificial Sequence: Synthetic peanut, 5' sequence and inner sequence
tagggaagagaaggacatatgatgtcgtgcgtgccctatcaggtggttgtgga

SEQ ID NO: 1350 - DNA, 53 bp, Artificial Sequence
  Description of Artificial Sequence: Synthetic peanut, 5' sequence and inner sequence
tagggaagagaaggacatatgatcgtagcgcaccaggacatgtcgtcggcatg

SEQ ID NO: 1351 - DNA, 53 bp, Artificial Sequence
  Description of Artificial Sequence: Synthetic peanut, 5' sequence and inner sequence
tagggaagagaaggacatatgatcgcaccttcgatacgtcatgcacgctgaca

SEQ ID NO: 1352 - DNA, 53 bp, Artificial Sequence
  Description of Artificial Sequence: Synthetic peanut, 5' sequence and inner sequence
tagggaagagaaggacatatgatccgcagcgacatcaagcggtggtgtgcgtg

SEQ ID NO: 1353 - DNA, 53 bp, Artificial Sequence
  Description of Artificial Sequence: Synthetic peanut, 5' sequence and inner sequence
tagggaagagaaggacatatgatgggcaacacgcaggatgtgatgcatgcgga

SEQ ID NO: 1354 - DNA, 53 bp, Artificial Sequence
  Description of Artificial Sequence: Synthetic peanut, 5' sequence and inner sequence
tagggaagagaaggacatatgatccgaacgcaccgtccaagttgccatgcgcg

SEQ ID NO: 1355 - DNA, 53 bp, Artificial Sequence
  Description of Artificial Sequence: Synthetic peanut, 5' sequence and inner sequence
tagggaagagaaggacatatgatggcatgaacgacctgggcatgcgtggtcca

SEQ ID NO: 1356 - DNA, 53 bp, Artificial Sequence
  Description of Artificial Sequence: Synthetic peanut, 5' sequence and inner sequence
tagggaagagaaggacatatgatcgcacaaagggacgtggacgagcctacgtg

SEQ ID NO: 1357 - DNA, 53 bp, Artificial Sequence
  Description of Artificial Sequence: Synthetic peanut, 5' sequence and inner sequence
tagggaagagaaggacatatgatgcgatgacagacgcagctttgggatgcacg

SEQ ID NO: 1358 - DNA, 53 bp, Artificial Sequence
  Description of Artificial Sequence: Synthetic peanut, 5' sequence and inner sequence
tagggaagagaaggacatatgatccgtagcgacatcaagcggtggtgtgtgtg

SEQ ID NO: 1359 - DNA, 53 bp, Artificial Sequence
  Description of Artificial Sequence: Synthetic peanut, 5' sequence and inner sequence
tagggaagagaaggacatatgatgtcatgcgatgaacgaggcatgatgcgtca

SEQ ID NO: 1360 - DNA, 53 bp, Artificial Sequence
  Description of Artificial Sequence: Synthetic peanut, 5' sequence and inner sequence
tagggaagagaaggacatatgatgcacatcaggccgtatcgtgactcgtggga

SEQ ID NO: 1361 - DNA, 53 bp, Artificial Sequence
  Description of Artificial Sequence: Synthetic peanut, 5' sequence and inner sequence
tagggaagagaaggacatatgatcatacgccctgcctgcactatggccatgca

SEQ ID NO: 1362 - DNA, 53 bp, Artificial Sequence
  Description of Artificial Sequence: Synthetic peanut, 5' sequence and inner sequence
tagggaagagaaggacatatgatgtacgatgctgcccgacatgtggacgtgga

SEQ ID NO: 1363 - DNA, 53 bp, Artificial Sequence
  Description of Artificial Sequence: Synthetic peanut, 5' sequence and inner sequence
tagggaagagaaggacatatgatgcaactggcacgcacaagcactgctgcgca

SEQ ID NO: 1364 - DNA, 53 bp, Artificial Sequence
  Description of Artificial Sequence: Synthetic peanut, 5' sequence and inner sequence
tagggaagagaaggacatatgatcggcacggaaacatgtaggcatgctcgacg

SEQ ID NO: 1365 - DNA, 53 bp, Artificial Sequence
  Description of Artificial Sequence: Synthetic peanut, 5' sequence and inner sequence
tagggaagagaaggacatatgatggacgcagcttgcctactggttgtcacgta

SEQ ID NO: 1366 - DNA, 53 bp, Artificial Sequence
  Description of Artificial Sequence: Synthetic peanut, 5' sequence and inner sequence
tagggaagagaaggacatatgatgacgtgccatcgtaagttcgacactgccgt

SEQ ID NO: 1367 - DNA, 53 bp, Artificial Sequence
  Description of Artificial Sequence: Synthetic peanut, 5' sequence and inner sequence
tagggaagagaaggacatatgatcgcaccgccgatacgtcatgcacgctgaca

SEQ ID NO: 1368 - DNA, 53 bp, Artificial Sequence
  Description of Artificial Sequence: Synthetic peanut, 5' sequence and inner sequence
tagggaagagaaggacatatgatcacgcaccaagtaacacgcgtactgacgca

SEQ ID NO: 1369 - DNA, 53 bp, Artificial Sequence
  Description of Artificial Sequence: Synthetic peanut, 5' sequence and inner sequence
tagggaagagaaggacatatgatgtcatgccatcccttcgagtgtgacaggca

SEQ ID NO: 1370 - DNA, 53 bp, Artificial Sequence
  Description of Artificial Sequence: Synthetic peanut, 5' sequence and inner sequence
tagggaagagaaggacatatgatgttcgcgcgacacctatcaatgtggacgtg

SEQ ID NO: 1371 - DNA, 53 bp, Artificial Sequence
  Description of Artificial Sequence: Synthetic peanut, 5' sequence and inner sequence
tagggaagagaaggacatatgatggcgtgcggaccggtcagtcgtcatgcaca

SEQ ID NO: 1372 - DNA, 53 bp, Artificial Sequence
  Description of Artificial Sequence: Synthetic peanut, 5' sequence and inner sequence
tagggaagagaaggacatatgatcatgtgcatggtacgtacacaatgcgcacg

SEQ ID NO: 1373 - DNA, 53 bp, Artificial Sequence
  Description of Artificial Sequence: Synthetic peanut, 5' sequence and inner sequence
tagggaagagaaggacatatgatgcacgtggtctgaccggctcggtgtgcatg

SEQ ID NO: 1374 - DNA, 53 bp, Artificial Sequence
  Description of Artificial Sequence: Synthetic peanut, 5' sequence and inner sequence
tagggaagagaaggacatatgatccgtgctcatccccaagtgtgccatggtga

SEQ ID NO: 1375 - DNA, 53 bp, Artificial Sequence
  Description of Artificial Sequence: Synthetic peanut, 5' sequence and inner sequence
tagggaagagaaggacatatgatgtcatgcacgaacactatcatggctgcatg

SEQ ID NO: 1376 - DNA, 53 bp, Artificial Sequence
  Description of Artificial Sequence: Synthetic peanut, 5' sequence and inner sequence
tagggaagagaaggacatatgatggacggaacggcactatcatgcggtgtgta

SEQ ID NO: 1377 - DNA, 53 bp, Artificial Sequence
  Description of Artificial Sequence: Synthetic peanut, 5' sequence and inner sequence
tagggaagagaaggacatatgataatgcggcatgaacggacctacacgtgggc

SEQ ID NO: 1378 - DNA, 53 bp, Artificial Sequence
  Description of Artificial Sequence: Synthetic peanut, 5' sequence and inner sequence
tagggaagagaaggacatatgatcgtgcacaagtcggaccacgttgctgctca

SEQ ID NO: 1379 - DNA, 53 bp, Artificial Sequence
  Description of Artificial Sequence: Synthetic peanut, 5' sequence and inner sequence
tagggaagagaaggacatatgatgtactgcacgcaccctatcatgtaggcatg

SEQ ID NO: 1380 - DNA, 53 bp, Artificial Sequence
  Description of Artificial Sequence: Synthetic peanut, 5' sequence and inner sequence
tagggaagagaaggacatatgatcggaccgtcgatacgtcatgcacgctgaca

SEQ ID NO: 1381 - DNA, 53 bp, Artificial Sequence
  Description of Artificial Sequence: Synthetic peanut, 5' sequence and inner sequence
tagggaagagaaggacatatgatcgtgacgcaacgtgtgcaatgttgtacgca

SEQ ID NO: 1382 - DNA, 53 bp, Artificial Sequence
  Description of Artificial Sequence: Synthetic peanut, 5' sequence and inner sequence
tagggaagagaaggacatatgatcgcagcaactgcaacggtatgcactgcgtg

SEQ ID NO: 1383 - DNA, 53 bp, Artificial Sequence
  Description of Artificial Sequence: Synthetic peanut, 5' sequence and inner sequence
tagggaagagaaggacatatgatgtgcgaccgaccctatcaggtgctcatgta

SEQ ID NO: 1384 - DNA, 53 bp, Artificial Sequence
  Description of Artificial Sequence: Synthetic peanut, 5' sequence and inner sequence
tagggaagagaaggacatatgatcatgcgacacggtgataggatgcatgcaca

SEQ ID NO: 1385 - DNA, 53 bp, Artificial Sequence
  Description of Artificial Sequence: Synthetic peanut, 5' sequence and inner sequence
tagggaagagaaggacatatgatcgaccgaggacgtggtgtgtgggctgcgca

SEQ ID NO: 1386 - DNA, 53 bp, Artificial Sequence
  Description of Artificial Sequence: Synthetic peanut, 5' sequence and inner sequence
tagggaagagaaggacatatgatacgcacgtagccctatcagtggtgcatgca

SEQ ID NO: 1387 - DNA, 53 bp, Artificial Sequence
  Description of Artificial Sequence: Synthetic peanut, 5' sequence and inner sequence
tagggaagagaaggacatatgatccgtctgaccgatgtggtgcatgtggcagg

SEQ ID NO: 1388 - DNA, 53 bp, Artificial Sequence
  Description of Artificial Sequence: Synthetic peanut, 5' sequence and inner sequence
tagggaagagaaggacatatgatccgtgcacgtggagcaaggactgtgtggca

SEQ ID NO: 1389 - DNA, 53 bp, Artificial Sequence
  Description of Artificial Sequence: Synthetic peanut, 5' sequence and inner sequence
tagggaagagaaggacatatgatccgaacgaaccgcacgtggactgagcgacg

SEQ ID NO: 1390 - DNA, 53 bp, Artificial Sequence
  Description of Artificial Sequence: Synthetic peanut, 5' sequence and inner sequence
tagggaagagaaggacatatgatgcaccgatagctcgtaccgtcacgtggcca

SEQ ID NO: 1391 - DNA, 53 bp, Artificial Sequence
  Description of Artificial Sequence: Synthetic peanut, 5' sequence and inner sequence
tagggaagagaaggacatatgatccacacggaccgaaactgcactgttgggcg

SEQ ID NO: 1392 - DNA, 53 bp, Artificial Sequence
  Description of Artificial Sequence: Synthetic peanut, 5' sequence and inner sequence
tagggaagagaaggacatatgatcgtaccgtcaaggcaggcatggttgggcaa

SEQ ID NO: 1393 - DNA, 53 bp, Artificial Sequence
  Description of Artificial Sequence: Synthetic peanut, 5' sequence and inner sequence
tagggaagagaaggacatatgatggacgaacgtaacgatgggggcagtacgca

SEQ ID NO: 1394 - DNA, 53 bp, Artificial Sequence
  Description of Artificial Sequence: Synthetic peanut, 5' sequence and inner sequence
tagggaagagaaggacatatgatggtccgaacgcacctcatgtgtgtcgtgta

SEQ ID NO: 1395 - DNA, 53 bp, Artificial Sequence
  Description of Artificial Sequence: Synthetic peanut, 5' sequence and inner sequence
tagggaagagaaggacatatgatgtgactgagctggcgtagctggacgtgtgc

SEQ ID NO: 1396 - DNA, 53 bp, Artificial Sequence
  Description of Artificial Sequence: Synthetic peanut, 5' sequence and inner sequence
tagggaagagaaggacatatgatgacgtacgctggatgtgacgaatgtgcggt

SEQ ID NO: 1397 - DNA, 53 bp, Artificial Sequence
  Description of Artificial Sequence: Synthetic peanut, 5' sequence and inner sequence
tagggaagagaaggacatatgatccgtatcgacatcaagcggtggtgtgcgtg

SEQ ID NO: 1398 - DNA, 53 bp, Artificial Sequence
  Description of Artificial Sequence: Synthetic peanut, 5' sequence and inner sequence
tagggaagagaaggacatatgatgtcatgcacgaacactatcatggcggcacg

SEQ ID NO: 1399 - DNA, 53 bp, Artificial Sequence
  Description of Artificial Sequence: Synthetic peanut, 5' sequence and inner sequence
tagggaagagaaggacatatgatcgcaccgtgtggtaacgtgtccgaggcata

SEQ ID NO: 1400 - DNA, 53 bp, Artificial Sequence
  Description of Artificial Sequence: Synthetic peanut, 5' sequence and inner sequence
tagggaagagaaggacatatgatcgtgctgagcgagcctatctgtggttcgtg

SEQ ID NO: 1401 - DNA, 53 bp, Artificial Sequence
  Description of Artificial Sequence: Synthetic peanut, 5' sequence and inner sequence
tagggaagagaaggacatatgatgtcgtagcgcacactagcaagtgtcacgta

SEQ ID NO: 1402 - DNA, 53 bp, Artificial Sequence
  Description of Artificial Sequence: Synthetic peanut, 5' sequence and inner sequence
tagggaagagaaggacatatgatgcgaacagacacggtagcacatcctgcaca

SEQ ID NO: 1403 - DNA, 53 bp, Artificial Sequence
  Description of Artificial Sequence: Synthetic peanut, 5' sequence and inner sequence
tagggaagagaaggacatatgatcgcacgcaaggggtgtggtaccacgtcgca

SEQ ID NO: 1404 - DNA, 53 bp, Artificial Sequence
  Description of Artificial Sequence: Synthetic peanut, 5' sequence and inner sequence
tagggaagagaaggacatatgatcgcacagagtgacgcacgtacgcctgtccg

SEQ ID NO: 1405 - DNA, 53 bp, Artificial Sequence
  Description of Artificial Sequence: Synthetic peanut, 5' sequence and inner sequence
tagggaagagaaggacatatgatcgacgaaccgaaccgtatcactgcgtggca

SEQ ID NO: 1406 - DNA, 53 bp, Artificial Sequence
  Description of Artificial Sequence: Synthetic peanut, 5' sequence and inner sequence
tagggaagagaaggacatatgatggcatgcacgcacctacacgtgggcatgga

SEQ ID NO: 1407 - DNA, 53 bp, Artificial Sequence
  Description of Artificial Sequence: Synthetic peanut, 5' sequence and inner sequence
tagggaagagaaggacatatgatcgcaccgtcgatacgacatgcacgctgaca

SEQ ID NO: 1408 - DNA, 53 bp, Artificial Sequence
  Description of Artificial Sequence: Synthetic peanut, 5' sequence and inner sequence
tagggaagagaaggacatatgatgccgtgcggacctagggctgtatcgacgtg

SEQ ID NO: 1409 - DNA, 53 bp, Artificial Sequence
  Description of Artificial Sequence: Synthetic peanut, 5' sequence and inner sequence
tagggaagagaaggacatatgatcgcattgtcgtgaactggccgtggtggaca

SEQ ID NO: 1410 - DNA, 53 bp, Artificial Sequence
  Description of Artificial Sequence: Synthetic peanut, 5' sequence and inner sequence
tagggaagagaaggacatatgatacgtatgccacagcgttccgtaagtgcaca

SEQ ID NO: 1411 - DNA, 53 bp, Artificial Sequence
  Description of Artificial Sequence: Synthetic peanut, 5' sequence and inner sequence
tagggaagagaaggacatatgatccacacagcaatgtgtctacgatgtgcgca

SEQ ID NO: 1412 - DNA, 53 bp, Artificial Sequence
  Description of Artificial Sequence: Synthetic peanut, 5' sequence and inner sequence
tagggaagagaaggacatatgatcatgcacaccgagcatacatcgtctgcgca

SEQ ID NO: 1413 - DNA, 53 bp, Artificial Sequence
  Description of Artificial Sequence: Synthetic peanut, 5' sequence and inner sequence
tagggaagagaaggacatatgatggacaacgtggcccaacatgtggttcgtgt

SEQ ID NO: 1414 - DNA, 53 bp, Artificial Sequence
  Description of Artificial Sequence: Synthetic peanut, 5' sequence and inner sequence
tagggaagagaaggacatatgatgcacgactcgcaccctatcatgatgccatg

SEQ ID NO: 1415 - DNA, 53 bp, Artificial Sequence
  Description of Artificial Sequence: Synthetic peanut, 5' sequence and inner sequence
tagggaagagaaggacatatgatgcatgtgtccaagctgatctgtggtgtgta

SEQ ID NO: 1416 - DNA, 53 bp, Artificial Sequence
  Description of Artificial Sequence: Synthetic peanut, 5' sequence and inner sequence
tagggaagagaaggacatatgatcacgtagcatggaaggtgatatgcgtcaca

SEQ ID NO: 1417 - DNA, 53 bp, Artificial Sequence
  Description of Artificial Sequence: Synthetic peanut, 5' sequence and inner sequence
tagggaagagaaggacatatgatcgacacgcagggcacgtaacgcttaacgcg

SEQ ID NO: 1418 - DNA, 53 bp, Artificial Sequence
  Description of Artificial Sequence: Synthetic peanut, 5' sequence and inner sequence
tagggaagagaaggacatatgatcgcgagcacggtggacacgtacactgcacg

SEQ ID NO: 1419 - DNA, 53 bp, Artificial Sequence
  Description of Artificial Sequence: Synthetic peanut, 5' sequence and inner sequence
tagggaagagaaggacatatgatgtcatgcacgaacactatcattgcggcatg

SEQ ID NO: 1420 - DNA, 53 bp, Artificial Sequence
  Description of Artificial Sequence: Synthetic peanut, 5' sequence and inner sequence
tagggaagagaaggacatatgatcgcaccgtcgatacgtcatgcacgctgata

SEQ ID NO: 1421 - DNA, 53 bp, Artificial Sequence
  Description of Artificial Sequence: Synthetic peanut, 5' sequence and inner sequence
tagggaagagaaggacatatgatcgtgccgtagggactgggcgacatgcatgt

SEQ ID NO: 1422 - DNA, 53 bp, Artificial Sequence
  Description of Artificial Sequence: Synthetic peanut, 5' sequence and inner sequence
tagggaagagaaggacatatgatccgagcgcgagaggacacgtcacgtacgca

SEQ ID NO: 1423 - DNA, 51 bp, Artificial Sequence
  Description of Artificial Sequence: Synthetic peanut, 5' sequence and inner sequence
tagggaagagaaggacatatgatcgcaccgtcgatacgtcatgcacgcacc

SEQ ID NO: 1424 - DNA, 53 bp, Artificial Sequence
  Description of Artificial Sequence: Synthetic peanut, 5' sequence and inner sequence
tagggaagagaaggacatatgatgccgcaacgactgaggggtgtatgtacgcg

SEQ ID NO: 1425 - DNA, 53 bp, Artificial Sequence
  Description of Artificial Sequence: Synthetic peanut, 5' sequence and inner sequence
tagggaagagaaggacatatgatcgccacaaacacatgcgtacgcactgcgtg

SEQ ID NO: 1426 - DNA, 53 bp, Artificial Sequence
  Description of Artificial Sequence: Synthetic peanut, 5' sequence and inner sequence
tagggaagagaaggacatatgatcgcaacggaccaaagtgtggctgtgtgtgc

SEQ ID NO: 1427 - DNA, 48 bp, Artificial Sequence
  Description of Artificial Sequence: Synthetic peanut, 5' sequence and inner sequence
tagggaagagaaggacatatgatggcctgcgatggatgtgtgcgtgta

SEQ ID NO: 1428 - DNA, 53 bp, Artificial Sequence
  Description of Artificial Sequence: Synthetic peanut, 5' sequence and inner sequence
tagggaagagaaggacatatgatcacgtgctaggacgatacatgtgccacaca

SEQ ID NO: 1429 - DNA, 53 bp, Artificial Sequence
  Description of Artificial Sequence: Synthetic peanut, 5' sequence and inner sequence
tagggaagagaaggacatatgatacgatgtcgtgaacggaccgtcatgtggca

SEQ ID NO: 1430 - DNA, 53 bp, Artificial Sequence
  Description of Artificial Sequence: Synthetic peanut, 5' sequence and inner sequence
tagggaagagaaggacatatgatccgacgacgtcccgcaagttcgtggccatg

SEQ ID NO: 1431 - DNA, 53 bp, Artificial Sequence
  Description of Artificial Sequence: Synthetic peanut, 5' sequence and inner sequence
tagggaagagaaggacatatgatgtgctgcgatggattgggagtgtctttggc

SEQ ID NO: 1432 - DNA, 53 bp, Artificial Sequence
  Description of Artificial Sequence: Synthetic peanut, 5' sequence and inner sequence
tagggaagagaaggacatatgatccgacgagtcacgtagtcatgccttgtcga

SEQ ID NO: 1433 - DNA, 53 bp, Artificial Sequence
  Description of Artificial Sequence: Synthetic peanut, 5' sequence and inner sequence
tagggaagagaaggacatatgatggcatcgacgtacccaagatcacgtgcgtg

SEQ ID NO: 1434 - DNA, 53 bp, Artificial Sequence
  Description of Artificial Sequence: Synthetic peanut, 5' sequence and inner sequence
tagggaagagaaggacatatgatcgcaaccagacaaagcgttgtgtacgcacg

SEQ ID NO: 1435 - DNA, 53 bp, Artificial Sequence
  Description of Artificial Sequence: Synthetic peanut, 5' sequence and inner sequence
tagggaagagaaggacatatgatcgtacacggggcaggtagtgttcatgcaca

SEQ ID NO: 1436 - DNA, 53 bp, Artificial Sequence
  Description of Artificial Sequence: Synthetic peanut, 5' sequence and inner sequence
tagggaagagaaggacatatgatggccaccgaggcacgaatgcgtaacgtggt

SEQ ID NO: 1437 - DNA, 53 bp, Artificial Sequence
  Description of Artificial Sequence: Synthetic peanut, 5' sequence and inner sequence
tagggaagagaaggacatatgatggacgcagcttgcctactggtgggcacgta

SEQ ID NO: 1438 - DNA, 53 bp, Artificial Sequence
  Description of Artificial Sequence: Synthetic peanut, 5' sequence and inner sequence
tagggaagagaaggacatatgatgtcatgaacgaccgaggagtgcgtcacgta

SEQ ID NO: 1439 - DNA, 53 bp, Artificial Sequence
  Description of Artificial Sequence: Synthetic peanut, 5' sequence and inner sequence
tagggaagagaaggacatatgatgcacatggaccgaaacgtgacgcggggtca

SEQ ID NO: 1440 - DNA, 53 bp, Artificial Sequence
  Description of Artificial Sequence: Synthetic peanut, 5' sequence and inner sequence
tagggaagagaaggacatatgatcatgtcgcggcaagcgtaacgtgctacgga

SEQ ID NO: 1441 - DNA, 53 bp, Artificial Sequence
  Description of Artificial Sequence: Synthetic peanut, 5' sequence and inner sequence
tagggaagagaaggacatatgatgtcgtgcgtgccctatcaagtcggtctgta

SEQ ID NO: 1442 - DNA, 53 bp, Artificial Sequence
  Description of Artificial Sequence: Synthetic peanut, 5' sequence and inner sequence
tagggaagagaaggacatatgatccgtagcgacatccagcggtggtgtgcgtg

SEQ ID NO: 1443 - DNA, 53 bp, Artificial Sequence
  Description of Artificial Sequence: Synthetic peanut, 5' sequence and inner sequence
tagggaagagaaggacatatgatccgtagcgacatcaagcgctggtgtgcgtg

SEQ ID NO: 1444 - DNA, 53 bp, Artificial Sequence
  Description of Artificial Sequence: Synthetic peanut, 5' sequence and inner sequence
tagggaagagaaggacatatgatcgatgcaaggccaacatcagcgtgcgtgtg

SEQ ID NO: 1445 - DNA, 53 bp, Artificial Sequence
  Description of Artificial Sequence: Synthetic peanut, 5' sequence and inner sequence
tagggaagagaaggacatatgatcatgcggcagatcgaagtgtccactgcgcg

SEQ ID NO: 1446 - DNA, 53 bp, Artificial Sequence
  Description of Artificial Sequence: Synthetic peanut, 5' sequence and inner sequence
tagggaagagaaggacatatgatgtcatgccatcccttcgagtgtgccaggta

SEQ ID NO: 1447 - DNA, 53 bp, Artificial Sequence
  Description of Artificial Sequence: Synthetic peanut, 5' sequence and inner sequence
tagggaagagaaggacatatgatcacgcactacgacacactgcgtacggcacg

SEQ ID NO: 1448 - DNA, 53 bp, Artificial Sequence
  Description of Artificial Sequence: Synthetic peanut, 5' sequence and inner sequence
tagggaagagaaggacatatgatccgatcgacctcgtgtgcatggctggcgca

SEQ ID NO: 1449 - DNA, 53 bp, Artificial Sequence
  Description of Artificial Sequence: Synthetic peanut, 5' sequence and inner sequence
tagggaagagaaggacatatgatcgcaccgttgatacgtcatgcacgctgaca

SEQ ID NO: 1450 - DNA, 53 bp, Artificial Sequence
  Description of Artificial Sequence: Synthetic peanut, 5' sequence and inner sequence
tagggaagagaaggacatatgatggcctagcacgtcacaatgggcatgccgcg

SEQ ID NO: 1451 - DNA, 53 bp, Artificial Sequence
  Description of Artificial Sequence: Synthetic peanut, 5' sequence and inner sequence
tagggaagagaaggacatatgatccgtcacacagcacatgcgtccgtgccgca

SEQ ID NO: 1452 - DNA, 53 bp, Artificial Sequence
  Description of Artificial Sequence: Synthetic peanut, 5' sequence and inner sequence
tagggaagagaaggacatatgatcgcaccgtcgataagtcatgcacgctgaca

SEQ ID NO: 1453 - DNA, 52 bp, Artificial Sequence
  Description of Artificial Sequence: Synthetic peanut, 5' sequence and inner sequence
tagggaagagaaggacatatgatggcctgcgatggatgtggacgtacgtggc

SEQ ID NO: 1454 - DNA, 53 bp, Artificial Sequence
  Description of Artificial Sequence: Synthetic peanut, 5' sequence and inner sequence
tagggaagagaaggacatatgatggacgcagcttgcctactggtggtcacgca

SEQ ID NO: 1455 - DNA, 53 bp, Artificial Sequence
  Description of Artificial Sequence: Synthetic peanut, 5' sequence and inner sequence
tagggaagagaaggacatatgatggacagcgatggatgtgggttgtgctcgtc

SEQ ID NO: 1456 - DNA, 53 bp, Artificial Sequence
  Description of Artificial Sequence: Synthetic peanut, 5' sequence and inner sequence
tagggaagagaaggacatatgatcgacatggcgaaagggatgtgtgacgcgtg

SEQ ID NO: 1457 - DNA, 53 bp, Artificial Sequence
  Description of Artificial Sequence: Synthetic peanut, 5' sequence and inner sequence
tagggaagagaaggacatatgatccgtagcgccatcaagcggtggtgtgcgtg

SEQ ID NO: 1458 - DNA, 53 bp, Artificial Sequence
  Description of Artificial Sequence: Synthetic peanut, 5' sequence and inner sequence
tagggaagagaaggacatatgatacgtcaacatggcgcagttcgtaacgcaca

SEQ ID NO: 1459 - DNA, 53 bp, Artificial Sequence
  Description of Artificial Sequence: Synthetic peanut, 5' sequence and inner sequence
tagggaagagaaggacatatgatcgcgccgaaaggacgaacgatgtgtgcgtg

SEQ ID NO: 1460 - DNA, 53 bp, Artificial Sequence
  Description of Artificial Sequence: Synthetic peanut, 5' sequence and inner sequence
tagggaagagaaggacatatgatgcacgaacgacgctgtcatcgcacgtcaca

SEQ ID NO: 1461 - DNA, 53 bp, Artificial Sequence
  Description of Artificial Sequence: Synthetic peanut, 5' sequence and inner sequence
tagggaagagaaggacatatgatgtacgcatcgccccttcgagtggacaggta

SEQ ID NO: 1462 - DNA, 53 bp, Artificial Sequence
  Description of Artificial Sequence: Synthetic peanut, 5' sequence and inner sequence
tagggaagagaaggacatatgatggactgcgatggatgtgggttgtgctcgtc

SEQ ID NO: 1463 - DNA, 53 bp, Artificial Sequence
  Description of Artificial Sequence: Synthetic peanut, 5' sequence and inner sequence
tagggaagagaaggacatatgatcgcaccgtcgatacggcatgcacgctgaca

SEQ ID NO: 1464 - DNA, 53 bp, Artificial Sequence
  Description of Artificial Sequence: Synthetic peanut, 5' sequence and inner sequence
tagggaagagaaggacatatgatggcattcgatgcactacaagttgttgtgta

SEQ ID NO: 1465 - DNA, 53 bp, Artificial Sequence
  Description of Artificial Sequence: Synthetic peanut, 5' sequence and inner sequence
tagggaagagaaggacatatgatgcgtgcagcatatggaaggacgtggccgcg

SEQ ID NO: 1466 - DNA, 53 bp, Artificial Sequence
  Description of Artificial Sequence: Synthetic peanut, 5' sequence and inner sequence
tagggaagagaaggacatatgatcgcaccgtcgatatgtcatgcacgctgaca

SEQ ID NO: 1467 - DNA, 53 bp, Artificial Sequence
  Description of Artificial Sequence: Synthetic peanut, 5' sequence and inner sequence
tagggaagagaaggacatatgatccgtagcgacatcacgcggtggtgtgcgtg

SEQ ID NO: 1468 - DNA, 53 bp, Artificial Sequence
  Description of Artificial Sequence: Synthetic peanut, 5' sequence and inner sequence
tagggaagagaaggacatatgatgtgctgaggcatccctaggacacgtggcca

SEQ ID NO: 1469 - DNA, 53 bp, Artificial Sequence
  Description of Artificial Sequence: Synthetic peanut, 5' sequence and inner sequence
tagggaagagaaggacatatgatcacgtgcacgatgcaagtacacatgcacca

SEQ ID NO: 1470 - DNA, 53 bp, Artificial Sequence
  Description of Artificial Sequence: Synthetic peanut, 5' sequence and inner sequence
tagggaagagaaggacatatgatggacggaacgcagccacgtgtgtcgatgta

SEQ ID NO: 1471 - DNA, 53 bp, Artificial Sequence
  Description of Artificial Sequence: Synthetic peanut, 5' sequence and inner sequence
tagggaagagaaggacatatgatgacgcgatgcacttggtccgtactcacgtg

SEQ ID NO: 1472 - DNA, 53 bp, Artificial Sequence
  Description of Artificial Sequence: Synthetic peanut, 5' sequence and inner sequence
tagggaagagaaggacatatgatggacggatcgaacctagagagtggcgtgga

SEQ ID NO: 1473 - DNA, 53 bp, Artificial Sequence
  Description of Artificial Sequence: Synthetic peanut, 5' sequence and inner sequence
tagggaagagaaggacatatgatccgtggcgtaacgaaggggaggtatgcacg

SEQ ID NO: 1474 - DNA, 53 bp, Artificial Sequence
  Description of Artificial Sequence: Synthetic peanut, 5' sequence and inner sequence
tagggaagagaaggacatatgatacgcactgaccgttagcatggtcctgcaca

SEQ ID NO: 1475 - DNA, 53 bp, Artificial Sequence
  Description of Artificial Sequence: Synthetic peanut, 5' sequence and inner sequence
tagggaagagaaggacatatgatccggagcgcactgtcagcgtggtgtacgtg

SEQ ID NO: 1476 - DNA, 53 bp, Artificial Sequence
  Description of Artificial Sequence: Synthetic peanut, 5' sequence and inner sequence
tagggaagagaaggacatatgatcgaaccgcaaggaggctggtacgttcggca

SEQ ID NO: 1477 - DNA, 53 bp, Artificial Sequence
  Description of Artificial Sequence: Synthetic peanut, 5' sequence and inner sequence
tagggaagagaaggacatatgatcgcaccgtcgatacgtcatgcacgccgaca

SEQ ID NO: 1478 - DNA, 53 bp, Artificial Sequence
  Description of Artificial Sequence: Synthetic peanut, 5' sequence and inner sequence
tagggaagagaaggacatatgatcgtaccgaacaagtgacattgcgcacggtc

SEQ ID NO: 1479 - DNA, 53 bp, Artificial Sequence
  Description of Artificial Sequence: Synthetic peanut, 5' sequence and inner sequence
tagggaagagaaggacatatgatgcacaaacgaccgaggcatgtagcgacgtg

SEQ ID NO: 1480 - DNA, 53 bp, Artificial Sequence
  Description of Artificial Sequence: Synthetic peanut, 5' sequence and inner sequence
tagggaagagaaggacatatgatcgtgcatgctgtcgggacgcacactgtgtg

SEQ ID NO: 1481 - DNA, 53 bp, Artificial Sequence
  Description of Artificial Sequence: Synthetic peanut, 5' sequence and inner sequence
tagggaagagaaggacatatgatcgcaccggtgagggcatggttcggcacgca

SEQ ID NO: 1482 - DNA, 53 bp, Artificial Sequence
  Description of Artificial Sequence: Synthetic peanut, 5' sequence and inner sequence
tagggaagagaaggacatatgatcgtgccaccagagtgacgcatgcatgatgc

SEQ ID NO: 1483 - DNA, 53 bp, Artificial Sequence
  Description of Artificial Sequence: Synthetic peanut, 5' sequence and inner sequence
tagggaagagaaggacatatgatcgacagatcggcatcaccagtcattgcgca

SEQ ID NO: 1484 - DNA, 53 bp, Artificial Sequence
  Description of Artificial Sequence: Synthetic peanut, 5' sequence and inner sequence
tagggaagagaaggacatatgatcgaaccggaaggtggcgcatgggtgaggga

SEQ ID NO: 1485 - DNA, 53 bp, Artificial Sequence
  Description of Artificial Sequence: Synthetic peanut, 5' sequence and inner sequence
tagggaagagaaggacatatgatggacgcaacgaacctacgagtgatcgtgta

SEQ ID NO: 1486 - DNA, 53 bp, Artificial Sequence
  Description of Artificial Sequence: Synthetic peanut, 5' sequence and inner sequence
tagggaagagaaggacatatgattcgtagcgacatcaagcggtggtgtgcgtg

SEQ ID NO: 1487 - DNA, 53 bp, Artificial Sequence
  Description of Artificial Sequence: Synthetic peanut, 5' sequence and inner sequence
tagggaagagaaggacatatgatgtgcgagtcgaccgtacaagtgcaggcatg

SEQ ID NO: 1488 - DNA, 53 bp, Artificial Sequence
  Description of Artificial Sequence: Synthetic peanut, 5' sequence and inner sequence
tagggaagagaaggacatatgatcgcaccgtcgatacgtcatgcacactgaca

SEQ ID NO: 1489 - DNA, 54 bp, Artificial Sequence
  Description of Artificial Sequence: Synthetic peanut, 5' sequence and inner sequence
tagggaagagaaggacatatgatggcctgcgatggatgtggacggtgtggtagt

SEQ ID NO: 1490 - DNA, 53 bp, Artificial Sequence
  Description of Artificial Sequence: Synthetic peanut, 5' sequence and inner sequence
tagggaagagaaggacatatgatcgcacacgggaggcatcgtaacgtgcagca

SEQ ID NO: 1491 - DNA, 53 bp, Artificial Sequence
  Description of Artificial Sequence: Synthetic peanut, 5' sequence and inner sequence
tagggaagagaaggacatatgatacgtcaaacgcgacaatgcatgcgtacacg

SEQ ID NO: 1492 - DNA, 53 bp, Artificial Sequence
  Description of Artificial Sequence: Synthetic peanut, 5' sequence and inner sequence
tagggaagagaaggacatatgatcacgctgcatgatcacgcacttccgtcacg

SEQ ID NO: 1493 - DNA, 53 bp, Artificial Sequence
  Description of Artificial Sequence: Synthetic peanut, 5' sequence and inner sequence
tagggaagagaaggacatatgatgtcattccgcatcctacacttgggcacgta

SEQ ID NO: 1494 - DNA, 53 bp, Artificial Sequence
  Description of Artificial Sequence: Synthetic peanut, 5' sequence and inner sequence
tagggaagagaaggacatatgatcgacacagcatcgaacttatggcatgcacg

SEQ ID NO: 1495 - DNA, 53 bp, Artificial Sequence
  Description of Artificial Sequence: Synthetic peanut, 5' sequence and inner sequence
tagggaagagaaggacatatgatcgaacgcagtgcagtgacatccagtgcaca

SEQ ID NO: 1496 - DNA, 53 bp, Artificial Sequence
  Description of Artificial Sequence: Synthetic peanut, 5' sequence and inner sequence
tagggaagagaaggacatatgatgtcgtgcgatctgaccgtgcaagttgggca

SEQ ID NO: 1497 - DNA, 53 bp, Artificial Sequence
  Description of Artificial Sequence: Synthetic peanut, 5' sequence and inner sequence
tagggaagagaaggacatatgatcgcaccgtcgatacgtcatgcaagctgaca

SEQ ID NO: 1498 - DNA, 53 bp, Artificial Sequence
  Description of Artificial Sequence: Synthetic peanut, 5' sequence and inner sequence
tagggaagagaaggacatatgatcgcaccgtcgatacgtcatgcacgatgaca

SEQ ID NO: 1499 - DNA, 53 bp, Artificial Sequence
  Description of Artificial Sequence: Synthetic peanut, 5' sequence and inner sequence
tagggaagagaaggacatatgatggcctgcgatggatgtgcgttgtgtctgtc

SEQ ID NO: 1500 - DNA, 53 bp, Artificial Sequence
  Description of Artificial Sequence: Synthetic peanut, 5' sequence and inner sequence
tagggaagagaaggacatatgatccgcacacgacacttggtcatccgctgtcg

SEQ ID NO: 1501 - DNA, 53 bp, Artificial Sequence
  Description of Artificial Sequence: Synthetic peanut, 5' sequence and inner sequence
tagggaagagaaggacatatgatcacgaacagtaggcattgcacggcgacgcg

SEQ ID NO: 1502 - DNA, 53 bp, Artificial Sequence
  Description of Artificial Sequence: Synthetic peanut, 5' sequence and inner sequence
tagggaagagaaggacatatgatgcaacggcggaatcacgtgggatgtgcgca

SEQ ID NO: 1503 - DNA, 54 bp, Artificial Sequence
  Description of Artificial Sequence: Synthetic peanut, 5' sequence and inner sequence
tagggaagagaaggacatatgatgtactgcgatggcttagcaaagtgcgacatg

SEQ ID NO: 1504 - DNA, 53 bp, Artificial Sequence
  Description of Artificial Sequence: Synthetic peanut, 5' sequence and inner sequence
tagggaagagaaggacatatgatcgaagatggacgcatcagcccgacgtgtca

SEQ ID NO: 1505 - DNA, 53 bp, Artificial Sequence
  Description of Artificial Sequence: Synthetic peanut, 5' sequence and inner sequence
tagggaagagaaggacatatgatgcacgacagagcgacactgtgtccgacgca

SEQ ID NO: 1506 - DNA, 53 bp, Artificial Sequence
  Description of Artificial Sequence: Synthetic peanut, 5' sequence and inner sequence
tagggaagagaaggacatatgatggacgcaacgtaccgtatcgtggccatgca

SEQ ID NO: 1507 - DNA, 53 bp, Artificial Sequence
  Description of Artificial Sequence: Synthetic peanut, 5' sequence and inner sequence
tagggaagagaaggacatatgatcgccccgtcgatacgtcatgcacgctgaca

SEQ ID NO: 1508 - DNA, 53 bp, Artificial Sequence
  Description of Artificial Sequence: Synthetic peanut, 5' sequence and inner sequence
tagggaagagaaggacatatgatcgtgcacagccataacgtacccccgtcacg

SEQ ID NO: 1509 - DNA, 53 bp, Artificial Sequence
  Description of Artificial Sequence: Synthetic peanut, 5' sequence and inner sequence
tagggaagagaaggacatatgatcgcaccgtcgatacgtcaggcacgctgaca

SEQ ID NO: 1510 - DNA, 53 bp, Artificial Sequence
  Description of Artificial Sequence: Synthetic peanut, 5' sequence and inner sequence
tagggaagagaaggacatatgatcacggatgggcgaaacggcttgactgcgtc

SEQ ID NO: 1511 - DNA, 53 bp, Artificial Sequence
  Description of Artificial Sequence: Synthetic peanut, 5' sequence and inner sequence
tagggaagagaaggacatatgatccgaccgcgttgcctagtgatcggtggcca

SEQ ID NO: 1512 - DNA, 53 bp, Artificial Sequence
  Description of Artificial Sequence: Synthetic peanut, 5' sequence and inner sequence
tagggaagagaaggacatatgatcgcaccgtcgatacgtcatgcacgctggca

SEQ ID NO: 1513 - DNA, 53 bp, Artificial Sequence
  Description of Artificial Sequence: Synthetic peanut, 5' sequence and inner sequence
tagggaagagaaggacatatgatcgcaccggcaagtgctacggtctagtcgtg

SEQ ID NO: 1514 - DNA, 53 bp, Artificial Sequence
  Description of Artificial Sequence: Synthetic peanut, 5' sequence and inner sequence
tagggaagagaaggacatatgatcgcaacgaactgatgcaacgcgtaggcatg

SEQ ID NO: 1515 - DNA, 53 bp, Artificial Sequence
  Description of Artificial Sequence: Synthetic peanut, 5' sequence and inner sequence
tagggaagagaaggacatatgatgtcacgcagcgtatcccttcgagtggtgtg

SEQ ID NO: 1516 - DNA, 49 bp, Artificial Sequence
  Description of Artificial Sequence: Synthetic peanut, 5' sequence and inner sequence
tagggaagagaaggacatatgatgacgtgagcacgtaatggcctgcgcg

SEQ ID NO: 1517 - DNA, 53 bp, Artificial Sequence
  Description of Artificial Sequence: Synthetic peanut, 5' sequence and inner sequence
tagggaagagaaggacatatgatgtcatgcacgcacctacacgtgggcacgta

SEQ ID NO: 1518 - DNA, 53 bp, Artificial Sequence
  Description of Artificial Sequence: Synthetic peanut, 5' sequence and inner sequence
tagggaagagaaggacatatgatgtacgtggctgccctgtgcgaatgtacgca

SEQ ID NO: 1519 - DNA, 53 bp, Artificial Sequence
  Description of Artificial Sequence: Synthetic peanut, 5' sequence and inner sequence
tagggaagagaaggacatatgatcacgcagggcacgtggcgttcaccttgcca

SEQ ID NO: 1520 - DNA, 53 bp, Artificial Sequence
  Description of Artificial Sequence: Synthetic peanut, 5' sequence and inner sequence
tagggaagagaaggacatatgatcgtgccaacgacctacgtgccatgcggtca

SEQ ID NO: 1521 - DNA, 53 bp, Artificial Sequence
  Description of Artificial Sequence: Synthetic peanut, 5' sequence and inner sequence
tagggaagagaaggacatatgatccgcacgtagccctatcagttgtgcatgca

SEQ ID NO: 1522 - DNA, 53 bp, Artificial Sequence
  Description of Artificial Sequence: Synthetic peanut, 5' sequence and inner sequence
tagggaagagaaggacatatgattcggaccgcaagtcaggcacgtacgacggt

SEQ ID NO: 1523 - DNA, 53 bp, Artificial Sequence
  Description of Artificial Sequence: Synthetic peanut, 5' sequence and inner sequence
tagggaagagaaggacatatgatgcacgcagcttgccgtagggtggcatggga

SEQ ID NO: 1524 - DNA, 53 bp, Artificial Sequence
  Description of Artificial Sequence: Synthetic peanut, 5' sequence and inner sequence
tagggaagagaaggacatatgatgttgcgaacggaccgttgcgtggttaggga

SEQ ID NO: 1525 - DNA, 53 bp, Artificial Sequence
  Description of Artificial Sequence: Synthetic peanut, 5' sequence and inner sequence
tagggaagagaaggacatatgatcacgcagtgtgtgacgtgtgtgtgttcacg

SEQ ID NO: 1526 - DNA, 53 bp, Artificial Sequence
  Description of Artificial Sequence: Synthetic peanut, 5' sequence and inner sequence
tagggaagagaaggacatatgatcgtcacgccgaggtacgtccttccgccacg

SEQ ID NO: 1527 - DNA, 53 bp, Artificial Sequence
  Description of Artificial Sequence: Synthetic peanut, 5' sequence and inner sequence
tagggaagagaaggacatatgatggacaggctgagcgaacaagtgcatgcacg

SEQ ID NO: 1528 - DNA, 53 bp, Artificial Sequence
  Description of Artificial Sequence: Synthetic peanut, 5' sequence and inner sequence
tagggaagagaaggacatatgatgtcacgacgaaggcctagcaacgtgcgtca

SEQ ID NO: 1529 - DNA, 53 bp, Artificial Sequence
  Description of Artificial Sequence: Synthetic peanut, 5' sequence and inner sequence
tagggaagagaaggacatatgatccatcatggacgacgatggcttagcgtggt

SEQ ID NO: 1530 - DNA, 53 bp, Artificial Sequence
  Description of Artificial Sequence: Synthetic peanut, 5' sequence and inner sequence
tagggaagagaaggacatatgatgtacacacgtaccgccagatcaagtgcaca

SEQ ID NO: 1531 - DNA, 53 bp, Artificial Sequence
  Description of Artificial Sequence: Synthetic peanut, 5' sequence and inner sequence
tagggaagagaaggacatatgatcgatacgcaacgccacgaacatgcctcacg

SEQ ID NO: 1532 - DNA, 53 bp, Artificial Sequence
  Description of Artificial Sequence: Synthetic peanut, 5' sequence and inner sequence
tagggaagagaaggacatatgatcgcaatggacgaattgaccgtgcgtggcca

SEQ ID NO: 1533 - DNA, 53 bp, Artificial Sequence
  Description of Artificial Sequence: Synthetic peanut, 5' sequence and inner sequence
tagggaagagaaggacatatgatcgcagcagtgtgcgtacaatgtcatgcgcg

SEQ ID NO: 1534 - DNA, 53 bp, Artificial Sequence
  Description of Artificial Sequence: Synthetic peanut, 5' sequence and inner sequence
tagggaagagaaggacatatgatcgaacgcgacgatggctcgtgcacttgaca

SEQ ID NO: 1535 - DNA, 53 bp, Artificial Sequence
  Description of Artificial Sequence: Synthetic peanut, 5' sequence and inner sequence
tagggaagagaaggacatatgatccgacgcaaggcaggtacatgtggtgcggt

SEQ ID NO: 1536 - DNA, 53 bp, Artificial Sequence
  Description of Artificial Sequence: Synthetic peanut, 5' sequence and inner sequence
tagggaagagaaggacatatgatcaggcacggagacgctgtgtatacgacgca

SEQ ID NO: 1537 - DNA, 53 bp, Artificial Sequence
  Description of Artificial Sequence: Synthetic peanut, 5' sequence and inner sequence
tagggaagagaaggacatatgatcacgataggcacggcgtatcacagttcggt

SEQ ID NO: 1538 - DNA, 53 bp, Artificial Sequence
  Description of Artificial Sequence: Synthetic peanut, 5' sequence and inner sequence
tagggaagagaaggacatatgatcacgtgttgcgaggcacctgccactgcacg

SEQ ID NO: 1539 - DNA, 53 bp, Artificial Sequence
  Description of Artificial Sequence: Synthetic peanut, 5' sequence and inner sequence
tagggaagagaaggacatatgatcgcatcggaccgtacgtgtactcgtgctgt

SEQ ID NO: 1540 - DNA, 53 bp, Artificial Sequence
  Description of Artificial Sequence: Synthetic peanut, 5' sequence and inner sequence
tagggaagagaaggacatatgatggccgaacgtaacgcctcgtggtcctggca

SEQ ID NO: 1541 - DNA, 53 bp, Artificial Sequence
  Description of Artificial Sequence: Synthetic peanut, 5' sequence and inner sequence
tagggaagagaaggacatatgatgtgcatcgcgaccatgggctggacctgtcc

SEQ ID NO: 1542 - DNA, 53 bp, Artificial Sequence
  Description of Artificial Sequence: Synthetic peanut, 5' sequence and inner sequence
tagggaagagaaggacatatgatcatgctcagtgggaacgtggcccgtgcacg

SEQ ID NO: 1543 - DNA, 53 bp, Artificial Sequence
  Description of Artificial Sequence: Synthetic peanut, 5' sequence and inner sequence
tagggaagagaaggacatatgatcgcaccgtcaatacgtcatgcacgctgaca

SEQ ID NO: 1544 - DNA, 53 bp, Artificial Sequence
  Description of Artificial Sequence: Synthetic peanut, 5' sequence and inner sequence
tagggaagagaaggacatatgatcgcgcacatgatcgtcactcctgctgcacc

SEQ ID NO: 1545 - DNA, 53 bp, Artificial Sequence
  Description of Artificial Sequence: Synthetic peanut, 5' sequence and inner sequence
tagggaagagaaggacatatgatcgcaccgacgagtgggcttaacgtgtcacg

SEQ ID NO: 1546 - DNA, 53 bp, Artificial Sequence
  Description of Artificial Sequence: Synthetic peanut, 5' sequence and inner sequence
tagggaagagaaggacatatgatcacacaaggcacacgtgacatatcgtcgcg

SEQ ID NO: 1547 - DNA, 53 bp, Artificial Sequence
  Description of Artificial Sequence: Synthetic peanut, 5' sequence and inner sequence
tagggaagagaaggacatatgatcatgatgcaggctaagtcgcactcgccacg

SEQ ID NO: 1548 - DNA, 53 bp, Artificial Sequence
  Description of Artificial Sequence: Synthetic peanut, 5' sequence and inner sequence
tagggaagagaaggacatatgatccatatggcagtgcgatggcttcgctggtc

SEQ ID NO: 1549 - DNA, 52 bp, Artificial Sequence
  Description of Artificial Sequence: Synthetic peanut, 5' sequence and inner sequence
tagggaagagaaggacatatgatcgtacgacacgacagacatgcacgacgca

SEQ ID NO: 1550 - DNA, 53 bp, Artificial Sequence
  Description of Artificial Sequence: Synthetic peanut, 5' sequence and inner sequence
tagggaagagaaggacatatgatcgtgagggcaaatgcacgacaacacgcgca

SEQ ID NO: 1551 - DNA, 53 bp, Artificial Sequence
  Description of Artificial Sequence: Synthetic peanut, 5' sequence and inner sequence
tagggaagagaaggacatatgatcgtgcgatgtgcgtatcgagtgcgtgtgga

SEQ ID NO: 1552 - DNA, 53 bp, Artificial Sequence
  Description of Artificial Sequence: Synthetic peanut, 5' sequence and inner sequence
tagggaagagaaggacatatgatgtgcacaacgtaccgctcacgtggccacgt

SEQ ID NO: 1553 - DNA, 53 bp, Artificial Sequence
  Description of Artificial Sequence: Synthetic peanut, 5' sequence and inner sequence
tagggaagagaaggacatatgatccgcacgtagccctatcagtggcgcatgca

SEQ ID NO: 1554 - DNA, 53 bp, Artificial Sequence
  Description of Artificial Sequence: Synthetic peanut, 5' sequence and inner sequence
tagggaagagaaggacatatgatcgtgccgcacaaagcatgacctcgttgtgc

SEQ ID NO: 1555 - DNA, 53 bp, Artificial Sequence
  Description of Artificial Sequence: Synthetic peanut, 5' sequence and inner sequence
tagggaagagaaggacatatgatcgacatggaacgcaggtctgcacgttgacc

SEQ ID NO: 1556 - DNA, 53 bp, Artificial Sequence
  Description of Artificial Sequence: Synthetic peanut, 5' sequence and inner sequence
tagggaagagaaggacatatgatgcatgccgtgtcgtcccaaccagctgggca

SEQ ID NO: 1557 - DNA, 53 bp, Artificial Sequence
  Description of Artificial Sequence: Synthetic peanut, 5' sequence and inner sequence
tagggaagagaaggacatatgatcgacacgagatcaagccgtcatgatgcggt

SEQ ID NO: 1558 - DNA, 53 bp, Artificial Sequence
  Description of Artificial Sequence: Synthetic peanut, 5' sequence and inner sequence
tagggaagagaaggacatatgatcgtggcagcaacaccggtacgcagttcgtg

SEQ ID NO: 1559 - DNA, 53 bp, Artificial Sequence
  Description of Artificial Sequence: Synthetic peanut, 5' sequence and inner sequence
tagggaagagaaggacatatgatccgcacgtagccctatcagtgttgcatgca

SEQ ID NO: 1560 - DNA, 53 bp, Artificial Sequence
  Description of Artificial Sequence: Synthetic peanut, 5' sequence and inner sequence
tagggaagagaaggacatatgatgtcattccgcatcctacacgtgggtatgga

SEQ ID NO: 1561 - DNA, 53 bp, Artificial Sequence
  Description of Artificial Sequence: Synthetic peanut, 5' sequence and inner sequence
tagggaagagaaggacatatgatcccaccgtcgatacgtcatgcacgctgaca

SEQ ID NO: 1562 - DNA, 53 bp, Artificial Sequence
  Description of Artificial Sequence: Synthetic peanut, 5' sequence and inner sequence
tagggaagagaaggacatatgatcgcggacagacaccacgtatgtcacggaca

SEQ ID NO: 1563 - DNA, 53 bp, Artificial Sequence
  Description of Artificial Sequence: Synthetic peanut, 5' sequence and inner sequence
tagggaagagaaggacatatgattggcctgacgtgccctgacatgctgcgtca

SEQ ID NO: 1564 - DNA, 53 bp, Artificial Sequence
  Description of Artificial Sequence: Synthetic peanut, 5' sequence and inner sequence
tagggaagagaaggacatatgatccgtgtggacgacaactactgccatgcgca

SEQ ID NO: 1565 - DNA, 53 bp, Artificial Sequence
  Description of Artificial Sequence: Synthetic peanut, 5' sequence and inner sequence
tagggaagagaaggacatatgatcgcaccaatgcacacgtgacatgatgcacg

SEQ ID NO: 1566 - DNA, 53 bp, Artificial Sequence
  Description of Artificial Sequence: Synthetic peanut, 5' sequence and inner sequence
tagggaagagaaggacatatgatgcgcagcagggaagcaggccacactacgtg

SEQ ID NO: 1567 - DNA, 53 bp, Artificial Sequence
  Description of Artificial Sequence: Synthetic peanut, 5' sequence and inner sequence
tagggaagagaaggacatatgattcgatgaccgcgagtgggacgtgcacgtgc

SEQ ID NO: 1568 - DNA, 53 bp, Artificial Sequence
  Description of Artificial Sequence: Synthetic peanut, 5' sequence and inner sequence
tagggaagagaaggacatatgatcacaccgcggaagtgacgtgcaccaacgtg

SEQ ID NO: 1569 - DNA, 53 bp, Artificial Sequence
  Description of Artificial Sequence: Synthetic peanut, 5' sequence and inner sequence
tagggaagagaaggacatatgatcacgtacgcacaacgtggcttgacggtgta

SEQ ID NO: 1570 - DNA, 53 bp, Artificial Sequence
  Description of Artificial Sequence: Synthetic peanut, 5' sequence and inner sequence
tagggaagagaaggacatatgatgcactgagcgtaccgaggaggcggtgtgtc

SEQ ID NO: 1571 - DNA, 53 bp, Artificial Sequence
  Description of Artificial Sequence: Synthetic peanut, 5' sequence and inner sequence
tagggaagagaaggacatatgatcgacgcacacggcaagaccacactgcgatc

SEQ ID NO: 1572 - DNA, 53 bp, Artificial Sequence
  Description of Artificial Sequence: Synthetic peanut, 5' sequence and inner sequence
tagggaagagaaggacatatgatgacgcaacgacctgagtggacacggacgta

SEQ ID NO: 1573 - DNA, 53 bp, Artificial Sequence
  Description of Artificial Sequence: Synthetic peanut, 5' sequence and inner sequence
tagggaagagaaggacatatgatggcctgcgatggatgtgtgcgtgtacgacg

SEQ ID NO: 1574 - DNA, 53 bp, Artificial Sequence
  Description of Artificial Sequence: Synthetic peanut, 5' sequence and inner sequence
tagggaagagaaggacatatgatcacatcacgcactctgagcgtaacgtgggt

SEQ ID NO: 1575 - DNA, 53 bp, Artificial Sequence
  Description of Artificial Sequence: Synthetic peanut, 5' sequence and inner sequence
tagggaagagaaggacatatgatacgtcccacacgacacgtggtatgtgcatg

SEQ ID NO: 1576 - DNA, 53 bp, Artificial Sequence
  Description of Artificial Sequence: Synthetic peanut, 5' sequence and inner sequence
tagggaagagaaggacatatgatcgcatcgtcgatacgtcatgcacgctgaca

SEQ ID NO: 1577 - DNA, 53 bp, Artificial Sequence
  Description of Artificial Sequence: Synthetic peanut, 5' sequence and inner sequence
tagggaagagaaggacatatgatggcctgcgatggatgtggggatgcactgtc

SEQ ID NO: 1578 - DNA, 53 bp, Artificial Sequence
  Description of Artificial Sequence: Synthetic peanut, 5' sequence and inner sequence
tagggaagagaaggacatatgatcacggcagggtatgtgacacagcctgcacg

SEQ ID NO: 1579 - DNA, 53 bp, Artificial Sequence
  Description of Artificial Sequence: Synthetic peanut, 5' sequence and inner sequence
tagggaagagaaggacatatgatggccgaaacgacgtggtgagtacgcagcca

SEQ ID NO: 1580 - DNA, 53 bp, Artificial Sequence
  Description of Artificial Sequence: Synthetic peanut, 5' sequence and inner sequence
tagggaagagaaggacatatgatccgtagcgacatcaagcggtggtgtgagtg

SEQ ID NO: 1581 - DNA, 53 bp, Artificial Sequence
  Description of Artificial Sequence: Synthetic peanut, 5' sequence and inner sequence
tagggaagagaaggacatatgatgcgttcgataccctatgtggcctgtacgtg

SEQ ID NO: 1582 - DNA, 53 bp, Artificial Sequence
  Description of Artificial Sequence: Synthetic peanut, 5' sequence and inner sequence
tagggaagagaaggacatatgatgtgcttggatccctatcaggtggacgtgta

SEQ ID NO: 1583 - DNA, 53 bp, Artificial Sequence
  Description of Artificial Sequence: Synthetic peanut, 5' sequence and inner sequence
tagggaagagaaggacatatgatcgcaccgtcgatacgtcatgcccgctgaca

SEQ ID NO: 1584 - DNA, 53 bp, Artificial Sequence
  Description of Artificial Sequence: Synthetic peanut, 5' sequence and inner sequence
tagggaagagaaggacatatgatcgtgggacgcgaaggatgtgacactgcgtg

SEQ ID NO: 1585 - DNA, 53 bp, Artificial Sequence
  Description of Artificial Sequence: Synthetic peanut, 5' sequence and inner sequence
tagggaagagaaggacatatgatcgaaccgcaacggtggtcctgcccttgaca

SEQ ID NO: 1586 - DNA, 53 bp, Artificial Sequence
  Description of Artificial Sequence: Synthetic peanut, 5' sequence and inner sequence
tagggaagagaaggacatatgatgcgcctgaacgtagcgaaaggtggtgcatg

SEQ ID NO: 1587 - DNA, 53 bp, Artificial Sequence
  Description of Artificial Sequence: Synthetic peanut, 5' sequence and inner sequence
tagggaagagaaggacatatgatcacaacgcacacgggctgactgactgcgtg

SEQ ID NO: 1588 - DNA, 53 bp, Artificial Sequence
  Description of Artificial Sequence: Synthetic peanut, 5' sequence and inner sequence
tagggaagagaaggacatatgatcgcaacggcaggcagagtgaatgtggcgtg

SEQ ID NO: 1589 - DNA, 53 bp, Artificial Sequence
  Description of Artificial Sequence: Synthetic peanut, 5' sequence and inner sequence
tagggaagagaaggacatatgatcgacgcggaaggcacggactgaccgtcaca

SEQ ID NO: 1590 - DNA, 53 bp, Artificial Sequence
  Description of Artificial Sequence: Synthetic peanut, 5' sequence and inner sequence
tagggaagagaaggacatatgatcacgtggcacggtgctatacggcattcgca

SEQ ID NO: 1591 - DNA, 53 bp, Artificial Sequence
  Description of Artificial Sequence: Synthetic peanut, 5' sequence and inner sequence
tagggaagagaaggacatatgatgccatgcacgaacactatcatggcggcatg

SEQ ID NO: 1592 - DNA, 53 bp, Artificial Sequence
  Description of Artificial Sequence: Synthetic peanut, 5' sequence and inner sequence
tagggaagagaaggacatatgatggcagcaggacatcacacatgcacttcgca

SEQ ID NO: 1593 - DNA, 53 bp, Artificial Sequence
  Description of Artificial Sequence: Synthetic peanut, 5' sequence and inner sequence
tagggaagagaaggacatatgatcgtgcagtggcaacggtccgacgcaacaca

SEQ ID NO: 1594 - DNA, 53 bp, Artificial Sequence
  Description of Artificial Sequence: Synthetic peanut, 5' sequence and inner sequence
tagggaagagaaggacatatgatcgataccgccactacgacatgcacggcgta

SEQ ID NO: 1595 - DNA, 53 bp, Artificial Sequence
  Description of Artificial Sequence: Synthetic peanut, 5' sequence and inner sequence
tagggaagagaaggacatatgatccgtagcgacatcaagcgatggtgtgcgtg

SEQ ID NO: 1596 - DNA, 53 bp, Artificial Sequence
  Description of Artificial Sequence: Synthetic peanut, 5' sequence and inner sequence
tagggaagagaaggacatatgatcgtatggctgggatcgtacctacgtggaca

SEQ ID NO: 1597 - DNA, 53 bp, Artificial Sequence
  Description of Artificial Sequence: Synthetic peanut, 5' sequence and inner sequence
tagggaagagaaggacatatgatcgcacactgtgagggcatgtggcacgcagt

SEQ ID NO: 1598 - DNA, 53 bp, Artificial Sequence
  Description of Artificial Sequence: Synthetic peanut, 5' sequence and inner sequence
tagggaagagaaggacatatgatcgcaccgtcgatacgtcatgcacgctgacg

SEQ ID NO: 1599 - DNA, 53 bp, Artificial Sequence
  Description of Artificial Sequence: Synthetic peanut, 5' sequence and inner sequence
tagggaagagaaggacatatgatcgcaccgtcgatacgtcaagcacgctgaca

SEQ ID NO: 1600 - DNA, 53 bp, Artificial Sequence
  Description of Artificial Sequence: Synthetic peanut, 5' sequence and inner sequence
tagggaagagaaggacatatgatgcacatggccaacatgcagcaccgtccgca

SEQ ID NO: 1601 - DNA, 53 bp, Artificial Sequence
  Description of Artificial Sequence: Synthetic peanut, 5' sequence and inner sequence
tagggaagagaaggacatatgatcgaccatgcaacgaggtgatgtctgtcgcg

SEQ ID NO: 1602 - DNA, 53 bp, Artificial Sequence
  Description of Artificial Sequence: Synthetic peanut, 5' sequence and inner sequence
tagggaagagaaggacatatgatcacacacgcaatgtcatcatgttgtgcaca

SEQ ID NO: 1603 - DNA, 53 bp, Artificial Sequence
  Description of Artificial Sequence: Synthetic peanut, 5' sequence and inner sequence
tagggaagagaaggacatatgatcgcaccgtcgacacgtcatgcacgctgaca

SEQ ID NO: 1604 - DNA, 53 bp, Artificial Sequence
  Description of Artificial Sequence: Synthetic peanut, 5' sequence and inner sequence
tagggaagagaaggacatatgatcacgcggcacgatacgtcaggtccgatgca

SEQ ID NO: 1605 - DNA, 53 bp, Artificial Sequence
  Description of Artificial Sequence: Synthetic peanut, 5' sequence and inner sequence
tagggaagagaaggacatatgatcgacgcgtagcaaggatgccctgatgcaca

SEQ ID NO: 1606 - DNA, 53 bp, Artificial Sequence
  Description of Artificial Sequence: Synthetic peanut, 5' sequence and inner sequence
tagggaagagaaggacatatgatcgtaccgcagctagacacggcatgggcaca

SEQ ID NO: 1607 - DNA, 53 bp, Artificial Sequence
  Description of Artificial Sequence: Synthetic peanut, 5' sequence and inner sequence
tagggaagagaaggacatatgatgtgacgcagcaacatcaacaggctgtcgca

SEQ ID NO: 1608 - DNA, 53 bp, Artificial Sequence
  Description of Artificial Sequence: Synthetic peanut, 5' sequence and inner sequence
tagggaagagaaggacatatgatcgtaccgaacaggggacgtacgtagacacg

SEQ ID NO: 1609 - DNA, 53 bp, Artificial Sequence
  Description of Artificial Sequence: Synthetic peanut, 5' sequence and inner sequence
tagggaagagaaggacatatgatgcgtacacggatcagcacagctactgcaca

SEQ ID NO: 1610 - DNA, 53 bp, Artificial Sequence
  Description of Artificial Sequence: Synthetic peanut, 5' sequence and inner sequence
tagggaagagaaggacatatgatggcaacgcacatcgtatcacgcatcggacc

SEQ ID NO: 1611 - DNA, 53 bp, Artificial Sequence
  Description of Artificial Sequence: Synthetic peanut, 5' sequence and inner sequence
tagggaagagaaggacatatgatgtcattccgcatcctacacgtgggcacgca

SEQ ID NO: 1612 - DNA, 53 bp, Artificial Sequence
  Description of Artificial Sequence: Synthetic peanut, 5' sequence and inner sequence
tagggaagagaaggacatatgatcacgatacgtcaaggcatcactccgtcgca

SEQ ID NO: 1613 - DNA, 53 bp, Artificial Sequence
  Description of Artificial Sequence: Synthetic peanut, 5' sequence and inner sequence
tagggaagagaaggacatatgatgtcgtgaggcgaaccgtcatgcactgcgtg

SEQ ID NO: 1614 - DNA, 53 bp, Artificial Sequence
  Description of Artificial Sequence: Synthetic peanut, 5' sequence and inner sequence
tagggaagagaaggacatatgatcatgcacgctagagcacatcacgctgcgcg

SEQ ID NO: 1615 - DNA, 53 bp, Artificial Sequence
  Description of Artificial Sequence: Synthetic peanut, 5' sequence and inner sequence
tagggaagagaaggacatatgatgcactactcgcaccctatcatgaggccatg

SEQ ID NO: 1616 - DNA, 53 bp, Artificial Sequence
  Description of Artificial Sequence: Synthetic peanut, 5' sequence and inner sequence
tagggaagagaaggacatatgatggcgtacgatggatgtgcgttgtgtctgtc

SEQ ID NO: 1617 - DNA, 53 bp, Artificial Sequence
  Description of Artificial Sequence: Synthetic peanut, 5' sequence and inner sequence
tagggaagagaaggacatatgatgtcgtgcacgaacactatcatggcggcatg

SEQ ID NO: 1618 - DNA, 53 bp, Artificial Sequence
  Description of Artificial Sequence: Synthetic peanut, 5' sequence and inner sequence
tagggaagagaaggacatatgatacgcaacggtgactgcatcgtacgtgcaca

SEQ ID NO: 1619 - DNA, 53 bp, Artificial Sequence
  Description of Artificial Sequence: Synthetic peanut, 5' sequence and inner sequence
tagggaagagaaggacatatgatccgtagcgacatcaagcggtagtgtgcgtg

SEQ ID NO: 1620 - DNA, 53 bp, Artificial Sequence
  Description of Artificial Sequence: Synthetic peanut, 5' sequence and inner sequence
tagggaagagaaggacatatgatcgtacgtaccgcgcctacatgtggcaggga

SEQ ID NO: 1621 - DNA, 53 bp, Artificial Sequence
  Description of Artificial Sequence: Synthetic peanut, 5' sequence and inner sequence
tagggaagagaaggacatatgatggacacagcgtaccattcaagtgatgcacg

SEQ ID NO: 1622 - DNA, 53 bp, Artificial Sequence
  Description of Artificial Sequence: Synthetic peanut, 5' sequence and inner sequence
tagggaagagaaggacatatgatgtcatgcacgaacactatcatgtcggcatg

SEQ ID NO: 1623 - DNA, 53 bp, Artificial Sequence
  Description of Artificial Sequence: Synthetic peanut, 5' sequence and inner sequence
tagggaagagaaggacatatgatgcacgtggcagcgagcacacttacggcaca

SEQ ID NO: 1624 - DNA, 53 bp, Artificial Sequence
  Description of Artificial Sequence: Synthetic peanut, 5' sequence and inner sequence
tagggaagagaaggacatatgatcgcaccgcaccgacagtggggacgtatgca

SEQ ID NO: 1625 - DNA, 53 bp, Artificial Sequence
  Description of Artificial Sequence: Synthetic peanut, 5' sequence and inner sequence
tagggaagagaaggacatatgatggacggaacggaacaacaagggcaggcatg

SEQ ID NO: 1626 - DNA, 53 bp, Artificial Sequence
  Description of Artificial Sequence: Synthetic peanut, 5' sequence and inner sequence
tagggaagagaaggacatatgatcgacgagcaggcagaacgtcttccgtcacg

SEQ ID NO: 1627 - DNA, 53 bp, Artificial Sequence
  Description of Artificial Sequence: Synthetic peanut, 5' sequence and inner sequence
tagggaagagaaggacatatgatgccacacagatgacgtatcgtacgtcgcgt

SEQ ID NO: 1628 - DNA, 53 bp, Artificial Sequence
  Description of Artificial Sequence: Synthetic peanut, 5' sequence and inner sequence
tagggaagagaaggacatatgatggacgcgatgaccgtatcgtggttgtgtca

SEQ ID NO: 1629 - DNA, 53 bp, Artificial Sequence
  Description of Artificial Sequence: Synthetic peanut, 5' sequence and inner sequence
tagggaagagaaggacatatgatgcacaccacgaacataaggtggcatgcaca

SEQ ID NO: 1630 - DNA, 53 bp, Artificial Sequence
  Description of Artificial Sequence: Synthetic peanut, 5' sequence and inner sequence
tagggaagagaaggacatatgatgcatgtgacggcgatctgaccgcgtggaca

SEQ ID NO: 1631 - DNA, 53 bp, Artificial Sequence
  Description of Artificial Sequence: Synthetic peanut, 5' sequence and inner sequence
tagggaagagaaggacatatgatggccgacctggatgtgagcatgcatctagt

SEQ ID NO: 1632 - DNA, 53 bp, Artificial Sequence
  Description of Artificial Sequence: Synthetic peanut, 5' sequence and inner sequence
tagggaagagaaggacatatgatggcatgcacgcacctacacgttggcacgta

SEQ ID NO: 1633 - DNA, 53 bp, Artificial Sequence
  Description of Artificial Sequence: Synthetic peanut, 5' sequence and inner sequence
tagggaagagaaggacatatgatggccgaaacggatgtggccttgtgctacgc

SEQ ID NO: 1634 - DNA, 53 bp, Artificial Sequence
  Description of Artificial Sequence: Synthetic peanut, 5' sequence and inner sequence
tagggaagagaaggacatatgatccgtagcgacatcaagcggtggagtgcgtg

SEQ ID NO: 1635 - DNA, 53 bp, Artificial Sequence
  Description of Artificial Sequence: Synthetic peanut, 5' sequence and inner sequence
tagggaagagaaggacatatgatggccaagctggatgtgttcaggtcacgacg

SEQ ID NO: 1636 - DNA, 53 bp, Artificial Sequence
  Description of Artificial Sequence: Synthetic peanut, 5' sequence and inner sequence
tagggaagagaaggacatatgatgtgctgcgatgggacgtggtaaggtgcatg

SEQ ID NO: 1637 - DNA, 53 bp, Artificial Sequence
  Description of Artificial Sequence: Synthetic peanut, 5' sequence and inner sequence
tagggaagagaaggacatatgatggcatgcacgcacctacacgttggtatgga

SEQ ID NO: 1638 - DNA, 53 bp, Artificial Sequence
  Description of Artificial Sequence: Synthetic peanut, 5' sequence and inner sequence
tagggaagagaaggacatatgatcgcggaccggcaacgtgatggcaatgcaca

SEQ ID NO: 1639 - DNA, 53 bp, Artificial Sequence
  Description of Artificial Sequence: Synthetic peanut, 5' sequence and inner sequence
tagggaagagaaggacatatgatcacgcacgaacgagactgctaccatgtgca

SEQ ID NO: 1640 - DNA, 53 bp, Artificial Sequence
  Description of Artificial Sequence: Synthetic peanut, 5' sequence and inner sequence
tagggaagagaaggacatatgattcgtgtgccgtaacagccctacagtgcgtc

SEQ ID NO: 1641 - DNA, 53 bp, Artificial Sequence
  Description of Artificial Sequence: Synthetic peanut, 5' sequence and inner sequence
tagggaagagaaggacatatgatcgtgcatgcacagtgccgtacagttgtgcg

SEQ ID NO: 1642 - DNA, 52 bp, Artificial Sequence
  Description of Artificial Sequence: Synthetic peanut, 5' sequence and inner sequence
tagggaagagaaggacatatgatggcctgcgatggatgtggttgtgctcgtc

SEQ ID NO: 1643 - DNA, 53 bp, Artificial Sequence
  Description of Artificial Sequence: Synthetic peanut, 5' sequence and inner sequence
tagggaagagaaggacatatgatcgtgccaggcagatcgatgtgttgccgatg

SEQ ID NO: 1644 - DNA, 53 bp, Artificial Sequence
  Description of Artificial Sequence: Synthetic peanut, 5' sequence and inner sequence
tagggaagagaaggacatatgatccgtagcgacatcaagcggtggtgtgcttg

SEQ ID NO: 1645 - DNA, 53 bp, Artificial Sequence
  Description of Artificial Sequence: Synthetic peanut, 5' sequence and inner sequence
tagggaagagaaggacatatgattggccgaagcgcacctacacgtgtcaggta

SEQ ID NO: 1646 - DNA, 53 bp, Artificial Sequence
  Description of Artificial Sequence: Synthetic peanut, 5' sequence and inner sequence
tagggaagagaaggacatatgatagcaccgtcgatacgtcatgcacgctgaca

SEQ ID NO: 1647 - DNA, 53 bp, Artificial Sequence
  Description of Artificial Sequence: Synthetic peanut, 5' sequence and inner sequence
tagggaagagaaggacatatgatgcacgactcgcaccctatcatgagtccatg

SEQ ID NO: 1648 - DNA, 52 bp, Artificial Sequence
  Description of Artificial Sequence: Synthetic peanut, 5' sequence and inner sequence
tagggaagagaaggacatatgatgtgcgaccgaccctatcaagtgcagcatg

SEQ ID NO: 1649 - DNA, 53 bp, Artificial Sequence
  Description of Artificial Sequence: Synthetic peanut, 5' sequence and inner sequence
tagggaagagaaggacatatgatcgatgcgcagtcaaccactgtgatgcgacg

SEQ ID NO: 1650 - DNA, 53 bp, Artificial Sequence
  Description of Artificial Sequence: Synthetic peanut, 5' sequence and inner sequence
tagggaagagaaggacatatgatcacgtggcaaggacgtggaggtggtgagca

SEQ ID NO: 1651 - DNA, 53 bp, Artificial Sequence
  Description of Artificial Sequence: Synthetic peanut, 5' sequence and inner sequence
tagggaagagaaggacatatgatcacgcgagggagcaccgttgcttacgcaca

SEQ ID NO: 1652 - DNA, 54 bp, Artificial Sequence
  Description of Artificial Sequence: Synthetic peanut, 5' sequence and inner sequence
tagggaagagaaggacatatgattggcgtgcacaggagcagtcatacgtacgca

SEQ ID NO: 1653 - DNA, 53 bp, Artificial Sequence
  Description of Artificial Sequence: Synthetic peanut, 5' sequence and inner sequence
tagggaagagaaggacatatgatccgcacgtagccctatcattggtgcatgca

SEQ ID NO: 1654 - DNA, 53 bp, Artificial Sequence
  Description of Artificial Sequence: Synthetic peanut, 5' sequence and inner sequence
tagggaagagaaggacatatgatggccaaacggaacgtagcacgggggacgta

SEQ ID NO: 1655 - DNA, 53 bp, Artificial Sequence
  Description of Artificial Sequence: Synthetic peanut, 5' sequence and inner sequence
tagggaagagaaggacatatgatcgtgcgtgcggggaaggcgtgtgttacgca

SEQ ID NO: 1656 - DNA, 53 bp, Artificial Sequence
  Description of Artificial Sequence: Synthetic peanut, 5' sequence and inner sequence
tagggaagagaaggacatatgatcgacgggcacacgtgatcttgtaccgcgca

SEQ ID NO: 1657 - DNA, 53 bp, Artificial Sequence
  Description of Artificial Sequence: Synthetic peanut, 5' sequence and inner sequence
tagggaagagaaggacatatgatggacgcgatgggcgtgggtatgcacttggc

SEQ ID NO: 1658 - DNA, 53 bp, Artificial Sequence
  Description of Artificial Sequence: Synthetic peanut, 5' sequence and inner sequence
tagggaagagaaggacatatgatccgttacggaacaggtgatcgtcctgcaca

SEQ ID NO: 1659 - DNA, 54 bp, Artificial Sequence
  Description of Artificial Sequence: Synthetic peanut, 5' sequence and inner sequence
tagggaagagaaggacatatgatggccgtacgatggatgtgggttgtgctcgtc

SEQ ID NO: 1660 - DNA, 53 bp, Artificial Sequence
  Description of Artificial Sequence: Synthetic peanut, 5' sequence and inner sequence
tagggaagagaaggacatatgatcgatggcaagctcgtccatacaatgcgtca

SEQ ID NO: 1661 - DNA, 53 bp, Artificial Sequence
  Description of Artificial Sequence: Synthetic peanut, 5' sequence and inner sequence
tagggaagagaaggacatatgatgtcattccgcatcctacatgtgggcacgta

SEQ ID NO: 1662 - DNA, 53 bp, Artificial Sequence
  Description of Artificial Sequence: Synthetic peanut, 5' sequence and inner sequence
tagggaagagaaggacatatgatggcatgcacgcacctacacgtgtgtatgga

SEQ ID NO: 1663 - DNA, 53 bp, Artificial Sequence
  Description of Artificial Sequence: Synthetic peanut, 5' sequence and inner sequence
tagggaagagaaggacatatgattgcgtcacatggccgtatcttagcgtgtcg

SEQ ID NO: 1664 - DNA, 53 bp, Artificial Sequence
  Description of Artificial Sequence: Synthetic peanut, 5' sequence and inner sequence
tagggaagagaaggacatatgatcgatgcgctgtggaaggagtgtggcacgta

SEQ ID NO: 1665 - DNA, 53 bp, Artificial Sequence
  Description of Artificial Sequence: Synthetic peanut, 5' sequence and inner sequence
tagggaagagaaggacatatgatgacatgacgtgaccgaacgtgtacggggca

SEQ ID NO: 1666 - DNA, 53 bp, Artificial Sequence
  Description of Artificial Sequence: Synthetic peanut, 5' sequence and inner sequence
tagggaagagaaggacatatgatcgcaccgtcaagcgggaaggcactttggcg

SEQ ID NO: 1667 - DNA, 53 bp, Artificial Sequence
  Description of Artificial Sequence: Synthetic peanut, 5' sequence and inner sequence
tagggaagagaaggacatatgatcgcatcgcaggtacggctggtagctaggca

SEQ ID NO: 1668 - DNA, 53 bp, Artificial Sequence
  Description of Artificial Sequence: Synthetic peanut, 5' sequence and inner sequence
tagggaagagaaggacatatgatcgcaccatggcacagtcacgcacgcgtcga

SEQ ID NO: 1669 - DNA, 53 bp, Artificial Sequence
  Description of Artificial Sequence: Synthetic peanut, 5' sequence and inner sequence
tagggaagagaaggacatatgatcgaccagggcagggacagggacagtgcatg

SEQ ID NO: 1670 - DNA, 53 bp, Artificial Sequence
  Description of Artificial Sequence: Synthetic peanut, 5' sequence and inner sequence
tagggaagagaaggacatatgatcgtaccgcaagtcggtcgtgcattacggtc

SEQ ID NO: 1671 - DNA, 53 bp, Artificial Sequence
  Description of Artificial Sequence: Synthetic peanut, 5' sequence and inner sequence
tagggaagagaaggacatatgattggacagcgctgatcaggcaacgtggtgca

SEQ ID NO: 1672 - DNA, 53 bp, Artificial Sequence
  Description of Artificial Sequence: Synthetic peanut, 5' sequence and inner sequence
tagggaagagaaggacatatgatcgttgcgcaagtgacgtcgtgtctgcgaca

SEQ ID NO: 1673 - DNA, 53 bp, Artificial Sequence
  Description of Artificial Sequence: Synthetic peanut, 5' sequence and inner sequence
tagggaagagaaggacatatgatggacgcaccgaaccgcaagccaagtgagca

SEQ ID NO: 1674 - DNA, 53 bp, Artificial Sequence
  Description of Artificial Sequence: Synthetic peanut, 5' sequence and inner sequence
tagggaagagaaggacatatgatcgcaacggcatgcctcttccatgctgcgca

SEQ ID NO: 1675 - DNA, 53 bp, Artificial Sequence
  Description of Artificial Sequence: Synthetic peanut, 5' sequence and inner sequence
tagggaagagaaggacatatgatcgtgcacgagtacggcaatgtctttgcgtg

SEQ ID NO: 1676 - DNA, 53 bp, Artificial Sequence
  Description of Artificial Sequence: Synthetic peanut, 5' sequence and inner sequence
tagggaagagaaggacatatgatgcgtgcagcgtgtcccgatggatgtcgtca

SEQ ID NO: 1677 - DNA, 53 bp, Artificial Sequence
  Description of Artificial Sequence: Synthetic peanut, 5' sequence and inner sequence
tagggaagagaaggacatatgatcgtaccgtgactgggcatgcactcacgtca

SEQ ID NO: 1678 - DNA, 53 bp, Artificial Sequence
  Description of Artificial Sequence: Synthetic peanut, 5' sequence and inner sequence
tagggaagagaaggacatatgatccgtagctacatcaagcggtggtgtgcgtg

SEQ ID NO: 1679 - DNA, 53 bp, Artificial Sequence
  Description of Artificial Sequence: Synthetic peanut, 5' sequence and inner sequence
tagggaagagaaggacatatgatcgtggctgacaagtgcgtgatgactgcgta

SEQ ID NO: 1680 - DNA, 53 bp, Artificial Sequence
  Description of Artificial Sequence: Synthetic peanut, 5' sequence and inner sequence
tagggaagagaaggacatatgatgtcatgcgctgggtagtgatcacgtacggt

SEQ ID NO: 1681 - DNA, 53 bp, Artificial Sequence
  Description of Artificial Sequence: Synthetic peanut, 5' sequence and inner sequence
tagggaagagaaggacatatgatcgacacgagtacgtcatcgttgcaggcatg

SEQ ID NO: 1682 - DNA, 53 bp, Artificial Sequence
  Description of Artificial Sequence: Synthetic peanut, 5' sequence and inner sequence
tagggaagagaaggacatatgatccaccgatggaccgtagtcgtaccgtcacg

SEQ ID NO: 1683 - DNA, 53 bp, Artificial Sequence
  Description of Artificial Sequence: Synthetic peanut, 5' sequence and inner sequence
tagggaagagaaggacatatgatcgcaccgtcgatacgtcatacacgctgaca

SEQ ID NO: 1684 - DNA, 53 bp, Artificial Sequence
  Description of Artificial Sequence: Synthetic peanut, 5' sequence and inner sequence
tagggaagagaaggacatatgatgtccttccgcatcctacacgtgggcacgta

SEQ ID NO: 1685 - DNA, 53 bp, Artificial Sequence
  Description of Artificial Sequence: Synthetic peanut, 5' sequence and inner sequence
tagggaagagaaggacatatgatcctcacgtagccctatcagtggtgcatgca

SEQ ID NO: 1686 - DNA, 53 bp, Artificial Sequence
  Description of Artificial Sequence: Synthetic peanut, 5' sequence and inner sequence
tagggaagagaaggacatatgatcccatcgcatgactgaacgcgtccgtgggc

SEQ ID NO: 1687 - DNA, 53 bp, Artificial Sequence
  Description of Artificial Sequence: Synthetic peanut, 5' sequence and inner sequence
tagggaagagaaggacatatgatgcattggcgtgacatcgtaccgacggcatg

SEQ ID NO: 1688 - DNA, 53 bp, Artificial Sequence
  Description of Artificial Sequence: Synthetic peanut, 5' sequence and inner sequence
tagggaagagaaggacatatgatcatgcaaggcgacgtgcagcatccttcgca

SEQ ID NO: 1689 - DNA, 52 bp, Artificial Sequence
  Description of Artificial Sequence: Synthetic peanut, 5' sequence and inner sequence
tagggaagagaaggacatatgatcgacatgacccaggcgacgtgactgcatg

SEQ ID NO: 1690 - DNA, 53 bp, Artificial Sequence
  Description of Artificial Sequence: Synthetic peanut, 5' sequence and inner sequence
tagggaagagaaggacatatgatcacgtcaggcaaagggacgtatgcccaccg

SEQ ID NO: 1691 - DNA, 53 bp, Artificial Sequence
  Description of Artificial Sequence: Synthetic peanut, 5' sequence and inner sequence
tagggaagagaaggacatatgattgcaccggcactgacggactgagctgcacg

SEQ ID NO: 1692 - DNA, 53 bp, Artificial Sequence
  Description of Artificial Sequence: Synthetic peanut, 5' sequence and inner sequence
tagggaagagaaggacatatgatggccggaacgaaacgcggggccatgcacta

SEQ ID NO: 1693 - DNA, 53 bp, Artificial Sequence
  Description of Artificial Sequence: Synthetic peanut, 5' sequence and inner sequence
tagggaagagaaggacatatgatgcatgacgagaacgcacatgccgatgcaca

SEQ ID NO: 1694 - DNA, 53 bp, Artificial Sequence
  Description of Artificial Sequence: Synthetic peanut, 5' sequence and inner sequence
tagggaagagaaggacatatgatcacgtgagaggcacgacaagctgtttggca

SEQ ID NO: 1695 - DNA, 53 bp, Artificial Sequence
  Description of Artificial Sequence: Synthetic peanut, 5' sequence and inner sequence
tagggaagagaaggacatatgatcatgtgtgcggcactgactatcgagtggga

SEQ ID NO: 1696 - DNA, 53 bp, Artificial Sequence
  Description of Artificial Sequence: Synthetic peanut, 5' sequence and inner sequence
tagggaagagaaggacatatgatgcgctgcgaagaccggtaatgacgtggaca

SEQ ID NO: 1697 - DNA, 53 bp, Artificial Sequence
  Description of Artificial Sequence: Synthetic peanut, 5' sequence and inner sequence
tagggaagagaaggacatatgatacgacaaggcaacgtgtcctacgtgttggt

SEQ ID NO: 1698 - DNA, 53 bp, Artificial Sequence
  Description of Artificial Sequence: Synthetic peanut, 5' sequence and inner sequence
tagggaagagaaggacatatgatgacctaagcgcaccctagcatgtgttcatg

SEQ ID NO: 1699 - DNA, 53 bp, Artificial Sequence
  Description of Artificial Sequence: Synthetic peanut, 5' sequence and inner sequence
tagggaagagaaggacatatgatccgacgacatgaccgatgtggcattgcgta

SEQ ID NO: 1700 - DNA, 53 bp, Artificial Sequence
  Description of Artificial Sequence: Synthetic peanut, 5' sequence and inner sequence
tagggaagagaaggacatatgatcgcaccgcctcacgtacggcatgttgcaca

SEQ ID NO: 1701 - DNA, 53 bp, Artificial Sequence
  Description of Artificial Sequence: Synthetic peanut, 5' sequence and inner sequence
tagggaagagaaggacatatgattgcgtcgtatgtgcggctcggatgtgtgtc

SEQ ID NO: 1702 - DNA, 53 bp, Artificial Sequence
  Description of Artificial Sequence: Synthetic peanut, 5' sequence and inner sequence
tagggaagagaaggacatatgatggcatgcgatggatgaggtgctgcactagt

SEQ ID NO: 1703 - DNA, 53 bp, Artificial Sequence
  Description of Artificial Sequence: Synthetic peanut, 5' sequence and inner sequence
tagggaagagaaggacatatgatgtacgcggctggatacaagtacggcatgga

SEQ ID NO: 1704 - DNA, 53 bp, Artificial Sequence
  Description of Artificial Sequence: Synthetic peanut, 5' sequence and inner sequence
tagggaagagaaggacatatgatcgatacgacgaggctcacacaggctgcgca

SEQ ID NO: 1705 - DNA, 53 bp, Artificial Sequence
  Description of Artificial Sequence: Synthetic peanut, 5' sequence and inner sequence
tagggaagagaaggacatatgatcgcaccgtcgatacgtcatgcacgctgact

SEQ ID NO: 1706 - DNA, 53 bp, Artificial Sequence
  Description of Artificial Sequence: Synthetic peanut, 5' sequence and inner sequence
tagggaagagaaggacatatgatccacgacatggaacgtagcgtcacttcgcg

SEQ ID NO: 1707 - DNA, 53 bp, Artificial Sequence
  Description of Artificial Sequence: Synthetic peanut, 5' sequence and inner sequence
tagggaagagaaggacatatgatgtcatgcacgaacactattatggcggcatg

SEQ ID NO: 1708 - DNA, 54 bp, Artificial Sequence
  Description of Artificial Sequence: Synthetic peanut, 5' sequence and inner sequence
tagggaagagaaggacatatgatcatgccatgacgtccatgggtcctacgcgca

SEQ ID NO: 1709 - DNA, 53 bp, Artificial Sequence
  Description of Artificial Sequence: Synthetic peanut, 5' sequence and inner sequence
tagggaagagaaggacatatgatcgaccaggacgaatcgtactggcctgcgca

SEQ ID NO: 1710 - DNA, 53 bp, Artificial Sequence
  Description of Artificial Sequence: Synthetic peanut, 5' sequence and inner sequence
tagggaagagaaggacatatgatccatgtggcgcatgtgttcagtgctgcgtg

SEQ ID NO: 1711 - DNA, 53 bp, Artificial Sequence
  Description of Artificial Sequence: Synthetic peanut, 5' sequence and inner sequence
tagggaagagaaggacatatgatccatccgatgcgtcacgcaactgtgccatg

SEQ ID NO: 1712 - DNA, 53 bp, Artificial Sequence
  Description of Artificial Sequence: Synthetic peanut, 5' sequence and inner sequence
tagggaagagaaggacatatgatcgcacctacagtcagtcacgatgctacgtg

SEQ ID NO: 1713 - DNA, 53 bp, Artificial Sequence
  Description of Artificial Sequence: Synthetic peanut, 5' sequence and inner sequence
tagggaagagaaggacatatgatcgaaccgaacaggcacgacctcacggggtg

SEQ ID NO: 1714 - DNA, 53 bp, Artificial Sequence
  Description of Artificial Sequence: Synthetic peanut, 5' sequence and inner sequence
tagggaagagaaggacatatgatgtacacgatgcaccttcaagttgtgatgta

SEQ ID NO: 1715 - DNA, 53 bp, Artificial Sequence
  Description of Artificial Sequence: Synthetic peanut, 5' sequence and inner sequence
tagggaagagaaggacatatgatgcccaatctgacctatcaacgtgtcgtgga

SEQ ID NO: 1716 - DNA, 53 bp, Artificial Sequence
  Description of Artificial Sequence: Synthetic peanut, 5' sequence and inner sequence
tagggaagagaaggacatatgatcatgcaggacgcacgactagacatggcgta

SEQ ID NO: 1717 - DNA, 53 bp, Artificial Sequence
  Description of Artificial Sequence: Synthetic peanut, 5' sequence and inner sequence
tagggaagagaaggacatatgatcgcaccgtcgatacgtcatgcacgctcaca

SEQ ID NO: 1718 - DNA, 53 bp, Artificial Sequence
  Description of Artificial Sequence: Synthetic peanut, 5' sequence and inner sequence
tagggaagagaaggacatatgatgcgtgcagaggatgtgcccttcgtcccgca

SEQ ID NO: 1719 - DNA, 53 bp, Artificial Sequence
  Description of Artificial Sequence: Synthetic peanut, 5' sequence and inner sequence
tagggaagagaaggacatatgatgcatcagcaggcgcgatcgaacctggcaca

SEQ ID NO: 1720 - DNA, 53 bp, Artificial Sequence
  Description of Artificial Sequence: Synthetic peanut, 5' sequence and inner sequence
tagggaagagaaggacatatgatcgagcgcacgtgaggcactgtatcgtcacg

SEQ ID NO: 1721 - DNA, 53 bp, Artificial Sequence
  Description of Artificial Sequence: Synthetic peanut, 5' sequence and inner sequence
tagggaagagaaggacatatgatccacatggtcgcatcgaacggtggtacgca

SEQ ID NO: 1722 - DNA, 53 bp, Artificial Sequence
  Description of Artificial Sequence: Synthetic peanut, 5' sequence and inner sequence
tagggaagagaaggacatatgattggcatgggacgatgcgccttccctgcatg

SEQ ID NO: 1723 - DNA, 53 bp, Artificial Sequence
  Description of Artificial Sequence: Synthetic peanut, 5' sequence and inner sequence
tagggaagagaaggacatatgatgcacaacacgtagggaacagtacgtacgca

SEQ ID NO: 1724 - DNA, 53 bp, Artificial Sequence
  Description of Artificial Sequence: Synthetic peanut, 5' sequence and inner sequence
tagggaagagaaggacatatgatggacgcagcttgcctactgttggtcacgta

SEQ ID NO: 1725 - DNA, 53 bp, Artificial Sequence
  Description of Artificial Sequence: Synthetic peanut, 5' sequence and inner sequence
tagggaagagaaggacatatgatcgcgtcagcagcgaatggcatgtctcgacc

SEQ ID NO: 1726 - DNA, 53 bp, Artificial Sequence
  Description of Artificial Sequence: Synthetic peanut, 5' sequence and inner sequence
tagggaagagaaggacatatgatcacgtgatgcgagggcgtatggtctgccgt

SEQ ID NO: 1727 - DNA, 53 bp, Artificial Sequence
  Description of Artificial Sequence: Synthetic peanut, 5' sequence and inner sequence
tagggaagagaaggacatatgatgtcatgcacgcacactatcatggcggcatg

SEQ ID NO: 1728 - DNA, 53 bp, Artificial Sequence
  Description of Artificial Sequence: Synthetic peanut, 5' sequence and inner sequence
tagggaagagaaggacatatgatgcacgaatcgcaccctatcatgaggccatg

SEQ ID NO: 1729 - DNA, 53 bp, Artificial Sequence
  Description of Artificial Sequence: Synthetic peanut, 5' sequence and inner sequence
tagggaagagaaggacatatgatacgaacggagcagaggtccacgcatgcacg

SEQ ID NO: 1730 - DNA, 53 bp, Artificial Sequence
  Description of Artificial Sequence: Synthetic peanut, 5' sequence and inner sequence
tagggaagagaaggacatatgatcacgtgcggaggacaacgccatactgcgtg

SEQ ID NO: 1731 - DNA, 53 bp, Artificial Sequence
  Description of Artificial Sequence: Synthetic peanut, 5' sequence and inner sequence
tagggaagagaaggacatatgatcgtgacaggcaggaaacatcgatgtgcgcc

SEQ ID NO: 1732 - DNA, 53 bp, Artificial Sequence
  Description of Artificial Sequence: Synthetic peanut, 5' sequence and inner sequence
tagggaagagaaggacatatgatcgtgccacaagtcgacacgcatatcacgcg

SEQ ID NO: 1733 - DNA, 53 bp, Artificial Sequence
  Description of Artificial Sequence: Synthetic peanut, 5' sequence and inner sequence
tagggaagagaaggacatatgatcacgtacggcacaacgactggaggtgagca

SEQ ID NO: 1734 - DNA, 53 bp, Artificial Sequence
  Description of Artificial Sequence: Synthetic peanut, 5' sequence and inner sequence
tagggaagagaaggacatatgatgccgtagcgaaccgctgtcattgtgcgatg

SEQ ID NO: 1735 - DNA, 53 bp, Artificial Sequence
  Description of Artificial Sequence: Synthetic peanut, 5' sequence and inner sequence
tagggaagagaaggacatatgatcacgcacaggtgatgcatggatcacgcgca

SEQ ID NO: 1736 - DNA, 53 bp, Artificial Sequence
  Description of Artificial Sequence: Synthetic peanut, 5' sequence and inner sequence
tagggaagagaaggacatatgatcgacgcacgaaacgaacatgttgtcacgca

SEQ ID NO: 1737 - DNA, 53 bp, Artificial Sequence
  Description of Artificial Sequence: Synthetic peanut, 5' sequence and inner sequence
tagggaagagaaggacatatgatcgcgccaacaacagggaacgtaacgccatg

SEQ ID NO: 1738 - DNA, 53 bp, Artificial Sequence
  Description of Artificial Sequence: Synthetic peanut, 5' sequence and inner sequence
tagggaagagaaggacatatgatccatgtgaacgtgcgtaccgaaagtgcgtc

SEQ ID NO: 1739 - DNA, 53 bp, Artificial Sequence
  Description of Artificial Sequence: Synthetic peanut, 5' sequence and inner sequence
tagggaagagaaggacatatgatcgacgcatgaccagtggcgatgtatgcacg

SEQ ID NO: 1740 - DNA, 53 bp, Artificial Sequence
  Description of Artificial Sequence: Synthetic peanut, 5' sequence and inner sequence
tagggaagagaaggacatatgatgtgcgatcgtacctatcaatggtcatcgta

SEQ ID NO: 1741 - DNA, 53 bp, Artificial Sequence
  Description of Artificial Sequence: Synthetic peanut, 5' sequence and inner sequence
tagggaagagaaggacatatgatggccgaatgaccgtctcatgtgagcatgga

SEQ ID NO: 1742 - DNA, 53 bp, Artificial Sequence
  Description of Artificial Sequence: Synthetic peanut, 5' sequence and inner sequence
tagggaagagaaggacatatgatccgtagagacatcaagcggtggtgtgcgtg

SEQ ID NO: 1743 - DNA, 53 bp, Artificial Sequence
  Description of Artificial Sequence: Synthetic peanut, 5' sequence and inner sequence
tagggaagagaaggacatatgatcgtgacacgcaccattacgtccagctgcgc

SEQ ID NO: 1744 - DNA, 53 bp, Artificial Sequence
  Description of Artificial Sequence: Synthetic peanut, 5' sequence and inner sequence
tagggaagagaaggacatatgatacgacgaacggtagcagcactgacgacaca

SEQ ID NO: 1745 - DNA, 53 bp, Artificial Sequence
  Description of Artificial Sequence: Synthetic peanut, 5' sequence and inner sequence
tagggaagagaaggacatatgatcacgcgtgctggtctgcatgtccatgcgca

SEQ ID NO: 1746 - DNA, 53 bp, Artificial Sequence
  Description of Artificial Sequence: Synthetic peanut, 5' sequence and inner sequence
tagggaagagaaggacatatgatggcatgcacgcaccctatcatgtaggcatg

SEQ ID NO: 1747 - DNA, 53 bp, Artificial Sequence
  Description of Artificial Sequence: Synthetic peanut, 5' sequence and inner sequence
tagggaagagaaggacatatgatcacgcagtcgaaactcagtgtcactgcacg

SEQ ID NO: 1748 - DNA, 53 bp, Artificial Sequence
  Description of Artificial Sequence: Synthetic peanut, 5' sequence and inner sequence
tagggaagagaaggacatatgatcgacccgcagacgttgtgtggtggtgcgta

SEQ ID NO: 1749 - DNA, 53 bp, Artificial Sequence
  Description of Artificial Sequence: Synthetic peanut, 5' sequence and inner sequence
tagggaagagaaggacatatgatcgtatgccaaacgcaacctacagctgtggt

SEQ ID NO: 1750 - DNA, 53 bp, Artificial Sequence
  Description of Artificial Sequence: Synthetic peanut, 5' sequence and inner sequence
tagggaagagaaggacatatgatggcctgcgatggatgtggtgctgcactagt

SEQ ID NO: 1751 - DNA, 53 bp, Artificial Sequence
  Description of Artificial Sequence: Synthetic peanut, 5' sequence and inner sequence
tagggaagagaaggacatatgataggcacacgtgaaggcacatcgactacgca

SEQ ID NO: 1752 - DNA, 53 bp, Artificial Sequence
  Description of Artificial Sequence: Synthetic peanut, 5' sequence and inner sequence
tagggaagagaaggacatatgatcacgcatggaaggcacgtcaaccacgggca

SEQ ID NO: 1753 - DNA, 53 bp, Artificial Sequence
  Description of Artificial Sequence: Synthetic peanut, 5' sequence and inner sequence
tagggaagagaaggacatatgatgacatgcacgaacactatcatggcggcatg

SEQ ID NO: 1754 - DNA, 53 bp, Artificial Sequence
  Description of Artificial Sequence: Synthetic peanut, 5' sequence and inner sequence
tagggaagagaaggacatatgatcgcaccggcgatacgtcatgcacgctgaca

SEQ ID NO: 1755 - DNA, 53 bp, Artificial Sequence
  Description of Artificial Sequence: Synthetic peanut, 5' sequence and inner sequence
tagggaagagaaggacatatgatcctgaccgcaatggttagggaccaggcacg

SEQ ID NO: 1756 - DNA, 53 bp, Artificial Sequence
  Description of Artificial Sequence: Synthetic peanut, 5' sequence and inner sequence
tagggaagagaaggacatatgatccgtagcggcatcaagcggtggtgtgcgtg

SEQ ID NO: 1757 - DNA, 53 bp, Artificial Sequence
  Description of Artificial Sequence: Synthetic peanut, 5' sequence and inner sequence
tagggaagagaaggacatatgatcgcaacggtacatcagctgcaacgtggcca

SEQ ID NO: 1758 - DNA, 53 bp, Artificial Sequence
  Description of Artificial Sequence: Synthetic peanut, 5' sequence and inner sequence
tagggaagagaaggacatatgattggacgcacaatacacgtcaaggcggcatg

SEQ ID NO: 1759 - DNA, 53 bp, Artificial Sequence
  Description of Artificial Sequence: Synthetic peanut, 5' sequence and inner sequence
tagggaagagaaggacatatgatccacgcagcacacggtaatggctctgcacg

SEQ ID NO: 1760 - DNA, 53 bp, Artificial Sequence
  Description of Artificial Sequence: Synthetic peanut, 5' sequence and inner sequence
tagggaagagaaggacatatgatccgttacgaccgcaagactgtgtgtacgtg

SEQ ID NO: 1761 - DNA, 53 bp, Artificial Sequence
  Description of Artificial Sequence: Synthetic peanut, 5' sequence and inner sequence
tagggaagagaaggacatatgatcatgtgtgcagcgaatgccctgacgtggac

SEQ ID NO: 1762 - DNA, 53 bp, Artificial Sequence
  Description of Artificial Sequence: Synthetic peanut, 5' sequence and inner sequence
tagggaagagaaggacatatgatgcgatccgacggagacacgtccacttcgcg

SEQ ID NO: 1763 - DNA, 53 bp, Artificial Sequence
  Description of Artificial Sequence: Synthetic peanut, 5' sequence and inner sequence
tagggaagagaaggacatatgatgcaacgaacgtacctgtgtcgtgacgcgtc

SEQ ID NO: 1764 - DNA, 53 bp, Artificial Sequence
  Description of Artificial Sequence: Synthetic peanut, 5' sequence and inner sequence
tagggaagagaaggacatatgatgcctgctcaaccctacaacgtggccacgta

SEQ ID NO: 1765 - DNA, 53 bp, Artificial Sequence
  Description of Artificial Sequence: Synthetic peanut, 5' sequence and inner sequence
tagggaagagaaggacatatgatcgatgcagcgagtgacgtagcagctacgga

SEQ ID NO: 1766 - DNA, 53 bp, Artificial Sequence
  Description of Artificial Sequence: Synthetic peanut, 5' sequence and inner sequence
tagggaagagaaggacatatgatcgaggcaggcaaacagcagtacagctcggt

SEQ ID NO: 1767 - DNA, 53 bp, Artificial Sequence
  Description of Artificial Sequence: Synthetic peanut, 5' sequence and inner sequence
tagggaagagaaggacatatgatcgtacgccaccattgaccgtagcatgcacg

SEQ ID NO: 1768 - DNA, 53 bp, Artificial Sequence
  Description of Artificial Sequence: Synthetic peanut, 5' sequence and inner sequence
tagggaagagaaggacatatgatggcatgcacgcacatacacgtgggtatgga

SEQ ID NO: 1769 - DNA, 53 bp, Artificial Sequence
  Description of Artificial Sequence: Synthetic peanut, 5' sequence and inner sequence
tagggaagagaaggacatatgatcgacacggctgacaatagcgttctgacgca

SEQ ID NO: 1770 - DNA, 53 bp, Artificial Sequence
  Description of Artificial Sequence: Synthetic peanut, 5' sequence and inner sequence
tagggaagagaaggacatatgatcgcaccgtacatgcaggactgtcatcgtga

SEQ ID NO: 1771 - DNA, 53 bp, Artificial Sequence
  Description of Artificial Sequence: Synthetic peanut, 5' sequence and inner sequence
tagggaagagaaggacatatgatcgagccgaagcggttggggacgatggcaca

SEQ ID NO: 1772 - DNA, 53 bp, Artificial Sequence
  Description of Artificial Sequence: Synthetic peanut, 5' sequence and inner sequence
tagggaagagaaggacatatgattcgcacgtagccctatcagtggtgcatgca

SEQ ID NO: 1773 - DNA, 53 bp, Artificial Sequence
  Description of Artificial Sequence: Synthetic peanut, 5' sequence and inner sequence
tagggaagagaaggacatatgattcgataccgtgccagtgggtgtgcttagca

SEQ ID NO: 1774 - DNA, 53 bp, Artificial Sequence
  Description of Artificial Sequence: Synthetic peanut, 5' sequence and inner sequence
tagggaagagaaggacatatgatgtcatgccatcccttcgattgtgacaggta

SEQ ID NO: 1775 - DNA, 53 bp, Artificial Sequence
  Description of Artificial Sequence: Synthetic peanut, 5' sequence and inner sequence
tagggaagagaaggacatatgatcgatcggaacggtgggcggagtgcagtgtg

SEQ ID NO: 1776 - DNA, 53 bp, Artificial Sequence
  Description of Artificial Sequence: Synthetic peanut, 5' sequence and inner sequence
tagggaagagaaggacatatgatccatcgcgtcactatcatgtgtgtcacgca

SEQ ID NO: 1777 - DNA, 53 bp, Artificial Sequence
  Description of Artificial Sequence: Synthetic peanut, 5' sequence and inner sequence
tagggaagagaaggacatatgatgacgcgcgcacctatcaatggcatgcacta

SEQ ID NO: 1778 - DNA, 53 bp, Artificial Sequence
  Description of Artificial Sequence: Synthetic peanut, 5' sequence and inner sequence
tagggaagagaaggacatatgatccgtagtgacatcaagcggtggtgtgcgtg

SEQ ID NO: 1779 - DNA, 53 bp, Artificial Sequence
  Description of Artificial Sequence: Synthetic peanut, 5' sequence and inner sequence
tagggaagagaaggacatatgatggacgcgaacaacgttgacgtaacggcaca

SEQ ID NO: 1780 - DNA, 53 bp, Artificial Sequence
  Description of Artificial Sequence: Synthetic peanut, 5' sequence and inner sequence
tagggaagagaaggacatatgattcacgactcgcaccctatcatgaggccatg

SEQ ID NO: 1781 - DNA, 53 bp, Artificial Sequence
  Description of Artificial Sequence: Synthetic peanut, 5' sequence and inner sequence
tagggaagagaaggacatatgattgcgacaagcacgatacactgcgctgcgca

SEQ ID NO: 1782 - DNA, 53 bp, Artificial Sequence
  Description of Artificial Sequence: Synthetic peanut, 5' sequence and inner sequence
tagggaagagaaggacatatgatggcctgcgatggatgtgcgttgtgctcggc

SEQ ID NO: 1783 - DNA, 53 bp, Artificial Sequence
  Description of Artificial Sequence: Synthetic peanut, 5' sequence and inner sequence
tagggaagagaaggacatatgatcatggccgacacgtaccttcaagtgtgaca

SEQ ID NO: 1784 - DNA, 53 bp, Artificial Sequence
  Description of Artificial Sequence: Synthetic peanut, 5' sequence and inner sequence
tagggaagagaaggacatatgatcatgcgcaagcccggtacgcacactggacg

SEQ ID NO: 1785 - DNA, 53 bp, Artificial Sequence
  Description of Artificial Sequence: Synthetic peanut, 5' sequence and inner sequence
tagggaagagaaggacatatgatcgcagcgtgaggaaggtactgtgcaacgcg

SEQ ID NO: 1786 - DNA, 53 bp, Artificial Sequence
  Description of Artificial Sequence: Synthetic peanut, 5' sequence and inner sequence
tagggaagagaaggacatatgatcgacaagcaggcaatgtgactcacgcgtga

SEQ ID NO: 1787 - DNA, 53 bp, Artificial Sequence
  Description of Artificial Sequence: Synthetic peanut, 5' sequence and inner sequence
tagggaagagaaggacatatgatggacgcagcttgcctacttgtggtcacgta

SEQ ID NO: 1788 - DNA, 53 bp, Artificial Sequence
  Description of Artificial Sequence: Synthetic peanut, 5' sequence and inner sequence
tagggaagagaaggacatatgatcgcaccgacgatacgtcatgcacgctgaca

SEQ ID NO: 1789 - DNA, 53 bp, Artificial Sequence
  Description of Artificial Sequence: Synthetic peanut, 5' sequence and inner sequence
tagggaagagaaggacatatgatgcacgactcacaccctatcatgaggccatg

SEQ ID NO: 1790 - DNA, 53 bp, Artificial Sequence
  Description of Artificial Sequence: Synthetic peanut, 5' sequence and inner sequence
tagggaagagaaggacatatgatcggcacaggaggcgtgaagcatgcaccatg

SEQ ID NO: 1791 - DNA, 53 bp, Artificial Sequence
  Description of Artificial Sequence: Synthetic peanut, 5' sequence and inner sequence
tagggaagagaaggacatatgatgacatgcactgaccgatcgatggtcacgta

SEQ ID NO: 1792 - DNA, 53 bp, Artificial Sequence
  Description of Artificial Sequence: Synthetic peanut, 5' sequence and inner sequence
tagggaagagaaggacatatgatcggcacggagtcgcagcatagccgtacgca

SEQ ID NO: 1793 - DNA, 53 bp, Artificial Sequence
  Description of Artificial Sequence: Synthetic peanut, 5' sequence and inner sequence
tagggaagagaaggacatatgatgtgtgaccgacccgtaagtgtgcatgcgac

SEQ ID NO: 1794 - DNA, 53 bp, Artificial Sequence
  Description of Artificial Sequence: Synthetic peanut, 5' sequence and inner sequence
tagggaagagaaggacatatgatccgagcagaccattgcgacgatgatgcgca

SEQ ID NO: 1795 - DNA, 53 bp, Artificial Sequence
  Description of Artificial Sequence: Synthetic peanut, 5' sequence and inner sequence
tagggaagagaaggacatatgatcatcgcaatgacatggacgttgcctggaca

SEQ ID NO: 1796 - DNA, 53 bp, Artificial Sequence
  Description of Artificial Sequence: Synthetic peanut, 5' sequence and inner sequence
tagggaagagaaggacatatgatccactggccacgtggatgatgcactgcgca

SEQ ID NO: 1797 - DNA, 53 bp, Artificial Sequence
  Description of Artificial Sequence: Synthetic peanut, 5' sequence and inner sequence
tagggaagagaaggacatatgatcgatgaggcatagcgagtacacactgcgtg

SEQ ID NO: 1798 - DNA, 53 bp, Artificial Sequence
  Description of Artificial Sequence: Synthetic peanut, 5' sequence and inner sequence
tagggaagagaaggacatatgatcacgtaccacggtgacatgagtgcgccacg

SEQ ID NO: 1799 - DNA, 53 bp, Artificial Sequence
  Description of Artificial Sequence: Synthetic peanut, 5' sequence and inner sequence
tagggaagagaaggacatatgatcgatgacgtgcgagacgacatgcatacgca

SEQ ID NO: 1800 - DNA, 53 bp, Artificial Sequence
  Description of Artificial Sequence: Synthetic peanut, 5' sequence and inner sequence
tagggaagagaaggacatatgatggcgcgaacgtacctatcaagttggtcgta

SEQ ID NO: 1801 - DNA, 53 bp, Artificial Sequence
  Description of Artificial Sequence: Synthetic peanut, 5' sequence and inner sequence
tagggaagagaaggacatatgatgtacgcacgcagaccttcaagtcggccatg

SEQ ID NO: 1802 - DNA, 53 bp, Artificial Sequence
  Description of Artificial Sequence: Synthetic peanut, 5' sequence and inner sequence
tagggaagagaaggacatatgatcgcaacagaacaggtggtgacgcactgacg

SEQ ID NO: 1803 - DNA, 53 bp, Artificial Sequence
  Description of Artificial Sequence: Synthetic peanut, 5' sequence and inner sequence
tagggaagagaaggacatatgatcgcacgctagaggcacatgcacgctacacg

SEQ ID NO: 1804 - DNA, 53 bp, Artificial Sequence
  Description of Artificial Sequence: Synthetic peanut, 5' sequence and inner sequence
tagggaagagaaggacatatgatgccacgcacatcatggacttcctctgcacg

SEQ ID NO: 1805 - DNA, 53 bp, Artificial Sequence
  Description of Artificial Sequence: Synthetic peanut, 5' sequence and inner sequence
tagggaagagaaggacatatgatgcacgactagcaccctatcatgaggccatg

SEQ ID NO: 1806 - DNA, 53 bp, Artificial Sequence
  Description of Artificial Sequence: Synthetic peanut, 5' sequence and inner sequence
tagggaagagaaggacatatgatcgcaccgtcgatacatcatgcacgctgaca

SEQ ID NO: 1807 - DNA, 53 bp, Artificial Sequence
  Description of Artificial Sequence: Synthetic peanut, 5' sequence and inner sequence
tagggaagagaaggacatatgatccgaactgacggtcaagggtgcatggcgta

SEQ ID NO: 1808 - DNA, 53 bp, Artificial Sequence
  Description of Artificial Sequence: Synthetic peanut, 5' sequence and inner sequence
tagggaagagaaggacatatgatcacgtggacagatcgtaccgttagtgtgtc

SEQ ID NO: 1809 - DNA, 53 bp, Artificial Sequence
  Description of Artificial Sequence: Synthetic peanut, 5' sequence and inner sequence
tagggaagagaaggacatatgatgacaccacgtggaccatactgtacgtgtgc

SEQ ID NO: 1810 - DNA, 52 bp, Artificial Sequence
  Description of Artificial Sequence: Synthetic peanut, 5' sequence and inner sequence
tagggaagagaaggacatatgatgcaccgtcgatacgtcatgcacgctgaca

SEQ ID NO: 1811 - DNA, 53 bp, Artificial Sequence
  Description of Artificial Sequence: Synthetic peanut, 5' sequence and inner sequence
tagggaagagaaggacatatgatcctgaacgaacgtgggtaggtacgcagcca

SEQ ID NO: 1812 - DNA, 53 bp, Artificial Sequence
  Description of Artificial Sequence: Synthetic peanut, 5' sequence and inner sequence
tagggaagagaaggacatatgatgtcatgcatgcccaatgtcattggtacgca

SEQ ID NO: 1813 - DNA, 53 bp, Artificial Sequence
  Description of Artificial Sequence: Synthetic peanut, 5' sequence and inner sequence
tagggaagagaaggacatatgatggacgcggatgagcttcgagtgacgtgtac

SEQ ID NO: 1814 - DNA, 53 bp, Artificial Sequence
  Description of Artificial Sequence: Synthetic peanut, 5' sequence and inner sequence
tagggaagagaaggacatatgatcgcacagacacggaaggacactgcgatgtg

SEQ ID NO: 1815 - DNA, 53 bp, Artificial Sequence
  Description of Artificial Sequence: Synthetic peanut, 5' sequence and inner sequence
tagggaagagaaggacatatgatcgcaggacggacgaggcttaccgtagcgca

SEQ ID NO: 1816 - DNA, 53 bp, Artificial Sequence
  Description of Artificial Sequence: Synthetic peanut, 5' sequence and inner sequence
tagggaagagaaggacatatgatggactgcgcgtaccgtcaagtgcgaatgga

SEQ ID NO: 1817 - DNA, 53 bp, Artificial Sequence
  Description of Artificial Sequence: Synthetic peanut, 5' sequence and inner sequence
tagggaagagaaggacatatgatcatgcgcaggccaactgtacgacaccgatg

SEQ ID NO: 1818 - DNA, 53 bp, Artificial Sequence
  Description of Artificial Sequence: Synthetic peanut, 5' sequence and inner sequence
tagggaagagaaggacatatgatcgccacgaggcaacaacgtgtgctgcgaca

SEQ ID NO: 1819 - DNA, 53 bp, Artificial Sequence
  Description of Artificial Sequence: Synthetic peanut, 5' sequence and inner sequence
tagggaagagaaggacatatgatcgatccgtggtgcagggagtgtgctgcgta

SEQ ID NO: 1820 - DNA, 53 bp, Artificial Sequence
  Description of Artificial Sequence: Synthetic peanut, 5' sequence and inner sequence
tagggaagagaaggacatatgatcacgcataggcaggtgagcttgtccgcatc

SEQ ID NO: 1821 - DNA, 53 bp, Artificial Sequence
  Description of Artificial Sequence: Synthetic peanut, 5' sequence and inner sequence
tagggaagagaaggacatatgatgcaacgtgacgacaagcaaggccgtacgcg

SEQ ID NO: 1822 - DNA, 49 bp, Artificial Sequence
  Description of Artificial Sequence: Synthetic peanut, 5' sequence and inner sequence
tagggaagagaaggacatatgatggcacaaacggaccgacaagtgcgca

SEQ ID NO: 1823 - DNA, 53 bp, Artificial Sequence
  Description of Artificial Sequence: Synthetic peanut, 5' sequence and inner sequence
tagggaagagaaggacatatgatcgatgccacgacgcaccttcgtcatgcaca

SEQ ID NO: 1824 - DNA, 53 bp, Artificial Sequence
  Description of Artificial Sequence: Synthetic peanut, 5' sequence and inner sequence
tagggaagagaaggacatatgatcacacgcaaagtacgtccggacactgcacg

SEQ ID NO: 1825 - DNA, 53 bp, Artificial Sequence
  Description of Artificial Sequence: Synthetic peanut, 5' sequence and inner sequence
tagggaagagaaggacatatgatcgcaacaggctgagcacatgtacgtacaca

SEQ ID NO: 1826 - DNA, 53 bp, Artificial Sequence
  Description of Artificial Sequence: Synthetic peanut, 5' sequence and inner sequence
tagggaagagaaggacatatgatgtcgtgtcgtgactgcatacgagtgacgca

SEQ ID NO: 1827 - DNA, 53 bp, Artificial Sequence
  Description of Artificial Sequence: Synthetic peanut, 5' sequence and inner sequence
tagggaagagaaggacatatgatggactgcgatggatgtgtgcgtgtattagc

SEQ ID NO: 1828 - DNA, 53 bp, Artificial Sequence
  Description of Artificial Sequence: Synthetic peanut, 5' sequence and inner sequence
tagggaagagaaggacatatgatggccacagcgtacctcaacgtgtacgtgca

SEQ ID NO: 1829 - DNA, 53 bp, Artificial Sequence
  Description of Artificial Sequence: Synthetic peanut, 5' sequence and inner sequence
tagggaagagaaggacatatgatcgcaacgggagggaaacgtcctgcgacgcg

SEQ ID NO: 1830 - DNA, 53 bp, Artificial Sequence
  Description of Artificial Sequence: Synthetic peanut, 5' sequence and inner sequence
tagggaagagaaggacatatgatacgtgtggctgcatttcgtcccgtgtggca

SEQ ID NO: 1831 - DNA, 53 bp, Artificial Sequence
  Description of Artificial Sequence: Synthetic peanut, 5' sequence and inner sequence
tagggaagagaaggacatatgatcgtaccgcaagggggagagtgcgtgttggc

SEQ ID NO: 1832 - DNA, 53 bp, Artificial Sequence
  Description of Artificial Sequence: Synthetic peanut, 5' sequence and inner sequence
tagggaagagaaggacatatgatgcggtgcggaacatgtacgccatcttgcca

SEQ ID NO: 1833 - DNA, 53 bp, Artificial Sequence
  Description of Artificial Sequence: Synthetic peanut, 5' sequence and inner sequence
tagggaagagaaggacatatgatcatgcagcagggttacgtgttcactgcgcc

SEQ ID NO: 1834 - DNA, 53 bp, Artificial Sequence
  Description of Artificial Sequence: Synthetic peanut, 5' sequence and inner sequence
tagggaagagaaggacatatgatgtgcgacacgtgttcccgttcaagttgggc

SEQ ID NO: 1835 - DNA, 53 bp, Artificial Sequence
  Description of Artificial Sequence: Synthetic peanut, 5' sequence and inner sequence
tagggaagagaaggacatatgatcgcaacgcacatccgaacgacgtgtgcatg

SEQ ID NO: 1836 - DNA, 53 bp, Artificial Sequence
  Description of Artificial Sequence: Synthetic peanut, 5' sequence and inner sequence
tagggaagagaaggacatatgattgtcacagggacgtatcgcaccgctgtggt

SEQ ID NO: 1837 - DNA, 53 bp, Artificial Sequence
  Description of Artificial Sequence: Synthetic peanut, 5' sequence and inner sequence
tagggaagagaaggacatatgatcgcaccgtcgatacgttatgcacgctgaca

SEQ ID NO: 1838 - DNA, 53 bp, Artificial Sequence
  Description of Artificial Sequence: Synthetic peanut, 5' sequence and inner sequence
tagggaagagaaggacatatgatcgatgctaggatggacgtgacggctacgcg

SEQ ID NO: 1839 - DNA, 53 bp, Artificial Sequence
  Description of Artificial Sequence: Synthetic peanut, 5' sequence and inner sequence
tagggaagagaaggacatatgatcgacaggcaggtcaaggtcatcgctgcaca

SEQ ID NO: 1840 - DNA, 53 bp, Artificial Sequence
  Description of Artificial Sequence: Synthetic peanut, 5' sequence and inner sequence
tagggaagagaaggacatatgatcgcactgtcgatacgtcatgcacgctgaca

SEQ ID NO: 1841 - DNA, 53 bp, Artificial Sequence
  Description of Artificial Sequence: Synthetic peanut, 5' sequence and inner sequence
tagggaagagaaggacatatgatgacgcactcaaccgatcagtggcatgcgtg

SEQ ID NO: 1842 - DNA, 53 bp, Artificial Sequence
  Description of Artificial Sequence: Synthetic peanut, 5' sequence and inner sequence
tagggaagagaaggacatatgatcgcacggcaaggaagggtgcgtacttgtgt

SEQ ID NO: 1843 - DNA, 53 bp, Artificial Sequence
  Description of Artificial Sequence: Synthetic peanut, 5' sequence and inner sequence
tagggaagagaaggacatatgatcgatgaccgtgtggtgaatgtgcctacgca

SEQ ID NO: 1844 - DNA, 53 bp, Artificial Sequence
  Description of Artificial Sequence: Synthetic peanut, 5' sequence and inner sequence
tagggaagagaaggacatatgatccatcatgcaccgtaacggaccactgcgca

SEQ ID NO: 1845 - DNA, 54 bp, Artificial Sequence
  Description of Artificial Sequence: Synthetic peanut, 5' sequence and inner sequence
tagggaagagaaggacatatgatcgcaccgtcgatacgtcatgcacgctgacca

SEQ ID NO: 1846 - DNA, 53 bp, Artificial Sequence
  Description of Artificial Sequence: Synthetic peanut, 5' sequence and inner sequence
tagggaagagaaggacatatgatgcacgtggcttacccgctggcatgacgacg

SEQ ID NO: 1847 - DNA, 53 bp, Artificial Sequence
  Description of Artificial Sequence: Synthetic peanut, 5' sequence and inner sequence
tagggaagagaaggacatatgatcgatgcacaccaaacaggccacgctacgtg

SEQ ID NO: 1848 - DNA, 53 bp, Artificial Sequence
  Description of Artificial Sequence: Synthetic peanut, 5' sequence and inner sequence
tagggaagagaaggacatatgatgcacggcacgtaacggttggttcaggcaca

SEQ ID NO: 1849 - DNA, 53 bp, Artificial Sequence
  Description of Artificial Sequence: Synthetic peanut, 5' sequence and inner sequence
tagggaagagaaggacatatgatcgacacgaagctcaagggcgatacggcatg

SEQ ID NO: 1850 - DNA, 53 bp, Artificial Sequence
  Description of Artificial Sequence: Synthetic peanut, 5' sequence and inner sequence
tagggaagagaaggacatatgatccgacctcgcaccgtatcaagctggccatg

SEQ ID NO: 1851 - DNA, 53 bp, Artificial Sequence
  Description of Artificial Sequence: Synthetic peanut, 5' sequence and inner sequence
tagggaagagaaggacatatgatccgtgcaggagcattatggcacgtgcggca

SEQ ID NO: 1852 - DNA, 53 bp, Artificial Sequence
  Description of Artificial Sequence: Synthetic peanut, 5' sequence and inner sequence
tagggaagagaaggacatatgatcgccaacacggtacacatcatggctacgcg

SEQ ID NO: 1853 - DNA, 53 bp, Artificial Sequence
  Description of Artificial Sequence: Synthetic peanut, 5' sequence and inner sequence
tagggaagagaaggacatatgatcgcaccgtcgatacgtcttgcacgctgaca

SEQ ID NO: 1854 - DNA, 53 bp, Artificial Sequence
  Description of Artificial Sequence: Synthetic peanut, 5' sequence and inner sequence
tagggaagagaaggacatatgatgcgtgacgtaacgacagatcatgcgtcagt

SEQ ID NO: 1855 - DNA, 53 bp, Artificial Sequence
  Description of Artificial Sequence: Synthetic peanut, 5' sequence and inner sequence
tagggaagagaaggacatatgatcgcggcagacgaccttgcgttccatgcaca

SEQ ID NO: 1856 - DNA, 53 bp, Artificial Sequence
  Description of Artificial Sequence: Synthetic peanut, 5' sequence and inner sequence
tagggaagagaaggacatatgatcacgcacgtcggagaggtacgttcgccacc

SEQ ID NO: 1857 - DNA, 53 bp, Artificial Sequence
  Description of Artificial Sequence: Synthetic peanut, 5' sequence and inner sequence
tagggaagagaaggacatatgatgtcattccgcatcctacacgtgggtacgta

SEQ ID NO: 1858 - DNA, 53 bp, Artificial Sequence
  Description of Artificial Sequence: Synthetic peanut, 5' sequence and inner sequence
tagggaagagaaggacatatgatcgcgacgaagtggaggtaatgtccgtgcca

SEQ ID NO: 1859 - DNA, 53 bp, Artificial Sequence
  Description of Artificial Sequence: Synthetic peanut, 5' sequence and inner sequence
tagggaagagaaggacatatgatcacatgcatcgtaccgtcacagcacgacca

SEQ ID NO: 1860 - DNA, 53 bp, Artificial Sequence
  Description of Artificial Sequence: Synthetic peanut, 5' sequence and inner sequence
tagggaagagaaggacatatgatccgtcgcgacatcaagcggtggtgtgcgtg

SEQ ID NO: 1861 - DNA, 53 bp, Artificial Sequence
  Description of Artificial Sequence: Synthetic peanut, 5' sequence and inner sequence
tagggaagagaaggacatatgattgcgcaaggtcacggtcctacgccttcacg

SEQ ID NO: 1862 - DNA, 53 bp, Artificial Sequence
  Description of Artificial Sequence: Synthetic peanut, 5' sequence and inner sequence
tagggaagagaaggacatatgatcgtaccggagcggcgcacagtgatggcatg

SEQ ID NO: 1863 - DNA, 53 bp, Artificial Sequence
  Description of Artificial Sequence: Synthetic peanut, 5' sequence and inner sequence
tagggaagagaaggacatatgatggcatgcgatgggtagtgatcacgtacggt

SEQ ID NO: 1864 - DNA, 56 bp, Artificial Sequence
  Description of Artificial Sequence: Synthetic peanut, 5' sequence and inner sequence
tagggaagagaaggacatatgatccgcatcggaccgatcaaggcaggctgtacgtg

SEQ ID NO: 1865 - DNA, 53 bp, Artificial Sequence
  Description of Artificial Sequence: Synthetic peanut, 5' sequence and inner sequence
tagggaagagaaggacatatgatcgcagcggaagtaccgtacgtatcgtgcca

SEQ ID NO: 1866 - DNA, 53 bp, Artificial Sequence
  Description of Artificial Sequence: Synthetic peanut, 5' sequence and inner sequence
tagggaagagaaggacatatgatcgcaccgtcgatacgtcatgcaccctgaca

SEQ ID NO: 1867 - DNA, 53 bp, Artificial Sequence
  Description of Artificial Sequence: Synthetic peanut, 5' sequence and inner sequence
tagggaagagaaggacatatgatgtgcgcaacgaccctacacgtggtggtgta

SEQ ID NO: 1868 - DNA, 53 bp, Artificial Sequence
  Description of Artificial Sequence: Synthetic peanut, 5' sequence and inner sequence
tagggaagagaaggacatatgatcatggcacggaacgcgcagtcacatgcatg

SEQ ID NO: 1869 - DNA, 53 bp, Artificial Sequence
  Description of Artificial Sequence: Synthetic peanut, 5' sequence and inner sequence
tagggaagagaaggacatatgatggccgaacgtaccggtcaagtggatgcgta

SEQ ID NO: 1870 - DNA, 53 bp, Artificial Sequence
  Description of Artificial Sequence: Synthetic peanut, 5' sequence and inner sequence
tagggaagagaaggacatatgatcgcatgtgaggcactagatgcacttgcgca

SEQ ID NO: 1871 - DNA, 53 bp, Artificial Sequence
  Description of Artificial Sequence: Synthetic peanut, 5' sequence and inner sequence
tagggaagagaaggacatatgatgtcatgcacgaacactataatggcggcatg

SEQ ID NO: 1872 - DNA, 53 bp, Artificial Sequence
  Description of Artificial Sequence: Synthetic peanut, 5' sequence and inner sequence
tagggaagagaaggacatatgatgcgacggtgtgcggtggtatgtcctgcaca

SEQ ID NO: 1873 - DNA, 52 bp, Artificial Sequence
  Description of Artificial Sequence: Synthetic peanut, 5' sequence and inner sequence
tagggaagagaaggacatatgatgtcatgccatcccttcgagtgtgcaggta

SEQ ID NO: 1874 - DNA, 53 bp, Artificial Sequence
  Description of Artificial Sequence: Synthetic peanut, 5' sequence and inner sequence
tagggaagagaaggacatatgatgccaagcggaccaaagtgtgccatgacgca

SEQ ID NO: 1875 - DNA, 53 bp, Artificial Sequence
  Description of Artificial Sequence: Synthetic peanut, 5' sequence and inner sequence
tagggaagagaaggacatatgatgtcatgccgaactgcccattgccatgcagc

SEQ ID NO: 1876 - DNA, 53 bp, Artificial Sequence
  Description of Artificial Sequence: Synthetic peanut, 5' sequence and inner sequence
tagggaagagaaggacatatgatcgacacacggaaccacgtgactgcgccacc

SEQ ID NO: 1877 - DNA, 53 bp, Artificial Sequence
  Description of Artificial Sequence: Synthetic peanut, 5' sequence and inner sequence
tagggaagagaaggacatatgatccgcacgtagctctatcagtggtgcatgca

SEQ ID NO: 1878 - DNA, 53 bp, Artificial Sequence
  Description of Artificial Sequence: Synthetic peanut, 5' sequence and inner sequence
tagggaagagaaggacatatgatgccaagcgagacgacatgtggtactgcgtg

SEQ ID NO: 1879 - DNA, 52 bp, Artificial Sequence
  Description of Artificial Sequence: Synthetic peanut, 5' sequence and inner sequence
tagggaagagaaggacatatgatggcatgcgatggatgtggtggtgctgtca

SEQ ID NO: 1880 - DNA, 53 bp, Artificial Sequence
  Description of Artificial Sequence: Synthetic peanut, 5' sequence and inner sequence
tagggaagagaaggacatatgatgccatgcgtgtccctagtcatgacggcata

SEQ ID NO: 1881 - DNA, 53 bp, Artificial Sequence
  Description of Artificial Sequence: Synthetic peanut, 5' sequence and inner sequence
tagggaagagaaggacatatgatcgtaccgcgctggtcacacgtgctgtgtca

SEQ ID NO: 1882 - DNA, 53 bp, Artificial Sequence
  Description of Artificial Sequence: Synthetic peanut, 5' sequence and inner sequence
tagggaagagaaggacatatgatcgtgcagcaggatgacgagcattgggcgtg

SEQ ID NO: 1883 - DNA, 53 bp, Artificial Sequence
  Description of Artificial Sequence: Synthetic peanut, 5' sequence and inner sequence
tagggaagagaaggacatatgatacgcacaacggaaggtctcactgcgtcacg

SEQ ID NO: 1884 - DNA, 53 bp, Artificial Sequence
  Description of Artificial Sequence: Synthetic peanut, 5' sequence and inner sequence
tagggaagagaaggacatatgatgcacgactcgcacactatcatgaggccatg

SEQ ID NO: 1885 - DNA, 50 bp, Artificial Sequence
  Description of Artificial Sequence: Synthetic peanut, 5' sequence and inner sequence
tagggaagagaaggacatatgatggccaagctgacctagcatgtgtgtca

SEQ ID NO: 1886 - DNA, 53 bp, Artificial Sequence
  Description of Artificial Sequence: Synthetic peanut, 5' sequence and inner sequence
tagggaagagaaggacatatgatcgtgcgcaacgtcgtacgtacatgtgcgta

SEQ ID NO: 1887 - DNA, 53 bp, Artificial Sequence
  Description of Artificial Sequence: Synthetic peanut, 5' sequence and inner sequence
tagggaagagaaggacatatgattgacgcagcataccctaaggacatggcgtg

SEQ ID NO: 1888 - DNA, 53 bp, Artificial Sequence
  Description of Artificial Sequence: Synthetic peanut, 5' sequence and inner sequence
tagggaagagaaggacatatgatcacacagcgacatgtggtcctacctgcaca

SEQ ID NO: 1889 - DNA, 53 bp, Artificial Sequence
  Description of Artificial Sequence: Synthetic peanut, 5' sequence and inner sequence
tagggaagagaaggacatatgatgtacgacgcgagctagcaaggaggcgtgta

SEQ ID NO: 1890 - DNA, 53 bp, Artificial Sequence
  Description of Artificial Sequence: Synthetic peanut, 5' sequence and inner sequence
tagggaagagaaggacatatgatcgatacgcagatcggacgtatgcagcggca

SEQ ID NO: 1891 - DNA, 53 bp, Artificial Sequence
  Description of Artificial Sequence: Synthetic peanut, 5' sequence and inner sequence
tagggaagagaaggacatatgatgcacgactcgcaccctctcatgaggccatg

SEQ ID NO: 1892 - DNA, 53 bp, Artificial Sequence
  Description of Artificial Sequence: Synthetic peanut, 5' sequence and inner sequence
tagggaagagaaggacatatgatccgtagcgatatcaagcggtggtgtgcgtg

SEQ ID NO: 1893 - DNA, 49 bp, Artificial Sequence
  Description of Artificial Sequence: Synthetic peanut, 5' sequence and inner sequence
tagggaagagaaggacatatgatggcatgcacgcacctacacgtggaca

SEQ ID NO: 1894 - DNA, 53 bp, Artificial Sequence
  Description of Artificial Sequence: Synthetic peanut, 5' sequence and inner sequence
tagggaagagaaggacatatgatccgagacacacgacaggaccatccgtcacg

SEQ ID NO: 1895 - DNA, 53 bp, Artificial Sequence
  Description of Artificial Sequence: Synthetic peanut, 5' sequence and inner sequence
tagggaagagaaggacatatgatcgcagacagaccgtcagtgtgtagtgcgca

SEQ ID NO: 1896 - DNA, 53 bp, Artificial Sequence
  Description of Artificial Sequence: Synthetic peanut, 5' sequence and inner sequence
tagggaagagaaggacatatgatcgaaccgggcaagggtaggtaccatgcacg

SEQ ID NO: 1897 - DNA, 53 bp, Artificial Sequence
  Description of Artificial Sequence: Synthetic peanut, 5' sequence and inner sequence
tagggaagagaaggacatatgatcgcacgcatagggatgacgttccctcgtca

SEQ ID NO: 1898 - DNA, 53 bp, Artificial Sequence
  Description of Artificial Sequence: Synthetic peanut, 5' sequence and inner sequence
tagggaagagaaggacatatgatcgtaccagggggacgtacctgccgtggaca

SEQ ID NO: 1899 - DNA, 53 bp, Artificial Sequence
  Description of Artificial Sequence: Synthetic peanut, 5' sequence and inner sequence
tagggaagagaaggacatatgatcgtagcggcacgcagtcctgtgtaggcaca

SEQ ID NO: 1900 - DNA, 53 bp, Artificial Sequence
  Description of Artificial Sequence: Synthetic peanut, 5' sequence and inner sequence
tagggaagagaaggacatatgatggacgcagcttgcctactggtggtaacgta

SEQ ID NO: 1901 - DNA, 53 bp, Artificial Sequence
  Description of Artificial Sequence: Synthetic peanut, 5' sequence and inner sequence
tagggaagagaaggacatatgatggcacaaacggaccgacaagtgcgcatggt

SEQ ID NO: 1902 - DNA, 53 bp, Artificial Sequence
  Description of Artificial Sequence: Synthetic peanut, 5' sequence and inner sequence
tagggaagagaaggacatatgatcgcaccgagcgtggagagcacattggcaca

SEQ ID NO: 1903 - DNA, 53 bp, Artificial Sequence
  Description of Artificial Sequence: Synthetic peanut, 5' sequence and inner sequence
tagggaagagaaggacatatgatcgcaccgtccatacgtcatgcacgctgaca

SEQ ID NO: 1904 - DNA, 53 bp, Artificial Sequence
  Description of Artificial Sequence: Synthetic peanut, 5' sequence and inner sequence
tagggaagagaaggacatatgatgccacaaagcgtgaccgaactgtgtgcatg

SEQ ID NO: 1905 - DNA, 53 bp, Artificial Sequence
  Description of Artificial Sequence: Synthetic peanut, 5' sequence and inner sequence
tagggaagagaaggacatatgatgcacacagcagtacgacatgccacgttgcg

SEQ ID NO: 1906 - DNA, 53 bp, Artificial Sequence
  Description of Artificial Sequence: Synthetic peanut, 5' sequence and inner sequence
tagggaagagaaggacatatgatccgatcggcatcgctggtcaggacgtagca

SEQ ID NO: 1907 - DNA, 53 bp, Artificial Sequence
  Description of Artificial Sequence: Synthetic peanut, 5' sequence and inner sequence
tagggaagagaaggacatatgatcgacacgcagtaatgaccagatgccacgtg

SEQ ID NO: 1908 - DNA, 53 bp, Artificial Sequence
  Description of Artificial Sequence: Synthetic peanut, 5' sequence and inner sequence
tagggaagagaaggacatatgatcaccacgcatcattgtccgccaactgcaca

SEQ ID NO: 1909 - DNA, 53 bp, Artificial Sequence
  Description of Artificial Sequence: Synthetic peanut, 5' sequence and inner sequence
tagggaagagaaggacatatgatggcatgcgatgaacgaggcatgattcgtca

SEQ ID NO: 1910 - DNA, 53 bp, Artificial Sequence
  Description of Artificial Sequence: Synthetic peanut, 5' sequence and inner sequence
tagggaagagaaggacatatgatcgtacacacaggaacgaggcatacgacgca

SEQ ID NO: 1911 - DNA, 53 bp, Artificial Sequence
  Description of Artificial Sequence: Synthetic peanut, 5' sequence and inner sequence
tagggaagagaaggacatatgatgtacgtatcgaacggtcaagtcggtgtgta

SEQ ID NO: 1912 - DNA, 53 bp, Artificial Sequence
  Description of Artificial Sequence: Synthetic peanut, 5' sequence and inner sequence
tagggaagagaaggacatatgatggccgaacgtaacgcgggggcatgtggatg

SEQ ID NO: 1913 - DNA, 53 bp, Artificial Sequence
  Description of Artificial Sequence: Synthetic peanut, 5' sequence and inner sequence
tagggaagagaaggacatatgatcagtagcgacatcaagcggtggtgtgcgtg

SEQ ID NO: 1914 - DNA, 53 bp, Artificial Sequence
  Description of Artificial Sequence: Synthetic peanut, 5' sequence and inner sequence
tagggaagagaaggacatatgatgtcgtgtgcgtgccctacaagtcaggcatg

SEQ ID NO: 1915 - DNA, 53 bp, Artificial Sequence
  Description of Artificial Sequence: Synthetic peanut, 5' sequence and inner sequence
tagggaagagaaggacatatgatcgaaccgcgtggacgtgttgctgggcatca

SEQ ID NO: 1916 - DNA, 53 bp, Artificial Sequence
  Description of Artificial Sequence: Synthetic peanut, 5' sequence and inner sequence
tagggaagagaaggacatatgatcatgtggccaacgaggcgctacacgtgggc

SEQ ID NO: 1917 - DNA, 53 bp, Artificial Sequence
  Description of Artificial Sequence: Synthetic peanut, 5' sequence and inner sequence
tagggaagagaaggacatatgatccgcacgcgaacgaggtggtacatggcgta

SEQ ID NO: 1918 - DNA, 53 bp, Artificial Sequence
  Description of Artificial Sequence: Synthetic peanut, 5' sequence and inner sequence
tagggaagagaaggacatatgatcgcaacacgaggatgtgcaatatggtcgcg

SEQ ID NO: 1919 - DNA, 53 bp, Artificial Sequence
  Description of Artificial Sequence: Synthetic peanut, 5' sequence and inner sequence
tagggaagagaaggacatatgatggacgcatcgcccgtcaatgtgacgccatg

SEQ ID NO: 1920 - DNA, 53 bp, Artificial Sequence
  Description of Artificial Sequence: Synthetic peanut, 5' sequence and inner sequence
tagggaagagaaggacatatgatccgcacgtatccctatcagtggtgcatgca

SEQ ID NO: 1921 - DNA, 53 bp, Artificial Sequence
  Description of Artificial Sequence: Synthetic peanut, 5' sequence and inner sequence
tagggaagagaaggacatatgatgtgctgccagcccgtagcaagtcaggcatg

SEQ ID NO: 1922 - DNA, 53 bp, Artificial Sequence
  Description of Artificial Sequence: Synthetic peanut, 5' sequence and inner sequence
tagggaagagaaggacatatgatcatgctgaatgcgtagtgctgccttgcgca

SEQ ID NO: 1923 - DNA, 53 bp, Artificial Sequence
  Description of Artificial Sequence: Synthetic peanut, 5' sequence and inner sequence
tagggaagagaaggacatatgatcgcacacgtacgtaacggcatggacatcgt

SEQ ID NO: 1924 - DNA, 53 bp, Artificial Sequence
  Description of Artificial Sequence: Synthetic peanut, 5' sequence and inner sequence
tagggaagagaaggacatatgatgtcgtgactggctagctgtacatgcactgc

SEQ ID NO: 1925 - DNA, 53 bp, Artificial Sequence
  Description of Artificial Sequence: Synthetic peanut, 5' sequence and inner sequence
tagggaagagaaggacatatgatacgtgggcggagacgaagcactgcagcacg

SEQ ID NO: 1926 - DNA, 53 bp, Artificial Sequence
  Description of Artificial Sequence: Synthetic peanut, 5' sequence and inner sequence
tagggaagagaaggacatatgatcgaaccagactgggcaggcacaaaggcacg

SEQ ID NO: 1927 - DNA, 53 bp, Artificial Sequence
  Description of Artificial Sequence: Synthetic peanut, 5' sequence and inner sequence
tagggaagagaaggacatatgatcatggccgcgtgaacgtgcactaatgcgca

SEQ ID NO: 1928 - DNA, 53 bp, Artificial Sequence
  Description of Artificial Sequence: Synthetic peanut, 5' sequence and inner sequence
tagggaagagaaggacatatgatcatgatgtcacgaactgagctcacgtggcc

SEQ ID NO: 1929 - DNA, 53 bp, Artificial Sequence
  Description of Artificial Sequence: Synthetic peanut, 5' sequence and inner sequence
tagggaagagaaggacatatgatggcacaaacagcagaaggacgcgatgcacg

SEQ ID NO: 1930 - DNA, 53 bp, Artificial Sequence
  Description of Artificial Sequence: Synthetic peanut, 5' sequence and inner sequence
tagggaagagaaggacatatgatcgcacctgtcaaggcggaatggcacgtggc

SEQ ID NO: 1931 - DNA, 53 bp, Artificial Sequence
  Description of Artificial Sequence: Synthetic peanut, 5' sequence and inner sequence
tagggaagagaaggacatatgatcgcacccaactggtcgtgaccctcggcaca

SEQ ID NO: 1932 - DNA, 53 bp, Artificial Sequence
  Description of Artificial Sequence: Synthetic peanut, 5' sequence and inner sequence
tagggaagagaaggacatatgatgcacggatcgaaaccgtaccgagtggcgca

SEQ ID NO: 1933 - DNA, 53 bp, Artificial Sequence
  Description of Artificial Sequence: Synthetic peanut, 5' sequence and inner sequence
tagggaagagaaggacatatgatgcatgcacgtcacatcacaacgactgcacg

SEQ ID NO: 1934 - DNA, 53 bp, Artificial Sequence
  Description of Artificial Sequence: Synthetic peanut, 5' sequence and inner sequence
tagggaagagaaggacatatgatcatgcgggacggatgtagtatggctgcacg

SEQ ID NO: 1935 - DNA, 53 bp, Artificial Sequence
  Description of Artificial Sequence: Synthetic peanut, 5' sequence and inner sequence
tagggaagagaaggacatatgatggccaacgctggacaggctgtgactacgca

SEQ ID NO: 1936 - DNA, 53 bp, Artificial Sequence
  Description of Artificial Sequence: Synthetic peanut, 5' sequence and inner sequence
tagggaagagaaggacatatgatcatgcgcagggaagatggtgcgttgacgca

SEQ ID NO: 1937 - DNA, 53 bp, Artificial Sequence
  Description of Artificial Sequence: Synthetic peanut, 5' sequence and inner sequence
tagggaagagaaggacatatgatgaccgcagcgacgtatcatgtggtggtgta

SEQ ID NO: 1938 - DNA, 53 bp, Artificial Sequence
  Description of Artificial Sequence: Synthetic peanut, 5' sequence and inner sequence
tagggaagagaaggacatatgatcgcaagtgcacactgcagtatgtccgcaca

SEQ ID NO: 1939 - DNA, 53 bp, Artificial Sequence
  Description of Artificial Sequence: Synthetic peanut, 5' sequence and inner sequence
tagggaagagaaggacatatgatcgatgccacgaataacgggccatgtgcgta

SEQ ID NO: 1940 - DNA, 53 bp, Artificial Sequence
  Description of Artificial Sequence: Synthetic peanut, 5' sequence and inner sequence
tagggaagagaaggacatatgatcggaccgaagtggcacatgtctgttccacg

SEQ ID NO: 1941 - DNA, 53 bp, Artificial Sequence
  Description of Artificial Sequence: Synthetic peanut, 5' sequence and inner sequence
tagggaagagaaggacatatgatcatggcgacgacatgctgatcacctacgca

SEQ ID NO: 1942 - DNA, 53 bp, Artificial Sequence
  Description of Artificial Sequence: Synthetic peanut, 5' sequence and inner sequence
tagggaagagaaggacatatgatcacggaccaggagacgagacacggtgcgcg

SEQ ID NO: 1943 - DNA, 53 bp, Artificial Sequence
  Description of Artificial Sequence: Synthetic peanut, 5' sequence and inner sequence
tagggaagagaaggacatatgatacacgactcgcaccctatcatgaggccatg

SEQ ID NO: 1944 - DNA, 53 bp, Artificial Sequence
  Description of Artificial Sequence: Synthetic peanut, 5' sequence and inner sequence
tagggaagagaaggacatatgatcatgcacaggcaatggtatgctcctgcacc

SEQ ID NO: 1945 - DNA, 53 bp, Artificial Sequence
  Description of Artificial Sequence: Synthetic peanut, 5' sequence and inner sequence
tagggaagagaaggacatatgatccacacgtagccctatcagtggtgcatgca

SEQ ID NO: 1946 - DNA, 53 bp, Artificial Sequence
  Description of Artificial Sequence: Synthetic peanut, 5' sequence and inner sequence
tagggaagagaaggacatatgatctcatgctgtacgtctcgttccattgggca

SEQ ID NO: 1947 - DNA, 53 bp, Artificial Sequence
  Description of Artificial Sequence: Synthetic peanut, 5' sequence and inner sequence
tagggaagagaaggacatatgatgcggggacacgcagcacaagtacgtgcaca

SEQ ID NO: 1948 - DNA, 53 bp, Artificial Sequence
  Description of Artificial Sequence: Synthetic peanut, 5' sequence and inner sequence
tagggaagagaaggacatatgatcgatgtgcgtactcgtcccttcgagtggga

SEQ ID NO: 1949 - DNA, 53 bp, Artificial Sequence
  Description of Artificial Sequence: Synthetic peanut, 5' sequence and inner sequence
tagggaagagaaggacatatgatcacatcgtacgccgatctggatgtggctca

SEQ ID NO: 1950 - DNA, 53 bp, Artificial Sequence
  Description of Artificial Sequence: Synthetic peanut, 5' sequence and inner sequence
tagggaagagaaggacatatgatggtctgcgcgtaccgtcaagtgcgaatgga

SEQ ID NO: 1951 - DNA, 53 bp, Artificial Sequence
  Description of Artificial Sequence: Synthetic peanut, 5' sequence and inner sequence
tagggaagagaaggacatatgatggccgatgaccgtcaagtgttgtgcgctgt

SEQ ID NO: 1952 - DNA, 53 bp, Artificial Sequence
  Description of Artificial Sequence: Synthetic peanut, 5' sequence and inner sequence
tagggaagagaaggacatatgatcatgcgccaagagcaacggtgtggatggca

SEQ ID NO: 1953 - DNA, 53 bp, Artificial Sequence
  Description of Artificial Sequence: Synthetic peanut, 5' sequence and inner sequence
tagggaagagaaggacatatgatcggtccggaacgtaacgtgcacacggggca

SEQ ID NO: 1954 - DNA, 53 bp, Artificial Sequence
  Description of Artificial Sequence: Synthetic peanut, 5' sequence and inner sequence
tagggaagagaaggacatatgatcgcacatgccgtatatgaccgcgctgcatc

SEQ ID NO: 1955 - DNA, 53 bp, Artificial Sequence
  Description of Artificial Sequence: Synthetic peanut, 5' sequence and inner sequence
tagggaagagaaggacatatgatgtcattacgcatcctacacgtgggcacgta

SEQ ID NO: 1956 - DNA, 53 bp, Artificial Sequence
  Description of Artificial Sequence: Synthetic peanut, 5' sequence and inner sequence
tagggaagagaaggacatatgatcacgtgcagcatgcctgagctgacctggcc

SEQ ID NO: 1957 - DNA, 53 bp, Artificial Sequence
  Description of Artificial Sequence: Synthetic peanut, 5' sequence and inner sequence
tagggaagagaaggacatatgatcggatggaccaacaacggactgcgtggaca

SEQ ID NO: 1958 - DNA, 53 bp, Artificial Sequence
  Description of Artificial Sequence: Synthetic peanut, 5' sequence and inner sequence
tagggaagagaaggacatatgatcacgcacgcaaggacgaactggtatgcgta

SEQ ID NO: 1959 - DNA, 53 bp, Artificial Sequence
  Description of Artificial Sequence: Synthetic peanut, 5' sequence and inner sequence
tagggaagagaaggacatatgatgctgcacagcaaggtacgtcattccgcaca

SEQ ID NO: 1960 - DNA, 53 bp, Artificial Sequence
  Description of Artificial Sequence: Synthetic peanut, 5' sequence and inner sequence
tagggaagagaaggacatatgatcgtacgcagtgggccttacgtctcggcacg

SEQ ID NO: 1961 - DNA, 53 bp, Artificial Sequence
  Description of Artificial Sequence: Synthetic peanut, 5' sequence and inner sequence
tagggaagagaaggacatatgatccgtggcaatgacggtgtcacgtacgcggt

SEQ ID NO: 1962 - DNA, 53 bp, Artificial Sequence
  Description of Artificial Sequence: Synthetic peanut, 5' sequence and inner sequence
tagggaagagaaggacatatgatggcatgcacgcacctacacgtgggtatggt

SEQ ID NO: 1963 - DNA, 53 bp, Artificial Sequence
  Description of Artificial Sequence: Synthetic peanut, 5' sequence and inner sequence
tagggaagagaaggacatatgattcaccgcaacgtaagtgtgtgccgtacgca

SEQ ID NO: 1964 - DNA, 53 bp, Artificial Sequence
  Description of Artificial Sequence: Synthetic peanut, 5' sequence and inner sequence
tagggaagagaaggacatatgatccaaccaggccatgatgcgtgtcatgcatg

SEQ ID NO: 1965 - DNA, 53 bp, Artificial Sequence
  Description of Artificial Sequence: Synthetic peanut, 5' sequence and inner sequence
tagggaagagaaggacatatgatcgcaccgtagatacgtaatgcacgctgaca

SEQ ID NO: 1966 - DNA, 53 bp, Artificial Sequence
  Description of Artificial Sequence: Synthetic peanut, 5' sequence and inner sequence
tagggaagagaaggacatatgatgcgatgacagacgcagctttggtatgcacg

SEQ ID NO: 1967 - DNA, 53 bp, Artificial Sequence
  Description of Artificial Sequence: Synthetic peanut, 5' sequence and inner sequence
tagggaagagaaggacatatgatcgaacgcagtgaagtgacatccagtgcaca

SEQ ID NO: 1968 - DNA, 53 bp, Artificial Sequence
  Description of Artificial Sequence: Synthetic peanut, 5' sequence and inner sequence
tagggaagagaaggacatatgatggcctgatcgaacctagagagtggcgtggg

SEQ ID NO: 1969 - DNA, 53 bp, Artificial Sequence
  Description of Artificial Sequence: Synthetic peanut, 5' sequence and inner sequence
tagggaagagaaggacatatgatacgtgcaggtgcaacatgtccaacggcaca

SEQ ID NO: 1970 - DNA, 53 bp, Artificial Sequence
  Description of Artificial Sequence: Synthetic peanut, 5' sequence and inner sequence
tagggaagagaaggacatatgatccacaacgcacacgtagtctggtatgcatg

SEQ ID NO: 1971 - DNA, 54 bp, Artificial Sequence
  Description of Artificial Sequence: Synthetic peanut, 5' sequence and inner sequence
tagggaagagaaggacatatgatcgacactgtgcctgaccgtcaagttgcggca

SEQ ID NO: 1972 - DNA, 53 bp, Artificial Sequence
  Description of Artificial Sequence: Synthetic peanut, 5' sequence and inner sequence
tagggaagagaaggacatatgatccgatctggcgtagctggaacatgtgcgta

SEQ ID NO: 1973 - DNA, 53 bp, Artificial Sequence
  Description of Artificial Sequence: Synthetic peanut, 5' sequence and inner sequence
tagggaagagaaggacatatgatcgtgccgtaacagcaacgtacgtggccaca

SEQ ID NO: 1974 - DNA, 53 bp, Artificial Sequence
  Description of Artificial Sequence: Synthetic peanut, 5' sequence and inner sequence
tagggaagagaaggacatatgatcggacaacgtcacgcaagggtcacggcatg

SEQ ID NO: 1975 - DNA, 52 bp, Artificial Sequence
  Description of Artificial Sequence: Synthetic peanut, 5' sequence and inner sequence
tagggaagagaaggacatatgatgtcatgccatcccttcgagtgtgacggta

SEQ ID NO: 1976 - DNA, 53 bp, Artificial Sequence
  Description of Artificial Sequence: Synthetic peanut, 5' sequence and inner sequence
tagggaagagaaggacatatgatcgtgacgtggcagacacgtacaattgcgcg

SEQ ID NO: 1977 - DNA, 53 bp, Artificial Sequence
  Description of Artificial Sequence: Synthetic peanut, 5' sequence and inner sequence
tagggaagagaaggacatatgatgtcacggctcggatgtgtgcatcgtacgta

SEQ ID NO: 1978 - DNA, 53 bp, Artificial Sequence
  Description of Artificial Sequence: Synthetic peanut, 5' sequence and inner sequence
tagggaagagaaggacatatgatcacagcatgacacaggtacgacgatgcgtg

SEQ ID NO: 1979 - DNA, 53 bp, Artificial Sequence
  Description of Artificial Sequence: Synthetic peanut, 5' sequence and inner sequence
tagggaagagaaggacatatgatggcctgcacgcacctacacgtgggtatgga

SEQ ID NO: 1980 - DNA, 53 bp, Artificial Sequence
  Description of Artificial Sequence: Synthetic peanut, 5' sequence and inner sequence
tagggaagagaaggacatatgatgcgcaatgcgatacgtcgtggccatgcaca

SEQ ID NO: 1981 - DNA, 53 bp, Artificial Sequence
  Description of Artificial Sequence: Synthetic peanut, 5' sequence and inner sequence
tagggaagagaaggacatatgatcgcagcacagacatggacggtacacgcgcg

SEQ ID NO: 1982 - DNA, 53 bp, Artificial Sequence
  Description of Artificial Sequence: Synthetic peanut, 5' sequence and inner sequence
tagggaagagaaggacatatgatcatgcacggttcgccgggatacgttgcgca

SEQ ID NO: 1983 - DNA, 53 bp, Artificial Sequence
  Description of Artificial Sequence: Synthetic peanut, 5' sequence and inner sequence
tagggaagagaaggacatatgatcgagtgcagcgaggtcctgggcagtgcgtg

SEQ ID NO: 1984 - DNA, 53 bp, Artificial Sequence
  Description of Artificial Sequence: Synthetic peanut, 5' sequence and inner sequence
tagggaagagaaggacatatgatacactgctcgaccgaacgtgagacgtgtgc

SEQ ID NO: 1985 - DNA, 53 bp, Artificial Sequence
  Description of Artificial Sequence: Synthetic peanut, 5' sequence and inner sequence
tagggaagagaaggacatatgatgtactgcactgccctacacgtgggcacgta

SEQ ID NO: 1986 - DNA, 53 bp, Artificial Sequence
  Description of Artificial Sequence: Synthetic peanut, 5' sequence and inner sequence
tagggaagagaaggacatatgatcgcatgcagagggcattctccacctccgcg

SEQ ID NO: 1987 - DNA, 53 bp, Artificial Sequence
  Description of Artificial Sequence: Synthetic peanut, 5' sequence and inner sequence
tagggaagagaaggacatatgatcatgccgagtgacgaagcagttgcgcctcg

SEQ ID NO: 1988 - DNA, 53 bp, Artificial Sequence
  Description of Artificial Sequence: Synthetic peanut, 5' sequence and inner sequence
tagggaagagaaggacatatgatgtcgtgcatggcttagctggtcgtcttggc

SEQ ID NO: 1989 - DNA, 53 bp, Artificial Sequence
  Description of Artificial Sequence: Synthetic peanut, 5' sequence and inner sequence
tagggaagagaaggacatatgattgcgcagcgcgatgtcgtacctcttgcgtg

SEQ ID NO: 1990 - DNA, 53 bp, Artificial Sequence
  Description of Artificial Sequence: Synthetic peanut, 5' sequence and inner sequence
tagggaagagaaggacatatgatgcatgcagccatgagtgcacatcgtcctgc

SEQ ID NO: 1991 - DNA, 53 bp, Artificial Sequence
  Description of Artificial Sequence: Synthetic peanut, 5' sequence and inner sequence
tagggaagagaaggacatatgatgtcattccgcatcctacacgcgggcacgta

SEQ ID NO: 1992 - DNA, 53 bp, Artificial Sequence
  Description of Artificial Sequence: Synthetic peanut, 5' sequence and inner sequence
tagggaagagaaggacatatgatgcgacagcgacatacgatatgctctgcgtc

SEQ ID NO: 1993 - DNA, 53 bp, Artificial Sequence
  Description of Artificial Sequence: Synthetic peanut, 5' sequence and inner sequence
tagggaagagaaggacatatgatcacgcacgtcaataacacggtcaccgcgca

SEQ ID NO: 1994 - DNA, 53 bp, Artificial Sequence
  Description of Artificial Sequence: Synthetic peanut, 5' sequence and inner sequence
tagggaagagaaggacatatgatggcacagagcgaccatcaagtgcgtgtgta

SEQ ID NO: 1995 - DNA, 53 bp, Artificial Sequence
  Description of Artificial Sequence: Synthetic peanut, 5' sequence and inner sequence
tagggaagagaaggacatatgatcacacacatcgaccctgagcccactgcgtg

SEQ ID NO: 1996 - DNA, 53 bp, Artificial Sequence
  Description of Artificial Sequence: Synthetic peanut, 5' sequence and inner sequence
tagggaagagaaggacatatgatcgcaccgagagtcacgcacgccacggctgt

SEQ ID NO: 1997 - DNA, 53 bp, Artificial Sequence
  Description of Artificial Sequence: Synthetic peanut, 5' sequence and inner sequence
tagggaagagaaggacatatgatcgcgtgcaaggagcgtgatcggttggcaca

SEQ ID NO: 1998 - DNA, 53 bp, Artificial Sequence
  Description of Artificial Sequence: Synthetic peanut, 5' sequence and inner sequence
tagggaagagaaggacatatgatccgcacgtagtcctatcagtggtgcatgca

SEQ ID NO: 1999 - DNA, 53 bp, Artificial Sequence
  Description of Artificial Sequence: Synthetic peanut, 5' sequence and inner sequence
tagggaagagaaggacatatgattgagcgcacaaacgatcggcatgatacgca

SEQ ID NO: 2000 - DNA, 53 bp, Artificial Sequence
  Description of Artificial Sequence: Synthetic peanut, 5' sequence and inner sequence
tagggaagagaaggacatatgatcggtgacggtaagcatcgtgcaccttgcca

SEQ ID NO: 2001 - DNA, 53 bp, Artificial Sequence
  Description of Artificial Sequence: Synthetic peanut, 5' sequence and inner sequence
tagggaagagaaggacatatgattcgacccacgcgaaacggcaatgcgtcacg

SEQ ID NO: 2002 - DNA, 53 bp, Artificial Sequence
  Description of Artificial Sequence: Synthetic peanut, 5' sequence and inner sequence
tagggaagagaaggacatatgatgcataggcagaccttccgtacacgtgcgtc

SEQ ID NO: 2003 - DNA, 53 bp, Artificial Sequence
  Description of Artificial Sequence: Synthetic peanut,  sequence 3' and inner sequence
cgcaccgtcgatacgtcatgcacgctgacattgactagtacatgaccacttga

SEQ ID NO: 2004 - DNA, 53 bp, Artificial Sequence
  Description of Artificial Sequence: Synthetic peanut,  sequence 3' and inner sequence
ccgtagcgacatcaagcggtggtgtgcgtgttgactagtacatgaccacttga

SEQ ID NO: 2005 - DNA, 53 bp, Artificial Sequence
  Description of Artificial Sequence: Synthetic peanut,  sequence 3' and inner sequence
gtcatgcacgaacactatcatggcggcatgttgactagtacatgaccacttga

SEQ ID NO: 2006 - DNA, 53 bp, Artificial Sequence
  Description of Artificial Sequence: Synthetic peanut,  sequence 3' and inner sequence
gtcattccgcatcctacacgtgggcacgtattgactagtacatgaccacttga

SEQ ID NO: 2007 - DNA, 53 bp, Artificial Sequence
  Description of Artificial Sequence: Synthetic peanut,  sequence 3' and inner sequence
ccgcacgtagccctatcagtggtgcatgcattgactagtacatgaccacttga

SEQ ID NO: 2008 - DNA, 53 bp, Artificial Sequence
  Description of Artificial Sequence: Synthetic peanut,  sequence 3' and inner sequence
gcacgactcgcaccctatcatgaggccatgttgactagtacatgaccacttga

SEQ ID NO: 2009 - DNA, 53 bp, Artificial Sequence
  Description of Artificial Sequence: Synthetic peanut,  sequence 3' and inner sequence
gtcatgccatcccttcgagtgtgacaggtattgactagtacatgaccacttga

SEQ ID NO: 2010 - DNA, 53 bp, Artificial Sequence
  Description of Artificial Sequence: Synthetic peanut,  sequence 3' and inner sequence
ggcatgcgatgaacgaggcatgatgcgtcattgactagtacatgaccacttga

SEQ ID NO: 2011 - DNA, 53 bp, Artificial Sequence
  Description of Artificial Sequence: Synthetic peanut,  sequence 3' and inner sequence
ccatcgcgtcactatcatgtgtgtcacgtattgactagtacatgaccacttga

SEQ ID NO: 2012 - DNA, 53 bp, Artificial Sequence
  Description of Artificial Sequence: Synthetic peanut,  sequence 3' and inner sequence
ggcatgcacgcacctacacgtgggtatggattgactagtacatgaccacttga

SEQ ID NO: 2013 - DNA, 53 bp, Artificial Sequence
  Description of Artificial Sequence: Synthetic peanut,  sequence 3' and inner sequence
cgcaccgtcaagcgggaaggcactttggtgttgactagtacatgaccacttga

SEQ ID NO: 2014 - DNA, 53 bp, Artificial Sequence
  Description of Artificial Sequence: Synthetic peanut,  sequence 3' and inner sequence
ggacgcagcttgcctactggtggtcacgtattgactagtacatgaccacttga

SEQ ID NO: 2015 - DNA, 53 bp, Artificial Sequence
  Description of Artificial Sequence: Synthetic peanut,  sequence 3' and inner sequence
gtcgtgactggctagctggacatgcactgcttgactagtacatgaccacttga

SEQ ID NO: 2016 - DNA, 53 bp, Artificial Sequence
  Description of Artificial Sequence: Synthetic peanut,  sequence 3' and inner sequence
gcgacagcgacatacgatctgctctgcgtcttgactagtacatgaccacttga

SEQ ID NO: 2017 - DNA, 53 bp, Artificial Sequence
  Description of Artificial Sequence: Synthetic peanut,  sequence 3' and inner sequence
tggccgatcgaccctatcaagtgcagcatgttgactagtacatgaccacttga

SEQ ID NO: 2018 - DNA, 53 bp, Artificial Sequence
  Description of Artificial Sequence: Synthetic peanut,  sequence 3' and inner sequence
cgcaccgagagtgatcgtggttcgcagtcattgactagtacatgaccacttga

SEQ ID NO: 2019 - DNA, 53 bp, Artificial Sequence
  Description of Artificial Sequence: Synthetic peanut,  sequence 3' and inner sequence
ggacggatcgaacctacaagttgtcgtggattgactagtacatgaccacttga

SEQ ID NO: 2020 - DNA, 53 bp, Artificial Sequence
  Description of Artificial Sequence: Synthetic peanut,  sequence 3' and inner sequence
ggccacagcgtacctcaacgtggacgtgcattgactagtacatgaccacttga

SEQ ID NO: 2021 - DNA, 53 bp, Artificial Sequence
  Description of Artificial Sequence: Synthetic peanut,  sequence 3' and inner sequence
gtcactgtgcctgaccgtcaagttgcggcattgactagtacatgaccacttga

SEQ ID NO: 2022 - DNA, 53 bp, Artificial Sequence
  Description of Artificial Sequence: Synthetic peanut,  sequence 3' and inner sequence
gcactgagcgtacgtatcagcgggcacgtattgactagtacatgaccacttga

SEQ ID NO: 2023 - DNA, 53 bp, Artificial Sequence
  Description of Artificial Sequence: Synthetic peanut,  sequence 3' and inner sequence
ggcacaaacggaccgacaagtgcgcatggattgactagtacatgaccacttga

SEQ ID NO: 2024 - DNA, 53 bp, Artificial Sequence
  Description of Artificial Sequence: Synthetic peanut,  sequence 3' and inner sequence
ggcctgatcgaacctagagagtggcgtggattgactagtacatgaccacttga

SEQ ID NO: 2025 - DNA, 53 bp, Artificial Sequence
  Description of Artificial Sequence: Synthetic peanut,  sequence 3' and inner sequence
gcgtgtcagcaatacgtcctcatctgcccgttgactagtacatgaccacttga

SEQ ID NO: 2026 - DNA, 53 bp, Artificial Sequence
  Description of Artificial Sequence: Synthetic peanut,  sequence 3' and inner sequence
ggcctgcgatggatgtgggttgtgctcgtcttgactagtacatgaccacttga

SEQ ID NO: 2027 - DNA, 53 bp, Artificial Sequence
  Description of Artificial Sequence: Synthetic peanut,  sequence 3' and inner sequence
ggcctgcgatggatgtgtgcgtgtattagcttgactagtacatgaccacttga

SEQ ID NO: 2028 - DNA, 53 bp, Artificial Sequence
  Description of Artificial Sequence: Synthetic peanut,  sequence 3' and inner sequence
gtacgcatcgtcccgtcatgtggttccgtattgactagtacatgaccacttga

SEQ ID NO: 2029 - DNA, 53 bp, Artificial Sequence
  Description of Artificial Sequence: Synthetic peanut,  sequence 3' and inner sequence
ggacgcatcgccccttcgagtggacaggtattgactagtacatgaccacttga

SEQ ID NO: 2030 - DNA, 53 bp, Artificial Sequence
  Description of Artificial Sequence: Synthetic peanut,  sequence 3' and inner sequence
ggcatgcacgcacctacacgtgggcacgtattgactagtacatgaccacttga

SEQ ID NO: 2031 - DNA, 53 bp, Artificial Sequence
  Description of Artificial Sequence: Synthetic peanut,  sequence 3' and inner sequence
gtgctgaacgtaccgattcaagtgtgcgtgttgactagtacatgaccacttga

SEQ ID NO: 2032 - DNA, 53 bp, Artificial Sequence
  Description of Artificial Sequence: Synthetic peanut,  sequence 3' and inner sequence
gtcacggaacgaagcctatcaagtgcgacattgactagtacatgaccacttga

SEQ ID NO: 2033 - DNA, 53 bp, Artificial Sequence
  Description of Artificial Sequence: Synthetic peanut,  sequence 3' and inner sequence
gcactgcacgcaccctatcatgtaggcatgttgactagtacatgaccacttga

SEQ ID NO: 2034 - DNA, 53 bp, Artificial Sequence
  Description of Artificial Sequence: Synthetic peanut,  sequence 3' and inner sequence
gtcatgcgcggacattcaagttggcgtggattgactagtacatgaccacttga

SEQ ID NO: 2035 - DNA, 53 bp, Artificial Sequence
  Description of Artificial Sequence: Synthetic peanut,  sequence 3' and inner sequence
ccgtagcgacatcaagcggtggtgtgcgtattgactagtacatgaccacttga

SEQ ID NO: 2036 - DNA, 53 bp, Artificial Sequence
  Description of Artificial Sequence: Synthetic peanut,  sequence 3' and inner sequence
cgcatcgtacgtactcctcgtcactgcgtgttgactagtacatgaccacttga

SEQ ID NO: 2037 - DNA, 53 bp, Artificial Sequence
  Description of Artificial Sequence: Synthetic peanut,  sequence 3' and inner sequence
ggccaagctgaccgtaaaggcaggcgtgtattgactagtacatgaccacttga

SEQ ID NO: 2038 - DNA, 53 bp, Artificial Sequence
  Description of Artificial Sequence: Synthetic peanut,  sequence 3' and inner sequence
ggcacggaggatggacgttctgccttggtcttgactagtacatgaccacttga

SEQ ID NO: 2039 - DNA, 53 bp, Artificial Sequence
  Description of Artificial Sequence: Synthetic peanut,  sequence 3' and inner sequence
ggcatgcgctgggtagtgatcacgtacggtttgactagtacatgaccacttga

SEQ ID NO: 2040 - DNA, 53 bp, Artificial Sequence
  Description of Artificial Sequence: Synthetic peanut,  sequence 3' and inner sequence
cgtaccgcaagtgacgtgtccgtgccgtgattgactagtacatgaccacttga

SEQ ID NO: 2041 - DNA, 53 bp, Artificial Sequence
  Description of Artificial Sequence: Synthetic peanut,  sequence 3' and inner sequence
ccgatcgcacgtcaaggcaggctgtacgagttgactagtacatgaccacttga

SEQ ID NO: 2042 - DNA, 53 bp, Artificial Sequence
  Description of Artificial Sequence: Synthetic peanut,  sequence 3' and inner sequence
gacctgactgtgcctatcgagtgcgtgatgttgactagtacatgaccacttga

SEQ ID NO: 2043 - DNA, 53 bp, Artificial Sequence
  Description of Artificial Sequence: Synthetic peanut,  sequence 3' and inner sequence
gacggtgcgtcctaaagtgctcagtgcgtgttgactagtacatgaccacttga

SEQ ID NO: 2044 - DNA, 53 bp, Artificial Sequence
  Description of Artificial Sequence: Synthetic peanut,  sequence 3' and inner sequence
ggacggaacgtgagggcaagtacgtgctcgttgactagtacatgaccacttga

SEQ ID NO: 2045 - DNA, 53 bp, Artificial Sequence
  Description of Artificial Sequence: Synthetic peanut,  sequence 3' and inner sequence
gcactggctgacctacacgtggacgatgtgttgactagtacatgaccacttga

SEQ ID NO: 2046 - DNA, 53 bp, Artificial Sequence
  Description of Artificial Sequence: Synthetic peanut,  sequence 3' and inner sequence
ggacgcagcggaacgttcgagtggtacgtattgactagtacatgaccacttga

SEQ ID NO: 2047 - DNA, 53 bp, Artificial Sequence
  Description of Artificial Sequence: Synthetic peanut,  sequence 3' and inner sequence
gtactgcactgccctacacgtgggaatggattgactagtacatgaccacttga

SEQ ID NO: 2048 - DNA, 53 bp, Artificial Sequence
  Description of Artificial Sequence: Synthetic peanut,  sequence 3' and inner sequence
ggccaatgcgccccttcatgttgtcgtgtattgactagtacatgaccacttga

SEQ ID NO: 2049 - DNA, 53 bp, Artificial Sequence
  Description of Artificial Sequence: Synthetic peanut,  sequence 3' and inner sequence
cgtaccgacaagggagcacgtacgcggtcattgactagtacatgaccacttga

SEQ ID NO: 2050 - DNA, 53 bp, Artificial Sequence
  Description of Artificial Sequence: Synthetic peanut,  sequence 3' and inner sequence
gcattgggcgaacgaccatcagtgtgcatgttgactagtacatgaccacttga

SEQ ID NO: 2051 - DNA, 53 bp, Artificial Sequence
  Description of Artificial Sequence: Synthetic peanut,  sequence 3' and inner sequence
cgcatgggacgtactgaccggatcgtgtcattgactagtacatgaccacttga

SEQ ID NO: 2052 - DNA, 53 bp, Artificial Sequence
  Description of Artificial Sequence: Synthetic peanut,  sequence 3' and inner sequence
ggacgcaacgtaccgtatcgtggccatgtgttgactagtacatgaccacttga

SEQ ID NO: 2053 - DNA, 53 bp, Artificial Sequence
  Description of Artificial Sequence: Synthetic peanut,  sequence 3' and inner sequence
gcacgtacgccttgcctatctgtgctcatgttgactagtacatgaccacttga

SEQ ID NO: 2054 - DNA, 53 bp, Artificial Sequence
  Description of Artificial Sequence: Synthetic peanut,  sequence 3' and inner sequence
gcattggacgatcgtgccctacacgtgggcttgactagtacatgaccacttga

SEQ ID NO: 2055 - DNA, 53 bp, Artificial Sequence
  Description of Artificial Sequence: Synthetic peanut,  sequence 3' and inner sequence
ggacgcacgcagaccttcaagtcggccatgttgactagtacatgaccacttga

SEQ ID NO: 2056 - DNA, 53 bp, Artificial Sequence
  Description of Artificial Sequence: Synthetic peanut,  sequence 3' and inner sequence
cacgtgcggaggacaacgccctactgcgtgttgactagtacatgaccacttga

SEQ ID NO: 2057 - DNA, 53 bp, Artificial Sequence
  Description of Artificial Sequence: Synthetic peanut,  sequence 3' and inner sequence
tggccaacgctacctatggacgtgtgcgtgttgactagtacatgaccacttga

SEQ ID NO: 2058 - DNA, 53 bp, Artificial Sequence
  Description of Artificial Sequence: Synthetic peanut,  sequence 3' and inner sequence
gtacggaacggaacaacaagggcaggcatgttgactagtacatgaccacttga

SEQ ID NO: 2059 - DNA, 53 bp, Artificial Sequence
  Description of Artificial Sequence: Synthetic peanut,  sequence 3' and inner sequence
gacgacacgaccttcaagcatggcctagcgttgactagtacatgaccacttga

SEQ ID NO: 2060 - DNA, 53 bp, Artificial Sequence
  Description of Artificial Sequence: Synthetic peanut,  sequence 3' and inner sequence
cgcgacgagtaggcatgtcttctgtgtgcattgactagtacatgaccacttga

SEQ ID NO: 2061 - DNA, 53 bp, Artificial Sequence
  Description of Artificial Sequence: Synthetic peanut,  sequence 3' and inner sequence
gccgacgatgacctggacgtgtggttgtccttgactagtacatgaccacttga

SEQ ID NO: 2062 - DNA, 53 bp, Artificial Sequence
  Description of Artificial Sequence: Synthetic peanut,  sequence 3' and inner sequence
gccatcgtacgatcgtacccggcatgcacgttgactagtacatgaccacttga

SEQ ID NO: 2063 - DNA, 53 bp, Artificial Sequence
  Description of Artificial Sequence: Synthetic peanut,  sequence 3' and inner sequence
tggacaacgatgccctgtcgtgtgcgcggtttgactagtacatgaccacttga

SEQ ID NO: 2064 - DNA, 53 bp, Artificial Sequence
  Description of Artificial Sequence: Synthetic peanut,  sequence 3' and inner sequence
cgcaacggtgacgagcagtgagtgcatgtattgactagtacatgaccacttga

SEQ ID NO: 2065 - DNA, 53 bp, Artificial Sequence
  Description of Artificial Sequence: Synthetic peanut,  sequence 3' and inner sequence
cacacgtatggtcggcgatggactgtggcattgactagtacatgaccacttga

SEQ ID NO: 2066 - DNA, 53 bp, Artificial Sequence
  Description of Artificial Sequence: Synthetic peanut,  sequence 3' and inner sequence
ggactgaacgtactgccaggtgagcatgcattgactagtacatgaccacttga

SEQ ID NO: 2067 - DNA, 53 bp, Artificial Sequence
  Description of Artificial Sequence: Synthetic peanut,  sequence 3' and inner sequence
cgatggtacgaacgccacgtcatgcggtcattgactagtacatgaccacttga

SEQ ID NO: 2068 - DNA, 53 bp, Artificial Sequence
  Description of Artificial Sequence: Synthetic peanut,  sequence 3' and inner sequence
cgcaacgtcagtgtgcatggatgcgtcctgttgactagtacatgaccacttga

SEQ ID NO: 2069 - DNA, 53 bp, Artificial Sequence
  Description of Artificial Sequence: Synthetic peanut,  sequence 3' and inner sequence
cacgtggcagtgggaagtgtgcactacgcattgactagtacatgaccacttga

SEQ ID NO: 2070 - DNA, 52 bp, Artificial Sequence
  Description of Artificial Sequence: Synthetic peanut,  sequence 3' and inner sequence
gcacgccgatgccctcatgtggccgtggattgactagtacatgaccacttga

SEQ ID NO: 2071 - DNA, 53 bp, Artificial Sequence
  Description of Artificial Sequence: Synthetic peanut,  sequence 3' and inner sequence
ccgtagcgacatcaagcggtgttgtgcgtgttgactagtacatgaccacttga

SEQ ID NO: 2072 - DNA, 53 bp, Artificial Sequence
  Description of Artificial Sequence: Synthetic peanut,  sequence 3' and inner sequence
catgcaatacgtcagcgtaccgtgtgcacattgactagtacatgaccacttga

SEQ ID NO: 2073 - DNA, 53 bp, Artificial Sequence
  Description of Artificial Sequence: Synthetic peanut,  sequence 3' and inner sequence
cgcaccggacgtgacgacgtagtgtggccattgactagtacatgaccacttga

SEQ ID NO: 2074 - DNA, 53 bp, Artificial Sequence
  Description of Artificial Sequence: Synthetic peanut,  sequence 3' and inner sequence
gtacgcacgatgagcgccaagtgacatggattgactagtacatgaccacttga

SEQ ID NO: 2075 - DNA, 53 bp, Artificial Sequence
  Description of Artificial Sequence: Synthetic peanut,  sequence 3' and inner sequence
cgatgtgcagagtggtggacaagctgcgcattgactagtacatgaccacttga

SEQ ID NO: 2076 - DNA, 53 bp, Artificial Sequence
  Description of Artificial Sequence: Synthetic peanut,  sequence 3' and inner sequence
catgtgtcgactcgccctatcatgcggtcattgactagtacatgaccacttga

SEQ ID NO: 2077 - DNA, 53 bp, Artificial Sequence
  Description of Artificial Sequence: Synthetic peanut,  sequence 3' and inner sequence
gtgcgagcagaccgacgcgagtggtacgtgttgactagtacatgaccacttga

SEQ ID NO: 2078 - DNA, 53 bp, Artificial Sequence
  Description of Artificial Sequence: Synthetic peanut,  sequence 3' and inner sequence
ggcatgcacgaacactatcatggcggcatgttgactagtacatgaccacttga

SEQ ID NO: 2079 - DNA, 53 bp, Artificial Sequence
  Description of Artificial Sequence: Synthetic peanut,  sequence 3' and inner sequence
ggcatgatcgaccgcatagtcacgtacgcattgactagtacatgaccacttga

SEQ ID NO: 2080 - DNA, 53 bp, Artificial Sequence
  Description of Artificial Sequence: Synthetic peanut,  sequence 3' and inner sequence
gcacgcaacgaacctacgagtgatcgtgtattgactagtacatgaccacttga

SEQ ID NO: 2081 - DNA, 53 bp, Artificial Sequence
  Description of Artificial Sequence: Synthetic peanut,  sequence 3' and inner sequence
ggacgcaacgtaccgtatcgtggccatgtattgactagtacatgaccacttga

SEQ ID NO: 2082 - DNA, 53 bp, Artificial Sequence
  Description of Artificial Sequence: Synthetic peanut,  sequence 3' and inner sequence
ccgcatcggaccgatcaaggcaggcttggattgactagtacatgaccacttga

SEQ ID NO: 2083 - DNA, 53 bp, Artificial Sequence
  Description of Artificial Sequence: Synthetic peanut,  sequence 3' and inner sequence
cggaccggtgacgagtgctagtacggcatgttgactagtacatgaccacttga

SEQ ID NO: 2084 - DNA, 53 bp, Artificial Sequence
  Description of Artificial Sequence: Synthetic peanut,  sequence 3' and inner sequence
cgtgcgcgagacatggtccatcggttcgtgttgactagtacatgaccacttga

SEQ ID NO: 2085 - DNA, 53 bp, Artificial Sequence
  Description of Artificial Sequence: Synthetic peanut,  sequence 3' and inner sequence
ggcatgcgatggatgtgggttgtgctcgtcttgactagtacatgaccacttga

SEQ ID NO: 2086 - DNA, 53 bp, Artificial Sequence
  Description of Artificial Sequence: Synthetic peanut,  sequence 3' and inner sequence
cacgacagcgttagcaggccatgcgacacgttgactagtacatgaccacttga

SEQ ID NO: 2087 - DNA, 53 bp, Artificial Sequence
  Description of Artificial Sequence: Synthetic peanut,  sequence 3' and inner sequence
cacgcaaggacagcacacctgactggcgtgttgactagtacatgaccacttga

SEQ ID NO: 2088 - DNA, 53 bp, Artificial Sequence
  Description of Artificial Sequence: Synthetic peanut,  sequence 3' and inner sequence
acgtgtggcatgcgactgtccgtgttcatgttgactagtacatgaccacttga

SEQ ID NO: 2089 - DNA, 53 bp, Artificial Sequence
  Description of Artificial Sequence: Synthetic peanut,  sequence 3' and inner sequence
ggccatgtcgacctatggtgatgtgcgacgttgactagtacatgaccacttga

SEQ ID NO: 2090 - DNA, 53 bp, Artificial Sequence
  Description of Artificial Sequence: Synthetic peanut,  sequence 3' and inner sequence
acgtgacggatcgatggacctcagtgcgtgttgactagtacatgaccacttga

SEQ ID NO: 2091 - DNA, 53 bp, Artificial Sequence
  Description of Artificial Sequence: Synthetic peanut,  sequence 3' and inner sequence
cgcaaccggcacgtgagcactgtacgatcgttgactagtacatgaccacttga

SEQ ID NO: 2092 - DNA, 53 bp, Artificial Sequence
  Description of Artificial Sequence: Synthetic peanut,  sequence 3' and inner sequence
gacgcacgacgaccggtcaagttcggcatgttgactagtacatgaccacttga

SEQ ID NO: 2093 - DNA, 53 bp, Artificial Sequence
  Description of Artificial Sequence: Synthetic peanut,  sequence 3' and inner sequence
gtacgcgacgtccctgagagtgtgcaggtattgactagtacatgaccacttga

SEQ ID NO: 2094 - DNA, 53 bp, Artificial Sequence
  Description of Artificial Sequence: Synthetic peanut,  sequence 3' and inner sequence
ggactgcgcgtgacctatcaatggcatgtattgactagtacatgaccacttga

SEQ ID NO: 2095 - DNA, 53 bp, Artificial Sequence
  Description of Artificial Sequence: Synthetic peanut,  sequence 3' and inner sequence
ggcagtgtcgtgcccgtcaatgtgtgcatgttgactagtacatgaccacttga

SEQ ID NO: 2096 - DNA, 53 bp, Artificial Sequence
  Description of Artificial Sequence: Synthetic peanut,  sequence 3' and inner sequence
cgcacgatcgtcctgccctcacgtggcgcattgactagtacatgaccacttga

SEQ ID NO: 2097 - DNA, 53 bp, Artificial Sequence
  Description of Artificial Sequence: Synthetic peanut,  sequence 3' and inner sequence
ggacgagcggaaggtgaggcatggtgcgtattgactagtacatgaccacttga

SEQ ID NO: 2098 - DNA, 53 bp, Artificial Sequence
  Description of Artificial Sequence: Synthetic peanut,  sequence 3' and inner sequence
cgaccgtgacgcaggataacgtactgcgcattgactagtacatgaccacttga

SEQ ID NO: 2099 - DNA, 53 bp, Artificial Sequence
  Description of Artificial Sequence: Synthetic peanut,  sequence 3' and inner sequence
tcgatcgatccgtcaagcaggcacgtgtcattgactagtacatgaccacttga

SEQ ID NO: 2100 - DNA, 53 bp, Artificial Sequence
  Description of Artificial Sequence: Synthetic peanut,  sequence 3' and inner sequence
gtacgcgctggtcccgtatcatgtgcgtcattgactagtacatgaccacttga

SEQ ID NO: 2101 - DNA, 53 bp, Artificial Sequence
  Description of Artificial Sequence: Synthetic peanut,  sequence 3' and inner sequence
cgcaccacacgcacgttatgcacctgcgctttgactagtacatgaccacttga

SEQ ID NO: 2102 - DNA, 53 bp, Artificial Sequence
  Description of Artificial Sequence: Synthetic peanut,  sequence 3' and inner sequence
ggcatgcgaatggatgtgacgatgtgcgtgttgactagtacatgaccacttga

SEQ ID NO: 2103 - DNA, 53 bp, Artificial Sequence
  Description of Artificial Sequence: Synthetic peanut,  sequence 3' and inner sequence
cgaaccgcatgtaaggtcacgcacgtcgtattgactagtacatgaccacttga

SEQ ID NO: 2104 - DNA, 53 bp, Artificial Sequence
  Description of Artificial Sequence: Synthetic peanut,  sequence 3' and inner sequence
cgcaccgtagatacgtcatgcacgctgacattgactagtacatgaccacttga

SEQ ID NO: 2105 - DNA, 53 bp, Artificial Sequence
  Description of Artificial Sequence: Synthetic peanut,  sequence 3' and inner sequence
cgtaccgaacgcggtcttgtgcactacgtgttgactagtacatgaccacttga

SEQ ID NO: 2106 - DNA, 53 bp, Artificial Sequence
  Description of Artificial Sequence: Synthetic peanut,  sequence 3' and inner sequence
gtactgcactgccctacacgtgggtatggattgactagtacatgaccacttga

SEQ ID NO: 2107 - DNA, 53 bp, Artificial Sequence
  Description of Artificial Sequence: Synthetic peanut,  sequence 3' and inner sequence
gcatcacagtcactatcttccgtgggcacgttgactagtacatgaccacttga

SEQ ID NO: 2108 - DNA, 53 bp, Artificial Sequence
  Description of Artificial Sequence: Synthetic peanut,  sequence 3' and inner sequence
gcaacggcagcgtacgtgctttacgtcacgttgactagtacatgaccacttga

SEQ ID NO: 2109 - DNA, 53 bp, Artificial Sequence
  Description of Artificial Sequence: Synthetic peanut,  sequence 3' and inner sequence
gtgcgccgatatcccttcacagttggcatgttgactagtacatgaccacttga

SEQ ID NO: 2110 - DNA, 53 bp, Artificial Sequence
  Description of Artificial Sequence: Synthetic peanut,  sequence 3' and inner sequence
caggcacaacgcacgtgacaccgctgcgcattgactagtacatgaccacttga

SEQ ID NO: 2111 - DNA, 53 bp, Artificial Sequence
  Description of Artificial Sequence: Synthetic peanut,  sequence 3' and inner sequence
ggacaacgtggctggtaggtatcgtgggcattgactagtacatgaccacttga

SEQ ID NO: 2112 - DNA, 53 bp, Artificial Sequence
  Description of Artificial Sequence: Synthetic peanut,  sequence 3' and inner sequence
tggccagaacgacaagtgcatgcgcagtgattgactagtacatgaccacttga

SEQ ID NO: 2113 - DNA, 53 bp, Artificial Sequence
  Description of Artificial Sequence: Synthetic peanut,  sequence 3' and inner sequence
cgcacccggcaagacggaatgtggttggcgttgactagtacatgaccacttga

SEQ ID NO: 2114 - DNA, 53 bp, Artificial Sequence
  Description of Artificial Sequence: Synthetic peanut,  sequence 3' and inner sequence
cgcaccgtcgatacgtcattcacgctgacattgactagtacatgaccacttga

SEQ ID NO: 2115 - DNA, 53 bp, Artificial Sequence
  Description of Artificial Sequence: Synthetic peanut,  sequence 3' and inner sequence
cgatgctacacgtgacggcatgcgcttggcttgactagtacatgaccacttga

SEQ ID NO: 2116 - DNA, 53 bp, Artificial Sequence
  Description of Artificial Sequence: Synthetic peanut,  sequence 3' and inner sequence
ggcctgcgatggaatgtgcgaatgtacgcattgactagtacatgaccacttga

SEQ ID NO: 2117 - DNA, 53 bp, Artificial Sequence
  Description of Artificial Sequence: Synthetic peanut,  sequence 3' and inner sequence
gcaatgggtggccacctcgtcacgcgtggtttgactagtacatgaccacttga

SEQ ID NO: 2118 - DNA, 53 bp, Artificial Sequence
  Description of Artificial Sequence: Synthetic peanut,  sequence 3' and inner sequence
ccgcacgcgacagaacgtgttcatgcactgttgactagtacatgaccacttga

SEQ ID NO: 2119 - DNA, 53 bp, Artificial Sequence
  Description of Artificial Sequence: Synthetic peanut,  sequence 3' and inner sequence
gtcatgcgatggatgtgggttgtgctcgtcttgactagtacatgaccacttga

SEQ ID NO: 2120 - DNA, 53 bp, Artificial Sequence
  Description of Artificial Sequence: Synthetic peanut,  sequence 3' and inner sequence
ggatggccgaactgtgccgtggagtgcatgttgactagtacatgaccacttga

SEQ ID NO: 2121 - DNA, 53 bp, Artificial Sequence
  Description of Artificial Sequence: Synthetic peanut,  sequence 3' and inner sequence
ccgtagcgacatcaagctgtggtgtgcgtgttgactagtacatgaccacttga

SEQ ID NO: 2122 - DNA, 53 bp, Artificial Sequence
  Description of Artificial Sequence: Synthetic peanut,  sequence 3' and inner sequence
ggacgcgtcgaccttcaagtgtgccgtggattgactagtacatgaccacttga

SEQ ID NO: 2123 - DNA, 53 bp, Artificial Sequence
  Description of Artificial Sequence: Synthetic peanut,  sequence 3' and inner sequence
ccgtagcgacatcaagcggtggtgtgcatgttgactagtacatgaccacttga

SEQ ID NO: 2124 - DNA, 53 bp, Artificial Sequence
  Description of Artificial Sequence: Synthetic peanut,  sequence 3' and inner sequence
cacgtgcatgctaacgtacggccagggacattgactagtacatgaccacttga

SEQ ID NO: 2125 - DNA, 53 bp, Artificial Sequence
  Description of Artificial Sequence: Synthetic peanut,  sequence 3' and inner sequence
ggcctgactgtgcctatcgagtgcgtgatgttgactagtacatgaccacttga

SEQ ID NO: 2126 - DNA, 53 bp, Artificial Sequence
  Description of Artificial Sequence: Synthetic peanut,  sequence 3' and inner sequence
gatgcacgcaacgtacccttcatgtggccattgactagtacatgaccacttga

SEQ ID NO: 2127 - DNA, 53 bp, Artificial Sequence
  Description of Artificial Sequence: Synthetic peanut,  sequence 3' and inner sequence
ctcatgcggaccgaactggatgtgtgcatgttgactagtacatgaccacttga

SEQ ID NO: 2128 - DNA, 53 bp, Artificial Sequence
  Description of Artificial Sequence: Synthetic peanut,  sequence 3' and inner sequence
ggcctgcgatggatgtgggctagtatgggcttgactagtacatgaccacttga

SEQ ID NO: 2129 - DNA, 53 bp, Artificial Sequence
  Description of Artificial Sequence: Synthetic peanut,  sequence 3' and inner sequence
cacgatccgaccaggcgtgacgtggccatgttgactagtacatgaccacttga

SEQ ID NO: 2130 - DNA, 53 bp, Artificial Sequence
  Description of Artificial Sequence: Synthetic peanut,  sequence 3' and inner sequence
cgatccgtcaaggtagtgatgtgctacgtgttgactagtacatgaccacttga

SEQ ID NO: 2131 - DNA, 53 bp, Artificial Sequence
  Description of Artificial Sequence: Synthetic peanut,  sequence 3' and inner sequence
tgtggccaaacgcgcatacacgtgctcatgttgactagtacatgaccacttga

SEQ ID NO: 2132 - DNA, 53 bp, Artificial Sequence
  Description of Artificial Sequence: Synthetic peanut,  sequence 3' and inner sequence
ccgtagcgacatcaagcggtggtgtgcgtcttgactagtacatgaccacttga

SEQ ID NO: 2133 - DNA, 53 bp, Artificial Sequence
  Description of Artificial Sequence: Synthetic peanut,  sequence 3' and inner sequence
atggccgcagctgacctagcatgtgtgtcattgactagtacatgaccacttga

SEQ ID NO: 2134 - DNA, 53 bp, Artificial Sequence
  Description of Artificial Sequence: Synthetic peanut,  sequence 3' and inner sequence
gacacgccgatgagcctagcctgtacgacgttgactagtacatgaccacttga

SEQ ID NO: 2135 - DNA, 53 bp, Artificial Sequence
  Description of Artificial Sequence: Synthetic peanut,  sequence 3' and inner sequence
cgaccgtgacgtgtgcagtagtacggcgtgttgactagtacatgaccacttga

SEQ ID NO: 2136 - DNA, 53 bp, Artificial Sequence
  Description of Artificial Sequence: Synthetic peanut,  sequence 3' and inner sequence
gccgtcgcgacctagcaagtgcgatgtggattgactagtacatgaccacttga

SEQ ID NO: 2137 - DNA, 53 bp, Artificial Sequence
  Description of Artificial Sequence: Synthetic peanut,  sequence 3' and inner sequence
cgcaccgtcgatacgtcatgcactctgacattgactagtacatgaccacttga

SEQ ID NO: 2138 - DNA, 53 bp, Artificial Sequence
  Description of Artificial Sequence: Synthetic peanut,  sequence 3' and inner sequence
cgtgccaggacatgacgtgcacgctgcgcattgactagtacatgaccacttga

SEQ ID NO: 2139 - DNA, 53 bp, Artificial Sequence
  Description of Artificial Sequence: Synthetic peanut,  sequence 3' and inner sequence
ggcctgcgatggatgaggtgctgcactagtttgactagtacatgaccacttga

SEQ ID NO: 2140 - DNA, 53 bp, Artificial Sequence
  Description of Artificial Sequence: Synthetic peanut,  sequence 3' and inner sequence
catgtgcgtggagaacgtccctatgcgacattgactagtacatgaccacttga

SEQ ID NO: 2141 - DNA, 53 bp, Artificial Sequence
  Description of Artificial Sequence: Synthetic peanut,  sequence 3' and inner sequence
ccgtagcgacatcaagcgttggtgtgcgtgttgactagtacatgaccacttga

SEQ ID NO: 2142 - DNA, 53 bp, Artificial Sequence
  Description of Artificial Sequence: Synthetic peanut,  sequence 3' and inner sequence
catatgccgatcgacactagcaagtgtgcattgactagtacatgaccacttga

SEQ ID NO: 2143 - DNA, 53 bp, Artificial Sequence
  Description of Artificial Sequence: Synthetic peanut,  sequence 3' and inner sequence
catgtgtgcacaaccgatgtatgctgcgtgttgactagtacatgaccacttga

SEQ ID NO: 2144 - DNA, 53 bp, Artificial Sequence
  Description of Artificial Sequence: Synthetic peanut,  sequence 3' and inner sequence
ccgtagcgacatcaagcggcggtgtgcgtgttgactagtacatgaccacttga

SEQ ID NO: 2145 - DNA, 53 bp, Artificial Sequence
  Description of Artificial Sequence: Synthetic peanut,  sequence 3' and inner sequence
gtacgactcgcaccctatcatgaggccatgttgactagtacatgaccacttga

SEQ ID NO: 2146 - DNA, 53 bp, Artificial Sequence
  Description of Artificial Sequence: Synthetic peanut,  sequence 3' and inner sequence
gtctgagcgcaacctcgtggactgtgcgtgttgactagtacatgaccacttga

SEQ ID NO: 2147 - DNA, 53 bp, Artificial Sequence
  Description of Artificial Sequence: Synthetic peanut,  sequence 3' and inner sequence
gtgcgacctgacctagcaagcggtagtgtattgactagtacatgaccacttga

SEQ ID NO: 2148 - DNA, 51 bp, Artificial Sequence
  Description of Artificial Sequence: Synthetic peanut,  sequence 3' and inner sequence
ggacgcagctgacctagcatgtgtgtcattgactagtacatgaccacttga

SEQ ID NO: 2149 - DNA, 53 bp, Artificial Sequence
  Description of Artificial Sequence: Synthetic peanut,  sequence 3' and inner sequence
cgtaccgtcgatacgtcatgcacgctgacattgactagtacatgaccacttga

SEQ ID NO: 2150 - DNA, 54 bp, Artificial Sequence
  Description of Artificial Sequence: Synthetic peanut,  sequence 3' and inner sequence
ggcctgcgatggatggggtcagcacgttggcttgactagtacatgaccacttga

SEQ ID NO: 2151 - DNA, 53 bp, Artificial Sequence
  Description of Artificial Sequence: Synthetic peanut,  sequence 3' and inner sequence
ccgtagcgacatcaagcggtggcgtgcgtgttgactagtacatgaccacttga

SEQ ID NO: 2152 - DNA, 53 bp, Artificial Sequence
  Description of Artificial Sequence: Synthetic peanut,  sequence 3' and inner sequence
cgtaacgcgatgtcaggcacgagttgcacattgactagtacatgaccacttga

SEQ ID NO: 2153 - DNA, 53 bp, Artificial Sequence
  Description of Artificial Sequence: Synthetic peanut,  sequence 3' and inner sequence
cgcaccatgaaaggggtgaggtacgtcgcgttgactagtacatgaccacttga

SEQ ID NO: 2154 - DNA, 53 bp, Artificial Sequence
  Description of Artificial Sequence: Synthetic peanut,  sequence 3' and inner sequence
gcatcggatgacgcaactgaccgagtgggattgactagtacatgaccacttga

SEQ ID NO: 2155 - DNA, 53 bp, Artificial Sequence
  Description of Artificial Sequence: Synthetic peanut,  sequence 3' and inner sequence
cgtaccgcaagggggagagtgcgtgttggtttgactagtacatgaccacttga

SEQ ID NO: 2156 - DNA, 53 bp, Artificial Sequence
  Description of Artificial Sequence: Synthetic peanut,  sequence 3' and inner sequence
gacgctgcgttccctatcatgtgcggcatgttgactagtacatgaccacttga

SEQ ID NO: 2157 - DNA, 53 bp, Artificial Sequence
  Description of Artificial Sequence: Synthetic peanut,  sequence 3' and inner sequence
ccagccgaaccgcagatggtgcatgtcgcattgactagtacatgaccacttga

SEQ ID NO: 2158 - DNA, 53 bp, Artificial Sequence
  Description of Artificial Sequence: Synthetic peanut,  sequence 3' and inner sequence
cgcaccgggacgagacgtgctagtgtgtcattgactagtacatgaccacttga

SEQ ID NO: 2159 - DNA, 53 bp, Artificial Sequence
  Description of Artificial Sequence: Synthetic peanut,  sequence 3' and inner sequence
cgtgtcgtaggggatgagctgagcttggtcttgactagtacatgaccacttga

SEQ ID NO: 2160 - DNA, 53 bp, Artificial Sequence
  Description of Artificial Sequence: Synthetic peanut,  sequence 3' and inner sequence
catgcacgacgtcatacacggcactgctgcttgactagtacatgaccacttga

SEQ ID NO: 2161 - DNA, 53 bp, Artificial Sequence
  Description of Artificial Sequence: Synthetic peanut,  sequence 3' and inner sequence
gtcatgcacgcacctacacgtgggtatggattgactagtacatgaccacttga

SEQ ID NO: 2162 - DNA, 53 bp, Artificial Sequence
  Description of Artificial Sequence: Synthetic peanut,  sequence 3' and inner sequence
cacgtacggtaagacgtcacaacatgcacattgactagtacatgaccacttga

SEQ ID NO: 2163 - DNA, 53 bp, Artificial Sequence
  Description of Artificial Sequence: Synthetic peanut,  sequence 3' and inner sequence
gcacgcactcaaccgccaagtgccgtcgtgttgactagtacatgaccacttga

SEQ ID NO: 2164 - DNA, 53 bp, Artificial Sequence
  Description of Artificial Sequence: Synthetic peanut,  sequence 3' and inner sequence
ggatcgcacgctgcactatcacgttgggcattgactagtacatgaccacttga

SEQ ID NO: 2165 - DNA, 53 bp, Artificial Sequence
  Description of Artificial Sequence: Synthetic peanut,  sequence 3' and inner sequence
cgacccaacgtggcggtgacagtcgttgcattgactagtacatgaccacttga

SEQ ID NO: 2166 - DNA, 53 bp, Artificial Sequence
  Description of Artificial Sequence: Synthetic peanut,  sequence 3' and inner sequence
gtgcgcacgatggatgtggatggccagtctttgactagtacatgaccacttga

SEQ ID NO: 2167 - DNA, 53 bp, Artificial Sequence
  Description of Artificial Sequence: Synthetic peanut,  sequence 3' and inner sequence
tgcaccgtcgatacgtcatgcacgctgacattgactagtacatgaccacttga

SEQ ID NO: 2168 - DNA, 53 bp, Artificial Sequence
  Description of Artificial Sequence: Synthetic peanut,  sequence 3' and inner sequence
ccgagcggaacgtcaagtcggcagtacgcattgactagtacatgaccacttga

SEQ ID NO: 2169 - DNA, 53 bp, Artificial Sequence
  Description of Artificial Sequence: Synthetic peanut,  sequence 3' and inner sequence
cgcaacgtaacggtacgcctacgcttcacgttgactagtacatgaccacttga

SEQ ID NO: 2170 - DNA, 53 bp, Artificial Sequence
  Description of Artificial Sequence: Synthetic peanut,  sequence 3' and inner sequence
cacggcagcgacgtccacatgtcctgcgcattgactagtacatgaccacttga

SEQ ID NO: 2171 - DNA, 53 bp, Artificial Sequence
  Description of Artificial Sequence: Synthetic peanut,  sequence 3' and inner sequence
gcactgccgacctaacgagtgcgttgtgtgttgactagtacatgaccacttga

SEQ ID NO: 2172 - DNA, 53 bp, Artificial Sequence
  Description of Artificial Sequence: Synthetic peanut,  sequence 3' and inner sequence
cgacacgacaaggcatggactgactgcatgttgactagtacatgaccacttga

SEQ ID NO: 2173 - DNA, 53 bp, Artificial Sequence
  Description of Artificial Sequence: Synthetic peanut,  sequence 3' and inner sequence
gcgtagcgacatcaagcggtggtgtgcgtgttgactagtacatgaccacttga

SEQ ID NO: 2174 - DNA, 53 bp, Artificial Sequence
  Description of Artificial Sequence: Synthetic peanut,  sequence 3' and inner sequence
ccgtagcgacatcaagcggtggtgtgcgcgttgactagtacatgaccacttga

SEQ ID NO: 2175 - DNA, 53 bp, Artificial Sequence
  Description of Artificial Sequence: Synthetic peanut,  sequence 3' and inner sequence
gtacaagcggaccgtcaacgtggttgtggattgactagtacatgaccacttga

SEQ ID NO: 2176 - DNA, 53 bp, Artificial Sequence
  Description of Artificial Sequence: Synthetic peanut,  sequence 3' and inner sequence
cacaccgtcgatacgtcatgcacgctgacattgactagtacatgaccacttga

SEQ ID NO: 2177 - DNA, 53 bp, Artificial Sequence
  Description of Artificial Sequence: Synthetic peanut,  sequence 3' and inner sequence
cgcaccgtcgatacttcatgcacgctgacattgactagtacatgaccacttga

SEQ ID NO: 2178 - DNA, 53 bp, Artificial Sequence
  Description of Artificial Sequence: Synthetic peanut,  sequence 3' and inner sequence
cgtgacagcgtgcaatgtgctgcttggccattgactagtacatgaccacttga

SEQ ID NO: 2179 - DNA, 53 bp, Artificial Sequence
  Description of Artificial Sequence: Synthetic peanut,  sequence 3' and inner sequence
cggaccgcgaaagtcaggctgtgctttggcttgactagtacatgaccacttga

SEQ ID NO: 2180 - DNA, 53 bp, Artificial Sequence
  Description of Artificial Sequence: Synthetic peanut,  sequence 3' and inner sequence
cacgcacacaaccgacagtgagttggcgtattgactagtacatgaccacttga

SEQ ID NO: 2181 - DNA, 53 bp, Artificial Sequence
  Description of Artificial Sequence: Synthetic peanut,  sequence 3' and inner sequence
cacgtggacggaagcacggtagcatacgtgttgactagtacatgaccacttga

SEQ ID NO: 2182 - DNA, 53 bp, Artificial Sequence
  Description of Artificial Sequence: Synthetic peanut,  sequence 3' and inner sequence
gtcgtgtcgtacgcctatcgagtgtgcatgttgactagtacatgaccacttga

SEQ ID NO: 2183 - DNA, 53 bp, Artificial Sequence
  Description of Artificial Sequence: Synthetic peanut,  sequence 3' and inner sequence
ccatgccggaccggagcgtggccatgcacattgactagtacatgaccacttga

SEQ ID NO: 2184 - DNA, 53 bp, Artificial Sequence
  Description of Artificial Sequence: Synthetic peanut,  sequence 3' and inner sequence
ccgtagcgacatcaagcggtggtgcgcgtgttgactagtacatgaccacttga

SEQ ID NO: 2185 - DNA, 53 bp, Artificial Sequence
  Description of Artificial Sequence: Synthetic peanut,  sequence 3' and inner sequence
gcatagccgtaacgtaccgccgtggccatgttgactagtacatgaccacttga

SEQ ID NO: 2186 - DNA, 53 bp, Artificial Sequence
  Description of Artificial Sequence: Synthetic peanut,  sequence 3' and inner sequence
cgtgtggcctgactccccttcaatgcgtcattgactagtacatgaccacttga

SEQ ID NO: 2187 - DNA, 53 bp, Artificial Sequence
  Description of Artificial Sequence: Synthetic peanut,  sequence 3' and inner sequence
ggacgcgatggatgtggacggtgtggtagtttgactagtacatgaccacttga

SEQ ID NO: 2188 - DNA, 53 bp, Artificial Sequence
  Description of Artificial Sequence: Synthetic peanut,  sequence 3' and inner sequence
gaacggaacgcagcgtcaagtcggtgcatgttgactagtacatgaccacttga

SEQ ID NO: 2189 - DNA, 53 bp, Artificial Sequence
  Description of Artificial Sequence: Synthetic peanut,  sequence 3' and inner sequence
ccatgtgaacgcactgtggctagctggtcattgactagtacatgaccacttga

SEQ ID NO: 2190 - DNA, 53 bp, Artificial Sequence
  Description of Artificial Sequence: Synthetic peanut,  sequence 3' and inner sequence
cgcaccgtcgatacgccatgcacgctgacattgactagtacatgaccacttga

SEQ ID NO: 2191 - DNA, 53 bp, Artificial Sequence
  Description of Artificial Sequence: Synthetic peanut,  sequence 3' and inner sequence
gtcatgctcgcactatcaggtgtgcatggattgactagtacatgaccacttga

SEQ ID NO: 2192 - DNA, 53 bp, Artificial Sequence
  Description of Artificial Sequence: Synthetic peanut,  sequence 3' and inner sequence
ccgtagcgacatcaagcggtggtgttcgtgttgactagtacatgaccacttga

SEQ ID NO: 2193 - DNA, 52 bp, Artificial Sequence
  Description of Artificial Sequence: Synthetic peanut,  sequence 3' and inner sequence
gcacgtcgaaacacgtagccatgcacggtttgactagtacatgaccacttga

SEQ ID NO: 2194 - DNA, 53 bp, Artificial Sequence
  Description of Artificial Sequence: Synthetic peanut,  sequence 3' and inner sequence
ccgtagcgacatcaagcgggggtgtgcgtgttgactagtacatgaccacttga

SEQ ID NO: 2195 - DNA, 53 bp, Artificial Sequence
  Description of Artificial Sequence: Synthetic peanut,  sequence 3' and inner sequence
cgcgtgacgataaggtgtgctgcgctccgtttgactagtacatgaccacttga

SEQ ID NO: 2196 - DNA, 53 bp, Artificial Sequence
  Description of Artificial Sequence: Synthetic peanut,  sequence 3' and inner sequence
gtcgcgatgagctagcatgtgcgttgtgtattgactagtacatgaccacttga

SEQ ID NO: 2197 - DNA, 53 bp, Artificial Sequence
  Description of Artificial Sequence: Synthetic peanut,  sequence 3' and inner sequence
gcaactgcacgcattggaccgcacgtcacattgactagtacatgaccacttga

SEQ ID NO: 2198 - DNA, 53 bp, Artificial Sequence
  Description of Artificial Sequence: Synthetic peanut,  sequence 3' and inner sequence
ccgatcggacgtaggaatgcacgtggcagtttgactagtacatgaccacttga

SEQ ID NO: 2199 - DNA, 53 bp, Artificial Sequence
  Description of Artificial Sequence: Synthetic peanut,  sequence 3' and inner sequence
cacgtgcgtagttacgctggtcactgcggtttgactagtacatgaccacttga

SEQ ID NO: 2200 - DNA, 53 bp, Artificial Sequence
  Description of Artificial Sequence: Synthetic peanut,  sequence 3' and inner sequence
ggacgcacatcccgttcatgtgtgcatgtattgactagtacatgaccacttga

SEQ ID NO: 2201 - DNA, 53 bp, Artificial Sequence
  Description of Artificial Sequence: Synthetic peanut,  sequence 3' and inner sequence
gcacgactcgcaccctatcatgtaggcatgttgactagtacatgaccacttga

SEQ ID NO: 2202 - DNA, 53 bp, Artificial Sequence
  Description of Artificial Sequence: Synthetic peanut,  sequence 3' and inner sequence
cacgatgctgtcgaacgtgtgtcgctgcgcttgactagtacatgaccacttga

SEQ ID NO: 2203 - DNA, 53 bp, Artificial Sequence
  Description of Artificial Sequence: Synthetic peanut,  sequence 3' and inner sequence
gacgcactcgaacgtacatgtgagcatggattgactagtacatgaccacttga

SEQ ID NO: 2204 - DNA, 53 bp, Artificial Sequence
  Description of Artificial Sequence: Synthetic peanut,  sequence 3' and inner sequence
ccgtagcgacatcaagcggtggtgtgcgttttgactagtacatgaccacttga

SEQ ID NO: 2205 - DNA, 53 bp, Artificial Sequence
  Description of Artificial Sequence: Synthetic peanut,  sequence 3' and inner sequence
tgacgcagcggaacgttcgagtggtacgtattgactagtacatgaccacttga

SEQ ID NO: 2206 - DNA, 53 bp, Artificial Sequence
  Description of Artificial Sequence: Synthetic peanut,  sequence 3' and inner sequence
cgcatggcggtgacatgttgcgtctacccgttgactagtacatgaccacttga

SEQ ID NO: 2207 - DNA, 53 bp, Artificial Sequence
  Description of Artificial Sequence: Synthetic peanut,  sequence 3' and inner sequence
gtcatgcgcgtaccatcgagggggcgtggattgactagtacatgaccacttga

SEQ ID NO: 2208 - DNA, 53 bp, Artificial Sequence
  Description of Artificial Sequence: Synthetic peanut,  sequence 3' and inner sequence
gtgccgaacgaacccttcacagtgtgcatgttgactagtacatgaccacttga

SEQ ID NO: 2209 - DNA, 53 bp, Artificial Sequence
  Description of Artificial Sequence: Synthetic peanut,  sequence 3' and inner sequence
ccacgatgcccgatgcgtacgccatgcacattgactagtacatgaccacttga

SEQ ID NO: 2210 - DNA, 53 bp, Artificial Sequence
  Description of Artificial Sequence: Synthetic peanut,  sequence 3' and inner sequence
catgctgacggtcaagcaccactctgcgcgttgactagtacatgaccacttga

SEQ ID NO: 2211 - DNA, 53 bp, Artificial Sequence
  Description of Artificial Sequence: Synthetic peanut,  sequence 3' and inner sequence
ggcagcgcagaccgagtgagagtgggtgtgttgactagtacatgaccacttga

SEQ ID NO: 2212 - DNA, 53 bp, Artificial Sequence
  Description of Artificial Sequence: Synthetic peanut,  sequence 3' and inner sequence
ccgtagcgacatcaagcggttgtgtgcgtgttgactagtacatgaccacttga

SEQ ID NO: 2213 - DNA, 53 bp, Artificial Sequence
  Description of Artificial Sequence: Synthetic peanut,  sequence 3' and inner sequence
cgacgcaatcggacactggacatgcgcagattgactagtacatgaccacttga

SEQ ID NO: 2214 - DNA, 53 bp, Artificial Sequence
  Description of Artificial Sequence: Synthetic peanut,  sequence 3' and inner sequence
cgtaccagcaagcggacaagtagtgcgacattgactagtacatgaccacttga

SEQ ID NO: 2215 - DNA, 53 bp, Artificial Sequence
  Description of Artificial Sequence: Synthetic peanut,  sequence 3' and inner sequence
tgtcgtgcgatggatgtggcatgctctggcttgactagtacatgaccacttga

SEQ ID NO: 2216 - DNA, 54 bp, Artificial Sequence
  Description of Artificial Sequence: Synthetic peanut,  sequence 3' and inner sequence
gtgcgcacgatggatgtgggttgtgctcgtcttgactagtacatgaccacttga

SEQ ID NO: 2217 - DNA, 53 bp, Artificial Sequence
  Description of Artificial Sequence: Synthetic peanut,  sequence 3' and inner sequence
acgtcgcagccaacgtggaacacatgcgcattgactagtacatgaccacttga

SEQ ID NO: 2218 - DNA, 53 bp, Artificial Sequence
  Description of Artificial Sequence: Synthetic peanut,  sequence 3' and inner sequence
ggacgcaatcgtcacttcaagtacggcatgttgactagtacatgaccacttga

SEQ ID NO: 2219 - DNA, 53 bp, Artificial Sequence
  Description of Artificial Sequence: Synthetic peanut,  sequence 3' and inner sequence
cgcacactacgacagtgaccacgctgcacgttgactagtacatgaccacttga

SEQ ID NO: 2220 - DNA, 53 bp, Artificial Sequence
  Description of Artificial Sequence: Synthetic peanut,  sequence 3' and inner sequence
ggacgcagcgtaacgttcgagtggtacgtattgactagtacatgaccacttga

SEQ ID NO: 2221 - DNA, 54 bp, Artificial Sequence
  Description of Artificial Sequence: Synthetic peanut,  sequence 3' and inner sequence
gtgctgacgaaccctagcaagtgcatgcgtgttgactagtacatgaccacttga

SEQ ID NO: 2222 - DNA, 53 bp, Artificial Sequence
  Description of Artificial Sequence: Synthetic peanut,  sequence 3' and inner sequence
cgcaacgcagggcatggttgtcgtgtcgtattgactagtacatgaccacttga

SEQ ID NO: 2223 - DNA, 53 bp, Artificial Sequence
  Description of Artificial Sequence: Synthetic peanut,  sequence 3' and inner sequence
cgcaccgtcgatacgtaatgcacgctgacattgactagtacatgaccacttga

SEQ ID NO: 2224 - DNA, 53 bp, Artificial Sequence
  Description of Artificial Sequence: Synthetic peanut,  sequence 3' and inner sequence
cgtgacgtcgaaagggtgatcgtgcgcatgttgactagtacatgaccacttga

SEQ ID NO: 2225 - DNA, 53 bp, Artificial Sequence
  Description of Artificial Sequence: Synthetic peanut,  sequence 3' and inner sequence
cacgcagtggacgtacgtgtcgtaggcatgttgactagtacatgaccacttga

SEQ ID NO: 2226 - DNA, 53 bp, Artificial Sequence
  Description of Artificial Sequence: Synthetic peanut,  sequence 3' and inner sequence
cgcaccgtatgaggagtgtgtctgtgcgcgttgactagtacatgaccacttga

SEQ ID NO: 2227 - DNA, 53 bp, Artificial Sequence
  Description of Artificial Sequence: Synthetic peanut,  sequence 3' and inner sequence
ccgtagcgacatcaatcggtggtgtgcgtgttgactagtacatgaccacttga

SEQ ID NO: 2228 - DNA, 53 bp, Artificial Sequence
  Description of Artificial Sequence: Synthetic peanut,  sequence 3' and inner sequence
acgtagcgacatcaagcggtggtgtgcgtgttgactagtacatgaccacttga

SEQ ID NO: 2229 - DNA, 53 bp, Artificial Sequence
  Description of Artificial Sequence: Synthetic peanut,  sequence 3' and inner sequence
cgtaccgcaagtgcatcgtgctgggcagcattgactagtacatgaccacttga

SEQ ID NO: 2230 - DNA, 53 bp, Artificial Sequence
  Description of Artificial Sequence: Synthetic peanut,  sequence 3' and inner sequence
gtgctcgcaagacctacacgtggacgtggattgactagtacatgaccacttga

SEQ ID NO: 2231 - DNA, 53 bp, Artificial Sequence
  Description of Artificial Sequence: Synthetic peanut,  sequence 3' and inner sequence
cgcaccgtcgatacgtcatgcacgctgtcattgactagtacatgaccacttga

SEQ ID NO: 2232 - DNA, 53 bp, Artificial Sequence
  Description of Artificial Sequence: Synthetic peanut,  sequence 3' and inner sequence
ccgtagcgacatcaagcggaggtgtgcgtgttgactagtacatgaccacttga

SEQ ID NO: 2233 - DNA, 53 bp, Artificial Sequence
  Description of Artificial Sequence: Synthetic peanut,  sequence 3' and inner sequence
gacgacgatggcaaggggtgcacgtgctgtttgactagtacatgaccacttga

SEQ ID NO: 2234 - DNA, 53 bp, Artificial Sequence
  Description of Artificial Sequence: Synthetic peanut,  sequence 3' and inner sequence
catgcacaacggcagaacggcttgatcgcgttgactagtacatgaccacttga

SEQ ID NO: 2235 - DNA, 53 bp, Artificial Sequence
  Description of Artificial Sequence: Synthetic peanut,  sequence 3' and inner sequence
cgtgtggcacaagcagggatgatatgcgcattgactagtacatgaccacttga

SEQ ID NO: 2236 - DNA, 53 bp, Artificial Sequence
  Description of Artificial Sequence: Synthetic peanut,  sequence 3' and inner sequence
cgcaccgtctatacgtcatgcacgctgacattgactagtacatgaccacttga

SEQ ID NO: 2237 - DNA, 53 bp, Artificial Sequence
  Description of Artificial Sequence: Synthetic peanut,  sequence 3' and inner sequence
gcatcggtccgagcgtaacgagcagtgggattgactagtacatgaccacttga

SEQ ID NO: 2238 - DNA, 53 bp, Artificial Sequence
  Description of Artificial Sequence: Synthetic peanut,  sequence 3' and inner sequence
ggcatgcgatggatgtggtgtacccagtccttgactagtacatgaccacttga

SEQ ID NO: 2239 - DNA, 53 bp, Artificial Sequence
  Description of Artificial Sequence: Synthetic peanut,  sequence 3' and inner sequence
gcactgatcgatacctgagtggcgtacgtgttgactagtacatgaccacttga

SEQ ID NO: 2240 - DNA, 53 bp, Artificial Sequence
  Description of Artificial Sequence: Synthetic peanut,  sequence 3' and inner sequence
ggcattgcgcgcctagcaagttgacgtgtattgactagtacatgaccacttga

SEQ ID NO: 2241 - DNA, 51 bp, Artificial Sequence
  Description of Artificial Sequence: Synthetic peanut,  sequence 3' and inner sequence
ggacgcaacgtaccgtatcgtggccatgttgactagtacatgaccacttga

SEQ ID NO: 2242 - DNA, 53 bp, Artificial Sequence
  Description of Artificial Sequence: Synthetic peanut,  sequence 3' and inner sequence
cgcaccgtcgatacgtcatgcacgcttacattgactagtacatgaccacttga

SEQ ID NO: 2243 - DNA, 53 bp, Artificial Sequence
  Description of Artificial Sequence: Synthetic peanut,  sequence 3' and inner sequence
ggacgactcgcaccctatcatgaggccatgttgactagtacatgaccacttga

SEQ ID NO: 2244 - DNA, 53 bp, Artificial Sequence
  Description of Artificial Sequence: Synthetic peanut,  sequence 3' and inner sequence
ccgtagcgacatcaagcggtggtttgcgtgttgactagtacatgaccacttga

SEQ ID NO: 2245 - DNA, 53 bp, Artificial Sequence
  Description of Artificial Sequence: Synthetic peanut,  sequence 3' and inner sequence
ggcactgaacgcacgacctacacgtggacattgactagtacatgaccacttga

SEQ ID NO: 2246 - DNA, 53 bp, Artificial Sequence
  Description of Artificial Sequence: Synthetic peanut,  sequence 3' and inner sequence
cgcaccgtcgatacgtcatgcacgctgaccttgactagtacatgaccacttga

SEQ ID NO: 2247 - DNA, 53 bp, Artificial Sequence
  Description of Artificial Sequence: Synthetic peanut,  sequence 3' and inner sequence
ggacggaacgcagcgtcaagtcggtgcatgttgactagtacatgaccacttga

SEQ ID NO: 2248 - DNA, 53 bp, Artificial Sequence
  Description of Artificial Sequence: Synthetic peanut,  sequence 3' and inner sequence
ggcaccgtcgatacgtcatgcacgctgacattgactagtacatgaccacttga

SEQ ID NO: 2249 - DNA, 53 bp, Artificial Sequence
  Description of Artificial Sequence: Synthetic peanut,  sequence 3' and inner sequence
cgtgtgcggcgaggaacggtgtgttgcgtgttgactagtacatgaccacttga

SEQ ID NO: 2250 - DNA, 54 bp, Artificial Sequence
  Description of Artificial Sequence: Synthetic peanut,  sequence 3' and inner sequence
ggacgcatcgccccttcgagtgtgacaggtattgactagtacatgaccacttga

SEQ ID NO: 2251 - DNA, 52 bp, Artificial Sequence
  Description of Artificial Sequence: Synthetic peanut,  sequence 3' and inner sequence
gtcatgccatcccttcgagtggacaggtattgactagtacatgaccacttga

SEQ ID NO: 2252 - DNA, 53 bp, Artificial Sequence
  Description of Artificial Sequence: Synthetic peanut,  sequence 3' and inner sequence
gcgtagcgagaatggtcaagtgtgtgcgtgttgactagtacatgaccacttga

SEQ ID NO: 2253 - DNA, 53 bp, Artificial Sequence
  Description of Artificial Sequence: Synthetic peanut,  sequence 3' and inner sequence
acattggcatgccttacctacacgtggccattgactagtacatgaccacttga

SEQ ID NO: 2254 - DNA, 53 bp, Artificial Sequence
  Description of Artificial Sequence: Synthetic peanut,  sequence 3' and inner sequence
catgcgtgaacgtagctatcatgtggcgcattgactagtacatgaccacttga

SEQ ID NO: 2255 - DNA, 53 bp, Artificial Sequence
  Description of Artificial Sequence: Synthetic peanut,  sequence 3' and inner sequence
cgacacgcagtttgagcccgacgatgcacgttgactagtacatgaccacttga

SEQ ID NO: 2256 - DNA, 53 bp, Artificial Sequence
  Description of Artificial Sequence: Synthetic peanut,  sequence 3' and inner sequence
cgcaccgtcgctacgtcatgcacgctgacattgactagtacatgaccacttga

SEQ ID NO: 2257 - DNA, 53 bp, Artificial Sequence
  Description of Artificial Sequence: Synthetic peanut,  sequence 3' and inner sequence
ggccgaacgaccgatcgagtggcgcatggattgactagtacatgaccacttga

SEQ ID NO: 2258 - DNA, 54 bp, Artificial Sequence
  Description of Artificial Sequence: Synthetic peanut,  sequence 3' and inner sequence
ggcatgcgatggatggggtcagcacgttggcttgactagtacatgaccacttga

SEQ ID NO: 2259 - DNA, 52 bp, Artificial Sequence
  Description of Artificial Sequence: Synthetic peanut,  sequence 3' and inner sequence
cgaccagcgcaagtaagtggcgtgatgcattgactagtacatgaccacttga

SEQ ID NO: 2260 - DNA, 53 bp, Artificial Sequence
  Description of Artificial Sequence: Synthetic peanut,  sequence 3' and inner sequence
gtgcatcgatggcgtatgctggtgatgtgcttgactagtacatgaccacttga

SEQ ID NO: 2261 - DNA, 53 bp, Artificial Sequence
  Description of Artificial Sequence: Synthetic peanut,  sequence 3' and inner sequence
cgtagcgcagaaggacacatggactgcacgttgactagtacatgaccacttga

SEQ ID NO: 2262 - DNA, 53 bp, Artificial Sequence
  Description of Artificial Sequence: Synthetic peanut,  sequence 3' and inner sequence
ccgcgcgcatcccttcacagtggtgatgcattgactagtacatgaccacttga

SEQ ID NO: 2263 - DNA, 53 bp, Artificial Sequence
  Description of Artificial Sequence: Synthetic peanut,  sequence 3' and inner sequence
cgcaccgtcgatacgtcacgcacgctgacattgactagtacatgaccacttga

SEQ ID NO: 2264 - DNA, 53 bp, Artificial Sequence
  Description of Artificial Sequence: Synthetic peanut,  sequence 3' and inner sequence
gtgccaaacgaccaaagcgggcagtgcgtattgactagtacatgaccacttga

SEQ ID NO: 2265 - DNA, 53 bp, Artificial Sequence
  Description of Artificial Sequence: Synthetic peanut,  sequence 3' and inner sequence
ggcatgcgatggatgtgtgcgtgtattagcttgactagtacatgaccacttga

SEQ ID NO: 2266 - DNA, 53 bp, Artificial Sequence
  Description of Artificial Sequence: Synthetic peanut,  sequence 3' and inner sequence
gtgctgcatgagcggtgtgcgtgtacgacgttgactagtacatgaccacttga

SEQ ID NO: 2267 - DNA, 53 bp, Artificial Sequence
  Description of Artificial Sequence: Synthetic peanut,  sequence 3' and inner sequence
cgcaccgtcgatccgtcatgcacgctgacattgactagtacatgaccacttga

SEQ ID NO: 2268 - DNA, 53 bp, Artificial Sequence
  Description of Artificial Sequence: Synthetic peanut,  sequence 3' and inner sequence
cgacacgtaccaagcgggacaatgtgcagtttgactagtacatgaccacttga

SEQ ID NO: 2269 - DNA, 53 bp, Artificial Sequence
  Description of Artificial Sequence: Synthetic peanut,  sequence 3' and inner sequence
cgaacacgaacagtggatggacgcgtcacgttgactagtacatgaccacttga

SEQ ID NO: 2270 - DNA, 53 bp, Artificial Sequence
  Description of Artificial Sequence: Synthetic peanut,  sequence 3' and inner sequence
gtgcgcggcttgccttcacgtgatcgtgtattgactagtacatgaccacttga

SEQ ID NO: 2271 - DNA, 53 bp, Artificial Sequence
  Description of Artificial Sequence: Synthetic peanut,  sequence 3' and inner sequence
ggactgacgagccgttcatgtggttgtggattgactagtacatgaccacttga

SEQ ID NO: 2272 - DNA, 53 bp, Artificial Sequence
  Description of Artificial Sequence: Synthetic peanut,  sequence 3' and inner sequence
ccgtagcgacatcaagaggtggtgtgcgtgttgactagtacatgaccacttga

SEQ ID NO: 2273 - DNA, 53 bp, Artificial Sequence
  Description of Artificial Sequence: Synthetic peanut,  sequence 3' and inner sequence
gtacgacgcggaccttcaagtaggcgtgtattgactagtacatgaccacttga

SEQ ID NO: 2274 - DNA, 53 bp, Artificial Sequence
  Description of Artificial Sequence: Synthetic peanut,  sequence 3' and inner sequence
cgcaccgtcgatacgtcatgtacgctgacattgactagtacatgaccacttga

SEQ ID NO: 2275 - DNA, 53 bp, Artificial Sequence
  Description of Artificial Sequence: Synthetic peanut,  sequence 3' and inner sequence
catggccacgacgcatcaggacatgacgcattgactagtacatgaccacttga

SEQ ID NO: 2276 - DNA, 53 bp, Artificial Sequence
  Description of Artificial Sequence: Synthetic peanut,  sequence 3' and inner sequence
ggcaggcaggacggcgtacagtacgacacattgactagtacatgaccacttga

SEQ ID NO: 2277 - DNA, 53 bp, Artificial Sequence
  Description of Artificial Sequence: Synthetic peanut,  sequence 3' and inner sequence
cgcaccgtcgatacgtcatgcatgctgacattgactagtacatgaccacttga

SEQ ID NO: 2278 - DNA, 53 bp, Artificial Sequence
  Description of Artificial Sequence: Synthetic peanut,  sequence 3' and inner sequence
catgcgcaagtcgaagcatcgtcacacgtgttgactagtacatgaccacttga

SEQ ID NO: 2279 - DNA, 53 bp, Artificial Sequence
  Description of Artificial Sequence: Synthetic peanut,  sequence 3' and inner sequence
ggacacagcgtacctcaacgtggacgtgcattgactagtacatgaccacttga

SEQ ID NO: 2280 - DNA, 53 bp, Artificial Sequence
  Description of Artificial Sequence: Synthetic peanut,  sequence 3' and inner sequence
gtcgccacggacctgtcatggatgggcacattgactagtacatgaccacttga

SEQ ID NO: 2281 - DNA, 53 bp, Artificial Sequence
  Description of Artificial Sequence: Synthetic peanut,  sequence 3' and inner sequence
gccacgtcgtcacgcagcatgtacggcacattgactagtacatgaccacttga

SEQ ID NO: 2282 - DNA, 53 bp, Artificial Sequence
  Description of Artificial Sequence: Synthetic peanut,  sequence 3' and inner sequence
gcacatggccaactcgaccacatgtgagcattgactagtacatgaccacttga

SEQ ID NO: 2283 - DNA, 53 bp, Artificial Sequence
  Description of Artificial Sequence: Synthetic peanut,  sequence 3' and inner sequence
ccgtagcgacatcaagcggtggggtgcgtgttgactagtacatgaccacttga

SEQ ID NO: 2284 - DNA, 53 bp, Artificial Sequence
  Description of Artificial Sequence: Synthetic peanut,  sequence 3' and inner sequence
cctgcgatgggtgtgggggtgcactgcgtcttgactagtacatgaccacttga

SEQ ID NO: 2285 - DNA, 53 bp, Artificial Sequence
  Description of Artificial Sequence: Synthetic peanut,  sequence 3' and inner sequence
cacatggcctgcgtaccgacacgtggttcgttgactagtacatgaccacttga

SEQ ID NO: 2286 - DNA, 53 bp, Artificial Sequence
  Description of Artificial Sequence: Synthetic peanut,  sequence 3' and inner sequence
gtgctgagctgggagtggtggtgctttggcttgactagtacatgaccacttga

SEQ ID NO: 2287 - DNA, 53 bp, Artificial Sequence
  Description of Artificial Sequence: Synthetic peanut,  sequence 3' and inner sequence
tggacggcgcgatcacgttcatgcggttcattgactagtacatgaccacttga

SEQ ID NO: 2288 - DNA, 53 bp, Artificial Sequence
  Description of Artificial Sequence: Synthetic peanut,  sequence 3' and inner sequence
ggacgagcggaacgatcgagtggttgcgtattgactagtacatgaccacttga

SEQ ID NO: 2289 - DNA, 53 bp, Artificial Sequence
  Description of Artificial Sequence: Synthetic peanut,  sequence 3' and inner sequence
ctcaccgtcgatacgtcatgcacgctgacattgactagtacatgaccacttga

SEQ ID NO: 2290 - DNA, 53 bp, Artificial Sequence
  Description of Artificial Sequence: Synthetic peanut,  sequence 3' and inner sequence
cgtgccgacgatgacctatcgatgtggacattgactagtacatgaccacttga

SEQ ID NO: 2291 - DNA, 53 bp, Artificial Sequence
  Description of Artificial Sequence: Synthetic peanut,  sequence 3' and inner sequence
cgcaccgtcgatacgtcatgaacgctgacattgactagtacatgaccacttga

SEQ ID NO: 2292 - DNA, 53 bp, Artificial Sequence
  Description of Artificial Sequence: Synthetic peanut,  sequence 3' and inner sequence
cgcacagtcgatacgtcatgcacgctgacattgactagtacatgaccacttga

SEQ ID NO: 2293 - DNA, 53 bp, Artificial Sequence
  Description of Artificial Sequence: Synthetic peanut,  sequence 3' and inner sequence
gtgctgcacggacatatcacgtggcatggattgactagtacatgaccacttga

SEQ ID NO: 2294 - DNA, 53 bp, Artificial Sequence
  Description of Artificial Sequence: Synthetic peanut,  sequence 3' and inner sequence
gcgcacgtagccctatcagtggtgcatgcattgactagtacatgaccacttga

SEQ ID NO: 2295 - DNA, 53 bp, Artificial Sequence
  Description of Artificial Sequence: Synthetic peanut,  sequence 3' and inner sequence
cacgcacgcatacaacggcaccatggcgtgttgactagtacatgaccacttga

SEQ ID NO: 2296 - DNA, 53 bp, Artificial Sequence
  Description of Artificial Sequence: Synthetic peanut,  sequence 3' and inner sequence
gcgcaagcagaggatgcatgctcttgccgtttgactagtacatgaccacttga

SEQ ID NO: 2297 - DNA, 53 bp, Artificial Sequence
  Description of Artificial Sequence: Synthetic peanut,  sequence 3' and inner sequence
cgaccaaaccgatgggcatacacgtgcacattgactagtacatgaccacttga

SEQ ID NO: 2298 - DNA, 53 bp, Artificial Sequence
  Description of Artificial Sequence: Synthetic peanut,  sequence 3' and inner sequence
gcatcatgcgtcctctgccactgtgtgtcattgactagtacatgaccacttga

SEQ ID NO: 2299 - DNA, 53 bp, Artificial Sequence
  Description of Artificial Sequence: Synthetic peanut,  sequence 3' and inner sequence
tggccgatgcgtcccttcaatgtgtgcatgttgactagtacatgaccacttga

SEQ ID NO: 2300 - DNA, 53 bp, Artificial Sequence
  Description of Artificial Sequence: Synthetic peanut,  sequence 3' and inner sequence
tggcgtgcacgaaacgcatcgacatgcacattgactagtacatgaccacttga

SEQ ID NO: 2301 - DNA, 53 bp, Artificial Sequence
  Description of Artificial Sequence: Synthetic peanut,  sequence 3' and inner sequence
cacatagggcacgaatctgggtgtgcgtcattgactagtacatgaccacttga

SEQ ID NO: 2302 - DNA, 53 bp, Artificial Sequence
  Description of Artificial Sequence: Synthetic peanut,  sequence 3' and inner sequence
cgacaccagagtgcatgcctgtacgacacgttgactagtacatgaccacttga

SEQ ID NO: 2303 - DNA, 53 bp, Artificial Sequence
  Description of Artificial Sequence: Synthetic peanut,  sequence 3' and inner sequence
gtcattccgcatcctacacgtgtgcacgtattgactagtacatgaccacttga

SEQ ID NO: 2304 - DNA, 53 bp, Artificial Sequence
  Description of Artificial Sequence: Synthetic peanut,  sequence 3' and inner sequence
ccattgggcattacgtgcgctcacttcgcgttgactagtacatgaccacttga

SEQ ID NO: 2305 - DNA, 53 bp, Artificial Sequence
  Description of Artificial Sequence: Synthetic peanut,  sequence 3' and inner sequence
gtacgtatcggcccggtcaagttcggcatgttgactagtacatgaccacttga

SEQ ID NO: 2306 - DNA, 53 bp, Artificial Sequence
  Description of Artificial Sequence: Synthetic peanut,  sequence 3' and inner sequence
cgaccgatacgcgcatagtgtgtgtggacattgactagtacatgaccacttga

SEQ ID NO: 2307 - DNA, 53 bp, Artificial Sequence
  Description of Artificial Sequence: Synthetic peanut,  sequence 3' and inner sequence
cgatgcacaagcaatgggcctaacgacacgttgactagtacatgaccacttga

SEQ ID NO: 2308 - DNA, 53 bp, Artificial Sequence
  Description of Artificial Sequence: Synthetic peanut,  sequence 3' and inner sequence
tggccaagcgacctagcaagtgtgctcatgttgactagtacatgaccacttga

SEQ ID NO: 2309 - DNA, 53 bp, Artificial Sequence
  Description of Artificial Sequence: Synthetic peanut,  sequence 3' and inner sequence
cacgcagtgacattgcaggcagagtgcgtcttgactagtacatgaccacttga

SEQ ID NO: 2310 - DNA, 53 bp, Artificial Sequence
  Description of Artificial Sequence: Synthetic peanut,  sequence 3' and inner sequence
ggcatgcacgcacctacacgtgggaatggattgactagtacatgaccacttga

SEQ ID NO: 2311 - DNA, 53 bp, Artificial Sequence
  Description of Artificial Sequence: Synthetic peanut,  sequence 3' and inner sequence
gtgctgcctgacccacgtggacttgcactattgactagtacatgaccacttga

SEQ ID NO: 2312 - DNA, 53 bp, Artificial Sequence
  Description of Artificial Sequence: Synthetic peanut,  sequence 3' and inner sequence
ggccgaaacgcagcctagcgagtgtcgtcattgactagtacatgaccacttga

SEQ ID NO: 2313 - DNA, 53 bp, Artificial Sequence
  Description of Artificial Sequence: Synthetic peanut,  sequence 3' and inner sequence
cgcaccagacaagcacgtcacggcgacacgttgactagtacatgaccacttga

SEQ ID NO: 2314 - DNA, 53 bp, Artificial Sequence
  Description of Artificial Sequence: Synthetic peanut,  sequence 3' and inner sequence
gcatacgtacgccacgacacgatctggccattgactagtacatgaccacttga

SEQ ID NO: 2315 - DNA, 53 bp, Artificial Sequence
  Description of Artificial Sequence: Synthetic peanut,  sequence 3' and inner sequence
cgcaccgcatgacgtgaatggtgaggtatgttgactagtacatgaccacttga

SEQ ID NO: 2316 - DNA, 53 bp, Artificial Sequence
  Description of Artificial Sequence: Synthetic peanut,  sequence 3' and inner sequence
ggcatgcgatggaatgtgcgaatgtacgcattgactagtacatgaccacttga

SEQ ID NO: 2317 - DNA, 53 bp, Artificial Sequence
  Description of Artificial Sequence: Synthetic peanut,  sequence 3' and inner sequence
cgcaccgtcgatacgtcatgcacgttgacattgactagtacatgaccacttga

SEQ ID NO: 2318 - DNA, 53 bp, Artificial Sequence
  Description of Artificial Sequence: Synthetic peanut,  sequence 3' and inner sequence
ccgcactgacctgacgtggtagtgtcgacgttgactagtacatgaccacttga

SEQ ID NO: 2319 - DNA, 53 bp, Artificial Sequence
  Description of Artificial Sequence: Synthetic peanut,  sequence 3' and inner sequence
gcatggcaagaacgcactgtgttgtggccattgactagtacatgaccacttga

SEQ ID NO: 2320 - DNA, 53 bp, Artificial Sequence
  Description of Artificial Sequence: Synthetic peanut,  sequence 3' and inner sequence
gtcattccgcatcctacacgttggcacgtattgactagtacatgaccacttga

SEQ ID NO: 2321 - DNA, 53 bp, Artificial Sequence
  Description of Artificial Sequence: Synthetic peanut,  sequence 3' and inner sequence
ggcctgcgatgaacgaggcatgatgcgtcattgactagtacatgaccacttga

SEQ ID NO: 2322 - DNA, 53 bp, Artificial Sequence
  Description of Artificial Sequence: Synthetic peanut,  sequence 3' and inner sequence
gcacgccgatggatgaggtcagtgtgctgtttgactagtacatgaccacttga

SEQ ID NO: 2323 - DNA, 53 bp, Artificial Sequence
  Description of Artificial Sequence: Synthetic peanut,  sequence 3' and inner sequence
gcactgcacgcaccctatcatgaggccatgttgactagtacatgaccacttga

SEQ ID NO: 2324 - DNA, 53 bp, Artificial Sequence
  Description of Artificial Sequence: Synthetic peanut,  sequence 3' and inner sequence
ccgtagcgacataaagcggtggtgtgcgtgttgactagtacatgaccacttga

SEQ ID NO: 2325 - DNA, 53 bp, Artificial Sequence
  Description of Artificial Sequence: Synthetic peanut,  sequence 3' and inner sequence
cacgcgacggtacgtgatgggtgaggcatattgactagtacatgaccacttga

SEQ ID NO: 2326 - DNA, 53 bp, Artificial Sequence
  Description of Artificial Sequence: Synthetic peanut,  sequence 3' and inner sequence
cgaaccgtcgatacgtcatgcacgctgacattgactagtacatgaccacttga

SEQ ID NO: 2327 - DNA, 53 bp, Artificial Sequence
  Description of Artificial Sequence: Synthetic peanut,  sequence 3' and inner sequence
gtgctgcgatggatgtgggttgtgctcgtcttgactagtacatgaccacttga

SEQ ID NO: 2328 - DNA, 53 bp, Artificial Sequence
  Description of Artificial Sequence: Synthetic peanut,  sequence 3' and inner sequence
gtcagtcgatggatgtgggttgtgctcgtcttgactagtacatgaccacttga

SEQ ID NO: 2329 - DNA, 53 bp, Artificial Sequence
  Description of Artificial Sequence: Synthetic peanut,  sequence 3' and inner sequence
tgactgaacgtaacgtcgagcggttgtggattgactagtacatgaccacttga

SEQ ID NO: 2330 - DNA, 53 bp, Artificial Sequence
  Description of Artificial Sequence: Synthetic peanut,  sequence 3' and inner sequence
cgtgccaagcgtgtatcaggcatcgacacgttgactagtacatgaccacttga

SEQ ID NO: 2331 - DNA, 53 bp, Artificial Sequence
  Description of Artificial Sequence: Synthetic peanut,  sequence 3' and inner sequence
cgcaacgtcgatacgtcatgcacgctgacattgactagtacatgaccacttga

SEQ ID NO: 2332 - DNA, 53 bp, Artificial Sequence
  Description of Artificial Sequence: Synthetic peanut,  sequence 3' and inner sequence
cgcaccgtcgatacgtcctgcacgctgacattgactagtacatgaccacttga

SEQ ID NO: 2333 - DNA, 53 bp, Artificial Sequence
  Description of Artificial Sequence: Synthetic peanut,  sequence 3' and inner sequence
gcacatccagtgcaaccaatggcatgcgtgttgactagtacatgaccacttga

SEQ ID NO: 2334 - DNA, 52 bp, Artificial Sequence
  Description of Artificial Sequence: Synthetic peanut,  sequence 3' and inner sequence
ggccgatcgaccctatcaagtgcagcatgttgactagtacatgaccacttga

SEQ ID NO: 2335 - DNA, 53 bp, Artificial Sequence
  Description of Artificial Sequence: Synthetic peanut,  sequence 3' and inner sequence
cacgtacaacagtgccgttcacagtgcgtgttgactagtacatgaccacttga

SEQ ID NO: 2336 - DNA, 53 bp, Artificial Sequence
  Description of Artificial Sequence: Synthetic peanut,  sequence 3' and inner sequence
cgtaccgggggagtgcgacatgacgacgtgttgactagtacatgaccacttga

SEQ ID NO: 2337 - DNA, 53 bp, Artificial Sequence
  Description of Artificial Sequence: Synthetic peanut,  sequence 3' and inner sequence
cgcaacacgtgacgcactttggtctacgcattgactagtacatgaccacttga

SEQ ID NO: 2338 - DNA, 53 bp, Artificial Sequence
  Description of Artificial Sequence: Synthetic peanut,  sequence 3' and inner sequence
cgtgtgcaggcaggcacaggcgtagtggcattgactagtacatgaccacttga

SEQ ID NO: 2339 - DNA, 53 bp, Artificial Sequence
  Description of Artificial Sequence: Synthetic peanut,  sequence 3' and inner sequence
cgacacgcgtaacgtctagtccgctgctgcttgactagtacatgaccacttga

SEQ ID NO: 2340 - DNA, 53 bp, Artificial Sequence
  Description of Artificial Sequence: Synthetic peanut,  sequence 3' and inner sequence
gtcattccgcatcctacacgtggtcacgtattgactagtacatgaccacttga

SEQ ID NO: 2341 - DNA, 53 bp, Artificial Sequence
  Description of Artificial Sequence: Synthetic peanut,  sequence 3' and inner sequence
ccgtgagcgtacctacacgtgcggcttggattgactagtacatgaccacttga

SEQ ID NO: 2342 - DNA, 53 bp, Artificial Sequence
  Description of Artificial Sequence: Synthetic peanut,  sequence 3' and inner sequence
cacatgcgcattgccttcgttcactgcacattgactagtacatgaccacttga

SEQ ID NO: 2343 - DNA, 53 bp, Artificial Sequence
  Description of Artificial Sequence: Synthetic peanut,  sequence 3' and inner sequence
ccgtagcgacctcaagcggtggtgtgcgtgttgactagtacatgaccacttga

SEQ ID NO: 2344 - DNA, 53 bp, Artificial Sequence
  Description of Artificial Sequence: Synthetic peanut,  sequence 3' and inner sequence
ggacgcatcgtcccgtcatgtggttccgtattgactagtacatgaccacttga

SEQ ID NO: 2345 - DNA, 53 bp, Artificial Sequence
  Description of Artificial Sequence: Synthetic peanut,  sequence 3' and inner sequence
tgcgcaaggacactgcacgtatgcctgccattgactagtacatgaccacttga

SEQ ID NO: 2346 - DNA, 53 bp, Artificial Sequence
  Description of Artificial Sequence: Synthetic peanut,  sequence 3' and inner sequence
gtcatgaaacgagcctacacgtggtgcatgttgactagtacatgaccacttga

SEQ ID NO: 2347 - DNA, 53 bp, Artificial Sequence
  Description of Artificial Sequence: Synthetic peanut,  sequence 3' and inner sequence
ccgacgcatgaccgaacggggtgatgtgccttgactagtacatgaccacttga

SEQ ID NO: 2348 - DNA, 53 bp, Artificial Sequence
  Description of Artificial Sequence: Synthetic peanut,  sequence 3' and inner sequence
gtgctacgatggctgtgggcgtgatgcgtattgactagtacatgaccacttga

SEQ ID NO: 2349 - DNA, 53 bp, Artificial Sequence
  Description of Artificial Sequence: Synthetic peanut,  sequence 3' and inner sequence
gtcgtgcgtgccctatcaggtggttgtggattgactagtacatgaccacttga

SEQ ID NO: 2350 - DNA, 53 bp, Artificial Sequence
  Description of Artificial Sequence: Synthetic peanut,  sequence 3' and inner sequence
cgtagcgcaccaggacatgtcgtcggcatgttgactagtacatgaccacttga

SEQ ID NO: 2351 - DNA, 53 bp, Artificial Sequence
  Description of Artificial Sequence: Synthetic peanut,  sequence 3' and inner sequence
cgcaccttcgatacgtcatgcacgctgacattgactagtacatgaccacttga

SEQ ID NO: 2352 - DNA, 53 bp, Artificial Sequence
  Description of Artificial Sequence: Synthetic peanut,  sequence 3' and inner sequence
ccgcagcgacatcaagcggtggtgtgcgtgttgactagtacatgaccacttga

SEQ ID NO: 2353 - DNA, 53 bp, Artificial Sequence
  Description of Artificial Sequence: Synthetic peanut,  sequence 3' and inner sequence
gggcaacacgcaggatgtgatgcatgcggattgactagtacatgaccacttga

SEQ ID NO: 2354 - DNA, 53 bp, Artificial Sequence
  Description of Artificial Sequence: Synthetic peanut,  sequence 3' and inner sequence
ccgaacgcaccgtccaagttgccatgcgcgttgactagtacatgaccacttga

SEQ ID NO: 2355 - DNA, 53 bp, Artificial Sequence
  Description of Artificial Sequence: Synthetic peanut,  sequence 3' and inner sequence
ggcatgaacgacctgggcatgcgtggtccattgactagtacatgaccacttga

SEQ ID NO: 2356 - DNA, 53 bp, Artificial Sequence
  Description of Artificial Sequence: Synthetic peanut,  sequence 3' and inner sequence
cgcacaaagggacgtggacgagcctacgtgttgactagtacatgaccacttga

SEQ ID NO: 2357 - DNA, 53 bp, Artificial Sequence
  Description of Artificial Sequence: Synthetic peanut,  sequence 3' and inner sequence
gcgatgacagacgcagctttgggatgcacgttgactagtacatgaccacttga

SEQ ID NO: 2358 - DNA, 53 bp, Artificial Sequence
  Description of Artificial Sequence: Synthetic peanut,  sequence 3' and inner sequence
ccgtagcgacatcaagcggtggtgtgtgtgttgactagtacatgaccacttga

SEQ ID NO: 2359 - DNA, 53 bp, Artificial Sequence
  Description of Artificial Sequence: Synthetic peanut,  sequence 3' and inner sequence
gtcatgcgatgaacgaggcatgatgcgtcattgactagtacatgaccacttga

SEQ ID NO: 2360 - DNA, 53 bp, Artificial Sequence
  Description of Artificial Sequence: Synthetic peanut,  sequence 3' and inner sequence
gcacatcaggccgtatcgtgactcgtgggattgactagtacatgaccacttga

SEQ ID NO: 2361 - DNA, 53 bp, Artificial Sequence
  Description of Artificial Sequence: Synthetic peanut,  sequence 3' and inner sequence
catacgccctgcctgcactatggccatgcattgactagtacatgaccacttga

SEQ ID NO: 2362 - DNA, 53 bp, Artificial Sequence
  Description of Artificial Sequence: Synthetic peanut,  sequence 3' and inner sequence
gtacgatgctgcccgacatgtggacgtggattgactagtacatgaccacttga

SEQ ID NO: 2363 - DNA, 53 bp, Artificial Sequence
  Description of Artificial Sequence: Synthetic peanut,  sequence 3' and inner sequence
gcaactggcacgcacaagcactgctgcgcattgactagtacatgaccacttga

SEQ ID NO: 2364 - DNA, 53 bp, Artificial Sequence
  Description of Artificial Sequence: Synthetic peanut,  sequence 3' and inner sequence
cggcacggaaacatgtaggcatgctcgacgttgactagtacatgaccacttga

SEQ ID NO: 2365 - DNA, 53 bp, Artificial Sequence
  Description of Artificial Sequence: Synthetic peanut,  sequence 3' and inner sequence
ggacgcagcttgcctactggttgtcacgtattgactagtacatgaccacttga

SEQ ID NO: 2366 - DNA, 53 bp, Artificial Sequence
  Description of Artificial Sequence: Synthetic peanut,  sequence 3' and inner sequence
gacgtgccatcgtaagttcgacactgccgtttgactagtacatgaccacttga

SEQ ID NO: 2367 - DNA, 53 bp, Artificial Sequence
  Description of Artificial Sequence: Synthetic peanut,  sequence 3' and inner sequence
cgcaccgccgatacgtcatgcacgctgacattgactagtacatgaccacttga

SEQ ID NO: 2368 - DNA, 53 bp, Artificial Sequence
  Description of Artificial Sequence: Synthetic peanut,  sequence 3' and inner sequence
cacgcaccaagtaacacgcgtactgacgcattgactagtacatgaccacttga

SEQ ID NO: 2369 - DNA, 53 bp, Artificial Sequence
  Description of Artificial Sequence: Synthetic peanut,  sequence 3' and inner sequence
gtcatgccatcccttcgagtgtgacaggcattgactagtacatgaccacttga

SEQ ID NO: 2370 - DNA, 53 bp, Artificial Sequence
  Description of Artificial Sequence: Synthetic peanut,  sequence 3' and inner sequence
gttcgcgcgacacctatcaatgtggacgtgttgactagtacatgaccacttga

SEQ ID NO: 2371 - DNA, 53 bp, Artificial Sequence
  Description of Artificial Sequence: Synthetic peanut,  sequence 3' and inner sequence
ggcgtgcggaccggtcagtcgtcatgcacattgactagtacatgaccacttga

SEQ ID NO: 2372 - DNA, 53 bp, Artificial Sequence
  Description of Artificial Sequence: Synthetic peanut,  sequence 3' and inner sequence
catgtgcatggtacgtacacaatgcgcacgttgactagtacatgaccacttga

SEQ ID NO: 2373 - DNA, 53 bp, Artificial Sequence
  Description of Artificial Sequence: Synthetic peanut,  sequence 3' and inner sequence
gcacgtggtctgaccggctcggtgtgcatgttgactagtacatgaccacttga

SEQ ID NO: 2374 - DNA, 53 bp, Artificial Sequence
  Description of Artificial Sequence: Synthetic peanut,  sequence 3' and inner sequence
ccgtgctcatccccaagtgtgccatggtgattgactagtacatgaccacttga

SEQ ID NO: 2375 - DNA, 53 bp, Artificial Sequence
  Description of Artificial Sequence: Synthetic peanut,  sequence 3' and inner sequence
gtcatgcacgaacactatcatggctgcatgttgactagtacatgaccacttga

SEQ ID NO: 2376 - DNA, 53 bp, Artificial Sequence
  Description of Artificial Sequence: Synthetic peanut,  sequence 3' and inner sequence
ggacggaacggcactatcatgcggtgtgtattgactagtacatgaccacttga

SEQ ID NO: 2377 - DNA, 53 bp, Artificial Sequence
  Description of Artificial Sequence: Synthetic peanut,  sequence 3' and inner sequence
aatgcggcatgaacggacctacacgtgggcttgactagtacatgaccacttga

SEQ ID NO: 2378 - DNA, 53 bp, Artificial Sequence
  Description of Artificial Sequence: Synthetic peanut,  sequence 3' and inner sequence
cgtgcacaagtcggaccacgttgctgctcattgactagtacatgaccacttga

SEQ ID NO: 2379 - DNA, 53 bp, Artificial Sequence
  Description of Artificial Sequence: Synthetic peanut,  sequence 3' and inner sequence
gtactgcacgcaccctatcatgtaggcatgttgactagtacatgaccacttga

SEQ ID NO: 2380 - DNA, 53 bp, Artificial Sequence
  Description of Artificial Sequence: Synthetic peanut,  sequence 3' and inner sequence
cggaccgtcgatacgtcatgcacgctgacattgactagtacatgaccacttga

SEQ ID NO: 2381 - DNA, 53 bp, Artificial Sequence
  Description of Artificial Sequence: Synthetic peanut,  sequence 3' and inner sequence
cgtgacgcaacgtgtgcaatgttgtacgcattgactagtacatgaccacttga

SEQ ID NO: 2382 - DNA, 53 bp, Artificial Sequence
  Description of Artificial Sequence: Synthetic peanut,  sequence 3' and inner sequence
cgcagcaactgcaacggtatgcactgcgtgttgactagtacatgaccacttga

SEQ ID NO: 2383 - DNA, 53 bp, Artificial Sequence
  Description of Artificial Sequence: Synthetic peanut,  sequence 3' and inner sequence
gtgcgaccgaccctatcaggtgctcatgtattgactagtacatgaccacttga

SEQ ID NO: 2384 - DNA, 53 bp, Artificial Sequence
  Description of Artificial Sequence: Synthetic peanut,  sequence 3' and inner sequence
catgcgacacggtgataggatgcatgcacattgactagtacatgaccacttga

SEQ ID NO: 2385 - DNA, 53 bp, Artificial Sequence
  Description of Artificial Sequence: Synthetic peanut,  sequence 3' and inner sequence
cgaccgaggacgtggtgtgtgggctgcgcattgactagtacatgaccacttga

SEQ ID NO: 2386 - DNA, 53 bp, Artificial Sequence
  Description of Artificial Sequence: Synthetic peanut,  sequence 3' and inner sequence
acgcacgtagccctatcagtggtgcatgcattgactagtacatgaccacttga

SEQ ID NO: 2387 - DNA, 53 bp, Artificial Sequence
  Description of Artificial Sequence: Synthetic peanut,  sequence 3' and inner sequence
ccgtctgaccgatgtggtgcatgtggcaggttgactagtacatgaccacttga

SEQ ID NO: 2388 - DNA, 53 bp, Artificial Sequence
  Description of Artificial Sequence: Synthetic peanut,  sequence 3' and inner sequence
ccgtgcacgtggagcaaggactgtgtggcattgactagtacatgaccacttga

SEQ ID NO: 2389 - DNA, 53 bp, Artificial Sequence
  Description of Artificial Sequence: Synthetic peanut,  sequence 3' and inner sequence
ccgaacgaaccgcacgtggactgagcgacgttgactagtacatgaccacttga

SEQ ID NO: 2390 - DNA, 53 bp, Artificial Sequence
  Description of Artificial Sequence: Synthetic peanut,  sequence 3' and inner sequence
gcaccgatagctcgtaccgtcacgtggccattgactagtacatgaccacttga

SEQ ID NO: 2391 - DNA, 53 bp, Artificial Sequence
  Description of Artificial Sequence: Synthetic peanut,  sequence 3' and inner sequence
ccacacggaccgaaactgcactgttgggcgttgactagtacatgaccacttga

SEQ ID NO: 2392 - DNA, 53 bp, Artificial Sequence
  Description of Artificial Sequence: Synthetic peanut,  sequence 3' and inner sequence
cgtaccgtcaaggcaggcatggttgggcaattgactagtacatgaccacttga

SEQ ID NO: 2393 - DNA, 53 bp, Artificial Sequence
  Description of Artificial Sequence: Synthetic peanut,  sequence 3' and inner sequence
ggacgaacgtaacgatgggggcagtacgcattgactagtacatgaccacttga

SEQ ID NO: 2394 - DNA, 53 bp, Artificial Sequence
  Description of Artificial Sequence: Synthetic peanut,  sequence 3' and inner sequence
ggtccgaacgcacctcatgtgtgtcgtgtattgactagtacatgaccacttga

SEQ ID NO: 2395 - DNA, 53 bp, Artificial Sequence
  Description of Artificial Sequence: Synthetic peanut,  sequence 3' and inner sequence
gtgactgagctggcgtagctggacgtgtgcttgactagtacatgaccacttga

SEQ ID NO: 2396 - DNA, 53 bp, Artificial Sequence
  Description of Artificial Sequence: Synthetic peanut,  sequence 3' and inner sequence
gacgtacgctggatgtgacgaatgtgcggtttgactagtacatgaccacttga

SEQ ID NO: 2397 - DNA, 53 bp, Artificial Sequence
  Description of Artificial Sequence: Synthetic peanut,  sequence 3' and inner sequence
ccgtatcgacatcaagcggtggtgtgcgtgttgactagtacatgaccacttga

SEQ ID NO: 2398 - DNA, 53 bp, Artificial Sequence
  Description of Artificial Sequence: Synthetic peanut,  sequence 3' and inner sequence
gtcatgcacgaacactatcatggcggcacgttgactagtacatgaccacttga

SEQ ID NO: 2399 - DNA, 53 bp, Artificial Sequence
  Description of Artificial Sequence: Synthetic peanut,  sequence 3' and inner sequence
cgcaccgtgtggtaacgtgtccgaggcatattgactagtacatgaccacttga

SEQ ID NO: 2400 - DNA, 53 bp, Artificial Sequence
  Description of Artificial Sequence: Synthetic peanut,  sequence 3' and inner sequence
cgtgctgagcgagcctatctgtggttcgtgttgactagtacatgaccacttga

SEQ ID NO: 2401 - DNA, 53 bp, Artificial Sequence
  Description of Artificial Sequence: Synthetic peanut,  sequence 3' and inner sequence
gtcgtagcgcacactagcaagtgtcacgtattgactagtacatgaccacttga

SEQ ID NO: 2402 - DNA, 53 bp, Artificial Sequence
  Description of Artificial Sequence: Synthetic peanut,  sequence 3' and inner sequence
gcgaacagacacggtagcacatcctgcacattgactagtacatgaccacttga

SEQ ID NO: 2403 - DNA, 53 bp, Artificial Sequence
  Description of Artificial Sequence: Synthetic peanut,  sequence 3' and inner sequence
cgcacgcaaggggtgtggtaccacgtcgcattgactagtacatgaccacttga

SEQ ID NO: 2404 - DNA, 53 bp, Artificial Sequence
  Description of Artificial Sequence: Synthetic peanut,  sequence 3' and inner sequence
cgcacagagtgacgcacgtacgcctgtccgttgactagtacatgaccacttga

SEQ ID NO: 2405 - DNA, 53 bp, Artificial Sequence
  Description of Artificial Sequence: Synthetic peanut,  sequence 3' and inner sequence
cgacgaaccgaaccgtatcactgcgtggcattgactagtacatgaccacttga

SEQ ID NO: 2406 - DNA, 53 bp, Artificial Sequence
  Description of Artificial Sequence: Synthetic peanut,  sequence 3' and inner sequence
ggcatgcacgcacctacacgtgggcatggattgactagtacatgaccacttga

SEQ ID NO: 2407 - DNA, 53 bp, Artificial Sequence
  Description of Artificial Sequence: Synthetic peanut,  sequence 3' and inner sequence
cgcaccgtcgatacgacatgcacgctgacattgactagtacatgaccacttga

SEQ ID NO: 2408 - DNA, 53 bp, Artificial Sequence
  Description of Artificial Sequence: Synthetic peanut,  sequence 3' and inner sequence
gccgtgcggacctagggctgtatcgacgtgttgactagtacatgaccacttga

SEQ ID NO: 2409 - DNA, 53 bp, Artificial Sequence
  Description of Artificial Sequence: Synthetic peanut,  sequence 3' and inner sequence
cgcattgtcgtgaactggccgtggtggacattgactagtacatgaccacttga

SEQ ID NO: 2410 - DNA, 53 bp, Artificial Sequence
  Description of Artificial Sequence: Synthetic peanut,  sequence 3' and inner sequence
acgtatgccacagcgttccgtaagtgcacattgactagtacatgaccacttga

SEQ ID NO: 2411 - DNA, 53 bp, Artificial Sequence
  Description of Artificial Sequence: Synthetic peanut,  sequence 3' and inner sequence
ccacacagcaatgtgtctacgatgtgcgcattgactagtacatgaccacttga

SEQ ID NO: 2412 - DNA, 53 bp, Artificial Sequence
  Description of Artificial Sequence: Synthetic peanut,  sequence 3' and inner sequence
catgcacaccgagcatacatcgtctgcgcattgactagtacatgaccacttga

SEQ ID NO: 2413 - DNA, 53 bp, Artificial Sequence
  Description of Artificial Sequence: Synthetic peanut,  sequence 3' and inner sequence
ggacaacgtggcccaacatgtggttcgtgtttgactagtacatgaccacttga

SEQ ID NO: 2414 - DNA, 53 bp, Artificial Sequence
  Description of Artificial Sequence: Synthetic peanut,  sequence 3' and inner sequence
gcacgactcgcaccctatcatgatgccatgttgactagtacatgaccacttga

SEQ ID NO: 2415 - DNA, 53 bp, Artificial Sequence
  Description of Artificial Sequence: Synthetic peanut,  sequence 3' and inner sequence
gcatgtgtccaagctgatctgtggtgtgtattgactagtacatgaccacttga

SEQ ID NO: 2416 - DNA, 53 bp, Artificial Sequence
  Description of Artificial Sequence: Synthetic peanut,  sequence 3' and inner sequence
cacgtagcatggaaggtgatatgcgtcacattgactagtacatgaccacttga

SEQ ID NO: 2417 - DNA, 53 bp, Artificial Sequence
  Description of Artificial Sequence: Synthetic peanut,  sequence 3' and inner sequence
cgacacgcagggcacgtaacgcttaacgcgttgactagtacatgaccacttga

SEQ ID NO: 2418 - DNA, 53 bp, Artificial Sequence
  Description of Artificial Sequence: Synthetic peanut,  sequence 3' and inner sequence
cgcgagcacggtggacacgtacactgcacgttgactagtacatgaccacttga

SEQ ID NO: 2419 - DNA, 53 bp, Artificial Sequence
  Description of Artificial Sequence: Synthetic peanut,  sequence 3' and inner sequence
gtcatgcacgaacactatcattgcggcatgttgactagtacatgaccacttga

SEQ ID NO: 2420 - DNA, 53 bp, Artificial Sequence
  Description of Artificial Sequence: Synthetic peanut,  sequence 3' and inner sequence
cgcaccgtcgatacgtcatgcacgctgatattgactagtacatgaccacttga

SEQ ID NO: 2421 - DNA, 53 bp, Artificial Sequence
  Description of Artificial Sequence: Synthetic peanut,  sequence 3' and inner sequence
cgtgccgtagggactgggcgacatgcatgtttgactagtacatgaccacttga

SEQ ID NO: 2422 - DNA, 53 bp, Artificial Sequence
  Description of Artificial Sequence: Synthetic peanut,  sequence 3' and inner sequence
ccgagcgcgagaggacacgtcacgtacgcattgactagtacatgaccacttga

SEQ ID NO: 2423 - DNA, 51 bp, Artificial Sequence
  Description of Artificial Sequence: Synthetic peanut,  sequence 3' and inner sequence
cgcaccgtcgatacgtcatgcacgcaccttgactagtacatgaccacttga

SEQ ID NO: 2424 - DNA, 53 bp, Artificial Sequence
  Description of Artificial Sequence: Synthetic peanut,  sequence 3' and inner sequence
gccgcaacgactgaggggtgtatgtacgcgttgactagtacatgaccacttga

SEQ ID NO: 2425 - DNA, 53 bp, Artificial Sequence
  Description of Artificial Sequence: Synthetic peanut,  sequence 3' and inner sequence
cgccacaaacacatgcgtacgcactgcgtgttgactagtacatgaccacttga

SEQ ID NO: 2426 - DNA, 53 bp, Artificial Sequence
  Description of Artificial Sequence: Synthetic peanut,  sequence 3' and inner sequence
cgcaacggaccaaagtgtggctgtgtgtgcttgactagtacatgaccacttga

SEQ ID NO: 2427 - DNA, 48 bp, Artificial Sequence
  Description of Artificial Sequence: Synthetic peanut,  sequence 3' and inner sequence
ggcctgcgatggatgtgtgcgtgtattgactagtacatgaccacttga

SEQ ID NO: 2428 - DNA, 53 bp, Artificial Sequence
  Description of Artificial Sequence: Synthetic peanut,  sequence 3' and inner sequence
cacgtgctaggacgatacatgtgccacacattgactagtacatgaccacttga

SEQ ID NO: 2429 - DNA, 53 bp, Artificial Sequence
  Description of Artificial Sequence: Synthetic peanut,  sequence 3' and inner sequence
acgatgtcgtgaacggaccgtcatgtggcattgactagtacatgaccacttga

SEQ ID NO: 2430 - DNA, 53 bp, Artificial Sequence
  Description of Artificial Sequence: Synthetic peanut,  sequence 3' and inner sequence
ccgacgacgtcccgcaagttcgtggccatgttgactagtacatgaccacttga

SEQ ID NO: 2431 - DNA, 53 bp, Artificial Sequence
  Description of Artificial Sequence: Synthetic peanut,  sequence 3' and inner sequence
gtgctgcgatggattgggagtgtctttggcttgactagtacatgaccacttga

SEQ ID NO: 2432 - DNA, 53 bp, Artificial Sequence
  Description of Artificial Sequence: Synthetic peanut,  sequence 3' and inner sequence
ccgacgagtcacgtagtcatgccttgtcgattgactagtacatgaccacttga

SEQ ID NO: 2433 - DNA, 53 bp, Artificial Sequence
  Description of Artificial Sequence: Synthetic peanut,  sequence 3' and inner sequence
ggcatcgacgtacccaagatcacgtgcgtgttgactagtacatgaccacttga

SEQ ID NO: 2434 - DNA, 53 bp, Artificial Sequence
  Description of Artificial Sequence: Synthetic peanut,  sequence 3' and inner sequence
cgcaaccagacaaagcgttgtgtacgcacgttgactagtacatgaccacttga

SEQ ID NO: 2435 - DNA, 53 bp, Artificial Sequence
  Description of Artificial Sequence: Synthetic peanut,  sequence 3' and inner sequence
cgtacacggggcaggtagtgttcatgcacattgactagtacatgaccacttga

SEQ ID NO: 2436 - DNA, 53 bp, Artificial Sequence
  Description of Artificial Sequence: Synthetic peanut,  sequence 3' and inner sequence
ggccaccgaggcacgaatgcgtaacgtggtttgactagtacatgaccacttga

SEQ ID NO: 2437 - DNA, 53 bp, Artificial Sequence
  Description of Artificial Sequence: Synthetic peanut,  sequence 3' and inner sequence
ggacgcagcttgcctactggtgggcacgtattgactagtacatgaccacttga

SEQ ID NO: 2438 - DNA, 53 bp, Artificial Sequence
  Description of Artificial Sequence: Synthetic peanut,  sequence 3' and inner sequence
gtcatgaacgaccgaggagtgcgtcacgtattgactagtacatgaccacttga

SEQ ID NO: 2439 - DNA, 53 bp, Artificial Sequence
  Description of Artificial Sequence: Synthetic peanut,  sequence 3' and inner sequence
gcacatggaccgaaacgtgacgcggggtcattgactagtacatgaccacttga

SEQ ID NO: 2440 - DNA, 53 bp, Artificial Sequence
  Description of Artificial Sequence: Synthetic peanut,  sequence 3' and inner sequence
catgtcgcggcaagcgtaacgtgctacggattgactagtacatgaccacttga

SEQ ID NO: 2441 - DNA, 53 bp, Artificial Sequence
  Description of Artificial Sequence: Synthetic peanut,  sequence 3' and inner sequence
gtcgtgcgtgccctatcaagtcggtctgtattgactagtacatgaccacttga

SEQ ID NO: 2442 - DNA, 53 bp, Artificial Sequence
  Description of Artificial Sequence: Synthetic peanut,  sequence 3' and inner sequence
ccgtagcgacatccagcggtggtgtgcgtgttgactagtacatgaccacttga

SEQ ID NO: 2443 - DNA, 53 bp, Artificial Sequence
  Description of Artificial Sequence: Synthetic peanut,  sequence 3' and inner sequence
ccgtagcgacatcaagcgctggtgtgcgtgttgactagtacatgaccacttga

SEQ ID NO: 2444 - DNA, 53 bp, Artificial Sequence
  Description of Artificial Sequence: Synthetic peanut,  sequence 3' and inner sequence
cgatgcaaggccaacatcagcgtgcgtgtgttgactagtacatgaccacttga

SEQ ID NO: 2445 - DNA, 53 bp, Artificial Sequence
  Description of Artificial Sequence: Synthetic peanut,  sequence 3' and inner sequence
catgcggcagatcgaagtgtccactgcgcgttgactagtacatgaccacttga

SEQ ID NO: 2446 - DNA, 53 bp, Artificial Sequence
  Description of Artificial Sequence: Synthetic peanut,  sequence 3' and inner sequence
gtcatgccatcccttcgagtgtgccaggtattgactagtacatgaccacttga

SEQ ID NO: 2447 - DNA, 53 bp, Artificial Sequence
  Description of Artificial Sequence: Synthetic peanut,  sequence 3' and inner sequence
cacgcactacgacacactgcgtacggcacgttgactagtacatgaccacttga

SEQ ID NO: 2448 - DNA, 53 bp, Artificial Sequence
  Description of Artificial Sequence: Synthetic peanut,  sequence 3' and inner sequence
ccgatcgacctcgtgtgcatggctggcgcattgactagtacatgaccacttga

SEQ ID NO: 2449 - DNA, 53 bp, Artificial Sequence
  Description of Artificial Sequence: Synthetic peanut,  sequence 3' and inner sequence
cgcaccgttgatacgtcatgcacgctgacattgactagtacatgaccacttga

SEQ ID NO: 2450 - DNA, 53 bp, Artificial Sequence
  Description of Artificial Sequence: Synthetic peanut,  sequence 3' and inner sequence
ggcctagcacgtcacaatgggcatgccgcgttgactagtacatgaccacttga

SEQ ID NO: 2451 - DNA, 53 bp, Artificial Sequence
  Description of Artificial Sequence: Synthetic peanut,  sequence 3' and inner sequence
ccgtcacacagcacatgcgtccgtgccgcattgactagtacatgaccacttga

SEQ ID NO: 2452 - DNA, 53 bp, Artificial Sequence
  Description of Artificial Sequence: Synthetic peanut,  sequence 3' and inner sequence
cgcaccgtcgataagtcatgcacgctgacattgactagtacatgaccacttga

SEQ ID NO: 2453 - DNA, 52 bp, Artificial Sequence
  Description of Artificial Sequence: Synthetic peanut,  sequence 3' and inner sequence
ggcctgcgatggatgtggacgtacgtggcttgactagtacatgaccacttga

SEQ ID NO: 2454 - DNA, 53 bp, Artificial Sequence
  Description of Artificial Sequence: Synthetic peanut,  sequence 3' and inner sequence
ggacgcagcttgcctactggtggtcacgcattgactagtacatgaccacttga

SEQ ID NO: 2455 - DNA, 53 bp, Artificial Sequence
  Description of Artificial Sequence: Synthetic peanut,  sequence 3' and inner sequence
ggacagcgatggatgtgggttgtgctcgtcttgactagtacatgaccacttga

SEQ ID NO: 2456 - DNA, 53 bp, Artificial Sequence
  Description of Artificial Sequence: Synthetic peanut,  sequence 3' and inner sequence
cgacatggcgaaagggatgtgtgacgcgtgttgactagtacatgaccacttga

SEQ ID NO: 2457 - DNA, 53 bp, Artificial Sequence
  Description of Artificial Sequence: Synthetic peanut,  sequence 3' and inner sequence
ccgtagcgccatcaagcggtggtgtgcgtgttgactagtacatgaccacttga

SEQ ID NO: 2458 - DNA, 53 bp, Artificial Sequence
  Description of Artificial Sequence: Synthetic peanut,  sequence 3' and inner sequence
acgtcaacatggcgcagttcgtaacgcacattgactagtacatgaccacttga

SEQ ID NO: 2459 - DNA, 53 bp, Artificial Sequence
  Description of Artificial Sequence: Synthetic peanut,  sequence 3' and inner sequence
cgcgccgaaaggacgaacgatgtgtgcgtgttgactagtacatgaccacttga

SEQ ID NO: 2460 - DNA, 53 bp, Artificial Sequence
  Description of Artificial Sequence: Synthetic peanut,  sequence 3' and inner sequence
gcacgaacgacgctgtcatcgcacgtcacattgactagtacatgaccacttga

SEQ ID NO: 2461 - DNA, 53 bp, Artificial Sequence
  Description of Artificial Sequence: Synthetic peanut,  sequence 3' and inner sequence
gtacgcatcgccccttcgagtggacaggtattgactagtacatgaccacttga

SEQ ID NO: 2462 - DNA, 53 bp, Artificial Sequence
  Description of Artificial Sequence: Synthetic peanut,  sequence 3' and inner sequence
ggactgcgatggatgtgggttgtgctcgtcttgactagtacatgaccacttga

SEQ ID NO: 2463 - DNA, 53 bp, Artificial Sequence
  Description of Artificial Sequence: Synthetic peanut,  sequence 3' and inner sequence
cgcaccgtcgatacggcatgcacgctgacattgactagtacatgaccacttga

SEQ ID NO: 2464 - DNA, 53 bp, Artificial Sequence
  Description of Artificial Sequence: Synthetic peanut,  sequence 3' and inner sequence
ggcattcgatgcactacaagttgttgtgtattgactagtacatgaccacttga

SEQ ID NO: 2465 - DNA, 53 bp, Artificial Sequence
  Description of Artificial Sequence: Synthetic peanut,  sequence 3' and inner sequence
gcgtgcagcatatggaaggacgtggccgcgttgactagtacatgaccacttga

SEQ ID NO: 2466 - DNA, 53 bp, Artificial Sequence
  Description of Artificial Sequence: Synthetic peanut,  sequence 3' and inner sequence
cgcaccgtcgatatgtcatgcacgctgacattgactagtacatgaccacttga

SEQ ID NO: 2467 - DNA, 53 bp, Artificial Sequence
  Description of Artificial Sequence: Synthetic peanut,  sequence 3' and inner sequence
ccgtagcgacatcacgcggtggtgtgcgtgttgactagtacatgaccacttga

SEQ ID NO: 2468 - DNA, 53 bp, Artificial Sequence
  Description of Artificial Sequence: Synthetic peanut,  sequence 3' and inner sequence
gtgctgaggcatccctaggacacgtggccattgactagtacatgaccacttga

SEQ ID NO: 2469 - DNA, 53 bp, Artificial Sequence
  Description of Artificial Sequence: Synthetic peanut,  sequence 3' and inner sequence
cacgtgcacgatgcaagtacacatgcaccattgactagtacatgaccacttga

SEQ ID NO: 2470 - DNA, 53 bp, Artificial Sequence
  Description of Artificial Sequence: Synthetic peanut,  sequence 3' and inner sequence
ggacggaacgcagccacgtgtgtcgatgtattgactagtacatgaccacttga

SEQ ID NO: 2471 - DNA, 53 bp, Artificial Sequence
  Description of Artificial Sequence: Synthetic peanut,  sequence 3' and inner sequence
gacgcgatgcacttggtccgtactcacgtgttgactagtacatgaccacttga

SEQ ID NO: 2472 - DNA, 53 bp, Artificial Sequence
  Description of Artificial Sequence: Synthetic peanut,  sequence 3' and inner sequence
ggacggatcgaacctagagagtggcgtggattgactagtacatgaccacttga

SEQ ID NO: 2473 - DNA, 53 bp, Artificial Sequence
  Description of Artificial Sequence: Synthetic peanut,  sequence 3' and inner sequence
ccgtggcgtaacgaaggggaggtatgcacgttgactagtacatgaccacttga

SEQ ID NO: 2474 - DNA, 53 bp, Artificial Sequence
  Description of Artificial Sequence: Synthetic peanut,  sequence 3' and inner sequence
acgcactgaccgttagcatggtcctgcacattgactagtacatgaccacttga

SEQ ID NO: 2475 - DNA, 53 bp, Artificial Sequence
  Description of Artificial Sequence: Synthetic peanut,  sequence 3' and inner sequence
ccggagcgcactgtcagcgtggtgtacgtgttgactagtacatgaccacttga

SEQ ID NO: 2476 - DNA, 53 bp, Artificial Sequence
  Description of Artificial Sequence: Synthetic peanut,  sequence 3' and inner sequence
cgaaccgcaaggaggctggtacgttcggcattgactagtacatgaccacttga

SEQ ID NO: 2477 - DNA, 53 bp, Artificial Sequence
  Description of Artificial Sequence: Synthetic peanut,  sequence 3' and inner sequence
cgcaccgtcgatacgtcatgcacgccgacattgactagtacatgaccacttga

SEQ ID NO: 2478 - DNA, 53 bp, Artificial Sequence
  Description of Artificial Sequence: Synthetic peanut,  sequence 3' and inner sequence
cgtaccgaacaagtgacattgcgcacggtcttgactagtacatgaccacttga

SEQ ID NO: 2479 - DNA, 53 bp, Artificial Sequence
  Description of Artificial Sequence: Synthetic peanut,  sequence 3' and inner sequence
gcacaaacgaccgaggcatgtagcgacgtgttgactagtacatgaccacttga

SEQ ID NO: 2480 - DNA, 53 bp, Artificial Sequence
  Description of Artificial Sequence: Synthetic peanut,  sequence 3' and inner sequence
cgtgcatgctgtcgggacgcacactgtgtgttgactagtacatgaccacttga

SEQ ID NO: 2481 - DNA, 53 bp, Artificial Sequence
  Description of Artificial Sequence: Synthetic peanut,  sequence 3' and inner sequence
cgcaccggtgagggcatggttcggcacgcattgactagtacatgaccacttga

SEQ ID NO: 2482 - DNA, 53 bp, Artificial Sequence
  Description of Artificial Sequence: Synthetic peanut,  sequence 3' and inner sequence
cgtgccaccagagtgacgcatgcatgatgcttgactagtacatgaccacttga

SEQ ID NO: 2483 - DNA, 53 bp, Artificial Sequence
  Description of Artificial Sequence: Synthetic peanut,  sequence 3' and inner sequence
cgacagatcggcatcaccagtcattgcgcattgactagtacatgaccacttga

SEQ ID NO: 2484 - DNA, 53 bp, Artificial Sequence
  Description of Artificial Sequence: Synthetic peanut,  sequence 3' and inner sequence
cgaaccggaaggtggcgcatgggtgagggattgactagtacatgaccacttga

SEQ ID NO: 2485 - DNA, 53 bp, Artificial Sequence
  Description of Artificial Sequence: Synthetic peanut,  sequence 3' and inner sequence
ggacgcaacgaacctacgagtgatcgtgtattgactagtacatgaccacttga

SEQ ID NO: 2486 - DNA, 53 bp, Artificial Sequence
  Description of Artificial Sequence: Synthetic peanut,  sequence 3' and inner sequence
tcgtagcgacatcaagcggtggtgtgcgtgttgactagtacatgaccacttga

SEQ ID NO: 2487 - DNA, 53 bp, Artificial Sequence
  Description of Artificial Sequence: Synthetic peanut,  sequence 3' and inner sequence
gtgcgagtcgaccgtacaagtgcaggcatgttgactagtacatgaccacttga

SEQ ID NO: 2488 - DNA, 53 bp, Artificial Sequence
  Description of Artificial Sequence: Synthetic peanut,  sequence 3' and inner sequence
cgcaccgtcgatacgtcatgcacactgacattgactagtacatgaccacttga

SEQ ID NO: 2489 - DNA, 54 bp, Artificial Sequence
  Description of Artificial Sequence: Synthetic peanut,  sequence 3' and inner sequence
ggcctgcgatggatgtggacggtgtggtagtttgactagtacatgaccacttga

SEQ ID NO: 2490 - DNA, 53 bp, Artificial Sequence
  Description of Artificial Sequence: Synthetic peanut,  sequence 3' and inner sequence
cgcacacgggaggcatcgtaacgtgcagcattgactagtacatgaccacttga

SEQ ID NO: 2491 - DNA, 53 bp, Artificial Sequence
  Description of Artificial Sequence: Synthetic peanut,  sequence 3' and inner sequence
acgtcaaacgcgacaatgcatgcgtacacgttgactagtacatgaccacttga

SEQ ID NO: 2492 - DNA, 53 bp, Artificial Sequence
  Description of Artificial Sequence: Synthetic peanut,  sequence 3' and inner sequence
cacgctgcatgatcacgcacttccgtcacgttgactagtacatgaccacttga

SEQ ID NO: 2493 - DNA, 53 bp, Artificial Sequence
  Description of Artificial Sequence: Synthetic peanut,  sequence 3' and inner sequence
gtcattccgcatcctacacttgggcacgtattgactagtacatgaccacttga

SEQ ID NO: 2494 - DNA, 53 bp, Artificial Sequence
  Description of Artificial Sequence: Synthetic peanut,  sequence 3' and inner sequence
cgacacagcatcgaacttatggcatgcacgttgactagtacatgaccacttga

SEQ ID NO: 2495 - DNA, 53 bp, Artificial Sequence
  Description of Artificial Sequence: Synthetic peanut,  sequence 3' and inner sequence
cgaacgcagtgcagtgacatccagtgcacattgactagtacatgaccacttga

SEQ ID NO: 2496 - DNA, 53 bp, Artificial Sequence
  Description of Artificial Sequence: Synthetic peanut,  sequence 3' and inner sequence
gtcgtgcgatctgaccgtgcaagttgggcattgactagtacatgaccacttga

SEQ ID NO: 2497 - DNA, 53 bp, Artificial Sequence
  Description of Artificial Sequence: Synthetic peanut,  sequence 3' and inner sequence
cgcaccgtcgatacgtcatgcaagctgacattgactagtacatgaccacttga

SEQ ID NO: 2498 - DNA, 53 bp, Artificial Sequence
  Description of Artificial Sequence: Synthetic peanut,  sequence 3' and inner sequence
cgcaccgtcgatacgtcatgcacgatgacattgactagtacatgaccacttga

SEQ ID NO: 2499 - DNA, 53 bp, Artificial Sequence
  Description of Artificial Sequence: Synthetic peanut,  sequence 3' and inner sequence
ggcctgcgatggatgtgcgttgtgtctgtcttgactagtacatgaccacttga

SEQ ID NO: 2500 - DNA, 53 bp, Artificial Sequence
  Description of Artificial Sequence: Synthetic peanut,  sequence 3' and inner sequence
ccgcacacgacacttggtcatccgctgtcgttgactagtacatgaccacttga

SEQ ID NO: 2501 - DNA, 53 bp, Artificial Sequence
  Description of Artificial Sequence: Synthetic peanut,  sequence 3' and inner sequence
cacgaacagtaggcattgcacggcgacgcgttgactagtacatgaccacttga

SEQ ID NO: 2502 - DNA, 53 bp, Artificial Sequence
  Description of Artificial Sequence: Synthetic peanut,  sequence 3' and inner sequence
gcaacggcggaatcacgtgggatgtgcgcattgactagtacatgaccacttga

SEQ ID NO: 2503 - DNA, 54 bp, Artificial Sequence
  Description of Artificial Sequence: Synthetic peanut,  sequence 3' and inner sequence
gtactgcgatggcttagcaaagtgcgacatgttgactagtacatgaccacttga

SEQ ID NO: 2504 - DNA, 53 bp, Artificial Sequence
  Description of Artificial Sequence: Synthetic peanut,  sequence 3' and inner sequence
cgaagatggacgcatcagcccgacgtgtcattgactagtacatgaccacttga

SEQ ID NO: 2505 - DNA, 53 bp, Artificial Sequence
  Description of Artificial Sequence: Synthetic peanut,  sequence 3' and inner sequence
gcacgacagagcgacactgtgtccgacgcattgactagtacatgaccacttga

SEQ ID NO: 2506 - DNA, 53 bp, Artificial Sequence
  Description of Artificial Sequence: Synthetic peanut,  sequence 3' and inner sequence
ggacgcaacgtaccgtatcgtggccatgcattgactagtacatgaccacttga

SEQ ID NO: 2507 - DNA, 53 bp, Artificial Sequence
  Description of Artificial Sequence: Synthetic peanut,  sequence 3' and inner sequence
cgccccgtcgatacgtcatgcacgctgacattgactagtacatgaccacttga

SEQ ID NO: 2508 - DNA, 53 bp, Artificial Sequence
  Description of Artificial Sequence: Synthetic peanut,  sequence 3' and inner sequence
cgtgcacagccataacgtacccccgtcacgttgactagtacatgaccacttga

SEQ ID NO: 2509 - DNA, 53 bp, Artificial Sequence
  Description of Artificial Sequence: Synthetic peanut,  sequence 3' and inner sequence
cgcaccgtcgatacgtcaggcacgctgacattgactagtacatgaccacttga

SEQ ID NO: 2510 - DNA, 53 bp, Artificial Sequence
  Description of Artificial Sequence: Synthetic peanut,  sequence 3' and inner sequence
cacggatgggcgaaacggcttgactgcgtcttgactagtacatgaccacttga

SEQ ID NO: 2511 - DNA, 53 bp, Artificial Sequence
  Description of Artificial Sequence: Synthetic peanut,  sequence 3' and inner sequence
ccgaccgcgttgcctagtgatcggtggccattgactagtacatgaccacttga

SEQ ID NO: 2512 - DNA, 53 bp, Artificial Sequence
  Description of Artificial Sequence: Synthetic peanut,  sequence 3' and inner sequence
cgcaccgtcgatacgtcatgcacgctggcattgactagtacatgaccacttga

SEQ ID NO: 2513 - DNA, 53 bp, Artificial Sequence
  Description of Artificial Sequence: Synthetic peanut,  sequence 3' and inner sequence
cgcaccggcaagtgctacggtctagtcgtgttgactagtacatgaccacttga

SEQ ID NO: 2514 - DNA, 53 bp, Artificial Sequence
  Description of Artificial Sequence: Synthetic peanut,  sequence 3' and inner sequence
cgcaacgaactgatgcaacgcgtaggcatgttgactagtacatgaccacttga

SEQ ID NO: 2515 - DNA, 53 bp, Artificial Sequence
  Description of Artificial Sequence: Synthetic peanut,  sequence 3' and inner sequence
gtcacgcagcgtatcccttcgagtggtgtgttgactagtacatgaccacttga

SEQ ID NO: 2516 - DNA, 49 bp, Artificial Sequence
  Description of Artificial Sequence: Synthetic peanut,  sequence 3' and inner sequence
gacgtgagcacgtaatggcctgcgcgttgactagtacatgaccacttga

SEQ ID NO: 2517 - DNA, 53 bp, Artificial Sequence
  Description of Artificial Sequence: Synthetic peanut,  sequence 3' and inner sequence
gtcatgcacgcacctacacgtgggcacgtattgactagtacatgaccacttga

SEQ ID NO: 2518 - DNA, 53 bp, Artificial Sequence
  Description of Artificial Sequence: Synthetic peanut,  sequence 3' and inner sequence
gtacgtggctgccctgtgcgaatgtacgcattgactagtacatgaccacttga

SEQ ID NO: 2519 - DNA, 53 bp, Artificial Sequence
  Description of Artificial Sequence: Synthetic peanut,  sequence 3' and inner sequence
cacgcagggcacgtggcgttcaccttgccattgactagtacatgaccacttga

SEQ ID NO: 2520 - DNA, 53 bp, Artificial Sequence
  Description of Artificial Sequence: Synthetic peanut,  sequence 3' and inner sequence
cgtgccaacgacctacgtgccatgcggtcattgactagtacatgaccacttga

SEQ ID NO: 2521 - DNA, 53 bp, Artificial Sequence
  Description of Artificial Sequence: Synthetic peanut,  sequence 3' and inner sequence
ccgcacgtagccctatcagttgtgcatgcattgactagtacatgaccacttga

SEQ ID NO: 2522 - DNA, 53 bp, Artificial Sequence
  Description of Artificial Sequence: Synthetic peanut,  sequence 3' and inner sequence
tcggaccgcaagtcaggcacgtacgacggtttgactagtacatgaccacttga

SEQ ID NO: 2523 - DNA, 53 bp, Artificial Sequence
  Description of Artificial Sequence: Synthetic peanut,  sequence 3' and inner sequence
gcacgcagcttgccgtagggtggcatgggattgactagtacatgaccacttga

SEQ ID NO: 2524 - DNA, 53 bp, Artificial Sequence
  Description of Artificial Sequence: Synthetic peanut,  sequence 3' and inner sequence
gttgcgaacggaccgttgcgtggttagggattgactagtacatgaccacttga

SEQ ID NO: 2525 - DNA, 53 bp, Artificial Sequence
  Description of Artificial Sequence: Synthetic peanut,  sequence 3' and inner sequence
cacgcagtgtgtgacgtgtgtgtgttcacgttgactagtacatgaccacttga

SEQ ID NO: 2526 - DNA, 53 bp, Artificial Sequence
  Description of Artificial Sequence: Synthetic peanut,  sequence 3' and inner sequence
cgtcacgccgaggtacgtccttccgccacgttgactagtacatgaccacttga

SEQ ID NO: 2527 - DNA, 53 bp, Artificial Sequence
  Description of Artificial Sequence: Synthetic peanut,  sequence 3' and inner sequence
ggacaggctgagcgaacaagtgcatgcacgttgactagtacatgaccacttga

SEQ ID NO: 2528 - DNA, 53 bp, Artificial Sequence
  Description of Artificial Sequence: Synthetic peanut,  sequence 3' and inner sequence
gtcacgacgaaggcctagcaacgtgcgtcattgactagtacatgaccacttga

SEQ ID NO: 2529 - DNA, 53 bp, Artificial Sequence
  Description of Artificial Sequence: Synthetic peanut,  sequence 3' and inner sequence
ccatcatggacgacgatggcttagcgtggtttgactagtacatgaccacttga

SEQ ID NO: 2530 - DNA, 53 bp, Artificial Sequence
  Description of Artificial Sequence: Synthetic peanut,  sequence 3' and inner sequence
gtacacacgtaccgccagatcaagtgcacattgactagtacatgaccacttga

SEQ ID NO: 2531 - DNA, 53 bp, Artificial Sequence
  Description of Artificial Sequence: Synthetic peanut,  sequence 3' and inner sequence
cgatacgcaacgccacgaacatgcctcacgttgactagtacatgaccacttga

SEQ ID NO: 2532 - DNA, 53 bp, Artificial Sequence
  Description of Artificial Sequence: Synthetic peanut,  sequence 3' and inner sequence
cgcaatggacgaattgaccgtgcgtggccattgactagtacatgaccacttga

SEQ ID NO: 2533 - DNA, 53 bp, Artificial Sequence
  Description of Artificial Sequence: Synthetic peanut,  sequence 3' and inner sequence
cgcagcagtgtgcgtacaatgtcatgcgcgttgactagtacatgaccacttga

SEQ ID NO: 2534 - DNA, 53 bp, Artificial Sequence
  Description of Artificial Sequence: Synthetic peanut,  sequence 3' and inner sequence
cgaacgcgacgatggctcgtgcacttgacattgactagtacatgaccacttga

SEQ ID NO: 2535 - DNA, 53 bp, Artificial Sequence
  Description of Artificial Sequence: Synthetic peanut,  sequence 3' and inner sequence
ccgacgcaaggcaggtacatgtggtgcggtttgactagtacatgaccacttga

SEQ ID NO: 2536 - DNA, 53 bp, Artificial Sequence
  Description of Artificial Sequence: Synthetic peanut,  sequence 3' and inner sequence
caggcacggagacgctgtgtatacgacgcattgactagtacatgaccacttga

SEQ ID NO: 2537 - DNA, 53 bp, Artificial Sequence
  Description of Artificial Sequence: Synthetic peanut,  sequence 3' and inner sequence
cacgataggcacggcgtatcacagttcggtttgactagtacatgaccacttga

SEQ ID NO: 2538 - DNA, 53 bp, Artificial Sequence
  Description of Artificial Sequence: Synthetic peanut,  sequence 3' and inner sequence
cacgtgttgcgaggcacctgccactgcacgttgactagtacatgaccacttga

SEQ ID NO: 2539 - DNA, 53 bp, Artificial Sequence
  Description of Artificial Sequence: Synthetic peanut,  sequence 3' and inner sequence
cgcatcggaccgtacgtgtactcgtgctgtttgactagtacatgaccacttga

SEQ ID NO: 2540 - DNA, 53 bp, Artificial Sequence
  Description of Artificial Sequence: Synthetic peanut,  sequence 3' and inner sequence
ggccgaacgtaacgcctcgtggtcctggcattgactagtacatgaccacttga

SEQ ID NO: 2541 - DNA, 53 bp, Artificial Sequence
  Description of Artificial Sequence: Synthetic peanut,  sequence 3' and inner sequence
gtgcatcgcgaccatgggctggacctgtccttgactagtacatgaccacttga

SEQ ID NO: 2542 - DNA, 53 bp, Artificial Sequence
  Description of Artificial Sequence: Synthetic peanut,  sequence 3' and inner sequence
catgctcagtgggaacgtggcccgtgcacgttgactagtacatgaccacttga

SEQ ID NO: 2543 - DNA, 53 bp, Artificial Sequence
  Description of Artificial Sequence: Synthetic peanut,  sequence 3' and inner sequence
cgcaccgtcaatacgtcatgcacgctgacattgactagtacatgaccacttga

SEQ ID NO: 2544 - DNA, 53 bp, Artificial Sequence
  Description of Artificial Sequence: Synthetic peanut,  sequence 3' and inner sequence
cgcgcacatgatcgtcactcctgctgcaccttgactagtacatgaccacttga

SEQ ID NO: 2545 - DNA, 53 bp, Artificial Sequence
  Description of Artificial Sequence: Synthetic peanut,  sequence 3' and inner sequence
cgcaccgacgagtgggcttaacgtgtcacgttgactagtacatgaccacttga

SEQ ID NO: 2546 - DNA, 53 bp, Artificial Sequence
  Description of Artificial Sequence: Synthetic peanut,  sequence 3' and inner sequence
cacacaaggcacacgtgacatatcgtcgcgttgactagtacatgaccacttga

SEQ ID NO: 2547 - DNA, 53 bp, Artificial Sequence
  Description of Artificial Sequence: Synthetic peanut,  sequence 3' and inner sequence
catgatgcaggctaagtcgcactcgccacgttgactagtacatgaccacttga

SEQ ID NO: 2548 - DNA, 53 bp, Artificial Sequence
  Description of Artificial Sequence: Synthetic peanut,  sequence 3' and inner sequence
ccatatggcagtgcgatggcttcgctggtcttgactagtacatgaccacttga

SEQ ID NO: 2549 - DNA, 52 bp, Artificial Sequence
  Description of Artificial Sequence: Synthetic peanut,  sequence 3' and inner sequence
cgtacgacacgacagacatgcacgacgcattgactagtacatgaccacttga

SEQ ID NO: 2550 - DNA, 53 bp, Artificial Sequence
  Description of Artificial Sequence: Synthetic peanut,  sequence 3' and inner sequence
cgtgagggcaaatgcacgacaacacgcgcattgactagtacatgaccacttga

SEQ ID NO: 2551 - DNA, 53 bp, Artificial Sequence
  Description of Artificial Sequence: Synthetic peanut,  sequence 3' and inner sequence
cgtgcgatgtgcgtatcgagtgcgtgtggattgactagtacatgaccacttga

SEQ ID NO: 2552 - DNA, 53 bp, Artificial Sequence
  Description of Artificial Sequence: Synthetic peanut,  sequence 3' and inner sequence
gtgcacaacgtaccgctcacgtggccacgtttgactagtacatgaccacttga

SEQ ID NO: 2553 - DNA, 53 bp, Artificial Sequence
  Description of Artificial Sequence: Synthetic peanut,  sequence 3' and inner sequence
ccgcacgtagccctatcagtggcgcatgcattgactagtacatgaccacttga

SEQ ID NO: 2554 - DNA, 53 bp, Artificial Sequence
  Description of Artificial Sequence: Synthetic peanut,  sequence 3' and inner sequence
cgtgccgcacaaagcatgacctcgttgtgcttgactagtacatgaccacttga

SEQ ID NO: 2555 - DNA, 53 bp, Artificial Sequence
  Description of Artificial Sequence: Synthetic peanut,  sequence 3' and inner sequence
cgacatggaacgcaggtctgcacgttgaccttgactagtacatgaccacttga

SEQ ID NO: 2556 - DNA, 53 bp, Artificial Sequence
  Description of Artificial Sequence: Synthetic peanut,  sequence 3' and inner sequence
gcatgccgtgtcgtcccaaccagctgggcattgactagtacatgaccacttga

SEQ ID NO: 2557 - DNA, 53 bp, Artificial Sequence
  Description of Artificial Sequence: Synthetic peanut,  sequence 3' and inner sequence
cgacacgagatcaagccgtcatgatgcggtttgactagtacatgaccacttga

SEQ ID NO: 2558 - DNA, 53 bp, Artificial Sequence
  Description of Artificial Sequence: Synthetic peanut,  sequence 3' and inner sequence
cgtggcagcaacaccggtacgcagttcgtgttgactagtacatgaccacttga

SEQ ID NO: 2559 - DNA, 53 bp, Artificial Sequence
  Description of Artificial Sequence: Synthetic peanut,  sequence 3' and inner sequence
ccgcacgtagccctatcagtgttgcatgcattgactagtacatgaccacttga

SEQ ID NO: 2560 - DNA, 53 bp, Artificial Sequence
  Description of Artificial Sequence: Synthetic peanut,  sequence 3' and inner sequence
gtcattccgcatcctacacgtgggtatggattgactagtacatgaccacttga

SEQ ID NO: 2561 - DNA, 53 bp, Artificial Sequence
  Description of Artificial Sequence: Synthetic peanut,  sequence 3' and inner sequence
cccaccgtcgatacgtcatgcacgctgacattgactagtacatgaccacttga

SEQ ID NO: 2562 - DNA, 53 bp, Artificial Sequence
  Description of Artificial Sequence: Synthetic peanut,  sequence 3' and inner sequence
cgcggacagacaccacgtatgtcacggacattgactagtacatgaccacttga

SEQ ID NO: 2563 - DNA, 53 bp, Artificial Sequence
  Description of Artificial Sequence: Synthetic peanut,  sequence 3' and inner sequence
tggcctgacgtgccctgacatgctgcgtcattgactagtacatgaccacttga

SEQ ID NO: 2564 - DNA, 53 bp, Artificial Sequence
  Description of Artificial Sequence: Synthetic peanut,  sequence 3' and inner sequence
ccgtgtggacgacaactactgccatgcgcattgactagtacatgaccacttga

SEQ ID NO: 2565 - DNA, 53 bp, Artificial Sequence
  Description of Artificial Sequence: Synthetic peanut,  sequence 3' and inner sequence
cgcaccaatgcacacgtgacatgatgcacgttgactagtacatgaccacttga

SEQ ID NO: 2566 - DNA, 53 bp, Artificial Sequence
  Description of Artificial Sequence: Synthetic peanut,  sequence 3' and inner sequence
gcgcagcagggaagcaggccacactacgtgttgactagtacatgaccacttga

SEQ ID NO: 2567 - DNA, 53 bp, Artificial Sequence
  Description of Artificial Sequence: Synthetic peanut,  sequence 3' and inner sequence
tcgatgaccgcgagtgggacgtgcacgtgcttgactagtacatgaccacttga

SEQ ID NO: 2568 - DNA, 53 bp, Artificial Sequence
  Description of Artificial Sequence: Synthetic peanut,  sequence 3' and inner sequence
cacaccgcggaagtgacgtgcaccaacgtgttgactagtacatgaccacttga

SEQ ID NO: 2569 - DNA, 53 bp, Artificial Sequence
  Description of Artificial Sequence: Synthetic peanut,  sequence 3' and inner sequence
cacgtacgcacaacgtggcttgacggtgtattgactagtacatgaccacttga

SEQ ID NO: 2570 - DNA, 53 bp, Artificial Sequence
  Description of Artificial Sequence: Synthetic peanut,  sequence 3' and inner sequence
gcactgagcgtaccgaggaggcggtgtgtcttgactagtacatgaccacttga

SEQ ID NO: 2571 - DNA, 53 bp, Artificial Sequence
  Description of Artificial Sequence: Synthetic peanut,  sequence 3' and inner sequence
cgacgcacacggcaagaccacactgcgatcttgactagtacatgaccacttga

SEQ ID NO: 2572 - DNA, 53 bp, Artificial Sequence
  Description of Artificial Sequence: Synthetic peanut,  sequence 3' and inner sequence
gacgcaacgacctgagtggacacggacgtattgactagtacatgaccacttga

SEQ ID NO: 2573 - DNA, 53 bp, Artificial Sequence
  Description of Artificial Sequence: Synthetic peanut,  sequence 3' and inner sequence
ggcctgcgatggatgtgtgcgtgtacgacgttgactagtacatgaccacttga

SEQ ID NO: 2574 - DNA, 53 bp, Artificial Sequence
  Description of Artificial Sequence: Synthetic peanut,  sequence 3' and inner sequence
cacatcacgcactctgagcgtaacgtgggtttgactagtacatgaccacttga

SEQ ID NO: 2575 - DNA, 53 bp, Artificial Sequence
  Description of Artificial Sequence: Synthetic peanut,  sequence 3' and inner sequence
acgtcccacacgacacgtggtatgtgcatgttgactagtacatgaccacttga

SEQ ID NO: 2576 - DNA, 53 bp, Artificial Sequence
  Description of Artificial Sequence: Synthetic peanut,  sequence 3' and inner sequence
cgcatcgtcgatacgtcatgcacgctgacattgactagtacatgaccacttga

SEQ ID NO: 2577 - DNA, 53 bp, Artificial Sequence
  Description of Artificial Sequence: Synthetic peanut,  sequence 3' and inner sequence
ggcctgcgatggatgtggggatgcactgtcttgactagtacatgaccacttga

SEQ ID NO: 2578 - DNA, 53 bp, Artificial Sequence
  Description of Artificial Sequence: Synthetic peanut,  sequence 3' and inner sequence
cacggcagggtatgtgacacagcctgcacgttgactagtacatgaccacttga

SEQ ID NO: 2579 - DNA, 53 bp, Artificial Sequence
  Description of Artificial Sequence: Synthetic peanut,  sequence 3' and inner sequence
ggccgaaacgacgtggtgagtacgcagccattgactagtacatgaccacttga

SEQ ID NO: 2580 - DNA, 53 bp, Artificial Sequence
  Description of Artificial Sequence: Synthetic peanut,  sequence 3' and inner sequence
ccgtagcgacatcaagcggtggtgtgagtgttgactagtacatgaccacttga

SEQ ID NO: 2581 - DNA, 53 bp, Artificial Sequence
  Description of Artificial Sequence: Synthetic peanut,  sequence 3' and inner sequence
gcgttcgataccctatgtggcctgtacgtgttgactagtacatgaccacttga

SEQ ID NO: 2582 - DNA, 53 bp, Artificial Sequence
  Description of Artificial Sequence: Synthetic peanut,  sequence 3' and inner sequence
gtgcttggatccctatcaggtggacgtgtattgactagtacatgaccacttga

SEQ ID NO: 2583 - DNA, 53 bp, Artificial Sequence
  Description of Artificial Sequence: Synthetic peanut,  sequence 3' and inner sequence
cgcaccgtcgatacgtcatgcccgctgacattgactagtacatgaccacttga

SEQ ID NO: 2584 - DNA, 53 bp, Artificial Sequence
  Description of Artificial Sequence: Synthetic peanut,  sequence 3' and inner sequence
cgtgggacgcgaaggatgtgacactgcgtgttgactagtacatgaccacttga

SEQ ID NO: 2585 - DNA, 53 bp, Artificial Sequence
  Description of Artificial Sequence: Synthetic peanut,  sequence 3' and inner sequence
cgaaccgcaacggtggtcctgcccttgacattgactagtacatgaccacttga

SEQ ID NO: 2586 - DNA, 53 bp, Artificial Sequence
  Description of Artificial Sequence: Synthetic peanut,  sequence 3' and inner sequence
gcgcctgaacgtagcgaaaggtggtgcatgttgactagtacatgaccacttga

SEQ ID NO: 2587 - DNA, 53 bp, Artificial Sequence
  Description of Artificial Sequence: Synthetic peanut,  sequence 3' and inner sequence
cacaacgcacacgggctgactgactgcgtgttgactagtacatgaccacttga

SEQ ID NO: 2588 - DNA, 53 bp, Artificial Sequence
  Description of Artificial Sequence: Synthetic peanut,  sequence 3' and inner sequence
cgcaacggcaggcagagtgaatgtggcgtgttgactagtacatgaccacttga

SEQ ID NO: 2589 - DNA, 53 bp, Artificial Sequence
  Description of Artificial Sequence: Synthetic peanut,  sequence 3' and inner sequence
cgacgcggaaggcacggactgaccgtcacattgactagtacatgaccacttga

SEQ ID NO: 2590 - DNA, 53 bp, Artificial Sequence
  Description of Artificial Sequence: Synthetic peanut,  sequence 3' and inner sequence
cacgtggcacggtgctatacggcattcgcattgactagtacatgaccacttga

SEQ ID NO: 2591 - DNA, 53 bp, Artificial Sequence
  Description of Artificial Sequence: Synthetic peanut,  sequence 3' and inner sequence
gccatgcacgaacactatcatggcggcatgttgactagtacatgaccacttga

SEQ ID NO: 2592 - DNA, 53 bp, Artificial Sequence
  Description of Artificial Sequence: Synthetic peanut,  sequence 3' and inner sequence
ggcagcaggacatcacacatgcacttcgcattgactagtacatgaccacttga

SEQ ID NO: 2593 - DNA, 53 bp, Artificial Sequence
  Description of Artificial Sequence: Synthetic peanut,  sequence 3' and inner sequence
cgtgcagtggcaacggtccgacgcaacacattgactagtacatgaccacttga

SEQ ID NO: 2594 - DNA, 53 bp, Artificial Sequence
  Description of Artificial Sequence: Synthetic peanut,  sequence 3' and inner sequence
cgataccgccactacgacatgcacggcgtattgactagtacatgaccacttga

SEQ ID NO: 2595 - DNA, 53 bp, Artificial Sequence
  Description of Artificial Sequence: Synthetic peanut,  sequence 3' and inner sequence
ccgtagcgacatcaagcgatggtgtgcgtgttgactagtacatgaccacttga

SEQ ID NO: 2596 - DNA, 53 bp, Artificial Sequence
  Description of Artificial Sequence: Synthetic peanut,  sequence 3' and inner sequence
cgtatggctgggatcgtacctacgtggacattgactagtacatgaccacttga

SEQ ID NO: 2597 - DNA, 53 bp, Artificial Sequence
  Description of Artificial Sequence: Synthetic peanut,  sequence 3' and inner sequence
cgcacactgtgagggcatgtggcacgcagtttgactagtacatgaccacttga

SEQ ID NO: 2598 - DNA, 53 bp, Artificial Sequence
  Description of Artificial Sequence: Synthetic peanut,  sequence 3' and inner sequence
cgcaccgtcgatacgtcatgcacgctgacgttgactagtacatgaccacttga

SEQ ID NO: 2599 - DNA, 53 bp, Artificial Sequence
  Description of Artificial Sequence: Synthetic peanut,  sequence 3' and inner sequence
cgcaccgtcgatacgtcaagcacgctgacattgactagtacatgaccacttga

SEQ ID NO: 2600 - DNA, 53 bp, Artificial Sequence
  Description of Artificial Sequence: Synthetic peanut,  sequence 3' and inner sequence
gcacatggccaacatgcagcaccgtccgcattgactagtacatgaccacttga

SEQ ID NO: 2601 - DNA, 53 bp, Artificial Sequence
  Description of Artificial Sequence: Synthetic peanut,  sequence 3' and inner sequence
cgaccatgcaacgaggtgatgtctgtcgcgttgactagtacatgaccacttga

SEQ ID NO: 2602 - DNA, 53 bp, Artificial Sequence
  Description of Artificial Sequence: Synthetic peanut,  sequence 3' and inner sequence
cacacacgcaatgtcatcatgttgtgcacattgactagtacatgaccacttga

SEQ ID NO: 2603 - DNA, 53 bp, Artificial Sequence
  Description of Artificial Sequence: Synthetic peanut,  sequence 3' and inner sequence
cgcaccgtcgacacgtcatgcacgctgacattgactagtacatgaccacttga

SEQ ID NO: 2604 - DNA, 53 bp, Artificial Sequence
  Description of Artificial Sequence: Synthetic peanut,  sequence 3' and inner sequence
cacgcggcacgatacgtcaggtccgatgcattgactagtacatgaccacttga

SEQ ID NO: 2605 - DNA, 53 bp, Artificial Sequence
  Description of Artificial Sequence: Synthetic peanut,  sequence 3' and inner sequence
cgacgcgtagcaaggatgccctgatgcacattgactagtacatgaccacttga

SEQ ID NO: 2606 - DNA, 53 bp, Artificial Sequence
  Description of Artificial Sequence: Synthetic peanut,  sequence 3' and inner sequence
cgtaccgcagctagacacggcatgggcacattgactagtacatgaccacttga

SEQ ID NO: 2607 - DNA, 53 bp, Artificial Sequence
  Description of Artificial Sequence: Synthetic peanut,  sequence 3' and inner sequence
gtgacgcagcaacatcaacaggctgtcgcattgactagtacatgaccacttga

SEQ ID NO: 2608 - DNA, 53 bp, Artificial Sequence
  Description of Artificial Sequence: Synthetic peanut,  sequence 3' and inner sequence
cgtaccgaacaggggacgtacgtagacacgttgactagtacatgaccacttga

SEQ ID NO: 2609 - DNA, 53 bp, Artificial Sequence
  Description of Artificial Sequence: Synthetic peanut,  sequence 3' and inner sequence
gcgtacacggatcagcacagctactgcacattgactagtacatgaccacttga

SEQ ID NO: 2610 - DNA, 53 bp, Artificial Sequence
  Description of Artificial Sequence: Synthetic peanut,  sequence 3' and inner sequence
ggcaacgcacatcgtatcacgcatcggaccttgactagtacatgaccacttga

SEQ ID NO: 2611 - DNA, 53 bp, Artificial Sequence
  Description of Artificial Sequence: Synthetic peanut,  sequence 3' and inner sequence
gtcattccgcatcctacacgtgggcacgcattgactagtacatgaccacttga

SEQ ID NO: 2612 - DNA, 53 bp, Artificial Sequence
  Description of Artificial Sequence: Synthetic peanut,  sequence 3' and inner sequence
cacgatacgtcaaggcatcactccgtcgcattgactagtacatgaccacttga

SEQ ID NO: 2613 - DNA, 53 bp, Artificial Sequence
  Description of Artificial Sequence: Synthetic peanut,  sequence 3' and inner sequence
gtcgtgaggcgaaccgtcatgcactgcgtgttgactagtacatgaccacttga

SEQ ID NO: 2614 - DNA, 53 bp, Artificial Sequence
  Description of Artificial Sequence: Synthetic peanut,  sequence 3' and inner sequence
catgcacgctagagcacatcacgctgcgcgttgactagtacatgaccacttga

SEQ ID NO: 2615 - DNA, 53 bp, Artificial Sequence
  Description of Artificial Sequence: Synthetic peanut,  sequence 3' and inner sequence
gcactactcgcaccctatcatgaggccatgttgactagtacatgaccacttga

SEQ ID NO: 2616 - DNA, 53 bp, Artificial Sequence
  Description of Artificial Sequence: Synthetic peanut,  sequence 3' and inner sequence
ggcgtacgatggatgtgcgttgtgtctgtcttgactagtacatgaccacttga

SEQ ID NO: 2617 - DNA, 53 bp, Artificial Sequence
  Description of Artificial Sequence: Synthetic peanut,  sequence 3' and inner sequence
gtcgtgcacgaacactatcatggcggcatgttgactagtacatgaccacttga

SEQ ID NO: 2618 - DNA, 53 bp, Artificial Sequence
  Description of Artificial Sequence: Synthetic peanut,  sequence 3' and inner sequence
acgcaacggtgactgcatcgtacgtgcacattgactagtacatgaccacttga

SEQ ID NO: 2619 - DNA, 53 bp, Artificial Sequence
  Description of Artificial Sequence: Synthetic peanut,  sequence 3' and inner sequence
ccgtagcgacatcaagcggtagtgtgcgtgttgactagtacatgaccacttga

SEQ ID NO: 2620 - DNA, 53 bp, Artificial Sequence
  Description of Artificial Sequence: Synthetic peanut,  sequence 3' and inner sequence
cgtacgtaccgcgcctacatgtggcagggattgactagtacatgaccacttga

SEQ ID NO: 2621 - DNA, 53 bp, Artificial Sequence
  Description of Artificial Sequence: Synthetic peanut,  sequence 3' and inner sequence
ggacacagcgtaccattcaagtgatgcacgttgactagtacatgaccacttga

SEQ ID NO: 2622 - DNA, 53 bp, Artificial Sequence
  Description of Artificial Sequence: Synthetic peanut,  sequence 3' and inner sequence
gtcatgcacgaacactatcatgtcggcatgttgactagtacatgaccacttga

SEQ ID NO: 2623 - DNA, 53 bp, Artificial Sequence
  Description of Artificial Sequence: Synthetic peanut,  sequence 3' and inner sequence
gcacgtggcagcgagcacacttacggcacattgactagtacatgaccacttga

SEQ ID NO: 2624 - DNA, 53 bp, Artificial Sequence
  Description of Artificial Sequence: Synthetic peanut,  sequence 3' and inner sequence
cgcaccgcaccgacagtggggacgtatgcattgactagtacatgaccacttga

SEQ ID NO: 2625 - DNA, 53 bp, Artificial Sequence
  Description of Artificial Sequence: Synthetic peanut,  sequence 3' and inner sequence
ggacggaacggaacaacaagggcaggcatgttgactagtacatgaccacttga

SEQ ID NO: 2626 - DNA, 53 bp, Artificial Sequence
  Description of Artificial Sequence: Synthetic peanut,  sequence 3' and inner sequence
cgacgagcaggcagaacgtcttccgtcacgttgactagtacatgaccacttga

SEQ ID NO: 2627 - DNA, 53 bp, Artificial Sequence
  Description of Artificial Sequence: Synthetic peanut,  sequence 3' and inner sequence
gccacacagatgacgtatcgtacgtcgcgtttgactagtacatgaccacttga

SEQ ID NO: 2628 - DNA, 53 bp, Artificial Sequence
  Description of Artificial Sequence: Synthetic peanut,  sequence 3' and inner sequence
ggacgcgatgaccgtatcgtggttgtgtcattgactagtacatgaccacttga

SEQ ID NO: 2629 - DNA, 53 bp, Artificial Sequence
  Description of Artificial Sequence: Synthetic peanut,  sequence 3' and inner sequence
gcacaccacgaacataaggtggcatgcacattgactagtacatgaccacttga

SEQ ID NO: 2630 - DNA, 53 bp, Artificial Sequence
  Description of Artificial Sequence: Synthetic peanut,  sequence 3' and inner sequence
gcatgtgacggcgatctgaccgcgtggacattgactagtacatgaccacttga

SEQ ID NO: 2631 - DNA, 53 bp, Artificial Sequence
  Description of Artificial Sequence: Synthetic peanut,  sequence 3' and inner sequence
ggccgacctggatgtgagcatgcatctagtttgactagtacatgaccacttga

SEQ ID NO: 2632 - DNA, 53 bp, Artificial Sequence
  Description of Artificial Sequence: Synthetic peanut,  sequence 3' and inner sequence
ggcatgcacgcacctacacgttggcacgtattgactagtacatgaccacttga

SEQ ID NO: 2633 - DNA, 53 bp, Artificial Sequence
  Description of Artificial Sequence: Synthetic peanut,  sequence 3' and inner sequence
ggccgaaacggatgtggccttgtgctacgcttgactagtacatgaccacttga

SEQ ID NO: 2634 - DNA, 53 bp, Artificial Sequence
  Description of Artificial Sequence: Synthetic peanut,  sequence 3' and inner sequence
ccgtagcgacatcaagcggtggagtgcgtgttgactagtacatgaccacttga

SEQ ID NO: 2635 - DNA, 53 bp, Artificial Sequence
  Description of Artificial Sequence: Synthetic peanut,  sequence 3' and inner sequence
ggccaagctggatgtgttcaggtcacgacgttgactagtacatgaccacttga

SEQ ID NO: 2636 - DNA, 53 bp, Artificial Sequence
  Description of Artificial Sequence: Synthetic peanut,  sequence 3' and inner sequence
gtgctgcgatgggacgtggtaaggtgcatgttgactagtacatgaccacttga

SEQ ID NO: 2637 - DNA, 53 bp, Artificial Sequence
  Description of Artificial Sequence: Synthetic peanut,  sequence 3' and inner sequence
ggcatgcacgcacctacacgttggtatggattgactagtacatgaccacttga

SEQ ID NO: 2638 - DNA, 53 bp, Artificial Sequence
  Description of Artificial Sequence: Synthetic peanut,  sequence 3' and inner sequence
cgcggaccggcaacgtgatggcaatgcacattgactagtacatgaccacttga

SEQ ID NO: 2639 - DNA, 53 bp, Artificial Sequence
  Description of Artificial Sequence: Synthetic peanut,  sequence 3' and inner sequence
cacgcacgaacgagactgctaccatgtgcattgactagtacatgaccacttga

SEQ ID NO: 2640 - DNA, 53 bp, Artificial Sequence
  Description of Artificial Sequence: Synthetic peanut,  sequence 3' and inner sequence
tcgtgtgccgtaacagccctacagtgcgtcttgactagtacatgaccacttga

SEQ ID NO: 2641 - DNA, 53 bp, Artificial Sequence
  Description of Artificial Sequence: Synthetic peanut,  sequence 3' and inner sequence
cgtgcatgcacagtgccgtacagttgtgcgttgactagtacatgaccacttga

SEQ ID NO: 2642 - DNA, 52 bp, Artificial Sequence
  Description of Artificial Sequence: Synthetic peanut,  sequence 3' and inner sequence
ggcctgcgatggatgtggttgtgctcgtcttgactagtacatgaccacttga

SEQ ID NO: 2643 - DNA, 53 bp, Artificial Sequence
  Description of Artificial Sequence: Synthetic peanut,  sequence 3' and inner sequence
cgtgccaggcagatcgatgtgttgccgatgttgactagtacatgaccacttga

SEQ ID NO: 2644 - DNA, 53 bp, Artificial Sequence
  Description of Artificial Sequence: Synthetic peanut,  sequence 3' and inner sequence
ccgtagcgacatcaagcggtggtgtgcttgttgactagtacatgaccacttga

SEQ ID NO: 2645 - DNA, 53 bp, Artificial Sequence
  Description of Artificial Sequence: Synthetic peanut,  sequence 3' and inner sequence
tggccgaagcgcacctacacgtgtcaggtattgactagtacatgaccacttga

SEQ ID NO: 2646 - DNA, 53 bp, Artificial Sequence
  Description of Artificial Sequence: Synthetic peanut,  sequence 3' and inner sequence
agcaccgtcgatacgtcatgcacgctgacattgactagtacatgaccacttga

SEQ ID NO: 2647 - DNA, 53 bp, Artificial Sequence
  Description of Artificial Sequence: Synthetic peanut,  sequence 3' and inner sequence
gcacgactcgcaccctatcatgagtccatgttgactagtacatgaccacttga

SEQ ID NO: 2648 - DNA, 52 bp, Artificial Sequence
  Description of Artificial Sequence: Synthetic peanut,  sequence 3' and inner sequence
gtgcgaccgaccctatcaagtgcagcatgttgactagtacatgaccacttga

SEQ ID NO: 2649 - DNA, 53 bp, Artificial Sequence
  Description of Artificial Sequence: Synthetic peanut,  sequence 3' and inner sequence
cgatgcgcagtcaaccactgtgatgcgacgttgactagtacatgaccacttga

SEQ ID NO: 2650 - DNA, 53 bp, Artificial Sequence
  Description of Artificial Sequence: Synthetic peanut,  sequence 3' and inner sequence
cacgtggcaaggacgtggaggtggtgagcattgactagtacatgaccacttga

SEQ ID NO: 2651 - DNA, 53 bp, Artificial Sequence
  Description of Artificial Sequence: Synthetic peanut,  sequence 3' and inner sequence
cacgcgagggagcaccgttgcttacgcacattgactagtacatgaccacttga

SEQ ID NO: 2652 - DNA, 54 bp, Artificial Sequence
  Description of Artificial Sequence: Synthetic peanut,  sequence 3' and inner sequence
tggcgtgcacaggagcagtcatacgtacgcattgactagtacatgaccacttga

SEQ ID NO: 2653 - DNA, 53 bp, Artificial Sequence
  Description of Artificial Sequence: Synthetic peanut,  sequence 3' and inner sequence
ccgcacgtagccctatcattggtgcatgcattgactagtacatgaccacttga

SEQ ID NO: 2654 - DNA, 53 bp, Artificial Sequence
  Description of Artificial Sequence: Synthetic peanut,  sequence 3' and inner sequence
ggccaaacggaacgtagcacgggggacgtattgactagtacatgaccacttga

SEQ ID NO: 2655 - DNA, 53 bp, Artificial Sequence
  Description of Artificial Sequence: Synthetic peanut,  sequence 3' and inner sequence
cgtgcgtgcggggaaggcgtgtgttacgcattgactagtacatgaccacttga

SEQ ID NO: 2656 - DNA, 53 bp, Artificial Sequence
  Description of Artificial Sequence: Synthetic peanut,  sequence 3' and inner sequence
cgacgggcacacgtgatcttgtaccgcgcattgactagtacatgaccacttga

SEQ ID NO: 2657 - DNA, 53 bp, Artificial Sequence
  Description of Artificial Sequence: Synthetic peanut,  sequence 3' and inner sequence
ggacgcgatgggcgtgggtatgcacttggcttgactagtacatgaccacttga

SEQ ID NO: 2658 - DNA, 53 bp, Artificial Sequence
  Description of Artificial Sequence: Synthetic peanut,  sequence 3' and inner sequence
ccgttacggaacaggtgatcgtcctgcacattgactagtacatgaccacttga

SEQ ID NO: 2659 - DNA, 54 bp, Artificial Sequence
  Description of Artificial Sequence: Synthetic peanut,  sequence 3' and inner sequence
ggccgtacgatggatgtgggttgtgctcgtcttgactagtacatgaccacttga

SEQ ID NO: 2660 - DNA, 53 bp, Artificial Sequence
  Description of Artificial Sequence: Synthetic peanut,  sequence 3' and inner sequence
cgatggcaagctcgtccatacaatgcgtcattgactagtacatgaccacttga

SEQ ID NO: 2661 - DNA, 53 bp, Artificial Sequence
  Description of Artificial Sequence: Synthetic peanut,  sequence 3' and inner sequence
gtcattccgcatcctacatgtgggcacgtattgactagtacatgaccacttga

SEQ ID NO: 2662 - DNA, 53 bp, Artificial Sequence
  Description of Artificial Sequence: Synthetic peanut,  sequence 3' and inner sequence
ggcatgcacgcacctacacgtgtgtatggattgactagtacatgaccacttga

SEQ ID NO: 2663 - DNA, 53 bp, Artificial Sequence
  Description of Artificial Sequence: Synthetic peanut,  sequence 3' and inner sequence
tgcgtcacatggccgtatcttagcgtgtcgttgactagtacatgaccacttga

SEQ ID NO: 2664 - DNA, 53 bp, Artificial Sequence
  Description of Artificial Sequence: Synthetic peanut,  sequence 3' and inner sequence
cgatgcgctgtggaaggagtgtggcacgtattgactagtacatgaccacttga

SEQ ID NO: 2665 - DNA, 53 bp, Artificial Sequence
  Description of Artificial Sequence: Synthetic peanut,  sequence 3' and inner sequence
gacatgacgtgaccgaacgtgtacggggcattgactagtacatgaccacttga

SEQ ID NO: 2666 - DNA, 53 bp, Artificial Sequence
  Description of Artificial Sequence: Synthetic peanut,  sequence 3' and inner sequence
cgcaccgtcaagcgggaaggcactttggcgttgactagtacatgaccacttga

SEQ ID NO: 2667 - DNA, 53 bp, Artificial Sequence
  Description of Artificial Sequence: Synthetic peanut,  sequence 3' and inner sequence
cgcatcgcaggtacggctggtagctaggcattgactagtacatgaccacttga

SEQ ID NO: 2668 - DNA, 53 bp, Artificial Sequence
  Description of Artificial Sequence: Synthetic peanut,  sequence 3' and inner sequence
cgcaccatggcacagtcacgcacgcgtcgattgactagtacatgaccacttga

SEQ ID NO: 2669 - DNA, 53 bp, Artificial Sequence
  Description of Artificial Sequence: Synthetic peanut,  sequence 3' and inner sequence
cgaccagggcagggacagggacagtgcatgttgactagtacatgaccacttga

SEQ ID NO: 2670 - DNA, 53 bp, Artificial Sequence
  Description of Artificial Sequence: Synthetic peanut,  sequence 3' and inner sequence
cgtaccgcaagtcggtcgtgcattacggtcttgactagtacatgaccacttga

SEQ ID NO: 2671 - DNA, 53 bp, Artificial Sequence
  Description of Artificial Sequence: Synthetic peanut,  sequence 3' and inner sequence
tggacagcgctgatcaggcaacgtggtgcattgactagtacatgaccacttga

SEQ ID NO: 2672 - DNA, 53 bp, Artificial Sequence
  Description of Artificial Sequence: Synthetic peanut,  sequence 3' and inner sequence
cgttgcgcaagtgacgtcgtgtctgcgacattgactagtacatgaccacttga

SEQ ID NO: 2673 - DNA, 53 bp, Artificial Sequence
  Description of Artificial Sequence: Synthetic peanut,  sequence 3' and inner sequence
ggacgcaccgaaccgcaagccaagtgagcattgactagtacatgaccacttga

SEQ ID NO: 2674 - DNA, 53 bp, Artificial Sequence
  Description of Artificial Sequence: Synthetic peanut,  sequence 3' and inner sequence
cgcaacggcatgcctcttccatgctgcgcattgactagtacatgaccacttga

SEQ ID NO: 2675 - DNA, 53 bp, Artificial Sequence
  Description of Artificial Sequence: Synthetic peanut,  sequence 3' and inner sequence
cgtgcacgagtacggcaatgtctttgcgtgttgactagtacatgaccacttga

SEQ ID NO: 2676 - DNA, 53 bp, Artificial Sequence
  Description of Artificial Sequence: Synthetic peanut,  sequence 3' and inner sequence
gcgtgcagcgtgtcccgatggatgtcgtcattgactagtacatgaccacttga

SEQ ID NO: 2677 - DNA, 53 bp, Artificial Sequence
  Description of Artificial Sequence: Synthetic peanut,  sequence 3' and inner sequence
cgtaccgtgactgggcatgcactcacgtcattgactagtacatgaccacttga

SEQ ID NO: 2678 - DNA, 53 bp, Artificial Sequence
  Description of Artificial Sequence: Synthetic peanut,  sequence 3' and inner sequence
ccgtagctacatcaagcggtggtgtgcgtgttgactagtacatgaccacttga

SEQ ID NO: 2679 - DNA, 53 bp, Artificial Sequence
  Description of Artificial Sequence: Synthetic peanut,  sequence 3' and inner sequence
cgtggctgacaagtgcgtgatgactgcgtattgactagtacatgaccacttga

SEQ ID NO: 2680 - DNA, 53 bp, Artificial Sequence
  Description of Artificial Sequence: Synthetic peanut,  sequence 3' and inner sequence
gtcatgcgctgggtagtgatcacgtacggtttgactagtacatgaccacttga

SEQ ID NO: 2681 - DNA, 53 bp, Artificial Sequence
  Description of Artificial Sequence: Synthetic peanut,  sequence 3' and inner sequence
cgacacgagtacgtcatcgttgcaggcatgttgactagtacatgaccacttga

SEQ ID NO: 2682 - DNA, 53 bp, Artificial Sequence
  Description of Artificial Sequence: Synthetic peanut,  sequence 3' and inner sequence
ccaccgatggaccgtagtcgtaccgtcacgttgactagtacatgaccacttga

SEQ ID NO: 2683 - DNA, 53 bp, Artificial Sequence
  Description of Artificial Sequence: Synthetic peanut,  sequence 3' and inner sequence
cgcaccgtcgatacgtcatacacgctgacattgactagtacatgaccacttga

SEQ ID NO: 2684 - DNA, 53 bp, Artificial Sequence
  Description of Artificial Sequence: Synthetic peanut,  sequence 3' and inner sequence
gtccttccgcatcctacacgtgggcacgtattgactagtacatgaccacttga

SEQ ID NO: 2685 - DNA, 53 bp, Artificial Sequence
  Description of Artificial Sequence: Synthetic peanut,  sequence 3' and inner sequence
cctcacgtagccctatcagtggtgcatgcattgactagtacatgaccacttga

SEQ ID NO: 2686 - DNA, 53 bp, Artificial Sequence
  Description of Artificial Sequence: Synthetic peanut,  sequence 3' and inner sequence
cccatcgcatgactgaacgcgtccgtgggcttgactagtacatgaccacttga

SEQ ID NO: 2687 - DNA, 53 bp, Artificial Sequence
  Description of Artificial Sequence: Synthetic peanut,  sequence 3' and inner sequence
gcattggcgtgacatcgtaccgacggcatgttgactagtacatgaccacttga

SEQ ID NO: 2688 - DNA, 53 bp, Artificial Sequence
  Description of Artificial Sequence: Synthetic peanut,  sequence 3' and inner sequence
catgcaaggcgacgtgcagcatccttcgcattgactagtacatgaccacttga

SEQ ID NO: 2689 - DNA, 52 bp, Artificial Sequence
  Description of Artificial Sequence: Synthetic peanut,  sequence 3' and inner sequence
cgacatgacccaggcgacgtgactgcatgttgactagtacatgaccacttga

SEQ ID NO: 2690 - DNA, 53 bp, Artificial Sequence
  Description of Artificial Sequence: Synthetic peanut,  sequence 3' and inner sequence
cacgtcaggcaaagggacgtatgcccaccgttgactagtacatgaccacttga

SEQ ID NO: 2691 - DNA, 53 bp, Artificial Sequence
  Description of Artificial Sequence: Synthetic peanut,  sequence 3' and inner sequence
tgcaccggcactgacggactgagctgcacgttgactagtacatgaccacttga

SEQ ID NO: 2692 - DNA, 53 bp, Artificial Sequence
  Description of Artificial Sequence: Synthetic peanut,  sequence 3' and inner sequence
ggccggaacgaaacgcggggccatgcactattgactagtacatgaccacttga

SEQ ID NO: 2693 - DNA, 53 bp, Artificial Sequence
  Description of Artificial Sequence: Synthetic peanut,  sequence 3' and inner sequence
gcatgacgagaacgcacatgccgatgcacattgactagtacatgaccacttga

SEQ ID NO: 2694 - DNA, 53 bp, Artificial Sequence
  Description of Artificial Sequence: Synthetic peanut,  sequence 3' and inner sequence
cacgtgagaggcacgacaagctgtttggcattgactagtacatgaccacttga

SEQ ID NO: 2695 - DNA, 53 bp, Artificial Sequence
  Description of Artificial Sequence: Synthetic peanut,  sequence 3' and inner sequence
catgtgtgcggcactgactatcgagtgggattgactagtacatgaccacttga

SEQ ID NO: 2696 - DNA, 53 bp, Artificial Sequence
  Description of Artificial Sequence: Synthetic peanut,  sequence 3' and inner sequence
gcgctgcgaagaccggtaatgacgtggacattgactagtacatgaccacttga

SEQ ID NO: 2697 - DNA, 53 bp, Artificial Sequence
  Description of Artificial Sequence: Synthetic peanut,  sequence 3' and inner sequence
acgacaaggcaacgtgtcctacgtgttggtttgactagtacatgaccacttga

SEQ ID NO: 2698 - DNA, 53 bp, Artificial Sequence
  Description of Artificial Sequence: Synthetic peanut,  sequence 3' and inner sequence
gacctaagcgcaccctagcatgtgttcatgttgactagtacatgaccacttga

SEQ ID NO: 2699 - DNA, 53 bp, Artificial Sequence
  Description of Artificial Sequence: Synthetic peanut,  sequence 3' and inner sequence
ccgacgacatgaccgatgtggcattgcgtattgactagtacatgaccacttga

SEQ ID NO: 2700 - DNA, 53 bp, Artificial Sequence
  Description of Artificial Sequence: Synthetic peanut,  sequence 3' and inner sequence
cgcaccgcctcacgtacggcatgttgcacattgactagtacatgaccacttga

SEQ ID NO: 2701 - DNA, 53 bp, Artificial Sequence
  Description of Artificial Sequence: Synthetic peanut,  sequence 3' and inner sequence
tgcgtcgtatgtgcggctcggatgtgtgtcttgactagtacatgaccacttga

SEQ ID NO: 2702 - DNA, 53 bp, Artificial Sequence
  Description of Artificial Sequence: Synthetic peanut,  sequence 3' and inner sequence
ggcatgcgatggatgaggtgctgcactagtttgactagtacatgaccacttga

SEQ ID NO: 2703 - DNA, 53 bp, Artificial Sequence
  Description of Artificial Sequence: Synthetic peanut,  sequence 3' and inner sequence
gtacgcggctggatacaagtacggcatggattgactagtacatgaccacttga

SEQ ID NO: 2704 - DNA, 53 bp, Artificial Sequence
  Description of Artificial Sequence: Synthetic peanut,  sequence 3' and inner sequence
cgatacgacgaggctcacacaggctgcgcattgactagtacatgaccacttga

SEQ ID NO: 2705 - DNA, 53 bp, Artificial Sequence
  Description of Artificial Sequence: Synthetic peanut,  sequence 3' and inner sequence
cgcaccgtcgatacgtcatgcacgctgactttgactagtacatgaccacttga

SEQ ID NO: 2706 - DNA, 53 bp, Artificial Sequence
  Description of Artificial Sequence: Synthetic peanut,  sequence 3' and inner sequence
ccacgacatggaacgtagcgtcacttcgcgttgactagtacatgaccacttga

SEQ ID NO: 2707 - DNA, 53 bp, Artificial Sequence
  Description of Artificial Sequence: Synthetic peanut,  sequence 3' and inner sequence
gtcatgcacgaacactattatggcggcatgttgactagtacatgaccacttga

SEQ ID NO: 2708 - DNA, 54 bp, Artificial Sequence
  Description of Artificial Sequence: Synthetic peanut,  sequence 3' and inner sequence
catgccatgacgtccatgggtcctacgcgcattgactagtacatgaccacttga

SEQ ID NO: 2709 - DNA, 53 bp, Artificial Sequence
  Description of Artificial Sequence: Synthetic peanut,  sequence 3' and inner sequence
cgaccaggacgaatcgtactggcctgcgcattgactagtacatgaccacttga

SEQ ID NO: 2710 - DNA, 53 bp, Artificial Sequence
  Description of Artificial Sequence: Synthetic peanut,  sequence 3' and inner sequence
ccatgtggcgcatgtgttcagtgctgcgtgttgactagtacatgaccacttga

SEQ ID NO: 2711 - DNA, 53 bp, Artificial Sequence
  Description of Artificial Sequence: Synthetic peanut,  sequence 3' and inner sequence
ccatccgatgcgtcacgcaactgtgccatgttgactagtacatgaccacttga

SEQ ID NO: 2712 - DNA, 53 bp, Artificial Sequence
  Description of Artificial Sequence: Synthetic peanut,  sequence 3' and inner sequence
cgcacctacagtcagtcacgatgctacgtgttgactagtacatgaccacttga

SEQ ID NO: 2713 - DNA, 53 bp, Artificial Sequence
  Description of Artificial Sequence: Synthetic peanut,  sequence 3' and inner sequence
cgaaccgaacaggcacgacctcacggggtgttgactagtacatgaccacttga

SEQ ID NO: 2714 - DNA, 53 bp, Artificial Sequence
  Description of Artificial Sequence: Synthetic peanut,  sequence 3' and inner sequence
gtacacgatgcaccttcaagttgtgatgtattgactagtacatgaccacttga

SEQ ID NO: 2715 - DNA, 53 bp, Artificial Sequence
  Description of Artificial Sequence: Synthetic peanut,  sequence 3' and inner sequence
gcccaatctgacctatcaacgtgtcgtggattgactagtacatgaccacttga

SEQ ID NO: 2716 - DNA, 53 bp, Artificial Sequence
  Description of Artificial Sequence: Synthetic peanut,  sequence 3' and inner sequence
catgcaggacgcacgactagacatggcgtattgactagtacatgaccacttga

SEQ ID NO: 2717 - DNA, 53 bp, Artificial Sequence
  Description of Artificial Sequence: Synthetic peanut,  sequence 3' and inner sequence
cgcaccgtcgatacgtcatgcacgctcacattgactagtacatgaccacttga

SEQ ID NO: 2718 - DNA, 53 bp, Artificial Sequence
  Description of Artificial Sequence: Synthetic peanut,  sequence 3' and inner sequence
gcgtgcagaggatgtgcccttcgtcccgcattgactagtacatgaccacttga

SEQ ID NO: 2719 - DNA, 53 bp, Artificial Sequence
  Description of Artificial Sequence: Synthetic peanut,  sequence 3' and inner sequence
gcatcagcaggcgcgatcgaacctggcacattgactagtacatgaccacttga

SEQ ID NO: 2720 - DNA, 53 bp, Artificial Sequence
  Description of Artificial Sequence: Synthetic peanut,  sequence 3' and inner sequence
cgagcgcacgtgaggcactgtatcgtcacgttgactagtacatgaccacttga

SEQ ID NO: 2721 - DNA, 53 bp, Artificial Sequence
  Description of Artificial Sequence: Synthetic peanut,  sequence 3' and inner sequence
ccacatggtcgcatcgaacggtggtacgcattgactagtacatgaccacttga

SEQ ID NO: 2722 - DNA, 53 bp, Artificial Sequence
  Description of Artificial Sequence: Synthetic peanut,  sequence 3' and inner sequence
tggcatgggacgatgcgccttccctgcatgttgactagtacatgaccacttga

SEQ ID NO: 2723 - DNA, 53 bp, Artificial Sequence
  Description of Artificial Sequence: Synthetic peanut,  sequence 3' and inner sequence
gcacaacacgtagggaacagtacgtacgcattgactagtacatgaccacttga

SEQ ID NO: 2724 - DNA, 53 bp, Artificial Sequence
  Description of Artificial Sequence: Synthetic peanut,  sequence 3' and inner sequence
ggacgcagcttgcctactgttggtcacgtattgactagtacatgaccacttga

SEQ ID NO: 2725 - DNA, 53 bp, Artificial Sequence
  Description of Artificial Sequence: Synthetic peanut,  sequence 3' and inner sequence
cgcgtcagcagcgaatggcatgtctcgaccttgactagtacatgaccacttga

SEQ ID NO: 2726 - DNA, 53 bp, Artificial Sequence
  Description of Artificial Sequence: Synthetic peanut,  sequence 3' and inner sequence
cacgtgatgcgagggcgtatggtctgccgtttgactagtacatgaccacttga

SEQ ID NO: 2727 - DNA, 53 bp, Artificial Sequence
  Description of Artificial Sequence: Synthetic peanut,  sequence 3' and inner sequence
gtcatgcacgcacactatcatggcggcatgttgactagtacatgaccacttga

SEQ ID NO: 2728 - DNA, 53 bp, Artificial Sequence
  Description of Artificial Sequence: Synthetic peanut,  sequence 3' and inner sequence
gcacgaatcgcaccctatcatgaggccatgttgactagtacatgaccacttga

SEQ ID NO: 2729 - DNA, 53 bp, Artificial Sequence
  Description of Artificial Sequence: Synthetic peanut,  sequence 3' and inner sequence
acgaacggagcagaggtccacgcatgcacgttgactagtacatgaccacttga

SEQ ID NO: 2730 - DNA, 53 bp, Artificial Sequence
  Description of Artificial Sequence: Synthetic peanut,  sequence 3' and inner sequence
cacgtgcggaggacaacgccatactgcgtgttgactagtacatgaccacttga

SEQ ID NO: 2731 - DNA, 53 bp, Artificial Sequence
  Description of Artificial Sequence: Synthetic peanut,  sequence 3' and inner sequence
cgtgacaggcaggaaacatcgatgtgcgccttgactagtacatgaccacttga

SEQ ID NO: 2732 - DNA, 53 bp, Artificial Sequence
  Description of Artificial Sequence: Synthetic peanut,  sequence 3' and inner sequence
cgtgccacaagtcgacacgcatatcacgcgttgactagtacatgaccacttga

SEQ ID NO: 2733 - DNA, 53 bp, Artificial Sequence
  Description of Artificial Sequence: Synthetic peanut,  sequence 3' and inner sequence
cacgtacggcacaacgactggaggtgagcattgactagtacatgaccacttga

SEQ ID NO: 2734 - DNA, 53 bp, Artificial Sequence
  Description of Artificial Sequence: Synthetic peanut,  sequence 3' and inner sequence
gccgtagcgaaccgctgtcattgtgcgatgttgactagtacatgaccacttga

SEQ ID NO: 2735 - DNA, 53 bp, Artificial Sequence
  Description of Artificial Sequence: Synthetic peanut,  sequence 3' and inner sequence
cacgcacaggtgatgcatggatcacgcgcattgactagtacatgaccacttga

SEQ ID NO: 2736 - DNA, 53 bp, Artificial Sequence
  Description of Artificial Sequence: Synthetic peanut,  sequence 3' and inner sequence
cgacgcacgaaacgaacatgttgtcacgcattgactagtacatgaccacttga

SEQ ID NO: 2737 - DNA, 53 bp, Artificial Sequence
  Description of Artificial Sequence: Synthetic peanut,  sequence 3' and inner sequence
cgcgccaacaacagggaacgtaacgccatgttgactagtacatgaccacttga

SEQ ID NO: 2738 - DNA, 53 bp, Artificial Sequence
  Description of Artificial Sequence: Synthetic peanut,  sequence 3' and inner sequence
ccatgtgaacgtgcgtaccgaaagtgcgtcttgactagtacatgaccacttga

SEQ ID NO: 2739 - DNA, 53 bp, Artificial Sequence
  Description of Artificial Sequence: Synthetic peanut,  sequence 3' and inner sequence
cgacgcatgaccagtggcgatgtatgcacgttgactagtacatgaccacttga

SEQ ID NO: 2740 - DNA, 53 bp, Artificial Sequence
  Description of Artificial Sequence: Synthetic peanut,  sequence 3' and inner sequence
gtgcgatcgtacctatcaatggtcatcgtattgactagtacatgaccacttga

SEQ ID NO: 2741 - DNA, 53 bp, Artificial Sequence
  Description of Artificial Sequence: Synthetic peanut,  sequence 3' and inner sequence
ggccgaatgaccgtctcatgtgagcatggattgactagtacatgaccacttga

SEQ ID NO: 2742 - DNA, 53 bp, Artificial Sequence
  Description of Artificial Sequence: Synthetic peanut,  sequence 3' and inner sequence
ccgtagagacatcaagcggtggtgtgcgtgttgactagtacatgaccacttga

SEQ ID NO: 2743 - DNA, 53 bp, Artificial Sequence
  Description of Artificial Sequence: Synthetic peanut,  sequence 3' and inner sequence
cgtgacacgcaccattacgtccagctgcgcttgactagtacatgaccacttga

SEQ ID NO: 2744 - DNA, 53 bp, Artificial Sequence
  Description of Artificial Sequence: Synthetic peanut,  sequence 3' and inner sequence
acgacgaacggtagcagcactgacgacacattgactagtacatgaccacttga

SEQ ID NO: 2745 - DNA, 53 bp, Artificial Sequence
  Description of Artificial Sequence: Synthetic peanut,  sequence 3' and inner sequence
cacgcgtgctggtctgcatgtccatgcgcattgactagtacatgaccacttga

SEQ ID NO: 2746 - DNA, 53 bp, Artificial Sequence
  Description of Artificial Sequence: Synthetic peanut,  sequence 3' and inner sequence
ggcatgcacgcaccctatcatgtaggcatgttgactagtacatgaccacttga

SEQ ID NO: 2747 - DNA, 53 bp, Artificial Sequence
  Description of Artificial Sequence: Synthetic peanut,  sequence 3' and inner sequence
cacgcagtcgaaactcagtgtcactgcacgttgactagtacatgaccacttga

SEQ ID NO: 2748 - DNA, 53 bp, Artificial Sequence
  Description of Artificial Sequence: Synthetic peanut,  sequence 3' and inner sequence
cgacccgcagacgttgtgtggtggtgcgtattgactagtacatgaccacttga

SEQ ID NO: 2749 - DNA, 53 bp, Artificial Sequence
  Description of Artificial Sequence: Synthetic peanut,  sequence 3' and inner sequence
cgtatgccaaacgcaacctacagctgtggtttgactagtacatgaccacttga

SEQ ID NO: 2750 - DNA, 53 bp, Artificial Sequence
  Description of Artificial Sequence: Synthetic peanut,  sequence 3' and inner sequence
ggcctgcgatggatgtggtgctgcactagtttgactagtacatgaccacttga

SEQ ID NO: 2751 - DNA, 53 bp, Artificial Sequence
  Description of Artificial Sequence: Synthetic peanut,  sequence 3' and inner sequence
aggcacacgtgaaggcacatcgactacgcattgactagtacatgaccacttga

SEQ ID NO: 2752 - DNA, 53 bp, Artificial Sequence
  Description of Artificial Sequence: Synthetic peanut,  sequence 3' and inner sequence
cacgcatggaaggcacgtcaaccacgggcattgactagtacatgaccacttga

SEQ ID NO: 2753 - DNA, 53 bp, Artificial Sequence
  Description of Artificial Sequence: Synthetic peanut,  sequence 3' and inner sequence
gacatgcacgaacactatcatggcggcatgttgactagtacatgaccacttga

SEQ ID NO: 2754 - DNA, 53 bp, Artificial Sequence
  Description of Artificial Sequence: Synthetic peanut,  sequence 3' and inner sequence
cgcaccggcgatacgtcatgcacgctgacattgactagtacatgaccacttga

SEQ ID NO: 2755 - DNA, 53 bp, Artificial Sequence
  Description of Artificial Sequence: Synthetic peanut,  sequence 3' and inner sequence
cctgaccgcaatggttagggaccaggcacgttgactagtacatgaccacttga

SEQ ID NO: 2756 - DNA, 53 bp, Artificial Sequence
  Description of Artificial Sequence: Synthetic peanut,  sequence 3' and inner sequence
ccgtagcggcatcaagcggtggtgtgcgtgttgactagtacatgaccacttga

SEQ ID NO: 2757 - DNA, 53 bp, Artificial Sequence
  Description of Artificial Sequence: Synthetic peanut,  sequence 3' and inner sequence
cgcaacggtacatcagctgcaacgtggccattgactagtacatgaccacttga

SEQ ID NO: 2758 - DNA, 53 bp, Artificial Sequence
  Description of Artificial Sequence: Synthetic peanut,  sequence 3' and inner sequence
tggacgcacaatacacgtcaaggcggcatgttgactagtacatgaccacttga

SEQ ID NO: 2759 - DNA, 53 bp, Artificial Sequence
  Description of Artificial Sequence: Synthetic peanut,  sequence 3' and inner sequence
ccacgcagcacacggtaatggctctgcacgttgactagtacatgaccacttga

SEQ ID NO: 2760 - DNA, 53 bp, Artificial Sequence
  Description of Artificial Sequence: Synthetic peanut,  sequence 3' and inner sequence
ccgttacgaccgcaagactgtgtgtacgtgttgactagtacatgaccacttga

SEQ ID NO: 2761 - DNA, 53 bp, Artificial Sequence
  Description of Artificial Sequence: Synthetic peanut,  sequence 3' and inner sequence
catgtgtgcagcgaatgccctgacgtggacttgactagtacatgaccacttga

SEQ ID NO: 2762 - DNA, 53 bp, Artificial Sequence
  Description of Artificial Sequence: Synthetic peanut,  sequence 3' and inner sequence
gcgatccgacggagacacgtccacttcgcgttgactagtacatgaccacttga

SEQ ID NO: 2763 - DNA, 53 bp, Artificial Sequence
  Description of Artificial Sequence: Synthetic peanut,  sequence 3' and inner sequence
gcaacgaacgtacctgtgtcgtgacgcgtcttgactagtacatgaccacttga

SEQ ID NO: 2764 - DNA, 53 bp, Artificial Sequence
  Description of Artificial Sequence: Synthetic peanut,  sequence 3' and inner sequence
gcctgctcaaccctacaacgtggccacgtattgactagtacatgaccacttga

SEQ ID NO: 2765 - DNA, 53 bp, Artificial Sequence
  Description of Artificial Sequence: Synthetic peanut,  sequence 3' and inner sequence
cgatgcagcgagtgacgtagcagctacggattgactagtacatgaccacttga

SEQ ID NO: 2766 - DNA, 53 bp, Artificial Sequence
  Description of Artificial Sequence: Synthetic peanut,  sequence 3' and inner sequence
cgaggcaggcaaacagcagtacagctcggtttgactagtacatgaccacttga

SEQ ID NO: 2767 - DNA, 53 bp, Artificial Sequence
  Description of Artificial Sequence: Synthetic peanut,  sequence 3' and inner sequence
cgtacgccaccattgaccgtagcatgcacgttgactagtacatgaccacttga

SEQ ID NO: 2768 - DNA, 53 bp, Artificial Sequence
  Description of Artificial Sequence: Synthetic peanut,  sequence 3' and inner sequence
ggcatgcacgcacatacacgtgggtatggattgactagtacatgaccacttga

SEQ ID NO: 2769 - DNA, 53 bp, Artificial Sequence
  Description of Artificial Sequence: Synthetic peanut,  sequence 3' and inner sequence
cgacacggctgacaatagcgttctgacgcattgactagtacatgaccacttga

SEQ ID NO: 2770 - DNA, 53 bp, Artificial Sequence
  Description of Artificial Sequence: Synthetic peanut,  sequence 3' and inner sequence
cgcaccgtacatgcaggactgtcatcgtgattgactagtacatgaccacttga

SEQ ID NO: 2771 - DNA, 53 bp, Artificial Sequence
  Description of Artificial Sequence: Synthetic peanut,  sequence 3' and inner sequence
cgagccgaagcggttggggacgatggcacattgactagtacatgaccacttga

SEQ ID NO: 2772 - DNA, 53 bp, Artificial Sequence
  Description of Artificial Sequence: Synthetic peanut,  sequence 3' and inner sequence
tcgcacgtagccctatcagtggtgcatgcattgactagtacatgaccacttga

SEQ ID NO: 2773 - DNA, 53 bp, Artificial Sequence
  Description of Artificial Sequence: Synthetic peanut,  sequence 3' and inner sequence
tcgataccgtgccagtgggtgtgcttagcattgactagtacatgaccacttga

SEQ ID NO: 2774 - DNA, 53 bp, Artificial Sequence
  Description of Artificial Sequence: Synthetic peanut,  sequence 3' and inner sequence
gtcatgccatcccttcgattgtgacaggtattgactagtacatgaccacttga

SEQ ID NO: 2775 - DNA, 53 bp, Artificial Sequence
  Description of Artificial Sequence: Synthetic peanut,  sequence 3' and inner sequence
cgatcggaacggtgggcggagtgcagtgtgttgactagtacatgaccacttga

SEQ ID NO: 2776 - DNA, 53 bp, Artificial Sequence
  Description of Artificial Sequence: Synthetic peanut,  sequence 3' and inner sequence
ccatcgcgtcactatcatgtgtgtcacgcattgactagtacatgaccacttga

SEQ ID NO: 2777 - DNA, 53 bp, Artificial Sequence
  Description of Artificial Sequence: Synthetic peanut,  sequence 3' and inner sequence
gacgcgcgcacctatcaatggcatgcactattgactagtacatgaccacttga

SEQ ID NO: 2778 - DNA, 53 bp, Artificial Sequence
  Description of Artificial Sequence: Synthetic peanut,  sequence 3' and inner sequence
ccgtagtgacatcaagcggtggtgtgcgtgttgactagtacatgaccacttga

SEQ ID NO: 2779 - DNA, 53 bp, Artificial Sequence
  Description of Artificial Sequence: Synthetic peanut,  sequence 3' and inner sequence
ggacgcgaacaacgttgacgtaacggcacattgactagtacatgaccacttga

SEQ ID NO: 2780 - DNA, 53 bp, Artificial Sequence
  Description of Artificial Sequence: Synthetic peanut,  sequence 3' and inner sequence
tcacgactcgcaccctatcatgaggccatgttgactagtacatgaccacttga

SEQ ID NO: 2781 - DNA, 53 bp, Artificial Sequence
  Description of Artificial Sequence: Synthetic peanut,  sequence 3' and inner sequence
tgcgacaagcacgatacactgcgctgcgcattgactagtacatgaccacttga

SEQ ID NO: 2782 - DNA, 53 bp, Artificial Sequence
  Description of Artificial Sequence: Synthetic peanut,  sequence 3' and inner sequence
ggcctgcgatggatgtgcgttgtgctcggcttgactagtacatgaccacttga

SEQ ID NO: 2783 - DNA, 53 bp, Artificial Sequence
  Description of Artificial Sequence: Synthetic peanut,  sequence 3' and inner sequence
catggccgacacgtaccttcaagtgtgacattgactagtacatgaccacttga

SEQ ID NO: 2784 - DNA, 53 bp, Artificial Sequence
  Description of Artificial Sequence: Synthetic peanut,  sequence 3' and inner sequence
catgcgcaagcccggtacgcacactggacgttgactagtacatgaccacttga

SEQ ID NO: 2785 - DNA, 53 bp, Artificial Sequence
  Description of Artificial Sequence: Synthetic peanut,  sequence 3' and inner sequence
cgcagcgtgaggaaggtactgtgcaacgcgttgactagtacatgaccacttga

SEQ ID NO: 2786 - DNA, 53 bp, Artificial Sequence
  Description of Artificial Sequence: Synthetic peanut,  sequence 3' and inner sequence
cgacaagcaggcaatgtgactcacgcgtgattgactagtacatgaccacttga

SEQ ID NO: 2787 - DNA, 53 bp, Artificial Sequence
  Description of Artificial Sequence: Synthetic peanut,  sequence 3' and inner sequence
ggacgcagcttgcctacttgtggtcacgtattgactagtacatgaccacttga

SEQ ID NO: 2788 - DNA, 53 bp, Artificial Sequence
  Description of Artificial Sequence: Synthetic peanut,  sequence 3' and inner sequence
cgcaccgacgatacgtcatgcacgctgacattgactagtacatgaccacttga

SEQ ID NO: 2789 - DNA, 53 bp, Artificial Sequence
  Description of Artificial Sequence: Synthetic peanut,  sequence 3' and inner sequence
gcacgactcacaccctatcatgaggccatgttgactagtacatgaccacttga

SEQ ID NO: 2790 - DNA, 53 bp, Artificial Sequence
  Description of Artificial Sequence: Synthetic peanut,  sequence 3' and inner sequence
cggcacaggaggcgtgaagcatgcaccatgttgactagtacatgaccacttga

SEQ ID NO: 2791 - DNA, 53 bp, Artificial Sequence
  Description of Artificial Sequence: Synthetic peanut,  sequence 3' and inner sequence
gacatgcactgaccgatcgatggtcacgtattgactagtacatgaccacttga

SEQ ID NO: 2792 - DNA, 53 bp, Artificial Sequence
  Description of Artificial Sequence: Synthetic peanut,  sequence 3' and inner sequence
cggcacggagtcgcagcatagccgtacgcattgactagtacatgaccacttga

SEQ ID NO: 2793 - DNA, 53 bp, Artificial Sequence
  Description of Artificial Sequence: Synthetic peanut,  sequence 3' and inner sequence
gtgtgaccgacccgtaagtgtgcatgcgacttgactagtacatgaccacttga

SEQ ID NO: 2794 - DNA, 53 bp, Artificial Sequence
  Description of Artificial Sequence: Synthetic peanut,  sequence 3' and inner sequence
ccgagcagaccattgcgacgatgatgcgcattgactagtacatgaccacttga

SEQ ID NO: 2795 - DNA, 53 bp, Artificial Sequence
  Description of Artificial Sequence: Synthetic peanut,  sequence 3' and inner sequence
catcgcaatgacatggacgttgcctggacattgactagtacatgaccacttga

SEQ ID NO: 2796 - DNA, 53 bp, Artificial Sequence
  Description of Artificial Sequence: Synthetic peanut,  sequence 3' and inner sequence
ccactggccacgtggatgatgcactgcgcattgactagtacatgaccacttga

SEQ ID NO: 2797 - DNA, 53 bp, Artificial Sequence
  Description of Artificial Sequence: Synthetic peanut,  sequence 3' and inner sequence
cgatgaggcatagcgagtacacactgcgtgttgactagtacatgaccacttga

SEQ ID NO: 2798 - DNA, 53 bp, Artificial Sequence
  Description of Artificial Sequence: Synthetic peanut,  sequence 3' and inner sequence
cacgtaccacggtgacatgagtgcgccacgttgactagtacatgaccacttga

SEQ ID NO: 2799 - DNA, 53 bp, Artificial Sequence
  Description of Artificial Sequence: Synthetic peanut,  sequence 3' and inner sequence
cgatgacgtgcgagacgacatgcatacgcattgactagtacatgaccacttga

SEQ ID NO: 2800 - DNA, 53 bp, Artificial Sequence
  Description of Artificial Sequence: Synthetic peanut,  sequence 3' and inner sequence
ggcgcgaacgtacctatcaagttggtcgtattgactagtacatgaccacttga

SEQ ID NO: 2801 - DNA, 53 bp, Artificial Sequence
  Description of Artificial Sequence: Synthetic peanut,  sequence 3' and inner sequence
gtacgcacgcagaccttcaagtcggccatgttgactagtacatgaccacttga

SEQ ID NO: 2802 - DNA, 53 bp, Artificial Sequence
  Description of Artificial Sequence: Synthetic peanut,  sequence 3' and inner sequence
cgcaacagaacaggtggtgacgcactgacgttgactagtacatgaccacttga

SEQ ID NO: 2803 - DNA, 53 bp, Artificial Sequence
  Description of Artificial Sequence: Synthetic peanut,  sequence 3' and inner sequence
cgcacgctagaggcacatgcacgctacacgttgactagtacatgaccacttga

SEQ ID NO: 2804 - DNA, 53 bp, Artificial Sequence
  Description of Artificial Sequence: Synthetic peanut,  sequence 3' and inner sequence
gccacgcacatcatggacttcctctgcacgttgactagtacatgaccacttga

SEQ ID NO: 2805 - DNA, 53 bp, Artificial Sequence
  Description of Artificial Sequence: Synthetic peanut,  sequence 3' and inner sequence
gcacgactagcaccctatcatgaggccatgttgactagtacatgaccacttga

SEQ ID NO: 2806 - DNA, 53 bp, Artificial Sequence
  Description of Artificial Sequence: Synthetic peanut,  sequence 3' and inner sequence
cgcaccgtcgatacatcatgcacgctgacattgactagtacatgaccacttga

SEQ ID NO: 2807 - DNA, 53 bp, Artificial Sequence
  Description of Artificial Sequence: Synthetic peanut,  sequence 3' and inner sequence
ccgaactgacggtcaagggtgcatggcgtattgactagtacatgaccacttga

SEQ ID NO: 2808 - DNA, 53 bp, Artificial Sequence
  Description of Artificial Sequence: Synthetic peanut,  sequence 3' and inner sequence
cacgtggacagatcgtaccgttagtgtgtcttgactagtacatgaccacttga

SEQ ID NO: 2809 - DNA, 53 bp, Artificial Sequence
  Description of Artificial Sequence: Synthetic peanut,  sequence 3' and inner sequence
gacaccacgtggaccatactgtacgtgtgcttgactagtacatgaccacttga

SEQ ID NO: 2810 - DNA, 52 bp, Artificial Sequence
  Description of Artificial Sequence: Synthetic peanut,  sequence 3' and inner sequence
gcaccgtcgatacgtcatgcacgctgacattgactagtacatgaccacttga

SEQ ID NO: 2811 - DNA, 53 bp, Artificial Sequence
  Description of Artificial Sequence: Synthetic peanut,  sequence 3' and inner sequence
cctgaacgaacgtgggtaggtacgcagccattgactagtacatgaccacttga

SEQ ID NO: 2812 - DNA, 53 bp, Artificial Sequence
  Description of Artificial Sequence: Synthetic peanut,  sequence 3' and inner sequence
gtcatgcatgcccaatgtcattggtacgcattgactagtacatgaccacttga

SEQ ID NO: 2813 - DNA, 53 bp, Artificial Sequence
  Description of Artificial Sequence: Synthetic peanut,  sequence 3' and inner sequence
ggacgcggatgagcttcgagtgacgtgtacttgactagtacatgaccacttga

SEQ ID NO: 2814 - DNA, 53 bp, Artificial Sequence
  Description of Artificial Sequence: Synthetic peanut,  sequence 3' and inner sequence
cgcacagacacggaaggacactgcgatgtgttgactagtacatgaccacttga

SEQ ID NO: 2815 - DNA, 53 bp, Artificial Sequence
  Description of Artificial Sequence: Synthetic peanut,  sequence 3' and inner sequence
cgcaggacggacgaggcttaccgtagcgcattgactagtacatgaccacttga

SEQ ID NO: 2816 - DNA, 53 bp, Artificial Sequence
  Description of Artificial Sequence: Synthetic peanut,  sequence 3' and inner sequence
ggactgcgcgtaccgtcaagtgcgaatggattgactagtacatgaccacttga

SEQ ID NO: 2817 - DNA, 53 bp, Artificial Sequence
  Description of Artificial Sequence: Synthetic peanut,  sequence 3' and inner sequence
catgcgcaggccaactgtacgacaccgatgttgactagtacatgaccacttga

SEQ ID NO: 2818 - DNA, 53 bp, Artificial Sequence
  Description of Artificial Sequence: Synthetic peanut,  sequence 3' and inner sequence
cgccacgaggcaacaacgtgtgctgcgacattgactagtacatgaccacttga

SEQ ID NO: 2819 - DNA, 53 bp, Artificial Sequence
  Description of Artificial Sequence: Synthetic peanut,  sequence 3' and inner sequence
cgatccgtggtgcagggagtgtgctgcgtattgactagtacatgaccacttga

SEQ ID NO: 2820 - DNA, 53 bp, Artificial Sequence
  Description of Artificial Sequence: Synthetic peanut,  sequence 3' and inner sequence
cacgcataggcaggtgagcttgtccgcatcttgactagtacatgaccacttga

SEQ ID NO: 2821 - DNA, 53 bp, Artificial Sequence
  Description of Artificial Sequence: Synthetic peanut,  sequence 3' and inner sequence
gcaacgtgacgacaagcaaggccgtacgcgttgactagtacatgaccacttga

SEQ ID NO: 2822 - DNA, 49 bp, Artificial Sequence
  Description of Artificial Sequence: Synthetic peanut,  sequence 3' and inner sequence
ggcacaaacggaccgacaagtgcgcattgactagtacatgaccacttga

SEQ ID NO: 2823 - DNA, 53 bp, Artificial Sequence
  Description of Artificial Sequence: Synthetic peanut,  sequence 3' and inner sequence
cgatgccacgacgcaccttcgtcatgcacattgactagtacatgaccacttga

SEQ ID NO: 2824 - DNA, 53 bp, Artificial Sequence
  Description of Artificial Sequence: Synthetic peanut,  sequence 3' and inner sequence
cacacgcaaagtacgtccggacactgcacgttgactagtacatgaccacttga

SEQ ID NO: 2825 - DNA, 53 bp, Artificial Sequence
  Description of Artificial Sequence: Synthetic peanut,  sequence 3' and inner sequence
cgcaacaggctgagcacatgtacgtacacattgactagtacatgaccacttga

SEQ ID NO: 2826 - DNA, 53 bp, Artificial Sequence
  Description of Artificial Sequence: Synthetic peanut,  sequence 3' and inner sequence
gtcgtgtcgtgactgcatacgagtgacgcattgactagtacatgaccacttga

SEQ ID NO: 2827 - DNA, 53 bp, Artificial Sequence
  Description of Artificial Sequence: Synthetic peanut,  sequence 3' and inner sequence
ggactgcgatggatgtgtgcgtgtattagcttgactagtacatgaccacttga

SEQ ID NO: 2828 - DNA, 53 bp, Artificial Sequence
  Description of Artificial Sequence: Synthetic peanut,  sequence 3' and inner sequence
ggccacagcgtacctcaacgtgtacgtgcattgactagtacatgaccacttga

SEQ ID NO: 2829 - DNA, 53 bp, Artificial Sequence
  Description of Artificial Sequence: Synthetic peanut,  sequence 3' and inner sequence
cgcaacgggagggaaacgtcctgcgacgcgttgactagtacatgaccacttga

SEQ ID NO: 2830 - DNA, 53 bp, Artificial Sequence
  Description of Artificial Sequence: Synthetic peanut,  sequence 3' and inner sequence
acgtgtggctgcatttcgtcccgtgtggcattgactagtacatgaccacttga

SEQ ID NO: 2831 - DNA, 53 bp, Artificial Sequence
  Description of Artificial Sequence: Synthetic peanut,  sequence 3' and inner sequence
cgtaccgcaagggggagagtgcgtgttggcttgactagtacatgaccacttga

SEQ ID NO: 2832 - DNA, 53 bp, Artificial Sequence
  Description of Artificial Sequence: Synthetic peanut,  sequence 3' and inner sequence
gcggtgcggaacatgtacgccatcttgccattgactagtacatgaccacttga

SEQ ID NO: 2833 - DNA, 53 bp, Artificial Sequence
  Description of Artificial Sequence: Synthetic peanut,  sequence 3' and inner sequence
catgcagcagggttacgtgttcactgcgccttgactagtacatgaccacttga

SEQ ID NO: 2834 - DNA, 53 bp, Artificial Sequence
  Description of Artificial Sequence: Synthetic peanut,  sequence 3' and inner sequence
gtgcgacacgtgttcccgttcaagttgggcttgactagtacatgaccacttga

SEQ ID NO: 2835 - DNA, 53 bp, Artificial Sequence
  Description of Artificial Sequence: Synthetic peanut,  sequence 3' and inner sequence
cgcaacgcacatccgaacgacgtgtgcatgttgactagtacatgaccacttga

SEQ ID NO: 2836 - DNA, 53 bp, Artificial Sequence
  Description of Artificial Sequence: Synthetic peanut,  sequence 3' and inner sequence
tgtcacagggacgtatcgcaccgctgtggtttgactagtacatgaccacttga

SEQ ID NO: 2837 - DNA, 53 bp, Artificial Sequence
  Description of Artificial Sequence: Synthetic peanut,  sequence 3' and inner sequence
cgcaccgtcgatacgttatgcacgctgacattgactagtacatgaccacttga

SEQ ID NO: 2838 - DNA, 53 bp, Artificial Sequence
  Description of Artificial Sequence: Synthetic peanut,  sequence 3' and inner sequence
cgatgctaggatggacgtgacggctacgcgttgactagtacatgaccacttga

SEQ ID NO: 2839 - DNA, 53 bp, Artificial Sequence
  Description of Artificial Sequence: Synthetic peanut,  sequence 3' and inner sequence
cgacaggcaggtcaaggtcatcgctgcacattgactagtacatgaccacttga

SEQ ID NO: 2840 - DNA, 53 bp, Artificial Sequence
  Description of Artificial Sequence: Synthetic peanut,  sequence 3' and inner sequence
cgcactgtcgatacgtcatgcacgctgacattgactagtacatgaccacttga

SEQ ID NO: 2841 - DNA, 53 bp, Artificial Sequence
  Description of Artificial Sequence: Synthetic peanut,  sequence 3' and inner sequence
gacgcactcaaccgatcagtggcatgcgtgttgactagtacatgaccacttga

SEQ ID NO: 2842 - DNA, 53 bp, Artificial Sequence
  Description of Artificial Sequence: Synthetic peanut,  sequence 3' and inner sequence
cgcacggcaaggaagggtgcgtacttgtgtttgactagtacatgaccacttga

SEQ ID NO: 2843 - DNA, 53 bp, Artificial Sequence
  Description of Artificial Sequence: Synthetic peanut,  sequence 3' and inner sequence
cgatgaccgtgtggtgaatgtgcctacgcattgactagtacatgaccacttga

SEQ ID NO: 2844 - DNA, 53 bp, Artificial Sequence
  Description of Artificial Sequence: Synthetic peanut,  sequence 3' and inner sequence
ccatcatgcaccgtaacggaccactgcgcattgactagtacatgaccacttga

SEQ ID NO: 2845 - DNA, 54 bp, Artificial Sequence
  Description of Artificial Sequence: Synthetic peanut,  sequence 3' and inner sequence
cgcaccgtcgatacgtcatgcacgctgaccattgactagtacatgaccacttga

SEQ ID NO: 2846 - DNA, 53 bp, Artificial Sequence
  Description of Artificial Sequence: Synthetic peanut,  sequence 3' and inner sequence
gcacgtggcttacccgctggcatgacgacgttgactagtacatgaccacttga

SEQ ID NO: 2847 - DNA, 53 bp, Artificial Sequence
  Description of Artificial Sequence: Synthetic peanut,  sequence 3' and inner sequence
cgatgcacaccaaacaggccacgctacgtgttgactagtacatgaccacttga

SEQ ID NO: 2848 - DNA, 53 bp, Artificial Sequence
  Description of Artificial Sequence: Synthetic peanut,  sequence 3' and inner sequence
gcacggcacgtaacggttggttcaggcacattgactagtacatgaccacttga

SEQ ID NO: 2849 - DNA, 53 bp, Artificial Sequence
  Description of Artificial Sequence: Synthetic peanut,  sequence 3' and inner sequence
cgacacgaagctcaagggcgatacggcatgttgactagtacatgaccacttga

SEQ ID NO: 2850 - DNA, 53 bp, Artificial Sequence
  Description of Artificial Sequence: Synthetic peanut,  sequence 3' and inner sequence
ccgacctcgcaccgtatcaagctggccatgttgactagtacatgaccacttga

SEQ ID NO: 2851 - DNA, 53 bp, Artificial Sequence
  Description of Artificial Sequence: Synthetic peanut,  sequence 3' and inner sequence
ccgtgcaggagcattatggcacgtgcggcattgactagtacatgaccacttga

SEQ ID NO: 2852 - DNA, 53 bp, Artificial Sequence
  Description of Artificial Sequence: Synthetic peanut,  sequence 3' and inner sequence
cgccaacacggtacacatcatggctacgcgttgactagtacatgaccacttga

SEQ ID NO: 2853 - DNA, 53 bp, Artificial Sequence
  Description of Artificial Sequence: Synthetic peanut,  sequence 3' and inner sequence
cgcaccgtcgatacgtcttgcacgctgacattgactagtacatgaccacttga

SEQ ID NO: 2854 - DNA, 53 bp, Artificial Sequence
  Description of Artificial Sequence: Synthetic peanut,  sequence 3' and inner sequence
gcgtgacgtaacgacagatcatgcgtcagtttgactagtacatgaccacttga

SEQ ID NO: 2855 - DNA, 53 bp, Artificial Sequence
  Description of Artificial Sequence: Synthetic peanut,  sequence 3' and inner sequence
cgcggcagacgaccttgcgttccatgcacattgactagtacatgaccacttga

SEQ ID NO: 2856 - DNA, 53 bp, Artificial Sequence
  Description of Artificial Sequence: Synthetic peanut,  sequence 3' and inner sequence
cacgcacgtcggagaggtacgttcgccaccttgactagtacatgaccacttga

SEQ ID NO: 2857 - DNA, 53 bp, Artificial Sequence
  Description of Artificial Sequence: Synthetic peanut,  sequence 3' and inner sequence
gtcattccgcatcctacacgtgggtacgtattgactagtacatgaccacttga

SEQ ID NO: 2858 - DNA, 53 bp, Artificial Sequence
  Description of Artificial Sequence: Synthetic peanut,  sequence 3' and inner sequence
cgcgacgaagtggaggtaatgtccgtgccattgactagtacatgaccacttga

SEQ ID NO: 2859 - DNA, 53 bp, Artificial Sequence
  Description of Artificial Sequence: Synthetic peanut,  sequence 3' and inner sequence
cacatgcatcgtaccgtcacagcacgaccattgactagtacatgaccacttga

SEQ ID NO: 2860 - DNA, 53 bp, Artificial Sequence
  Description of Artificial Sequence: Synthetic peanut,  sequence 3' and inner sequence
ccgtcgcgacatcaagcggtggtgtgcgtgttgactagtacatgaccacttga

SEQ ID NO: 2861 - DNA, 53 bp, Artificial Sequence
  Description of Artificial Sequence: Synthetic peanut,  sequence 3' and inner sequence
tgcgcaaggtcacggtcctacgccttcacgttgactagtacatgaccacttga

SEQ ID NO: 2862 - DNA, 53 bp, Artificial Sequence
  Description of Artificial Sequence: Synthetic peanut,  sequence 3' and inner sequence
cgtaccggagcggcgcacagtgatggcatgttgactagtacatgaccacttga

SEQ ID NO: 2863 - DNA, 53 bp, Artificial Sequence
  Description of Artificial Sequence: Synthetic peanut,  sequence 3' and inner sequence
ggcatgcgatgggtagtgatcacgtacggtttgactagtacatgaccacttga

SEQ ID NO: 2864 - DNA, 56 bp, Artificial Sequence
  Description of Artificial Sequence: Synthetic peanut,  sequence 3' and inner sequence
ccgcatcggaccgatcaaggcaggctgtacgtgttgactagtacatgaccacttga

SEQ ID NO: 2865 - DNA, 53 bp, Artificial Sequence
  Description of Artificial Sequence: Synthetic peanut,  sequence 3' and inner sequence
cgcagcggaagtaccgtacgtatcgtgccattgactagtacatgaccacttga

SEQ ID NO: 2866 - DNA, 53 bp, Artificial Sequence
  Description of Artificial Sequence: Synthetic peanut,  sequence 3' and inner sequence
cgcaccgtcgatacgtcatgcaccctgacattgactagtacatgaccacttga

SEQ ID NO: 2867 - DNA, 53 bp, Artificial Sequence
  Description of Artificial Sequence: Synthetic peanut,  sequence 3' and inner sequence
gtgcgcaacgaccctacacgtggtggtgtattgactagtacatgaccacttga

SEQ ID NO: 2868 - DNA, 53 bp, Artificial Sequence
  Description of Artificial Sequence: Synthetic peanut,  sequence 3' and inner sequence
catggcacggaacgcgcagtcacatgcatgttgactagtacatgaccacttga

SEQ ID NO: 2869 - DNA, 53 bp, Artificial Sequence
  Description of Artificial Sequence: Synthetic peanut,  sequence 3' and inner sequence
ggccgaacgtaccggtcaagtggatgcgtattgactagtacatgaccacttga

SEQ ID NO: 2870 - DNA, 53 bp, Artificial Sequence
  Description of Artificial Sequence: Synthetic peanut,  sequence 3' and inner sequence
cgcatgtgaggcactagatgcacttgcgcattgactagtacatgaccacttga

SEQ ID NO: 2871 - DNA, 53 bp, Artificial Sequence
  Description of Artificial Sequence: Synthetic peanut,  sequence 3' and inner sequence
gtcatgcacgaacactataatggcggcatgttgactagtacatgaccacttga

SEQ ID NO: 2872 - DNA, 53 bp, Artificial Sequence
  Description of Artificial Sequence: Synthetic peanut,  sequence 3' and inner sequence
gcgacggtgtgcggtggtatgtcctgcacattgactagtacatgaccacttga

SEQ ID NO: 2873 - DNA, 52 bp, Artificial Sequence
  Description of Artificial Sequence: Synthetic peanut,  sequence 3' and inner sequence
gtcatgccatcccttcgagtgtgcaggtattgactagtacatgaccacttga

SEQ ID NO: 2874 - DNA, 53 bp, Artificial Sequence
  Description of Artificial Sequence: Synthetic peanut,  sequence 3' and inner sequence
gccaagcggaccaaagtgtgccatgacgcattgactagtacatgaccacttga

SEQ ID NO: 2875 - DNA, 53 bp, Artificial Sequence
  Description of Artificial Sequence: Synthetic peanut,  sequence 3' and inner sequence
gtcatgccgaactgcccattgccatgcagcttgactagtacatgaccacttga

SEQ ID NO: 2876 - DNA, 53 bp, Artificial Sequence
  Description of Artificial Sequence: Synthetic peanut,  sequence 3' and inner sequence
cgacacacggaaccacgtgactgcgccaccttgactagtacatgaccacttga

SEQ ID NO: 2877 - DNA, 53 bp, Artificial Sequence
  Description of Artificial Sequence: Synthetic peanut,  sequence 3' and inner sequence
ccgcacgtagctctatcagtggtgcatgcattgactagtacatgaccacttga

SEQ ID NO: 2878 - DNA, 53 bp, Artificial Sequence
  Description of Artificial Sequence: Synthetic peanut,  sequence 3' and inner sequence
gccaagcgagacgacatgtggtactgcgtgttgactagtacatgaccacttga

SEQ ID NO: 2879 - DNA, 52 bp, Artificial Sequence
  Description of Artificial Sequence: Synthetic peanut,  sequence 3' and inner sequence
ggcatgcgatggatgtggtggtgctgtcattgactagtacatgaccacttga

SEQ ID NO: 2880 - DNA, 53 bp, Artificial Sequence
  Description of Artificial Sequence: Synthetic peanut,  sequence 3' and inner sequence
gccatgcgtgtccctagtcatgacggcatattgactagtacatgaccacttga

SEQ ID NO: 2881 - DNA, 53 bp, Artificial Sequence
  Description of Artificial Sequence: Synthetic peanut,  sequence 3' and inner sequence
cgtaccgcgctggtcacacgtgctgtgtcattgactagtacatgaccacttga

SEQ ID NO: 2882 - DNA, 53 bp, Artificial Sequence
  Description of Artificial Sequence: Synthetic peanut,  sequence 3' and inner sequence
cgtgcagcaggatgacgagcattgggcgtgttgactagtacatgaccacttga

SEQ ID NO: 2883 - DNA, 53 bp, Artificial Sequence
  Description of Artificial Sequence: Synthetic peanut,  sequence 3' and inner sequence
acgcacaacggaaggtctcactgcgtcacgttgactagtacatgaccacttga

SEQ ID NO: 2884 - DNA, 53 bp, Artificial Sequence
  Description of Artificial Sequence: Synthetic peanut,  sequence 3' and inner sequence
gcacgactcgcacactatcatgaggccatgttgactagtacatgaccacttga

SEQ ID NO: 2885 - DNA, 50 bp, Artificial Sequence
  Description of Artificial Sequence: Synthetic peanut,  sequence 3' and inner sequence
ggccaagctgacctagcatgtgtgtcattgactagtacatgaccacttga

SEQ ID NO: 2886 - DNA, 53 bp, Artificial Sequence
  Description of Artificial Sequence: Synthetic peanut,  sequence 3' and inner sequence
cgtgcgcaacgtcgtacgtacatgtgcgtattgactagtacatgaccacttga

SEQ ID NO: 2887 - DNA, 53 bp, Artificial Sequence
  Description of Artificial Sequence: Synthetic peanut,  sequence 3' and inner sequence
tgacgcagcataccctaaggacatggcgtgttgactagtacatgaccacttga

SEQ ID NO: 2888 - DNA, 53 bp, Artificial Sequence
  Description of Artificial Sequence: Synthetic peanut,  sequence 3' and inner sequence
cacacagcgacatgtggtcctacctgcacattgactagtacatgaccacttga

SEQ ID NO: 2889 - DNA, 53 bp, Artificial Sequence
  Description of Artificial Sequence: Synthetic peanut,  sequence 3' and inner sequence
gtacgacgcgagctagcaaggaggcgtgtattgactagtacatgaccacttga

SEQ ID NO: 2890 - DNA, 53 bp, Artificial Sequence
  Description of Artificial Sequence: Synthetic peanut,  sequence 3' and inner sequence
cgatacgcagatcggacgtatgcagcggcattgactagtacatgaccacttga

SEQ ID NO: 2891 - DNA, 53 bp, Artificial Sequence
  Description of Artificial Sequence: Synthetic peanut,  sequence 3' and inner sequence
gcacgactcgcaccctctcatgaggccatgttgactagtacatgaccacttga

SEQ ID NO: 2892 - DNA, 53 bp, Artificial Sequence
  Description of Artificial Sequence: Synthetic peanut,  sequence 3' and inner sequence
ccgtagcgatatcaagcggtggtgtgcgtgttgactagtacatgaccacttga

SEQ ID NO: 2893 - DNA, 49 bp, Artificial Sequence
  Description of Artificial Sequence: Synthetic peanut,  sequence 3' and inner sequence
ggcatgcacgcacctacacgtggacattgactagtacatgaccacttga

SEQ ID NO: 2894 - DNA, 53 bp, Artificial Sequence
  Description of Artificial Sequence: Synthetic peanut,  sequence 3' and inner sequence
ccgagacacacgacaggaccatccgtcacgttgactagtacatgaccacttga

SEQ ID NO: 2895 - DNA, 53 bp, Artificial Sequence
  Description of Artificial Sequence: Synthetic peanut,  sequence 3' and inner sequence
cgcagacagaccgtcagtgtgtagtgcgcattgactagtacatgaccacttga

SEQ ID NO: 2896 - DNA, 53 bp, Artificial Sequence
  Description of Artificial Sequence: Synthetic peanut,  sequence 3' and inner sequence
cgaaccgggcaagggtaggtaccatgcacgttgactagtacatgaccacttga

SEQ ID NO: 2897 - DNA, 53 bp, Artificial Sequence
  Description of Artificial Sequence: Synthetic peanut,  sequence 3' and inner sequence
cgcacgcatagggatgacgttccctcgtcattgactagtacatgaccacttga

SEQ ID NO: 2898 - DNA, 53 bp, Artificial Sequence
  Description of Artificial Sequence: Synthetic peanut,  sequence 3' and inner sequence
cgtaccagggggacgtacctgccgtggacattgactagtacatgaccacttga

SEQ ID NO: 2899 - DNA, 53 bp, Artificial Sequence
  Description of Artificial Sequence: Synthetic peanut,  sequence 3' and inner sequence
cgtagcggcacgcagtcctgtgtaggcacattgactagtacatgaccacttga

SEQ ID NO: 2900 - DNA, 53 bp, Artificial Sequence
  Description of Artificial Sequence: Synthetic peanut,  sequence 3' and inner sequence
ggacgcagcttgcctactggtggtaacgtattgactagtacatgaccacttga

SEQ ID NO: 2901 - DNA, 53 bp, Artificial Sequence
  Description of Artificial Sequence: Synthetic peanut,  sequence 3' and inner sequence
ggcacaaacggaccgacaagtgcgcatggtttgactagtacatgaccacttga

SEQ ID NO: 2902 - DNA, 53 bp, Artificial Sequence
  Description of Artificial Sequence: Synthetic peanut,  sequence 3' and inner sequence
cgcaccgagcgtggagagcacattggcacattgactagtacatgaccacttga

SEQ ID NO: 2903 - DNA, 53 bp, Artificial Sequence
  Description of Artificial Sequence: Synthetic peanut,  sequence 3' and inner sequence
cgcaccgtccatacgtcatgcacgctgacattgactagtacatgaccacttga

SEQ ID NO: 2904 - DNA, 53 bp, Artificial Sequence
  Description of Artificial Sequence: Synthetic peanut,  sequence 3' and inner sequence
gccacaaagcgtgaccgaactgtgtgcatgttgactagtacatgaccacttga

SEQ ID NO: 2905 - DNA, 53 bp, Artificial Sequence
  Description of Artificial Sequence: Synthetic peanut,  sequence 3' and inner sequence
gcacacagcagtacgacatgccacgttgcgttgactagtacatgaccacttga

SEQ ID NO: 2906 - DNA, 53 bp, Artificial Sequence
  Description of Artificial Sequence: Synthetic peanut,  sequence 3' and inner sequence
ccgatcggcatcgctggtcaggacgtagcattgactagtacatgaccacttga

SEQ ID NO: 2907 - DNA, 53 bp, Artificial Sequence
  Description of Artificial Sequence: Synthetic peanut,  sequence 3' and inner sequence
cgacacgcagtaatgaccagatgccacgtgttgactagtacatgaccacttga

SEQ ID NO: 2908 - DNA, 53 bp, Artificial Sequence
  Description of Artificial Sequence: Synthetic peanut,  sequence 3' and inner sequence
caccacgcatcattgtccgccaactgcacattgactagtacatgaccacttga

SEQ ID NO: 2909 - DNA, 53 bp, Artificial Sequence
  Description of Artificial Sequence: Synthetic peanut,  sequence 3' and inner sequence
ggcatgcgatgaacgaggcatgattcgtcattgactagtacatgaccacttga

SEQ ID NO: 2910 - DNA, 53 bp, Artificial Sequence
  Description of Artificial Sequence: Synthetic peanut,  sequence 3' and inner sequence
cgtacacacaggaacgaggcatacgacgcattgactagtacatgaccacttga

SEQ ID NO: 2911 - DNA, 53 bp, Artificial Sequence
  Description of Artificial Sequence: Synthetic peanut,  sequence 3' and inner sequence
gtacgtatcgaacggtcaagtcggtgtgtattgactagtacatgaccacttga

SEQ ID NO: 2912 - DNA, 53 bp, Artificial Sequence
  Description of Artificial Sequence: Synthetic peanut,  sequence 3' and inner sequence
ggccgaacgtaacgcgggggcatgtggatgttgactagtacatgaccacttga

SEQ ID NO: 2913 - DNA, 53 bp, Artificial Sequence
  Description of Artificial Sequence: Synthetic peanut,  sequence 3' and inner sequence
cagtagcgacatcaagcggtggtgtgcgtgttgactagtacatgaccacttga

SEQ ID NO: 2914 - DNA, 53 bp, Artificial Sequence
  Description of Artificial Sequence: Synthetic peanut,  sequence 3' and inner sequence
gtcgtgtgcgtgccctacaagtcaggcatgttgactagtacatgaccacttga

SEQ ID NO: 2915 - DNA, 53 bp, Artificial Sequence
  Description of Artificial Sequence: Synthetic peanut,  sequence 3' and inner sequence
cgaaccgcgtggacgtgttgctgggcatcattgactagtacatgaccacttga

SEQ ID NO: 2916 - DNA, 53 bp, Artificial Sequence
  Description of Artificial Sequence: Synthetic peanut,  sequence 3' and inner sequence
catgtggccaacgaggcgctacacgtgggcttgactagtacatgaccacttga

SEQ ID NO: 2917 - DNA, 53 bp, Artificial Sequence
  Description of Artificial Sequence: Synthetic peanut,  sequence 3' and inner sequence
ccgcacgcgaacgaggtggtacatggcgtattgactagtacatgaccacttga

SEQ ID NO: 2918 - DNA, 53 bp, Artificial Sequence
  Description of Artificial Sequence: Synthetic peanut,  sequence 3' and inner sequence
cgcaacacgaggatgtgcaatatggtcgcgttgactagtacatgaccacttga

SEQ ID NO: 2919 - DNA, 53 bp, Artificial Sequence
  Description of Artificial Sequence: Synthetic peanut,  sequence 3' and inner sequence
ggacgcatcgcccgtcaatgtgacgccatgttgactagtacatgaccacttga

SEQ ID NO: 2920 - DNA, 53 bp, Artificial Sequence
  Description of Artificial Sequence: Synthetic peanut,  sequence 3' and inner sequence
ccgcacgtatccctatcagtggtgcatgcattgactagtacatgaccacttga

SEQ ID NO: 2921 - DNA, 53 bp, Artificial Sequence
  Description of Artificial Sequence: Synthetic peanut,  sequence 3' and inner sequence
gtgctgccagcccgtagcaagtcaggcatgttgactagtacatgaccacttga

SEQ ID NO: 2922 - DNA, 53 bp, Artificial Sequence
  Description of Artificial Sequence: Synthetic peanut,  sequence 3' and inner sequence
catgctgaatgcgtagtgctgccttgcgcattgactagtacatgaccacttga

SEQ ID NO: 2923 - DNA, 53 bp, Artificial Sequence
  Description of Artificial Sequence: Synthetic peanut,  sequence 3' and inner sequence
cgcacacgtacgtaacggcatggacatcgtttgactagtacatgaccacttga

SEQ ID NO: 2924 - DNA, 53 bp, Artificial Sequence
  Description of Artificial Sequence: Synthetic peanut,  sequence 3' and inner sequence
gtcgtgactggctagctgtacatgcactgcttgactagtacatgaccacttga

SEQ ID NO: 2925 - DNA, 53 bp, Artificial Sequence
  Description of Artificial Sequence: Synthetic peanut,  sequence 3' and inner sequence
acgtgggcggagacgaagcactgcagcacgttgactagtacatgaccacttga

SEQ ID NO: 2926 - DNA, 53 bp, Artificial Sequence
  Description of Artificial Sequence: Synthetic peanut,  sequence 3' and inner sequence
cgaaccagactgggcaggcacaaaggcacgttgactagtacatgaccacttga

SEQ ID NO: 2927 - DNA, 53 bp, Artificial Sequence
  Description of Artificial Sequence: Synthetic peanut,  sequence 3' and inner sequence
catggccgcgtgaacgtgcactaatgcgcattgactagtacatgaccacttga

SEQ ID NO: 2928 - DNA, 53 bp, Artificial Sequence
  Description of Artificial Sequence: Synthetic peanut,  sequence 3' and inner sequence
catgatgtcacgaactgagctcacgtggccttgactagtacatgaccacttga

SEQ ID NO: 2929 - DNA, 53 bp, Artificial Sequence
  Description of Artificial Sequence: Synthetic peanut,  sequence 3' and inner sequence
ggcacaaacagcagaaggacgcgatgcacgttgactagtacatgaccacttga

SEQ ID NO: 2930 - DNA, 53 bp, Artificial Sequence
  Description of Artificial Sequence: Synthetic peanut,  sequence 3' and inner sequence
cgcacctgtcaaggcggaatggcacgtggcttgactagtacatgaccacttga

SEQ ID NO: 2931 - DNA, 53 bp, Artificial Sequence
  Description of Artificial Sequence: Synthetic peanut,  sequence 3' and inner sequence
cgcacccaactggtcgtgaccctcggcacattgactagtacatgaccacttga

SEQ ID NO: 2932 - DNA, 53 bp, Artificial Sequence
  Description of Artificial Sequence: Synthetic peanut,  sequence 3' and inner sequence
gcacggatcgaaaccgtaccgagtggcgcattgactagtacatgaccacttga

SEQ ID NO: 2933 - DNA, 53 bp, Artificial Sequence
  Description of Artificial Sequence: Synthetic peanut,  sequence 3' and inner sequence
gcatgcacgtcacatcacaacgactgcacgttgactagtacatgaccacttga

SEQ ID NO: 2934 - DNA, 53 bp, Artificial Sequence
  Description of Artificial Sequence: Synthetic peanut,  sequence 3' and inner sequence
catgcgggacggatgtagtatggctgcacgttgactagtacatgaccacttga

SEQ ID NO: 2935 - DNA, 53 bp, Artificial Sequence
  Description of Artificial Sequence: Synthetic peanut,  sequence 3' and inner sequence
ggccaacgctggacaggctgtgactacgcattgactagtacatgaccacttga

SEQ ID NO: 2936 - DNA, 53 bp, Artificial Sequence
  Description of Artificial Sequence: Synthetic peanut,  sequence 3' and inner sequence
catgcgcagggaagatggtgcgttgacgcattgactagtacatgaccacttga

SEQ ID NO: 2937 - DNA, 53 bp, Artificial Sequence
  Description of Artificial Sequence: Synthetic peanut,  sequence 3' and inner sequence
gaccgcagcgacgtatcatgtggtggtgtattgactagtacatgaccacttga

SEQ ID NO: 2938 - DNA, 53 bp, Artificial Sequence
  Description of Artificial Sequence: Synthetic peanut,  sequence 3' and inner sequence
cgcaagtgcacactgcagtatgtccgcacattgactagtacatgaccacttga

SEQ ID NO: 2939 - DNA, 53 bp, Artificial Sequence
  Description of Artificial Sequence: Synthetic peanut,  sequence 3' and inner sequence
cgatgccacgaataacgggccatgtgcgtattgactagtacatgaccacttga

SEQ ID NO: 2940 - DNA, 53 bp, Artificial Sequence
  Description of Artificial Sequence: Synthetic peanut,  sequence 3' and inner sequence
cggaccgaagtggcacatgtctgttccacgttgactagtacatgaccacttga

SEQ ID NO: 2941 - DNA, 53 bp, Artificial Sequence
  Description of Artificial Sequence: Synthetic peanut,  sequence 3' and inner sequence
catggcgacgacatgctgatcacctacgcattgactagtacatgaccacttga

SEQ ID NO: 2942 - DNA, 53 bp, Artificial Sequence
  Description of Artificial Sequence: Synthetic peanut,  sequence 3' and inner sequence
cacggaccaggagacgagacacggtgcgcgttgactagtacatgaccacttga

SEQ ID NO: 2943 - DNA, 53 bp, Artificial Sequence
  Description of Artificial Sequence: Synthetic peanut,  sequence 3' and inner sequence
acacgactcgcaccctatcatgaggccatgttgactagtacatgaccacttga

SEQ ID NO: 2944 - DNA, 53 bp, Artificial Sequence
  Description of Artificial Sequence: Synthetic peanut,  sequence 3' and inner sequence
catgcacaggcaatggtatgctcctgcaccttgactagtacatgaccacttga

SEQ ID NO: 2945 - DNA, 53 bp, Artificial Sequence
  Description of Artificial Sequence: Synthetic peanut,  sequence 3' and inner sequence
ccacacgtagccctatcagtggtgcatgcattgactagtacatgaccacttga

SEQ ID NO: 2946 - DNA, 53 bp, Artificial Sequence
  Description of Artificial Sequence: Synthetic peanut,  sequence 3' and inner sequence
ctcatgctgtacgtctcgttccattgggcattgactagtacatgaccacttga

SEQ ID NO: 2947 - DNA, 53 bp, Artificial Sequence
  Description of Artificial Sequence: Synthetic peanut,  sequence 3' and inner sequence
gcggggacacgcagcacaagtacgtgcacattgactagtacatgaccacttga

SEQ ID NO: 2948 - DNA, 53 bp, Artificial Sequence
  Description of Artificial Sequence: Synthetic peanut,  sequence 3' and inner sequence
cgatgtgcgtactcgtcccttcgagtgggattgactagtacatgaccacttga

SEQ ID NO: 2949 - DNA, 53 bp, Artificial Sequence
  Description of Artificial Sequence: Synthetic peanut,  sequence 3' and inner sequence
cacatcgtacgccgatctggatgtggctcattgactagtacatgaccacttga

SEQ ID NO: 2950 - DNA, 53 bp, Artificial Sequence
  Description of Artificial Sequence: Synthetic peanut,  sequence 3' and inner sequence
ggtctgcgcgtaccgtcaagtgcgaatggattgactagtacatgaccacttga

SEQ ID NO: 2951 - DNA, 53 bp, Artificial Sequence
  Description of Artificial Sequence: Synthetic peanut,  sequence 3' and inner sequence
ggccgatgaccgtcaagtgttgtgcgctgtttgactagtacatgaccacttga

SEQ ID NO: 2952 - DNA, 53 bp, Artificial Sequence
  Description of Artificial Sequence: Synthetic peanut,  sequence 3' and inner sequence
catgcgccaagagcaacggtgtggatggcattgactagtacatgaccacttga

SEQ ID NO: 2953 - DNA, 53 bp, Artificial Sequence
  Description of Artificial Sequence: Synthetic peanut,  sequence 3' and inner sequence
cggtccggaacgtaacgtgcacacggggcattgactagtacatgaccacttga

SEQ ID NO: 2954 - DNA, 53 bp, Artificial Sequence
  Description of Artificial Sequence: Synthetic peanut,  sequence 3' and inner sequence
cgcacatgccgtatatgaccgcgctgcatcttgactagtacatgaccacttga

SEQ ID NO: 2955 - DNA, 53 bp, Artificial Sequence
  Description of Artificial Sequence: Synthetic peanut,  sequence 3' and inner sequence
gtcattacgcatcctacacgtgggcacgtattgactagtacatgaccacttga

SEQ ID NO: 2956 - DNA, 53 bp, Artificial Sequence
  Description of Artificial Sequence: Synthetic peanut,  sequence 3' and inner sequence
cacgtgcagcatgcctgagctgacctggccttgactagtacatgaccacttga

SEQ ID NO: 2957 - DNA, 53 bp, Artificial Sequence
  Description of Artificial Sequence: Synthetic peanut,  sequence 3' and inner sequence
cggatggaccaacaacggactgcgtggacattgactagtacatgaccacttga

SEQ ID NO: 2958 - DNA, 53 bp, Artificial Sequence
  Description of Artificial Sequence: Synthetic peanut,  sequence 3' and inner sequence
cacgcacgcaaggacgaactggtatgcgtattgactagtacatgaccacttga

SEQ ID NO: 2959 - DNA, 53 bp, Artificial Sequence
  Description of Artificial Sequence: Synthetic peanut,  sequence 3' and inner sequence
gctgcacagcaaggtacgtcattccgcacattgactagtacatgaccacttga

SEQ ID NO: 2960 - DNA, 53 bp, Artificial Sequence
  Description of Artificial Sequence: Synthetic peanut,  sequence 3' and inner sequence
cgtacgcagtgggccttacgtctcggcacgttgactagtacatgaccacttga

SEQ ID NO: 2961 - DNA, 53 bp, Artificial Sequence
  Description of Artificial Sequence: Synthetic peanut,  sequence 3' and inner sequence
ccgtggcaatgacggtgtcacgtacgcggtttgactagtacatgaccacttga

SEQ ID NO: 2962 - DNA, 53 bp, Artificial Sequence
  Description of Artificial Sequence: Synthetic peanut,  sequence 3' and inner sequence
ggcatgcacgcacctacacgtgggtatggtttgactagtacatgaccacttga

SEQ ID NO: 2963 - DNA, 53 bp, Artificial Sequence
  Description of Artificial Sequence: Synthetic peanut,  sequence 3' and inner sequence
tcaccgcaacgtaagtgtgtgccgtacgcattgactagtacatgaccacttga

SEQ ID NO: 2964 - DNA, 53 bp, Artificial Sequence
  Description of Artificial Sequence: Synthetic peanut,  sequence 3' and inner sequence
ccaaccaggccatgatgcgtgtcatgcatgttgactagtacatgaccacttga

SEQ ID NO: 2965 - DNA, 53 bp, Artificial Sequence
  Description of Artificial Sequence: Synthetic peanut,  sequence 3' and inner sequence
cgcaccgtagatacgtaatgcacgctgacattgactagtacatgaccacttga

SEQ ID NO: 2966 - DNA, 53 bp, Artificial Sequence
  Description of Artificial Sequence: Synthetic peanut,  sequence 3' and inner sequence
gcgatgacagacgcagctttggtatgcacgttgactagtacatgaccacttga

SEQ ID NO: 2967 - DNA, 53 bp, Artificial Sequence
  Description of Artificial Sequence: Synthetic peanut,  sequence 3' and inner sequence
cgaacgcagtgaagtgacatccagtgcacattgactagtacatgaccacttga

SEQ ID NO: 2968 - DNA, 53 bp, Artificial Sequence
  Description of Artificial Sequence: Synthetic peanut,  sequence 3' and inner sequence
ggcctgatcgaacctagagagtggcgtgggttgactagtacatgaccacttga

SEQ ID NO: 2969 - DNA, 53 bp, Artificial Sequence
  Description of Artificial Sequence: Synthetic peanut,  sequence 3' and inner sequence
acgtgcaggtgcaacatgtccaacggcacattgactagtacatgaccacttga

SEQ ID NO: 2970 - DNA, 53 bp, Artificial Sequence
  Description of Artificial Sequence: Synthetic peanut,  sequence 3' and inner sequence
ccacaacgcacacgtagtctggtatgcatgttgactagtacatgaccacttga

SEQ ID NO: 2971 - DNA, 54 bp, Artificial Sequence
  Description of Artificial Sequence: Synthetic peanut,  sequence 3' and inner sequence
cgacactgtgcctgaccgtcaagttgcggcattgactagtacatgaccacttga

SEQ ID NO: 2972 - DNA, 53 bp, Artificial Sequence
  Description of Artificial Sequence: Synthetic peanut,  sequence 3' and inner sequence
ccgatctggcgtagctggaacatgtgcgtattgactagtacatgaccacttga

SEQ ID NO: 2973 - DNA, 53 bp, Artificial Sequence
  Description of Artificial Sequence: Synthetic peanut,  sequence 3' and inner sequence
cgtgccgtaacagcaacgtacgtggccacattgactagtacatgaccacttga

SEQ ID NO: 2974 - DNA, 53 bp, Artificial Sequence
  Description of Artificial Sequence: Synthetic peanut,  sequence 3' and inner sequence
cggacaacgtcacgcaagggtcacggcatgttgactagtacatgaccacttga

SEQ ID NO: 2975 - DNA, 52 bp, Artificial Sequence
  Description of Artificial Sequence: Synthetic peanut,  sequence 3' and inner sequence
gtcatgccatcccttcgagtgtgacggtattgactagtacatgaccacttga

SEQ ID NO: 2976 - DNA, 53 bp, Artificial Sequence
  Description of Artificial Sequence: Synthetic peanut,  sequence 3' and inner sequence
cgtgacgtggcagacacgtacaattgcgcgttgactagtacatgaccacttga

SEQ ID NO: 2977 - DNA, 53 bp, Artificial Sequence
  Description of Artificial Sequence: Synthetic peanut,  sequence 3' and inner sequence
gtcacggctcggatgtgtgcatcgtacgtattgactagtacatgaccacttga

SEQ ID NO: 2978 - DNA, 53 bp, Artificial Sequence
  Description of Artificial Sequence: Synthetic peanut,  sequence 3' and inner sequence
cacagcatgacacaggtacgacgatgcgtgttgactagtacatgaccacttga

SEQ ID NO: 2979 - DNA, 53 bp, Artificial Sequence
  Description of Artificial Sequence: Synthetic peanut,  sequence 3' and inner sequence
ggcctgcacgcacctacacgtgggtatggattgactagtacatgaccacttga

SEQ ID NO: 2980 - DNA, 53 bp, Artificial Sequence
  Description of Artificial Sequence: Synthetic peanut,  sequence 3' and inner sequence
gcgcaatgcgatacgtcgtggccatgcacattgactagtacatgaccacttga

SEQ ID NO: 2981 - DNA, 53 bp, Artificial Sequence
  Description of Artificial Sequence: Synthetic peanut,  sequence 3' and inner sequence
cgcagcacagacatggacggtacacgcgcgttgactagtacatgaccacttga

SEQ ID NO: 2982 - DNA, 53 bp, Artificial Sequence
  Description of Artificial Sequence: Synthetic peanut,  sequence 3' and inner sequence
catgcacggttcgccgggatacgttgcgcattgactagtacatgaccacttga

SEQ ID NO: 2983 - DNA, 53 bp, Artificial Sequence
  Description of Artificial Sequence: Synthetic peanut,  sequence 3' and inner sequence
cgagtgcagcgaggtcctgggcagtgcgtgttgactagtacatgaccacttga

SEQ ID NO: 2984 - DNA, 53 bp, Artificial Sequence
  Description of Artificial Sequence: Synthetic peanut,  sequence 3' and inner sequence
acactgctcgaccgaacgtgagacgtgtgcttgactagtacatgaccacttga

SEQ ID NO: 2985 - DNA, 53 bp, Artificial Sequence
  Description of Artificial Sequence: Synthetic peanut,  sequence 3' and inner sequence
gtactgcactgccctacacgtgggcacgtattgactagtacatgaccacttga

SEQ ID NO: 2986 - DNA, 53 bp, Artificial Sequence
  Description of Artificial Sequence: Synthetic peanut,  sequence 3' and inner sequence
cgcatgcagagggcattctccacctccgcgttgactagtacatgaccacttga

SEQ ID NO: 2987 - DNA, 53 bp, Artificial Sequence
  Description of Artificial Sequence: Synthetic peanut,  sequence 3' and inner sequence
catgccgagtgacgaagcagttgcgcctcgttgactagtacatgaccacttga

SEQ ID NO: 2988 - DNA, 53 bp, Artificial Sequence
  Description of Artificial Sequence: Synthetic peanut,  sequence 3' and inner sequence
gtcgtgcatggcttagctggtcgtcttggcttgactagtacatgaccacttga

SEQ ID NO: 2989 - DNA, 53 bp, Artificial Sequence
  Description of Artificial Sequence: Synthetic peanut,  sequence 3' and inner sequence
tgcgcagcgcgatgtcgtacctcttgcgtgttgactagtacatgaccacttga

SEQ ID NO: 2990 - DNA, 53 bp, Artificial Sequence
  Description of Artificial Sequence: Synthetic peanut,  sequence 3' and inner sequence
gcatgcagccatgagtgcacatcgtcctgcttgactagtacatgaccacttga

SEQ ID NO: 2991 - DNA, 53 bp, Artificial Sequence
  Description of Artificial Sequence: Synthetic peanut,  sequence 3' and inner sequence
gtcattccgcatcctacacgcgggcacgtattgactagtacatgaccacttga

SEQ ID NO: 2992 - DNA, 53 bp, Artificial Sequence
  Description of Artificial Sequence: Synthetic peanut,  sequence 3' and inner sequence
gcgacagcgacatacgatatgctctgcgtcttgactagtacatgaccacttga

SEQ ID NO: 2993 - DNA, 53 bp, Artificial Sequence
  Description of Artificial Sequence: Synthetic peanut,  sequence 3' and inner sequence
cacgcacgtcaataacacggtcaccgcgcattgactagtacatgaccacttga

SEQ ID NO: 2994 - DNA, 53 bp, Artificial Sequence
  Description of Artificial Sequence: Synthetic peanut,  sequence 3' and inner sequence
ggcacagagcgaccatcaagtgcgtgtgtattgactagtacatgaccacttga

SEQ ID NO: 2995 - DNA, 53 bp, Artificial Sequence
  Description of Artificial Sequence: Synthetic peanut,  sequence 3' and inner sequence
cacacacatcgaccctgagcccactgcgtgttgactagtacatgaccacttga

SEQ ID NO: 2996 - DNA, 53 bp, Artificial Sequence
  Description of Artificial Sequence: Synthetic peanut,  sequence 3' and inner sequence
cgcaccgagagtcacgcacgccacggctgtttgactagtacatgaccacttga

SEQ ID NO: 2997 - DNA, 53 bp, Artificial Sequence
  Description of Artificial Sequence: Synthetic peanut,  sequence 3' and inner sequence
cgcgtgcaaggagcgtgatcggttggcacattgactagtacatgaccacttga

SEQ ID NO: 2998 - DNA, 53 bp, Artificial Sequence
  Description of Artificial Sequence: Synthetic peanut,  sequence 3' and inner sequence
ccgcacgtagtcctatcagtggtgcatgcattgactagtacatgaccacttga

SEQ ID NO: 2999 - DNA, 53 bp, Artificial Sequence
  Description of Artificial Sequence: Synthetic peanut,  sequence 3' and inner sequence
tgagcgcacaaacgatcggcatgatacgcattgactagtacatgaccacttga

SEQ ID NO: 3000 - DNA, 53 bp, Artificial Sequence
  Description of Artificial Sequence: Synthetic peanut,  sequence 3' and inner sequence
cggtgacggtaagcatcgtgcaccttgccattgactagtacatgaccacttga

SEQ ID NO: 3001 - DNA, 53 bp, Artificial Sequence
  Description of Artificial Sequence: Synthetic peanut,  sequence 3' and inner sequence
tcgacccacgcgaaacggcaatgcgtcacgttgactagtacatgaccacttga

SEQ ID NO: 3002 - DNA, 53 bp, Artificial Sequence
  Description of Artificial Sequence: Synthetic peanut,  sequence 3' and inner sequence
gcataggcagaccttccgtacacgtgcgtcttgactagtacatgaccacttga

SEQ ID NO: 3003 - DNA, 76 bp, Artificial Sequence
  Description of Artificial Sequence: Synthetic peanut, 5' sequence +inner sequence + 3' sequence
tagggaagagaaggacatatgatcgcaccgtcgatacgtcatgcacgctgacattgactagtacatgaccacttga

SEQ ID NO: 3004 - DNA, 76 bp, Artificial Sequence
  Description of Artificial Sequence: Synthetic peanut, 5' sequence +inner sequence + 3' sequence
tagggaagagaaggacatatgatccgtagcgacatcaagcggtggtgtgcgtgttgactagtacatgaccacttga

SEQ ID NO: 3005 - DNA, 76 bp, Artificial Sequence
  Description of Artificial Sequence: Synthetic peanut, 5' sequence +inner sequence + 3' sequence
tagggaagagaaggacatatgatgtcatgcacgaacactatcatggcggcatgttgactagtacatgaccacttga

SEQ ID NO: 3006 - DNA, 76 bp, Artificial Sequence
  Description of Artificial Sequence: Synthetic peanut, 5' sequence +inner sequence + 3' sequence
tagggaagagaaggacatatgatgtcattccgcatcctacacgtgggcacgtattgactagtacatgaccacttga

SEQ ID NO: 3007 - DNA, 76 bp, Artificial Sequence
  Description of Artificial Sequence: Synthetic peanut, 5' sequence +inner sequence + 3' sequence
tagggaagagaaggacatatgatccgcacgtagccctatcagtggtgcatgcattgactagtacatgaccacttga

SEQ ID NO: 3008 - DNA, 76 bp, Artificial Sequence
  Description of Artificial Sequence: Synthetic peanut, 5' sequence +inner sequence + 3' sequence
tagggaagagaaggacatatgatgcacgactcgcaccctatcatgaggccatgttgactagtacatgaccacttga

SEQ ID NO: 3009 - DNA, 76 bp, Artificial Sequence
  Description of Artificial Sequence: Synthetic peanut, 5' sequence +inner sequence + 3' sequence
tagggaagagaaggacatatgatgtcatgccatcccttcgagtgtgacaggtattgactagtacatgaccacttga

SEQ ID NO: 3010 - DNA, 76 bp, Artificial Sequence
  Description of Artificial Sequence: Synthetic peanut, 5' sequence +inner sequence + 3' sequence
tagggaagagaaggacatatgatggcatgcgatgaacgaggcatgatgcgtcattgactagtacatgaccacttga

SEQ ID NO: 3011 - DNA, 76 bp, Artificial Sequence
  Description of Artificial Sequence: Synthetic peanut, 5' sequence +inner sequence + 3' sequence
tagggaagagaaggacatatgatccatcgcgtcactatcatgtgtgtcacgtattgactagtacatgaccacttga

SEQ ID NO: 3012 - DNA, 76 bp, Artificial Sequence
  Description of Artificial Sequence: Synthetic peanut, 5' sequence +inner sequence + 3' sequence
tagggaagagaaggacatatgatggcatgcacgcacctacacgtgggtatggattgactagtacatgaccacttga

SEQ ID NO: 3013 - DNA, 76 bp, Artificial Sequence
  Description of Artificial Sequence: Synthetic peanut, 5' sequence +inner sequence + 3' sequence
tagggaagagaaggacatatgatcgcaccgtcaagcgggaaggcactttggtgttgactagtacatgaccacttga

SEQ ID NO: 3014 - DNA, 76 bp, Artificial Sequence
  Description of Artificial Sequence: Synthetic peanut, 5' sequence +inner sequence + 3' sequence
tagggaagagaaggacatatgatggacgcagcttgcctactggtggtcacgtattgactagtacatgaccacttga

SEQ ID NO: 3015 - DNA, 76 bp, Artificial Sequence
  Description of Artificial Sequence: Synthetic peanut, 5' sequence +inner sequence + 3' sequence
tagggaagagaaggacatatgatgtcgtgactggctagctggacatgcactgcttgactagtacatgaccacttga

SEQ ID NO: 3016 - DNA, 76 bp, Artificial Sequence
  Description of Artificial Sequence: Synthetic peanut, 5' sequence +inner sequence + 3' sequence
tagggaagagaaggacatatgatgcgacagcgacatacgatctgctctgcgtcttgactagtacatgaccacttga

SEQ ID NO: 3017 - DNA, 76 bp, Artificial Sequence
  Description of Artificial Sequence: Synthetic peanut, 5' sequence +inner sequence + 3' sequence
tagggaagagaaggacatatgattggccgatcgaccctatcaagtgcagcatgttgactagtacatgaccacttga

SEQ ID NO: 3018 - DNA, 76 bp, Artificial Sequence
  Description of Artificial Sequence: Synthetic peanut, 5' sequence +inner sequence + 3' sequence
tagggaagagaaggacatatgatcgcaccgagagtgatcgtggttcgcagtcattgactagtacatgaccacttga

SEQ ID NO: 3019 - DNA, 76 bp, Artificial Sequence
  Description of Artificial Sequence: Synthetic peanut, 5' sequence +inner sequence + 3' sequence
tagggaagagaaggacatatgatggacggatcgaacctacaagttgtcgtggattgactagtacatgaccacttga

SEQ ID NO: 3020 - DNA, 76 bp, Artificial Sequence
  Description of Artificial Sequence: Synthetic peanut, 5' sequence +inner sequence + 3' sequence
tagggaagagaaggacatatgatggccacagcgtacctcaacgtggacgtgcattgactagtacatgaccacttga

SEQ ID NO: 3021 - DNA, 76 bp, Artificial Sequence
  Description of Artificial Sequence: Synthetic peanut, 5' sequence +inner sequence + 3' sequence
tagggaagagaaggacatatgatgtcactgtgcctgaccgtcaagttgcggcattgactagtacatgaccacttga

SEQ ID NO: 3022 - DNA, 76 bp, Artificial Sequence
  Description of Artificial Sequence: Synthetic peanut, 5' sequence +inner sequence + 3' sequence
tagggaagagaaggacatatgatgcactgagcgtacgtatcagcgggcacgtattgactagtacatgaccacttga

SEQ ID NO: 3023 - DNA, 76 bp, Artificial Sequence
  Description of Artificial Sequence: Synthetic peanut, 5' sequence +inner sequence + 3' sequence
tagggaagagaaggacatatgatggcacaaacggaccgacaagtgcgcatggattgactagtacatgaccacttga

SEQ ID NO: 3024 - DNA, 76 bp, Artificial Sequence
  Description of Artificial Sequence: Synthetic peanut, 5' sequence +inner sequence + 3' sequence
tagggaagagaaggacatatgatggcctgatcgaacctagagagtggcgtggattgactagtacatgaccacttga

SEQ ID NO: 3025 - DNA, 76 bp, Artificial Sequence
  Description of Artificial Sequence: Synthetic peanut, 5' sequence +inner sequence + 3' sequence
tagggaagagaaggacatatgatgcgtgtcagcaatacgtcctcatctgcccgttgactagtacatgaccacttga

SEQ ID NO: 3026 - DNA, 76 bp, Artificial Sequence
  Description of Artificial Sequence: Synthetic peanut, 5' sequence +inner sequence + 3' sequence
tagggaagagaaggacatatgatggcctgcgatggatgtgggttgtgctcgtcttgactagtacatgaccacttga

SEQ ID NO: 3027 - DNA, 76 bp, Artificial Sequence
  Description of Artificial Sequence: Synthetic peanut, 5' sequence +inner sequence + 3' sequence
tagggaagagaaggacatatgatggcctgcgatggatgtgtgcgtgtattagcttgactagtacatgaccacttga

SEQ ID NO: 3028 - DNA, 76 bp, Artificial Sequence
  Description of Artificial Sequence: Synthetic peanut, 5' sequence +inner sequence + 3' sequence
tagggaagagaaggacatatgatgtacgcatcgtcccgtcatgtggttccgtattgactagtacatgaccacttga

SEQ ID NO: 3029 - DNA, 76 bp, Artificial Sequence
  Description of Artificial Sequence: Synthetic peanut, 5' sequence +inner sequence + 3' sequence
tagggaagagaaggacatatgatggacgcatcgccccttcgagtggacaggtattgactagtacatgaccacttga

SEQ ID NO: 3030 - DNA, 76 bp, Artificial Sequence
  Description of Artificial Sequence: Synthetic peanut, 5' sequence +inner sequence + 3' sequence
tagggaagagaaggacatatgatggcatgcacgcacctacacgtgggcacgtattgactagtacatgaccacttga

SEQ ID NO: 3031 - DNA, 76 bp, Artificial Sequence
  Description of Artificial Sequence: Synthetic peanut, 5' sequence +inner sequence + 3' sequence
tagggaagagaaggacatatgatgtgctgaacgtaccgattcaagtgtgcgtgttgactagtacatgaccacttga

SEQ ID NO: 3032 - DNA, 76 bp, Artificial Sequence
  Description of Artificial Sequence: Synthetic peanut, 5' sequence +inner sequence + 3' sequence
tagggaagagaaggacatatgatgtcacggaacgaagcctatcaagtgcgacattgactagtacatgaccacttga

SEQ ID NO: 3033 - DNA, 76 bp, Artificial Sequence
  Description of Artificial Sequence: Synthetic peanut, 5' sequence +inner sequence + 3' sequence
tagggaagagaaggacatatgatgcactgcacgcaccctatcatgtaggcatgttgactagtacatgaccacttga

SEQ ID NO: 3034 - DNA, 76 bp, Artificial Sequence
  Description of Artificial Sequence: Synthetic peanut, 5' sequence +inner sequence + 3' sequence
tagggaagagaaggacatatgatgtcatgcgcggacattcaagttggcgtggattgactagtacatgaccacttga

SEQ ID NO: 3035 - DNA, 76 bp, Artificial Sequence
  Description of Artificial Sequence: Synthetic peanut, 5' sequence +inner sequence + 3' sequence
tagggaagagaaggacatatgatccgtagcgacatcaagcggtggtgtgcgtattgactagtacatgaccacttga

SEQ ID NO: 3036 - DNA, 76 bp, Artificial Sequence
  Description of Artificial Sequence: Synthetic peanut, 5' sequence +inner sequence + 3' sequence
tagggaagagaaggacatatgatcgcatcgtacgtactcctcgtcactgcgtgttgactagtacatgaccacttga

SEQ ID NO: 3037 - DNA, 76 bp, Artificial Sequence
  Description of Artificial Sequence: Synthetic peanut, 5' sequence +inner sequence + 3' sequence
tagggaagagaaggacatatgatggccaagctgaccgtaaaggcaggcgtgtattgactagtacatgaccacttga

SEQ ID NO: 3038 - DNA, 76 bp, Artificial Sequence
  Description of Artificial Sequence: Synthetic peanut, 5' sequence +inner sequence + 3' sequence
tagggaagagaaggacatatgatggcacggaggatggacgttctgccttggtcttgactagtacatgaccacttga

SEQ ID NO: 3039 - DNA, 76 bp, Artificial Sequence
  Description of Artificial Sequence: Synthetic peanut, 5' sequence +inner sequence + 3' sequence
tagggaagagaaggacatatgatggcatgcgctgggtagtgatcacgtacggtttgactagtacatgaccacttga

SEQ ID NO: 3040 - DNA, 76 bp, Artificial Sequence
  Description of Artificial Sequence: Synthetic peanut, 5' sequence +inner sequence + 3' sequence
tagggaagagaaggacatatgatcgtaccgcaagtgacgtgtccgtgccgtgattgactagtacatgaccacttga

SEQ ID NO: 3041 - DNA, 76 bp, Artificial Sequence
  Description of Artificial Sequence: Synthetic peanut, 5' sequence +inner sequence + 3' sequence
tagggaagagaaggacatatgatccgatcgcacgtcaaggcaggctgtacgagttgactagtacatgaccacttga

SEQ ID NO: 3042 - DNA, 76 bp, Artificial Sequence
  Description of Artificial Sequence: Synthetic peanut, 5' sequence +inner sequence + 3' sequence
tagggaagagaaggacatatgatgacctgactgtgcctatcgagtgcgtgatgttgactagtacatgaccacttga

SEQ ID NO: 3043 - DNA, 76 bp, Artificial Sequence
  Description of Artificial Sequence: Synthetic peanut, 5' sequence +inner sequence + 3' sequence
tagggaagagaaggacatatgatgacggtgcgtcctaaagtgctcagtgcgtgttgactagtacatgaccacttga

SEQ ID NO: 3044 - DNA, 76 bp, Artificial Sequence
  Description of Artificial Sequence: Synthetic peanut, 5' sequence +inner sequence + 3' sequence
tagggaagagaaggacatatgatggacggaacgtgagggcaagtacgtgctcgttgactagtacatgaccacttga

SEQ ID NO: 3045 - DNA, 76 bp, Artificial Sequence
  Description of Artificial Sequence: Synthetic peanut, 5' sequence +inner sequence + 3' sequence
tagggaagagaaggacatatgatgcactggctgacctacacgtggacgatgtgttgactagtacatgaccacttga

SEQ ID NO: 3046 - DNA, 76 bp, Artificial Sequence
  Description of Artificial Sequence: Synthetic peanut, 5' sequence +inner sequence + 3' sequence
tagggaagagaaggacatatgatggacgcagcggaacgttcgagtggtacgtattgactagtacatgaccacttga

SEQ ID NO: 3047 - DNA, 76 bp, Artificial Sequence
  Description of Artificial Sequence: Synthetic peanut, 5' sequence +inner sequence + 3' sequence
tagggaagagaaggacatatgatgtactgcactgccctacacgtgggaatggattgactagtacatgaccacttga

SEQ ID NO: 3048 - DNA, 76 bp, Artificial Sequence
  Description of Artificial Sequence: Synthetic peanut, 5' sequence +inner sequence + 3' sequence
tagggaagagaaggacatatgatggccaatgcgccccttcatgttgtcgtgtattgactagtacatgaccacttga

SEQ ID NO: 3049 - DNA, 76 bp, Artificial Sequence
  Description of Artificial Sequence: Synthetic peanut, 5' sequence +inner sequence + 3' sequence
tagggaagagaaggacatatgatcgtaccgacaagggagcacgtacgcggtcattgactagtacatgaccacttga

SEQ ID NO: 3050 - DNA, 76 bp, Artificial Sequence
  Description of Artificial Sequence: Synthetic peanut, 5' sequence +inner sequence + 3' sequence
tagggaagagaaggacatatgatgcattgggcgaacgaccatcagtgtgcatgttgactagtacatgaccacttga

SEQ ID NO: 3051 - DNA, 76 bp, Artificial Sequence
  Description of Artificial Sequence: Synthetic peanut, 5' sequence +inner sequence + 3' sequence
tagggaagagaaggacatatgatcgcatgggacgtactgaccggatcgtgtcattgactagtacatgaccacttga

SEQ ID NO: 3052 - DNA, 76 bp, Artificial Sequence
  Description of Artificial Sequence: Synthetic peanut, 5' sequence +inner sequence + 3' sequence
tagggaagagaaggacatatgatggacgcaacgtaccgtatcgtggccatgtgttgactagtacatgaccacttga

SEQ ID NO: 3053 - DNA, 76 bp, Artificial Sequence
  Description of Artificial Sequence: Synthetic peanut, 5' sequence +inner sequence + 3' sequence
tagggaagagaaggacatatgatgcacgtacgccttgcctatctgtgctcatgttgactagtacatgaccacttga

SEQ ID NO: 3054 - DNA, 76 bp, Artificial Sequence
  Description of Artificial Sequence: Synthetic peanut, 5' sequence +inner sequence + 3' sequence
tagggaagagaaggacatatgatgcattggacgatcgtgccctacacgtgggcttgactagtacatgaccacttga

SEQ ID NO: 3055 - DNA, 76 bp, Artificial Sequence
  Description of Artificial Sequence: Synthetic peanut, 5' sequence +inner sequence + 3' sequence
tagggaagagaaggacatatgatggacgcacgcagaccttcaagtcggccatgttgactagtacatgaccacttga

SEQ ID NO: 3056 - DNA, 76 bp, Artificial Sequence
  Description of Artificial Sequence: Synthetic peanut, 5' sequence +inner sequence + 3' sequence
tagggaagagaaggacatatgatcacgtgcggaggacaacgccctactgcgtgttgactagtacatgaccacttga

SEQ ID NO: 3057 - DNA, 76 bp, Artificial Sequence
  Description of Artificial Sequence: Synthetic peanut, 5' sequence +inner sequence + 3' sequence
tagggaagagaaggacatatgattggccaacgctacctatggacgtgtgcgtgttgactagtacatgaccacttga

SEQ ID NO: 3058 - DNA, 76 bp, Artificial Sequence
  Description of Artificial Sequence: Synthetic peanut, 5' sequence +inner sequence + 3' sequence
tagggaagagaaggacatatgatgtacggaacggaacaacaagggcaggcatgttgactagtacatgaccacttga

SEQ ID NO: 3059 - DNA, 76 bp, Artificial Sequence
  Description of Artificial Sequence: Synthetic peanut, 5' sequence +inner sequence + 3' sequence
tagggaagagaaggacatatgatgacgacacgaccttcaagcatggcctagcgttgactagtacatgaccacttga

SEQ ID NO: 3060 - DNA, 76 bp, Artificial Sequence
  Description of Artificial Sequence: Synthetic peanut, 5' sequence +inner sequence + 3' sequence
tagggaagagaaggacatatgatcgcgacgagtaggcatgtcttctgtgtgcattgactagtacatgaccacttga

SEQ ID NO: 3061 - DNA, 76 bp, Artificial Sequence
  Description of Artificial Sequence: Synthetic peanut, 5' sequence +inner sequence + 3' sequence
tagggaagagaaggacatatgatgccgacgatgacctggacgtgtggttgtccttgactagtacatgaccacttga

SEQ ID NO: 3062 - DNA, 76 bp, Artificial Sequence
  Description of Artificial Sequence: Synthetic peanut, 5' sequence +inner sequence + 3' sequence
tagggaagagaaggacatatgatgccatcgtacgatcgtacccggcatgcacgttgactagtacatgaccacttga

SEQ ID NO: 3063 - DNA, 76 bp, Artificial Sequence
  Description of Artificial Sequence: Synthetic peanut, 5' sequence +inner sequence + 3' sequence
tagggaagagaaggacatatgattggacaacgatgccctgtcgtgtgcgcggtttgactagtacatgaccacttga

SEQ ID NO: 3064 - DNA, 76 bp, Artificial Sequence
  Description of Artificial Sequence: Synthetic peanut, 5' sequence +inner sequence + 3' sequence
tagggaagagaaggacatatgatcgcaacggtgacgagcagtgagtgcatgtattgactagtacatgaccacttga

SEQ ID NO: 3065 - DNA, 76 bp, Artificial Sequence
  Description of Artificial Sequence: Synthetic peanut, 5' sequence +inner sequence + 3' sequence
tagggaagagaaggacatatgatcacacgtatggtcggcgatggactgtggcattgactagtacatgaccacttga

SEQ ID NO: 3066 - DNA, 76 bp, Artificial Sequence
  Description of Artificial Sequence: Synthetic peanut, 5' sequence +inner sequence + 3' sequence
tagggaagagaaggacatatgatggactgaacgtactgccaggtgagcatgcattgactagtacatgaccacttga

SEQ ID NO: 3067 - DNA, 76 bp, Artificial Sequence
  Description of Artificial Sequence: Synthetic peanut, 5' sequence +inner sequence + 3' sequence
tagggaagagaaggacatatgatcgatggtacgaacgccacgtcatgcggtcattgactagtacatgaccacttga

SEQ ID NO: 3068 - DNA, 76 bp, Artificial Sequence
  Description of Artificial Sequence: Synthetic peanut, 5' sequence +inner sequence + 3' sequence
tagggaagagaaggacatatgatcgcaacgtcagtgtgcatggatgcgtcctgttgactagtacatgaccacttga

SEQ ID NO: 3069 - DNA, 76 bp, Artificial Sequence
  Description of Artificial Sequence: Synthetic peanut, 5' sequence +inner sequence + 3' sequence
tagggaagagaaggacatatgatcacgtggcagtgggaagtgtgcactacgcattgactagtacatgaccacttga

SEQ ID NO: 3070 - DNA, 75 bp, Artificial Sequence
  Description of Artificial Sequence: Synthetic peanut, 5' sequence +inner sequence + 3' sequence
tagggaagagaaggacatatgatgcacgccgatgccctcatgtggccgtggattgactagtacatgaccacttga

SEQ ID NO: 3071 - DNA, 76 bp, Artificial Sequence
  Description of Artificial Sequence: Synthetic peanut, 5' sequence +inner sequence + 3' sequence
tagggaagagaaggacatatgatccgtagcgacatcaagcggtgttgtgcgtgttgactagtacatgaccacttga

SEQ ID NO: 3072 - DNA, 76 bp, Artificial Sequence
  Description of Artificial Sequence: Synthetic peanut, 5' sequence +inner sequence + 3' sequence
tagggaagagaaggacatatgatcatgcaatacgtcagcgtaccgtgtgcacattgactagtacatgaccacttga

SEQ ID NO: 3073 - DNA, 76 bp, Artificial Sequence
  Description of Artificial Sequence: Synthetic peanut, 5' sequence +inner sequence + 3' sequence
tagggaagagaaggacatatgatcgcaccggacgtgacgacgtagtgtggccattgactagtacatgaccacttga

SEQ ID NO: 3074 - DNA, 76 bp, Artificial Sequence
  Description of Artificial Sequence: Synthetic peanut, 5' sequence +inner sequence + 3' sequence
tagggaagagaaggacatatgatgtacgcacgatgagcgccaagtgacatggattgactagtacatgaccacttga

SEQ ID NO: 3075 - DNA, 76 bp, Artificial Sequence
  Description of Artificial Sequence: Synthetic peanut, 5' sequence +inner sequence + 3' sequence
tagggaagagaaggacatatgatcgatgtgcagagtggtggacaagctgcgcattgactagtacatgaccacttga

SEQ ID NO: 3076 - DNA, 76 bp, Artificial Sequence
  Description of Artificial Sequence: Synthetic peanut, 5' sequence +inner sequence + 3' sequence
tagggaagagaaggacatatgatcatgtgtcgactcgccctatcatgcggtcattgactagtacatgaccacttga

SEQ ID NO: 3077 - DNA, 76 bp, Artificial Sequence
  Description of Artificial Sequence: Synthetic peanut, 5' sequence +inner sequence + 3' sequence
tagggaagagaaggacatatgatgtgcgagcagaccgacgcgagtggtacgtgttgactagtacatgaccacttga

SEQ ID NO: 3078 - DNA, 76 bp, Artificial Sequence
  Description of Artificial Sequence: Synthetic peanut, 5' sequence +inner sequence + 3' sequence
tagggaagagaaggacatatgatggcatgcacgaacactatcatggcggcatgttgactagtacatgaccacttga

SEQ ID NO: 3079 - DNA, 76 bp, Artificial Sequence
  Description of Artificial Sequence: Synthetic peanut, 5' sequence +inner sequence + 3' sequence
tagggaagagaaggacatatgatggcatgatcgaccgcatagtcacgtacgcattgactagtacatgaccacttga

SEQ ID NO: 3080 - DNA, 76 bp, Artificial Sequence
  Description of Artificial Sequence: Synthetic peanut, 5' sequence +inner sequence + 3' sequence
tagggaagagaaggacatatgatgcacgcaacgaacctacgagtgatcgtgtattgactagtacatgaccacttga

SEQ ID NO: 3081 - DNA, 76 bp, Artificial Sequence
  Description of Artificial Sequence: Synthetic peanut, 5' sequence +inner sequence + 3' sequence
tagggaagagaaggacatatgatggacgcaacgtaccgtatcgtggccatgtattgactagtacatgaccacttga

SEQ ID NO: 3082 - DNA, 76 bp, Artificial Sequence
  Description of Artificial Sequence: Synthetic peanut, 5' sequence +inner sequence + 3' sequence
tagggaagagaaggacatatgatccgcatcggaccgatcaaggcaggcttggattgactagtacatgaccacttga

SEQ ID NO: 3083 - DNA, 76 bp, Artificial Sequence
  Description of Artificial Sequence: Synthetic peanut, 5' sequence +inner sequence + 3' sequence
tagggaagagaaggacatatgatcggaccggtgacgagtgctagtacggcatgttgactagtacatgaccacttga

SEQ ID NO: 3084 - DNA, 76 bp, Artificial Sequence
  Description of Artificial Sequence: Synthetic peanut, 5' sequence +inner sequence + 3' sequence
tagggaagagaaggacatatgatcgtgcgcgagacatggtccatcggttcgtgttgactagtacatgaccacttga

SEQ ID NO: 3085 - DNA, 76 bp, Artificial Sequence
  Description of Artificial Sequence: Synthetic peanut, 5' sequence +inner sequence + 3' sequence
tagggaagagaaggacatatgatggcatgcgatggatgtgggttgtgctcgtcttgactagtacatgaccacttga

SEQ ID NO: 3086 - DNA, 76 bp, Artificial Sequence
  Description of Artificial Sequence: Synthetic peanut, 5' sequence +inner sequence + 3' sequence
tagggaagagaaggacatatgatcacgacagcgttagcaggccatgcgacacgttgactagtacatgaccacttga

SEQ ID NO: 3087 - DNA, 76 bp, Artificial Sequence
  Description of Artificial Sequence: Synthetic peanut, 5' sequence +inner sequence + 3' sequence
tagggaagagaaggacatatgatcacgcaaggacagcacacctgactggcgtgttgactagtacatgaccacttga

SEQ ID NO: 3088 - DNA, 76 bp, Artificial Sequence
  Description of Artificial Sequence: Synthetic peanut, 5' sequence +inner sequence + 3' sequence
tagggaagagaaggacatatgatacgtgtggcatgcgactgtccgtgttcatgttgactagtacatgaccacttga

SEQ ID NO: 3089 - DNA, 76 bp, Artificial Sequence
  Description of Artificial Sequence: Synthetic peanut, 5' sequence +inner sequence + 3' sequence
tagggaagagaaggacatatgatggccatgtcgacctatggtgatgtgcgacgttgactagtacatgaccacttga

SEQ ID NO: 3090 - DNA, 76 bp, Artificial Sequence
  Description of Artificial Sequence: Synthetic peanut, 5' sequence +inner sequence + 3' sequence
tagggaagagaaggacatatgatacgtgacggatcgatggacctcagtgcgtgttgactagtacatgaccacttga

SEQ ID NO: 3091 - DNA, 76 bp, Artificial Sequence
  Description of Artificial Sequence: Synthetic peanut, 5' sequence +inner sequence + 3' sequence
tagggaagagaaggacatatgatcgcaaccggcacgtgagcactgtacgatcgttgactagtacatgaccacttga

SEQ ID NO: 3092 - DNA, 76 bp, Artificial Sequence
  Description of Artificial Sequence: Synthetic peanut, 5' sequence +inner sequence + 3' sequence
tagggaagagaaggacatatgatgacgcacgacgaccggtcaagttcggcatgttgactagtacatgaccacttga

SEQ ID NO: 3093 - DNA, 76 bp, Artificial Sequence
  Description of Artificial Sequence: Synthetic peanut, 5' sequence +inner sequence + 3' sequence
tagggaagagaaggacatatgatgtacgcgacgtccctgagagtgtgcaggtattgactagtacatgaccacttga

SEQ ID NO: 3094 - DNA, 76 bp, Artificial Sequence
  Description of Artificial Sequence: Synthetic peanut, 5' sequence +inner sequence + 3' sequence
tagggaagagaaggacatatgatggactgcgcgtgacctatcaatggcatgtattgactagtacatgaccacttga

SEQ ID NO: 3095 - DNA, 76 bp, Artificial Sequence
  Description of Artificial Sequence: Synthetic peanut, 5' sequence +inner sequence + 3' sequence
tagggaagagaaggacatatgatggcagtgtcgtgcccgtcaatgtgtgcatgttgactagtacatgaccacttga

SEQ ID NO: 3096 - DNA, 76 bp, Artificial Sequence
  Description of Artificial Sequence: Synthetic peanut, 5' sequence +inner sequence + 3' sequence
tagggaagagaaggacatatgatcgcacgatcgtcctgccctcacgtggcgcattgactagtacatgaccacttga

SEQ ID NO: 3097 - DNA, 76 bp, Artificial Sequence
  Description of Artificial Sequence: Synthetic peanut, 5' sequence +inner sequence + 3' sequence
tagggaagagaaggacatatgatggacgagcggaaggtgaggcatggtgcgtattgactagtacatgaccacttga

SEQ ID NO: 3098 - DNA, 76 bp, Artificial Sequence
  Description of Artificial Sequence: Synthetic peanut, 5' sequence +inner sequence + 3' sequence
tagggaagagaaggacatatgatcgaccgtgacgcaggataacgtactgcgcattgactagtacatgaccacttga

SEQ ID NO: 3099 - DNA, 76 bp, Artificial Sequence
  Description of Artificial Sequence: Synthetic peanut, 5' sequence +inner sequence + 3' sequence
tagggaagagaaggacatatgattcgatcgatccgtcaagcaggcacgtgtcattgactagtacatgaccacttga

SEQ ID NO: 3100 - DNA, 76 bp, Artificial Sequence
  Description of Artificial Sequence: Synthetic peanut, 5' sequence +inner sequence + 3' sequence
tagggaagagaaggacatatgatgtacgcgctggtcccgtatcatgtgcgtcattgactagtacatgaccacttga

SEQ ID NO: 3101 - DNA, 76 bp, Artificial Sequence
  Description of Artificial Sequence: Synthetic peanut, 5' sequence +inner sequence + 3' sequence
tagggaagagaaggacatatgatcgcaccacacgcacgttatgcacctgcgctttgactagtacatgaccacttga

SEQ ID NO: 3102 - DNA, 76 bp, Artificial Sequence
  Description of Artificial Sequence: Synthetic peanut, 5' sequence +inner sequence + 3' sequence
tagggaagagaaggacatatgatggcatgcgaatggatgtgacgatgtgcgtgttgactagtacatgaccacttga

SEQ ID NO: 3103 - DNA, 76 bp, Artificial Sequence
  Description of Artificial Sequence: Synthetic peanut, 5' sequence +inner sequence + 3' sequence
tagggaagagaaggacatatgatcgaaccgcatgtaaggtcacgcacgtcgtattgactagtacatgaccacttga

SEQ ID NO: 3104 - DNA, 76 bp, Artificial Sequence
  Description of Artificial Sequence: Synthetic peanut, 5' sequence +inner sequence + 3' sequence
tagggaagagaaggacatatgatcgcaccgtagatacgtcatgcacgctgacattgactagtacatgaccacttga

SEQ ID NO: 3105 - DNA, 76 bp, Artificial Sequence
  Description of Artificial Sequence: Synthetic peanut, 5' sequence +inner sequence + 3' sequence
tagggaagagaaggacatatgatcgtaccgaacgcggtcttgtgcactacgtgttgactagtacatgaccacttga

SEQ ID NO: 3106 - DNA, 76 bp, Artificial Sequence
  Description of Artificial Sequence: Synthetic peanut, 5' sequence +inner sequence + 3' sequence
tagggaagagaaggacatatgatgtactgcactgccctacacgtgggtatggattgactagtacatgaccacttga

SEQ ID NO: 3107 - DNA, 76 bp, Artificial Sequence
  Description of Artificial Sequence: Synthetic peanut, 5' sequence +inner sequence + 3' sequence
tagggaagagaaggacatatgatgcatcacagtcactatcttccgtgggcacgttgactagtacatgaccacttga

SEQ ID NO: 3108 - DNA, 76 bp, Artificial Sequence
  Description of Artificial Sequence: Synthetic peanut, 5' sequence +inner sequence + 3' sequence
tagggaagagaaggacatatgatgcaacggcagcgtacgtgctttacgtcacgttgactagtacatgaccacttga

SEQ ID NO: 3109 - DNA, 76 bp, Artificial Sequence
  Description of Artificial Sequence: Synthetic peanut, 5' sequence +inner sequence + 3' sequence
tagggaagagaaggacatatgatgtgcgccgatatcccttcacagttggcatgttgactagtacatgaccacttga

SEQ ID NO: 3110 - DNA, 76 bp, Artificial Sequence
  Description of Artificial Sequence: Synthetic peanut, 5' sequence +inner sequence + 3' sequence
tagggaagagaaggacatatgatcaggcacaacgcacgtgacaccgctgcgcattgactagtacatgaccacttga

SEQ ID NO: 3111 - DNA, 76 bp, Artificial Sequence
  Description of Artificial Sequence: Synthetic peanut, 5' sequence +inner sequence + 3' sequence
tagggaagagaaggacatatgatggacaacgtggctggtaggtatcgtgggcattgactagtacatgaccacttga

SEQ ID NO: 3112 - DNA, 76 bp, Artificial Sequence
  Description of Artificial Sequence: Synthetic peanut, 5' sequence +inner sequence + 3' sequence
tagggaagagaaggacatatgattggccagaacgacaagtgcatgcgcagtgattgactagtacatgaccacttga

SEQ ID NO: 3113 - DNA, 76 bp, Artificial Sequence
  Description of Artificial Sequence: Synthetic peanut, 5' sequence +inner sequence + 3' sequence
tagggaagagaaggacatatgatcgcacccggcaagacggaatgtggttggcgttgactagtacatgaccacttga

SEQ ID NO: 3114 - DNA, 76 bp, Artificial Sequence
  Description of Artificial Sequence: Synthetic peanut, 5' sequence +inner sequence + 3' sequence
tagggaagagaaggacatatgatcgcaccgtcgatacgtcattcacgctgacattgactagtacatgaccacttga

SEQ ID NO: 3115 - DNA, 76 bp, Artificial Sequence
  Description of Artificial Sequence: Synthetic peanut, 5' sequence +inner sequence + 3' sequence
tagggaagagaaggacatatgatcgatgctacacgtgacggcatgcgcttggcttgactagtacatgaccacttga

SEQ ID NO: 3116 - DNA, 76 bp, Artificial Sequence
  Description of Artificial Sequence: Synthetic peanut, 5' sequence +inner sequence + 3' sequence
tagggaagagaaggacatatgatggcctgcgatggaatgtgcgaatgtacgcattgactagtacatgaccacttga

SEQ ID NO: 3117 - DNA, 76 bp, Artificial Sequence
  Description of Artificial Sequence: Synthetic peanut, 5' sequence +inner sequence + 3' sequence
tagggaagagaaggacatatgatgcaatgggtggccacctcgtcacgcgtggtttgactagtacatgaccacttga

SEQ ID NO: 3118 - DNA, 76 bp, Artificial Sequence
  Description of Artificial Sequence: Synthetic peanut, 5' sequence +inner sequence + 3' sequence
tagggaagagaaggacatatgatccgcacgcgacagaacgtgttcatgcactgttgactagtacatgaccacttga

SEQ ID NO: 3119 - DNA, 76 bp, Artificial Sequence
  Description of Artificial Sequence: Synthetic peanut, 5' sequence +inner sequence + 3' sequence
tagggaagagaaggacatatgatgtcatgcgatggatgtgggttgtgctcgtcttgactagtacatgaccacttga

SEQ ID NO: 3120 - DNA, 76 bp, Artificial Sequence
  Description of Artificial Sequence: Synthetic peanut, 5' sequence +inner sequence + 3' sequence
tagggaagagaaggacatatgatggatggccgaactgtgccgtggagtgcatgttgactagtacatgaccacttga

SEQ ID NO: 3121 - DNA, 76 bp, Artificial Sequence
  Description of Artificial Sequence: Synthetic peanut, 5' sequence +inner sequence + 3' sequence
tagggaagagaaggacatatgatccgtagcgacatcaagctgtggtgtgcgtgttgactagtacatgaccacttga

SEQ ID NO: 3122 - DNA, 76 bp, Artificial Sequence
  Description of Artificial Sequence: Synthetic peanut, 5' sequence +inner sequence + 3' sequence
tagggaagagaaggacatatgatggacgcgtcgaccttcaagtgtgccgtggattgactagtacatgaccacttga

SEQ ID NO: 3123 - DNA, 76 bp, Artificial Sequence
  Description of Artificial Sequence: Synthetic peanut, 5' sequence +inner sequence + 3' sequence
tagggaagagaaggacatatgatccgtagcgacatcaagcggtggtgtgcatgttgactagtacatgaccacttga

SEQ ID NO: 3124 - DNA, 76 bp, Artificial Sequence
  Description of Artificial Sequence: Synthetic peanut, 5' sequence +inner sequence + 3' sequence
tagggaagagaaggacatatgatcacgtgcatgctaacgtacggccagggacattgactagtacatgaccacttga

SEQ ID NO: 3125 - DNA, 76 bp, Artificial Sequence
  Description of Artificial Sequence: Synthetic peanut, 5' sequence +inner sequence + 3' sequence
tagggaagagaaggacatatgatggcctgactgtgcctatcgagtgcgtgatgttgactagtacatgaccacttga

SEQ ID NO: 3126 - DNA, 76 bp, Artificial Sequence
  Description of Artificial Sequence: Synthetic peanut, 5' sequence +inner sequence + 3' sequence
tagggaagagaaggacatatgatgatgcacgcaacgtacccttcatgtggccattgactagtacatgaccacttga

SEQ ID NO: 3127 - DNA, 76 bp, Artificial Sequence
  Description of Artificial Sequence: Synthetic peanut, 5' sequence +inner sequence + 3' sequence
tagggaagagaaggacatatgatctcatgcggaccgaactggatgtgtgcatgttgactagtacatgaccacttga

SEQ ID NO: 3128 - DNA, 76 bp, Artificial Sequence
  Description of Artificial Sequence: Synthetic peanut, 5' sequence +inner sequence + 3' sequence
tagggaagagaaggacatatgatggcctgcgatggatgtgggctagtatgggcttgactagtacatgaccacttga

SEQ ID NO: 3129 - DNA, 76 bp, Artificial Sequence
  Description of Artificial Sequence: Synthetic peanut, 5' sequence +inner sequence + 3' sequence
tagggaagagaaggacatatgatcacgatccgaccaggcgtgacgtggccatgttgactagtacatgaccacttga

SEQ ID NO: 3130 - DNA, 76 bp, Artificial Sequence
  Description of Artificial Sequence: Synthetic peanut, 5' sequence +inner sequence + 3' sequence
tagggaagagaaggacatatgatcgatccgtcaaggtagtgatgtgctacgtgttgactagtacatgaccacttga

SEQ ID NO: 3131 - DNA, 76 bp, Artificial Sequence
  Description of Artificial Sequence: Synthetic peanut, 5' sequence +inner sequence + 3' sequence
tagggaagagaaggacatatgattgtggccaaacgcgcatacacgtgctcatgttgactagtacatgaccacttga

SEQ ID NO: 3132 - DNA, 76 bp, Artificial Sequence
  Description of Artificial Sequence: Synthetic peanut, 5' sequence +inner sequence + 3' sequence
tagggaagagaaggacatatgatccgtagcgacatcaagcggtggtgtgcgtcttgactagtacatgaccacttga

SEQ ID NO: 3133 - DNA, 76 bp, Artificial Sequence
  Description of Artificial Sequence: Synthetic peanut, 5' sequence +inner sequence + 3' sequence
tagggaagagaaggacatatgatatggccgcagctgacctagcatgtgtgtcattgactagtacatgaccacttga

SEQ ID NO: 3134 - DNA, 76 bp, Artificial Sequence
  Description of Artificial Sequence: Synthetic peanut, 5' sequence +inner sequence + 3' sequence
tagggaagagaaggacatatgatgacacgccgatgagcctagcctgtacgacgttgactagtacatgaccacttga

SEQ ID NO: 3135 - DNA, 76 bp, Artificial Sequence
  Description of Artificial Sequence: Synthetic peanut, 5' sequence +inner sequence + 3' sequence
tagggaagagaaggacatatgatcgaccgtgacgtgtgcagtagtacggcgtgttgactagtacatgaccacttga

SEQ ID NO: 3136 - DNA, 76 bp, Artificial Sequence
  Description of Artificial Sequence: Synthetic peanut, 5' sequence +inner sequence + 3' sequence
tagggaagagaaggacatatgatgccgtcgcgacctagcaagtgcgatgtggattgactagtacatgaccacttga

SEQ ID NO: 3137 - DNA, 76 bp, Artificial Sequence
  Description of Artificial Sequence: Synthetic peanut, 5' sequence +inner sequence + 3' sequence
tagggaagagaaggacatatgatcgcaccgtcgatacgtcatgcactctgacattgactagtacatgaccacttga

SEQ ID NO: 3138 - DNA, 76 bp, Artificial Sequence
  Description of Artificial Sequence: Synthetic peanut, 5' sequence +inner sequence + 3' sequence
tagggaagagaaggacatatgatcgtgccaggacatgacgtgcacgctgcgcattgactagtacatgaccacttga

SEQ ID NO: 3139 - DNA, 76 bp, Artificial Sequence
  Description of Artificial Sequence: Synthetic peanut, 5' sequence +inner sequence + 3' sequence
tagggaagagaaggacatatgatggcctgcgatggatgaggtgctgcactagtttgactagtacatgaccacttga

SEQ ID NO: 3140 - DNA, 76 bp, Artificial Sequence
  Description of Artificial Sequence: Synthetic peanut, 5' sequence +inner sequence + 3' sequence
tagggaagagaaggacatatgatcatgtgcgtggagaacgtccctatgcgacattgactagtacatgaccacttga

SEQ ID NO: 3141 - DNA, 76 bp, Artificial Sequence
  Description of Artificial Sequence: Synthetic peanut, 5' sequence +inner sequence + 3' sequence
tagggaagagaaggacatatgatccgtagcgacatcaagcgttggtgtgcgtgttgactagtacatgaccacttga

SEQ ID NO: 3142 - DNA, 76 bp, Artificial Sequence
  Description of Artificial Sequence: Synthetic peanut, 5' sequence +inner sequence + 3' sequence
tagggaagagaaggacatatgatcatatgccgatcgacactagcaagtgtgcattgactagtacatgaccacttga

SEQ ID NO: 3143 - DNA, 76 bp, Artificial Sequence
  Description of Artificial Sequence: Synthetic peanut, 5' sequence +inner sequence + 3' sequence
tagggaagagaaggacatatgatcatgtgtgcacaaccgatgtatgctgcgtgttgactagtacatgaccacttga

SEQ ID NO: 3144 - DNA, 76 bp, Artificial Sequence
  Description of Artificial Sequence: Synthetic peanut, 5' sequence +inner sequence + 3' sequence
tagggaagagaaggacatatgatccgtagcgacatcaagcggcggtgtgcgtgttgactagtacatgaccacttga

SEQ ID NO: 3145 - DNA, 76 bp, Artificial Sequence
  Description of Artificial Sequence: Synthetic peanut, 5' sequence +inner sequence + 3' sequence
tagggaagagaaggacatatgatgtacgactcgcaccctatcatgaggccatgttgactagtacatgaccacttga

SEQ ID NO: 3146 - DNA, 76 bp, Artificial Sequence
  Description of Artificial Sequence: Synthetic peanut, 5' sequence +inner sequence + 3' sequence
tagggaagagaaggacatatgatgtctgagcgcaacctcgtggactgtgcgtgttgactagtacatgaccacttga

SEQ ID NO: 3147 - DNA, 76 bp, Artificial Sequence
  Description of Artificial Sequence: Synthetic peanut, 5' sequence +inner sequence + 3' sequence
tagggaagagaaggacatatgatgtgcgacctgacctagcaagcggtagtgtattgactagtacatgaccacttga

SEQ ID NO: 3148 - DNA, 74 bp, Artificial Sequence
  Description of Artificial Sequence: Synthetic peanut, 5' sequence +inner sequence + 3' sequence
tagggaagagaaggacatatgatggacgcagctgacctagcatgtgtgtcattgactagtacatgaccacttga

SEQ ID NO: 3149 - DNA, 76 bp, Artificial Sequence
  Description of Artificial Sequence: Synthetic peanut, 5' sequence +inner sequence + 3' sequence
tagggaagagaaggacatatgatcgtaccgtcgatacgtcatgcacgctgacattgactagtacatgaccacttga

SEQ ID NO: 3150 - DNA, 77 bp, Artificial Sequence
  Description of Artificial Sequence: Synthetic peanut, 5' sequence +inner sequence + 3' sequence
tagggaagagaaggacatatgatggcctgcgatggatggggtcagcacgttggcttgactagtacatgaccacttga

SEQ ID NO: 3151 - DNA, 76 bp, Artificial Sequence
  Description of Artificial Sequence: Synthetic peanut, 5' sequence +inner sequence + 3' sequence
tagggaagagaaggacatatgatccgtagcgacatcaagcggtggcgtgcgtgttgactagtacatgaccacttga

SEQ ID NO: 3152 - DNA, 76 bp, Artificial Sequence
  Description of Artificial Sequence: Synthetic peanut, 5' sequence +inner sequence + 3' sequence
tagggaagagaaggacatatgatcgtaacgcgatgtcaggcacgagttgcacattgactagtacatgaccacttga

SEQ ID NO: 3153 - DNA, 76 bp, Artificial Sequence
  Description of Artificial Sequence: Synthetic peanut, 5' sequence +inner sequence + 3' sequence
tagggaagagaaggacatatgatcgcaccatgaaaggggtgaggtacgtcgcgttgactagtacatgaccacttga

SEQ ID NO: 3154 - DNA, 76 bp, Artificial Sequence
  Description of Artificial Sequence: Synthetic peanut, 5' sequence +inner sequence + 3' sequence
tagggaagagaaggacatatgatgcatcggatgacgcaactgaccgagtgggattgactagtacatgaccacttga

SEQ ID NO: 3155 - DNA, 76 bp, Artificial Sequence
  Description of Artificial Sequence: Synthetic peanut, 5' sequence +inner sequence + 3' sequence
tagggaagagaaggacatatgatcgtaccgcaagggggagagtgcgtgttggtttgactagtacatgaccacttga

SEQ ID NO: 3156 - DNA, 76 bp, Artificial Sequence
  Description of Artificial Sequence: Synthetic peanut, 5' sequence +inner sequence + 3' sequence
tagggaagagaaggacatatgatgacgctgcgttccctatcatgtgcggcatgttgactagtacatgaccacttga

SEQ ID NO: 3157 - DNA, 76 bp, Artificial Sequence
  Description of Artificial Sequence: Synthetic peanut, 5' sequence +inner sequence + 3' sequence
tagggaagagaaggacatatgatccagccgaaccgcagatggtgcatgtcgcattgactagtacatgaccacttga

SEQ ID NO: 3158 - DNA, 76 bp, Artificial Sequence
  Description of Artificial Sequence: Synthetic peanut, 5' sequence +inner sequence + 3' sequence
tagggaagagaaggacatatgatcgcaccgggacgagacgtgctagtgtgtcattgactagtacatgaccacttga

SEQ ID NO: 3159 - DNA, 76 bp, Artificial Sequence
  Description of Artificial Sequence: Synthetic peanut, 5' sequence +inner sequence + 3' sequence
tagggaagagaaggacatatgatcgtgtcgtaggggatgagctgagcttggtcttgactagtacatgaccacttga

SEQ ID NO: 3160 - DNA, 76 bp, Artificial Sequence
  Description of Artificial Sequence: Synthetic peanut, 5' sequence +inner sequence + 3' sequence
tagggaagagaaggacatatgatcatgcacgacgtcatacacggcactgctgcttgactagtacatgaccacttga

SEQ ID NO: 3161 - DNA, 76 bp, Artificial Sequence
  Description of Artificial Sequence: Synthetic peanut, 5' sequence +inner sequence + 3' sequence
tagggaagagaaggacatatgatgtcatgcacgcacctacacgtgggtatggattgactagtacatgaccacttga

SEQ ID NO: 3162 - DNA, 76 bp, Artificial Sequence
  Description of Artificial Sequence: Synthetic peanut, 5' sequence +inner sequence + 3' sequence
tagggaagagaaggacatatgatcacgtacggtaagacgtcacaacatgcacattgactagtacatgaccacttga

SEQ ID NO: 3163 - DNA, 76 bp, Artificial Sequence
  Description of Artificial Sequence: Synthetic peanut, 5' sequence +inner sequence + 3' sequence
tagggaagagaaggacatatgatgcacgcactcaaccgccaagtgccgtcgtgttgactagtacatgaccacttga

SEQ ID NO: 3164 - DNA, 76 bp, Artificial Sequence
  Description of Artificial Sequence: Synthetic peanut, 5' sequence +inner sequence + 3' sequence
tagggaagagaaggacatatgatggatcgcacgctgcactatcacgttgggcattgactagtacatgaccacttga

SEQ ID NO: 3165 - DNA, 76 bp, Artificial Sequence
  Description of Artificial Sequence: Synthetic peanut, 5' sequence +inner sequence + 3' sequence
tagggaagagaaggacatatgatcgacccaacgtggcggtgacagtcgttgcattgactagtacatgaccacttga

SEQ ID NO: 3166 - DNA, 76 bp, Artificial Sequence
  Description of Artificial Sequence: Synthetic peanut, 5' sequence +inner sequence + 3' sequence
tagggaagagaaggacatatgatgtgcgcacgatggatgtggatggccagtctttgactagtacatgaccacttga

SEQ ID NO: 3167 - DNA, 76 bp, Artificial Sequence
  Description of Artificial Sequence: Synthetic peanut, 5' sequence +inner sequence + 3' sequence
tagggaagagaaggacatatgattgcaccgtcgatacgtcatgcacgctgacattgactagtacatgaccacttga

SEQ ID NO: 3168 - DNA, 76 bp, Artificial Sequence
  Description of Artificial Sequence: Synthetic peanut, 5' sequence +inner sequence + 3' sequence
tagggaagagaaggacatatgatccgagcggaacgtcaagtcggcagtacgcattgactagtacatgaccacttga

SEQ ID NO: 3169 - DNA, 76 bp, Artificial Sequence
  Description of Artificial Sequence: Synthetic peanut, 5' sequence +inner sequence + 3' sequence
tagggaagagaaggacatatgatcgcaacgtaacggtacgcctacgcttcacgttgactagtacatgaccacttga

SEQ ID NO: 3170 - DNA, 76 bp, Artificial Sequence
  Description of Artificial Sequence: Synthetic peanut, 5' sequence +inner sequence + 3' sequence
tagggaagagaaggacatatgatcacggcagcgacgtccacatgtcctgcgcattgactagtacatgaccacttga

SEQ ID NO: 3171 - DNA, 76 bp, Artificial Sequence
  Description of Artificial Sequence: Synthetic peanut, 5' sequence +inner sequence + 3' sequence
tagggaagagaaggacatatgatgcactgccgacctaacgagtgcgttgtgtgttgactagtacatgaccacttga

SEQ ID NO: 3172 - DNA, 76 bp, Artificial Sequence
  Description of Artificial Sequence: Synthetic peanut, 5' sequence +inner sequence + 3' sequence
tagggaagagaaggacatatgatcgacacgacaaggcatggactgactgcatgttgactagtacatgaccacttga

SEQ ID NO: 3173 - DNA, 76 bp, Artificial Sequence
  Description of Artificial Sequence: Synthetic peanut, 5' sequence +inner sequence + 3' sequence
tagggaagagaaggacatatgatgcgtagcgacatcaagcggtggtgtgcgtgttgactagtacatgaccacttga

SEQ ID NO: 3174 - DNA, 76 bp, Artificial Sequence
  Description of Artificial Sequence: Synthetic peanut, 5' sequence +inner sequence + 3' sequence
tagggaagagaaggacatatgatccgtagcgacatcaagcggtggtgtgcgcgttgactagtacatgaccacttga

SEQ ID NO: 3175 - DNA, 76 bp, Artificial Sequence
  Description of Artificial Sequence: Synthetic peanut, 5' sequence +inner sequence + 3' sequence
tagggaagagaaggacatatgatgtacaagcggaccgtcaacgtggttgtggattgactagtacatgaccacttga

SEQ ID NO: 3176 - DNA, 76 bp, Artificial Sequence
  Description of Artificial Sequence: Synthetic peanut, 5' sequence +inner sequence + 3' sequence
tagggaagagaaggacatatgatcacaccgtcgatacgtcatgcacgctgacattgactagtacatgaccacttga

SEQ ID NO: 3177 - DNA, 76 bp, Artificial Sequence
  Description of Artificial Sequence: Synthetic peanut, 5' sequence +inner sequence + 3' sequence
tagggaagagaaggacatatgatcgcaccgtcgatacttcatgcacgctgacattgactagtacatgaccacttga

SEQ ID NO: 3178 - DNA, 76 bp, Artificial Sequence
  Description of Artificial Sequence: Synthetic peanut, 5' sequence +inner sequence + 3' sequence
tagggaagagaaggacatatgatcgtgacagcgtgcaatgtgctgcttggccattgactagtacatgaccacttga

SEQ ID NO: 3179 - DNA, 76 bp, Artificial Sequence
  Description of Artificial Sequence: Synthetic peanut, 5' sequence +inner sequence + 3' sequence
tagggaagagaaggacatatgatcggaccgcgaaagtcaggctgtgctttggcttgactagtacatgaccacttga

SEQ ID NO: 3180 - DNA, 76 bp, Artificial Sequence
  Description of Artificial Sequence: Synthetic peanut, 5' sequence +inner sequence + 3' sequence
tagggaagagaaggacatatgatcacgcacacaaccgacagtgagttggcgtattgactagtacatgaccacttga

SEQ ID NO: 3181 - DNA, 76 bp, Artificial Sequence
  Description of Artificial Sequence: Synthetic peanut, 5' sequence +inner sequence + 3' sequence
tagggaagagaaggacatatgatcacgtggacggaagcacggtagcatacgtgttgactagtacatgaccacttga

SEQ ID NO: 3182 - DNA, 76 bp, Artificial Sequence
  Description of Artificial Sequence: Synthetic peanut, 5' sequence +inner sequence + 3' sequence
tagggaagagaaggacatatgatgtcgtgtcgtacgcctatcgagtgtgcatgttgactagtacatgaccacttga

SEQ ID NO: 3183 - DNA, 76 bp, Artificial Sequence
  Description of Artificial Sequence: Synthetic peanut, 5' sequence +inner sequence + 3' sequence
tagggaagagaaggacatatgatccatgccggaccggagcgtggccatgcacattgactagtacatgaccacttga

SEQ ID NO: 3184 - DNA, 76 bp, Artificial Sequence
  Description of Artificial Sequence: Synthetic peanut, 5' sequence +inner sequence + 3' sequence
tagggaagagaaggacatatgatccgtagcgacatcaagcggtggtgcgcgtgttgactagtacatgaccacttga

SEQ ID NO: 3185 - DNA, 76 bp, Artificial Sequence
  Description of Artificial Sequence: Synthetic peanut, 5' sequence +inner sequence + 3' sequence
tagggaagagaaggacatatgatgcatagccgtaacgtaccgccgtggccatgttgactagtacatgaccacttga

SEQ ID NO: 3186 - DNA, 76 bp, Artificial Sequence
  Description of Artificial Sequence: Synthetic peanut, 5' sequence +inner sequence + 3' sequence
tagggaagagaaggacatatgatcgtgtggcctgactccccttcaatgcgtcattgactagtacatgaccacttga

SEQ ID NO: 3187 - DNA, 76 bp, Artificial Sequence
  Description of Artificial Sequence: Synthetic peanut, 5' sequence +inner sequence + 3' sequence
tagggaagagaaggacatatgatggacgcgatggatgtggacggtgtggtagtttgactagtacatgaccacttga

SEQ ID NO: 3188 - DNA, 76 bp, Artificial Sequence
  Description of Artificial Sequence: Synthetic peanut, 5' sequence +inner sequence + 3' sequence
tagggaagagaaggacatatgatgaacggaacgcagcgtcaagtcggtgcatgttgactagtacatgaccacttga

SEQ ID NO: 3189 - DNA, 76 bp, Artificial Sequence
  Description of Artificial Sequence: Synthetic peanut, 5' sequence +inner sequence + 3' sequence
tagggaagagaaggacatatgatccatgtgaacgcactgtggctagctggtcattgactagtacatgaccacttga

SEQ ID NO: 3190 - DNA, 76 bp, Artificial Sequence
  Description of Artificial Sequence: Synthetic peanut, 5' sequence +inner sequence + 3' sequence
tagggaagagaaggacatatgatcgcaccgtcgatacgccatgcacgctgacattgactagtacatgaccacttga

SEQ ID NO: 3191 - DNA, 76 bp, Artificial Sequence
  Description of Artificial Sequence: Synthetic peanut, 5' sequence +inner sequence + 3' sequence
tagggaagagaaggacatatgatgtcatgctcgcactatcaggtgtgcatggattgactagtacatgaccacttga

SEQ ID NO: 3192 - DNA, 76 bp, Artificial Sequence
  Description of Artificial Sequence: Synthetic peanut, 5' sequence +inner sequence + 3' sequence
tagggaagagaaggacatatgatccgtagcgacatcaagcggtggtgttcgtgttgactagtacatgaccacttga

SEQ ID NO: 3193 - DNA, 75 bp, Artificial Sequence
  Description of Artificial Sequence: Synthetic peanut, 5' sequence +inner sequence + 3' sequence
tagggaagagaaggacatatgatgcacgtcgaaacacgtagccatgcacggtttgactagtacatgaccacttga

SEQ ID NO: 3194 - DNA, 76 bp, Artificial Sequence
  Description of Artificial Sequence: Synthetic peanut, 5' sequence +inner sequence + 3' sequence
tagggaagagaaggacatatgatccgtagcgacatcaagcgggggtgtgcgtgttgactagtacatgaccacttga

SEQ ID NO: 3195 - DNA, 76 bp, Artificial Sequence
  Description of Artificial Sequence: Synthetic peanut, 5' sequence +inner sequence + 3' sequence
tagggaagagaaggacatatgatcgcgtgacgataaggtgtgctgcgctccgtttgactagtacatgaccacttga

SEQ ID NO: 3196 - DNA, 76 bp, Artificial Sequence
  Description of Artificial Sequence: Synthetic peanut, 5' sequence +inner sequence + 3' sequence
tagggaagagaaggacatatgatgtcgcgatgagctagcatgtgcgttgtgtattgactagtacatgaccacttga

SEQ ID NO: 3197 - DNA, 76 bp, Artificial Sequence
  Description of Artificial Sequence: Synthetic peanut, 5' sequence +inner sequence + 3' sequence
tagggaagagaaggacatatgatgcaactgcacgcattggaccgcacgtcacattgactagtacatgaccacttga

SEQ ID NO: 3198 - DNA, 76 bp, Artificial Sequence
  Description of Artificial Sequence: Synthetic peanut, 5' sequence +inner sequence + 3' sequence
tagggaagagaaggacatatgatccgatcggacgtaggaatgcacgtggcagtttgactagtacatgaccacttga

SEQ ID NO: 3199 - DNA, 76 bp, Artificial Sequence
  Description of Artificial Sequence: Synthetic peanut, 5' sequence +inner sequence + 3' sequence
tagggaagagaaggacatatgatcacgtgcgtagttacgctggtcactgcggtttgactagtacatgaccacttga

SEQ ID NO: 3200 - DNA, 76 bp, Artificial Sequence
  Description of Artificial Sequence: Synthetic peanut, 5' sequence +inner sequence + 3' sequence
tagggaagagaaggacatatgatggacgcacatcccgttcatgtgtgcatgtattgactagtacatgaccacttga

SEQ ID NO: 3201 - DNA, 76 bp, Artificial Sequence
  Description of Artificial Sequence: Synthetic peanut, 5' sequence +inner sequence + 3' sequence
tagggaagagaaggacatatgatgcacgactcgcaccctatcatgtaggcatgttgactagtacatgaccacttga

SEQ ID NO: 3202 - DNA, 76 bp, Artificial Sequence
  Description of Artificial Sequence: Synthetic peanut, 5' sequence +inner sequence + 3' sequence
tagggaagagaaggacatatgatcacgatgctgtcgaacgtgtgtcgctgcgcttgactagtacatgaccacttga

SEQ ID NO: 3203 - DNA, 76 bp, Artificial Sequence
  Description of Artificial Sequence: Synthetic peanut, 5' sequence +inner sequence + 3' sequence
tagggaagagaaggacatatgatgacgcactcgaacgtacatgtgagcatggattgactagtacatgaccacttga

SEQ ID NO: 3204 - DNA, 76 bp, Artificial Sequence
  Description of Artificial Sequence: Synthetic peanut, 5' sequence +inner sequence + 3' sequence
tagggaagagaaggacatatgatccgtagcgacatcaagcggtggtgtgcgttttgactagtacatgaccacttga

SEQ ID NO: 3205 - DNA, 76 bp, Artificial Sequence
  Description of Artificial Sequence: Synthetic peanut, 5' sequence +inner sequence + 3' sequence
tagggaagagaaggacatatgattgacgcagcggaacgttcgagtggtacgtattgactagtacatgaccacttga

SEQ ID NO: 3206 - DNA, 76 bp, Artificial Sequence
  Description of Artificial Sequence: Synthetic peanut, 5' sequence +inner sequence + 3' sequence
tagggaagagaaggacatatgatcgcatggcggtgacatgttgcgtctacccgttgactagtacatgaccacttga

SEQ ID NO: 3207 - DNA, 76 bp, Artificial Sequence
  Description of Artificial Sequence: Synthetic peanut, 5' sequence +inner sequence + 3' sequence
tagggaagagaaggacatatgatgtcatgcgcgtaccatcgagggggcgtggattgactagtacatgaccacttga

SEQ ID NO: 3208 - DNA, 76 bp, Artificial Sequence
  Description of Artificial Sequence: Synthetic peanut, 5' sequence +inner sequence + 3' sequence
tagggaagagaaggacatatgatgtgccgaacgaacccttcacagtgtgcatgttgactagtacatgaccacttga

SEQ ID NO: 3209 - DNA, 76 bp, Artificial Sequence
  Description of Artificial Sequence: Synthetic peanut, 5' sequence +inner sequence + 3' sequence
tagggaagagaaggacatatgatccacgatgcccgatgcgtacgccatgcacattgactagtacatgaccacttga

SEQ ID NO: 3210 - DNA, 76 bp, Artificial Sequence
  Description of Artificial Sequence: Synthetic peanut, 5' sequence +inner sequence + 3' sequence
tagggaagagaaggacatatgatcatgctgacggtcaagcaccactctgcgcgttgactagtacatgaccacttga

SEQ ID NO: 3211 - DNA, 76 bp, Artificial Sequence
  Description of Artificial Sequence: Synthetic peanut, 5' sequence +inner sequence + 3' sequence
tagggaagagaaggacatatgatggcagcgcagaccgagtgagagtgggtgtgttgactagtacatgaccacttga

SEQ ID NO: 3212 - DNA, 76 bp, Artificial Sequence
  Description of Artificial Sequence: Synthetic peanut, 5' sequence +inner sequence + 3' sequence
tagggaagagaaggacatatgatccgtagcgacatcaagcggttgtgtgcgtgttgactagtacatgaccacttga

SEQ ID NO: 3213 - DNA, 76 bp, Artificial Sequence
  Description of Artificial Sequence: Synthetic peanut, 5' sequence +inner sequence + 3' sequence
tagggaagagaaggacatatgatcgacgcaatcggacactggacatgcgcagattgactagtacatgaccacttga

SEQ ID NO: 3214 - DNA, 76 bp, Artificial Sequence
  Description of Artificial Sequence: Synthetic peanut, 5' sequence +inner sequence + 3' sequence
tagggaagagaaggacatatgatcgtaccagcaagcggacaagtagtgcgacattgactagtacatgaccacttga

SEQ ID NO: 3215 - DNA, 76 bp, Artificial Sequence
  Description of Artificial Sequence: Synthetic peanut, 5' sequence +inner sequence + 3' sequence
tagggaagagaaggacatatgattgtcgtgcgatggatgtggcatgctctggcttgactagtacatgaccacttga

SEQ ID NO: 3216 - DNA, 77 bp, Artificial Sequence
  Description of Artificial Sequence: Synthetic peanut, 5' sequence +inner sequence + 3' sequence
tagggaagagaaggacatatgatgtgcgcacgatggatgtgggttgtgctcgtcttgactagtacatgaccacttga

SEQ ID NO: 3217 - DNA, 76 bp, Artificial Sequence
  Description of Artificial Sequence: Synthetic peanut, 5' sequence +inner sequence + 3' sequence
tagggaagagaaggacatatgatacgtcgcagccaacgtggaacacatgcgcattgactagtacatgaccacttga

SEQ ID NO: 3218 - DNA, 76 bp, Artificial Sequence
  Description of Artificial Sequence: Synthetic peanut, 5' sequence +inner sequence + 3' sequence
tagggaagagaaggacatatgatggacgcaatcgtcacttcaagtacggcatgttgactagtacatgaccacttga

SEQ ID NO: 3219 - DNA, 76 bp, Artificial Sequence
  Description of Artificial Sequence: Synthetic peanut, 5' sequence +inner sequence + 3' sequence
tagggaagagaaggacatatgatcgcacactacgacagtgaccacgctgcacgttgactagtacatgaccacttga

SEQ ID NO: 3220 - DNA, 76 bp, Artificial Sequence
  Description of Artificial Sequence: Synthetic peanut, 5' sequence +inner sequence + 3' sequence
tagggaagagaaggacatatgatggacgcagcgtaacgttcgagtggtacgtattgactagtacatgaccacttga

SEQ ID NO: 3221 - DNA, 77 bp, Artificial Sequence
  Description of Artificial Sequence: Synthetic peanut, 5' sequence +inner sequence + 3' sequence
tagggaagagaaggacatatgatgtgctgacgaaccctagcaagtgcatgcgtgttgactagtacatgaccacttga

SEQ ID NO: 3222 - DNA, 76 bp, Artificial Sequence
  Description of Artificial Sequence: Synthetic peanut, 5' sequence +inner sequence + 3' sequence
tagggaagagaaggacatatgatcgcaacgcagggcatggttgtcgtgtcgtattgactagtacatgaccacttga

SEQ ID NO: 3223 - DNA, 76 bp, Artificial Sequence
  Description of Artificial Sequence: Synthetic peanut, 5' sequence +inner sequence + 3' sequence
tagggaagagaaggacatatgatcgcaccgtcgatacgtaatgcacgctgacattgactagtacatgaccacttga

SEQ ID NO: 3224 - DNA, 76 bp, Artificial Sequence
  Description of Artificial Sequence: Synthetic peanut, 5' sequence +inner sequence + 3' sequence
tagggaagagaaggacatatgatcgtgacgtcgaaagggtgatcgtgcgcatgttgactagtacatgaccacttga

SEQ ID NO: 3225 - DNA, 76 bp, Artificial Sequence
  Description of Artificial Sequence: Synthetic peanut, 5' sequence +inner sequence + 3' sequence
tagggaagagaaggacatatgatcacgcagtggacgtacgtgtcgtaggcatgttgactagtacatgaccacttga

SEQ ID NO: 3226 - DNA, 76 bp, Artificial Sequence
  Description of Artificial Sequence: Synthetic peanut, 5' sequence +inner sequence + 3' sequence
tagggaagagaaggacatatgatcgcaccgtatgaggagtgtgtctgtgcgcgttgactagtacatgaccacttga

SEQ ID NO: 3227 - DNA, 76 bp, Artificial Sequence
  Description of Artificial Sequence: Synthetic peanut, 5' sequence +inner sequence + 3' sequence
tagggaagagaaggacatatgatccgtagcgacatcaatcggtggtgtgcgtgttgactagtacatgaccacttga

SEQ ID NO: 3228 - DNA, 76 bp, Artificial Sequence
  Description of Artificial Sequence: Synthetic peanut, 5' sequence +inner sequence + 3' sequence
tagggaagagaaggacatatgatacgtagcgacatcaagcggtggtgtgcgtgttgactagtacatgaccacttga

SEQ ID NO: 3229 - DNA, 76 bp, Artificial Sequence
  Description of Artificial Sequence: Synthetic peanut, 5' sequence +inner sequence + 3' sequence
tagggaagagaaggacatatgatcgtaccgcaagtgcatcgtgctgggcagcattgactagtacatgaccacttga

SEQ ID NO: 3230 - DNA, 76 bp, Artificial Sequence
  Description of Artificial Sequence: Synthetic peanut, 5' sequence +inner sequence + 3' sequence
tagggaagagaaggacatatgatgtgctcgcaagacctacacgtggacgtggattgactagtacatgaccacttga

SEQ ID NO: 3231 - DNA, 76 bp, Artificial Sequence
  Description of Artificial Sequence: Synthetic peanut, 5' sequence +inner sequence + 3' sequence
tagggaagagaaggacatatgatcgcaccgtcgatacgtcatgcacgctgtcattgactagtacatgaccacttga

SEQ ID NO: 3232 - DNA, 76 bp, Artificial Sequence
  Description of Artificial Sequence: Synthetic peanut, 5' sequence +inner sequence + 3' sequence
tagggaagagaaggacatatgatccgtagcgacatcaagcggaggtgtgcgtgttgactagtacatgaccacttga

SEQ ID NO: 3233 - DNA, 76 bp, Artificial Sequence
  Description of Artificial Sequence: Synthetic peanut, 5' sequence +inner sequence + 3' sequence
tagggaagagaaggacatatgatgacgacgatggcaaggggtgcacgtgctgtttgactagtacatgaccacttga

SEQ ID NO: 3234 - DNA, 76 bp, Artificial Sequence
  Description of Artificial Sequence: Synthetic peanut, 5' sequence +inner sequence + 3' sequence
tagggaagagaaggacatatgatcatgcacaacggcagaacggcttgatcgcgttgactagtacatgaccacttga

SEQ ID NO: 3235 - DNA, 76 bp, Artificial Sequence
  Description of Artificial Sequence: Synthetic peanut, 5' sequence +inner sequence + 3' sequence
tagggaagagaaggacatatgatcgtgtggcacaagcagggatgatatgcgcattgactagtacatgaccacttga

SEQ ID NO: 3236 - DNA, 76 bp, Artificial Sequence
  Description of Artificial Sequence: Synthetic peanut, 5' sequence +inner sequence + 3' sequence
tagggaagagaaggacatatgatcgcaccgtctatacgtcatgcacgctgacattgactagtacatgaccacttga

SEQ ID NO: 3237 - DNA, 76 bp, Artificial Sequence
  Description of Artificial Sequence: Synthetic peanut, 5' sequence +inner sequence + 3' sequence
tagggaagagaaggacatatgatgcatcggtccgagcgtaacgagcagtgggattgactagtacatgaccacttga

SEQ ID NO: 3238 - DNA, 76 bp, Artificial Sequence
  Description of Artificial Sequence: Synthetic peanut, 5' sequence +inner sequence + 3' sequence
tagggaagagaaggacatatgatggcatgcgatggatgtggtgtacccagtccttgactagtacatgaccacttga

SEQ ID NO: 3239 - DNA, 76 bp, Artificial Sequence
  Description of Artificial Sequence: Synthetic peanut, 5' sequence +inner sequence + 3' sequence
tagggaagagaaggacatatgatgcactgatcgatacctgagtggcgtacgtgttgactagtacatgaccacttga

SEQ ID NO: 3240 - DNA, 76 bp, Artificial Sequence
  Description of Artificial Sequence: Synthetic peanut, 5' sequence +inner sequence + 3' sequence
tagggaagagaaggacatatgatggcattgcgcgcctagcaagttgacgtgtattgactagtacatgaccacttga

SEQ ID NO: 3241 - DNA, 74 bp, Artificial Sequence
  Description of Artificial Sequence: Synthetic peanut, 5' sequence +inner sequence + 3' sequence
tagggaagagaaggacatatgatggacgcaacgtaccgtatcgtggccatgttgactagtacatgaccacttga

SEQ ID NO: 3242 - DNA, 76 bp, Artificial Sequence
  Description of Artificial Sequence: Synthetic peanut, 5' sequence +inner sequence + 3' sequence
tagggaagagaaggacatatgatcgcaccgtcgatacgtcatgcacgcttacattgactagtacatgaccacttga

SEQ ID NO: 3243 - DNA, 76 bp, Artificial Sequence
  Description of Artificial Sequence: Synthetic peanut, 5' sequence +inner sequence + 3' sequence
tagggaagagaaggacatatgatggacgactcgcaccctatcatgaggccatgttgactagtacatgaccacttga

SEQ ID NO: 3244 - DNA, 76 bp, Artificial Sequence
  Description of Artificial Sequence: Synthetic peanut, 5' sequence +inner sequence + 3' sequence
tagggaagagaaggacatatgatccgtagcgacatcaagcggtggtttgcgtgttgactagtacatgaccacttga

SEQ ID NO: 3245 - DNA, 76 bp, Artificial Sequence
  Description of Artificial Sequence: Synthetic peanut, 5' sequence +inner sequence + 3' sequence
tagggaagagaaggacatatgatggcactgaacgcacgacctacacgtggacattgactagtacatgaccacttga

SEQ ID NO: 3246 - DNA, 76 bp, Artificial Sequence
  Description of Artificial Sequence: Synthetic peanut, 5' sequence +inner sequence + 3' sequence
tagggaagagaaggacatatgatcgcaccgtcgatacgtcatgcacgctgaccttgactagtacatgaccacttga

SEQ ID NO: 3247 - DNA, 76 bp, Artificial Sequence
  Description of Artificial Sequence: Synthetic peanut, 5' sequence +inner sequence + 3' sequence
tagggaagagaaggacatatgatggacggaacgcagcgtcaagtcggtgcatgttgactagtacatgaccacttga

SEQ ID NO: 3248 - DNA, 76 bp, Artificial Sequence
  Description of Artificial Sequence: Synthetic peanut, 5' sequence +inner sequence + 3' sequence
tagggaagagaaggacatatgatggcaccgtcgatacgtcatgcacgctgacattgactagtacatgaccacttga

SEQ ID NO: 3249 - DNA, 76 bp, Artificial Sequence
  Description of Artificial Sequence: Synthetic peanut, 5' sequence +inner sequence + 3' sequence
tagggaagagaaggacatatgatcgtgtgcggcgaggaacggtgtgttgcgtgttgactagtacatgaccacttga

SEQ ID NO: 3250 - DNA, 77 bp, Artificial Sequence
  Description of Artificial Sequence: Synthetic peanut, 5' sequence +inner sequence + 3' sequence
tagggaagagaaggacatatgatggacgcatcgccccttcgagtgtgacaggtattgactagtacatgaccacttga

SEQ ID NO: 3251 - DNA, 75 bp, Artificial Sequence
  Description of Artificial Sequence: Synthetic peanut, 5' sequence +inner sequence + 3' sequence
tagggaagagaaggacatatgatgtcatgccatcccttcgagtggacaggtattgactagtacatgaccacttga

SEQ ID NO: 3252 - DNA, 76 bp, Artificial Sequence
  Description of Artificial Sequence: Synthetic peanut, 5' sequence +inner sequence + 3' sequence
tagggaagagaaggacatatgatgcgtagcgagaatggtcaagtgtgtgcgtgttgactagtacatgaccacttga

SEQ ID NO: 3253 - DNA, 76 bp, Artificial Sequence
  Description of Artificial Sequence: Synthetic peanut, 5' sequence +inner sequence + 3' sequence
tagggaagagaaggacatatgatacattggcatgccttacctacacgtggccattgactagtacatgaccacttga

SEQ ID NO: 3254 - DNA, 76 bp, Artificial Sequence
  Description of Artificial Sequence: Synthetic peanut, 5' sequence +inner sequence + 3' sequence
tagggaagagaaggacatatgatcatgcgtgaacgtagctatcatgtggcgcattgactagtacatgaccacttga

SEQ ID NO: 3255 - DNA, 76 bp, Artificial Sequence
  Description of Artificial Sequence: Synthetic peanut, 5' sequence +inner sequence + 3' sequence
tagggaagagaaggacatatgatcgacacgcagtttgagcccgacgatgcacgttgactagtacatgaccacttga

SEQ ID NO: 3256 - DNA, 76 bp, Artificial Sequence
  Description of Artificial Sequence: Synthetic peanut, 5' sequence +inner sequence + 3' sequence
tagggaagagaaggacatatgatcgcaccgtcgctacgtcatgcacgctgacattgactagtacatgaccacttga

SEQ ID NO: 3257 - DNA, 76 bp, Artificial Sequence
  Description of Artificial Sequence: Synthetic peanut, 5' sequence +inner sequence + 3' sequence
tagggaagagaaggacatatgatggccgaacgaccgatcgagtggcgcatggattgactagtacatgaccacttga

SEQ ID NO: 3258 - DNA, 77 bp, Artificial Sequence
  Description of Artificial Sequence: Synthetic peanut, 5' sequence +inner sequence + 3' sequence
tagggaagagaaggacatatgatggcatgcgatggatggggtcagcacgttggcttgactagtacatgaccacttga

SEQ ID NO: 3259 - DNA, 75 bp, Artificial Sequence
  Description of Artificial Sequence: Synthetic peanut, 5' sequence +inner sequence + 3' sequence
tagggaagagaaggacatatgatcgaccagcgcaagtaagtggcgtgatgcattgactagtacatgaccacttga

SEQ ID NO: 3260 - DNA, 76 bp, Artificial Sequence
  Description of Artificial Sequence: Synthetic peanut, 5' sequence +inner sequence + 3' sequence
tagggaagagaaggacatatgatgtgcatcgatggcgtatgctggtgatgtgcttgactagtacatgaccacttga

SEQ ID NO: 3261 - DNA, 76 bp, Artificial Sequence
  Description of Artificial Sequence: Synthetic peanut, 5' sequence +inner sequence + 3' sequence
tagggaagagaaggacatatgatcgtagcgcagaaggacacatggactgcacgttgactagtacatgaccacttga

SEQ ID NO: 3262 - DNA, 76 bp, Artificial Sequence
  Description of Artificial Sequence: Synthetic peanut, 5' sequence +inner sequence + 3' sequence
tagggaagagaaggacatatgatccgcgcgcatcccttcacagtggtgatgcattgactagtacatgaccacttga

SEQ ID NO: 3263 - DNA, 76 bp, Artificial Sequence
  Description of Artificial Sequence: Synthetic peanut, 5' sequence +inner sequence + 3' sequence
tagggaagagaaggacatatgatcgcaccgtcgatacgtcacgcacgctgacattgactagtacatgaccacttga

SEQ ID NO: 3264 - DNA, 76 bp, Artificial Sequence
  Description of Artificial Sequence: Synthetic peanut, 5' sequence +inner sequence + 3' sequence
tagggaagagaaggacatatgatgtgccaaacgaccaaagcgggcagtgcgtattgactagtacatgaccacttga

SEQ ID NO: 3265 - DNA, 76 bp, Artificial Sequence
  Description of Artificial Sequence: Synthetic peanut, 5' sequence +inner sequence + 3' sequence
tagggaagagaaggacatatgatggcatgcgatggatgtgtgcgtgtattagcttgactagtacatgaccacttga

SEQ ID NO: 3266 - DNA, 76 bp, Artificial Sequence
  Description of Artificial Sequence: Synthetic peanut, 5' sequence +inner sequence + 3' sequence
tagggaagagaaggacatatgatgtgctgcatgagcggtgtgcgtgtacgacgttgactagtacatgaccacttga

SEQ ID NO: 3267 - DNA, 76 bp, Artificial Sequence
  Description of Artificial Sequence: Synthetic peanut, 5' sequence +inner sequence + 3' sequence
tagggaagagaaggacatatgatcgcaccgtcgatccgtcatgcacgctgacattgactagtacatgaccacttga

SEQ ID NO: 3268 - DNA, 76 bp, Artificial Sequence
  Description of Artificial Sequence: Synthetic peanut, 5' sequence +inner sequence + 3' sequence
tagggaagagaaggacatatgatcgacacgtaccaagcgggacaatgtgcagtttgactagtacatgaccacttga

SEQ ID NO: 3269 - DNA, 76 bp, Artificial Sequence
  Description of Artificial Sequence: Synthetic peanut, 5' sequence +inner sequence + 3' sequence
tagggaagagaaggacatatgatcgaacacgaacagtggatggacgcgtcacgttgactagtacatgaccacttga

SEQ ID NO: 3270 - DNA, 76 bp, Artificial Sequence
  Description of Artificial Sequence: Synthetic peanut, 5' sequence +inner sequence + 3' sequence
tagggaagagaaggacatatgatgtgcgcggcttgccttcacgtgatcgtgtattgactagtacatgaccacttga

SEQ ID NO: 3271 - DNA, 76 bp, Artificial Sequence
  Description of Artificial Sequence: Synthetic peanut, 5' sequence +inner sequence + 3' sequence
tagggaagagaaggacatatgatggactgacgagccgttcatgtggttgtggattgactagtacatgaccacttga

SEQ ID NO: 3272 - DNA, 76 bp, Artificial Sequence
  Description of Artificial Sequence: Synthetic peanut, 5' sequence +inner sequence + 3' sequence
tagggaagagaaggacatatgatccgtagcgacatcaagaggtggtgtgcgtgttgactagtacatgaccacttga

SEQ ID NO: 3273 - DNA, 76 bp, Artificial Sequence
  Description of Artificial Sequence: Synthetic peanut, 5' sequence +inner sequence + 3' sequence
tagggaagagaaggacatatgatgtacgacgcggaccttcaagtaggcgtgtattgactagtacatgaccacttga

SEQ ID NO: 3274 - DNA, 76 bp, Artificial Sequence
  Description of Artificial Sequence: Synthetic peanut, 5' sequence +inner sequence + 3' sequence
tagggaagagaaggacatatgatcgcaccgtcgatacgtcatgtacgctgacattgactagtacatgaccacttga

SEQ ID NO: 3275 - DNA, 76 bp, Artificial Sequence
  Description of Artificial Sequence: Synthetic peanut, 5' sequence +inner sequence + 3' sequence
tagggaagagaaggacatatgatcatggccacgacgcatcaggacatgacgcattgactagtacatgaccacttga

SEQ ID NO: 3276 - DNA, 76 bp, Artificial Sequence
  Description of Artificial Sequence: Synthetic peanut, 5' sequence +inner sequence + 3' sequence
tagggaagagaaggacatatgatggcaggcaggacggcgtacagtacgacacattgactagtacatgaccacttga

SEQ ID NO: 3277 - DNA, 76 bp, Artificial Sequence
  Description of Artificial Sequence: Synthetic peanut, 5' sequence +inner sequence + 3' sequence
tagggaagagaaggacatatgatcgcaccgtcgatacgtcatgcatgctgacattgactagtacatgaccacttga

SEQ ID NO: 3278 - DNA, 76 bp, Artificial Sequence
  Description of Artificial Sequence: Synthetic peanut, 5' sequence +inner sequence + 3' sequence
tagggaagagaaggacatatgatcatgcgcaagtcgaagcatcgtcacacgtgttgactagtacatgaccacttga

SEQ ID NO: 3279 - DNA, 76 bp, Artificial Sequence
  Description of Artificial Sequence: Synthetic peanut, 5' sequence +inner sequence + 3' sequence
tagggaagagaaggacatatgatggacacagcgtacctcaacgtggacgtgcattgactagtacatgaccacttga

SEQ ID NO: 3280 - DNA, 76 bp, Artificial Sequence
  Description of Artificial Sequence: Synthetic peanut, 5' sequence +inner sequence + 3' sequence
tagggaagagaaggacatatgatgtcgccacggacctgtcatggatgggcacattgactagtacatgaccacttga

SEQ ID NO: 3281 - DNA, 76 bp, Artificial Sequence
  Description of Artificial Sequence: Synthetic peanut, 5' sequence +inner sequence + 3' sequence
tagggaagagaaggacatatgatgccacgtcgtcacgcagcatgtacggcacattgactagtacatgaccacttga

SEQ ID NO: 3282 - DNA, 76 bp, Artificial Sequence
  Description of Artificial Sequence: Synthetic peanut, 5' sequence +inner sequence + 3' sequence
tagggaagagaaggacatatgatgcacatggccaactcgaccacatgtgagcattgactagtacatgaccacttga

SEQ ID NO: 3283 - DNA, 76 bp, Artificial Sequence
  Description of Artificial Sequence: Synthetic peanut, 5' sequence +inner sequence + 3' sequence
tagggaagagaaggacatatgatccgtagcgacatcaagcggtggggtgcgtgttgactagtacatgaccacttga

SEQ ID NO: 3284 - DNA, 76 bp, Artificial Sequence
  Description of Artificial Sequence: Synthetic peanut, 5' sequence +inner sequence + 3' sequence
tagggaagagaaggacatatgatcctgcgatgggtgtgggggtgcactgcgtcttgactagtacatgaccacttga

SEQ ID NO: 3285 - DNA, 76 bp, Artificial Sequence
  Description of Artificial Sequence: Synthetic peanut, 5' sequence +inner sequence + 3' sequence
tagggaagagaaggacatatgatcacatggcctgcgtaccgacacgtggttcgttgactagtacatgaccacttga

SEQ ID NO: 3286 - DNA, 76 bp, Artificial Sequence
  Description of Artificial Sequence: Synthetic peanut, 5' sequence +inner sequence + 3' sequence
tagggaagagaaggacatatgatgtgctgagctgggagtggtggtgctttggcttgactagtacatgaccacttga

SEQ ID NO: 3287 - DNA, 76 bp, Artificial Sequence
  Description of Artificial Sequence: Synthetic peanut, 5' sequence +inner sequence + 3' sequence
tagggaagagaaggacatatgattggacggcgcgatcacgttcatgcggttcattgactagtacatgaccacttga

SEQ ID NO: 3288 - DNA, 76 bp, Artificial Sequence
  Description of Artificial Sequence: Synthetic peanut, 5' sequence +inner sequence + 3' sequence
tagggaagagaaggacatatgatggacgagcggaacgatcgagtggttgcgtattgactagtacatgaccacttga

SEQ ID NO: 3289 - DNA, 76 bp, Artificial Sequence
  Description of Artificial Sequence: Synthetic peanut, 5' sequence +inner sequence + 3' sequence
tagggaagagaaggacatatgatctcaccgtcgatacgtcatgcacgctgacattgactagtacatgaccacttga

SEQ ID NO: 3290 - DNA, 76 bp, Artificial Sequence
  Description of Artificial Sequence: Synthetic peanut, 5' sequence +inner sequence + 3' sequence
tagggaagagaaggacatatgatcgtgccgacgatgacctatcgatgtggacattgactagtacatgaccacttga

SEQ ID NO: 3291 - DNA, 76 bp, Artificial Sequence
  Description of Artificial Sequence: Synthetic peanut, 5' sequence +inner sequence + 3' sequence
tagggaagagaaggacatatgatcgcaccgtcgatacgtcatgaacgctgacattgactagtacatgaccacttga

SEQ ID NO: 3292 - DNA, 76 bp, Artificial Sequence
  Description of Artificial Sequence: Synthetic peanut, 5' sequence +inner sequence + 3' sequence
tagggaagagaaggacatatgatcgcacagtcgatacgtcatgcacgctgacattgactagtacatgaccacttga

SEQ ID NO: 3293 - DNA, 76 bp, Artificial Sequence
  Description of Artificial Sequence: Synthetic peanut, 5' sequence +inner sequence + 3' sequence
tagggaagagaaggacatatgatgtgctgcacggacatatcacgtggcatggattgactagtacatgaccacttga

SEQ ID NO: 3294 - DNA, 76 bp, Artificial Sequence
  Description of Artificial Sequence: Synthetic peanut, 5' sequence +inner sequence + 3' sequence
tagggaagagaaggacatatgatgcgcacgtagccctatcagtggtgcatgcattgactagtacatgaccacttga

SEQ ID NO: 3295 - DNA, 76 bp, Artificial Sequence
  Description of Artificial Sequence: Synthetic peanut, 5' sequence +inner sequence + 3' sequence
tagggaagagaaggacatatgatcacgcacgcatacaacggcaccatggcgtgttgactagtacatgaccacttga

SEQ ID NO: 3296 - DNA, 76 bp, Artificial Sequence
  Description of Artificial Sequence: Synthetic peanut, 5' sequence +inner sequence + 3' sequence
tagggaagagaaggacatatgatgcgcaagcagaggatgcatgctcttgccgtttgactagtacatgaccacttga

SEQ ID NO: 3297 - DNA, 76 bp, Artificial Sequence
  Description of Artificial Sequence: Synthetic peanut, 5' sequence +inner sequence + 3' sequence
tagggaagagaaggacatatgatcgaccaaaccgatgggcatacacgtgcacattgactagtacatgaccacttga

SEQ ID NO: 3298 - DNA, 76 bp, Artificial Sequence
  Description of Artificial Sequence: Synthetic peanut, 5' sequence +inner sequence + 3' sequence
tagggaagagaaggacatatgatgcatcatgcgtcctctgccactgtgtgtcattgactagtacatgaccacttga

SEQ ID NO: 3299 - DNA, 76 bp, Artificial Sequence
  Description of Artificial Sequence: Synthetic peanut, 5' sequence +inner sequence + 3' sequence
tagggaagagaaggacatatgattggccgatgcgtcccttcaatgtgtgcatgttgactagtacatgaccacttga

SEQ ID NO: 3300 - DNA, 76 bp, Artificial Sequence
  Description of Artificial Sequence: Synthetic peanut, 5' sequence +inner sequence + 3' sequence
tagggaagagaaggacatatgattggcgtgcacgaaacgcatcgacatgcacattgactagtacatgaccacttga

SEQ ID NO: 3301 - DNA, 76 bp, Artificial Sequence
  Description of Artificial Sequence: Synthetic peanut, 5' sequence +inner sequence + 3' sequence
tagggaagagaaggacatatgatcacatagggcacgaatctgggtgtgcgtcattgactagtacatgaccacttga

SEQ ID NO: 3302 - DNA, 76 bp, Artificial Sequence
  Description of Artificial Sequence: Synthetic peanut, 5' sequence +inner sequence + 3' sequence
tagggaagagaaggacatatgatcgacaccagagtgcatgcctgtacgacacgttgactagtacatgaccacttga

SEQ ID NO: 3303 - DNA, 76 bp, Artificial Sequence
  Description of Artificial Sequence: Synthetic peanut, 5' sequence +inner sequence + 3' sequence
tagggaagagaaggacatatgatgtcattccgcatcctacacgtgtgcacgtattgactagtacatgaccacttga

SEQ ID NO: 3304 - DNA, 76 bp, Artificial Sequence
  Description of Artificial Sequence: Synthetic peanut, 5' sequence +inner sequence + 3' sequence
tagggaagagaaggacatatgatccattgggcattacgtgcgctcacttcgcgttgactagtacatgaccacttga

SEQ ID NO: 3305 - DNA, 76 bp, Artificial Sequence
  Description of Artificial Sequence: Synthetic peanut, 5' sequence +inner sequence + 3' sequence
tagggaagagaaggacatatgatgtacgtatcggcccggtcaagttcggcatgttgactagtacatgaccacttga

SEQ ID NO: 3306 - DNA, 76 bp, Artificial Sequence
  Description of Artificial Sequence: Synthetic peanut, 5' sequence +inner sequence + 3' sequence
tagggaagagaaggacatatgatcgaccgatacgcgcatagtgtgtgtggacattgactagtacatgaccacttga

SEQ ID NO: 3307 - DNA, 76 bp, Artificial Sequence
  Description of Artificial Sequence: Synthetic peanut, 5' sequence +inner sequence + 3' sequence
tagggaagagaaggacatatgatcgatgcacaagcaatgggcctaacgacacgttgactagtacatgaccacttga

SEQ ID NO: 3308 - DNA, 76 bp, Artificial Sequence
  Description of Artificial Sequence: Synthetic peanut, 5' sequence +inner sequence + 3' sequence
tagggaagagaaggacatatgattggccaagcgacctagcaagtgtgctcatgttgactagtacatgaccacttga

SEQ ID NO: 3309 - DNA, 76 bp, Artificial Sequence
  Description of Artificial Sequence: Synthetic peanut, 5' sequence +inner sequence + 3' sequence
tagggaagagaaggacatatgatcacgcagtgacattgcaggcagagtgcgtcttgactagtacatgaccacttga

SEQ ID NO: 3310 - DNA, 76 bp, Artificial Sequence
  Description of Artificial Sequence: Synthetic peanut, 5' sequence +inner sequence + 3' sequence
tagggaagagaaggacatatgatggcatgcacgcacctacacgtgggaatggattgactagtacatgaccacttga

SEQ ID NO: 3311 - DNA, 76 bp, Artificial Sequence
  Description of Artificial Sequence: Synthetic peanut, 5' sequence +inner sequence + 3' sequence
tagggaagagaaggacatatgatgtgctgcctgacccacgtggacttgcactattgactagtacatgaccacttga

SEQ ID NO: 3312 - DNA, 76 bp, Artificial Sequence
  Description of Artificial Sequence: Synthetic peanut, 5' sequence +inner sequence + 3' sequence
tagggaagagaaggacatatgatggccgaaacgcagcctagcgagtgtcgtcattgactagtacatgaccacttga

SEQ ID NO: 3313 - DNA, 76 bp, Artificial Sequence
  Description of Artificial Sequence: Synthetic peanut, 5' sequence +inner sequence + 3' sequence
tagggaagagaaggacatatgatcgcaccagacaagcacgtcacggcgacacgttgactagtacatgaccacttga

SEQ ID NO: 3314 - DNA, 76 bp, Artificial Sequence
  Description of Artificial Sequence: Synthetic peanut, 5' sequence +inner sequence + 3' sequence
tagggaagagaaggacatatgatgcatacgtacgccacgacacgatctggccattgactagtacatgaccacttga

SEQ ID NO: 3315 - DNA, 76 bp, Artificial Sequence
  Description of Artificial Sequence: Synthetic peanut, 5' sequence +inner sequence + 3' sequence
tagggaagagaaggacatatgatcgcaccgcatgacgtgaatggtgaggtatgttgactagtacatgaccacttga

SEQ ID NO: 3316 - DNA, 76 bp, Artificial Sequence
  Description of Artificial Sequence: Synthetic peanut, 5' sequence +inner sequence + 3' sequence
tagggaagagaaggacatatgatggcatgcgatggaatgtgcgaatgtacgcattgactagtacatgaccacttga

SEQ ID NO: 3317 - DNA, 76 bp, Artificial Sequence
  Description of Artificial Sequence: Synthetic peanut, 5' sequence +inner sequence + 3' sequence
tagggaagagaaggacatatgatcgcaccgtcgatacgtcatgcacgttgacattgactagtacatgaccacttga

SEQ ID NO: 3318 - DNA, 76 bp, Artificial Sequence
  Description of Artificial Sequence: Synthetic peanut, 5' sequence +inner sequence + 3' sequence
tagggaagagaaggacatatgatccgcactgacctgacgtggtagtgtcgacgttgactagtacatgaccacttga

SEQ ID NO: 3319 - DNA, 76 bp, Artificial Sequence
  Description of Artificial Sequence: Synthetic peanut, 5' sequence +inner sequence + 3' sequence
tagggaagagaaggacatatgatgcatggcaagaacgcactgtgttgtggccattgactagtacatgaccacttga

SEQ ID NO: 3320 - DNA, 76 bp, Artificial Sequence
  Description of Artificial Sequence: Synthetic peanut, 5' sequence +inner sequence + 3' sequence
tagggaagagaaggacatatgatgtcattccgcatcctacacgttggcacgtattgactagtacatgaccacttga

SEQ ID NO: 3321 - DNA, 76 bp, Artificial Sequence
  Description of Artificial Sequence: Synthetic peanut, 5' sequence +inner sequence + 3' sequence
tagggaagagaaggacatatgatggcctgcgatgaacgaggcatgatgcgtcattgactagtacatgaccacttga

SEQ ID NO: 3322 - DNA, 76 bp, Artificial Sequence
  Description of Artificial Sequence: Synthetic peanut, 5' sequence +inner sequence + 3' sequence
tagggaagagaaggacatatgatgcacgccgatggatgaggtcagtgtgctgtttgactagtacatgaccacttga

SEQ ID NO: 3323 - DNA, 76 bp, Artificial Sequence
  Description of Artificial Sequence: Synthetic peanut, 5' sequence +inner sequence + 3' sequence
tagggaagagaaggacatatgatgcactgcacgcaccctatcatgaggccatgttgactagtacatgaccacttga

SEQ ID NO: 3324 - DNA, 76 bp, Artificial Sequence
  Description of Artificial Sequence: Synthetic peanut, 5' sequence +inner sequence + 3' sequence
tagggaagagaaggacatatgatccgtagcgacataaagcggtggtgtgcgtgttgactagtacatgaccacttga

SEQ ID NO: 3325 - DNA, 76 bp, Artificial Sequence
  Description of Artificial Sequence: Synthetic peanut, 5' sequence +inner sequence + 3' sequence
tagggaagagaaggacatatgatcacgcgacggtacgtgatgggtgaggcatattgactagtacatgaccacttga

SEQ ID NO: 3326 - DNA, 76 bp, Artificial Sequence
  Description of Artificial Sequence: Synthetic peanut, 5' sequence +inner sequence + 3' sequence
tagggaagagaaggacatatgatcgaaccgtcgatacgtcatgcacgctgacattgactagtacatgaccacttga

SEQ ID NO: 3327 - DNA, 76 bp, Artificial Sequence
  Description of Artificial Sequence: Synthetic peanut, 5' sequence +inner sequence + 3' sequence
tagggaagagaaggacatatgatgtgctgcgatggatgtgggttgtgctcgtcttgactagtacatgaccacttga

SEQ ID NO: 3328 - DNA, 76 bp, Artificial Sequence
  Description of Artificial Sequence: Synthetic peanut, 5' sequence +inner sequence + 3' sequence
tagggaagagaaggacatatgatgtcagtcgatggatgtgggttgtgctcgtcttgactagtacatgaccacttga

SEQ ID NO: 3329 - DNA, 76 bp, Artificial Sequence
  Description of Artificial Sequence: Synthetic peanut, 5' sequence +inner sequence + 3' sequence
tagggaagagaaggacatatgattgactgaacgtaacgtcgagcggttgtggattgactagtacatgaccacttga

SEQ ID NO: 3330 - DNA, 76 bp, Artificial Sequence
  Description of Artificial Sequence: Synthetic peanut, 5' sequence +inner sequence + 3' sequence
tagggaagagaaggacatatgatcgtgccaagcgtgtatcaggcatcgacacgttgactagtacatgaccacttga

SEQ ID NO: 3331 - DNA, 76 bp, Artificial Sequence
  Description of Artificial Sequence: Synthetic peanut, 5' sequence +inner sequence + 3' sequence
tagggaagagaaggacatatgatcgcaacgtcgatacgtcatgcacgctgacattgactagtacatgaccacttga

SEQ ID NO: 3332 - DNA, 76 bp, Artificial Sequence
  Description of Artificial Sequence: Synthetic peanut, 5' sequence +inner sequence + 3' sequence
tagggaagagaaggacatatgatcgcaccgtcgatacgtcctgcacgctgacattgactagtacatgaccacttga

SEQ ID NO: 3333 - DNA, 76 bp, Artificial Sequence
  Description of Artificial Sequence: Synthetic peanut, 5' sequence +inner sequence + 3' sequence
tagggaagagaaggacatatgatgcacatccagtgcaaccaatggcatgcgtgttgactagtacatgaccacttga

SEQ ID NO: 3334 - DNA, 75 bp, Artificial Sequence
  Description of Artificial Sequence: Synthetic peanut, 5' sequence +inner sequence + 3' sequence
tagggaagagaaggacatatgatggccgatcgaccctatcaagtgcagcatgttgactagtacatgaccacttga

SEQ ID NO: 3335 - DNA, 76 bp, Artificial Sequence
  Description of Artificial Sequence: Synthetic peanut, 5' sequence +inner sequence + 3' sequence
tagggaagagaaggacatatgatcacgtacaacagtgccgttcacagtgcgtgttgactagtacatgaccacttga

SEQ ID NO: 3336 - DNA, 76 bp, Artificial Sequence
  Description of Artificial Sequence: Synthetic peanut, 5' sequence +inner sequence + 3' sequence
tagggaagagaaggacatatgatcgtaccgggggagtgcgacatgacgacgtgttgactagtacatgaccacttga

SEQ ID NO: 3337 - DNA, 76 bp, Artificial Sequence
  Description of Artificial Sequence: Synthetic peanut, 5' sequence +inner sequence + 3' sequence
tagggaagagaaggacatatgatcgcaacacgtgacgcactttggtctacgcattgactagtacatgaccacttga

SEQ ID NO: 3338 - DNA, 76 bp, Artificial Sequence
  Description of Artificial Sequence: Synthetic peanut, 5' sequence +inner sequence + 3' sequence
tagggaagagaaggacatatgatcgtgtgcaggcaggcacaggcgtagtggcattgactagtacatgaccacttga

SEQ ID NO: 3339 - DNA, 76 bp, Artificial Sequence
  Description of Artificial Sequence: Synthetic peanut, 5' sequence +inner sequence + 3' sequence
tagggaagagaaggacatatgatcgacacgcgtaacgtctagtccgctgctgcttgactagtacatgaccacttga

SEQ ID NO: 3340 - DNA, 76 bp, Artificial Sequence
  Description of Artificial Sequence: Synthetic peanut, 5' sequence +inner sequence + 3' sequence
tagggaagagaaggacatatgatgtcattccgcatcctacacgtggtcacgtattgactagtacatgaccacttga

SEQ ID NO: 3341 - DNA, 76 bp, Artificial Sequence
  Description of Artificial Sequence: Synthetic peanut, 5' sequence +inner sequence + 3' sequence
tagggaagagaaggacatatgatccgtgagcgtacctacacgtgcggcttggattgactagtacatgaccacttga

SEQ ID NO: 3342 - DNA, 76 bp, Artificial Sequence
  Description of Artificial Sequence: Synthetic peanut, 5' sequence +inner sequence + 3' sequence
tagggaagagaaggacatatgatcacatgcgcattgccttcgttcactgcacattgactagtacatgaccacttga

SEQ ID NO: 3343 - DNA, 76 bp, Artificial Sequence
  Description of Artificial Sequence: Synthetic peanut, 5' sequence +inner sequence + 3' sequence
tagggaagagaaggacatatgatccgtagcgacctcaagcggtggtgtgcgtgttgactagtacatgaccacttga

SEQ ID NO: 3344 - DNA, 76 bp, Artificial Sequence
  Description of Artificial Sequence: Synthetic peanut, 5' sequence +inner sequence + 3' sequence
tagggaagagaaggacatatgatggacgcatcgtcccgtcatgtggttccgtattgactagtacatgaccacttga

SEQ ID NO: 3345 - DNA, 76 bp, Artificial Sequence
  Description of Artificial Sequence: Synthetic peanut, 5' sequence +inner sequence + 3' sequence
tagggaagagaaggacatatgattgcgcaaggacactgcacgtatgcctgccattgactagtacatgaccacttga

SEQ ID NO: 3346 - DNA, 76 bp, Artificial Sequence
  Description of Artificial Sequence: Synthetic peanut, 5' sequence +inner sequence + 3' sequence
tagggaagagaaggacatatgatgtcatgaaacgagcctacacgtggtgcatgttgactagtacatgaccacttga

SEQ ID NO: 3347 - DNA, 76 bp, Artificial Sequence
  Description of Artificial Sequence: Synthetic peanut, 5' sequence +inner sequence + 3' sequence
tagggaagagaaggacatatgatccgacgcatgaccgaacggggtgatgtgccttgactagtacatgaccacttga

SEQ ID NO: 3348 - DNA, 76 bp, Artificial Sequence
  Description of Artificial Sequence: Synthetic peanut, 5' sequence +inner sequence + 3' sequence
tagggaagagaaggacatatgatgtgctacgatggctgtgggcgtgatgcgtattgactagtacatgaccacttga

SEQ ID NO: 3349 - DNA, 76 bp, Artificial Sequence
  Description of Artificial Sequence: Synthetic peanut, 5' sequence +inner sequence + 3' sequence
tagggaagagaaggacatatgatgtcgtgcgtgccctatcaggtggttgtggattgactagtacatgaccacttga

SEQ ID NO: 3350 - DNA, 76 bp, Artificial Sequence
  Description of Artificial Sequence: Synthetic peanut, 5' sequence +inner sequence + 3' sequence
tagggaagagaaggacatatgatcgtagcgcaccaggacatgtcgtcggcatgttgactagtacatgaccacttga

SEQ ID NO: 3351 - DNA, 76 bp, Artificial Sequence
  Description of Artificial Sequence: Synthetic peanut, 5' sequence +inner sequence + 3' sequence
tagggaagagaaggacatatgatcgcaccttcgatacgtcatgcacgctgacattgactagtacatgaccacttga

SEQ ID NO: 3352 - DNA, 76 bp, Artificial Sequence
  Description of Artificial Sequence: Synthetic peanut, 5' sequence +inner sequence + 3' sequence
tagggaagagaaggacatatgatccgcagcgacatcaagcggtggtgtgcgtgttgactagtacatgaccacttga

SEQ ID NO: 3353 - DNA, 76 bp, Artificial Sequence
  Description of Artificial Sequence: Synthetic peanut, 5' sequence +inner sequence + 3' sequence
tagggaagagaaggacatatgatgggcaacacgcaggatgtgatgcatgcggattgactagtacatgaccacttga

SEQ ID NO: 3354 - DNA, 76 bp, Artificial Sequence
  Description of Artificial Sequence: Synthetic peanut, 5' sequence +inner sequence + 3' sequence
tagggaagagaaggacatatgatccgaacgcaccgtccaagttgccatgcgcgttgactagtacatgaccacttga

SEQ ID NO: 3355 - DNA, 76 bp, Artificial Sequence
  Description of Artificial Sequence: Synthetic peanut, 5' sequence +inner sequence + 3' sequence
tagggaagagaaggacatatgatggcatgaacgacctgggcatgcgtggtccattgactagtacatgaccacttga

SEQ ID NO: 3356 - DNA, 76 bp, Artificial Sequence
  Description of Artificial Sequence: Synthetic peanut, 5' sequence +inner sequence + 3' sequence
tagggaagagaaggacatatgatcgcacaaagggacgtggacgagcctacgtgttgactagtacatgaccacttga

SEQ ID NO: 3357 - DNA, 76 bp, Artificial Sequence
  Description of Artificial Sequence: Synthetic peanut, 5' sequence +inner sequence + 3' sequence
tagggaagagaaggacatatgatgcgatgacagacgcagctttgggatgcacgttgactagtacatgaccacttga

SEQ ID NO: 3358 - DNA, 76 bp, Artificial Sequence
  Description of Artificial Sequence: Synthetic peanut, 5' sequence +inner sequence + 3' sequence
tagggaagagaaggacatatgatccgtagcgacatcaagcggtggtgtgtgtgttgactagtacatgaccacttga

SEQ ID NO: 3359 - DNA, 76 bp, Artificial Sequence
  Description of Artificial Sequence: Synthetic peanut, 5' sequence +inner sequence + 3' sequence
tagggaagagaaggacatatgatgtcatgcgatgaacgaggcatgatgcgtcattgactagtacatgaccacttga

SEQ ID NO: 3360 - DNA, 76 bp, Artificial Sequence
  Description of Artificial Sequence: Synthetic peanut, 5' sequence +inner sequence + 3' sequence
tagggaagagaaggacatatgatgcacatcaggccgtatcgtgactcgtgggattgactagtacatgaccacttga

SEQ ID NO: 3361 - DNA, 76 bp, Artificial Sequence
  Description of Artificial Sequence: Synthetic peanut, 5' sequence +inner sequence + 3' sequence
tagggaagagaaggacatatgatcatacgccctgcctgcactatggccatgcattgactagtacatgaccacttga

SEQ ID NO: 3362 - DNA, 76 bp, Artificial Sequence
  Description of Artificial Sequence: Synthetic peanut, 5' sequence +inner sequence + 3' sequence
tagggaagagaaggacatatgatgtacgatgctgcccgacatgtggacgtggattgactagtacatgaccacttga

SEQ ID NO: 3363 - DNA, 76 bp, Artificial Sequence
  Description of Artificial Sequence: Synthetic peanut, 5' sequence +inner sequence + 3' sequence
tagggaagagaaggacatatgatgcaactggcacgcacaagcactgctgcgcattgactagtacatgaccacttga

SEQ ID NO: 3364 - DNA, 76 bp, Artificial Sequence
  Description of Artificial Sequence: Synthetic peanut, 5' sequence +inner sequence + 3' sequence
tagggaagagaaggacatatgatcggcacggaaacatgtaggcatgctcgacgttgactagtacatgaccacttga

SEQ ID NO: 3365 - DNA, 76 bp, Artificial Sequence
  Description of Artificial Sequence: Synthetic peanut, 5' sequence +inner sequence + 3' sequence
tagggaagagaaggacatatgatggacgcagcttgcctactggttgtcacgtattgactagtacatgaccacttga

SEQ ID NO: 3366 - DNA, 76 bp, Artificial Sequence
  Description of Artificial Sequence: Synthetic peanut, 5' sequence +inner sequence + 3' sequence
tagggaagagaaggacatatgatgacgtgccatcgtaagttcgacactgccgtttgactagtacatgaccacttga

SEQ ID NO: 3367 - DNA, 76 bp, Artificial Sequence
  Description of Artificial Sequence: Synthetic peanut, 5' sequence +inner sequence + 3' sequence
tagggaagagaaggacatatgatcgcaccgccgatacgtcatgcacgctgacattgactagtacatgaccacttga

SEQ ID NO: 3368 - DNA, 76 bp, Artificial Sequence
  Description of Artificial Sequence: Synthetic peanut, 5' sequence +inner sequence + 3' sequence
tagggaagagaaggacatatgatcacgcaccaagtaacacgcgtactgacgcattgactagtacatgaccacttga

SEQ ID NO: 3369 - DNA, 76 bp, Artificial Sequence
  Description of Artificial Sequence: Synthetic peanut, 5' sequence +inner sequence + 3' sequence
tagggaagagaaggacatatgatgtcatgccatcccttcgagtgtgacaggcattgactagtacatgaccacttga

SEQ ID NO: 3370 - DNA, 76 bp, Artificial Sequence
  Description of Artificial Sequence: Synthetic peanut, 5' sequence +inner sequence + 3' sequence
tagggaagagaaggacatatgatgttcgcgcgacacctatcaatgtggacgtgttgactagtacatgaccacttga

SEQ ID NO: 3371 - DNA, 76 bp, Artificial Sequence
  Description of Artificial Sequence: Synthetic peanut, 5' sequence +inner sequence + 3' sequence
tagggaagagaaggacatatgatggcgtgcggaccggtcagtcgtcatgcacattgactagtacatgaccacttga

SEQ ID NO: 3372 - DNA, 76 bp, Artificial Sequence
  Description of Artificial Sequence: Synthetic peanut, 5' sequence +inner sequence + 3' sequence
tagggaagagaaggacatatgatcatgtgcatggtacgtacacaatgcgcacgttgactagtacatgaccacttga

SEQ ID NO: 3373 - DNA, 76 bp, Artificial Sequence
  Description of Artificial Sequence: Synthetic peanut, 5' sequence +inner sequence + 3' sequence
tagggaagagaaggacatatgatgcacgtggtctgaccggctcggtgtgcatgttgactagtacatgaccacttga

SEQ ID NO: 3374 - DNA, 76 bp, Artificial Sequence
  Description of Artificial Sequence: Synthetic peanut, 5' sequence +inner sequence + 3' sequence
tagggaagagaaggacatatgatccgtgctcatccccaagtgtgccatggtgattgactagtacatgaccacttga

SEQ ID NO: 3375 - DNA, 76 bp, Artificial Sequence
  Description of Artificial Sequence: Synthetic peanut, 5' sequence +inner sequence + 3' sequence
tagggaagagaaggacatatgatgtcatgcacgaacactatcatggctgcatgttgactagtacatgaccacttga

SEQ ID NO: 3376 - DNA, 76 bp, Artificial Sequence
  Description of Artificial Sequence: Synthetic peanut, 5' sequence +inner sequence + 3' sequence
tagggaagagaaggacatatgatggacggaacggcactatcatgcggtgtgtattgactagtacatgaccacttga

SEQ ID NO: 3377 - DNA, 76 bp, Artificial Sequence
  Description of Artificial Sequence: Synthetic peanut, 5' sequence +inner sequence + 3' sequence
tagggaagagaaggacatatgataatgcggcatgaacggacctacacgtgggcttgactagtacatgaccacttga

SEQ ID NO: 3378 - DNA, 76 bp, Artificial Sequence
  Description of Artificial Sequence: Synthetic peanut, 5' sequence +inner sequence + 3' sequence
tagggaagagaaggacatatgatcgtgcacaagtcggaccacgttgctgctcattgactagtacatgaccacttga

SEQ ID NO: 3379 - DNA, 76 bp, Artificial Sequence
  Description of Artificial Sequence: Synthetic peanut, 5' sequence +inner sequence + 3' sequence
tagggaagagaaggacatatgatgtactgcacgcaccctatcatgtaggcatgttgactagtacatgaccacttga

SEQ ID NO: 3380 - DNA, 76 bp, Artificial Sequence
  Description of Artificial Sequence: Synthetic peanut, 5' sequence +inner sequence + 3' sequence
tagggaagagaaggacatatgatcggaccgtcgatacgtcatgcacgctgacattgactagtacatgaccacttga

SEQ ID NO: 3381 - DNA, 76 bp, Artificial Sequence
  Description of Artificial Sequence: Synthetic peanut, 5' sequence +inner sequence + 3' sequence
tagggaagagaaggacatatgatcgtgacgcaacgtgtgcaatgttgtacgcattgactagtacatgaccacttga

SEQ ID NO: 3382 - DNA, 76 bp, Artificial Sequence
  Description of Artificial Sequence: Synthetic peanut, 5' sequence +inner sequence + 3' sequence
tagggaagagaaggacatatgatcgcagcaactgcaacggtatgcactgcgtgttgactagtacatgaccacttga

SEQ ID NO: 3383 - DNA, 76 bp, Artificial Sequence
  Description of Artificial Sequence: Synthetic peanut, 5' sequence +inner sequence + 3' sequence
tagggaagagaaggacatatgatgtgcgaccgaccctatcaggtgctcatgtattgactagtacatgaccacttga

SEQ ID NO: 3384 - DNA, 76 bp, Artificial Sequence
  Description of Artificial Sequence: Synthetic peanut, 5' sequence +inner sequence + 3' sequence
tagggaagagaaggacatatgatcatgcgacacggtgataggatgcatgcacattgactagtacatgaccacttga

SEQ ID NO: 3385 - DNA, 76 bp, Artificial Sequence
  Description of Artificial Sequence: Synthetic peanut, 5' sequence +inner sequence + 3' sequence
tagggaagagaaggacatatgatcgaccgaggacgtggtgtgtgggctgcgcattgactagtacatgaccacttga

SEQ ID NO: 3386 - DNA, 76 bp, Artificial Sequence
  Description of Artificial Sequence: Synthetic peanut, 5' sequence +inner sequence + 3' sequence
tagggaagagaaggacatatgatacgcacgtagccctatcagtggtgcatgcattgactagtacatgaccacttga

SEQ ID NO: 3387 - DNA, 76 bp, Artificial Sequence
  Description of Artificial Sequence: Synthetic peanut, 5' sequence +inner sequence + 3' sequence
tagggaagagaaggacatatgatccgtctgaccgatgtggtgcatgtggcaggttgactagtacatgaccacttga

SEQ ID NO: 3388 - DNA, 76 bp, Artificial Sequence
  Description of Artificial Sequence: Synthetic peanut, 5' sequence +inner sequence + 3' sequence
tagggaagagaaggacatatgatccgtgcacgtggagcaaggactgtgtggcattgactagtacatgaccacttga

SEQ ID NO: 3389 - DNA, 76 bp, Artificial Sequence
  Description of Artificial Sequence: Synthetic peanut, 5' sequence +inner sequence + 3' sequence
tagggaagagaaggacatatgatccgaacgaaccgcacgtggactgagcgacgttgactagtacatgaccacttga

SEQ ID NO: 3390 - DNA, 76 bp, Artificial Sequence
  Description of Artificial Sequence: Synthetic peanut, 5' sequence +inner sequence + 3' sequence
tagggaagagaaggacatatgatgcaccgatagctcgtaccgtcacgtggccattgactagtacatgaccacttga

SEQ ID NO: 3391 - DNA, 76 bp, Artificial Sequence
  Description of Artificial Sequence: Synthetic peanut, 5' sequence +inner sequence + 3' sequence
tagggaagagaaggacatatgatccacacggaccgaaactgcactgttgggcgttgactagtacatgaccacttga

SEQ ID NO: 3392 - DNA, 76 bp, Artificial Sequence
  Description of Artificial Sequence: Synthetic peanut, 5' sequence +inner sequence + 3' sequence
tagggaagagaaggacatatgatcgtaccgtcaaggcaggcatggttgggcaattgactagtacatgaccacttga

SEQ ID NO: 3393 - DNA, 76 bp, Artificial Sequence
  Description of Artificial Sequence: Synthetic peanut, 5' sequence +inner sequence + 3' sequence
tagggaagagaaggacatatgatggacgaacgtaacgatgggggcagtacgcattgactagtacatgaccacttga

SEQ ID NO: 3394 - DNA, 76 bp, Artificial Sequence
  Description of Artificial Sequence: Synthetic peanut, 5' sequence +inner sequence + 3' sequence
tagggaagagaaggacatatgatggtccgaacgcacctcatgtgtgtcgtgtattgactagtacatgaccacttga

SEQ ID NO: 3395 - DNA, 76 bp, Artificial Sequence
  Description of Artificial Sequence: Synthetic peanut, 5' sequence +inner sequence + 3' sequence
tagggaagagaaggacatatgatgtgactgagctggcgtagctggacgtgtgcttgactagtacatgaccacttga

SEQ ID NO: 3396 - DNA, 76 bp, Artificial Sequence
  Description of Artificial Sequence: Synthetic peanut, 5' sequence +inner sequence + 3' sequence
tagggaagagaaggacatatgatgacgtacgctggatgtgacgaatgtgcggtttgactagtacatgaccacttga

SEQ ID NO: 3397 - DNA, 76 bp, Artificial Sequence
  Description of Artificial Sequence: Synthetic peanut, 5' sequence +inner sequence + 3' sequence
tagggaagagaaggacatatgatccgtatcgacatcaagcggtggtgtgcgtgttgactagtacatgaccacttga

SEQ ID NO: 3398 - DNA, 76 bp, Artificial Sequence
  Description of Artificial Sequence: Synthetic peanut, 5' sequence +inner sequence + 3' sequence
tagggaagagaaggacatatgatgtcatgcacgaacactatcatggcggcacgttgactagtacatgaccacttga

SEQ ID NO: 3399 - DNA, 76 bp, Artificial Sequence
  Description of Artificial Sequence: Synthetic peanut, 5' sequence +inner sequence + 3' sequence
tagggaagagaaggacatatgatcgcaccgtgtggtaacgtgtccgaggcatattgactagtacatgaccacttga

SEQ ID NO: 3400 - DNA, 76 bp, Artificial Sequence
  Description of Artificial Sequence: Synthetic peanut, 5' sequence +inner sequence + 3' sequence
tagggaagagaaggacatatgatcgtgctgagcgagcctatctgtggttcgtgttgactagtacatgaccacttga

SEQ ID NO: 3401 - DNA, 76 bp, Artificial Sequence
  Description of Artificial Sequence: Synthetic peanut, 5' sequence +inner sequence + 3' sequence
tagggaagagaaggacatatgatgtcgtagcgcacactagcaagtgtcacgtattgactagtacatgaccacttga

SEQ ID NO: 3402 - DNA, 76 bp, Artificial Sequence
  Description of Artificial Sequence: Synthetic peanut, 5' sequence +inner sequence + 3' sequence
tagggaagagaaggacatatgatgcgaacagacacggtagcacatcctgcacattgactagtacatgaccacttga

SEQ ID NO: 3403 - DNA, 76 bp, Artificial Sequence
  Description of Artificial Sequence: Synthetic peanut, 5' sequence +inner sequence + 3' sequence
tagggaagagaaggacatatgatcgcacgcaaggggtgtggtaccacgtcgcattgactagtacatgaccacttga

SEQ ID NO: 3404 - DNA, 76 bp, Artificial Sequence
  Description of Artificial Sequence: Synthetic peanut, 5' sequence +inner sequence + 3' sequence
tagggaagagaaggacatatgatcgcacagagtgacgcacgtacgcctgtccgttgactagtacatgaccacttga

SEQ ID NO: 3405 - DNA, 76 bp, Artificial Sequence
  Description of Artificial Sequence: Synthetic peanut, 5' sequence +inner sequence + 3' sequence
tagggaagagaaggacatatgatcgacgaaccgaaccgtatcactgcgtggcattgactagtacatgaccacttga

SEQ ID NO: 3406 - DNA, 76 bp, Artificial Sequence
  Description of Artificial Sequence: Synthetic peanut, 5' sequence +inner sequence + 3' sequence
tagggaagagaaggacatatgatggcatgcacgcacctacacgtgggcatggattgactagtacatgaccacttga

SEQ ID NO: 3407 - DNA, 76 bp, Artificial Sequence
  Description of Artificial Sequence: Synthetic peanut, 5' sequence +inner sequence + 3' sequence
tagggaagagaaggacatatgatcgcaccgtcgatacgacatgcacgctgacattgactagtacatgaccacttga

SEQ ID NO: 3408 - DNA, 76 bp, Artificial Sequence
  Description of Artificial Sequence: Synthetic peanut, 5' sequence +inner sequence + 3' sequence
tagggaagagaaggacatatgatgccgtgcggacctagggctgtatcgacgtgttgactagtacatgaccacttga

SEQ ID NO: 3409 - DNA, 76 bp, Artificial Sequence
  Description of Artificial Sequence: Synthetic peanut, 5' sequence +inner sequence + 3' sequence
tagggaagagaaggacatatgatcgcattgtcgtgaactggccgtggtggacattgactagtacatgaccacttga

SEQ ID NO: 3410 - DNA, 76 bp, Artificial Sequence
  Description of Artificial Sequence: Synthetic peanut, 5' sequence +inner sequence + 3' sequence
tagggaagagaaggacatatgatacgtatgccacagcgttccgtaagtgcacattgactagtacatgaccacttga

SEQ ID NO: 3411 - DNA, 76 bp, Artificial Sequence
  Description of Artificial Sequence: Synthetic peanut, 5' sequence +inner sequence + 3' sequence
tagggaagagaaggacatatgatccacacagcaatgtgtctacgatgtgcgcattgactagtacatgaccacttga

SEQ ID NO: 3412 - DNA, 76 bp, Artificial Sequence
  Description of Artificial Sequence: Synthetic peanut, 5' sequence +inner sequence + 3' sequence
tagggaagagaaggacatatgatcatgcacaccgagcatacatcgtctgcgcattgactagtacatgaccacttga

SEQ ID NO: 3413 - DNA, 76 bp, Artificial Sequence
  Description of Artificial Sequence: Synthetic peanut, 5' sequence +inner sequence + 3' sequence
tagggaagagaaggacatatgatggacaacgtggcccaacatgtggttcgtgtttgactagtacatgaccacttga

SEQ ID NO: 3414 - DNA, 76 bp, Artificial Sequence
  Description of Artificial Sequence: Synthetic peanut, 5' sequence +inner sequence + 3' sequence
tagggaagagaaggacatatgatgcacgactcgcaccctatcatgatgccatgttgactagtacatgaccacttga

SEQ ID NO: 3415 - DNA, 76 bp, Artificial Sequence
  Description of Artificial Sequence: Synthetic peanut, 5' sequence +inner sequence + 3' sequence
tagggaagagaaggacatatgatgcatgtgtccaagctgatctgtggtgtgtattgactagtacatgaccacttga

SEQ ID NO: 3416 - DNA, 76 bp, Artificial Sequence
  Description of Artificial Sequence: Synthetic peanut, 5' sequence +inner sequence + 3' sequence
tagggaagagaaggacatatgatcacgtagcatggaaggtgatatgcgtcacattgactagtacatgaccacttga

SEQ ID NO: 3417 - DNA, 76 bp, Artificial Sequence
  Description of Artificial Sequence: Synthetic peanut, 5' sequence +inner sequence + 3' sequence
tagggaagagaaggacatatgatcgacacgcagggcacgtaacgcttaacgcgttgactagtacatgaccacttga

SEQ ID NO: 3418 - DNA, 76 bp, Artificial Sequence
  Description of Artificial Sequence: Synthetic peanut, 5' sequence +inner sequence + 3' sequence
tagggaagagaaggacatatgatcgcgagcacggtggacacgtacactgcacgttgactagtacatgaccacttga

SEQ ID NO: 3419 - DNA, 76 bp, Artificial Sequence
  Description of Artificial Sequence: Synthetic peanut, 5' sequence +inner sequence + 3' sequence
tagggaagagaaggacatatgatgtcatgcacgaacactatcattgcggcatgttgactagtacatgaccacttga

SEQ ID NO: 3420 - DNA, 76 bp, Artificial Sequence
  Description of Artificial Sequence: Synthetic peanut, 5' sequence +inner sequence + 3' sequence
tagggaagagaaggacatatgatcgcaccgtcgatacgtcatgcacgctgatattgactagtacatgaccacttga

SEQ ID NO: 3421 - DNA, 76 bp, Artificial Sequence
  Description of Artificial Sequence: Synthetic peanut, 5' sequence +inner sequence + 3' sequence
tagggaagagaaggacatatgatcgtgccgtagggactgggcgacatgcatgtttgactagtacatgaccacttga

SEQ ID NO: 3422 - DNA, 76 bp, Artificial Sequence
  Description of Artificial Sequence: Synthetic peanut, 5' sequence +inner sequence + 3' sequence
tagggaagagaaggacatatgatccgagcgcgagaggacacgtcacgtacgcattgactagtacatgaccacttga

SEQ ID NO: 3423 - DNA, 74 bp, Artificial Sequence
  Description of Artificial Sequence: Synthetic peanut, 5' sequence +inner sequence + 3' sequence
tagggaagagaaggacatatgatcgcaccgtcgatacgtcatgcacgcaccttgactagtacatgaccacttga

SEQ ID NO: 3424 - DNA, 76 bp, Artificial Sequence
  Description of Artificial Sequence: Synthetic peanut, 5' sequence +inner sequence + 3' sequence
tagggaagagaaggacatatgatgccgcaacgactgaggggtgtatgtacgcgttgactagtacatgaccacttga

SEQ ID NO: 3425 - DNA, 76 bp, Artificial Sequence
  Description of Artificial Sequence: Synthetic peanut, 5' sequence +inner sequence + 3' sequence
tagggaagagaaggacatatgatcgccacaaacacatgcgtacgcactgcgtgttgactagtacatgaccacttga

SEQ ID NO: 3426 - DNA, 76 bp, Artificial Sequence
  Description of Artificial Sequence: Synthetic peanut, 5' sequence +inner sequence + 3' sequence
tagggaagagaaggacatatgatcgcaacggaccaaagtgtggctgtgtgtgcttgactagtacatgaccacttga

SEQ ID NO: 3427 - DNA, 71 bp, Artificial Sequence
  Description of Artificial Sequence: Synthetic peanut, 5' sequence +inner sequence + 3' sequence
tagggaagagaaggacatatgatggcctgcgatggatgtgtgcgtgtattgactagtacatgaccacttga

SEQ ID NO: 3428 - DNA, 76 bp, Artificial Sequence
  Description of Artificial Sequence: Synthetic peanut, 5' sequence +inner sequence + 3' sequence
tagggaagagaaggacatatgatcacgtgctaggacgatacatgtgccacacattgactagtacatgaccacttga

SEQ ID NO: 3429 - DNA, 76 bp, Artificial Sequence
  Description of Artificial Sequence: Synthetic peanut, 5' sequence +inner sequence + 3' sequence
tagggaagagaaggacatatgatacgatgtcgtgaacggaccgtcatgtggcattgactagtacatgaccacttga

SEQ ID NO: 3430 - DNA, 76 bp, Artificial Sequence
  Description of Artificial Sequence: Synthetic peanut, 5' sequence +inner sequence + 3' sequence
tagggaagagaaggacatatgatccgacgacgtcccgcaagttcgtggccatgttgactagtacatgaccacttga

SEQ ID NO: 3431 - DNA, 76 bp, Artificial Sequence
  Description of Artificial Sequence: Synthetic peanut, 5' sequence +inner sequence + 3' sequence
tagggaagagaaggacatatgatgtgctgcgatggattgggagtgtctttggcttgactagtacatgaccacttga

SEQ ID NO: 3432 - DNA, 76 bp, Artificial Sequence
  Description of Artificial Sequence: Synthetic peanut, 5' sequence +inner sequence + 3' sequence
tagggaagagaaggacatatgatccgacgagtcacgtagtcatgccttgtcgattgactagtacatgaccacttga

SEQ ID NO: 3433 - DNA, 76 bp, Artificial Sequence
  Description of Artificial Sequence: Synthetic peanut, 5' sequence +inner sequence + 3' sequence
tagggaagagaaggacatatgatggcatcgacgtacccaagatcacgtgcgtgttgactagtacatgaccacttga

SEQ ID NO: 3434 - DNA, 76 bp, Artificial Sequence
  Description of Artificial Sequence: Synthetic peanut, 5' sequence +inner sequence + 3' sequence
tagggaagagaaggacatatgatcgcaaccagacaaagcgttgtgtacgcacgttgactagtacatgaccacttga

SEQ ID NO: 3435 - DNA, 76 bp, Artificial Sequence
  Description of Artificial Sequence: Synthetic peanut, 5' sequence +inner sequence + 3' sequence
tagggaagagaaggacatatgatcgtacacggggcaggtagtgttcatgcacattgactagtacatgaccacttga

SEQ ID NO: 3436 - DNA, 76 bp, Artificial Sequence
  Description of Artificial Sequence: Synthetic peanut, 5' sequence +inner sequence + 3' sequence
tagggaagagaaggacatatgatggccaccgaggcacgaatgcgtaacgtggtttgactagtacatgaccacttga

SEQ ID NO: 3437 - DNA, 76 bp, Artificial Sequence
  Description of Artificial Sequence: Synthetic peanut, 5' sequence +inner sequence + 3' sequence
tagggaagagaaggacatatgatggacgcagcttgcctactggtgggcacgtattgactagtacatgaccacttga

SEQ ID NO: 3438 - DNA, 76 bp, Artificial Sequence
  Description of Artificial Sequence: Synthetic peanut, 5' sequence +inner sequence + 3' sequence
tagggaagagaaggacatatgatgtcatgaacgaccgaggagtgcgtcacgtattgactagtacatgaccacttga

SEQ ID NO: 3439 - DNA, 76 bp, Artificial Sequence
  Description of Artificial Sequence: Synthetic peanut, 5' sequence +inner sequence + 3' sequence
tagggaagagaaggacatatgatgcacatggaccgaaacgtgacgcggggtcattgactagtacatgaccacttga

SEQ ID NO: 3440 - DNA, 76 bp, Artificial Sequence
  Description of Artificial Sequence: Synthetic peanut, 5' sequence +inner sequence + 3' sequence
tagggaagagaaggacatatgatcatgtcgcggcaagcgtaacgtgctacggattgactagtacatgaccacttga

SEQ ID NO: 3441 - DNA, 76 bp, Artificial Sequence
  Description of Artificial Sequence: Synthetic peanut, 5' sequence +inner sequence + 3' sequence
tagggaagagaaggacatatgatgtcgtgcgtgccctatcaagtcggtctgtattgactagtacatgaccacttga

SEQ ID NO: 3442 - DNA, 76 bp, Artificial Sequence
  Description of Artificial Sequence: Synthetic peanut, 5' sequence +inner sequence + 3' sequence
tagggaagagaaggacatatgatccgtagcgacatccagcggtggtgtgcgtgttgactagtacatgaccacttga

SEQ ID NO: 3443 - DNA, 76 bp, Artificial Sequence
  Description of Artificial Sequence: Synthetic peanut, 5' sequence +inner sequence + 3' sequence
tagggaagagaaggacatatgatccgtagcgacatcaagcgctggtgtgcgtgttgactagtacatgaccacttga

SEQ ID NO: 3444 - DNA, 76 bp, Artificial Sequence
  Description of Artificial Sequence: Synthetic peanut, 5' sequence +inner sequence + 3' sequence
tagggaagagaaggacatatgatcgatgcaaggccaacatcagcgtgcgtgtgttgactagtacatgaccacttga

SEQ ID NO: 3445 - DNA, 76 bp, Artificial Sequence
  Description of Artificial Sequence: Synthetic peanut, 5' sequence +inner sequence + 3' sequence
tagggaagagaaggacatatgatcatgcggcagatcgaagtgtccactgcgcgttgactagtacatgaccacttga

SEQ ID NO: 3446 - DNA, 76 bp, Artificial Sequence
  Description of Artificial Sequence: Synthetic peanut, 5' sequence +inner sequence + 3' sequence
tagggaagagaaggacatatgatgtcatgccatcccttcgagtgtgccaggtattgactagtacatgaccacttga

SEQ ID NO: 3447 - DNA, 76 bp, Artificial Sequence
  Description of Artificial Sequence: Synthetic peanut, 5' sequence +inner sequence + 3' sequence
tagggaagagaaggacatatgatcacgcactacgacacactgcgtacggcacgttgactagtacatgaccacttga

SEQ ID NO: 3448 - DNA, 76 bp, Artificial Sequence
  Description of Artificial Sequence: Synthetic peanut, 5' sequence +inner sequence + 3' sequence
tagggaagagaaggacatatgatccgatcgacctcgtgtgcatggctggcgcattgactagtacatgaccacttga

SEQ ID NO: 3449 - DNA, 76 bp, Artificial Sequence
  Description of Artificial Sequence: Synthetic peanut, 5' sequence +inner sequence + 3' sequence
tagggaagagaaggacatatgatcgcaccgttgatacgtcatgcacgctgacattgactagtacatgaccacttga

SEQ ID NO: 3450 - DNA, 76 bp, Artificial Sequence
  Description of Artificial Sequence: Synthetic peanut, 5' sequence +inner sequence + 3' sequence
tagggaagagaaggacatatgatggcctagcacgtcacaatgggcatgccgcgttgactagtacatgaccacttga

SEQ ID NO: 3451 - DNA, 76 bp, Artificial Sequence
  Description of Artificial Sequence: Synthetic peanut, 5' sequence +inner sequence + 3' sequence
tagggaagagaaggacatatgatccgtcacacagcacatgcgtccgtgccgcattgactagtacatgaccacttga

SEQ ID NO: 3452 - DNA, 76 bp, Artificial Sequence
  Description of Artificial Sequence: Synthetic peanut, 5' sequence +inner sequence + 3' sequence
tagggaagagaaggacatatgatcgcaccgtcgataagtcatgcacgctgacattgactagtacatgaccacttga

SEQ ID NO: 3453 - DNA, 75 bp, Artificial Sequence
  Description of Artificial Sequence: Synthetic peanut, 5' sequence +inner sequence + 3' sequence
tagggaagagaaggacatatgatggcctgcgatggatgtggacgtacgtggcttgactagtacatgaccacttga

SEQ ID NO: 3454 - DNA, 76 bp, Artificial Sequence
  Description of Artificial Sequence: Synthetic peanut, 5' sequence +inner sequence + 3' sequence
tagggaagagaaggacatatgatggacgcagcttgcctactggtggtcacgcattgactagtacatgaccacttga

SEQ ID NO: 3455 - DNA, 76 bp, Artificial Sequence
  Description of Artificial Sequence: Synthetic peanut, 5' sequence +inner sequence + 3' sequence
tagggaagagaaggacatatgatggacagcgatggatgtgggttgtgctcgtcttgactagtacatgaccacttga

SEQ ID NO: 3456 - DNA, 76 bp, Artificial Sequence
  Description of Artificial Sequence: Synthetic peanut, 5' sequence +inner sequence + 3' sequence
tagggaagagaaggacatatgatcgacatggcgaaagggatgtgtgacgcgtgttgactagtacatgaccacttga

SEQ ID NO: 3457 - DNA, 76 bp, Artificial Sequence
  Description of Artificial Sequence: Synthetic peanut, 5' sequence +inner sequence + 3' sequence
tagggaagagaaggacatatgatccgtagcgccatcaagcggtggtgtgcgtgttgactagtacatgaccacttga

SEQ ID NO: 3458 - DNA, 76 bp, Artificial Sequence
  Description of Artificial Sequence: Synthetic peanut, 5' sequence +inner sequence + 3' sequence
tagggaagagaaggacatatgatacgtcaacatggcgcagttcgtaacgcacattgactagtacatgaccacttga

SEQ ID NO: 3459 - DNA, 76 bp, Artificial Sequence
  Description of Artificial Sequence: Synthetic peanut, 5' sequence +inner sequence + 3' sequence
tagggaagagaaggacatatgatcgcgccgaaaggacgaacgatgtgtgcgtgttgactagtacatgaccacttga

SEQ ID NO: 3460 - DNA, 76 bp, Artificial Sequence
  Description of Artificial Sequence: Synthetic peanut, 5' sequence +inner sequence + 3' sequence
tagggaagagaaggacatatgatgcacgaacgacgctgtcatcgcacgtcacattgactagtacatgaccacttga

SEQ ID NO: 3461 - DNA, 76 bp, Artificial Sequence
  Description of Artificial Sequence: Synthetic peanut, 5' sequence +inner sequence + 3' sequence
tagggaagagaaggacatatgatgtacgcatcgccccttcgagtggacaggtattgactagtacatgaccacttga

SEQ ID NO: 3462 - DNA, 76 bp, Artificial Sequence
  Description of Artificial Sequence: Synthetic peanut, 5' sequence +inner sequence + 3' sequence
tagggaagagaaggacatatgatggactgcgatggatgtgggttgtgctcgtcttgactagtacatgaccacttga

SEQ ID NO: 3463 - DNA, 76 bp, Artificial Sequence
  Description of Artificial Sequence: Synthetic peanut, 5' sequence +inner sequence + 3' sequence
tagggaagagaaggacatatgatcgcaccgtcgatacggcatgcacgctgacattgactagtacatgaccacttga

SEQ ID NO: 3464 - DNA, 76 bp, Artificial Sequence
  Description of Artificial Sequence: Synthetic peanut, 5' sequence +inner sequence + 3' sequence
tagggaagagaaggacatatgatggcattcgatgcactacaagttgttgtgtattgactagtacatgaccacttga

SEQ ID NO: 3465 - DNA, 76 bp, Artificial Sequence
  Description of Artificial Sequence: Synthetic peanut, 5' sequence +inner sequence + 3' sequence
tagggaagagaaggacatatgatgcgtgcagcatatggaaggacgtggccgcgttgactagtacatgaccacttga

SEQ ID NO: 3466 - DNA, 76 bp, Artificial Sequence
  Description of Artificial Sequence: Synthetic peanut, 5' sequence +inner sequence + 3' sequence
tagggaagagaaggacatatgatcgcaccgtcgatatgtcatgcacgctgacattgactagtacatgaccacttga

SEQ ID NO: 3467 - DNA, 76 bp, Artificial Sequence
  Description of Artificial Sequence: Synthetic peanut, 5' sequence +inner sequence + 3' sequence
tagggaagagaaggacatatgatccgtagcgacatcacgcggtggtgtgcgtgttgactagtacatgaccacttga

SEQ ID NO: 3468 - DNA, 76 bp, Artificial Sequence
  Description of Artificial Sequence: Synthetic peanut, 5' sequence +inner sequence + 3' sequence
tagggaagagaaggacatatgatgtgctgaggcatccctaggacacgtggccattgactagtacatgaccacttga

SEQ ID NO: 3469 - DNA, 76 bp, Artificial Sequence
  Description of Artificial Sequence: Synthetic peanut, 5' sequence +inner sequence + 3' sequence
tagggaagagaaggacatatgatcacgtgcacgatgcaagtacacatgcaccattgactagtacatgaccacttga

SEQ ID NO: 3470 - DNA, 76 bp, Artificial Sequence
  Description of Artificial Sequence: Synthetic peanut, 5' sequence +inner sequence + 3' sequence
tagggaagagaaggacatatgatggacggaacgcagccacgtgtgtcgatgtattgactagtacatgaccacttga

SEQ ID NO: 3471 - DNA, 76 bp, Artificial Sequence
  Description of Artificial Sequence: Synthetic peanut, 5' sequence +inner sequence + 3' sequence
tagggaagagaaggacatatgatgacgcgatgcacttggtccgtactcacgtgttgactagtacatgaccacttga

SEQ ID NO: 3472 - DNA, 76 bp, Artificial Sequence
  Description of Artificial Sequence: Synthetic peanut, 5' sequence +inner sequence + 3' sequence
tagggaagagaaggacatatgatggacggatcgaacctagagagtggcgtggattgactagtacatgaccacttga

SEQ ID NO: 3473 - DNA, 76 bp, Artificial Sequence
  Description of Artificial Sequence: Synthetic peanut, 5' sequence +inner sequence + 3' sequence
tagggaagagaaggacatatgatccgtggcgtaacgaaggggaggtatgcacgttgactagtacatgaccacttga

SEQ ID NO: 3474 - DNA, 76 bp, Artificial Sequence
  Description of Artificial Sequence: Synthetic peanut, 5' sequence +inner sequence + 3' sequence
tagggaagagaaggacatatgatacgcactgaccgttagcatggtcctgcacattgactagtacatgaccacttga

SEQ ID NO: 3475 - DNA, 76 bp, Artificial Sequence
  Description of Artificial Sequence: Synthetic peanut, 5' sequence +inner sequence + 3' sequence
tagggaagagaaggacatatgatccggagcgcactgtcagcgtggtgtacgtgttgactagtacatgaccacttga

SEQ ID NO: 3476 - DNA, 76 bp, Artificial Sequence
  Description of Artificial Sequence: Synthetic peanut, 5' sequence +inner sequence + 3' sequence
tagggaagagaaggacatatgatcgaaccgcaaggaggctggtacgttcggcattgactagtacatgaccacttga

SEQ ID NO: 3477 - DNA, 76 bp, Artificial Sequence
  Description of Artificial Sequence: Synthetic peanut, 5' sequence +inner sequence + 3' sequence
tagggaagagaaggacatatgatcgcaccgtcgatacgtcatgcacgccgacattgactagtacatgaccacttga

SEQ ID NO: 3478 - DNA, 76 bp, Artificial Sequence
  Description of Artificial Sequence: Synthetic peanut, 5' sequence +inner sequence + 3' sequence
tagggaagagaaggacatatgatcgtaccgaacaagtgacattgcgcacggtcttgactagtacatgaccacttga

SEQ ID NO: 3479 - DNA, 76 bp, Artificial Sequence
  Description of Artificial Sequence: Synthetic peanut, 5' sequence +inner sequence + 3' sequence
tagggaagagaaggacatatgatgcacaaacgaccgaggcatgtagcgacgtgttgactagtacatgaccacttga

SEQ ID NO: 3480 - DNA, 76 bp, Artificial Sequence
  Description of Artificial Sequence: Synthetic peanut, 5' sequence +inner sequence + 3' sequence
tagggaagagaaggacatatgatcgtgcatgctgtcgggacgcacactgtgtgttgactagtacatgaccacttga

SEQ ID NO: 3481 - DNA, 76 bp, Artificial Sequence
  Description of Artificial Sequence: Synthetic peanut, 5' sequence +inner sequence + 3' sequence
tagggaagagaaggacatatgatcgcaccggtgagggcatggttcggcacgcattgactagtacatgaccacttga

SEQ ID NO: 3482 - DNA, 76 bp, Artificial Sequence
  Description of Artificial Sequence: Synthetic peanut, 5' sequence +inner sequence + 3' sequence
tagggaagagaaggacatatgatcgtgccaccagagtgacgcatgcatgatgcttgactagtacatgaccacttga

SEQ ID NO: 3483 - DNA, 76 bp, Artificial Sequence
  Description of Artificial Sequence: Synthetic peanut, 5' sequence +inner sequence + 3' sequence
tagggaagagaaggacatatgatcgacagatcggcatcaccagtcattgcgcattgactagtacatgaccacttga

SEQ ID NO: 3484 - DNA, 76 bp, Artificial Sequence
  Description of Artificial Sequence: Synthetic peanut, 5' sequence +inner sequence + 3' sequence
tagggaagagaaggacatatgatcgaaccggaaggtggcgcatgggtgagggattgactagtacatgaccacttga

SEQ ID NO: 3485 - DNA, 76 bp, Artificial Sequence
  Description of Artificial Sequence: Synthetic peanut, 5' sequence +inner sequence + 3' sequence
tagggaagagaaggacatatgatggacgcaacgaacctacgagtgatcgtgtattgactagtacatgaccacttga

SEQ ID NO: 3486 - DNA, 76 bp, Artificial Sequence
  Description of Artificial Sequence: Synthetic peanut, 5' sequence +inner sequence + 3' sequence
tagggaagagaaggacatatgattcgtagcgacatcaagcggtggtgtgcgtgttgactagtacatgaccacttga

SEQ ID NO: 3487 - DNA, 76 bp, Artificial Sequence
  Description of Artificial Sequence: Synthetic peanut, 5' sequence +inner sequence + 3' sequence
tagggaagagaaggacatatgatgtgcgagtcgaccgtacaagtgcaggcatgttgactagtacatgaccacttga

SEQ ID NO: 3488 - DNA, 76 bp, Artificial Sequence
  Description of Artificial Sequence: Synthetic peanut, 5' sequence +inner sequence + 3' sequence
tagggaagagaaggacatatgatcgcaccgtcgatacgtcatgcacactgacattgactagtacatgaccacttga

SEQ ID NO: 3489 - DNA, 77 bp, Artificial Sequence
  Description of Artificial Sequence: Synthetic peanut, 5' sequence +inner sequence + 3' sequence
tagggaagagaaggacatatgatggcctgcgatggatgtggacggtgtggtagtttgactagtacatgaccacttga

SEQ ID NO: 3490 - DNA, 76 bp, Artificial Sequence
  Description of Artificial Sequence: Synthetic peanut, 5' sequence +inner sequence + 3' sequence
tagggaagagaaggacatatgatcgcacacgggaggcatcgtaacgtgcagcattgactagtacatgaccacttga

SEQ ID NO: 3491 - DNA, 76 bp, Artificial Sequence
  Description of Artificial Sequence: Synthetic peanut, 5' sequence +inner sequence + 3' sequence
tagggaagagaaggacatatgatacgtcaaacgcgacaatgcatgcgtacacgttgactagtacatgaccacttga

SEQ ID NO: 3492 - DNA, 76 bp, Artificial Sequence
  Description of Artificial Sequence: Synthetic peanut, 5' sequence +inner sequence + 3' sequence
tagggaagagaaggacatatgatcacgctgcatgatcacgcacttccgtcacgttgactagtacatgaccacttga

SEQ ID NO: 3493 - DNA, 76 bp, Artificial Sequence
  Description of Artificial Sequence: Synthetic peanut, 5' sequence +inner sequence + 3' sequence
tagggaagagaaggacatatgatgtcattccgcatcctacacttgggcacgtattgactagtacatgaccacttga

SEQ ID NO: 3494 - DNA, 76 bp, Artificial Sequence
  Description of Artificial Sequence: Synthetic peanut, 5' sequence +inner sequence + 3' sequence
tagggaagagaaggacatatgatcgacacagcatcgaacttatggcatgcacgttgactagtacatgaccacttga

SEQ ID NO: 3495 - DNA, 76 bp, Artificial Sequence
  Description of Artificial Sequence: Synthetic peanut, 5' sequence +inner sequence + 3' sequence
tagggaagagaaggacatatgatcgaacgcagtgcagtgacatccagtgcacattgactagtacatgaccacttga

SEQ ID NO: 3496 - DNA, 76 bp, Artificial Sequence
  Description of Artificial Sequence: Synthetic peanut, 5' sequence +inner sequence + 3' sequence
tagggaagagaaggacatatgatgtcgtgcgatctgaccgtgcaagttgggcattgactagtacatgaccacttga

SEQ ID NO: 3497 - DNA, 76 bp, Artificial Sequence
  Description of Artificial Sequence: Synthetic peanut, 5' sequence +inner sequence + 3' sequence
tagggaagagaaggacatatgatcgcaccgtcgatacgtcatgcaagctgacattgactagtacatgaccacttga

SEQ ID NO: 3498 - DNA, 76 bp, Artificial Sequence
  Description of Artificial Sequence: Synthetic peanut, 5' sequence +inner sequence + 3' sequence
tagggaagagaaggacatatgatcgcaccgtcgatacgtcatgcacgatgacattgactagtacatgaccacttga

SEQ ID NO: 3499 - DNA, 76 bp, Artificial Sequence
  Description of Artificial Sequence: Synthetic peanut, 5' sequence +inner sequence + 3' sequence
tagggaagagaaggacatatgatggcctgcgatggatgtgcgttgtgtctgtcttgactagtacatgaccacttga

SEQ ID NO: 3500 - DNA, 76 bp, Artificial Sequence
  Description of Artificial Sequence: Synthetic peanut, 5' sequence +inner sequence + 3' sequence
tagggaagagaaggacatatgatccgcacacgacacttggtcatccgctgtcgttgactagtacatgaccacttga

SEQ ID NO: 3501 - DNA, 76 bp, Artificial Sequence
  Description of Artificial Sequence: Synthetic peanut, 5' sequence +inner sequence + 3' sequence
tagggaagagaaggacatatgatcacgaacagtaggcattgcacggcgacgcgttgactagtacatgaccacttga

SEQ ID NO: 3502 - DNA, 76 bp, Artificial Sequence
  Description of Artificial Sequence: Synthetic peanut, 5' sequence +inner sequence + 3' sequence
tagggaagagaaggacatatgatgcaacggcggaatcacgtgggatgtgcgcattgactagtacatgaccacttga

SEQ ID NO: 3503 - DNA, 77 bp, Artificial Sequence
  Description of Artificial Sequence: Synthetic peanut, 5' sequence +inner sequence + 3' sequence
tagggaagagaaggacatatgatgtactgcgatggcttagcaaagtgcgacatgttgactagtacatgaccacttga

SEQ ID NO: 3504 - DNA, 76 bp, Artificial Sequence
  Description of Artificial Sequence: Synthetic peanut, 5' sequence +inner sequence + 3' sequence
tagggaagagaaggacatatgatcgaagatggacgcatcagcccgacgtgtcattgactagtacatgaccacttga

SEQ ID NO: 3505 - DNA, 76 bp, Artificial Sequence
  Description of Artificial Sequence: Synthetic peanut, 5' sequence +inner sequence + 3' sequence
tagggaagagaaggacatatgatgcacgacagagcgacactgtgtccgacgcattgactagtacatgaccacttga

SEQ ID NO: 3506 - DNA, 76 bp, Artificial Sequence
  Description of Artificial Sequence: Synthetic peanut, 5' sequence +inner sequence + 3' sequence
tagggaagagaaggacatatgatggacgcaacgtaccgtatcgtggccatgcattgactagtacatgaccacttga

SEQ ID NO: 3507 - DNA, 76 bp, Artificial Sequence
  Description of Artificial Sequence: Synthetic peanut, 5' sequence +inner sequence + 3' sequence
tagggaagagaaggacatatgatcgccccgtcgatacgtcatgcacgctgacattgactagtacatgaccacttga

SEQ ID NO: 3508 - DNA, 76 bp, Artificial Sequence
  Description of Artificial Sequence: Synthetic peanut, 5' sequence +inner sequence + 3' sequence
tagggaagagaaggacatatgatcgtgcacagccataacgtacccccgtcacgttgactagtacatgaccacttga

SEQ ID NO: 3509 - DNA, 76 bp, Artificial Sequence
  Description of Artificial Sequence: Synthetic peanut, 5' sequence +inner sequence + 3' sequence
tagggaagagaaggacatatgatcgcaccgtcgatacgtcaggcacgctgacattgactagtacatgaccacttga

SEQ ID NO: 3510 - DNA, 76 bp, Artificial Sequence
  Description of Artificial Sequence: Synthetic peanut, 5' sequence +inner sequence + 3' sequence
tagggaagagaaggacatatgatcacggatgggcgaaacggcttgactgcgtcttgactagtacatgaccacttga

SEQ ID NO: 3511 - DNA, 76 bp, Artificial Sequence
  Description of Artificial Sequence: Synthetic peanut, 5' sequence +inner sequence + 3' sequence
tagggaagagaaggacatatgatccgaccgcgttgcctagtgatcggtggccattgactagtacatgaccacttga

SEQ ID NO: 3512 - DNA, 76 bp, Artificial Sequence
  Description of Artificial Sequence: Synthetic peanut, 5' sequence +inner sequence + 3' sequence
tagggaagagaaggacatatgatcgcaccgtcgatacgtcatgcacgctggcattgactagtacatgaccacttga

SEQ ID NO: 3513 - DNA, 76 bp, Artificial Sequence
  Description of Artificial Sequence: Synthetic peanut, 5' sequence +inner sequence + 3' sequence
tagggaagagaaggacatatgatcgcaccggcaagtgctacggtctagtcgtgttgactagtacatgaccacttga

SEQ ID NO: 3514 - DNA, 76 bp, Artificial Sequence
  Description of Artificial Sequence: Synthetic peanut, 5' sequence +inner sequence + 3' sequence
tagggaagagaaggacatatgatcgcaacgaactgatgcaacgcgtaggcatgttgactagtacatgaccacttga

SEQ ID NO: 3515 - DNA, 76 bp, Artificial Sequence
  Description of Artificial Sequence: Synthetic peanut, 5' sequence +inner sequence + 3' sequence
tagggaagagaaggacatatgatgtcacgcagcgtatcccttcgagtggtgtgttgactagtacatgaccacttga

SEQ ID NO: 3516 - DNA, 72 bp, Artificial Sequence
  Description of Artificial Sequence: Synthetic peanut, 5' sequence +inner sequence + 3' sequence
tagggaagagaaggacatatgatgacgtgagcacgtaatggcctgcgcgttgactagtacatgaccacttga

SEQ ID NO: 3517 - DNA, 76 bp, Artificial Sequence
  Description of Artificial Sequence: Synthetic peanut, 5' sequence +inner sequence + 3' sequence
tagggaagagaaggacatatgatgtcatgcacgcacctacacgtgggcacgtattgactagtacatgaccacttga

SEQ ID NO: 3518 - DNA, 76 bp, Artificial Sequence
  Description of Artificial Sequence: Synthetic peanut, 5' sequence +inner sequence + 3' sequence
tagggaagagaaggacatatgatgtacgtggctgccctgtgcgaatgtacgcattgactagtacatgaccacttga

SEQ ID NO: 3519 - DNA, 76 bp, Artificial Sequence
  Description of Artificial Sequence: Synthetic peanut, 5' sequence +inner sequence + 3' sequence
tagggaagagaaggacatatgatcacgcagggcacgtggcgttcaccttgccattgactagtacatgaccacttga

SEQ ID NO: 3520 - DNA, 76 bp, Artificial Sequence
  Description of Artificial Sequence: Synthetic peanut, 5' sequence +inner sequence + 3' sequence
tagggaagagaaggacatatgatcgtgccaacgacctacgtgccatgcggtcattgactagtacatgaccacttga

SEQ ID NO: 3521 - DNA, 76 bp, Artificial Sequence
  Description of Artificial Sequence: Synthetic peanut, 5' sequence +inner sequence + 3' sequence
tagggaagagaaggacatatgatccgcacgtagccctatcagttgtgcatgcattgactagtacatgaccacttga

SEQ ID NO: 3522 - DNA, 76 bp, Artificial Sequence
  Description of Artificial Sequence: Synthetic peanut, 5' sequence +inner sequence + 3' sequence
tagggaagagaaggacatatgattcggaccgcaagtcaggcacgtacgacggtttgactagtacatgaccacttga

SEQ ID NO: 3523 - DNA, 76 bp, Artificial Sequence
  Description of Artificial Sequence: Synthetic peanut, 5' sequence +inner sequence + 3' sequence
tagggaagagaaggacatatgatgcacgcagcttgccgtagggtggcatgggattgactagtacatgaccacttga

SEQ ID NO: 3524 - DNA, 76 bp, Artificial Sequence
  Description of Artificial Sequence: Synthetic peanut, 5' sequence +inner sequence + 3' sequence
tagggaagagaaggacatatgatgttgcgaacggaccgttgcgtggttagggattgactagtacatgaccacttga

SEQ ID NO: 3525 - DNA, 76 bp, Artificial Sequence
  Description of Artificial Sequence: Synthetic peanut, 5' sequence +inner sequence + 3' sequence
tagggaagagaaggacatatgatcacgcagtgtgtgacgtgtgtgtgttcacgttgactagtacatgaccacttga

SEQ ID NO: 3526 - DNA, 76 bp, Artificial Sequence
  Description of Artificial Sequence: Synthetic peanut, 5' sequence +inner sequence + 3' sequence
tagggaagagaaggacatatgatcgtcacgccgaggtacgtccttccgccacgttgactagtacatgaccacttga

SEQ ID NO: 3527 - DNA, 76 bp, Artificial Sequence
  Description of Artificial Sequence: Synthetic peanut, 5' sequence +inner sequence + 3' sequence
tagggaagagaaggacatatgatggacaggctgagcgaacaagtgcatgcacgttgactagtacatgaccacttga

SEQ ID NO: 3528 - DNA, 76 bp, Artificial Sequence
  Description of Artificial Sequence: Synthetic peanut, 5' sequence +inner sequence + 3' sequence
tagggaagagaaggacatatgatgtcacgacgaaggcctagcaacgtgcgtcattgactagtacatgaccacttga

SEQ ID NO: 3529 - DNA, 76 bp, Artificial Sequence
  Description of Artificial Sequence: Synthetic peanut, 5' sequence +inner sequence + 3' sequence
tagggaagagaaggacatatgatccatcatggacgacgatggcttagcgtggtttgactagtacatgaccacttga

SEQ ID NO: 3530 - DNA, 76 bp, Artificial Sequence
  Description of Artificial Sequence: Synthetic peanut, 5' sequence +inner sequence + 3' sequence
tagggaagagaaggacatatgatgtacacacgtaccgccagatcaagtgcacattgactagtacatgaccacttga

SEQ ID NO: 3531 - DNA, 76 bp, Artificial Sequence
  Description of Artificial Sequence: Synthetic peanut, 5' sequence +inner sequence + 3' sequence
tagggaagagaaggacatatgatcgatacgcaacgccacgaacatgcctcacgttgactagtacatgaccacttga

SEQ ID NO: 3532 - DNA, 76 bp, Artificial Sequence
  Description of Artificial Sequence: Synthetic peanut, 5' sequence +inner sequence + 3' sequence
tagggaagagaaggacatatgatcgcaatggacgaattgaccgtgcgtggccattgactagtacatgaccacttga

SEQ ID NO: 3533 - DNA, 76 bp, Artificial Sequence
  Description of Artificial Sequence: Synthetic peanut, 5' sequence +inner sequence + 3' sequence
tagggaagagaaggacatatgatcgcagcagtgtgcgtacaatgtcatgcgcgttgactagtacatgaccacttga

SEQ ID NO: 3534 - DNA, 76 bp, Artificial Sequence
  Description of Artificial Sequence: Synthetic peanut, 5' sequence +inner sequence + 3' sequence
tagggaagagaaggacatatgatcgaacgcgacgatggctcgtgcacttgacattgactagtacatgaccacttga

SEQ ID NO: 3535 - DNA, 76 bp, Artificial Sequence
  Description of Artificial Sequence: Synthetic peanut, 5' sequence +inner sequence + 3' sequence
tagggaagagaaggacatatgatccgacgcaaggcaggtacatgtggtgcggtttgactagtacatgaccacttga

SEQ ID NO: 3536 - DNA, 76 bp, Artificial Sequence
  Description of Artificial Sequence: Synthetic peanut, 5' sequence +inner sequence + 3' sequence
tagggaagagaaggacatatgatcaggcacggagacgctgtgtatacgacgcattgactagtacatgaccacttga

SEQ ID NO: 3537 - DNA, 76 bp, Artificial Sequence
  Description of Artificial Sequence: Synthetic peanut, 5' sequence +inner sequence + 3' sequence
tagggaagagaaggacatatgatcacgataggcacggcgtatcacagttcggtttgactagtacatgaccacttga

SEQ ID NO: 3538 - DNA, 76 bp, Artificial Sequence
  Description of Artificial Sequence: Synthetic peanut, 5' sequence +inner sequence + 3' sequence
tagggaagagaaggacatatgatcacgtgttgcgaggcacctgccactgcacgttgactagtacatgaccacttga

SEQ ID NO: 3539 - DNA, 76 bp, Artificial Sequence
  Description of Artificial Sequence: Synthetic peanut, 5' sequence +inner sequence + 3' sequence
tagggaagagaaggacatatgatcgcatcggaccgtacgtgtactcgtgctgtttgactagtacatgaccacttga

SEQ ID NO: 3540 - DNA, 76 bp, Artificial Sequence
  Description of Artificial Sequence: Synthetic peanut, 5' sequence +inner sequence + 3' sequence
tagggaagagaaggacatatgatggccgaacgtaacgcctcgtggtcctggcattgactagtacatgaccacttga

SEQ ID NO: 3541 - DNA, 76 bp, Artificial Sequence
  Description of Artificial Sequence: Synthetic peanut, 5' sequence +inner sequence + 3' sequence
tagggaagagaaggacatatgatgtgcatcgcgaccatgggctggacctgtccttgactagtacatgaccacttga

SEQ ID NO: 3542 - DNA, 76 bp, Artificial Sequence
  Description of Artificial Sequence: Synthetic peanut, 5' sequence +inner sequence + 3' sequence
tagggaagagaaggacatatgatcatgctcagtgggaacgtggcccgtgcacgttgactagtacatgaccacttga

SEQ ID NO: 3543 - DNA, 76 bp, Artificial Sequence
  Description of Artificial Sequence: Synthetic peanut, 5' sequence +inner sequence + 3' sequence
tagggaagagaaggacatatgatcgcaccgtcaatacgtcatgcacgctgacattgactagtacatgaccacttga

SEQ ID NO: 3544 - DNA, 76 bp, Artificial Sequence
  Description of Artificial Sequence: Synthetic peanut, 5' sequence +inner sequence + 3' sequence
tagggaagagaaggacatatgatcgcgcacatgatcgtcactcctgctgcaccttgactagtacatgaccacttga

SEQ ID NO: 3545 - DNA, 76 bp, Artificial Sequence
  Description of Artificial Sequence: Synthetic peanut, 5' sequence +inner sequence + 3' sequence
tagggaagagaaggacatatgatcgcaccgacgagtgggcttaacgtgtcacgttgactagtacatgaccacttga

SEQ ID NO: 3546 - DNA, 76 bp, Artificial Sequence
  Description of Artificial Sequence: Synthetic peanut, 5' sequence +inner sequence + 3' sequence
tagggaagagaaggacatatgatcacacaaggcacacgtgacatatcgtcgcgttgactagtacatgaccacttga

SEQ ID NO: 3547 - DNA, 76 bp, Artificial Sequence
  Description of Artificial Sequence: Synthetic peanut, 5' sequence +inner sequence + 3' sequence
tagggaagagaaggacatatgatcatgatgcaggctaagtcgcactcgccacgttgactagtacatgaccacttga

SEQ ID NO: 3548 - DNA, 76 bp, Artificial Sequence
  Description of Artificial Sequence: Synthetic peanut, 5' sequence +inner sequence + 3' sequence
tagggaagagaaggacatatgatccatatggcagtgcgatggcttcgctggtcttgactagtacatgaccacttga

SEQ ID NO: 3549 - DNA, 75 bp, Artificial Sequence
  Description of Artificial Sequence: Synthetic peanut, 5' sequence +inner sequence + 3' sequence
tagggaagagaaggacatatgatcgtacgacacgacagacatgcacgacgcattgactagtacatgaccacttga

SEQ ID NO: 3550 - DNA, 76 bp, Artificial Sequence
  Description of Artificial Sequence: Synthetic peanut, 5' sequence +inner sequence + 3' sequence
tagggaagagaaggacatatgatcgtgagggcaaatgcacgacaacacgcgcattgactagtacatgaccacttga

SEQ ID NO: 3551 - DNA, 76 bp, Artificial Sequence
  Description of Artificial Sequence: Synthetic peanut, 5' sequence +inner sequence + 3' sequence
tagggaagagaaggacatatgatcgtgcgatgtgcgtatcgagtgcgtgtggattgactagtacatgaccacttga

SEQ ID NO: 3552 - DNA, 76 bp, Artificial Sequence
  Description of Artificial Sequence: Synthetic peanut, 5' sequence +inner sequence + 3' sequence
tagggaagagaaggacatatgatgtgcacaacgtaccgctcacgtggccacgtttgactagtacatgaccacttga

SEQ ID NO: 3553 - DNA, 76 bp, Artificial Sequence
  Description of Artificial Sequence: Synthetic peanut, 5' sequence +inner sequence + 3' sequence
tagggaagagaaggacatatgatccgcacgtagccctatcagtggcgcatgcattgactagtacatgaccacttga

SEQ ID NO: 3554 - DNA, 76 bp, Artificial Sequence
  Description of Artificial Sequence: Synthetic peanut, 5' sequence +inner sequence + 3' sequence
tagggaagagaaggacatatgatcgtgccgcacaaagcatgacctcgttgtgcttgactagtacatgaccacttga

SEQ ID NO: 3555 - DNA, 76 bp, Artificial Sequence
  Description of Artificial Sequence: Synthetic peanut, 5' sequence +inner sequence + 3' sequence
tagggaagagaaggacatatgatcgacatggaacgcaggtctgcacgttgaccttgactagtacatgaccacttga

SEQ ID NO: 3556 - DNA, 76 bp, Artificial Sequence
  Description of Artificial Sequence: Synthetic peanut, 5' sequence +inner sequence + 3' sequence
tagggaagagaaggacatatgatgcatgccgtgtcgtcccaaccagctgggcattgactagtacatgaccacttga

SEQ ID NO: 3557 - DNA, 76 bp, Artificial Sequence
  Description of Artificial Sequence: Synthetic peanut, 5' sequence +inner sequence + 3' sequence
tagggaagagaaggacatatgatcgacacgagatcaagccgtcatgatgcggtttgactagtacatgaccacttga

SEQ ID NO: 3558 - DNA, 76 bp, Artificial Sequence
  Description of Artificial Sequence: Synthetic peanut, 5' sequence +inner sequence + 3' sequence
tagggaagagaaggacatatgatcgtggcagcaacaccggtacgcagttcgtgttgactagtacatgaccacttga

SEQ ID NO: 3559 - DNA, 76 bp, Artificial Sequence
  Description of Artificial Sequence: Synthetic peanut, 5' sequence +inner sequence + 3' sequence
tagggaagagaaggacatatgatccgcacgtagccctatcagtgttgcatgcattgactagtacatgaccacttga

SEQ ID NO: 3560 - DNA, 76 bp, Artificial Sequence
  Description of Artificial Sequence: Synthetic peanut, 5' sequence +inner sequence + 3' sequence
tagggaagagaaggacatatgatgtcattccgcatcctacacgtgggtatggattgactagtacatgaccacttga

SEQ ID NO: 3561 - DNA, 76 bp, Artificial Sequence
  Description of Artificial Sequence: Synthetic peanut, 5' sequence +inner sequence + 3' sequence
tagggaagagaaggacatatgatcccaccgtcgatacgtcatgcacgctgacattgactagtacatgaccacttga

SEQ ID NO: 3562 - DNA, 76 bp, Artificial Sequence
  Description of Artificial Sequence: Synthetic peanut, 5' sequence +inner sequence + 3' sequence
tagggaagagaaggacatatgatcgcggacagacaccacgtatgtcacggacattgactagtacatgaccacttga

SEQ ID NO: 3563 - DNA, 76 bp, Artificial Sequence
  Description of Artificial Sequence: Synthetic peanut, 5' sequence +inner sequence + 3' sequence
tagggaagagaaggacatatgattggcctgacgtgccctgacatgctgcgtcattgactagtacatgaccacttga

SEQ ID NO: 3564 - DNA, 76 bp, Artificial Sequence
  Description of Artificial Sequence: Synthetic peanut, 5' sequence +inner sequence + 3' sequence
tagggaagagaaggacatatgatccgtgtggacgacaactactgccatgcgcattgactagtacatgaccacttga

SEQ ID NO: 3565 - DNA, 76 bp, Artificial Sequence
  Description of Artificial Sequence: Synthetic peanut, 5' sequence +inner sequence + 3' sequence
tagggaagagaaggacatatgatcgcaccaatgcacacgtgacatgatgcacgttgactagtacatgaccacttga

SEQ ID NO: 3566 - DNA, 76 bp, Artificial Sequence
  Description of Artificial Sequence: Synthetic peanut, 5' sequence +inner sequence + 3' sequence
tagggaagagaaggacatatgatgcgcagcagggaagcaggccacactacgtgttgactagtacatgaccacttga

SEQ ID NO: 3567 - DNA, 76 bp, Artificial Sequence
  Description of Artificial Sequence: Synthetic peanut, 5' sequence +inner sequence + 3' sequence
tagggaagagaaggacatatgattcgatgaccgcgagtgggacgtgcacgtgcttgactagtacatgaccacttga

SEQ ID NO: 3568 - DNA, 76 bp, Artificial Sequence
  Description of Artificial Sequence: Synthetic peanut, 5' sequence +inner sequence + 3' sequence
tagggaagagaaggacatatgatcacaccgcggaagtgacgtgcaccaacgtgttgactagtacatgaccacttga

SEQ ID NO: 3569 - DNA, 76 bp, Artificial Sequence
  Description of Artificial Sequence: Synthetic peanut, 5' sequence +inner sequence + 3' sequence
tagggaagagaaggacatatgatcacgtacgcacaacgtggcttgacggtgtattgactagtacatgaccacttga

SEQ ID NO: 3570 - DNA, 76 bp, Artificial Sequence
  Description of Artificial Sequence: Synthetic peanut, 5' sequence +inner sequence + 3' sequence
tagggaagagaaggacatatgatgcactgagcgtaccgaggaggcggtgtgtcttgactagtacatgaccacttga

SEQ ID NO: 3571 - DNA, 76 bp, Artificial Sequence
  Description of Artificial Sequence: Synthetic peanut, 5' sequence +inner sequence + 3' sequence
tagggaagagaaggacatatgatcgacgcacacggcaagaccacactgcgatcttgactagtacatgaccacttga

SEQ ID NO: 3572 - DNA, 76 bp, Artificial Sequence
  Description of Artificial Sequence: Synthetic peanut, 5' sequence +inner sequence + 3' sequence
tagggaagagaaggacatatgatgacgcaacgacctgagtggacacggacgtattgactagtacatgaccacttga

SEQ ID NO: 3573 - DNA, 76 bp, Artificial Sequence
  Description of Artificial Sequence: Synthetic peanut, 5' sequence +inner sequence + 3' sequence
tagggaagagaaggacatatgatggcctgcgatggatgtgtgcgtgtacgacgttgactagtacatgaccacttga

SEQ ID NO: 3574 - DNA, 76 bp, Artificial Sequence
  Description of Artificial Sequence: Synthetic peanut, 5' sequence +inner sequence + 3' sequence
tagggaagagaaggacatatgatcacatcacgcactctgagcgtaacgtgggtttgactagtacatgaccacttga

SEQ ID NO: 3575 - DNA, 76 bp, Artificial Sequence
  Description of Artificial Sequence: Synthetic peanut, 5' sequence +inner sequence + 3' sequence
tagggaagagaaggacatatgatacgtcccacacgacacgtggtatgtgcatgttgactagtacatgaccacttga

SEQ ID NO: 3576 - DNA, 76 bp, Artificial Sequence
  Description of Artificial Sequence: Synthetic peanut, 5' sequence +inner sequence + 3' sequence
tagggaagagaaggacatatgatcgcatcgtcgatacgtcatgcacgctgacattgactagtacatgaccacttga

SEQ ID NO: 3577 - DNA, 76 bp, Artificial Sequence
  Description of Artificial Sequence: Synthetic peanut, 5' sequence +inner sequence + 3' sequence
tagggaagagaaggacatatgatggcctgcgatggatgtggggatgcactgtcttgactagtacatgaccacttga

SEQ ID NO: 3578 - DNA, 76 bp, Artificial Sequence
  Description of Artificial Sequence: Synthetic peanut, 5' sequence +inner sequence + 3' sequence
tagggaagagaaggacatatgatcacggcagggtatgtgacacagcctgcacgttgactagtacatgaccacttga

SEQ ID NO: 3579 - DNA, 76 bp, Artificial Sequence
  Description of Artificial Sequence: Synthetic peanut, 5' sequence +inner sequence + 3' sequence
tagggaagagaaggacatatgatggccgaaacgacgtggtgagtacgcagccattgactagtacatgaccacttga

SEQ ID NO: 3580 - DNA, 76 bp, Artificial Sequence
  Description of Artificial Sequence: Synthetic peanut, 5' sequence +inner sequence + 3' sequence
tagggaagagaaggacatatgatccgtagcgacatcaagcggtggtgtgagtgttgactagtacatgaccacttga

SEQ ID NO: 3581 - DNA, 76 bp, Artificial Sequence
  Description of Artificial Sequence: Synthetic peanut, 5' sequence +inner sequence + 3' sequence
tagggaagagaaggacatatgatgcgttcgataccctatgtggcctgtacgtgttgactagtacatgaccacttga

SEQ ID NO: 3582 - DNA, 76 bp, Artificial Sequence
  Description of Artificial Sequence: Synthetic peanut, 5' sequence +inner sequence + 3' sequence
tagggaagagaaggacatatgatgtgcttggatccctatcaggtggacgtgtattgactagtacatgaccacttga

SEQ ID NO: 3583 - DNA, 76 bp, Artificial Sequence
  Description of Artificial Sequence: Synthetic peanut, 5' sequence +inner sequence + 3' sequence
tagggaagagaaggacatatgatcgcaccgtcgatacgtcatgcccgctgacattgactagtacatgaccacttga

SEQ ID NO: 3584 - DNA, 76 bp, Artificial Sequence
  Description of Artificial Sequence: Synthetic peanut, 5' sequence +inner sequence + 3' sequence
tagggaagagaaggacatatgatcgtgggacgcgaaggatgtgacactgcgtgttgactagtacatgaccacttga

SEQ ID NO: 3585 - DNA, 76 bp, Artificial Sequence
  Description of Artificial Sequence: Synthetic peanut, 5' sequence +inner sequence + 3' sequence
tagggaagagaaggacatatgatcgaaccgcaacggtggtcctgcccttgacattgactagtacatgaccacttga

SEQ ID NO: 3586 - DNA, 76 bp, Artificial Sequence
  Description of Artificial Sequence: Synthetic peanut, 5' sequence +inner sequence + 3' sequence
tagggaagagaaggacatatgatgcgcctgaacgtagcgaaaggtggtgcatgttgactagtacatgaccacttga

SEQ ID NO: 3587 - DNA, 76 bp, Artificial Sequence
  Description of Artificial Sequence: Synthetic peanut, 5' sequence +inner sequence + 3' sequence
tagggaagagaaggacatatgatcacaacgcacacgggctgactgactgcgtgttgactagtacatgaccacttga

SEQ ID NO: 3588 - DNA, 76 bp, Artificial Sequence
  Description of Artificial Sequence: Synthetic peanut, 5' sequence +inner sequence + 3' sequence
tagggaagagaaggacatatgatcgcaacggcaggcagagtgaatgtggcgtgttgactagtacatgaccacttga

SEQ ID NO: 3589 - DNA, 76 bp, Artificial Sequence
  Description of Artificial Sequence: Synthetic peanut, 5' sequence +inner sequence + 3' sequence
tagggaagagaaggacatatgatcgacgcggaaggcacggactgaccgtcacattgactagtacatgaccacttga

SEQ ID NO: 3590 - DNA, 76 bp, Artificial Sequence
  Description of Artificial Sequence: Synthetic peanut, 5' sequence +inner sequence + 3' sequence
tagggaagagaaggacatatgatcacgtggcacggtgctatacggcattcgcattgactagtacatgaccacttga

SEQ ID NO: 3591 - DNA, 76 bp, Artificial Sequence
  Description of Artificial Sequence: Synthetic peanut, 5' sequence +inner sequence + 3' sequence
tagggaagagaaggacatatgatgccatgcacgaacactatcatggcggcatgttgactagtacatgaccacttga

SEQ ID NO: 3592 - DNA, 76 bp, Artificial Sequence
  Description of Artificial Sequence: Synthetic peanut, 5' sequence +inner sequence + 3' sequence
tagggaagagaaggacatatgatggcagcaggacatcacacatgcacttcgcattgactagtacatgaccacttga

SEQ ID NO: 3593 - DNA, 76 bp, Artificial Sequence
  Description of Artificial Sequence: Synthetic peanut, 5' sequence +inner sequence + 3' sequence
tagggaagagaaggacatatgatcgtgcagtggcaacggtccgacgcaacacattgactagtacatgaccacttga

SEQ ID NO: 3594 - DNA, 76 bp, Artificial Sequence
  Description of Artificial Sequence: Synthetic peanut, 5' sequence +inner sequence + 3' sequence
tagggaagagaaggacatatgatcgataccgccactacgacatgcacggcgtattgactagtacatgaccacttga

SEQ ID NO: 3595 - DNA, 76 bp, Artificial Sequence
  Description of Artificial Sequence: Synthetic peanut, 5' sequence +inner sequence + 3' sequence
tagggaagagaaggacatatgatccgtagcgacatcaagcgatggtgtgcgtgttgactagtacatgaccacttga

SEQ ID NO: 3596 - DNA, 76 bp, Artificial Sequence
  Description of Artificial Sequence: Synthetic peanut, 5' sequence +inner sequence + 3' sequence
tagggaagagaaggacatatgatcgtatggctgggatcgtacctacgtggacattgactagtacatgaccacttga

SEQ ID NO: 3597 - DNA, 76 bp, Artificial Sequence
  Description of Artificial Sequence: Synthetic peanut, 5' sequence +inner sequence + 3' sequence
tagggaagagaaggacatatgatcgcacactgtgagggcatgtggcacgcagtttgactagtacatgaccacttga

SEQ ID NO: 3598 - DNA, 76 bp, Artificial Sequence
  Description of Artificial Sequence: Synthetic peanut, 5' sequence +inner sequence + 3' sequence
tagggaagagaaggacatatgatcgcaccgtcgatacgtcatgcacgctgacgttgactagtacatgaccacttga

SEQ ID NO: 3599 - DNA, 76 bp, Artificial Sequence
  Description of Artificial Sequence: Synthetic peanut, 5' sequence +inner sequence + 3' sequence
tagggaagagaaggacatatgatcgcaccgtcgatacgtcaagcacgctgacattgactagtacatgaccacttga

SEQ ID NO: 3600 - DNA, 76 bp, Artificial Sequence
  Description of Artificial Sequence: Synthetic peanut, 5' sequence +inner sequence + 3' sequence
tagggaagagaaggacatatgatgcacatggccaacatgcagcaccgtccgcattgactagtacatgaccacttga

SEQ ID NO: 3601 - DNA, 76 bp, Artificial Sequence
  Description of Artificial Sequence: Synthetic peanut, 5' sequence +inner sequence + 3' sequence
tagggaagagaaggacatatgatcgaccatgcaacgaggtgatgtctgtcgcgttgactagtacatgaccacttga

SEQ ID NO: 3602 - DNA, 76 bp, Artificial Sequence
  Description of Artificial Sequence: Synthetic peanut, 5' sequence +inner sequence + 3' sequence
tagggaagagaaggacatatgatcacacacgcaatgtcatcatgttgtgcacattgactagtacatgaccacttga

SEQ ID NO: 3603 - DNA, 76 bp, Artificial Sequence
  Description of Artificial Sequence: Synthetic peanut, 5' sequence +inner sequence + 3' sequence
tagggaagagaaggacatatgatcgcaccgtcgacacgtcatgcacgctgacattgactagtacatgaccacttga

SEQ ID NO: 3604 - DNA, 76 bp, Artificial Sequence
  Description of Artificial Sequence: Synthetic peanut, 5' sequence +inner sequence + 3' sequence
tagggaagagaaggacatatgatcacgcggcacgatacgtcaggtccgatgcattgactagtacatgaccacttga

SEQ ID NO: 3605 - DNA, 76 bp, Artificial Sequence
  Description of Artificial Sequence: Synthetic peanut, 5' sequence +inner sequence + 3' sequence
tagggaagagaaggacatatgatcgacgcgtagcaaggatgccctgatgcacattgactagtacatgaccacttga

SEQ ID NO: 3606 - DNA, 76 bp, Artificial Sequence
  Description of Artificial Sequence: Synthetic peanut, 5' sequence +inner sequence + 3' sequence
tagggaagagaaggacatatgatcgtaccgcagctagacacggcatgggcacattgactagtacatgaccacttga

SEQ ID NO: 3607 - DNA, 76 bp, Artificial Sequence
  Description of Artificial Sequence: Synthetic peanut, 5' sequence +inner sequence + 3' sequence
tagggaagagaaggacatatgatgtgacgcagcaacatcaacaggctgtcgcattgactagtacatgaccacttga

SEQ ID NO: 3608 - DNA, 76 bp, Artificial Sequence
  Description of Artificial Sequence: Synthetic peanut, 5' sequence +inner sequence + 3' sequence
tagggaagagaaggacatatgatcgtaccgaacaggggacgtacgtagacacgttgactagtacatgaccacttga

SEQ ID NO: 3609 - DNA, 76 bp, Artificial Sequence
  Description of Artificial Sequence: Synthetic peanut, 5' sequence +inner sequence + 3' sequence
tagggaagagaaggacatatgatgcgtacacggatcagcacagctactgcacattgactagtacatgaccacttga

SEQ ID NO: 3610 - DNA, 76 bp, Artificial Sequence
  Description of Artificial Sequence: Synthetic peanut, 5' sequence +inner sequence + 3' sequence
tagggaagagaaggacatatgatggcaacgcacatcgtatcacgcatcggaccttgactagtacatgaccacttga

SEQ ID NO: 3611 - DNA, 76 bp, Artificial Sequence
  Description of Artificial Sequence: Synthetic peanut, 5' sequence +inner sequence + 3' sequence
tagggaagagaaggacatatgatgtcattccgcatcctacacgtgggcacgcattgactagtacatgaccacttga

SEQ ID NO: 3612 - DNA, 76 bp, Artificial Sequence
  Description of Artificial Sequence: Synthetic peanut, 5' sequence +inner sequence + 3' sequence
tagggaagagaaggacatatgatcacgatacgtcaaggcatcactccgtcgcattgactagtacatgaccacttga

SEQ ID NO: 3613 - DNA, 76 bp, Artificial Sequence
  Description of Artificial Sequence: Synthetic peanut, 5' sequence +inner sequence + 3' sequence
tagggaagagaaggacatatgatgtcgtgaggcgaaccgtcatgcactgcgtgttgactagtacatgaccacttga

SEQ ID NO: 3614 - DNA, 76 bp, Artificial Sequence
  Description of Artificial Sequence: Synthetic peanut, 5' sequence +inner sequence + 3' sequence
tagggaagagaaggacatatgatcatgcacgctagagcacatcacgctgcgcgttgactagtacatgaccacttga

SEQ ID NO: 3615 - DNA, 76 bp, Artificial Sequence
  Description of Artificial Sequence: Synthetic peanut, 5' sequence +inner sequence + 3' sequence
tagggaagagaaggacatatgatgcactactcgcaccctatcatgaggccatgttgactagtacatgaccacttga

SEQ ID NO: 3616 - DNA, 76 bp, Artificial Sequence
  Description of Artificial Sequence: Synthetic peanut, 5' sequence +inner sequence + 3' sequence
tagggaagagaaggacatatgatggcgtacgatggatgtgcgttgtgtctgtcttgactagtacatgaccacttga

SEQ ID NO: 3617 - DNA, 76 bp, Artificial Sequence
  Description of Artificial Sequence: Synthetic peanut, 5' sequence +inner sequence + 3' sequence
tagggaagagaaggacatatgatgtcgtgcacgaacactatcatggcggcatgttgactagtacatgaccacttga

SEQ ID NO: 3618 - DNA, 76 bp, Artificial Sequence
  Description of Artificial Sequence: Synthetic peanut, 5' sequence +inner sequence + 3' sequence
tagggaagagaaggacatatgatacgcaacggtgactgcatcgtacgtgcacattgactagtacatgaccacttga

SEQ ID NO: 3619 - DNA, 76 bp, Artificial Sequence
  Description of Artificial Sequence: Synthetic peanut, 5' sequence +inner sequence + 3' sequence
tagggaagagaaggacatatgatccgtagcgacatcaagcggtagtgtgcgtgttgactagtacatgaccacttga

SEQ ID NO: 3620 - DNA, 76 bp, Artificial Sequence
  Description of Artificial Sequence: Synthetic peanut, 5' sequence +inner sequence + 3' sequence
tagggaagagaaggacatatgatcgtacgtaccgcgcctacatgtggcagggattgactagtacatgaccacttga

SEQ ID NO: 3621 - DNA, 76 bp, Artificial Sequence
  Description of Artificial Sequence: Synthetic peanut, 5' sequence +inner sequence + 3' sequence
tagggaagagaaggacatatgatggacacagcgtaccattcaagtgatgcacgttgactagtacatgaccacttga

SEQ ID NO: 3622 - DNA, 76 bp, Artificial Sequence
  Description of Artificial Sequence: Synthetic peanut, 5' sequence +inner sequence + 3' sequence
tagggaagagaaggacatatgatgtcatgcacgaacactatcatgtcggcatgttgactagtacatgaccacttga

SEQ ID NO: 3623 - DNA, 76 bp, Artificial Sequence
  Description of Artificial Sequence: Synthetic peanut, 5' sequence +inner sequence + 3' sequence
tagggaagagaaggacatatgatgcacgtggcagcgagcacacttacggcacattgactagtacatgaccacttga

SEQ ID NO: 3624 - DNA, 76 bp, Artificial Sequence
  Description of Artificial Sequence: Synthetic peanut, 5' sequence +inner sequence + 3' sequence
tagggaagagaaggacatatgatcgcaccgcaccgacagtggggacgtatgcattgactagtacatgaccacttga

SEQ ID NO: 3625 - DNA, 76 bp, Artificial Sequence
  Description of Artificial Sequence: Synthetic peanut, 5' sequence +inner sequence + 3' sequence
tagggaagagaaggacatatgatggacggaacggaacaacaagggcaggcatgttgactagtacatgaccacttga

SEQ ID NO: 3626 - DNA, 76 bp, Artificial Sequence
  Description of Artificial Sequence: Synthetic peanut, 5' sequence +inner sequence + 3' sequence
tagggaagagaaggacatatgatcgacgagcaggcagaacgtcttccgtcacgttgactagtacatgaccacttga

SEQ ID NO: 3627 - DNA, 76 bp, Artificial Sequence
  Description of Artificial Sequence: Synthetic peanut, 5' sequence +inner sequence + 3' sequence
tagggaagagaaggacatatgatgccacacagatgacgtatcgtacgtcgcgtttgactagtacatgaccacttga

SEQ ID NO: 3628 - DNA, 76 bp, Artificial Sequence
  Description of Artificial Sequence: Synthetic peanut, 5' sequence +inner sequence + 3' sequence
tagggaagagaaggacatatgatggacgcgatgaccgtatcgtggttgtgtcattgactagtacatgaccacttga

SEQ ID NO: 3629 - DNA, 76 bp, Artificial Sequence
  Description of Artificial Sequence: Synthetic peanut, 5' sequence +inner sequence + 3' sequence
tagggaagagaaggacatatgatgcacaccacgaacataaggtggcatgcacattgactagtacatgaccacttga

SEQ ID NO: 3630 - DNA, 76 bp, Artificial Sequence
  Description of Artificial Sequence: Synthetic peanut, 5' sequence +inner sequence + 3' sequence
tagggaagagaaggacatatgatgcatgtgacggcgatctgaccgcgtggacattgactagtacatgaccacttga

SEQ ID NO: 3631 - DNA, 76 bp, Artificial Sequence
  Description of Artificial Sequence: Synthetic peanut, 5' sequence +inner sequence + 3' sequence
tagggaagagaaggacatatgatggccgacctggatgtgagcatgcatctagtttgactagtacatgaccacttga

SEQ ID NO: 3632 - DNA, 76 bp, Artificial Sequence
  Description of Artificial Sequence: Synthetic peanut, 5' sequence +inner sequence + 3' sequence
tagggaagagaaggacatatgatggcatgcacgcacctacacgttggcacgtattgactagtacatgaccacttga

SEQ ID NO: 3633 - DNA, 76 bp, Artificial Sequence
  Description of Artificial Sequence: Synthetic peanut, 5' sequence +inner sequence + 3' sequence
tagggaagagaaggacatatgatggccgaaacggatgtggccttgtgctacgcttgactagtacatgaccacttga

SEQ ID NO: 3634 - DNA, 76 bp, Artificial Sequence
  Description of Artificial Sequence: Synthetic peanut, 5' sequence +inner sequence + 3' sequence
tagggaagagaaggacatatgatccgtagcgacatcaagcggtggagtgcgtgttgactagtacatgaccacttga

SEQ ID NO: 3635 - DNA, 76 bp, Artificial Sequence
  Description of Artificial Sequence: Synthetic peanut, 5' sequence +inner sequence + 3' sequence
tagggaagagaaggacatatgatggccaagctggatgtgttcaggtcacgacgttgactagtacatgaccacttga

SEQ ID NO: 3636 - DNA, 76 bp, Artificial Sequence
  Description of Artificial Sequence: Synthetic peanut, 5' sequence +inner sequence + 3' sequence
tagggaagagaaggacatatgatgtgctgcgatgggacgtggtaaggtgcatgttgactagtacatgaccacttga

SEQ ID NO: 3637 - DNA, 76 bp, Artificial Sequence
  Description of Artificial Sequence: Synthetic peanut, 5' sequence +inner sequence + 3' sequence
tagggaagagaaggacatatgatggcatgcacgcacctacacgttggtatggattgactagtacatgaccacttga

SEQ ID NO: 3638 - DNA, 76 bp, Artificial Sequence
  Description of Artificial Sequence: Synthetic peanut, 5' sequence +inner sequence + 3' sequence
tagggaagagaaggacatatgatcgcggaccggcaacgtgatggcaatgcacattgactagtacatgaccacttga

SEQ ID NO: 3639 - DNA, 76 bp, Artificial Sequence
  Description of Artificial Sequence: Synthetic peanut, 5' sequence +inner sequence + 3' sequence
tagggaagagaaggacatatgatcacgcacgaacgagactgctaccatgtgcattgactagtacatgaccacttga

SEQ ID NO: 3640 - DNA, 76 bp, Artificial Sequence
  Description of Artificial Sequence: Synthetic peanut, 5' sequence +inner sequence + 3' sequence
tagggaagagaaggacatatgattcgtgtgccgtaacagccctacagtgcgtcttgactagtacatgaccacttga

SEQ ID NO: 3641 - DNA, 76 bp, Artificial Sequence
  Description of Artificial Sequence: Synthetic peanut, 5' sequence +inner sequence + 3' sequence
tagggaagagaaggacatatgatcgtgcatgcacagtgccgtacagttgtgcgttgactagtacatgaccacttga

SEQ ID NO: 3642 - DNA, 75 bp, Artificial Sequence
  Description of Artificial Sequence: Synthetic peanut, 5' sequence +inner sequence + 3' sequence
tagggaagagaaggacatatgatggcctgcgatggatgtggttgtgctcgtcttgactagtacatgaccacttga

SEQ ID NO: 3643 - DNA, 76 bp, Artificial Sequence
  Description of Artificial Sequence: Synthetic peanut, 5' sequence +inner sequence + 3' sequence
tagggaagagaaggacatatgatcgtgccaggcagatcgatgtgttgccgatgttgactagtacatgaccacttga

SEQ ID NO: 3644 - DNA, 76 bp, Artificial Sequence
  Description of Artificial Sequence: Synthetic peanut, 5' sequence +inner sequence + 3' sequence
tagggaagagaaggacatatgatccgtagcgacatcaagcggtggtgtgcttgttgactagtacatgaccacttga

SEQ ID NO: 3645 - DNA, 76 bp, Artificial Sequence
  Description of Artificial Sequence: Synthetic peanut, 5' sequence +inner sequence + 3' sequence
tagggaagagaaggacatatgattggccgaagcgcacctacacgtgtcaggtattgactagtacatgaccacttga

SEQ ID NO: 3646 - DNA, 76 bp, Artificial Sequence
  Description of Artificial Sequence: Synthetic peanut, 5' sequence +inner sequence + 3' sequence
tagggaagagaaggacatatgatagcaccgtcgatacgtcatgcacgctgacattgactagtacatgaccacttga

SEQ ID NO: 3647 - DNA, 76 bp, Artificial Sequence
  Description of Artificial Sequence: Synthetic peanut, 5' sequence +inner sequence + 3' sequence
tagggaagagaaggacatatgatgcacgactcgcaccctatcatgagtccatgttgactagtacatgaccacttga

SEQ ID NO: 3648 - DNA, 75 bp, Artificial Sequence
  Description of Artificial Sequence: Synthetic peanut, 5' sequence +inner sequence + 3' sequence
tagggaagagaaggacatatgatgtgcgaccgaccctatcaagtgcagcatgttgactagtacatgaccacttga

SEQ ID NO: 3649 - DNA, 76 bp, Artificial Sequence
  Description of Artificial Sequence: Synthetic peanut, 5' sequence +inner sequence + 3' sequence
tagggaagagaaggacatatgatcgatgcgcagtcaaccactgtgatgcgacgttgactagtacatgaccacttga

SEQ ID NO: 3650 - DNA, 76 bp, Artificial Sequence
  Description of Artificial Sequence: Synthetic peanut, 5' sequence +inner sequence + 3' sequence
tagggaagagaaggacatatgatcacgtggcaaggacgtggaggtggtgagcattgactagtacatgaccacttga

SEQ ID NO: 3651 - DNA, 76 bp, Artificial Sequence
  Description of Artificial Sequence: Synthetic peanut, 5' sequence +inner sequence + 3' sequence
tagggaagagaaggacatatgatcacgcgagggagcaccgttgcttacgcacattgactagtacatgaccacttga

SEQ ID NO: 3652 - DNA, 77 bp, Artificial Sequence
  Description of Artificial Sequence: Synthetic peanut, 5' sequence +inner sequence + 3' sequence
tagggaagagaaggacatatgattggcgtgcacaggagcagtcatacgtacgcattgactagtacatgaccacttga

SEQ ID NO: 3653 - DNA, 76 bp, Artificial Sequence
  Description of Artificial Sequence: Synthetic peanut, 5' sequence +inner sequence + 3' sequence
tagggaagagaaggacatatgatccgcacgtagccctatcattggtgcatgcattgactagtacatgaccacttga

SEQ ID NO: 3654 - DNA, 76 bp, Artificial Sequence
  Description of Artificial Sequence: Synthetic peanut, 5' sequence +inner sequence + 3' sequence
tagggaagagaaggacatatgatggccaaacggaacgtagcacgggggacgtattgactagtacatgaccacttga

SEQ ID NO: 3655 - DNA, 76 bp, Artificial Sequence
  Description of Artificial Sequence: Synthetic peanut, 5' sequence +inner sequence + 3' sequence
tagggaagagaaggacatatgatcgtgcgtgcggggaaggcgtgtgttacgcattgactagtacatgaccacttga

SEQ ID NO: 3656 - DNA, 76 bp, Artificial Sequence
  Description of Artificial Sequence: Synthetic peanut, 5' sequence +inner sequence + 3' sequence
tagggaagagaaggacatatgatcgacgggcacacgtgatcttgtaccgcgcattgactagtacatgaccacttga

SEQ ID NO: 3657 - DNA, 76 bp, Artificial Sequence
  Description of Artificial Sequence: Synthetic peanut, 5' sequence +inner sequence + 3' sequence
tagggaagagaaggacatatgatggacgcgatgggcgtgggtatgcacttggcttgactagtacatgaccacttga

SEQ ID NO: 3658 - DNA, 76 bp, Artificial Sequence
  Description of Artificial Sequence: Synthetic peanut, 5' sequence +inner sequence + 3' sequence
tagggaagagaaggacatatgatccgttacggaacaggtgatcgtcctgcacattgactagtacatgaccacttga

SEQ ID NO: 3659 - DNA, 77 bp, Artificial Sequence
  Description of Artificial Sequence: Synthetic peanut, 5' sequence +inner sequence + 3' sequence
tagggaagagaaggacatatgatggccgtacgatggatgtgggttgtgctcgtcttgactagtacatgaccacttga

SEQ ID NO: 3660 - DNA, 76 bp, Artificial Sequence
  Description of Artificial Sequence: Synthetic peanut, 5' sequence +inner sequence + 3' sequence
tagggaagagaaggacatatgatcgatggcaagctcgtccatacaatgcgtcattgactagtacatgaccacttga

SEQ ID NO: 3661 - DNA, 76 bp, Artificial Sequence
  Description of Artificial Sequence: Synthetic peanut, 5' sequence +inner sequence + 3' sequence
tagggaagagaaggacatatgatgtcattccgcatcctacatgtgggcacgtattgactagtacatgaccacttga

SEQ ID NO: 3662 - DNA, 76 bp, Artificial Sequence
  Description of Artificial Sequence: Synthetic peanut, 5' sequence +inner sequence + 3' sequence
tagggaagagaaggacatatgatggcatgcacgcacctacacgtgtgtatggattgactagtacatgaccacttga

SEQ ID NO: 3663 - DNA, 76 bp, Artificial Sequence
  Description of Artificial Sequence: Synthetic peanut, 5' sequence +inner sequence + 3' sequence
tagggaagagaaggacatatgattgcgtcacatggccgtatcttagcgtgtcgttgactagtacatgaccacttga

SEQ ID NO: 3664 - DNA, 76 bp, Artificial Sequence
  Description of Artificial Sequence: Synthetic peanut, 5' sequence +inner sequence + 3' sequence
tagggaagagaaggacatatgatcgatgcgctgtggaaggagtgtggcacgtattgactagtacatgaccacttga

SEQ ID NO: 3665 - DNA, 76 bp, Artificial Sequence
  Description of Artificial Sequence: Synthetic peanut, 5' sequence +inner sequence + 3' sequence
tagggaagagaaggacatatgatgacatgacgtgaccgaacgtgtacggggcattgactagtacatgaccacttga

SEQ ID NO: 3666 - DNA, 76 bp, Artificial Sequence
  Description of Artificial Sequence: Synthetic peanut, 5' sequence +inner sequence + 3' sequence
tagggaagagaaggacatatgatcgcaccgtcaagcgggaaggcactttggcgttgactagtacatgaccacttga

SEQ ID NO: 3667 - DNA, 76 bp, Artificial Sequence
  Description of Artificial Sequence: Synthetic peanut, 5' sequence +inner sequence + 3' sequence
tagggaagagaaggacatatgatcgcatcgcaggtacggctggtagctaggcattgactagtacatgaccacttga

SEQ ID NO: 3668 - DNA, 76 bp, Artificial Sequence
  Description of Artificial Sequence: Synthetic peanut, 5' sequence +inner sequence + 3' sequence
tagggaagagaaggacatatgatcgcaccatggcacagtcacgcacgcgtcgattgactagtacatgaccacttga

SEQ ID NO: 3669 - DNA, 76 bp, Artificial Sequence
  Description of Artificial Sequence: Synthetic peanut, 5' sequence +inner sequence + 3' sequence
tagggaagagaaggacatatgatcgaccagggcagggacagggacagtgcatgttgactagtacatgaccacttga

SEQ ID NO: 3670 - DNA, 76 bp, Artificial Sequence
  Description of Artificial Sequence: Synthetic peanut, 5' sequence +inner sequence + 3' sequence
tagggaagagaaggacatatgatcgtaccgcaagtcggtcgtgcattacggtcttgactagtacatgaccacttga

SEQ ID NO: 3671 - DNA, 76 bp, Artificial Sequence
  Description of Artificial Sequence: Synthetic peanut, 5' sequence +inner sequence + 3' sequence
tagggaagagaaggacatatgattggacagcgctgatcaggcaacgtggtgcattgactagtacatgaccacttga

SEQ ID NO: 3672 - DNA, 76 bp, Artificial Sequence
  Description of Artificial Sequence: Synthetic peanut, 5' sequence +inner sequence + 3' sequence
tagggaagagaaggacatatgatcgttgcgcaagtgacgtcgtgtctgcgacattgactagtacatgaccacttga

SEQ ID NO: 3673 - DNA, 76 bp, Artificial Sequence
  Description of Artificial Sequence: Synthetic peanut, 5' sequence +inner sequence + 3' sequence
tagggaagagaaggacatatgatggacgcaccgaaccgcaagccaagtgagcattgactagtacatgaccacttga

SEQ ID NO: 3674 - DNA, 76 bp, Artificial Sequence
  Description of Artificial Sequence: Synthetic peanut, 5' sequence +inner sequence + 3' sequence
tagggaagagaaggacatatgatcgcaacggcatgcctcttccatgctgcgcattgactagtacatgaccacttga

SEQ ID NO: 3675 - DNA, 76 bp, Artificial Sequence
  Description of Artificial Sequence: Synthetic peanut, 5' sequence +inner sequence + 3' sequence
tagggaagagaaggacatatgatcgtgcacgagtacggcaatgtctttgcgtgttgactagtacatgaccacttga

SEQ ID NO: 3676 - DNA, 76 bp, Artificial Sequence
  Description of Artificial Sequence: Synthetic peanut, 5' sequence +inner sequence + 3' sequence
tagggaagagaaggacatatgatgcgtgcagcgtgtcccgatggatgtcgtcattgactagtacatgaccacttga

SEQ ID NO: 3677 - DNA, 76 bp, Artificial Sequence
  Description of Artificial Sequence: Synthetic peanut, 5' sequence +inner sequence + 3' sequence
tagggaagagaaggacatatgatcgtaccgtgactgggcatgcactcacgtcattgactagtacatgaccacttga

SEQ ID NO: 3678 - DNA, 76 bp, Artificial Sequence
  Description of Artificial Sequence: Synthetic peanut, 5' sequence +inner sequence + 3' sequence
tagggaagagaaggacatatgatccgtagctacatcaagcggtggtgtgcgtgttgactagtacatgaccacttga

SEQ ID NO: 3679 - DNA, 76 bp, Artificial Sequence
  Description of Artificial Sequence: Synthetic peanut, 5' sequence +inner sequence + 3' sequence
tagggaagagaaggacatatgatcgtggctgacaagtgcgtgatgactgcgtattgactagtacatgaccacttga

SEQ ID NO: 3680 - DNA, 76 bp, Artificial Sequence
  Description of Artificial Sequence: Synthetic peanut, 5' sequence +inner sequence + 3' sequence
tagggaagagaaggacatatgatgtcatgcgctgggtagtgatcacgtacggtttgactagtacatgaccacttga

SEQ ID NO: 3681 - DNA, 76 bp, Artificial Sequence
  Description of Artificial Sequence: Synthetic peanut, 5' sequence +inner sequence + 3' sequence
tagggaagagaaggacatatgatcgacacgagtacgtcatcgttgcaggcatgttgactagtacatgaccacttga

SEQ ID NO: 3682 - DNA, 76 bp, Artificial Sequence
  Description of Artificial Sequence: Synthetic peanut, 5' sequence +inner sequence + 3' sequence
tagggaagagaaggacatatgatccaccgatggaccgtagtcgtaccgtcacgttgactagtacatgaccacttga

SEQ ID NO: 3683 - DNA, 76 bp, Artificial Sequence
  Description of Artificial Sequence: Synthetic peanut, 5' sequence +inner sequence + 3' sequence
tagggaagagaaggacatatgatcgcaccgtcgatacgtcatacacgctgacattgactagtacatgaccacttga

SEQ ID NO: 3684 - DNA, 76 bp, Artificial Sequence
  Description of Artificial Sequence: Synthetic peanut, 5' sequence +inner sequence + 3' sequence
tagggaagagaaggacatatgatgtccttccgcatcctacacgtgggcacgtattgactagtacatgaccacttga

SEQ ID NO: 3685 - DNA, 76 bp, Artificial Sequence
  Description of Artificial Sequence: Synthetic peanut, 5' sequence +inner sequence + 3' sequence
tagggaagagaaggacatatgatcctcacgtagccctatcagtggtgcatgcattgactagtacatgaccacttga

SEQ ID NO: 3686 - DNA, 76 bp, Artificial Sequence
  Description of Artificial Sequence: Synthetic peanut, 5' sequence +inner sequence + 3' sequence
tagggaagagaaggacatatgatcccatcgcatgactgaacgcgtccgtgggcttgactagtacatgaccacttga

SEQ ID NO: 3687 - DNA, 76 bp, Artificial Sequence
  Description of Artificial Sequence: Synthetic peanut, 5' sequence +inner sequence + 3' sequence
tagggaagagaaggacatatgatgcattggcgtgacatcgtaccgacggcatgttgactagtacatgaccacttga

SEQ ID NO: 3688 - DNA, 76 bp, Artificial Sequence
  Description of Artificial Sequence: Synthetic peanut, 5' sequence +inner sequence + 3' sequence
tagggaagagaaggacatatgatcatgcaaggcgacgtgcagcatccttcgcattgactagtacatgaccacttga

SEQ ID NO: 3689 - DNA, 75 bp, Artificial Sequence
  Description of Artificial Sequence: Synthetic peanut, 5' sequence +inner sequence + 3' sequence
tagggaagagaaggacatatgatcgacatgacccaggcgacgtgactgcatgttgactagtacatgaccacttga

SEQ ID NO: 3690 - DNA, 76 bp, Artificial Sequence
  Description of Artificial Sequence: Synthetic peanut, 5' sequence +inner sequence + 3' sequence
tagggaagagaaggacatatgatcacgtcaggcaaagggacgtatgcccaccgttgactagtacatgaccacttga

SEQ ID NO: 3691 - DNA, 76 bp, Artificial Sequence
  Description of Artificial Sequence: Synthetic peanut, 5' sequence +inner sequence + 3' sequence
tagggaagagaaggacatatgattgcaccggcactgacggactgagctgcacgttgactagtacatgaccacttga

SEQ ID NO: 3692 - DNA, 76 bp, Artificial Sequence
  Description of Artificial Sequence: Synthetic peanut, 5' sequence +inner sequence + 3' sequence
tagggaagagaaggacatatgatggccggaacgaaacgcggggccatgcactattgactagtacatgaccacttga

SEQ ID NO: 3693 - DNA, 76 bp, Artificial Sequence
  Description of Artificial Sequence: Synthetic peanut, 5' sequence +inner sequence + 3' sequence
tagggaagagaaggacatatgatgcatgacgagaacgcacatgccgatgcacattgactagtacatgaccacttga

SEQ ID NO: 3694 - DNA, 76 bp, Artificial Sequence
  Description of Artificial Sequence: Synthetic peanut, 5' sequence +inner sequence + 3' sequence
tagggaagagaaggacatatgatcacgtgagaggcacgacaagctgtttggcattgactagtacatgaccacttga

SEQ ID NO: 3695 - DNA, 76 bp, Artificial Sequence
  Description of Artificial Sequence: Synthetic peanut, 5' sequence +inner sequence + 3' sequence
tagggaagagaaggacatatgatcatgtgtgcggcactgactatcgagtgggattgactagtacatgaccacttga

SEQ ID NO: 3696 - DNA, 76 bp, Artificial Sequence
  Description of Artificial Sequence: Synthetic peanut, 5' sequence +inner sequence + 3' sequence
tagggaagagaaggacatatgatgcgctgcgaagaccggtaatgacgtggacattgactagtacatgaccacttga

SEQ ID NO: 3697 - DNA, 76 bp, Artificial Sequence
  Description of Artificial Sequence: Synthetic peanut, 5' sequence +inner sequence + 3' sequence
tagggaagagaaggacatatgatacgacaaggcaacgtgtcctacgtgttggtttgactagtacatgaccacttga

SEQ ID NO: 3698 - DNA, 76 bp, Artificial Sequence
  Description of Artificial Sequence: Synthetic peanut, 5' sequence +inner sequence + 3' sequence
tagggaagagaaggacatatgatgacctaagcgcaccctagcatgtgttcatgttgactagtacatgaccacttga

SEQ ID NO: 3699 - DNA, 76 bp, Artificial Sequence
  Description of Artificial Sequence: Synthetic peanut, 5' sequence +inner sequence + 3' sequence
tagggaagagaaggacatatgatccgacgacatgaccgatgtggcattgcgtattgactagtacatgaccacttga

SEQ ID NO: 3700 - DNA, 76 bp, Artificial Sequence
  Description of Artificial Sequence: Synthetic peanut, 5' sequence +inner sequence + 3' sequence
tagggaagagaaggacatatgatcgcaccgcctcacgtacggcatgttgcacattgactagtacatgaccacttga

SEQ ID NO: 3701 - DNA, 76 bp, Artificial Sequence
  Description of Artificial Sequence: Synthetic peanut, 5' sequence +inner sequence + 3' sequence
tagggaagagaaggacatatgattgcgtcgtatgtgcggctcggatgtgtgtcttgactagtacatgaccacttga

SEQ ID NO: 3702 - DNA, 76 bp, Artificial Sequence
  Description of Artificial Sequence: Synthetic peanut, 5' sequence +inner sequence + 3' sequence
tagggaagagaaggacatatgatggcatgcgatggatgaggtgctgcactagtttgactagtacatgaccacttga

SEQ ID NO: 3703 - DNA, 76 bp, Artificial Sequence
  Description of Artificial Sequence: Synthetic peanut, 5' sequence +inner sequence + 3' sequence
tagggaagagaaggacatatgatgtacgcggctggatacaagtacggcatggattgactagtacatgaccacttga

SEQ ID NO: 3704 - DNA, 76 bp, Artificial Sequence
  Description of Artificial Sequence: Synthetic peanut, 5' sequence +inner sequence + 3' sequence
tagggaagagaaggacatatgatcgatacgacgaggctcacacaggctgcgcattgactagtacatgaccacttga

SEQ ID NO: 3705 - DNA, 76 bp, Artificial Sequence
  Description of Artificial Sequence: Synthetic peanut, 5' sequence +inner sequence + 3' sequence
tagggaagagaaggacatatgatcgcaccgtcgatacgtcatgcacgctgactttgactagtacatgaccacttga

SEQ ID NO: 3706 - DNA, 76 bp, Artificial Sequence
  Description of Artificial Sequence: Synthetic peanut, 5' sequence +inner sequence + 3' sequence
tagggaagagaaggacatatgatccacgacatggaacgtagcgtcacttcgcgttgactagtacatgaccacttga

SEQ ID NO: 3707 - DNA, 76 bp, Artificial Sequence
  Description of Artificial Sequence: Synthetic peanut, 5' sequence +inner sequence + 3' sequence
tagggaagagaaggacatatgatgtcatgcacgaacactattatggcggcatgttgactagtacatgaccacttga

SEQ ID NO: 3708 - DNA, 77 bp, Artificial Sequence
  Description of Artificial Sequence: Synthetic peanut, 5' sequence +inner sequence + 3' sequence
tagggaagagaaggacatatgatcatgccatgacgtccatgggtcctacgcgcattgactagtacatgaccacttga

SEQ ID NO: 3709 - DNA, 76 bp, Artificial Sequence
  Description of Artificial Sequence: Synthetic peanut, 5' sequence +inner sequence + 3' sequence
tagggaagagaaggacatatgatcgaccaggacgaatcgtactggcctgcgcattgactagtacatgaccacttga

SEQ ID NO: 3710 - DNA, 76 bp, Artificial Sequence
  Description of Artificial Sequence: Synthetic peanut, 5' sequence +inner sequence + 3' sequence
tagggaagagaaggacatatgatccatgtggcgcatgtgttcagtgctgcgtgttgactagtacatgaccacttga

SEQ ID NO: 3711 - DNA, 76 bp, Artificial Sequence
  Description of Artificial Sequence: Synthetic peanut, 5' sequence +inner sequence + 3' sequence
tagggaagagaaggacatatgatccatccgatgcgtcacgcaactgtgccatgttgactagtacatgaccacttga

SEQ ID NO: 3712 - DNA, 76 bp, Artificial Sequence
  Description of Artificial Sequence: Synthetic peanut, 5' sequence +inner sequence + 3' sequence
tagggaagagaaggacatatgatcgcacctacagtcagtcacgatgctacgtgttgactagtacatgaccacttga

SEQ ID NO: 3713 - DNA, 76 bp, Artificial Sequence
  Description of Artificial Sequence: Synthetic peanut, 5' sequence +inner sequence + 3' sequence
tagggaagagaaggacatatgatcgaaccgaacaggcacgacctcacggggtgttgactagtacatgaccacttga

SEQ ID NO: 3714 - DNA, 76 bp, Artificial Sequence
  Description of Artificial Sequence: Synthetic peanut, 5' sequence +inner sequence + 3' sequence
tagggaagagaaggacatatgatgtacacgatgcaccttcaagttgtgatgtattgactagtacatgaccacttga

SEQ ID NO: 3715 - DNA, 76 bp, Artificial Sequence
  Description of Artificial Sequence: Synthetic peanut, 5' sequence +inner sequence + 3' sequence
tagggaagagaaggacatatgatgcccaatctgacctatcaacgtgtcgtggattgactagtacatgaccacttga

SEQ ID NO: 3716 - DNA, 76 bp, Artificial Sequence
  Description of Artificial Sequence: Synthetic peanut, 5' sequence +inner sequence + 3' sequence
tagggaagagaaggacatatgatcatgcaggacgcacgactagacatggcgtattgactagtacatgaccacttga

SEQ ID NO: 3717 - DNA, 76 bp, Artificial Sequence
  Description of Artificial Sequence: Synthetic peanut, 5' sequence +inner sequence + 3' sequence
tagggaagagaaggacatatgatcgcaccgtcgatacgtcatgcacgctcacattgactagtacatgaccacttga

SEQ ID NO: 3718 - DNA, 76 bp, Artificial Sequence
  Description of Artificial Sequence: Synthetic peanut, 5' sequence +inner sequence + 3' sequence
tagggaagagaaggacatatgatgcgtgcagaggatgtgcccttcgtcccgcattgactagtacatgaccacttga

SEQ ID NO: 3719 - DNA, 76 bp, Artificial Sequence
  Description of Artificial Sequence: Synthetic peanut, 5' sequence +inner sequence + 3' sequence
tagggaagagaaggacatatgatgcatcagcaggcgcgatcgaacctggcacattgactagtacatgaccacttga

SEQ ID NO: 3720 - DNA, 76 bp, Artificial Sequence
  Description of Artificial Sequence: Synthetic peanut, 5' sequence +inner sequence + 3' sequence
tagggaagagaaggacatatgatcgagcgcacgtgaggcactgtatcgtcacgttgactagtacatgaccacttga

SEQ ID NO: 3721 - DNA, 76 bp, Artificial Sequence
  Description of Artificial Sequence: Synthetic peanut, 5' sequence +inner sequence + 3' sequence
tagggaagagaaggacatatgatccacatggtcgcatcgaacggtggtacgcattgactagtacatgaccacttga

SEQ ID NO: 3722 - DNA, 76 bp, Artificial Sequence
  Description of Artificial Sequence: Synthetic peanut, 5' sequence +inner sequence + 3' sequence
tagggaagagaaggacatatgattggcatgggacgatgcgccttccctgcatgttgactagtacatgaccacttga

SEQ ID NO: 3723 - DNA, 76 bp, Artificial Sequence
  Description of Artificial Sequence: Synthetic peanut, 5' sequence +inner sequence + 3' sequence
tagggaagagaaggacatatgatgcacaacacgtagggaacagtacgtacgcattgactagtacatgaccacttga

SEQ ID NO: 3724 - DNA, 76 bp, Artificial Sequence
  Description of Artificial Sequence: Synthetic peanut, 5' sequence +inner sequence + 3' sequence
tagggaagagaaggacatatgatggacgcagcttgcctactgttggtcacgtattgactagtacatgaccacttga

SEQ ID NO: 3725 - DNA, 76 bp, Artificial Sequence
  Description of Artificial Sequence: Synthetic peanut, 5' sequence +inner sequence + 3' sequence
tagggaagagaaggacatatgatcgcgtcagcagcgaatggcatgtctcgaccttgactagtacatgaccacttga

SEQ ID NO: 3726 - DNA, 76 bp, Artificial Sequence
  Description of Artificial Sequence: Synthetic peanut, 5' sequence +inner sequence + 3' sequence
tagggaagagaaggacatatgatcacgtgatgcgagggcgtatggtctgccgtttgactagtacatgaccacttga

SEQ ID NO: 3727 - DNA, 76 bp, Artificial Sequence
  Description of Artificial Sequence: Synthetic peanut, 5' sequence +inner sequence + 3' sequence
tagggaagagaaggacatatgatgtcatgcacgcacactatcatggcggcatgttgactagtacatgaccacttga

SEQ ID NO: 3728 - DNA, 76 bp, Artificial Sequence
  Description of Artificial Sequence: Synthetic peanut, 5' sequence +inner sequence + 3' sequence
tagggaagagaaggacatatgatgcacgaatcgcaccctatcatgaggccatgttgactagtacatgaccacttga

SEQ ID NO: 3729 - DNA, 76 bp, Artificial Sequence
  Description of Artificial Sequence: Synthetic peanut, 5' sequence +inner sequence + 3' sequence
tagggaagagaaggacatatgatacgaacggagcagaggtccacgcatgcacgttgactagtacatgaccacttga

SEQ ID NO: 3730 - DNA, 76 bp, Artificial Sequence
  Description of Artificial Sequence: Synthetic peanut, 5' sequence +inner sequence + 3' sequence
tagggaagagaaggacatatgatcacgtgcggaggacaacgccatactgcgtgttgactagtacatgaccacttga

SEQ ID NO: 3731 - DNA, 76 bp, Artificial Sequence
  Description of Artificial Sequence: Synthetic peanut, 5' sequence +inner sequence + 3' sequence
tagggaagagaaggacatatgatcgtgacaggcaggaaacatcgatgtgcgccttgactagtacatgaccacttga

SEQ ID NO: 3732 - DNA, 76 bp, Artificial Sequence
  Description of Artificial Sequence: Synthetic peanut, 5' sequence +inner sequence + 3' sequence
tagggaagagaaggacatatgatcgtgccacaagtcgacacgcatatcacgcgttgactagtacatgaccacttga

SEQ ID NO: 3733 - DNA, 76 bp, Artificial Sequence
  Description of Artificial Sequence: Synthetic peanut, 5' sequence +inner sequence + 3' sequence
tagggaagagaaggacatatgatcacgtacggcacaacgactggaggtgagcattgactagtacatgaccacttga

SEQ ID NO: 3734 - DNA, 76 bp, Artificial Sequence
  Description of Artificial Sequence: Synthetic peanut, 5' sequence +inner sequence + 3' sequence
tagggaagagaaggacatatgatgccgtagcgaaccgctgtcattgtgcgatgttgactagtacatgaccacttga

SEQ ID NO: 3735 - DNA, 76 bp, Artificial Sequence
  Description of Artificial Sequence: Synthetic peanut, 5' sequence +inner sequence + 3' sequence
tagggaagagaaggacatatgatcacgcacaggtgatgcatggatcacgcgcattgactagtacatgaccacttga

SEQ ID NO: 3736 - DNA, 76 bp, Artificial Sequence
  Description of Artificial Sequence: Synthetic peanut, 5' sequence +inner sequence + 3' sequence
tagggaagagaaggacatatgatcgacgcacgaaacgaacatgttgtcacgcattgactagtacatgaccacttga

SEQ ID NO: 3737 - DNA, 76 bp, Artificial Sequence
  Description of Artificial Sequence: Synthetic peanut, 5' sequence +inner sequence + 3' sequence
tagggaagagaaggacatatgatcgcgccaacaacagggaacgtaacgccatgttgactagtacatgaccacttga

SEQ ID NO: 3738 - DNA, 76 bp, Artificial Sequence
  Description of Artificial Sequence: Synthetic peanut, 5' sequence +inner sequence + 3' sequence
tagggaagagaaggacatatgatccatgtgaacgtgcgtaccgaaagtgcgtcttgactagtacatgaccacttga

SEQ ID NO: 3739 - DNA, 76 bp, Artificial Sequence
  Description of Artificial Sequence: Synthetic peanut, 5' sequence +inner sequence + 3' sequence
tagggaagagaaggacatatgatcgacgcatgaccagtggcgatgtatgcacgttgactagtacatgaccacttga

SEQ ID NO: 3740 - DNA, 76 bp, Artificial Sequence
  Description of Artificial Sequence: Synthetic peanut, 5' sequence +inner sequence + 3' sequence
tagggaagagaaggacatatgatgtgcgatcgtacctatcaatggtcatcgtattgactagtacatgaccacttga

SEQ ID NO: 3741 - DNA, 76 bp, Artificial Sequence
  Description of Artificial Sequence: Synthetic peanut, 5' sequence +inner sequence + 3' sequence
tagggaagagaaggacatatgatggccgaatgaccgtctcatgtgagcatggattgactagtacatgaccacttga

SEQ ID NO: 3742 - DNA, 76 bp, Artificial Sequence
  Description of Artificial Sequence: Synthetic peanut, 5' sequence +inner sequence + 3' sequence
tagggaagagaaggacatatgatccgtagagacatcaagcggtggtgtgcgtgttgactagtacatgaccacttga

SEQ ID NO: 3743 - DNA, 76 bp, Artificial Sequence
  Description of Artificial Sequence: Synthetic peanut, 5' sequence +inner sequence + 3' sequence
tagggaagagaaggacatatgatcgtgacacgcaccattacgtccagctgcgcttgactagtacatgaccacttga

SEQ ID NO: 3744 - DNA, 76 bp, Artificial Sequence
  Description of Artificial Sequence: Synthetic peanut, 5' sequence +inner sequence + 3' sequence
tagggaagagaaggacatatgatacgacgaacggtagcagcactgacgacacattgactagtacatgaccacttga

SEQ ID NO: 3745 - DNA, 76 bp, Artificial Sequence
  Description of Artificial Sequence: Synthetic peanut, 5' sequence +inner sequence + 3' sequence
tagggaagagaaggacatatgatcacgcgtgctggtctgcatgtccatgcgcattgactagtacatgaccacttga

SEQ ID NO: 3746 - DNA, 76 bp, Artificial Sequence
  Description of Artificial Sequence: Synthetic peanut, 5' sequence +inner sequence + 3' sequence
tagggaagagaaggacatatgatggcatgcacgcaccctatcatgtaggcatgttgactagtacatgaccacttga

SEQ ID NO: 3747 - DNA, 76 bp, Artificial Sequence
  Description of Artificial Sequence: Synthetic peanut, 5' sequence +inner sequence + 3' sequence
tagggaagagaaggacatatgatcacgcagtcgaaactcagtgtcactgcacgttgactagtacatgaccacttga

SEQ ID NO: 3748 - DNA, 76 bp, Artificial Sequence
  Description of Artificial Sequence: Synthetic peanut, 5' sequence +inner sequence + 3' sequence
tagggaagagaaggacatatgatcgacccgcagacgttgtgtggtggtgcgtattgactagtacatgaccacttga

SEQ ID NO: 3749 - DNA, 76 bp, Artificial Sequence
  Description of Artificial Sequence: Synthetic peanut, 5' sequence +inner sequence + 3' sequence
tagggaagagaaggacatatgatcgtatgccaaacgcaacctacagctgtggtttgactagtacatgaccacttga

SEQ ID NO: 3750 - DNA, 76 bp, Artificial Sequence
  Description of Artificial Sequence: Synthetic peanut, 5' sequence +inner sequence + 3' sequence
tagggaagagaaggacatatgatggcctgcgatggatgtggtgctgcactagtttgactagtacatgaccacttga

SEQ ID NO: 3751 - DNA, 76 bp, Artificial Sequence
  Description of Artificial Sequence: Synthetic peanut, 5' sequence +inner sequence + 3' sequence
tagggaagagaaggacatatgataggcacacgtgaaggcacatcgactacgcattgactagtacatgaccacttga

SEQ ID NO: 3752 - DNA, 76 bp, Artificial Sequence
  Description of Artificial Sequence: Synthetic peanut, 5' sequence +inner sequence + 3' sequence
tagggaagagaaggacatatgatcacgcatggaaggcacgtcaaccacgggcattgactagtacatgaccacttga

SEQ ID NO: 3753 - DNA, 76 bp, Artificial Sequence
  Description of Artificial Sequence: Synthetic peanut, 5' sequence +inner sequence + 3' sequence
tagggaagagaaggacatatgatgacatgcacgaacactatcatggcggcatgttgactagtacatgaccacttga

SEQ ID NO: 3754 - DNA, 76 bp, Artificial Sequence
  Description of Artificial Sequence: Synthetic peanut, 5' sequence +inner sequence + 3' sequence
tagggaagagaaggacatatgatcgcaccggcgatacgtcatgcacgctgacattgactagtacatgaccacttga

SEQ ID NO: 3755 - DNA, 76 bp, Artificial Sequence
  Description of Artificial Sequence: Synthetic peanut, 5' sequence +inner sequence + 3' sequence
tagggaagagaaggacatatgatcctgaccgcaatggttagggaccaggcacgttgactagtacatgaccacttga

SEQ ID NO: 3756 - DNA, 76 bp, Artificial Sequence
  Description of Artificial Sequence: Synthetic peanut, 5' sequence +inner sequence + 3' sequence
tagggaagagaaggacatatgatccgtagcggcatcaagcggtggtgtgcgtgttgactagtacatgaccacttga

SEQ ID NO: 3757 - DNA, 76 bp, Artificial Sequence
  Description of Artificial Sequence: Synthetic peanut, 5' sequence +inner sequence + 3' sequence
tagggaagagaaggacatatgatcgcaacggtacatcagctgcaacgtggccattgactagtacatgaccacttga

SEQ ID NO: 3758 - DNA, 76 bp, Artificial Sequence
  Description of Artificial Sequence: Synthetic peanut, 5' sequence +inner sequence + 3' sequence
tagggaagagaaggacatatgattggacgcacaatacacgtcaaggcggcatgttgactagtacatgaccacttga

SEQ ID NO: 3759 - DNA, 76 bp, Artificial Sequence
  Description of Artificial Sequence: Synthetic peanut, 5' sequence +inner sequence + 3' sequence
tagggaagagaaggacatatgatccacgcagcacacggtaatggctctgcacgttgactagtacatgaccacttga

SEQ ID NO: 3760 - DNA, 76 bp, Artificial Sequence
  Description of Artificial Sequence: Synthetic peanut, 5' sequence +inner sequence + 3' sequence
tagggaagagaaggacatatgatccgttacgaccgcaagactgtgtgtacgtgttgactagtacatgaccacttga

SEQ ID NO: 3761 - DNA, 76 bp, Artificial Sequence
  Description of Artificial Sequence: Synthetic peanut, 5' sequence +inner sequence + 3' sequence
tagggaagagaaggacatatgatcatgtgtgcagcgaatgccctgacgtggacttgactagtacatgaccacttga

SEQ ID NO: 3762 - DNA, 76 bp, Artificial Sequence
  Description of Artificial Sequence: Synthetic peanut, 5' sequence +inner sequence + 3' sequence
tagggaagagaaggacatatgatgcgatccgacggagacacgtccacttcgcgttgactagtacatgaccacttga

SEQ ID NO: 3763 - DNA, 76 bp, Artificial Sequence
  Description of Artificial Sequence: Synthetic peanut, 5' sequence +inner sequence + 3' sequence
tagggaagagaaggacatatgatgcaacgaacgtacctgtgtcgtgacgcgtcttgactagtacatgaccacttga

SEQ ID NO: 3764 - DNA, 76 bp, Artificial Sequence
  Description of Artificial Sequence: Synthetic peanut, 5' sequence +inner sequence + 3' sequence
tagggaagagaaggacatatgatgcctgctcaaccctacaacgtggccacgtattgactagtacatgaccacttga

SEQ ID NO: 3765 - DNA, 76 bp, Artificial Sequence
  Description of Artificial Sequence: Synthetic peanut, 5' sequence +inner sequence + 3' sequence
tagggaagagaaggacatatgatcgatgcagcgagtgacgtagcagctacggattgactagtacatgaccacttga

SEQ ID NO: 3766 - DNA, 76 bp, Artificial Sequence
  Description of Artificial Sequence: Synthetic peanut, 5' sequence +inner sequence + 3' sequence
tagggaagagaaggacatatgatcgaggcaggcaaacagcagtacagctcggtttgactagtacatgaccacttga

SEQ ID NO: 3767 - DNA, 76 bp, Artificial Sequence
  Description of Artificial Sequence: Synthetic peanut, 5' sequence +inner sequence + 3' sequence
tagggaagagaaggacatatgatcgtacgccaccattgaccgtagcatgcacgttgactagtacatgaccacttga

SEQ ID NO: 3768 - DNA, 76 bp, Artificial Sequence
  Description of Artificial Sequence: Synthetic peanut, 5' sequence +inner sequence + 3' sequence
tagggaagagaaggacatatgatggcatgcacgcacatacacgtgggtatggattgactagtacatgaccacttga

SEQ ID NO: 3769 - DNA, 76 bp, Artificial Sequence
  Description of Artificial Sequence: Synthetic peanut, 5' sequence +inner sequence + 3' sequence
tagggaagagaaggacatatgatcgacacggctgacaatagcgttctgacgcattgactagtacatgaccacttga

SEQ ID NO: 3770 - DNA, 76 bp, Artificial Sequence
  Description of Artificial Sequence: Synthetic peanut, 5' sequence +inner sequence + 3' sequence
tagggaagagaaggacatatgatcgcaccgtacatgcaggactgtcatcgtgattgactagtacatgaccacttga

SEQ ID NO: 3771 - DNA, 76 bp, Artificial Sequence
  Description of Artificial Sequence: Synthetic peanut, 5' sequence +inner sequence + 3' sequence
tagggaagagaaggacatatgatcgagccgaagcggttggggacgatggcacattgactagtacatgaccacttga

SEQ ID NO: 3772 - DNA, 76 bp, Artificial Sequence
  Description of Artificial Sequence: Synthetic peanut, 5' sequence +inner sequence + 3' sequence
tagggaagagaaggacatatgattcgcacgtagccctatcagtggtgcatgcattgactagtacatgaccacttga

SEQ ID NO: 3773 - DNA, 76 bp, Artificial Sequence
  Description of Artificial Sequence: Synthetic peanut, 5' sequence +inner sequence + 3' sequence
tagggaagagaaggacatatgattcgataccgtgccagtgggtgtgcttagcattgactagtacatgaccacttga

SEQ ID NO: 3774 - DNA, 76 bp, Artificial Sequence
  Description of Artificial Sequence: Synthetic peanut, 5' sequence +inner sequence + 3' sequence
tagggaagagaaggacatatgatgtcatgccatcccttcgattgtgacaggtattgactagtacatgaccacttga

SEQ ID NO: 3775 - DNA, 76 bp, Artificial Sequence
  Description of Artificial Sequence: Synthetic peanut, 5' sequence +inner sequence + 3' sequence
tagggaagagaaggacatatgatcgatcggaacggtgggcggagtgcagtgtgttgactagtacatgaccacttga

SEQ ID NO: 3776 - DNA, 76 bp, Artificial Sequence
  Description of Artificial Sequence: Synthetic peanut, 5' sequence +inner sequence + 3' sequence
tagggaagagaaggacatatgatccatcgcgtcactatcatgtgtgtcacgcattgactagtacatgaccacttga

SEQ ID NO: 3777 - DNA, 76 bp, Artificial Sequence
  Description of Artificial Sequence: Synthetic peanut, 5' sequence +inner sequence + 3' sequence
tagggaagagaaggacatatgatgacgcgcgcacctatcaatggcatgcactattgactagtacatgaccacttga

SEQ ID NO: 3778 - DNA, 76 bp, Artificial Sequence
  Description of Artificial Sequence: Synthetic peanut, 5' sequence +inner sequence + 3' sequence
tagggaagagaaggacatatgatccgtagtgacatcaagcggtggtgtgcgtgttgactagtacatgaccacttga

SEQ ID NO: 3779 - DNA, 76 bp, Artificial Sequence
  Description of Artificial Sequence: Synthetic peanut, 5' sequence +inner sequence + 3' sequence
tagggaagagaaggacatatgatggacgcgaacaacgttgacgtaacggcacattgactagtacatgaccacttga

SEQ ID NO: 3780 - DNA, 76 bp, Artificial Sequence
  Description of Artificial Sequence: Synthetic peanut, 5' sequence +inner sequence + 3' sequence
tagggaagagaaggacatatgattcacgactcgcaccctatcatgaggccatgttgactagtacatgaccacttga

SEQ ID NO: 3781 - DNA, 76 bp, Artificial Sequence
  Description of Artificial Sequence: Synthetic peanut, 5' sequence +inner sequence + 3' sequence
tagggaagagaaggacatatgattgcgacaagcacgatacactgcgctgcgcattgactagtacatgaccacttga

SEQ ID NO: 3782 - DNA, 76 bp, Artificial Sequence
  Description of Artificial Sequence: Synthetic peanut, 5' sequence +inner sequence + 3' sequence
tagggaagagaaggacatatgatggcctgcgatggatgtgcgttgtgctcggcttgactagtacatgaccacttga

SEQ ID NO: 3783 - DNA, 76 bp, Artificial Sequence
  Description of Artificial Sequence: Synthetic peanut, 5' sequence +inner sequence + 3' sequence
tagggaagagaaggacatatgatcatggccgacacgtaccttcaagtgtgacattgactagtacatgaccacttga

SEQ ID NO: 3784 - DNA, 76 bp, Artificial Sequence
  Description of Artificial Sequence: Synthetic peanut, 5' sequence +inner sequence + 3' sequence
tagggaagagaaggacatatgatcatgcgcaagcccggtacgcacactggacgttgactagtacatgaccacttga

SEQ ID NO: 3785 - DNA, 76 bp, Artificial Sequence
  Description of Artificial Sequence: Synthetic peanut, 5' sequence +inner sequence + 3' sequence
tagggaagagaaggacatatgatcgcagcgtgaggaaggtactgtgcaacgcgttgactagtacatgaccacttga

SEQ ID NO: 3786 - DNA, 76 bp, Artificial Sequence
  Description of Artificial Sequence: Synthetic peanut, 5' sequence +inner sequence + 3' sequence
tagggaagagaaggacatatgatcgacaagcaggcaatgtgactcacgcgtgattgactagtacatgaccacttga

SEQ ID NO: 3787 - DNA, 76 bp, Artificial Sequence
  Description of Artificial Sequence: Synthetic peanut, 5' sequence +inner sequence + 3' sequence
tagggaagagaaggacatatgatggacgcagcttgcctacttgtggtcacgtattgactagtacatgaccacttga

SEQ ID NO: 3788 - DNA, 76 bp, Artificial Sequence
  Description of Artificial Sequence: Synthetic peanut, 5' sequence +inner sequence + 3' sequence
tagggaagagaaggacatatgatcgcaccgacgatacgtcatgcacgctgacattgactagtacatgaccacttga

SEQ ID NO: 3789 - DNA, 76 bp, Artificial Sequence
  Description of Artificial Sequence: Synthetic peanut, 5' sequence +inner sequence + 3' sequence
tagggaagagaaggacatatgatgcacgactcacaccctatcatgaggccatgttgactagtacatgaccacttga

SEQ ID NO: 3790 - DNA, 76 bp, Artificial Sequence
  Description of Artificial Sequence: Synthetic peanut, 5' sequence +inner sequence + 3' sequence
tagggaagagaaggacatatgatcggcacaggaggcgtgaagcatgcaccatgttgactagtacatgaccacttga

SEQ ID NO: 3791 - DNA, 76 bp, Artificial Sequence
  Description of Artificial Sequence: Synthetic peanut, 5' sequence +inner sequence + 3' sequence
tagggaagagaaggacatatgatgacatgcactgaccgatcgatggtcacgtattgactagtacatgaccacttga

SEQ ID NO: 3792 - DNA, 76 bp, Artificial Sequence
  Description of Artificial Sequence: Synthetic peanut, 5' sequence +inner sequence + 3' sequence
tagggaagagaaggacatatgatcggcacggagtcgcagcatagccgtacgcattgactagtacatgaccacttga

SEQ ID NO: 3793 - DNA, 76 bp, Artificial Sequence
  Description of Artificial Sequence: Synthetic peanut, 5' sequence +inner sequence + 3' sequence
tagggaagagaaggacatatgatgtgtgaccgacccgtaagtgtgcatgcgacttgactagtacatgaccacttga

SEQ ID NO: 3794 - DNA, 76 bp, Artificial Sequence
  Description of Artificial Sequence: Synthetic peanut, 5' sequence +inner sequence + 3' sequence
tagggaagagaaggacatatgatccgagcagaccattgcgacgatgatgcgcattgactagtacatgaccacttga

SEQ ID NO: 3795 - DNA, 76 bp, Artificial Sequence
  Description of Artificial Sequence: Synthetic peanut, 5' sequence +inner sequence + 3' sequence
tagggaagagaaggacatatgatcatcgcaatgacatggacgttgcctggacattgactagtacatgaccacttga

SEQ ID NO: 3796 - DNA, 76 bp, Artificial Sequence
  Description of Artificial Sequence: Synthetic peanut, 5' sequence +inner sequence + 3' sequence
tagggaagagaaggacatatgatccactggccacgtggatgatgcactgcgcattgactagtacatgaccacttga

SEQ ID NO: 3797 - DNA, 76 bp, Artificial Sequence
  Description of Artificial Sequence: Synthetic peanut, 5' sequence +inner sequence + 3' sequence
tagggaagagaaggacatatgatcgatgaggcatagcgagtacacactgcgtgttgactagtacatgaccacttga

SEQ ID NO: 3798 - DNA, 76 bp, Artificial Sequence
  Description of Artificial Sequence: Synthetic peanut, 5' sequence +inner sequence + 3' sequence
tagggaagagaaggacatatgatcacgtaccacggtgacatgagtgcgccacgttgactagtacatgaccacttga

SEQ ID NO: 3799 - DNA, 76 bp, Artificial Sequence
  Description of Artificial Sequence: Synthetic peanut, 5' sequence +inner sequence + 3' sequence
tagggaagagaaggacatatgatcgatgacgtgcgagacgacatgcatacgcattgactagtacatgaccacttga

SEQ ID NO: 3800 - DNA, 76 bp, Artificial Sequence
  Description of Artificial Sequence: Synthetic peanut, 5' sequence +inner sequence + 3' sequence
tagggaagagaaggacatatgatggcgcgaacgtacctatcaagttggtcgtattgactagtacatgaccacttga

SEQ ID NO: 3801 - DNA, 76 bp, Artificial Sequence
  Description of Artificial Sequence: Synthetic peanut, 5' sequence +inner sequence + 3' sequence
tagggaagagaaggacatatgatgtacgcacgcagaccttcaagtcggccatgttgactagtacatgaccacttga

SEQ ID NO: 3802 - DNA, 76 bp, Artificial Sequence
  Description of Artificial Sequence: Synthetic peanut, 5' sequence +inner sequence + 3' sequence
tagggaagagaaggacatatgatcgcaacagaacaggtggtgacgcactgacgttgactagtacatgaccacttga

SEQ ID NO: 3803 - DNA, 76 bp, Artificial Sequence
  Description of Artificial Sequence: Synthetic peanut, 5' sequence +inner sequence + 3' sequence
tagggaagagaaggacatatgatcgcacgctagaggcacatgcacgctacacgttgactagtacatgaccacttga

SEQ ID NO: 3804 - DNA, 76 bp, Artificial Sequence
  Description of Artificial Sequence: Synthetic peanut, 5' sequence +inner sequence + 3' sequence
tagggaagagaaggacatatgatgccacgcacatcatggacttcctctgcacgttgactagtacatgaccacttga

SEQ ID NO: 3805 - DNA, 76 bp, Artificial Sequence
  Description of Artificial Sequence: Synthetic peanut, 5' sequence +inner sequence + 3' sequence
tagggaagagaaggacatatgatgcacgactagcaccctatcatgaggccatgttgactagtacatgaccacttga

SEQ ID NO: 3806 - DNA, 76 bp, Artificial Sequence
  Description of Artificial Sequence: Synthetic peanut, 5' sequence +inner sequence + 3' sequence
tagggaagagaaggacatatgatcgcaccgtcgatacatcatgcacgctgacattgactagtacatgaccacttga

SEQ ID NO: 3807 - DNA, 76 bp, Artificial Sequence
  Description of Artificial Sequence: Synthetic peanut, 5' sequence +inner sequence + 3' sequence
tagggaagagaaggacatatgatccgaactgacggtcaagggtgcatggcgtattgactagtacatgaccacttga

SEQ ID NO: 3808 - DNA, 76 bp, Artificial Sequence
  Description of Artificial Sequence: Synthetic peanut, 5' sequence +inner sequence + 3' sequence
tagggaagagaaggacatatgatcacgtggacagatcgtaccgttagtgtgtcttgactagtacatgaccacttga

SEQ ID NO: 3809 - DNA, 76 bp, Artificial Sequence
  Description of Artificial Sequence: Synthetic peanut, 5' sequence +inner sequence + 3' sequence
tagggaagagaaggacatatgatgacaccacgtggaccatactgtacgtgtgcttgactagtacatgaccacttga

SEQ ID NO: 3810 - DNA, 75 bp, Artificial Sequence
  Description of Artificial Sequence: Synthetic peanut, 5' sequence +inner sequence + 3' sequence
tagggaagagaaggacatatgatgcaccgtcgatacgtcatgcacgctgacattgactagtacatgaccacttga

SEQ ID NO: 3811 - DNA, 76 bp, Artificial Sequence
  Description of Artificial Sequence: Synthetic peanut, 5' sequence +inner sequence + 3' sequence
tagggaagagaaggacatatgatcctgaacgaacgtgggtaggtacgcagccattgactagtacatgaccacttga

SEQ ID NO: 3812 - DNA, 76 bp, Artificial Sequence
  Description of Artificial Sequence: Synthetic peanut, 5' sequence +inner sequence + 3' sequence
tagggaagagaaggacatatgatgtcatgcatgcccaatgtcattggtacgcattgactagtacatgaccacttga

SEQ ID NO: 3813 - DNA, 76 bp, Artificial Sequence
  Description of Artificial Sequence: Synthetic peanut, 5' sequence +inner sequence + 3' sequence
tagggaagagaaggacatatgatggacgcggatgagcttcgagtgacgtgtacttgactagtacatgaccacttga

SEQ ID NO: 3814 - DNA, 76 bp, Artificial Sequence
  Description of Artificial Sequence: Synthetic peanut, 5' sequence +inner sequence + 3' sequence
tagggaagagaaggacatatgatcgcacagacacggaaggacactgcgatgtgttgactagtacatgaccacttga

SEQ ID NO: 3815 - DNA, 76 bp, Artificial Sequence
  Description of Artificial Sequence: Synthetic peanut, 5' sequence +inner sequence + 3' sequence
tagggaagagaaggacatatgatcgcaggacggacgaggcttaccgtagcgcattgactagtacatgaccacttga

SEQ ID NO: 3816 - DNA, 76 bp, Artificial Sequence
  Description of Artificial Sequence: Synthetic peanut, 5' sequence +inner sequence + 3' sequence
tagggaagagaaggacatatgatggactgcgcgtaccgtcaagtgcgaatggattgactagtacatgaccacttga

SEQ ID NO: 3817 - DNA, 76 bp, Artificial Sequence
  Description of Artificial Sequence: Synthetic peanut, 5' sequence +inner sequence + 3' sequence
tagggaagagaaggacatatgatcatgcgcaggccaactgtacgacaccgatgttgactagtacatgaccacttga

SEQ ID NO: 3818 - DNA, 76 bp, Artificial Sequence
  Description of Artificial Sequence: Synthetic peanut, 5' sequence +inner sequence + 3' sequence
tagggaagagaaggacatatgatcgccacgaggcaacaacgtgtgctgcgacattgactagtacatgaccacttga

SEQ ID NO: 3819 - DNA, 76 bp, Artificial Sequence
  Description of Artificial Sequence: Synthetic peanut, 5' sequence +inner sequence + 3' sequence
tagggaagagaaggacatatgatcgatccgtggtgcagggagtgtgctgcgtattgactagtacatgaccacttga

SEQ ID NO: 3820 - DNA, 76 bp, Artificial Sequence
  Description of Artificial Sequence: Synthetic peanut, 5' sequence +inner sequence + 3' sequence
tagggaagagaaggacatatgatcacgcataggcaggtgagcttgtccgcatcttgactagtacatgaccacttga

SEQ ID NO: 3821 - DNA, 76 bp, Artificial Sequence
  Description of Artificial Sequence: Synthetic peanut, 5' sequence +inner sequence + 3' sequence
tagggaagagaaggacatatgatgcaacgtgacgacaagcaaggccgtacgcgttgactagtacatgaccacttga

SEQ ID NO: 3822 - DNA, 72 bp, Artificial Sequence
  Description of Artificial Sequence: Synthetic peanut, 5' sequence +inner sequence + 3' sequence
tagggaagagaaggacatatgatggcacaaacggaccgacaagtgcgcattgactagtacatgaccacttga

SEQ ID NO: 3823 - DNA, 76 bp, Artificial Sequence
  Description of Artificial Sequence: Synthetic peanut, 5' sequence +inner sequence + 3' sequence
tagggaagagaaggacatatgatcgatgccacgacgcaccttcgtcatgcacattgactagtacatgaccacttga

SEQ ID NO: 3824 - DNA, 76 bp, Artificial Sequence
  Description of Artificial Sequence: Synthetic peanut, 5' sequence +inner sequence + 3' sequence
tagggaagagaaggacatatgatcacacgcaaagtacgtccggacactgcacgttgactagtacatgaccacttga

SEQ ID NO: 3825 - DNA, 76 bp, Artificial Sequence
  Description of Artificial Sequence: Synthetic peanut, 5' sequence +inner sequence + 3' sequence
tagggaagagaaggacatatgatcgcaacaggctgagcacatgtacgtacacattgactagtacatgaccacttga

SEQ ID NO: 3826 - DNA, 76 bp, Artificial Sequence
  Description of Artificial Sequence: Synthetic peanut, 5' sequence +inner sequence + 3' sequence
tagggaagagaaggacatatgatgtcgtgtcgtgactgcatacgagtgacgcattgactagtacatgaccacttga

SEQ ID NO: 3827 - DNA, 76 bp, Artificial Sequence
  Description of Artificial Sequence: Synthetic peanut, 5' sequence +inner sequence + 3' sequence
tagggaagagaaggacatatgatggactgcgatggatgtgtgcgtgtattagcttgactagtacatgaccacttga

SEQ ID NO: 3828 - DNA, 76 bp, Artificial Sequence
  Description of Artificial Sequence: Synthetic peanut, 5' sequence +inner sequence + 3' sequence
tagggaagagaaggacatatgatggccacagcgtacctcaacgtgtacgtgcattgactagtacatgaccacttga

SEQ ID NO: 3829 - DNA, 76 bp, Artificial Sequence
  Description of Artificial Sequence: Synthetic peanut, 5' sequence +inner sequence + 3' sequence
tagggaagagaaggacatatgatcgcaacgggagggaaacgtcctgcgacgcgttgactagtacatgaccacttga

SEQ ID NO: 3830 - DNA, 76 bp, Artificial Sequence
  Description of Artificial Sequence: Synthetic peanut, 5' sequence +inner sequence + 3' sequence
tagggaagagaaggacatatgatacgtgtggctgcatttcgtcccgtgtggcattgactagtacatgaccacttga

SEQ ID NO: 3831 - DNA, 76 bp, Artificial Sequence
  Description of Artificial Sequence: Synthetic peanut, 5' sequence +inner sequence + 3' sequence
tagggaagagaaggacatatgatcgtaccgcaagggggagagtgcgtgttggcttgactagtacatgaccacttga

SEQ ID NO: 3832 - DNA, 76 bp, Artificial Sequence
  Description of Artificial Sequence: Synthetic peanut, 5' sequence +inner sequence + 3' sequence
tagggaagagaaggacatatgatgcggtgcggaacatgtacgccatcttgccattgactagtacatgaccacttga

SEQ ID NO: 3833 - DNA, 76 bp, Artificial Sequence
  Description of Artificial Sequence: Synthetic peanut, 5' sequence +inner sequence + 3' sequence
tagggaagagaaggacatatgatcatgcagcagggttacgtgttcactgcgccttgactagtacatgaccacttga

SEQ ID NO: 3834 - DNA, 76 bp, Artificial Sequence
  Description of Artificial Sequence: Synthetic peanut, 5' sequence +inner sequence + 3' sequence
tagggaagagaaggacatatgatgtgcgacacgtgttcccgttcaagttgggcttgactagtacatgaccacttga

SEQ ID NO: 3835 - DNA, 76 bp, Artificial Sequence
  Description of Artificial Sequence: Synthetic peanut, 5' sequence +inner sequence + 3' sequence
tagggaagagaaggacatatgatcgcaacgcacatccgaacgacgtgtgcatgttgactagtacatgaccacttga

SEQ ID NO: 3836 - DNA, 76 bp, Artificial Sequence
  Description of Artificial Sequence: Synthetic peanut, 5' sequence +inner sequence + 3' sequence
tagggaagagaaggacatatgattgtcacagggacgtatcgcaccgctgtggtttgactagtacatgaccacttga

SEQ ID NO: 3837 - DNA, 76 bp, Artificial Sequence
  Description of Artificial Sequence: Synthetic peanut, 5' sequence +inner sequence + 3' sequence
tagggaagagaaggacatatgatcgcaccgtcgatacgttatgcacgctgacattgactagtacatgaccacttga

SEQ ID NO: 3838 - DNA, 76 bp, Artificial Sequence
  Description of Artificial Sequence: Synthetic peanut, 5' sequence +inner sequence + 3' sequence
tagggaagagaaggacatatgatcgatgctaggatggacgtgacggctacgcgttgactagtacatgaccacttga

SEQ ID NO: 3839 - DNA, 76 bp, Artificial Sequence
  Description of Artificial Sequence: Synthetic peanut, 5' sequence +inner sequence + 3' sequence
tagggaagagaaggacatatgatcgacaggcaggtcaaggtcatcgctgcacattgactagtacatgaccacttga

SEQ ID NO: 3840 - DNA, 76 bp, Artificial Sequence
  Description of Artificial Sequence: Synthetic peanut, 5' sequence +inner sequence + 3' sequence
tagggaagagaaggacatatgatcgcactgtcgatacgtcatgcacgctgacattgactagtacatgaccacttga

SEQ ID NO: 3841 - DNA, 76 bp, Artificial Sequence
  Description of Artificial Sequence: Synthetic peanut, 5' sequence +inner sequence + 3' sequence
tagggaagagaaggacatatgatgacgcactcaaccgatcagtggcatgcgtgttgactagtacatgaccacttga

SEQ ID NO: 3842 - DNA, 76 bp, Artificial Sequence
  Description of Artificial Sequence: Synthetic peanut, 5' sequence +inner sequence + 3' sequence
tagggaagagaaggacatatgatcgcacggcaaggaagggtgcgtacttgtgtttgactagtacatgaccacttga

SEQ ID NO: 3843 - DNA, 76 bp, Artificial Sequence
  Description of Artificial Sequence: Synthetic peanut, 5' sequence +inner sequence + 3' sequence
tagggaagagaaggacatatgatcgatgaccgtgtggtgaatgtgcctacgcattgactagtacatgaccacttga

SEQ ID NO: 3844 - DNA, 76 bp, Artificial Sequence
  Description of Artificial Sequence: Synthetic peanut, 5' sequence +inner sequence + 3' sequence
tagggaagagaaggacatatgatccatcatgcaccgtaacggaccactgcgcattgactagtacatgaccacttga

SEQ ID NO: 3845 - DNA, 77 bp, Artificial Sequence
  Description of Artificial Sequence: Synthetic peanut, 5' sequence +inner sequence + 3' sequence
tagggaagagaaggacatatgatcgcaccgtcgatacgtcatgcacgctgaccattgactagtacatgaccacttga

SEQ ID NO: 3846 - DNA, 76 bp, Artificial Sequence
  Description of Artificial Sequence: Synthetic peanut, 5' sequence +inner sequence + 3' sequence
tagggaagagaaggacatatgatgcacgtggcttacccgctggcatgacgacgttgactagtacatgaccacttga

SEQ ID NO: 3847 - DNA, 76 bp, Artificial Sequence
  Description of Artificial Sequence: Synthetic peanut, 5' sequence +inner sequence + 3' sequence
tagggaagagaaggacatatgatcgatgcacaccaaacaggccacgctacgtgttgactagtacatgaccacttga

SEQ ID NO: 3848 - DNA, 76 bp, Artificial Sequence
  Description of Artificial Sequence: Synthetic peanut, 5' sequence +inner sequence + 3' sequence
tagggaagagaaggacatatgatgcacggcacgtaacggttggttcaggcacattgactagtacatgaccacttga

SEQ ID NO: 3849 - DNA, 76 bp, Artificial Sequence
  Description of Artificial Sequence: Synthetic peanut, 5' sequence +inner sequence + 3' sequence
tagggaagagaaggacatatgatcgacacgaagctcaagggcgatacggcatgttgactagtacatgaccacttga

SEQ ID NO: 3850 - DNA, 76 bp, Artificial Sequence
  Description of Artificial Sequence: Synthetic peanut, 5' sequence +inner sequence + 3' sequence
tagggaagagaaggacatatgatccgacctcgcaccgtatcaagctggccatgttgactagtacatgaccacttga

SEQ ID NO: 3851 - DNA, 76 bp, Artificial Sequence
  Description of Artificial Sequence: Synthetic peanut, 5' sequence +inner sequence + 3' sequence
tagggaagagaaggacatatgatccgtgcaggagcattatggcacgtgcggcattgactagtacatgaccacttga

SEQ ID NO: 3852 - DNA, 76 bp, Artificial Sequence
  Description of Artificial Sequence: Synthetic peanut, 5' sequence +inner sequence + 3' sequence
tagggaagagaaggacatatgatcgccaacacggtacacatcatggctacgcgttgactagtacatgaccacttga

SEQ ID NO: 3853 - DNA, 76 bp, Artificial Sequence
  Description of Artificial Sequence: Synthetic peanut, 5' sequence +inner sequence + 3' sequence
tagggaagagaaggacatatgatcgcaccgtcgatacgtcttgcacgctgacattgactagtacatgaccacttga

SEQ ID NO: 3854 - DNA, 76 bp, Artificial Sequence
  Description of Artificial Sequence: Synthetic peanut, 5' sequence +inner sequence + 3' sequence
tagggaagagaaggacatatgatgcgtgacgtaacgacagatcatgcgtcagtttgactagtacatgaccacttga

SEQ ID NO: 3855 - DNA, 76 bp, Artificial Sequence
  Description of Artificial Sequence: Synthetic peanut, 5' sequence +inner sequence + 3' sequence
tagggaagagaaggacatatgatcgcggcagacgaccttgcgttccatgcacattgactagtacatgaccacttga

SEQ ID NO: 3856 - DNA, 76 bp, Artificial Sequence
  Description of Artificial Sequence: Synthetic peanut, 5' sequence +inner sequence + 3' sequence
tagggaagagaaggacatatgatcacgcacgtcggagaggtacgttcgccaccttgactagtacatgaccacttga

SEQ ID NO: 3857 - DNA, 76 bp, Artificial Sequence
  Description of Artificial Sequence: Synthetic peanut, 5' sequence +inner sequence + 3' sequence
tagggaagagaaggacatatgatgtcattccgcatcctacacgtgggtacgtattgactagtacatgaccacttga

SEQ ID NO: 3858 - DNA, 76 bp, Artificial Sequence
  Description of Artificial Sequence: Synthetic peanut, 5' sequence +inner sequence + 3' sequence
tagggaagagaaggacatatgatcgcgacgaagtggaggtaatgtccgtgccattgactagtacatgaccacttga

SEQ ID NO: 3859 - DNA, 76 bp, Artificial Sequence
  Description of Artificial Sequence: Synthetic peanut, 5' sequence +inner sequence + 3' sequence
tagggaagagaaggacatatgatcacatgcatcgtaccgtcacagcacgaccattgactagtacatgaccacttga

SEQ ID NO: 3860 - DNA, 76 bp, Artificial Sequence
  Description of Artificial Sequence: Synthetic peanut, 5' sequence +inner sequence + 3' sequence
tagggaagagaaggacatatgatccgtcgcgacatcaagcggtggtgtgcgtgttgactagtacatgaccacttga

SEQ ID NO: 3861 - DNA, 76 bp, Artificial Sequence
  Description of Artificial Sequence: Synthetic peanut, 5' sequence +inner sequence + 3' sequence
tagggaagagaaggacatatgattgcgcaaggtcacggtcctacgccttcacgttgactagtacatgaccacttga

SEQ ID NO: 3862 - DNA, 76 bp, Artificial Sequence
  Description of Artificial Sequence: Synthetic peanut, 5' sequence +inner sequence + 3' sequence
tagggaagagaaggacatatgatcgtaccggagcggcgcacagtgatggcatgttgactagtacatgaccacttga

SEQ ID NO: 3863 - DNA, 76 bp, Artificial Sequence
  Description of Artificial Sequence: Synthetic peanut, 5' sequence +inner sequence + 3' sequence
tagggaagagaaggacatatgatggcatgcgatgggtagtgatcacgtacggtttgactagtacatgaccacttga

SEQ ID NO: 3864 - DNA, 79 bp, Artificial Sequence
  Description of Artificial Sequence: Synthetic peanut, 5' sequence +inner sequence + 3' sequence
tagggaagagaaggacatatgatccgcatcggaccgatcaaggcaggctgtacgtgttgactagtacatgaccacttga

SEQ ID NO: 3865 - DNA, 76 bp, Artificial Sequence
  Description of Artificial Sequence: Synthetic peanut, 5' sequence +inner sequence + 3' sequence
tagggaagagaaggacatatgatcgcagcggaagtaccgtacgtatcgtgccattgactagtacatgaccacttga

SEQ ID NO: 3866 - DNA, 76 bp, Artificial Sequence
  Description of Artificial Sequence: Synthetic peanut, 5' sequence +inner sequence + 3' sequence
tagggaagagaaggacatatgatcgcaccgtcgatacgtcatgcaccctgacattgactagtacatgaccacttga

SEQ ID NO: 3867 - DNA, 76 bp, Artificial Sequence
  Description of Artificial Sequence: Synthetic peanut, 5' sequence +inner sequence + 3' sequence
tagggaagagaaggacatatgatgtgcgcaacgaccctacacgtggtggtgtattgactagtacatgaccacttga

SEQ ID NO: 3868 - DNA, 76 bp, Artificial Sequence
  Description of Artificial Sequence: Synthetic peanut, 5' sequence +inner sequence + 3' sequence
tagggaagagaaggacatatgatcatggcacggaacgcgcagtcacatgcatgttgactagtacatgaccacttga

SEQ ID NO: 3869 - DNA, 76 bp, Artificial Sequence
  Description of Artificial Sequence: Synthetic peanut, 5' sequence +inner sequence + 3' sequence
tagggaagagaaggacatatgatggccgaacgtaccggtcaagtggatgcgtattgactagtacatgaccacttga

SEQ ID NO: 3870 - DNA, 76 bp, Artificial Sequence
  Description of Artificial Sequence: Synthetic peanut, 5' sequence +inner sequence + 3' sequence
tagggaagagaaggacatatgatcgcatgtgaggcactagatgcacttgcgcattgactagtacatgaccacttga

SEQ ID NO: 3871 - DNA, 76 bp, Artificial Sequence
  Description of Artificial Sequence: Synthetic peanut, 5' sequence +inner sequence + 3' sequence
tagggaagagaaggacatatgatgtcatgcacgaacactataatggcggcatgttgactagtacatgaccacttga

SEQ ID NO: 3872 - DNA, 76 bp, Artificial Sequence
  Description of Artificial Sequence: Synthetic peanut, 5' sequence +inner sequence + 3' sequence
tagggaagagaaggacatatgatgcgacggtgtgcggtggtatgtcctgcacattgactagtacatgaccacttga

SEQ ID NO: 3873 - DNA, 75 bp, Artificial Sequence
  Description of Artificial Sequence: Synthetic peanut, 5' sequence +inner sequence + 3' sequence
tagggaagagaaggacatatgatgtcatgccatcccttcgagtgtgcaggtattgactagtacatgaccacttga

SEQ ID NO: 3874 - DNA, 76 bp, Artificial Sequence
  Description of Artificial Sequence: Synthetic peanut, 5' sequence +inner sequence + 3' sequence
tagggaagagaaggacatatgatgccaagcggaccaaagtgtgccatgacgcattgactagtacatgaccacttga

SEQ ID NO: 3875 - DNA, 76 bp, Artificial Sequence
  Description of Artificial Sequence: Synthetic peanut, 5' sequence +inner sequence + 3' sequence
tagggaagagaaggacatatgatgtcatgccgaactgcccattgccatgcagcttgactagtacatgaccacttga

SEQ ID NO: 3876 - DNA, 76 bp, Artificial Sequence
  Description of Artificial Sequence: Synthetic peanut, 5' sequence +inner sequence + 3' sequence
tagggaagagaaggacatatgatcgacacacggaaccacgtgactgcgccaccttgactagtacatgaccacttga

SEQ ID NO: 3877 - DNA, 76 bp, Artificial Sequence
  Description of Artificial Sequence: Synthetic peanut, 5' sequence +inner sequence + 3' sequence
tagggaagagaaggacatatgatccgcacgtagctctatcagtggtgcatgcattgactagtacatgaccacttga

SEQ ID NO: 3878 - DNA, 76 bp, Artificial Sequence
  Description of Artificial Sequence: Synthetic peanut, 5' sequence +inner sequence + 3' sequence
tagggaagagaaggacatatgatgccaagcgagacgacatgtggtactgcgtgttgactagtacatgaccacttga

SEQ ID NO: 3879 - DNA, 75 bp, Artificial Sequence
  Description of Artificial Sequence: Synthetic peanut, 5' sequence +inner sequence + 3' sequence
tagggaagagaaggacatatgatggcatgcgatggatgtggtggtgctgtcattgactagtacatgaccacttga

SEQ ID NO: 3880 - DNA, 76 bp, Artificial Sequence
  Description of Artificial Sequence: Synthetic peanut, 5' sequence +inner sequence + 3' sequence
tagggaagagaaggacatatgatgccatgcgtgtccctagtcatgacggcatattgactagtacatgaccacttga

SEQ ID NO: 3881 - DNA, 76 bp, Artificial Sequence
  Description of Artificial Sequence: Synthetic peanut, 5' sequence +inner sequence + 3' sequence
tagggaagagaaggacatatgatcgtaccgcgctggtcacacgtgctgtgtcattgactagtacatgaccacttga

SEQ ID NO: 3882 - DNA, 76 bp, Artificial Sequence
  Description of Artificial Sequence: Synthetic peanut, 5' sequence +inner sequence + 3' sequence
tagggaagagaaggacatatgatcgtgcagcaggatgacgagcattgggcgtgttgactagtacatgaccacttga

SEQ ID NO: 3883 - DNA, 76 bp, Artificial Sequence
  Description of Artificial Sequence: Synthetic peanut, 5' sequence +inner sequence + 3' sequence
tagggaagagaaggacatatgatacgcacaacggaaggtctcactgcgtcacgttgactagtacatgaccacttga

SEQ ID NO: 3884 - DNA, 76 bp, Artificial Sequence
  Description of Artificial Sequence: Synthetic peanut, 5' sequence +inner sequence + 3' sequence
tagggaagagaaggacatatgatgcacgactcgcacactatcatgaggccatgttgactagtacatgaccacttga

SEQ ID NO: 3885 - DNA, 73 bp, Artificial Sequence
  Description of Artificial Sequence: Synthetic peanut, 5' sequence +inner sequence + 3' sequence
tagggaagagaaggacatatgatggccaagctgacctagcatgtgtgtcattgactagtacatgaccacttga

SEQ ID NO: 3886 - DNA, 76 bp, Artificial Sequence
  Description of Artificial Sequence: Synthetic peanut, 5' sequence +inner sequence + 3' sequence
tagggaagagaaggacatatgatcgtgcgcaacgtcgtacgtacatgtgcgtattgactagtacatgaccacttga

SEQ ID NO: 3887 - DNA, 76 bp, Artificial Sequence
  Description of Artificial Sequence: Synthetic peanut, 5' sequence +inner sequence + 3' sequence
tagggaagagaaggacatatgattgacgcagcataccctaaggacatggcgtgttgactagtacatgaccacttga

SEQ ID NO: 3888 - DNA, 76 bp, Artificial Sequence
  Description of Artificial Sequence: Synthetic peanut, 5' sequence +inner sequence + 3' sequence
tagggaagagaaggacatatgatcacacagcgacatgtggtcctacctgcacattgactagtacatgaccacttga

SEQ ID NO: 3889 - DNA, 76 bp, Artificial Sequence
  Description of Artificial Sequence: Synthetic peanut, 5' sequence +inner sequence + 3' sequence
tagggaagagaaggacatatgatgtacgacgcgagctagcaaggaggcgtgtattgactagtacatgaccacttga

SEQ ID NO: 3890 - DNA, 76 bp, Artificial Sequence
  Description of Artificial Sequence: Synthetic peanut, 5' sequence +inner sequence + 3' sequence
tagggaagagaaggacatatgatcgatacgcagatcggacgtatgcagcggcattgactagtacatgaccacttga

SEQ ID NO: 3891 - DNA, 76 bp, Artificial Sequence
  Description of Artificial Sequence: Synthetic peanut, 5' sequence +inner sequence + 3' sequence
tagggaagagaaggacatatgatgcacgactcgcaccctctcatgaggccatgttgactagtacatgaccacttga

SEQ ID NO: 3892 - DNA, 76 bp, Artificial Sequence
  Description of Artificial Sequence: Synthetic peanut, 5' sequence +inner sequence + 3' sequence
tagggaagagaaggacatatgatccgtagcgatatcaagcggtggtgtgcgtgttgactagtacatgaccacttga

SEQ ID NO: 3893 - DNA, 72 bp, Artificial Sequence
  Description of Artificial Sequence: Synthetic peanut, 5' sequence +inner sequence + 3' sequence
tagggaagagaaggacatatgatggcatgcacgcacctacacgtggacattgactagtacatgaccacttga

SEQ ID NO: 3894 - DNA, 76 bp, Artificial Sequence
  Description of Artificial Sequence: Synthetic peanut, 5' sequence +inner sequence + 3' sequence
tagggaagagaaggacatatgatccgagacacacgacaggaccatccgtcacgttgactagtacatgaccacttga

SEQ ID NO: 3895 - DNA, 76 bp, Artificial Sequence
  Description of Artificial Sequence: Synthetic peanut, 5' sequence +inner sequence + 3' sequence
tagggaagagaaggacatatgatcgcagacagaccgtcagtgtgtagtgcgcattgactagtacatgaccacttga

SEQ ID NO: 3896 - DNA, 76 bp, Artificial Sequence
  Description of Artificial Sequence: Synthetic peanut, 5' sequence +inner sequence + 3' sequence
tagggaagagaaggacatatgatcgaaccgggcaagggtaggtaccatgcacgttgactagtacatgaccacttga

SEQ ID NO: 3897 - DNA, 76 bp, Artificial Sequence
  Description of Artificial Sequence: Synthetic peanut, 5' sequence +inner sequence + 3' sequence
tagggaagagaaggacatatgatcgcacgcatagggatgacgttccctcgtcattgactagtacatgaccacttga

SEQ ID NO: 3898 - DNA, 76 bp, Artificial Sequence
  Description of Artificial Sequence: Synthetic peanut, 5' sequence +inner sequence + 3' sequence
tagggaagagaaggacatatgatcgtaccagggggacgtacctgccgtggacattgactagtacatgaccacttga

SEQ ID NO: 3899 - DNA, 76 bp, Artificial Sequence
  Description of Artificial Sequence: Synthetic peanut, 5' sequence +inner sequence + 3' sequence
tagggaagagaaggacatatgatcgtagcggcacgcagtcctgtgtaggcacattgactagtacatgaccacttga

SEQ ID NO: 3900 - DNA, 76 bp, Artificial Sequence
  Description of Artificial Sequence: Synthetic peanut, 5' sequence +inner sequence + 3' sequence
tagggaagagaaggacatatgatggacgcagcttgcctactggtggtaacgtattgactagtacatgaccacttga

SEQ ID NO: 3901 - DNA, 76 bp, Artificial Sequence
  Description of Artificial Sequence: Synthetic peanut, 5' sequence +inner sequence + 3' sequence
tagggaagagaaggacatatgatggcacaaacggaccgacaagtgcgcatggtttgactagtacatgaccacttga

SEQ ID NO: 3902 - DNA, 76 bp, Artificial Sequence
  Description of Artificial Sequence: Synthetic peanut, 5' sequence +inner sequence + 3' sequence
tagggaagagaaggacatatgatcgcaccgagcgtggagagcacattggcacattgactagtacatgaccacttga

SEQ ID NO: 3903 - DNA, 76 bp, Artificial Sequence
  Description of Artificial Sequence: Synthetic peanut, 5' sequence +inner sequence + 3' sequence
tagggaagagaaggacatatgatcgcaccgtccatacgtcatgcacgctgacattgactagtacatgaccacttga

SEQ ID NO: 3904 - DNA, 76 bp, Artificial Sequence
  Description of Artificial Sequence: Synthetic peanut, 5' sequence +inner sequence + 3' sequence
tagggaagagaaggacatatgatgccacaaagcgtgaccgaactgtgtgcatgttgactagtacatgaccacttga

SEQ ID NO: 3905 - DNA, 76 bp, Artificial Sequence
  Description of Artificial Sequence: Synthetic peanut, 5' sequence +inner sequence + 3' sequence
tagggaagagaaggacatatgatgcacacagcagtacgacatgccacgttgcgttgactagtacatgaccacttga

SEQ ID NO: 3906 - DNA, 76 bp, Artificial Sequence
  Description of Artificial Sequence: Synthetic peanut, 5' sequence +inner sequence + 3' sequence
tagggaagagaaggacatatgatccgatcggcatcgctggtcaggacgtagcattgactagtacatgaccacttga

SEQ ID NO: 3907 - DNA, 76 bp, Artificial Sequence
  Description of Artificial Sequence: Synthetic peanut, 5' sequence +inner sequence + 3' sequence
tagggaagagaaggacatatgatcgacacgcagtaatgaccagatgccacgtgttgactagtacatgaccacttga

SEQ ID NO: 3908 - DNA, 76 bp, Artificial Sequence
  Description of Artificial Sequence: Synthetic peanut, 5' sequence +inner sequence + 3' sequence
tagggaagagaaggacatatgatcaccacgcatcattgtccgccaactgcacattgactagtacatgaccacttga

SEQ ID NO: 3909 - DNA, 76 bp, Artificial Sequence
  Description of Artificial Sequence: Synthetic peanut, 5' sequence +inner sequence + 3' sequence
tagggaagagaaggacatatgatggcatgcgatgaacgaggcatgattcgtcattgactagtacatgaccacttga

SEQ ID NO: 3910 - DNA, 76 bp, Artificial Sequence
  Description of Artificial Sequence: Synthetic peanut, 5' sequence +inner sequence + 3' sequence
tagggaagagaaggacatatgatcgtacacacaggaacgaggcatacgacgcattgactagtacatgaccacttga

SEQ ID NO: 3911 - DNA, 76 bp, Artificial Sequence
  Description of Artificial Sequence: Synthetic peanut, 5' sequence +inner sequence + 3' sequence
tagggaagagaaggacatatgatgtacgtatcgaacggtcaagtcggtgtgtattgactagtacatgaccacttga

SEQ ID NO: 3912 - DNA, 76 bp, Artificial Sequence
  Description of Artificial Sequence: Synthetic peanut, 5' sequence +inner sequence + 3' sequence
tagggaagagaaggacatatgatggccgaacgtaacgcgggggcatgtggatgttgactagtacatgaccacttga

SEQ ID NO: 3913 - DNA, 76 bp, Artificial Sequence
  Description of Artificial Sequence: Synthetic peanut, 5' sequence +inner sequence + 3' sequence
tagggaagagaaggacatatgatcagtagcgacatcaagcggtggtgtgcgtgttgactagtacatgaccacttga

SEQ ID NO: 3914 - DNA, 76 bp, Artificial Sequence
  Description of Artificial Sequence: Synthetic peanut, 5' sequence +inner sequence + 3' sequence
tagggaagagaaggacatatgatgtcgtgtgcgtgccctacaagtcaggcatgttgactagtacatgaccacttga

SEQ ID NO: 3915 - DNA, 76 bp, Artificial Sequence
  Description of Artificial Sequence: Synthetic peanut, 5' sequence +inner sequence + 3' sequence
tagggaagagaaggacatatgatcgaaccgcgtggacgtgttgctgggcatcattgactagtacatgaccacttga

SEQ ID NO: 3916 - DNA, 76 bp, Artificial Sequence
  Description of Artificial Sequence: Synthetic peanut, 5' sequence +inner sequence + 3' sequence
tagggaagagaaggacatatgatcatgtggccaacgaggcgctacacgtgggcttgactagtacatgaccacttga

SEQ ID NO: 3917 - DNA, 76 bp, Artificial Sequence
  Description of Artificial Sequence: Synthetic peanut, 5' sequence +inner sequence + 3' sequence
tagggaagagaaggacatatgatccgcacgcgaacgaggtggtacatggcgtattgactagtacatgaccacttga

SEQ ID NO: 3918 - DNA, 76 bp, Artificial Sequence
  Description of Artificial Sequence: Synthetic peanut, 5' sequence +inner sequence + 3' sequence
tagggaagagaaggacatatgatcgcaacacgaggatgtgcaatatggtcgcgttgactagtacatgaccacttga

SEQ ID NO: 3919 - DNA, 76 bp, Artificial Sequence
  Description of Artificial Sequence: Synthetic peanut, 5' sequence +inner sequence + 3' sequence
tagggaagagaaggacatatgatggacgcatcgcccgtcaatgtgacgccatgttgactagtacatgaccacttga

SEQ ID NO: 3920 - DNA, 76 bp, Artificial Sequence
  Description of Artificial Sequence: Synthetic peanut, 5' sequence +inner sequence + 3' sequence
tagggaagagaaggacatatgatccgcacgtatccctatcagtggtgcatgcattgactagtacatgaccacttga

SEQ ID NO: 3921 - DNA, 76 bp, Artificial Sequence
  Description of Artificial Sequence: Synthetic peanut, 5' sequence +inner sequence + 3' sequence
tagggaagagaaggacatatgatgtgctgccagcccgtagcaagtcaggcatgttgactagtacatgaccacttga

SEQ ID NO: 3922 - DNA, 76 bp, Artificial Sequence
  Description of Artificial Sequence: Synthetic peanut, 5' sequence +inner sequence + 3' sequence
tagggaagagaaggacatatgatcatgctgaatgcgtagtgctgccttgcgcattgactagtacatgaccacttga

SEQ ID NO: 3923 - DNA, 76 bp, Artificial Sequence
  Description of Artificial Sequence: Synthetic peanut, 5' sequence +inner sequence + 3' sequence
tagggaagagaaggacatatgatcgcacacgtacgtaacggcatggacatcgtttgactagtacatgaccacttga

SEQ ID NO: 3924 - DNA, 76 bp, Artificial Sequence
  Description of Artificial Sequence: Synthetic peanut, 5' sequence +inner sequence + 3' sequence
tagggaagagaaggacatatgatgtcgtgactggctagctgtacatgcactgcttgactagtacatgaccacttga

SEQ ID NO: 3925 - DNA, 76 bp, Artificial Sequence
  Description of Artificial Sequence: Synthetic peanut, 5' sequence +inner sequence + 3' sequence
tagggaagagaaggacatatgatacgtgggcggagacgaagcactgcagcacgttgactagtacatgaccacttga

SEQ ID NO: 3926 - DNA, 76 bp, Artificial Sequence
  Description of Artificial Sequence: Synthetic peanut, 5' sequence +inner sequence + 3' sequence
tagggaagagaaggacatatgatcgaaccagactgggcaggcacaaaggcacgttgactagtacatgaccacttga

SEQ ID NO: 3927 - DNA, 76 bp, Artificial Sequence
  Description of Artificial Sequence: Synthetic peanut, 5' sequence +inner sequence + 3' sequence
tagggaagagaaggacatatgatcatggccgcgtgaacgtgcactaatgcgcattgactagtacatgaccacttga

SEQ ID NO: 3928 - DNA, 76 bp, Artificial Sequence
  Description of Artificial Sequence: Synthetic peanut, 5' sequence +inner sequence + 3' sequence
tagggaagagaaggacatatgatcatgatgtcacgaactgagctcacgtggccttgactagtacatgaccacttga

SEQ ID NO: 3929 - DNA, 76 bp, Artificial Sequence
  Description of Artificial Sequence: Synthetic peanut, 5' sequence +inner sequence + 3' sequence
tagggaagagaaggacatatgatggcacaaacagcagaaggacgcgatgcacgttgactagtacatgaccacttga

SEQ ID NO: 3930 - DNA, 76 bp, Artificial Sequence
  Description of Artificial Sequence: Synthetic peanut, 5' sequence +inner sequence + 3' sequence
tagggaagagaaggacatatgatcgcacctgtcaaggcggaatggcacgtggcttgactagtacatgaccacttga

SEQ ID NO: 3931 - DNA, 76 bp, Artificial Sequence
  Description of Artificial Sequence: Synthetic peanut, 5' sequence +inner sequence + 3' sequence
tagggaagagaaggacatatgatcgcacccaactggtcgtgaccctcggcacattgactagtacatgaccacttga

SEQ ID NO: 3932 - DNA, 76 bp, Artificial Sequence
  Description of Artificial Sequence: Synthetic peanut, 5' sequence +inner sequence + 3' sequence
tagggaagagaaggacatatgatgcacggatcgaaaccgtaccgagtggcgcattgactagtacatgaccacttga

SEQ ID NO: 3933 - DNA, 76 bp, Artificial Sequence
  Description of Artificial Sequence: Synthetic peanut, 5' sequence +inner sequence + 3' sequence
tagggaagagaaggacatatgatgcatgcacgtcacatcacaacgactgcacgttgactagtacatgaccacttga

SEQ ID NO: 3934 - DNA, 76 bp, Artificial Sequence
  Description of Artificial Sequence: Synthetic peanut, 5' sequence +inner sequence + 3' sequence
tagggaagagaaggacatatgatcatgcgggacggatgtagtatggctgcacgttgactagtacatgaccacttga

SEQ ID NO: 3935 - DNA, 76 bp, Artificial Sequence
  Description of Artificial Sequence: Synthetic peanut, 5' sequence +inner sequence + 3' sequence
tagggaagagaaggacatatgatggccaacgctggacaggctgtgactacgcattgactagtacatgaccacttga

SEQ ID NO: 3936 - DNA, 76 bp, Artificial Sequence
  Description of Artificial Sequence: Synthetic peanut, 5' sequence +inner sequence + 3' sequence
tagggaagagaaggacatatgatcatgcgcagggaagatggtgcgttgacgcattgactagtacatgaccacttga

SEQ ID NO: 3937 - DNA, 76 bp, Artificial Sequence
  Description of Artificial Sequence: Synthetic peanut, 5' sequence +inner sequence + 3' sequence
tagggaagagaaggacatatgatgaccgcagcgacgtatcatgtggtggtgtattgactagtacatgaccacttga

SEQ ID NO: 3938 - DNA, 76 bp, Artificial Sequence
  Description of Artificial Sequence: Synthetic peanut, 5' sequence +inner sequence + 3' sequence
tagggaagagaaggacatatgatcgcaagtgcacactgcagtatgtccgcacattgactagtacatgaccacttga

SEQ ID NO: 3939 - DNA, 76 bp, Artificial Sequence
  Description of Artificial Sequence: Synthetic peanut, 5' sequence +inner sequence + 3' sequence
tagggaagagaaggacatatgatcgatgccacgaataacgggccatgtgcgtattgactagtacatgaccacttga

SEQ ID NO: 3940 - DNA, 76 bp, Artificial Sequence
  Description of Artificial Sequence: Synthetic peanut, 5' sequence +inner sequence + 3' sequence
tagggaagagaaggacatatgatcggaccgaagtggcacatgtctgttccacgttgactagtacatgaccacttga

SEQ ID NO: 3941 - DNA, 76 bp, Artificial Sequence
  Description of Artificial Sequence: Synthetic peanut, 5' sequence +inner sequence + 3' sequence
tagggaagagaaggacatatgatcatggcgacgacatgctgatcacctacgcattgactagtacatgaccacttga

SEQ ID NO: 3942 - DNA, 76 bp, Artificial Sequence
  Description of Artificial Sequence: Synthetic peanut, 5' sequence +inner sequence + 3' sequence
tagggaagagaaggacatatgatcacggaccaggagacgagacacggtgcgcgttgactagtacatgaccacttga

SEQ ID NO: 3943 - DNA, 76 bp, Artificial Sequence
  Description of Artificial Sequence: Synthetic peanut, 5' sequence +inner sequence + 3' sequence
tagggaagagaaggacatatgatacacgactcgcaccctatcatgaggccatgttgactagtacatgaccacttga

SEQ ID NO: 3944 - DNA, 76 bp, Artificial Sequence
  Description of Artificial Sequence: Synthetic peanut, 5' sequence +inner sequence + 3' sequence
tagggaagagaaggacatatgatcatgcacaggcaatggtatgctcctgcaccttgactagtacatgaccacttga

SEQ ID NO: 3945 - DNA, 76 bp, Artificial Sequence
  Description of Artificial Sequence: Synthetic peanut, 5' sequence +inner sequence + 3' sequence
tagggaagagaaggacatatgatccacacgtagccctatcagtggtgcatgcattgactagtacatgaccacttga

SEQ ID NO: 3946 - DNA, 76 bp, Artificial Sequence
  Description of Artificial Sequence: Synthetic peanut, 5' sequence +inner sequence + 3' sequence
tagggaagagaaggacatatgatctcatgctgtacgtctcgttccattgggcattgactagtacatgaccacttga

SEQ ID NO: 3947 - DNA, 76 bp, Artificial Sequence
  Description of Artificial Sequence: Synthetic peanut, 5' sequence +inner sequence + 3' sequence
tagggaagagaaggacatatgatgcggggacacgcagcacaagtacgtgcacattgactagtacatgaccacttga

SEQ ID NO: 3948 - DNA, 76 bp, Artificial Sequence
  Description of Artificial Sequence: Synthetic peanut, 5' sequence +inner sequence + 3' sequence
tagggaagagaaggacatatgatcgatgtgcgtactcgtcccttcgagtgggattgactagtacatgaccacttga

SEQ ID NO: 3949 - DNA, 76 bp, Artificial Sequence
  Description of Artificial Sequence: Synthetic peanut, 5' sequence +inner sequence + 3' sequence
tagggaagagaaggacatatgatcacatcgtacgccgatctggatgtggctcattgactagtacatgaccacttga

SEQ ID NO: 3950 - DNA, 76 bp, Artificial Sequence
  Description of Artificial Sequence: Synthetic peanut, 5' sequence +inner sequence + 3' sequence
tagggaagagaaggacatatgatggtctgcgcgtaccgtcaagtgcgaatggattgactagtacatgaccacttga

SEQ ID NO: 3951 - DNA, 76 bp, Artificial Sequence
  Description of Artificial Sequence: Synthetic peanut, 5' sequence +inner sequence + 3' sequence
tagggaagagaaggacatatgatggccgatgaccgtcaagtgttgtgcgctgtttgactagtacatgaccacttga

SEQ ID NO: 3952 - DNA, 76 bp, Artificial Sequence
  Description of Artificial Sequence: Synthetic peanut, 5' sequence +inner sequence + 3' sequence
tagggaagagaaggacatatgatcatgcgccaagagcaacggtgtggatggcattgactagtacatgaccacttga

SEQ ID NO: 3953 - DNA, 76 bp, Artificial Sequence
  Description of Artificial Sequence: Synthetic peanut, 5' sequence +inner sequence + 3' sequence
tagggaagagaaggacatatgatcggtccggaacgtaacgtgcacacggggcattgactagtacatgaccacttga

SEQ ID NO: 3954 - DNA, 76 bp, Artificial Sequence
  Description of Artificial Sequence: Synthetic peanut, 5' sequence +inner sequence + 3' sequence
tagggaagagaaggacatatgatcgcacatgccgtatatgaccgcgctgcatcttgactagtacatgaccacttga

SEQ ID NO: 3955 - DNA, 76 bp, Artificial Sequence
  Description of Artificial Sequence: Synthetic peanut, 5' sequence +inner sequence + 3' sequence
tagggaagagaaggacatatgatgtcattacgcatcctacacgtgggcacgtattgactagtacatgaccacttga

SEQ ID NO: 3956 - DNA, 76 bp, Artificial Sequence
  Description of Artificial Sequence: Synthetic peanut, 5' sequence +inner sequence + 3' sequence
tagggaagagaaggacatatgatcacgtgcagcatgcctgagctgacctggccttgactagtacatgaccacttga

SEQ ID NO: 3957 - DNA, 76 bp, Artificial Sequence
  Description of Artificial Sequence: Synthetic peanut, 5' sequence +inner sequence + 3' sequence
tagggaagagaaggacatatgatcggatggaccaacaacggactgcgtggacattgactagtacatgaccacttga

SEQ ID NO: 3958 - DNA, 76 bp, Artificial Sequence
  Description of Artificial Sequence: Synthetic peanut, 5' sequence +inner sequence + 3' sequence
tagggaagagaaggacatatgatcacgcacgcaaggacgaactggtatgcgtattgactagtacatgaccacttga

SEQ ID NO: 3959 - DNA, 76 bp, Artificial Sequence
  Description of Artificial Sequence: Synthetic peanut, 5' sequence +inner sequence + 3' sequence
tagggaagagaaggacatatgatgctgcacagcaaggtacgtcattccgcacattgactagtacatgaccacttga

SEQ ID NO: 3960 - DNA, 76 bp, Artificial Sequence
  Description of Artificial Sequence: Synthetic peanut, 5' sequence +inner sequence + 3' sequence
tagggaagagaaggacatatgatcgtacgcagtgggccttacgtctcggcacgttgactagtacatgaccacttga

SEQ ID NO: 3961 - DNA, 76 bp, Artificial Sequence
  Description of Artificial Sequence: Synthetic peanut, 5' sequence +inner sequence + 3' sequence
tagggaagagaaggacatatgatccgtggcaatgacggtgtcacgtacgcggtttgactagtacatgaccacttga

SEQ ID NO: 3962 - DNA, 76 bp, Artificial Sequence
  Description of Artificial Sequence: Synthetic peanut, 5' sequence +inner sequence + 3' sequence
tagggaagagaaggacatatgatggcatgcacgcacctacacgtgggtatggtttgactagtacatgaccacttga

SEQ ID NO: 3963 - DNA, 76 bp, Artificial Sequence
  Description of Artificial Sequence: Synthetic peanut, 5' sequence +inner sequence + 3' sequence
tagggaagagaaggacatatgattcaccgcaacgtaagtgtgtgccgtacgcattgactagtacatgaccacttga

SEQ ID NO: 3964 - DNA, 76 bp, Artificial Sequence
  Description of Artificial Sequence: Synthetic peanut, 5' sequence +inner sequence + 3' sequence
tagggaagagaaggacatatgatccaaccaggccatgatgcgtgtcatgcatgttgactagtacatgaccacttga

SEQ ID NO: 3965 - DNA, 76 bp, Artificial Sequence
  Description of Artificial Sequence: Synthetic peanut, 5' sequence +inner sequence + 3' sequence
tagggaagagaaggacatatgatcgcaccgtagatacgtaatgcacgctgacattgactagtacatgaccacttga

SEQ ID NO: 3966 - DNA, 76 bp, Artificial Sequence
  Description of Artificial Sequence: Synthetic peanut, 5' sequence +inner sequence + 3' sequence
tagggaagagaaggacatatgatgcgatgacagacgcagctttggtatgcacgttgactagtacatgaccacttga

SEQ ID NO: 3967 - DNA, 76 bp, Artificial Sequence
  Description of Artificial Sequence: Synthetic peanut, 5' sequence +inner sequence + 3' sequence
tagggaagagaaggacatatgatcgaacgcagtgaagtgacatccagtgcacattgactagtacatgaccacttga

SEQ ID NO: 3968 - DNA, 76 bp, Artificial Sequence
  Description of Artificial Sequence: Synthetic peanut, 5' sequence +inner sequence + 3' sequence
tagggaagagaaggacatatgatggcctgatcgaacctagagagtggcgtgggttgactagtacatgaccacttga

SEQ ID NO: 3969 - DNA, 76 bp, Artificial Sequence
  Description of Artificial Sequence: Synthetic peanut, 5' sequence +inner sequence + 3' sequence
tagggaagagaaggacatatgatacgtgcaggtgcaacatgtccaacggcacattgactagtacatgaccacttga

SEQ ID NO: 3970 - DNA, 76 bp, Artificial Sequence
  Description of Artificial Sequence: Synthetic peanut, 5' sequence +inner sequence + 3' sequence
tagggaagagaaggacatatgatccacaacgcacacgtagtctggtatgcatgttgactagtacatgaccacttga

SEQ ID NO: 3971 - DNA, 77 bp, Artificial Sequence
  Description of Artificial Sequence: Synthetic peanut, 5' sequence +inner sequence + 3' sequence
tagggaagagaaggacatatgatcgacactgtgcctgaccgtcaagttgcggcattgactagtacatgaccacttga

SEQ ID NO: 3972 - DNA, 76 bp, Artificial Sequence
  Description of Artificial Sequence: Synthetic peanut, 5' sequence +inner sequence + 3' sequence
tagggaagagaaggacatatgatccgatctggcgtagctggaacatgtgcgtattgactagtacatgaccacttga

SEQ ID NO: 3973 - DNA, 76 bp, Artificial Sequence
  Description of Artificial Sequence: Synthetic peanut, 5' sequence +inner sequence + 3' sequence
tagggaagagaaggacatatgatcgtgccgtaacagcaacgtacgtggccacattgactagtacatgaccacttga

SEQ ID NO: 3974 - DNA, 76 bp, Artificial Sequence
  Description of Artificial Sequence: Synthetic peanut, 5' sequence +inner sequence + 3' sequence
tagggaagagaaggacatatgatcggacaacgtcacgcaagggtcacggcatgttgactagtacatgaccacttga

SEQ ID NO: 3975 - DNA, 75 bp, Artificial Sequence
  Description of Artificial Sequence: Synthetic peanut, 5' sequence +inner sequence + 3' sequence
tagggaagagaaggacatatgatgtcatgccatcccttcgagtgtgacggtattgactagtacatgaccacttga

SEQ ID NO: 3976 - DNA, 76 bp, Artificial Sequence
  Description of Artificial Sequence: Synthetic peanut, 5' sequence +inner sequence + 3' sequence
tagggaagagaaggacatatgatcgtgacgtggcagacacgtacaattgcgcgttgactagtacatgaccacttga

SEQ ID NO: 3977 - DNA, 76 bp, Artificial Sequence
  Description of Artificial Sequence: Synthetic peanut, 5' sequence +inner sequence + 3' sequence
tagggaagagaaggacatatgatgtcacggctcggatgtgtgcatcgtacgtattgactagtacatgaccacttga

SEQ ID NO: 3978 - DNA, 76 bp, Artificial Sequence
  Description of Artificial Sequence: Synthetic peanut, 5' sequence +inner sequence + 3' sequence
tagggaagagaaggacatatgatcacagcatgacacaggtacgacgatgcgtgttgactagtacatgaccacttga

SEQ ID NO: 3979 - DNA, 76 bp, Artificial Sequence
  Description of Artificial Sequence: Synthetic peanut, 5' sequence +inner sequence + 3' sequence
tagggaagagaaggacatatgatggcctgcacgcacctacacgtgggtatggattgactagtacatgaccacttga

SEQ ID NO: 3980 - DNA, 76 bp, Artificial Sequence
  Description of Artificial Sequence: Synthetic peanut, 5' sequence +inner sequence + 3' sequence
tagggaagagaaggacatatgatgcgcaatgcgatacgtcgtggccatgcacattgactagtacatgaccacttga

SEQ ID NO: 3981 - DNA, 76 bp, Artificial Sequence
  Description of Artificial Sequence: Synthetic peanut, 5' sequence +inner sequence + 3' sequence
tagggaagagaaggacatatgatcgcagcacagacatggacggtacacgcgcgttgactagtacatgaccacttga

SEQ ID NO: 3982 - DNA, 76 bp, Artificial Sequence
  Description of Artificial Sequence: Synthetic peanut, 5' sequence +inner sequence + 3' sequence
tagggaagagaaggacatatgatcatgcacggttcgccgggatacgttgcgcattgactagtacatgaccacttga

SEQ ID NO: 3983 - DNA, 76 bp, Artificial Sequence
  Description of Artificial Sequence: Synthetic peanut, 5' sequence +inner sequence + 3' sequence
tagggaagagaaggacatatgatcgagtgcagcgaggtcctgggcagtgcgtgttgactagtacatgaccacttga

SEQ ID NO: 3984 - DNA, 76 bp, Artificial Sequence
  Description of Artificial Sequence: Synthetic peanut, 5' sequence +inner sequence + 3' sequence
tagggaagagaaggacatatgatacactgctcgaccgaacgtgagacgtgtgcttgactagtacatgaccacttga

SEQ ID NO: 3985 - DNA, 76 bp, Artificial Sequence
  Description of Artificial Sequence: Synthetic peanut, 5' sequence +inner sequence + 3' sequence
tagggaagagaaggacatatgatgtactgcactgccctacacgtgggcacgtattgactagtacatgaccacttga

SEQ ID NO: 3986 - DNA, 76 bp, Artificial Sequence
  Description of Artificial Sequence: Synthetic peanut, 5' sequence +inner sequence + 3' sequence
tagggaagagaaggacatatgatcgcatgcagagggcattctccacctccgcgttgactagtacatgaccacttga

SEQ ID NO: 3987 - DNA, 76 bp, Artificial Sequence
  Description of Artificial Sequence: Synthetic peanut, 5' sequence +inner sequence + 3' sequence
tagggaagagaaggacatatgatcatgccgagtgacgaagcagttgcgcctcgttgactagtacatgaccacttga

SEQ ID NO: 3988 - DNA, 76 bp, Artificial Sequence
  Description of Artificial Sequence: Synthetic peanut, 5' sequence +inner sequence + 3' sequence
tagggaagagaaggacatatgatgtcgtgcatggcttagctggtcgtcttggcttgactagtacatgaccacttga

SEQ ID NO: 3989 - DNA, 76 bp, Artificial Sequence
  Description of Artificial Sequence: Synthetic peanut, 5' sequence +inner sequence + 3' sequence
tagggaagagaaggacatatgattgcgcagcgcgatgtcgtacctcttgcgtgttgactagtacatgaccacttga

SEQ ID NO: 3990 - DNA, 76 bp, Artificial Sequence
  Description of Artificial Sequence: Synthetic peanut, 5' sequence +inner sequence + 3' sequence
tagggaagagaaggacatatgatgcatgcagccatgagtgcacatcgtcctgcttgactagtacatgaccacttga

SEQ ID NO: 3991 - DNA, 76 bp, Artificial Sequence
  Description of Artificial Sequence: Synthetic peanut, 5' sequence +inner sequence + 3' sequence
tagggaagagaaggacatatgatgtcattccgcatcctacacgcgggcacgtattgactagtacatgaccacttga

SEQ ID NO: 3992 - DNA, 76 bp, Artificial Sequence
  Description of Artificial Sequence: Synthetic peanut, 5' sequence +inner sequence + 3' sequence
tagggaagagaaggacatatgatgcgacagcgacatacgatatgctctgcgtcttgactagtacatgaccacttga

SEQ ID NO: 3993 - DNA, 76 bp, Artificial Sequence
  Description of Artificial Sequence: Synthetic peanut, 5' sequence +inner sequence + 3' sequence
tagggaagagaaggacatatgatcacgcacgtcaataacacggtcaccgcgcattgactagtacatgaccacttga

SEQ ID NO: 3994 - DNA, 76 bp, Artificial Sequence
  Description of Artificial Sequence: Synthetic peanut, 5' sequence +inner sequence + 3' sequence
tagggaagagaaggacatatgatggcacagagcgaccatcaagtgcgtgtgtattgactagtacatgaccacttga

SEQ ID NO: 3995 - DNA, 76 bp, Artificial Sequence
  Description of Artificial Sequence: Synthetic peanut, 5' sequence +inner sequence + 3' sequence
tagggaagagaaggacatatgatcacacacatcgaccctgagcccactgcgtgttgactagtacatgaccacttga

SEQ ID NO: 3996 - DNA, 76 bp, Artificial Sequence
  Description of Artificial Sequence: Synthetic peanut, 5' sequence +inner sequence + 3' sequence
tagggaagagaaggacatatgatcgcaccgagagtcacgcacgccacggctgtttgactagtacatgaccacttga

SEQ ID NO: 3997 - DNA, 76 bp, Artificial Sequence
  Description of Artificial Sequence: Synthetic peanut, 5' sequence +inner sequence + 3' sequence
tagggaagagaaggacatatgatcgcgtgcaaggagcgtgatcggttggcacattgactagtacatgaccacttga

SEQ ID NO: 3998 - DNA, 76 bp, Artificial Sequence
  Description of Artificial Sequence: Synthetic peanut, 5' sequence +inner sequence + 3' sequence
tagggaagagaaggacatatgatccgcacgtagtcctatcagtggtgcatgcattgactagtacatgaccacttga

SEQ ID NO: 3999 - DNA, 76 bp, Artificial Sequence
  Description of Artificial Sequence: Synthetic peanut, 5' sequence +inner sequence + 3' sequence
tagggaagagaaggacatatgattgagcgcacaaacgatcggcatgatacgcattgactagtacatgaccacttga

SEQ ID NO: 4000 - DNA, 76 bp, Artificial Sequence
  Description of Artificial Sequence: Synthetic peanut, 5' sequence +inner sequence + 3' sequence
tagggaagagaaggacatatgatcggtgacggtaagcatcgtgcaccttgccattgactagtacatgaccacttga

SEQ ID NO: 4001 - DNA, 76 bp, Artificial Sequence
  Description of Artificial Sequence: Synthetic peanut, 5' sequence +inner sequence + 3' sequence
tagggaagagaaggacatatgattcgacccacgcgaaacggcaatgcgtcacgttgactagtacatgaccacttga

SEQ ID NO: 4002 - DNA, 76 bp, Artificial Sequence
  Description of Artificial Sequence: Synthetic peanut, 5' sequence +inner sequence + 3' sequence
tagggaagagaaggacatatgatgcataggcagaccttccgtacacgtgcgtcttgactagtacatgaccacttga

SEQ ID NO: 4003 - DNA, 30 bp, Artificial Sequence; identical to SEQ ID NO: 4
  Description of Artificial Sequence: Synthetic almond; inner sequence

SEQ ID NO: 4004 - DNA, 30 bp, Artificial Sequence; identical to SEQ ID NO: 3
  Description of Artificial Sequence: Synthetic almond; inner sequence

SEQ ID NO: 4005 - DNA, 30 bp, Artificial Sequence; identical to SEQ ID NO: 8
  Description of Artificial Sequence: Synthetic almond; inner sequence

SEQ ID NO: 4006 - DNA, 30 bp, Artificial Sequence; identical to SEQ ID NO: 10
  Description of Artificial Sequence: Synthetic almond; inner sequence

SEQ ID NO: 4007 - DNA, 30 bp, Artificial Sequence; identical to SEQ ID NO: 5
  Description of Artificial Sequence: Synthetic almond; inner sequence

SEQ ID NO: 4008 - DNA, 30 bp, Artificial Sequence; identical to SEQ ID NO: 12
  Description of Artificial Sequence: Synthetic almond; inner sequence

SEQ ID NO: 4009 - DNA, 30 bp, Artificial Sequence; identical to SEQ ID NO: 7
  Description of Artificial Sequence: Synthetic almond; inner sequence

SEQ ID NO: 4010 - DNA, 30 bp, Artificial Sequence; identical to SEQ ID NO: 6
  Description of Artificial Sequence: Synthetic almond; inner sequence

SEQ ID NO: 4011 - DNA, 30 bp, Artificial Sequence; identical to SEQ ID NO: 13
  Description of Artificial Sequence: Synthetic almond; inner sequence

SEQ ID NO: 4012 - DNA, 30 bp, Artificial Sequence; identical to SEQ ID NO: 23
  Description of Artificial Sequence: Synthetic almond; inner sequence

SEQ ID NO: 4013 - DNA, 30 bp, Artificial Sequence; identical to SEQ ID NO: 9
  Description of Artificial Sequence: Synthetic almond; inner sequence

SEQ ID NO: 4014 - DNA, 30 bp, Artificial Sequence; identical to SEQ ID NO: 16
  Description of Artificial Sequence: Synthetic almond; inner sequence

SEQ ID NO: 4015 - DNA, 30 bp, Artificial Sequence; identical to SEQ ID NO: 49
  Description of Artificial Sequence: Synthetic almond; inner sequence

SEQ ID NO: 4016 - DNA, 30 bp, Artificial Sequence; identical to SEQ ID NO: 11
  Description of Artificial Sequence: Synthetic almond; inner sequence

SEQ ID NO: 4017 - DNA, 30 bp, Artificial Sequence; identical to SEQ ID NO: 18
  Description of Artificial Sequence: Synthetic almond; inner sequence

SEQ ID NO: 4018 - DNA, 30 bp, Artificial Sequence; identical to SEQ ID NO: 22
  Description of Artificial Sequence: Synthetic almond; inner sequence

SEQ ID NO: 4019 - DNA, 30 bp, Artificial Sequence; identical to SEQ ID NO: 37
  Description of Artificial Sequence: Synthetic almond; inner sequence

SEQ ID NO: 4020 - DNA, 30 bp, Artificial Sequence; identical to SEQ ID NO: 17
  Description of Artificial Sequence: Synthetic almond; inner sequence

SEQ ID NO: 4021 - DNA, 30 bp, Artificial Sequence; identical to SEQ ID NO: 46
  Description of Artificial Sequence: Synthetic almond; inner sequence

SEQ ID NO: 4022 - DNA, 30 bp, Artificial Sequence; identical to SEQ ID NO: 34
  Description of Artificial Sequence: Synthetic almond; inner sequence

SEQ ID NO: 4023 - DNA, 30 bp, Artificial Sequence; identical to SEQ ID NO: 30
  Description of Artificial Sequence: Synthetic almond; inner sequence

SEQ ID NO: 4024 - DNA, 30 bp, Artificial Sequence; identical to SEQ ID NO: 20
  Description of Artificial Sequence: Synthetic almond; inner sequence

SEQ ID NO: 4025 - DNA, 30 bp, Artificial Sequence; identical to SEQ ID NO: 14
  Description of Artificial Sequence: Synthetic almond; inner sequence

SEQ ID NO: 4026 - DNA, 30 bp, Artificial Sequence; identical to SEQ ID NO: 36
  Description of Artificial Sequence: Synthetic almond; inner sequence

SEQ ID NO: 4027 - DNA, 30 bp, Artificial Sequence; identical to SEQ ID NO: 28
  Description of Artificial Sequence: Synthetic almond; inner sequence

SEQ ID NO: 4028 - DNA, 30 bp, Artificial Sequence; identical to SEQ ID NO: 25
  Description of Artificial Sequence: Synthetic almond; inner sequence

SEQ ID NO: 4029 - DNA, 30 bp, Artificial Sequence; identical to SEQ ID NO: 41
  Description of Artificial Sequence: Synthetic almond; inner sequence

SEQ ID NO: 4030 - DNA, 29 bp, Artificial Sequence
  Description of Artificial Sequence: Synthetic almond; inner sequence
gcacgccgatgccctcatgtggccgtgga

SEQ ID NO: 4031 - DNA, 30 bp, Artificial Sequence; identical to SEQ ID NO: 40
  Description of Artificial Sequence: Synthetic almond; inner sequence

SEQ ID NO: 4032 - DNA, 30 bp, Artificial Sequence; identical to SEQ ID NO: 33
  Description of Artificial Sequence: Synthetic almond; inner sequence

SEQ ID NO: 4033 - DNA, 30 bp, Artificial Sequence; identical to SEQ ID NO: 82
  Description of Artificial Sequence: Synthetic almond; inner sequence

SEQ ID NO: 4034 - DNA, 30 bp, Artificial Sequence; identical to SEQ ID NO: 88
  Description of Artificial Sequence: Synthetic almond; inner sequence

SEQ ID NO: 4035 - DNA, 30 bp, Artificial Sequence; identical to SEQ ID NO: 66
  Description of Artificial Sequence: Synthetic almond; inner sequence

SEQ ID NO: 4036 - DNA, 30 bp, Artificial Sequence; identical to SEQ ID NO: 35
  Description of Artificial Sequence: Synthetic almond; inner sequence

SEQ ID NO: 4037 - DNA, 30 bp, Artificial Sequence; identical to SEQ ID NO: 55
  Description of Artificial Sequence: Synthetic almond; inner sequence

SEQ ID NO: 4038 - DNA, 30 bp, Artificial Sequence; identical to SEQ ID NO: 64
  Description of Artificial Sequence: Synthetic almond; inner sequence

SEQ ID NO: 4039 - DNA, 30 bp, Artificial Sequence; identical to SEQ ID NO: 24
  Description of Artificial Sequence: Synthetic almond; inner sequence

SEQ ID NO: 4040 - DNA, 30 bp, Artificial Sequence; identical to SEQ ID NO: 39
  Description of Artificial Sequence: Synthetic almond; inner sequence

SEQ ID NO: 4041 - DNA, 30 bp, Artificial Sequence; identical to SEQ ID NO: 74
  Description of Artificial Sequence: Synthetic almond; inner sequence

SEQ ID NO: 4042 - DNA, 30 bp, Artificial Sequence; identical to SEQ ID NO: 32
  Description of Artificial Sequence: Synthetic almond; inner sequence

SEQ ID NO: 4043 - DNA, 30 bp, Artificial Sequence; identical to SEQ ID NO: 63
  Description of Artificial Sequence: Synthetic almond; inner sequence

SEQ ID NO: 4044 - DNA, 30 bp, Artificial Sequence; identical to SEQ ID NO: 61
  Description of Artificial Sequence: Synthetic almond; inner sequence

SEQ ID NO: 4045 - DNA, 30 bp, Artificial Sequence; identical to SEQ ID NO: 45
  Description of Artificial Sequence: Synthetic almond; inner sequence

SEQ ID NO: 4046 - DNA, 30 bp, Artificial Sequence; identical to SEQ ID NO: 21
  Description of Artificial Sequence: Synthetic almond; inner sequence

SEQ ID NO: 4047 - DNA, 30 bp, Artificial Sequence; identical to SEQ ID NO: 52
  Description of Artificial Sequence: Synthetic almond; inner sequence

SEQ ID NO: 4048 - DNA, 30 bp, Artificial Sequence; identical to SEQ ID NO: 44
  Description of Artificial Sequence: Synthetic almond; inner sequence

SEQ ID NO: 4049 - DNA, 30 bp, Artificial Sequence; identical to SEQ ID NO: 19
  Description of Artificial Sequence: Synthetic almond; inner sequence

SEQ ID NO: 4050 - DNA, 30 bp, Artificial Sequence; identical to SEQ ID NO: 15
  Description of Artificial Sequence: Synthetic almond; inner sequence

SEQ ID NO: 4051 - DNA, 30 bp, Artificial Sequence; identical to SEQ ID NO: 112
  Description of Artificial Sequence: Synthetic almond; inner sequence

SEQ ID NO: 4052 - DNA, 30 bp, Artificial Sequence; identical to SEQ ID NO: 108
  Description of Artificial Sequence: Synthetic almond; inner sequence

SEQ ID NO: 4053 - DNA, 30 bp, Artificial Sequence; identical to SEQ ID NO: 58
  Description of Artificial Sequence: Synthetic almond; inner sequence

SEQ ID NO: 4054 - DNA, 30 bp, Artificial Sequence; identical to SEQ ID NO: 131
  Description of Artificial Sequence: Synthetic almond; inner sequence

SEQ ID NO: 4055 - DNA, 30 bp, Artificial Sequence; identical to SEQ ID NO: 31
  Description of Artificial Sequence: Synthetic almond; inner sequence

SEQ ID NO: 4056 - DNA, 30 bp, Artificial Sequence; identical to SEQ ID NO: 29
  Description of Artificial Sequence: Synthetic almond; inner sequence

SEQ ID NO: 4057 - DNA, 30 bp, Artificial Sequence; identical to SEQ ID NO: 54
  Description of Artificial Sequence: Synthetic almond; inner sequence

SEQ ID NO: 4058 - DNA, 30 bp, Artificial Sequence; identical to SEQ ID NO: 80
  Description of Artificial Sequence: Synthetic almond; inner sequence

SEQ ID NO: 4059 - DNA, 30 bp, Artificial Sequence; identical to SEQ ID NO: 168
  Description of Artificial Sequence: Synthetic almond; inner sequence

SEQ ID NO: 4060 - DNA, 30 bp, Artificial Sequence; identical to SEQ ID NO: 567
  Description of Artificial Sequence: Synthetic almond; inner sequence

SEQ ID NO: 4061 - DNA, 30 bp, Artificial Sequence; identical to SEQ ID NO: 117
  Description of Artificial Sequence: Synthetic almond; inner sequence

SEQ ID NO: 4062 - DNA, 30 bp, Artificial Sequence; identical to SEQ ID NO: 78
  Description of Artificial Sequence: Synthetic almond; inner sequence

SEQ ID NO: 4063 - DNA, 30 bp, Artificial Sequence; identical to SEQ ID NO: 129
  Description of Artificial Sequence: Synthetic almond; inner sequence

SEQ ID NO: 4064 - DNA, 30 bp, Artificial Sequence; identical to SEQ ID NO: 48
  Description of Artificial Sequence: Synthetic almond; inner sequence

SEQ ID NO: 4065 - DNA, 30 bp, Artificial Sequence; identical to SEQ ID NO: 207
  Description of Artificial Sequence: Synthetic almond; inner sequence

SEQ ID NO: 4066 - DNA, 30 bp, Artificial Sequence; identical to SEQ ID NO: 133
  Description of Artificial Sequence: Synthetic almond; inner sequence

SEQ ID NO: 4067 - DNA, 30 bp, Artificial Sequence; identical to SEQ ID NO: 136
  Description of Artificial Sequence: Synthetic almond; inner sequence

SEQ ID NO: 4068 - DNA, 30 bp, Artificial Sequence; identical to SEQ ID NO: 97
  Description of Artificial Sequence: Synthetic almond; inner sequence

SEQ ID NO: 4069 - DNA, 30 bp, Artificial Sequence; identical to SEQ ID NO: 155
  Description of Artificial Sequence: Synthetic almond; inner sequence

SEQ ID NO: 4070 - DNA, 30 bp, Artificial Sequence; identical to SEQ ID NO: 65
  Description of Artificial Sequence: Synthetic almond; inner sequence

SEQ ID NO: 4071 - DNA, 30 bp, Artificial Sequence; identical to SEQ ID NO: 183
  Description of Artificial Sequence: Synthetic almond; inner sequence

SEQ ID NO: 4072 - DNA, 30 bp, Artificial Sequence; identical to SEQ ID NO: 38
  Description of Artificial Sequence: Synthetic almond; inner sequence

SEQ ID NO: 4073 - DNA, 29 bp, Artificial Sequence
  Description of Artificial Sequence: Synthetic almond; inner sequence
gcacgtcgaaacacgtagccatgcacggt

SEQ ID NO: 4074 - DNA, 30 bp, Artificial Sequence; identical to SEQ ID NO: 81
  Description of Artificial Sequence: Synthetic almond; inner sequence

SEQ ID NO: 4075 - DNA, 30 bp, Artificial Sequence; identical to SEQ ID NO: 126
  Description of Artificial Sequence: Synthetic almond; inner sequence

SEQ ID NO: 4076 - DNA, 30 bp, Artificial Sequence; identical to SEQ ID NO: 67
  Description of Artificial Sequence: Synthetic almond; inner sequence

SEQ ID NO: 4077 - DNA, 30 bp, Artificial Sequence; identical to SEQ ID NO: 142
  Description of Artificial Sequence: Synthetic almond; inner sequence

SEQ ID NO: 4078 - DNA, 30 bp, Artificial Sequence; identical to SEQ ID NO: 51
  Description of Artificial Sequence: Synthetic almond; inner sequence

SEQ ID NO: 4079 - DNA, 30 bp, Artificial Sequence; identical to SEQ ID NO: 185
  Description of Artificial Sequence: Synthetic almond; inner sequence

SEQ ID NO: 4080 - DNA, 30 bp, Artificial Sequence; identical to SEQ ID NO: 195
  Description of Artificial Sequence: Synthetic almond; inner sequence

SEQ ID NO: 4081 - DNA, 30 bp, Artificial Sequence; identical to SEQ ID NO: 79
  Description of Artificial Sequence: Synthetic almond; inner sequence

SEQ ID NO: 4082 - DNA, 30 bp, Artificial Sequence; identical to SEQ ID NO: 692
  Description of Artificial Sequence: Synthetic almond; inner sequence

SEQ ID NO: 4083 - DNA, 30 bp, Artificial Sequence; identical to SEQ ID NO: 103
  Description of Artificial Sequence: Synthetic almond; inner sequence

SEQ ID NO: 4084 - DNA, 30 bp, Artificial Sequence; identical to SEQ ID NO: 211
  Description of Artificial Sequence: Synthetic almond; inner sequence

SEQ ID NO: 4085 - DNA, 30 bp, Artificial Sequence; identical to SEQ ID NO: 93
  Description of Artificial Sequence: Synthetic almond; inner sequence

SEQ ID NO: 4086 - DNA, 30 bp, Artificial Sequence; identical to SEQ ID NO: 92
  Description of Artificial Sequence: Synthetic almond; inner sequence

SEQ ID NO: 4087 - DNA, 30 bp, Artificial Sequence; identical to SEQ ID NO: 47
  Description of Artificial Sequence: Synthetic almond; inner sequence

SEQ ID NO: 4088 - DNA, 30 bp, Artificial Sequence; identical to SEQ ID NO: 50
  Description of Artificial Sequence: Synthetic almond; inner sequence

SEQ ID NO: 4089 - DNA, 30 bp, Artificial Sequence; identical to SEQ ID NO: 120
  Description of Artificial Sequence: Synthetic almond; inner sequence

SEQ ID NO: 4090 - DNA, 30 bp, Artificial Sequence; identical to SEQ ID NO: 26
  Description of Artificial Sequence: Synthetic almond; inner sequence

SEQ ID NO: 4091 - DNA, 30 bp, Artificial Sequence; identical to SEQ ID NO: 430
  Description of Artificial Sequence: Synthetic almond; inner sequence

SEQ ID NO: 4092 - DNA, 30 bp, Artificial Sequence; identical to SEQ ID NO: 229
  Description of Artificial Sequence: Synthetic almond; inner sequence

SEQ ID NO: 4093 - DNA, 30 bp, Artificial Sequence; identical to SEQ ID NO: 154
  Description of Artificial Sequence: Synthetic almond; inner sequence

SEQ ID NO: 4094 - DNA, 30 bp, Artificial Sequence; identical to SEQ ID NO: 56
  Description of Artificial Sequence: Synthetic almond; inner sequence

SEQ ID NO: 4095 - DNA, 30 bp, Artificial Sequence; identical to SEQ ID NO: 83
  Description of Artificial Sequence: Synthetic almond; inner sequence

SEQ ID NO: 4096 - DNA, 30 bp, Artificial Sequence; identical to SEQ ID NO: 247
  Description of Artificial Sequence: Synthetic almond; inner sequence

SEQ ID NO: 4097 - DNA, 30 bp, Artificial Sequence; identical to SEQ ID NO: 257
  Description of Artificial Sequence: Synthetic almond; inner sequence

SEQ ID NO: 4098 - DNA, 30 bp, Artificial Sequence; identical to SEQ ID NO: 287
  Description of Artificial Sequence: Synthetic almond; inner sequence

SEQ ID NO: 4099 - DNA, 30 bp, Artificial Sequence; identical to SEQ ID NO: 255
  Description of Artificial Sequence: Synthetic almond; inner sequence

SEQ ID NO: 4100 - DNA, 30 bp, Artificial Sequence; identical to SEQ ID NO: 59
  Description of Artificial Sequence: Synthetic almond; inner sequence

SEQ ID NO: 4101 - DNA, 30 bp, Artificial Sequence; identical to SEQ ID NO: 288
  Description of Artificial Sequence: Synthetic almond; inner sequence

SEQ ID NO: 4102 - DNA, 30 bp, Artificial Sequence; identical to SEQ ID NO: 91
  Description of Artificial Sequence: Synthetic almond; inner sequence

SEQ ID NO: 4103 - DNA, 30 bp, Artificial Sequence; identical to SEQ ID NO: 77
  Description of Artificial Sequence: Synthetic almond; inner sequence

SEQ ID NO: 4104 - DNA, 30 bp, Artificial Sequence; identical to SEQ ID NO: 151
  Description of Artificial Sequence: Synthetic almond; inner sequence

SEQ ID NO: 4105 - DNA, 30 bp, Artificial Sequence; identical to SEQ ID NO: 354
  Description of Artificial Sequence: Synthetic almond; inner sequence

SEQ ID NO: 4106 - DNA, 30 bp, Artificial Sequence; identical to SEQ ID NO: 233
  Description of Artificial Sequence: Synthetic almond; inner sequence

SEQ ID NO: 4107 - DNA, 30 bp, Artificial Sequence; identical to SEQ ID NO: 147
  Description of Artificial Sequence: Synthetic almond; inner sequence

SEQ ID NO: 4108 - DNA, 30 bp, Artificial Sequence; identical to SEQ ID NO: 161
  Description of Artificial Sequence: Synthetic almond; inner sequence

SEQ ID NO: 4109 - DNA, 30 bp, Artificial Sequence; identical to SEQ ID NO: 296
  Description of Artificial Sequence: Synthetic almond; inner sequence

SEQ ID NO: 4110 - DNA, 30 bp, Artificial Sequence; identical to SEQ ID NO: 355
  Description of Artificial Sequence: Synthetic almond; inner sequence

SEQ ID NO: 4111 - DNA, 30 bp, Artificial Sequence; identical to SEQ ID NO: 285
  Description of Artificial Sequence: Synthetic almond; inner sequence

SEQ ID NO: 4112 - DNA, 30 bp, Artificial Sequence; identical to SEQ ID NO: 122
  Description of Artificial Sequence: Synthetic almond; inner sequence

SEQ ID NO: 4113 - DNA, 30 bp, Artificial Sequence; identical to SEQ ID NO: 98
  Description of Artificial Sequence: Synthetic almond; inner sequence

SEQ ID NO: 4114 - DNA, 30 bp, Artificial Sequence; identical to SEQ ID NO: 203
  Description of Artificial Sequence: Synthetic almond; inner sequence

SEQ ID NO: 4115 - DNA, 30 bp, Artificial Sequence; identical to SEQ ID NO: 60
  Description of Artificial Sequence: Synthetic almond; inner sequence

SEQ ID NO: 4116 - DNA, 30 bp, Artificial Sequence; identical to SEQ ID NO: 144
  Description of Artificial Sequence: Synthetic almond; inner sequence

SEQ ID NO: 4117 - DNA, 30 bp, Artificial Sequence; identical to SEQ ID NO: 76
  Description of Artificial Sequence: Synthetic almond; inner sequence

SEQ ID NO: 4118 - DNA, 30 bp, Artificial Sequence; identical to SEQ ID NO: 27
  Description of Artificial Sequence: Synthetic almond; inner sequence

SEQ ID NO: 4119 - DNA, 30 bp, Artificial Sequence; identical to SEQ ID NO: 465
  Description of Artificial Sequence: Synthetic almond; inner sequence

SEQ ID NO: 4120 - DNA, 30 bp, Artificial Sequence; identical to SEQ ID NO: 237
  Description of Artificial Sequence: Synthetic almond; inner sequence

SEQ ID NO: 4121 - DNA, 30 bp, Artificial Sequence; identical to SEQ ID NO: 264
  Description of Artificial Sequence: Synthetic almond; inner sequence

SEQ ID NO: 4122 - DNA, 30 bp, Artificial Sequence; identical to SEQ ID NO: 198
  Description of Artificial Sequence: Synthetic almond; inner sequence

SEQ ID NO: 4123 - DNA, 30 bp, Artificial Sequence; identical to SEQ ID NO: 205
  Description of Artificial Sequence: Synthetic almond; inner sequence

SEQ ID NO: 4124 - DNA, 30 bp, Artificial Sequence; identical to SEQ ID NO: 68
  Description of Artificial Sequence: Synthetic almond; inner sequence

SEQ ID NO: 4125 - DNA, 30 bp, Artificial Sequence; identical to SEQ ID NO: 188
  Description of Artificial Sequence: Synthetic almond; inner sequence

SEQ ID NO: 4126 - DNA, 30 bp, Artificial Sequence; identical to SEQ ID NO: 179
  Description of Artificial Sequence: Synthetic almond; inner sequence

SEQ ID NO: 4127 - DNA, 30 bp, Artificial Sequence; identical to SEQ ID NO: 113
  Description of Artificial Sequence: Synthetic almond; inner sequence

SEQ ID NO: 4128 - DNA, 30 bp, Artificial Sequence; identical to SEQ ID NO: 94
  Description of Artificial Sequence: Synthetic almond; inner sequence

SEQ ID NO: 4129 - DNA, 30 bp, Artificial Sequence; identical to SEQ ID NO: 57
  Description of Artificial Sequence: Synthetic almond; inner sequence

SEQ ID NO: 4130 - DNA, 30 bp, Artificial Sequence; identical to SEQ ID NO: 282
  Description of Artificial Sequence: Synthetic almond; inner sequence

SEQ ID NO: 4131 - DNA, 30 bp, Artificial Sequence; identical to SEQ ID NO: 73
  Description of Artificial Sequence: Synthetic almond; inner sequence

SEQ ID NO: 4132 - DNA, 30 bp, Artificial Sequence; identical to SEQ ID NO: 145
  Description of Artificial Sequence: Synthetic almond; inner sequence

SEQ ID NO: 4133 - DNA, 30 bp, Artificial Sequence; identical to SEQ ID NO: 140
  Description of Artificial Sequence: Synthetic almond; inner sequence

SEQ ID NO: 4134 - DNA, 30 bp, Artificial Sequence; identical to SEQ ID NO: 691
  Description of Artificial Sequence: Synthetic almond; inner sequence

SEQ ID NO: 4135 - DNA, 30 bp, Artificial Sequence; identical to SEQ ID NO: 311
  Description of Artificial Sequence: Synthetic almond; inner sequence

SEQ ID NO: 4136 - DNA, 30 bp, Artificial Sequence; identical to SEQ ID NO: 522
  Description of Artificial Sequence: Synthetic almond; inner sequence

SEQ ID NO: 4137 - DNA, 30 bp, Artificial Sequence; identical to SEQ ID NO: 95
  Description of Artificial Sequence: Synthetic almond; inner sequence

SEQ ID NO: 4138 - DNA, 30 bp, Artificial Sequence; identical to SEQ ID NO: 283
  Description of Artificial Sequence: Synthetic almond; inner sequence

SEQ ID NO: 4139 - DNA, 30 bp, Artificial Sequence; identical to SEQ ID NO: 62
  Description of Artificial Sequence: Synthetic almond; inner sequence

SEQ ID NO: 4140 - DNA, 28 bp, Artificial Sequence
  Description of Artificial Sequence: Synthetic almond; inner sequence
ggacgcagctgacctagcatgtgtgtca

SEQ ID NO: 4141 - DNA, 31 bp, Artificial Sequence; identical to SEQ ID NO: 150
  Description of Artificial Sequence: Synthetic almond; inner sequence

SEQ ID NO: 4142 - DNA, 30 bp, Artificial Sequence; identical to SEQ ID NO: 360
  Description of Artificial Sequence: Synthetic almond; inner sequence

SEQ ID NO: 4143 - DNA, 30 bp, Artificial Sequence; identical to SEQ ID NO: 673
  Description of Artificial Sequence: Synthetic almond; inner sequence

SEQ ID NO: 4144 - DNA, 30 bp, Artificial Sequence; identical to SEQ ID NO: 329
  Description of Artificial Sequence: Synthetic almond; inner sequence

SEQ ID NO: 4145 - DNA, 30 bp, Artificial Sequence; identical to SEQ ID NO: 253
  Description of Artificial Sequence: Synthetic almond; inner sequence

SEQ ID NO: 4146 - DNA, 30 bp, Artificial Sequence; identical to SEQ ID NO: 293
  Description of Artificial Sequence: Synthetic almond; inner sequence

SEQ ID NO: 4147 - DNA, 30 bp, Artificial Sequence; identical to SEQ ID NO: 99
  Description of Artificial Sequence: Synthetic almond; inner sequence

SEQ ID NO: 4148 - DNA, 30 bp, Artificial Sequence; identical to SEQ ID NO: 115
  Description of Artificial Sequence: Synthetic almond; inner sequence

SEQ ID NO: 4149 - DNA, 30 bp, Artificial Sequence; identical to SEQ ID NO: 53
  Description of Artificial Sequence: Synthetic almond; inner sequence

SEQ ID NO: 4150 - DNA, 30 bp, Artificial Sequence; identical to SEQ ID NO: 42
  Description of Artificial Sequence: Synthetic almond; inner sequence

SEQ ID NO: 4151 - DNA, 30 bp, Artificial Sequence; identical to SEQ ID NO: 377
  Description of Artificial Sequence: Synthetic almond; inner sequence

SEQ ID NO: 4152 - DNA, 30 bp, Artificial Sequence; identical to SEQ ID NO: 362
  Description of Artificial Sequence: Synthetic almond; inner sequence

SEQ ID NO: 4153 - DNA, 30 bp, Artificial Sequence; identical to SEQ ID NO: 87
  Description of Artificial Sequence: Synthetic almond; inner sequence

SEQ ID NO: 4154 - DNA, 30 bp, Artificial Sequence; identical to SEQ ID NO: 290
  Description of Artificial Sequence: Synthetic almond; inner sequence

SEQ ID NO: 4155 - DNA, 31 bp, Artificial Sequence; identical to SEQ ID NO: 258
  Description of Artificial Sequence: Synthetic almond; inner sequence

SEQ ID NO: 4156 - DNA, 30 bp, Artificial Sequence; identical to SEQ ID NO: 654
  Description of Artificial Sequence: Synthetic almond; inner sequence

SEQ ID NO: 4157 - DNA, 30 bp, Artificial Sequence; identical to SEQ ID NO: 174
  Description of Artificial Sequence: Synthetic almond; inner sequence

SEQ ID NO: 4158 - DNA, 30 bp, Artificial Sequence; identical to SEQ ID NO: 118
  Description of Artificial Sequence: Synthetic almond; inner sequence

SEQ ID NO: 4159 - DNA, 30 bp, Artificial Sequence; identical to SEQ ID NO: 71
  Description of Artificial Sequence: Synthetic almond; inner sequence

SEQ ID NO: 4160 - DNA, 30 bp, Artificial Sequence; identical to SEQ ID NO: 347
  Description of Artificial Sequence: Synthetic almond; inner sequence

SEQ ID NO: 4161 - DNA, 30 bp, Artificial Sequence; identical to SEQ ID NO: 208
  Description of Artificial Sequence: Synthetic almond; inner sequence

SEQ ID NO: 4162 - DNA, 30 bp, Artificial Sequence; identical to SEQ ID NO: 96
  Description of Artificial Sequence: Synthetic almond; inner sequence

SEQ ID NO: 4163 - DNA, 30 bp, Artificial Sequence; identical to SEQ ID NO: 468
  Description of Artificial Sequence: Synthetic almond; inner sequence

SEQ ID NO: 4164 - DNA, 30 bp, Artificial Sequence; identical to SEQ ID NO: 245
  Description of Artificial Sequence: Synthetic almond; inner sequence

SEQ ID NO: 4165 - DNA, 30 bp, Artificial Sequence; identical to SEQ ID NO: 929
  Description of Artificial Sequence: Synthetic almond; inner sequence

SEQ ID NO: 4166 - DNA, 30 bp, Artificial Sequence; identical to SEQ ID NO: 470
  Description of Artificial Sequence: Synthetic almond; inner sequence

SEQ ID NO: 4167 - DNA, 30 bp, Artificial Sequence; identical to SEQ ID NO: 153
  Description of Artificial Sequence: Synthetic almond; inner sequence

SEQ ID NO: 4168 - DNA, 30 bp, Artificial Sequence; identical to SEQ ID NO: 321
  Description of Artificial Sequence: Synthetic almond; inner sequence

SEQ ID NO: 4169 - DNA, 30 bp, Artificial Sequence; identical to SEQ ID NO: 84
  Description of Artificial Sequence: Synthetic almond; inner sequence

SEQ ID NO: 4170 - DNA, 30 bp, Artificial Sequence; identical to SEQ ID NO: 663
  Description of Artificial Sequence: Synthetic almond; inner sequence

SEQ ID NO: 4171 - DNA, 30 bp, Artificial Sequence; identical to SEQ ID NO: 222
  Description of Artificial Sequence: Synthetic almond; inner sequence

SEQ ID NO: 4172 - DNA, 30 bp, Artificial Sequence; identical to SEQ ID NO: 438
  Description of Artificial Sequence: Synthetic almond; inner sequence

SEQ ID NO: 4173 - DNA, 30 bp, Artificial Sequence; identical to SEQ ID NO: 152
  Description of Artificial Sequence: Synthetic almond; inner sequence

SEQ ID NO: 4174 - DNA, 30 bp, Artificial Sequence; identical to SEQ ID NO: 106
  Description of Artificial Sequence: Synthetic almond; inner sequence

SEQ ID NO: 4175 - DNA, 30 bp, Artificial Sequence; identical to SEQ ID NO: 312
  Description of Artificial Sequence: Synthetic almond; inner sequence

SEQ ID NO: 4176 - DNA, 30 bp, Artificial Sequence; identical to SEQ ID NO: 234
  Description of Artificial Sequence: Synthetic almond; inner sequence

SEQ ID NO: 4177 - DNA, 30 bp, Artificial Sequence; identical to SEQ ID NO: 376
  Description of Artificial Sequence: Synthetic almond; inner sequence

SEQ ID NO: 4178 - DNA, 30 bp, Artificial Sequence; identical to SEQ ID NO: 111
  Description of Artificial Sequence: Synthetic almond; inner sequence

SEQ ID NO: 4179 - DNA, 30 bp, Artificial Sequence; identical to SEQ ID NO: 164
  Description of Artificial Sequence: Synthetic almond; inner sequence

SEQ ID NO: 4180 - DNA, 30 bp, Artificial Sequence; identical to SEQ ID NO: 69
  Description of Artificial Sequence: Synthetic almond; inner sequence

SEQ ID NO: 4181 - DNA, 30 bp, Artificial Sequence; identical to SEQ ID NO: 240
  Description of Artificial Sequence: Synthetic almond; inner sequence

SEQ ID NO: 4182 - DNA, 30 bp, Artificial Sequence; identical to SEQ ID NO: 149
  Description of Artificial Sequence: Synthetic almond; inner sequence

SEQ ID NO: 4183 - DNA, 30 bp, Artificial Sequence; identical to SEQ ID NO: 75
  Description of Artificial Sequence: Synthetic almond; inner sequence

SEQ ID NO: 4184 - DNA, 30 bp, Artificial Sequence; identical to SEQ ID NO: 201
  Description of Artificial Sequence: Synthetic almond; inner sequence

SEQ ID NO: 4185 - DNA, 30 bp, Artificial Sequence; identical to SEQ ID NO: 43
  Description of Artificial Sequence: Synthetic almond; inner sequence

SEQ ID NO: 4186 - DNA, 30 bp, Artificial Sequence; identical to SEQ ID NO: 406
  Description of Artificial Sequence: Synthetic almond; inner sequence

SEQ ID NO: 4187 - DNA, 30 bp, Artificial Sequence; identical to SEQ ID NO: 184
  Description of Artificial Sequence: Synthetic almond; inner sequence

SEQ ID NO: 4188 - DNA, 30 bp, Artificial Sequence; identical to SEQ ID NO: 308
  Description of Artificial Sequence: Synthetic almond; inner sequence

SEQ ID NO: 4189 - DNA, 30 bp, Artificial Sequence; identical to SEQ ID NO: 429
  Description of Artificial Sequence: Synthetic almond; inner sequence

SEQ ID NO: 4190 - DNA, 30 bp, Artificial Sequence; identical to SEQ ID NO: 527
  Description of Artificial Sequence: Synthetic almond; inner sequence

SEQ ID NO: 4191 - DNA, 30 bp, Artificial Sequence; identical to SEQ ID NO: 392
  Description of Artificial Sequence: Synthetic almond; inner sequence

SEQ ID NO: 4192 - DNA, 30 bp, Artificial Sequence; identical to SEQ ID NO: 132
  Description of Artificial Sequence: Synthetic almond; inner sequence

SEQ ID NO: 4193 - DNA, 30 bp, Artificial Sequence; identical to SEQ ID NO: 100
  Description of Artificial Sequence: Synthetic almond; inner sequence

SEQ ID NO: 4194 - DNA, 30 bp, Artificial Sequence; identical to SEQ ID NO: 729
  Description of Artificial Sequence: Synthetic almond; inner sequence

SEQ ID NO: 4195 - DNA, 30 bp, Artificial Sequence; identical to SEQ ID NO: 215
  Description of Artificial Sequence: Synthetic almond; inner sequence

SEQ ID NO: 4196 - DNA, 30 bp, Artificial Sequence; identical to SEQ ID NO: 178
  Description of Artificial Sequence: Synthetic almond; inner sequence

SEQ ID NO: 4197 - DNA, 30 bp, Artificial Sequence; identical to SEQ ID NO: 353
  Description of Artificial Sequence: Synthetic almond; inner sequence

SEQ ID NO: 4198 - DNA, 30 bp, Artificial Sequence
  Description of Artificial Sequence: Synthetic almond; inner sequence
gccgcagtgcgaatggtccgacgctgcacg

SEQ ID NO: 4199 - DNA, 30 bp, Artificial Sequence; identical to SEQ ID NO: 105
  Description of Artificial Sequence: Synthetic almond; inner sequence

SEQ ID NO: 4200 - DNA, 30 bp, Artificial Sequence; identical to SEQ ID NO: 359
  Description of Artificial Sequence: Synthetic almond; inner sequence

SEQ ID NO: 4201 - DNA, 30 bp, Artificial Sequence; identical to SEQ ID NO: 116
  Description of Artificial Sequence: Synthetic almond; inner sequence

SEQ ID NO: 4202 - DNA, 30 bp, Artificial Sequence; identical to SEQ ID NO: 953
  Description of Artificial Sequence: Synthetic almond; inner sequence

SEQ ID NO: 4203 - DNA, 30 bp, Artificial Sequence; identical to SEQ ID NO: 645
  Description of Artificial Sequence: Synthetic almond; inner sequence

SEQ ID NO: 4204 - DNA, 30 bp, Artificial Sequence; identical to SEQ ID NO: 172
  Description of Artificial Sequence: Synthetic almond; inner sequence

SEQ ID NO: 4205 - DNA, 30 bp, Artificial Sequence
  Description of Artificial Sequence: Synthetic almond; inner sequence
agtgtggctgcctcgaccaacgtggccatg

SEQ ID NO: 4206 - DNA, 30 bp, Artificial Sequence; identical to SEQ ID NO: 138
  Description of Artificial Sequence: Synthetic almond; inner sequence

SEQ ID NO: 4207 - DNA, 30 bp, Artificial Sequence; identical to SEQ ID NO: 436
  Description of Artificial Sequence: Synthetic almond; inner sequence

SEQ ID NO: 4208 - DNA, 30 bp, Artificial Sequence; identical to SEQ ID NO: 299
  Description of Artificial Sequence: Synthetic almond; inner sequence

SEQ ID NO: 4209 - DNA, 30 bp, Artificial Sequence; identical to SEQ ID NO: 579
  Description of Artificial Sequence: Synthetic almond; inner sequence

SEQ ID NO: 4210 - DNA, 30 bp, Artificial Sequence; identical to SEQ ID NO: 268
  Description of Artificial Sequence: Synthetic almond; inner sequence

SEQ ID NO: 4211 - DNA, 30 bp, Artificial Sequence; identical to SEQ ID NO: 159
  Description of Artificial Sequence: Synthetic almond; inner sequence

SEQ ID NO: 4212 - DNA, 30 bp, Artificial Sequence; identical to SEQ ID NO: 175
  Description of Artificial Sequence: Synthetic almond; inner sequence

SEQ ID NO: 4213 - DNA, 30 bp, Artificial Sequence; identical to SEQ ID NO: 125
  Description of Artificial Sequence: Synthetic almond; inner sequence

SEQ ID NO: 4214 - DNA, 30 bp, Artificial Sequence; identical to SEQ ID NO: 901
  Description of Artificial Sequence: Synthetic almond; inner sequence

SEQ ID NO: 4215 - DNA, 30 bp, Artificial Sequence; identical to SEQ ID NO: 270
  Description of Artificial Sequence: Synthetic almond; inner sequence

SEQ ID NO: 4216 - DNA, 30 bp, Artificial Sequence; identical to SEQ ID NO: 541
  Description of Artificial Sequence: Synthetic almond; inner sequence

SEQ ID NO: 4217 - DNA, 30 bp, Artificial Sequence; identical to SEQ ID NO: 230
  Description of Artificial Sequence: Synthetic almond; inner sequence

SEQ ID NO: 4218 - DNA, 30 bp, Artificial Sequence; identical to SEQ ID NO: 197
  Description of Artificial Sequence: Synthetic almond; inner sequence

SEQ ID NO: 4219 - DNA, 30 bp, Artificial Sequence; identical to SEQ ID NO: 364
  Description of Artificial Sequence: Synthetic almond; inner sequence

SEQ ID NO: 4220 - DNA, 30 bp, Artificial Sequence; identical to SEQ ID NO: 139
  Description of Artificial Sequence: Synthetic almond; inner sequence

SEQ ID NO: 4221 - DNA, 30 bp, Artificial Sequence; identical to SEQ ID NO: 123
  Description of Artificial Sequence: Synthetic almond; inner sequence

SEQ ID NO: 4222 - DNA, 30 bp, Artificial Sequence; identical to SEQ ID NO: 610
  Description of Artificial Sequence: Synthetic almond; inner sequence

SEQ ID NO: 4223 - DNA, 30 bp, Artificial Sequence; identical to SEQ ID NO: 570
  Description of Artificial Sequence: Synthetic almond; inner sequence

SEQ ID NO: 4224 - DNA, 30 bp, Artificial Sequence; identical to SEQ ID NO: 104
  Description of Artificial Sequence: Synthetic almond; inner sequence

SEQ ID NO: 4225 - DNA, 30 bp, Artificial Sequence; identical to SEQ ID NO: 86
  Description of Artificial Sequence: Synthetic almond; inner sequence

SEQ ID NO: 4226 - DNA, 30 bp, Artificial Sequence; identical to SEQ ID NO: 783
  Description of Artificial Sequence: Synthetic almond; inner sequence

SEQ ID NO: 4227 - DNA, 30 bp, Artificial Sequence; identical to SEQ ID NO: 232
  Description of Artificial Sequence: Synthetic almond; inner sequence

SEQ ID NO: 4228 - DNA, 30 bp, Artificial Sequence; identical to SEQ ID NO: 85
  Description of Artificial Sequence: Synthetic almond; inner sequence

SEQ ID NO: 4229 - DNA, 30 bp, Artificial Sequence
  Description of Artificial Sequence: Synthetic almond; inner sequence
ccgaacggacctacgtgggatgcgcgtcgt

SEQ ID NO: 4230 - DNA, 30 bp, Artificial Sequence
  Description of Artificial Sequence: Synthetic almond; inner sequence
ggacgcgatgaccacatgccgtgagacatg

SEQ ID NO: 4231 - DNA, 30 bp, Artificial Sequence; identical to SEQ ID NO: 191
  Description of Artificial Sequence: Synthetic almond; inner sequence

SEQ ID NO: 4232 - DNA, 30 bp, Artificial Sequence; identical to SEQ ID NO: 552
  Description of Artificial Sequence: Synthetic almond; inner sequence

SEQ ID NO: 4233 - DNA, 30 bp, Artificial Sequence; identical to SEQ ID NO: 194
  Description of Artificial Sequence: Synthetic almond; inner sequence

SEQ ID NO: 4234 - DNA, 30 bp, Artificial Sequence
  Description of Artificial Sequence: Synthetic almond; inner sequence
ggacgcggctgacctcaagctggccaggta

SEQ ID NO: 4235 - DNA, 30 bp, Artificial Sequence; identical to SEQ ID NO: 209
  Description of Artificial Sequence: Synthetic almond; inner sequence

SEQ ID NO: 4236 - DNA, 30 bp, Artificial Sequence; identical to SEQ ID NO: 361
  Description of Artificial Sequence: Synthetic almond; inner sequence

SEQ ID NO: 4237 - DNA, 30 bp, Artificial Sequence; identical to SEQ ID NO: 389
  Description of Artificial Sequence: Synthetic almond; inner sequence

SEQ ID NO: 4238 - DNA, 30 bp, Artificial Sequence
  Description of Artificial Sequence: Synthetic almond; inner sequence
cgatggccgtaacgaaacgtgcaggtggga

SEQ ID NO: 4239 - DNA, 30 bp, Artificial Sequence; identical to SEQ ID NO: 519
  Description of Artificial Sequence: Synthetic almond; inner sequence

SEQ ID NO: 4240 - DNA, 30 bp, Artificial Sequence
  Description of Artificial Sequence: Synthetic almond; inner sequence
ggccgagctgacctgcacgcacgcatggcc

SEQ ID NO: 4241 - DNA, 30 bp, Artificial Sequence; identical to SEQ ID NO: 107
  Description of Artificial Sequence: Synthetic almond; inner sequence

SEQ ID NO: 4242 - DNA, 30 bp, Artificial Sequence; identical to SEQ ID NO: 269
  Description of Artificial Sequence: Synthetic almond; inner sequence

SEQ ID NO: 4243 - DNA, 31 bp, Artificial Sequence; identical to SEQ ID NO: 221
  Description of Artificial Sequence: Synthetic almond; inner sequence

SEQ ID NO: 4244 - DNA, 30 bp, Artificial Sequence; identical to SEQ ID NO: 134
  Description of Artificial Sequence: Synthetic almond; inner sequence

SEQ ID NO: 4245 - DNA, 31 bp, Artificial Sequence
  Description of Artificial Sequence: Synthetic almond; inner sequence
catggccgcagctgacctagcatgtgtgtca

SEQ ID NO: 4246 - DNA, 30 bp, Artificial Sequence; identical to SEQ ID NO: 506
  Description of Artificial Sequence: Synthetic almond; inner sequence

SEQ ID NO: 4247 - DNA, 30 bp, Artificial Sequence; identical to SEQ ID NO: 243
  Description of Artificial Sequence: Synthetic almond; inner sequence

SEQ ID NO: 4248 - DNA, 30 bp, Artificial Sequence; identical to SEQ ID NO: 341
  Description of Artificial Sequence: Synthetic almond; inner sequence

SEQ ID NO: 4249 - DNA, 30 bp, Artificial Sequence; identical to SEQ ID NO: 110
  Description of Artificial Sequence: Synthetic almond; inner sequence

SEQ ID NO: 4250 - DNA, 30 bp, Artificial Sequence; identical to SEQ ID NO: 314
  Description of Artificial Sequence: Synthetic almond; inner sequence

SEQ ID NO: 4251 - DNA, 30 bp, Artificial Sequence; identical to SEQ ID NO: 572
  Description of Artificial Sequence: Synthetic almond; inner sequence

SEQ ID NO: 4252 - DNA, 30 bp, Artificial Sequence; identical to SEQ ID NO: 170
  Description of Artificial Sequence: Synthetic almond; inner sequence

SEQ ID NO: 4253 - DNA, 30 bp, Artificial Sequence; identical to SEQ ID NO: 165
  Description of Artificial Sequence: Synthetic almond; inner sequence

SEQ ID NO: 4254 - DNA, 30 bp, Artificial Sequence
  Description of Artificial Sequence: Synthetic almond; inner sequence
ggccagagcgaccctacacgtggcacgtac

SEQ ID NO: 4255 - DNA, 30 bp, Artificial Sequence; identical to SEQ ID NO: 204
  Description of Artificial Sequence: Synthetic almond; inner sequence

SEQ ID NO: 4256 - DNA, 30 bp, Artificial Sequence; identical to SEQ ID NO: 836
  Description of Artificial Sequence: Synthetic almond; inner sequence

SEQ ID NO: 4257 - DNA, 30 bp, Artificial Sequence; identical to SEQ ID NO: 831
  Description of Artificial Sequence: Synthetic almond; inner sequence

SEQ ID NO: 4258 - DNA, 30 bp, Artificial Sequence; identical to SEQ ID NO: 532
  Description of Artificial Sequence: Synthetic almond; inner sequence

SEQ ID NO: 4259 - DNA, 30 bp, Artificial Sequence; identical to SEQ ID NO: 336
  Description of Artificial Sequence: Synthetic almond; inner sequence

SEQ ID NO: 4260 - DNA, 30 bp, Artificial Sequence
  Description of Artificial Sequence: Synthetic almond; inner sequence
tggtccgacgctgaccagtgcacgtggcca

SEQ ID NO: 4261 - DNA, 30 bp, Artificial Sequence; identical to SEQ ID NO: 72
  Description of Artificial Sequence: Synthetic almond; inner sequence

SEQ ID NO: 4262 - DNA, 30 bp, Artificial Sequence; identical to SEQ ID NO: 391
  Description of Artificial Sequence: Synthetic almond; inner sequence

SEQ ID NO: 4263 - DNA, 30 bp, Artificial Sequence; identical to SEQ ID NO: 956
  Description of Artificial Sequence: Synthetic almond; inner sequence

SEQ ID NO: 4264 - DNA, 30 bp, Artificial Sequence; identical to SEQ ID NO: 540
  Description of Artificial Sequence: Synthetic almond; inner sequence

SEQ ID NO: 4265 - DNA, 30 bp, Artificial Sequence; identical to SEQ ID NO: 352
  Description of Artificial Sequence: Synthetic almond; inner sequence

SEQ ID NO: 4266 - DNA, 30 bp, Artificial Sequence; identical to SEQ ID NO: 146
  Description of Artificial Sequence: Synthetic almond; inner sequence

SEQ ID NO: 4267 - DNA, 28 bp, Artificial Sequence
  Description of Artificial Sequence: Synthetic almond; inner sequence
ggacgcaacgtaccgtatcgtggccatg

SEQ ID NO: 4268 - DNA, 30 bp, Artificial Sequence; identical to SEQ ID NO: 190
  Description of Artificial Sequence: Synthetic almond; inner sequence

SEQ ID NO: 4269 - DNA, 30 bp, Artificial Sequence; identical to SEQ ID NO: 485
  Description of Artificial Sequence: Synthetic almond; inner sequence

SEQ ID NO: 4270 - DNA, 30 bp, Artificial Sequence; identical to SEQ ID NO: 371
  Description of Artificial Sequence: Synthetic almond; inner sequence

SEQ ID NO: 4271 - DNA, 30 bp, Artificial Sequence; identical to SEQ ID NO: 454
  Description of Artificial Sequence: Synthetic almond; inner sequence

SEQ ID NO: 4272 - DNA, 30 bp, Artificial Sequence
  Description of Artificial Sequence: Synthetic almond; inner sequence
acgtccaggaccacatgtcgttgcgtcacg

SEQ ID NO: 4273 - DNA, 30 bp, Artificial Sequence
  Description of Artificial Sequence: Synthetic almond; inner sequence
tcgacatgaccagatgtacctcgcttcacg

SEQ ID NO: 4274 - DNA, 30 bp, Artificial Sequence; identical to SEQ ID NO: 102
  Description of Artificial Sequence: Synthetic almond; inner sequence

SEQ ID NO: 4275 - DNA, 30 bp, Artificial Sequence; identical to SEQ ID NO: 228
  Description of Artificial Sequence: Synthetic almond; inner sequence

SEQ ID NO: 4276 - DNA, 30 bp, Artificial Sequence; identical to SEQ ID NO: 200
  Description of Artificial Sequence: Synthetic almond; inner sequence

SEQ ID NO: 4277 - DNA, 30 bp, Artificial Sequence; identical to SEQ ID NO: 367
  Description of Artificial Sequence: Synthetic almond; inner sequence

SEQ ID NO: 4278 - DNA, 30 bp, Artificial Sequence; identical to SEQ ID NO: 121
  Description of Artificial Sequence: Synthetic almond; inner sequence

SEQ ID NO: 4279 - DNA, 30 bp, Artificial Sequence; identical to SEQ ID NO: 481
  Description of Artificial Sequence: Synthetic almond; inner sequence

SEQ ID NO: 4280 - DNA, 30 bp, Artificial Sequence
  Description of Artificial Sequence: Synthetic almond; inner sequence
ggccgcatcgaccgaagtggcatgcgcgca

SEQ ID NO: 4281 - DNA, 30 bp, Artificial Sequence; identical to SEQ ID NO: 718
  Description of Artificial Sequence: Synthetic almond; inner sequence

SEQ ID NO: 4282 - DNA, 30 bp, Artificial Sequence; identical to SEQ ID NO: 171
  Description of Artificial Sequence: Synthetic almond; inner sequence

SEQ ID NO: 4283 - DNA, 30 bp, Artificial Sequence; identical to SEQ ID NO: 385
  Description of Artificial Sequence: Synthetic almond; inner sequence

SEQ ID NO: 4284 - DNA, 30 bp, Artificial Sequence; identical to SEQ ID NO: 109
  Description of Artificial Sequence: Synthetic almond; inner sequence

SEQ ID NO: 4285 - DNA, 30 bp, Artificial Sequence; identical to SEQ ID NO: 89
  Description of Artificial Sequence: Synthetic almond; inner sequence

SEQ ID NO: 4286 - DNA, 30 bp, Artificial Sequence; identical to SEQ ID NO: 832
  Description of Artificial Sequence: Synthetic almond; inner sequence

SEQ ID NO: 4287 - DNA, 30 bp, Artificial Sequence; identical to SEQ ID NO: 163
  Description of Artificial Sequence: Synthetic almond; inner sequence

SEQ ID NO: 4288 - DNA, 30 bp, Artificial Sequence; identical to SEQ ID NO: 634
  Description of Artificial Sequence: Synthetic almond; inner sequence

SEQ ID NO: 4289 - DNA, 30 bp, Artificial Sequence
  Description of Artificial Sequence: Synthetic almond; inner sequence
gtacgtagcgcaacgatgtggctatgcaca

SEQ ID NO: 4290 - DNA, 30 bp, Artificial Sequence; identical to SEQ ID NO: 310
  Description of Artificial Sequence: Synthetic almond; inner sequence

SEQ ID NO: 4291 - DNA, 30 bp, Artificial Sequence; identical to SEQ ID NO: 484
  Description of Artificial Sequence: Synthetic almond; inner sequence

SEQ ID NO: 4292 - DNA, 31 bp, Artificial Sequence; identical to SEQ ID NO: 250
  Description of Artificial Sequence: Synthetic almond; inner sequence

SEQ ID NO: 4293 - DNA, 30 bp, Artificial Sequence; identical to SEQ ID NO: 220
  Description of Artificial Sequence: Synthetic almond; inner sequence

SEQ ID NO: 4294 - DNA, 30 bp, Artificial Sequence; identical to SEQ ID NO: 196
  Description of Artificial Sequence: Synthetic almond; inner sequence

SEQ ID NO: 4295 - DNA, 30 bp, Artificial Sequence; identical to SEQ ID NO: 912
  Description of Artificial Sequence: Synthetic almond; inner sequence

SEQ ID NO: 4296 - DNA, 30 bp, Artificial Sequence; identical to SEQ ID NO: 529
  Description of Artificial Sequence: Synthetic almond; inner sequence

SEQ ID NO: 4297 - DNA, 30 bp, Artificial Sequence
  Description of Artificial Sequence: Synthetic almond; inner sequence
ggccgacacttaccgatgcaacgctgcgca

SEQ ID NO: 4298 - DNA, 30 bp, Artificial Sequence; identical to SEQ ID NO: 343
  Description of Artificial Sequence: Synthetic almond; inner sequence

SEQ ID NO: 4299 - DNA, 30 bp, Artificial Sequence; identical to SEQ ID NO: 305
  Description of Artificial Sequence: Synthetic almond; inner sequence

SEQ ID NO: 4300 - DNA, 30 bp, Artificial Sequence; identical to SEQ ID NO: 476
  Description of Artificial Sequence: Synthetic almond; inner sequence

SEQ ID NO: 4301 - DNA, 30 bp, Artificial Sequence
  Description of Artificial Sequence: Synthetic almond; inner sequence
catggccgcaatcatgaccgcaagtgtgcg

SEQ ID NO: 4302 - DNA, 30 bp, Artificial Sequence; identical to SEQ ID NO: 613
  Description of Artificial Sequence: Synthetic almond; inner sequence

SEQ ID NO: 4303 - DNA, 30 bp, Artificial Sequence; identical to SEQ ID NO: 90
  Description of Artificial Sequence: Synthetic almond; inner sequence

SEQ ID NO: 4304 - DNA, 30 bp, Artificial Sequence; identical to SEQ ID NO: 186
  Description of Artificial Sequence: Synthetic almond; inner sequence

SEQ ID NO: 4305 - DNA, 30 bp, Artificial Sequence; identical to SEQ ID NO: 218
  Description of Artificial Sequence: Synthetic almond; inner sequence

SEQ ID NO: 4306 - DNA, 30 bp, Artificial Sequence; identical to SEQ ID NO: 725
  Description of Artificial Sequence: Synthetic almond; inner sequence

SEQ ID NO: 4307 - DNA, 30 bp, Artificial Sequence; identical to SEQ ID NO: 323
  Description of Artificial Sequence: Synthetic almond; inner sequence

SEQ ID NO: 4308 - DNA, 30 bp, Artificial Sequence; identical to SEQ ID NO: 520
  Description of Artificial Sequence: Synthetic almond; inner sequence

SEQ ID NO: 4309 - DNA, 30 bp, Artificial Sequence; identical to SEQ ID NO: 158
  Description of Artificial Sequence: Synthetic almond; inner sequence

SEQ ID NO: 4310 - DNA, 30 bp, Artificial Sequence; identical to SEQ ID NO: 553
  Description of Artificial Sequence: Synthetic almond; inner sequence

SEQ ID NO: 4311 - DNA, 30 bp, Artificial Sequence; identical to SEQ ID NO: 246
  Description of Artificial Sequence: Synthetic almond; inner sequence

SEQ ID NO: 4312 - DNA, 30 bp, Artificial Sequence
  Description of Artificial Sequence: Synthetic almond; inner sequence
ggcgtgagtgcaccgtgatcaagcgtggca

SEQ ID NO: 4313 - DNA, 30 bp, Artificial Sequence; identical to SEQ ID NO: 450
  Description of Artificial Sequence: Synthetic almond; inner sequence

SEQ ID NO: 4314 - DNA, 30 bp, Artificial Sequence; identical to SEQ ID NO: 401
  Description of Artificial Sequence: Synthetic almond; inner sequence

SEQ ID NO: 4315 - DNA, 30 bp, Artificial Sequence; identical to SEQ ID NO: 511
  Description of Artificial Sequence: Synthetic almond; inner sequence

SEQ ID NO: 4316 - DNA, 30 bp, Artificial Sequence; identical to SEQ ID NO: 916
  Description of Artificial Sequence: Synthetic almond; inner sequence

SEQ ID NO: 4317 - DNA, 30 bp, Artificial Sequence
  Description of Artificial Sequence: Synthetic almond; inner sequence
ccgcgcgaggaccgtgtcaagctggtcacg

SEQ ID NO: 4318 - DNA, 30 bp, Artificial Sequence; identical to SEQ ID NO: 173
  Description of Artificial Sequence: Synthetic almond; inner sequence

SEQ ID NO: 4319 - DNA, 30 bp, Artificial Sequence; identical to SEQ ID NO: 523
  Description of Artificial Sequence: Synthetic almond; inner sequence

SEQ ID NO: 4320 - DNA, 30 bp, Artificial Sequence; identical to SEQ ID NO: 262
  Description of Artificial Sequence: Synthetic almond; inner sequence

SEQ ID NO: 4321 - DNA, 30 bp, Artificial Sequence; identical to SEQ ID NO: 192
  Description of Artificial Sequence: Synthetic almond; inner sequence

SEQ ID NO: 4322 - DNA, 30 bp, Artificial Sequence; identical to SEQ ID NO: 517
  Description of Artificial Sequence: Synthetic almond; inner sequence

SEQ ID NO: 4323 - DNA, 30 bp, Artificial Sequence; identical to SEQ ID NO: 254
  Description of Artificial Sequence: Synthetic almond; inner sequence

SEQ ID NO: 4324 - DNA, 30 bp, Artificial Sequence; identical to SEQ ID NO: 478
  Description of Artificial Sequence: Synthetic almond; inner sequence

SEQ ID NO: 4325 - DNA, 30 bp, Artificial Sequence; identical to SEQ ID NO: 167
  Description of Artificial Sequence: Synthetic almond; inner sequence

SEQ ID NO: 4326 - DNA, 30 bp, Artificial Sequence; identical to SEQ ID NO: 719
  Description of Artificial Sequence: Synthetic almond; inner sequence

SEQ ID NO: 4327 - DNA, 30 bp, Artificial Sequence; identical to SEQ ID NO: 442
  Description of Artificial Sequence: Synthetic almond; inner sequence

SEQ ID NO: 4328 - DNA, 30 bp, Artificial Sequence; identical to SEQ ID NO: 214
  Description of Artificial Sequence: Synthetic almond; inner sequence

SEQ ID NO: 4329 - DNA, 30 bp, Artificial Sequence; identical to SEQ ID NO: 741
  Description of Artificial Sequence: Synthetic almond; inner sequence

SEQ ID NO: 4330 - DNA, 30 bp, Artificial Sequence; identical to SEQ ID NO: 850
  Description of Artificial Sequence: Synthetic almond; inner sequence

SEQ ID NO: 4331 - DNA, 30 bp, Artificial Sequence; identical to SEQ ID NO: 350
  Description of Artificial Sequence: Synthetic almond; inner sequence

SEQ ID NO: 4332 - DNA, 30 bp, Artificial Sequence; identical to SEQ ID NO: 625
  Description of Artificial Sequence: Synthetic almond; inner sequence

SEQ ID NO: 4333 - DNA, 30 bp, Artificial Sequence; identical to SEQ ID NO: 771
  Description of Artificial Sequence: Synthetic almond; inner sequence

SEQ ID NO: 4334 - DNA, 30 bp, Artificial Sequence; identical to SEQ ID NO: 137
  Description of Artificial Sequence: Synthetic almond; inner sequence

SEQ ID NO: 4335 - DNA, 30 bp, Artificial Sequence; identical to SEQ ID NO: 114
  Description of Artificial Sequence: Synthetic almond; inner sequence

SEQ ID NO: 4336 - DNA, 30 bp, Artificial Sequence
  Description of Artificial Sequence: Synthetic almond; inner sequence
gcacgcctcgcaccctatcatgaggccatg

SEQ ID NO: 4337 - DNA, 33 bp, Artificial Sequence; identical to SEQ ID NO: 864
  Description of Artificial Sequence: Synthetic almond; inner sequence

SEQ ID NO: 4338 - DNA, 30 bp, Artificial Sequence; identical to SEQ ID NO: 496
  Description of Artificial Sequence: Synthetic almond; inner sequence

SEQ ID NO: 4339 - DNA, 30 bp, Artificial Sequence
  Description of Artificial Sequence: Synthetic almond; inner sequence
cgtggcgcacgacacggaccttcgctgcgc

SEQ ID NO: 4340 - DNA, 30 bp, Artificial Sequence; identical to SEQ ID NO: 160
  Description of Artificial Sequence: Synthetic almond; inner sequence

SEQ ID NO: 4341 - DNA, 30 bp, Artificial Sequence; identical to SEQ ID NO: 213
  Description of Artificial Sequence: Synthetic almond; inner sequence

SEQ ID NO: 4342 - DNA, 30 bp, Artificial Sequence; identical to SEQ ID NO: 606
  Description of Artificial Sequence: Synthetic almond; inner sequence

SEQ ID NO: 4343 - DNA, 30 bp, Artificial Sequence; identical to SEQ ID NO: 545
  Description of Artificial Sequence: Synthetic almond; inner sequence

SEQ ID NO: 4344 - DNA, 30 bp, Artificial Sequence; identical to SEQ ID NO: 212
  Description of Artificial Sequence: Synthetic almond; inner sequence

SEQ ID NO: 4345 - DNA, 30 bp, Artificial Sequence; identical to SEQ ID NO: 811
  Description of Artificial Sequence: Synthetic almond; inner sequence

SEQ ID NO: 4346 - DNA, 30 bp, Artificial Sequence; identical to SEQ ID NO: 271
  Description of Artificial Sequence: Synthetic almond; inner sequence

SEQ ID NO: 4347 - DNA, 30 bp, Artificial Sequence; identical to SEQ ID NO: 439
  Description of Artificial Sequence: Synthetic almond; inner sequence

SEQ ID NO: 4348 - DNA, 30 bp, Artificial Sequence
  Description of Artificial Sequence: Synthetic almond; inner sequence
acgtcgcgaacccaagacgcatgtgccagt

SEQ ID NO: 4349 - DNA, 30 bp, Artificial Sequence; identical to SEQ ID NO: 696
  Description of Artificial Sequence: Synthetic almond; inner sequence

SEQ ID NO: 4350 - DNA, 30 bp, Artificial Sequence; identical to SEQ ID NO: 332
  Description of Artificial Sequence: Synthetic almond; inner sequence

SEQ ID NO: 4351 - DNA, 30 bp, Artificial Sequence
  Description of Artificial Sequence: Synthetic almond; inner sequence
gtgcacagcgaacctaagcgggcatgcacg

SEQ ID NO: 4352 - DNA, 30 bp, Artificial Sequence; identical to SEQ ID NO: 457
  Description of Artificial Sequence: Synthetic almond; inner sequence

SEQ ID NO: 4353 - DNA, 30 bp, Artificial Sequence; identical to SEQ ID NO: 626
  Description of Artificial Sequence: Synthetic almond; inner sequence

SEQ ID NO: 4354 - DNA, 30 bp, Artificial Sequence; identical to SEQ ID NO: 713
  Description of Artificial Sequence: Synthetic almond; inner sequence

SEQ ID NO: 4355 - DNA, 30 bp, Artificial Sequence; identical to SEQ ID NO: 807
  Description of Artificial Sequence: Synthetic almond; inner sequence

SEQ ID NO: 4356 - DNA, 30 bp, Artificial Sequence
  Description of Artificial Sequence: Synthetic almond; inner sequence
acgtgcacacgccaaggtccgatcgacgcg

SEQ ID NO: 4357 - DNA, 30 bp, Artificial Sequence
  Description of Artificial Sequence: Synthetic almond; inner sequence
gctaccagcagcatgccgccgagctgcacg

SEQ ID NO: 4358 - DNA, 30 bp, Artificial Sequence; identical to SEQ ID NO: 313
  Description of Artificial Sequence: Synthetic almond; inner sequence

SEQ ID NO: 4359 - DNA, 30 bp, Artificial Sequence; identical to SEQ ID NO: 157
  Description of Artificial Sequence: Synthetic almond; inner sequence

SEQ ID NO: 4360 - DNA, 30 bp, Artificial Sequence; identical to SEQ ID NO: 791
  Description of Artificial Sequence: Synthetic almond; inner sequence

SEQ ID NO: 4361 - DNA, 30 bp, Artificial Sequence; identical to SEQ ID NO: 666
  Description of Artificial Sequence: Synthetic almond; inner sequence

SEQ ID NO: 4362 - DNA, 30 bp, Artificial Sequence; identical to SEQ ID NO: 585
  Description of Artificial Sequence: Synthetic almond; inner sequence

SEQ ID NO: 4363 - DNA, 30 bp, Artificial Sequence; identical to SEQ ID NO: 297
  Description of Artificial Sequence: Synthetic almond; inner sequence

SEQ ID NO: 4364 - DNA, 30 bp, Artificial Sequence
  Description of Artificial Sequence: Synthetic almond; inner sequence
ggcatgcacgcacctacacgtggggatgga

SEQ ID NO: 4365 - DNA, 30 bp, Artificial Sequence; identical to SEQ ID NO: 379
  Description of Artificial Sequence: Synthetic almond; inner sequence

SEQ ID NO: 4366 - DNA, 30 bp, Artificial Sequence; identical to SEQ ID NO: 930
  Description of Artificial Sequence: Synthetic almond; inner sequence

SEQ ID NO: 4367 - DNA, 30 bp, Artificial Sequence; identical to SEQ ID NO: 316
  Description of Artificial Sequence: Synthetic almond; inner sequence

SEQ ID NO: 4368 - DNA, 30 bp, Artificial Sequence; identical to SEQ ID NO: 414
  Description of Artificial Sequence: Synthetic almond; inner sequence

SEQ ID NO: 4369 - DNA, 30 bp, Artificial Sequence; identical to SEQ ID NO: 928
  Description of Artificial Sequence: Synthetic almond; inner sequence

SEQ ID NO: 4370 - DNA, 30 bp, Artificial Sequence; identical to SEQ ID NO: 671
  Description of Artificial Sequence: Synthetic almond; inner sequence

SEQ ID NO: 4371 - DNA, 30 bp, Artificial Sequence; identical to SEQ ID NO: 273
  Description of Artificial Sequence: Synthetic almond; inner sequence

SEQ ID NO: 4372 - DNA, 30 bp, Artificial Sequence; identical to SEQ ID NO: 611
  Description of Artificial Sequence: Synthetic almond; inner sequence

SEQ ID NO: 4373 - DNA, 30 bp, Artificial Sequence
  Description of Artificial Sequence: Synthetic almond; inner sequence
cgcgaagtggcacagggacgcgtctgccca

SEQ ID NO: 4374 - DNA, 30 bp, Artificial Sequence; identical to SEQ ID NO: 390
  Description of Artificial Sequence: Synthetic almond; inner sequence

SEQ ID NO: 4375 - DNA, 30 bp, Artificial Sequence; identical to SEQ ID NO: 380
  Description of Artificial Sequence: Synthetic almond; inner sequence

SEQ ID NO: 4376 - DNA, 30 bp, Artificial Sequence
  Description of Artificial Sequence: Synthetic almond; inner sequence
gcaacgcagcaccgccatctgccgtgggca

SEQ ID NO: 4377 - DNA, 30 bp, Artificial Sequence
  Description of Artificial Sequence: Synthetic almond; inner sequence
ggcatgcacgcacctacacgcgggtatgga

SEQ ID NO: 4378 - DNA, 30 bp, Artificial Sequence; identical to SEQ ID NO: 276
  Description of Artificial Sequence: Synthetic almond; inner sequence

SEQ ID NO: 4379 - DNA, 30 bp, Artificial Sequence; identical to SEQ ID NO: 632
  Description of Artificial Sequence: Synthetic almond; inner sequence

SEQ ID NO: 4380 - DNA, 30 bp, Artificial Sequence
  Description of Artificial Sequence: Synthetic almond; inner sequence
ggacctgcgaagagcgtacacgtggccatg

SEQ ID NO: 4381 - DNA, 30 bp, Artificial Sequence
  Description of Artificial Sequence: Synthetic almond; inner sequence
cgtaccgtcaagcgggaaggcactttggtg

SEQ ID NO: 4382 - DNA, 30 bp, Artificial Sequence; identical to SEQ ID NO: 127
  Description of Artificial Sequence: Synthetic almond; inner sequence

SEQ ID NO: 4383 - DNA, 30 bp, Artificial Sequence; identical to SEQ ID NO: 915
  Description of Artificial Sequence: Synthetic almond; inner sequence

SEQ ID NO: 4384 - DNA, 30 bp, Artificial Sequence
  Description of Artificial Sequence: Synthetic almond; inner sequence
gcgacagcgacatacgatctgctctgcgcc

SEQ ID NO: 4385 - DNA, 30 bp, Artificial Sequence; identical to SEQ ID NO: 177
  Description of Artificial Sequence: Synthetic almond; inner sequence

SEQ ID NO: 4386 - DNA, 30 bp, Artificial Sequence; identical to SEQ ID NO: 426
  Description of Artificial Sequence: Synthetic almond; inner sequence

SEQ ID NO: 4387 - DNA, 30 bp, Artificial Sequence; identical to SEQ ID NO: 274
  Description of Artificial Sequence: Synthetic almond; inner sequence

SEQ ID NO: 4388 - DNA, 30 bp, Artificial Sequence; identical to SEQ ID NO: 950
  Description of Artificial Sequence: Synthetic almond; inner sequence

SEQ ID NO: 4389 - DNA, 30 bp, Artificial Sequence; identical to SEQ ID NO: 932
  Description of Artificial Sequence: Synthetic almond; inner sequence

SEQ ID NO: 4390 - DNA, 30 bp, Artificial Sequence; identical to SEQ ID NO: 869
  Description of Artificial Sequence: Synthetic almond; inner sequence

SEQ ID NO: 4391 - DNA, 30 bp, Artificial Sequence; identical to SEQ ID NO: 399
  Description of Artificial Sequence: Synthetic almond; inner sequence

SEQ ID NO: 4392 - DNA, 30 bp, Artificial Sequence; identical to SEQ ID NO: 238
  Description of Artificial Sequence: Synthetic almond; inner sequence

SEQ ID NO: 4393 - DNA, 30 bp, Artificial Sequence
  Description of Artificial Sequence: Synthetic almond; inner sequence
tcgtgtcgtgcgatgaaccggtcgtggcca

SEQ ID NO: 4394 - DNA, 30 bp, Artificial Sequence
  Description of Artificial Sequence: Synthetic almond; inner sequence
ggccgaacggacctcaatgtgtggcatgca

SEQ ID NO: 4395 - DNA, 30 bp, Artificial Sequence; identical to SEQ ID NO: 448
  Description of Artificial Sequence: Synthetic almond; inner sequence

SEQ ID NO: 4396 - DNA, 30 bp, Artificial Sequence; identical to SEQ ID NO: 369
  Description of Artificial Sequence: Synthetic almond; inner sequence

SEQ ID NO: 4397 - DNA, 30 bp, Artificial Sequence; identical to SEQ ID NO: 746
  Description of Artificial Sequence: Synthetic almond; inner sequence

SEQ ID NO: 4398 - DNA, 30 bp, Artificial Sequence; identical to SEQ ID NO: 909
  Description of Artificial Sequence: Synthetic almond; inner sequence

SEQ ID NO: 4399 - DNA, 30 bp, Artificial Sequence; identical to SEQ ID NO: 333
  Description of Artificial Sequence: Synthetic almond; inner sequence

SEQ ID NO: 4400 - DNA, 30 bp, Artificial Sequence; identical to SEQ ID NO: 176
  Description of Artificial Sequence: Synthetic almond; inner sequence

SEQ ID NO: 4401 - DNA, 30 bp, Artificial Sequence
  Description of Artificial Sequence: Synthetic almond; inner sequence
cgtccgacacgtaccgaccatcggtggcca

SEQ ID NO: 4402 - DNA, 30 bp, Artificial Sequence; identical to SEQ ID NO: 419
  Description of Artificial Sequence: Synthetic almond; inner sequence

SEQ ID NO: 4403 - DNA, 30 bp, Artificial Sequence; identical to SEQ ID NO: 383
  Description of Artificial Sequence: Synthetic almond; inner sequence

SEQ ID NO: 4404 - DNA, 30 bp, Artificial Sequence; identical to SEQ ID NO: 279
  Description of Artificial Sequence: Synthetic almond; inner sequence

SEQ ID NO: 4405 - DNA, 30 bp, Artificial Sequence
  Description of Artificial Sequence: Synthetic almond; inner sequence
cgcaccgacaagggagcacgtacgcggtca

SEQ ID NO: 4406 - DNA, 30 bp, Artificial Sequence
  Description of Artificial Sequence: Synthetic almond; inner sequence
ggcatgctcgagcccgattgcgtggccatg

SEQ ID NO: 4407 - DNA, 30 bp, Artificial Sequence
  Description of Artificial Sequence: Synthetic almond; inner sequence
tggcacgacgattcccgcaagtgcgccatg

SEQ ID NO: 4408 - DNA, 30 bp, Artificial Sequence; identical to SEQ ID NO: 156
  Description of Artificial Sequence: Synthetic almond; inner sequence

SEQ ID NO: 4409 - DNA, 29 bp, Artificial Sequence
  Description of Artificial Sequence: Synthetic almond; inner sequence
cgaccagcgcaagtaagtggcgtgatgca

SEQ ID NO: 4410 - DNA, 30 bp, Artificial Sequence; identical to SEQ ID NO: 757
  Description of Artificial Sequence: Synthetic almond; inner sequence

SEQ ID NO: 4411 - DNA, 30 bp, Artificial Sequence; identical to SEQ ID NO: 417
  Description of Artificial Sequence: Synthetic almond; inner sequence

SEQ ID NO: 4412 - DNA, 30 bp, Artificial Sequence; identical to SEQ ID NO: 248
  Description of Artificial Sequence: Synthetic almond; inner sequence

SEQ ID NO: 4413 - DNA, 30 bp, Artificial Sequence; identical to SEQ ID NO: 180
  Description of Artificial Sequence: Synthetic almond; inner sequence

SEQ ID NO: 4414 - DNA, 30 bp, Artificial Sequence; identical to SEQ ID NO: 668
  Description of Artificial Sequence: Synthetic almond; inner sequence

SEQ ID NO: 4415 - DNA, 30 bp, Artificial Sequence; identical to SEQ ID NO: 563
  Description of Artificial Sequence: Synthetic almond; inner sequence

SEQ ID NO: 4416 - DNA, 30 bp, Artificial Sequence; identical to SEQ ID NO: 433
  Description of Artificial Sequence: Synthetic almond; inner sequence

SEQ ID NO: 4417 - DNA, 30 bp, Artificial Sequence; identical to SEQ ID NO: 344
  Description of Artificial Sequence: Synthetic almond; inner sequence

SEQ ID NO: 4418 - DNA, 30 bp, Artificial Sequence; identical to SEQ ID NO: 647
  Description of Artificial Sequence: Synthetic almond; inner sequence

SEQ ID NO: 4419 - DNA, 30 bp, Artificial Sequence
  Description of Artificial Sequence: Synthetic almond; inner sequence
ccgtaccgacatcaagcggtggtgtgcgtg

SEQ ID NO: 4420 - DNA, 30 bp, Artificial Sequence
  Description of Artificial Sequence: Synthetic almond; inner sequence
ccgtagcgacatcaagcggtggtgggcgtg

SEQ ID NO: 4421 - DNA, 30 bp, Artificial Sequence; identical to SEQ ID NO: 358
  Description of Artificial Sequence: Synthetic almond; inner sequence

SEQ ID NO: 4422 - DNA, 30 bp, Artificial Sequence; identical to SEQ ID NO: 524
  Description of Artificial Sequence: Synthetic almond; inner sequence

SEQ ID NO: 4423 - DNA, 30 bp, Artificial Sequence; identical to SEQ ID NO: 375
  Description of Artificial Sequence: Synthetic almond; inner sequence

SEQ ID NO: 4424 - DNA, 30 bp, Artificial Sequence; identical to SEQ ID NO: 181
  Description of Artificial Sequence: Synthetic almond; inner sequence

SEQ ID NO: 4425 - DNA, 30 bp, Artificial Sequence
  Description of Artificial Sequence: Synthetic almond; inner sequence
gcactgaacggaatgtgctggacgtggcca

SEQ ID NO: 4426 - DNA, 30 bp, Artificial Sequence; identical to SEQ ID NO: 638
  Description of Artificial Sequence: Synthetic almond; inner sequence

SEQ ID NO: 4427 - DNA, 30 bp, Artificial Sequence; identical to SEQ ID NO: 467
  Description of Artificial Sequence: Synthetic almond; inner sequence

SEQ ID NO: 4428 - DNA, 30 bp, Artificial Sequence
  Description of Artificial Sequence: Synthetic almond; inner sequence
tcatgtggccgtgctgacccaacgtgagca

SEQ ID NO: 4429 - DNA, 30 bp, Artificial Sequence
  Description of Artificial Sequence: Synthetic almond; inner sequence
ggcatgcgctgaacgaggcatgatgcgtca

SEQ ID NO: 4430 - DNA, 30 bp, Artificial Sequence; identical to SEQ ID NO: 397
  Description of Artificial Sequence: Synthetic almond; inner sequence

SEQ ID NO: 4431 - DNA, 30 bp, Artificial Sequence; identical to SEQ ID NO: 128
  Description of Artificial Sequence: Synthetic almond; inner sequence

SEQ ID NO: 4432 - DNA, 30 bp, Artificial Sequence; identical to SEQ ID NO: 284
  Description of Artificial Sequence: Synthetic almond; inner sequence

SEQ ID NO: 4433 - DNA, 30 bp, Artificial Sequence; identical to SEQ ID NO: 592
  Description of Artificial Sequence: Synthetic almond; inner sequence

SEQ ID NO: 4434 - DNA, 31 bp, Artificial Sequence
  Description of Artificial Sequence: Synthetic almond; inner sequence
ccgtagcgacaagggagcacgtacgcggtca

SEQ ID NO: 4435 - DNA, 30 bp, Artificial Sequence; identical to SEQ ID NO: 513
  Description of Artificial Sequence: Synthetic almond; inner sequence

SEQ ID NO: 4436 - DNA, 30 bp, Artificial Sequence
  Description of Artificial Sequence: Synthetic almond; inner sequence
ggccaaacggaccggttgcggtgttgcaca

SEQ ID NO: 4437 - DNA, 30 bp, Artificial Sequence; identical to SEQ ID NO: 591
  Description of Artificial Sequence: Synthetic almond; inner sequence

SEQ ID NO: 4438 - DNA, 30 bp, Artificial Sequence; identical to SEQ ID NO: 272
  Description of Artificial Sequence: Synthetic almond; inner sequence

SEQ ID NO: 4439 - DNA, 30 bp, Artificial Sequence; identical to SEQ ID NO: 630
  Description of Artificial Sequence: Synthetic almond; inner sequence

SEQ ID NO: 4440 - DNA, 30 bp, Artificial Sequence; identical to SEQ ID NO: 219
  Description of Artificial Sequence: Synthetic almond; inner sequence

SEQ ID NO: 4441 - DNA, 30 bp, Artificial Sequence; identical to SEQ ID NO: 504
  Description of Artificial Sequence: Synthetic almond; inner sequence

SEQ ID NO: 4442 - DNA, 30 bp, Artificial Sequence; identical to SEQ ID NO: 300
  Description of Artificial Sequence: Synthetic almond; inner sequence

SEQ ID NO: 4443 - DNA, 30 bp, Artificial Sequence; identical to SEQ ID NO: 860
  Description of Artificial Sequence: Synthetic almond; inner sequence

SEQ ID NO: 4444 - DNA, 30 bp, Artificial Sequence; identical to SEQ ID NO: 356
  Description of Artificial Sequence: Synthetic almond; inner sequence

SEQ ID NO: 4445 - DNA, 30 bp, Artificial Sequence
  Description of Artificial Sequence: Synthetic almond; inner sequence
gtcatgcacgcaactttcacgtggccatgg

SEQ ID NO: 4446 - DNA, 30 bp, Artificial Sequence; identical to SEQ ID NO: 256
  Description of Artificial Sequence: Synthetic almond; inner sequence

SEQ ID NO: 4447 - DNA, 30 bp, Artificial Sequence; identical to SEQ ID NO: 206
  Description of Artificial Sequence: Synthetic almond; inner sequence

SEQ ID NO: 4448 - DNA, 30 bp, Artificial Sequence; identical to SEQ ID NO: 403
  Description of Artificial Sequence: Synthetic almond; inner sequence

SEQ ID NO: 4449 - DNA, 30 bp, Artificial Sequence
  Description of Artificial Sequence: Synthetic almond; inner sequence
tcgacagaccgtgcaccgtggccatgcact

SEQ ID NO: 4450 - DNA, 30 bp, Artificial Sequence; identical to SEQ ID NO: 815
  Description of Artificial Sequence: Synthetic almond; inner sequence

SEQ ID NO: 4451 - DNA, 30 bp, Artificial Sequence
  Description of Artificial Sequence: Synthetic almond; inner sequence
ggcatgcgaaggacctatcatgtgggcaga

SEQ ID NO: 4452 - DNA, 30 bp, Artificial Sequence; identical to SEQ ID NO: 236
  Description of Artificial Sequence: Synthetic almond; inner sequence

SEQ ID NO: 4453 - DNA, 30 bp, Artificial Sequence; identical to SEQ ID NO: 422
  Description of Artificial Sequence: Synthetic almond; inner sequence

SEQ ID NO: 4454 - DNA, 30 bp, Artificial Sequence; identical to SEQ ID NO: 925
  Description of Artificial Sequence: Synthetic almond; inner sequence

SEQ ID NO: 4455 - DNA, 30 bp, Artificial Sequence; identical to SEQ ID NO: 409
  Description of Artificial Sequence: Synthetic almond; inner sequence

SEQ ID NO: 4456 - DNA, 30 bp, Artificial Sequence; identical to SEQ ID NO: 862
  Description of Artificial Sequence: Synthetic almond; inner sequence

SEQ ID NO: 4457 - DNA, 30 bp, Artificial Sequence; identical to SEQ ID NO: 994
  Description of Artificial Sequence: Synthetic almond; inner sequence

SEQ ID NO: 4458 - DNA, 30 bp, Artificial Sequence; identical to SEQ ID NO: 217
  Description of Artificial Sequence: Synthetic almond; inner sequence

SEQ ID NO: 4459 - DNA, 30 bp, Artificial Sequence
  Description of Artificial Sequence: Synthetic almond; inner sequence
ggccgagcgtaccgtgcgagtgggagcgta

SEQ ID NO: 4460 - DNA, 30 bp, Artificial Sequence; identical to SEQ ID NO: 244
  Description of Artificial Sequence: Synthetic almond; inner sequence

SEQ ID NO: 4461 - DNA, 30 bp, Artificial Sequence; identical to SEQ ID NO: 357
  Description of Artificial Sequence: Synthetic almond; inner sequence

SEQ ID NO: 4462 - DNA, 30 bp, Artificial Sequence; identical to SEQ ID NO: 394
  Description of Artificial Sequence: Synthetic almond; inner sequence

SEQ ID NO: 4463 - DNA, 30 bp, Artificial Sequence; identical to SEQ ID NO: 777
  Description of Artificial Sequence: Synthetic almond; inner sequence

SEQ ID NO: 4464 - DNA, 30 bp, Artificial Sequence; identical to SEQ ID NO: 492
  Description of Artificial Sequence: Synthetic almond; inner sequence

SEQ ID NO: 4465 - DNA, 30 bp, Artificial Sequence
  Description of Artificial Sequence: Synthetic almond; inner sequence
cacatggtggcatactgactgcactgcact

SEQ ID NO: 4466 - DNA, 30 bp, Artificial Sequence; identical to SEQ ID NO: 561
  Description of Artificial Sequence: Synthetic almond; inner sequence

SEQ ID NO: 4467 - DNA, 30 bp, Artificial Sequence; identical to SEQ ID NO: 637
  Description of Artificial Sequence: Synthetic almond; inner sequence

SEQ ID NO: 4468 - DNA, 30 bp, Artificial Sequence; identical to SEQ ID NO: 530
  Description of Artificial Sequence: Synthetic almond; inner sequence

SEQ ID NO: 4469 - DNA, 30 bp, Artificial Sequence
  Description of Artificial Sequence: Synthetic almond; inner sequence
cgtcacgcatcactggcctgccttgccgtg

SEQ ID NO: 4470 - DNA, 30 bp, Artificial Sequence
  Description of Artificial Sequence: Synthetic almond; inner sequence
ggccgaagcgatacggcaagtcggcatgca

SEQ ID NO: 4471 - DNA, 30 bp, Artificial Sequence; identical to SEQ ID NO: 620
  Description of Artificial Sequence: Synthetic almond; inner sequence

SEQ ID NO: 4472 - DNA, 30 bp, Artificial Sequence
  Description of Artificial Sequence: Synthetic almond; inner sequence
cgatcgcaccgccgtgatcatgcacgcgca

SEQ ID NO: 4473 - DNA, 30 bp, Artificial Sequence; identical to SEQ ID NO: 875
  Description of Artificial Sequence: Synthetic almond; inner sequence

SEQ ID NO: 4474 - DNA, 30 bp, Artificial Sequence; identical to SEQ ID NO: 292
  Description of Artificial Sequence: Synthetic almond; inner sequence

SEQ ID NO: 4475 - DNA, 30 bp, Artificial Sequence; identical to SEQ ID NO: 294
  Description of Artificial Sequence: Synthetic almond; inner sequence

SEQ ID NO: 4476 - DNA, 30 bp, Artificial Sequence; identical to SEQ ID NO: 728
  Description of Artificial Sequence: Synthetic almond; inner sequence

SEQ ID NO: 4477 - DNA, 30 bp, Artificial Sequence; identical to SEQ ID NO: 631
  Description of Artificial Sequence: Synthetic almond; inner sequence

SEQ ID NO: 4478 - DNA, 30 bp, Artificial Sequence; identical to SEQ ID NO: 278
  Description of Artificial Sequence: Synthetic almond; inner sequence

SEQ ID NO: 4479 - DNA, 30 bp, Artificial Sequence; identical to SEQ ID NO: 407
  Description of Artificial Sequence: Synthetic almond; inner sequence

SEQ ID NO: 4480 - DNA, 30 bp, Artificial Sequence; identical to SEQ ID NO: 556
  Description of Artificial Sequence: Synthetic almond; inner sequence

SEQ ID NO: 4481 - DNA, 30 bp, Artificial Sequence; identical to SEQ ID NO: 706
  Description of Artificial Sequence: Synthetic almond; inner sequence

SEQ ID NO: 4482 - DNA, 30 bp, Artificial Sequence; identical to SEQ ID NO: 326
  Description of Artificial Sequence: Synthetic almond; inner sequence

SEQ ID NO: 4483 - DNA, 30 bp, Artificial Sequence; identical to SEQ ID NO: 393
  Description of Artificial Sequence: Synthetic almond; inner sequence

SEQ ID NO: 4484 - DNA, 30 bp, Artificial Sequence; identical to SEQ ID NO: 764
  Description of Artificial Sequence: Synthetic almond; inner sequence

SEQ ID NO: 4485 - DNA, 30 bp, Artificial Sequence
  Description of Artificial Sequence: Synthetic almond; inner sequence
tgaacgcagtgacgaaacgtatggcgcaca

SEQ ID NO: 4486 - DNA, 30 bp, Artificial Sequence; identical to SEQ ID NO: 891
  Description of Artificial Sequence: Synthetic almond; inner sequence

SEQ ID NO: 4487 - DNA, 30 bp, Artificial Sequence; identical to SEQ ID NO: 617
  Description of Artificial Sequence: Synthetic almond; inner sequence

SEQ ID NO: 4488 - DNA, 30 bp, Artificial Sequence; identical to SEQ ID NO: 124
  Description of Artificial Sequence: Synthetic almond; inner sequence

SEQ ID NO: 4489 - DNA, 30 bp, Artificial Sequence
  Description of Artificial Sequence: Synthetic almond; inner sequence
ggcatgcgatgaacgaggcatgatccgtca

SEQ ID NO: 4490 - DNA, 30 bp, Artificial Sequence; identical to SEQ ID NO: 528
  Description of Artificial Sequence: Synthetic almond; inner sequence

SEQ ID NO: 4491 - DNA, 30 bp, Artificial Sequence
  Description of Artificial Sequence: Synthetic almond; inner sequence
ggcatgagcgaacccgtcgagtgcgtcgta

SEQ ID NO: 4492 - DNA, 30 bp, Artificial Sequence
  Description of Artificial Sequence: Synthetic almond; inner sequence
gtacgccactgaccgaccttgcgtgaggca

SEQ ID NO: 4493 - DNA, 30 bp, Artificial Sequence; identical to SEQ ID NO: 669
  Description of Artificial Sequence: Synthetic almond; inner sequence

SEQ ID NO: 4494 - DNA, 30 bp, Artificial Sequence
  Description of Artificial Sequence: Synthetic almond; inner sequence
gacgacgatgagcgtgggattggctggtgt

SEQ ID NO: 4495 - DNA, 30 bp, Artificial Sequence; identical to SEQ ID NO: 331
  Description of Artificial Sequence: Synthetic almond; inner sequence

SEQ ID NO: 4496 - DNA, 30 bp, Artificial Sequence; identical to SEQ ID NO: 628
  Description of Artificial Sequence: Synthetic almond; inner sequence

SEQ ID NO: 4497 - DNA, 30 bp, Artificial Sequence; identical to SEQ ID NO: 309
  Description of Artificial Sequence: Synthetic almond; inner sequence

SEQ ID NO: 4498 - DNA, 30 bp, Artificial Sequence
  Description of Artificial Sequence: Synthetic almond; inner sequence
ggcacaaacggaccgacaagcgcgcatgga

SEQ ID NO: 4499 - DNA, 30 bp, Artificial Sequence
  Description of Artificial Sequence: Synthetic almond; inner sequence
ccgatcgcacgcacggggacatggtcgagt

SEQ ID NO: 4500 - DNA, 30 bp, Artificial Sequence; identical to SEQ ID NO: 166
  Description of Artificial Sequence: Synthetic almond; inner sequence

SEQ ID NO: 4501 - DNA, 30 bp, Artificial Sequence; identical to SEQ ID NO: 597
  Description of Artificial Sequence: Synthetic almond; inner sequence

SEQ ID NO: 4502 - DNA, 30 bp, Artificial Sequence
  Description of Artificial Sequence: Synthetic almond; inner sequence
ggtgacgcaacgagtgtactgatcgccacg

SEQ ID NO: 4503 - DNA, 30 bp, Artificial Sequence
  Description of Artificial Sequence: Synthetic almond; inner sequence
ggcacaaacgtaccgacaagtgcgcatgga

SEQ ID NO: 4504 - DNA, 30 bp, Artificial Sequence
  Description of Artificial Sequence: Synthetic almond; inner sequence
cgtaccgacaagggagcacgtacgctgtca

SEQ ID NO: 4505 - DNA, 30 bp, Artificial Sequence; identical to SEQ ID NO: 249
  Description of Artificial Sequence: Synthetic almond; inner sequence

SEQ ID NO: 4506 - DNA, 30 bp, Artificial Sequence; identical to SEQ ID NO: 365
  Description of Artificial Sequence: Synthetic almond; inner sequence

SEQ ID NO: 4507 - DNA, 30 bp, Artificial Sequence; identical to SEQ ID NO: 911
  Description of Artificial Sequence: Synthetic almond; inner sequence

SEQ ID NO: 4508 - DNA, 30 bp, Artificial Sequence; identical to SEQ ID NO: 398
  Description of Artificial Sequence: Synthetic almond; inner sequence

SEQ ID NO: 4509 - DNA, 30 bp, Artificial Sequence
  Description of Artificial Sequence: Synthetic almond; inner sequence
cgcatcgagcataccggtcctcgcttcacg

SEQ ID NO: 4510 - DNA, 30 bp, Artificial Sequence; identical to SEQ ID NO: 281
  Description of Artificial Sequence: Synthetic almond; inner sequence

SEQ ID NO: 4511 - DNA, 30 bp, Artificial Sequence; identical to SEQ ID NO: 487
  Description of Artificial Sequence: Synthetic almond; inner sequence

SEQ ID NO: 4512 - DNA, 30 bp, Artificial Sequence; identical to SEQ ID NO: 437
  Description of Artificial Sequence: Synthetic almond; inner sequence

SEQ ID NO: 4513 - DNA, 30 bp, Artificial Sequence
  Description of Artificial Sequence: Synthetic almond; inner sequence
gtacgcaacgaacctaagagtggccaggga

SEQ ID NO: 4514 - DNA, 30 bp, Artificial Sequence; identical to SEQ ID NO: 996
  Description of Artificial Sequence: Synthetic almond; inner sequence

SEQ ID NO: 4515 - DNA, 30 bp, Artificial Sequence; identical to SEQ ID NO: 224
  Description of Artificial Sequence: Synthetic almond; inner sequence

SEQ ID NO: 4516 - DNA, 30 bp, Artificial Sequence; identical to SEQ ID NO: 727
  Description of Artificial Sequence: Synthetic almond; inner sequence

SEQ ID NO: 4517 - DNA, 30 bp, Artificial Sequence
  Description of Artificial Sequence: Synthetic almond; inner sequence
cgcatgcgatgaacgaggcatgatgcgtca

SEQ ID NO: 4518 - DNA, 30 bp, Artificial Sequence; identical to SEQ ID NO: 942
  Description of Artificial Sequence: Synthetic almond; inner sequence

SEQ ID NO: 4519 - DNA, 30 bp, Artificial Sequence
  Description of Artificial Sequence: Synthetic almond; inner sequence
cgaccgtggagaagcgagcatggatgcagc

SEQ ID NO: 4520 - DNA, 30 bp, Artificial Sequence
  Description of Artificial Sequence: Synthetic almond; inner sequence
tcgaacgaaccgcatgcatggtcaggcata

SEQ ID NO: 4521 - DNA, 30 bp, Artificial Sequence
  Description of Artificial Sequence: Synthetic almond; inner sequence
ggcatgcgatgaacgatgcatgatgcgtca

SEQ ID NO: 4522 - DNA, 30 bp, Artificial Sequence; identical to SEQ ID NO: 141
  Description of Artificial Sequence: Synthetic almond; inner sequence

SEQ ID NO: 4523 - DNA, 30 bp, Artificial Sequence; identical to SEQ ID NO: 596
  Description of Artificial Sequence: Synthetic almond; inner sequence

SEQ ID NO: 4524 - DNA, 30 bp, Artificial Sequence; identical to SEQ ID NO: 119
  Description of Artificial Sequence: Synthetic almond; inner sequence

SEQ ID NO: 4525 - DNA, 30 bp, Artificial Sequence
  Description of Artificial Sequence: Synthetic almond; inner sequence
ggccgaacgagcgtcaggtgcgtcggtgta

SEQ ID NO: 4526 - DNA, 30 bp, Artificial Sequence
  Description of Artificial Sequence: Synthetic almond; inner sequence
cgcatgtggagtgagcgtccctgtggcaca

SEQ ID NO: 4527 - DNA, 30 bp, Artificial Sequence; identical to SEQ ID NO: 101
  Description of Artificial Sequence: Synthetic almond; inner sequence

SEQ ID NO: 4528 - DNA, 30 bp, Artificial Sequence; identical to SEQ ID NO: 242
  Description of Artificial Sequence: Synthetic almond; inner sequence

SEQ ID NO: 4529 - DNA, 30 bp, Artificial Sequence
  Description of Artificial Sequence: Synthetic almond; inner sequence
ctgagcggcaagtgcagcacgtacgttggt

SEQ ID NO: 4530 - DNA, 30 bp, Artificial Sequence
  Description of Artificial Sequence: Synthetic almond; inner sequence
catgcggcatgaacggacctacacgtgggc

SEQ ID NO: 4531 - DNA, 30 bp, Artificial Sequence
  Description of Artificial Sequence: Synthetic almond; inner sequence
gcaacgcagggatacgtccgacgatgcgtg

SEQ ID NO: 4532 - DNA, 30 bp, Artificial Sequence; identical to SEQ ID NO: 346
  Description of Artificial Sequence: Synthetic almond; inner sequence

SEQ ID NO: 4533 - DNA, 30 bp, Artificial Sequence; identical to SEQ ID NO: 680
  Description of Artificial Sequence: Synthetic almond; inner sequence

SEQ ID NO: 4534 - DNA, 30 bp, Artificial Sequence; identical to SEQ ID NO: 518
  Description of Artificial Sequence: Synthetic almond; inner sequence

SEQ ID NO: 4535 - DNA, 30 bp, Artificial Sequence
  Description of Artificial Sequence: Synthetic almond; inner sequence
ggactgcactacctacacgtggccacgtac

SEQ ID NO: 4536 - DNA, 30 bp, Artificial Sequence; identical to SEQ ID NO: 320
  Description of Artificial Sequence: Synthetic almond; inner sequence

SEQ ID NO: 4537 - DNA, 30 bp, Artificial Sequence; identical to SEQ ID NO: 277
  Description of Artificial Sequence: Synthetic almond; inner sequence

SEQ ID NO: 4538 - DNA, 30 bp, Artificial Sequence; identical to SEQ ID NO: 808
  Description of Artificial Sequence: Synthetic almond; inner sequence

SEQ ID NO: 4539 - DNA, 30 bp, Artificial Sequence
  Description of Artificial Sequence: Synthetic almond; inner sequence
cataccgtgcagcacatgtccgatgcgacc

SEQ ID NO: 4540 - DNA, 30 bp, Artificial Sequence; identical to SEQ ID NO: 370
  Description of Artificial Sequence: Synthetic almond; inner sequence

SEQ ID NO: 4541 - DNA, 30 bp, Artificial Sequence; identical to SEQ ID NO: 223
  Description of Artificial Sequence: Synthetic almond; inner sequence

SEQ ID NO: 4542 - DNA, 30 bp, Artificial Sequence; identical to SEQ ID NO: 463
  Description of Artificial Sequence: Synthetic almond; inner sequence

SEQ ID NO: 4543 - DNA, 30 bp, Artificial Sequence
  Description of Artificial Sequence: Synthetic almond; inner sequence
ccgcacgtagccctatcagtggggcatgca

SEQ ID NO: 4544 - DNA, 30 bp, Artificial Sequence; identical to SEQ ID NO: 366
  Description of Artificial Sequence: Synthetic almond; inner sequence

SEQ ID NO: 4545 - DNA, 30 bp, Artificial Sequence; identical to SEQ ID NO: 583
  Description of Artificial Sequence: Synthetic almond; inner sequence

SEQ ID NO: 4546 - DNA, 30 bp, Artificial Sequence; identical to SEQ ID NO: 510
  Description of Artificial Sequence: Synthetic almond; inner sequence

SEQ ID NO: 4547 - DNA, 30 bp, Artificial Sequence; identical to SEQ ID NO: 657
  Description of Artificial Sequence: Synthetic almond; inner sequence

SEQ ID NO: 4548 - DNA, 30 bp, Artificial Sequence; identical to SEQ ID NO: 319
  Description of Artificial Sequence: Synthetic almond; inner sequence

SEQ ID NO: 4549 - DNA, 30 bp, Artificial Sequence; identical to SEQ ID NO: 135
  Description of Artificial Sequence: Synthetic almond; inner sequence

SEQ ID NO: 4550 - DNA, 30 bp, Artificial Sequence; identical to SEQ ID NO: 622
  Description of Artificial Sequence: Synthetic almond; inner sequence

SEQ ID NO: 4551 - DNA, 30 bp, Artificial Sequence; identical to SEQ ID NO: 324
  Description of Artificial Sequence: Synthetic almond; inner sequence

SEQ ID NO: 4552 - DNA, 30 bp, Artificial Sequence
  Description of Artificial Sequence: Synthetic almond; inner sequence
ggacgcacgatgagcgccaagtgacatgga

SEQ ID NO: 4553 - DNA, 30 bp, Artificial Sequence; identical to SEQ ID NO: 275
  Description of Artificial Sequence: Synthetic almond; inner sequence

SEQ ID NO: 4554 - DNA, 30 bp, Artificial Sequence; identical to SEQ ID NO: 722
  Description of Artificial Sequence: Synthetic almond; inner sequence

SEQ ID NO: 4555 - DNA, 30 bp, Artificial Sequence
  Description of Artificial Sequence: Synthetic almond; inner sequence
ggaccgagcgagccatcaagtcggcatgca

SEQ ID NO: 4556 - DNA, 30 bp, Artificial Sequence; identical to SEQ ID NO: 816
  Description of Artificial Sequence: Synthetic almond; inner sequence

SEQ ID NO: 4557 - DNA, 30 bp, Artificial Sequence; identical to SEQ ID NO: 535
  Description of Artificial Sequence: Synthetic almond; inner sequence

SEQ ID NO: 4558 - DNA, 30 bp, Artificial Sequence; identical to SEQ ID NO: 568
  Description of Artificial Sequence: Synthetic almond; inner sequence

SEQ ID NO: 4559 - DNA, 29 bp, Artificial Sequence
  Description of Artificial Sequence: Synthetic almond; inner sequence
ggccgaacggaccgacaagtgcgcatgga

SEQ ID NO: 4560 - DNA, 30 bp, Artificial Sequence; identical to SEQ ID NO: 695
  Description of Artificial Sequence: Synthetic almond; inner sequence

SEQ ID NO: 4561 - DNA, 30 bp, Artificial Sequence; identical to SEQ ID NO: 440
  Description of Artificial Sequence: Synthetic almond; inner sequence

SEQ ID NO: 4562 - DNA, 29 bp, Artificial Sequence
  Description of Artificial Sequence: Synthetic almond; inner sequence
ggccgatcgaccctatcaagtgcagcatg

SEQ ID NO: 4563 - DNA, 30 bp, Artificial Sequence; identical to SEQ ID NO: 615
  Description of Artificial Sequence: Synthetic almond; inner sequence

SEQ ID NO: 4564 - DNA, 30 bp, Artificial Sequence; identical to SEQ ID NO: 952
  Description of Artificial Sequence: Synthetic almond; inner sequence

SEQ ID NO: 4565 - DNA, 30 bp, Artificial Sequence
  Description of Artificial Sequence: Synthetic almond; inner sequence
ggcatgcacgcacctacacgtgggtatggc

SEQ ID NO: 4566 - DNA, 30 bp, Artificial Sequence; identical to SEQ ID NO: 557
  Description of Artificial Sequence: Synthetic almond; inner sequence

SEQ ID NO: 4567 - DNA, 30 bp, Artificial Sequence; identical to SEQ ID NO: 818
  Description of Artificial Sequence: Synthetic almond; inner sequence

SEQ ID NO: 4568 - DNA, 30 bp, Artificial Sequence
  Description of Artificial Sequence: Synthetic almond; inner sequence
gcgtgcagcatagggagcacacgtcccgtg

SEQ ID NO: 4569 - DNA, 30 bp, Artificial Sequence
  Description of Artificial Sequence: Synthetic almond; inner sequence
ggccgacgatgaccgcatgcacgattgcca

SEQ ID NO: 4570 - DNA, 30 bp, Artificial Sequence; identical to SEQ ID NO: 900
  Description of Artificial Sequence: Synthetic almond; inner sequence

SEQ ID NO: 4571 - DNA, 30 bp, Artificial Sequence
  Description of Artificial Sequence: Synthetic almond; inner sequence
ggcatgcgatgaactaggcatgatgcgtca

SEQ ID NO: 4572 - DNA, 30 bp, Artificial Sequence; identical to SEQ ID NO: 231
  Description of Artificial Sequence: Synthetic almond; inner sequence

SEQ ID NO: 4573 - DNA, 30 bp, Artificial Sequence
  Description of Artificial Sequence: Synthetic almond; inner sequence
ccggagcgacatcaagcggtggtgtgcgtg

SEQ ID NO: 4574 - DNA, 30 bp, Artificial Sequence; identical to SEQ ID NO: 800
  Description of Artificial Sequence: Synthetic almond; inner sequence

SEQ ID NO: 4575 - DNA, 30 bp, Artificial Sequence
  Description of Artificial Sequence: Synthetic almond; inner sequence
tgcacaaacggaccgacaagtgcgcatgga

SEQ ID NO: 4576 - DNA, 30 bp, Artificial Sequence
  Description of Artificial Sequence: Synthetic almond; inner sequence
ggcatgcgatgaacgaggcatgatgcgaca

SEQ ID NO: 4577 - DNA, 30 bp, Artificial Sequence; identical to SEQ ID NO: 475
  Description of Artificial Sequence: Synthetic almond; inner sequence

SEQ ID NO: 4578 - DNA, 30 bp, Artificial Sequence; identical to SEQ ID NO: 373
  Description of Artificial Sequence: Synthetic almond; inner sequence

SEQ ID NO: 4579 - DNA, 30 bp, Artificial Sequence
  Description of Artificial Sequence: Synthetic almond; inner sequence
ccgaagcgacatcaagcggtggtgtgcgtg

SEQ ID NO: 4580 - DNA, 30 bp, Artificial Sequence
  Description of Artificial Sequence: Synthetic almond; inner sequence
cgaaccggaacgtggtgactgggcttgtgt

SEQ ID NO: 4581 - DNA, 30 bp, Artificial Sequence; identical to SEQ ID NO: 301
  Description of Artificial Sequence: Synthetic almond; inner sequence

SEQ ID NO: 4582 - DNA, 30 bp, Artificial Sequence; identical to SEQ ID NO: 979
  Description of Artificial Sequence: Synthetic almond; inner sequence

SEQ ID NO: 4583 - DNA, 30 bp, Artificial Sequence
  Description of Artificial Sequence: Synthetic almond; inner sequence
gacatgcagcaacgtacgcccttccgtgca

SEQ ID NO: 4584 - DNA, 30 bp, Artificial Sequence; identical to SEQ ID NO: 889
  Description of Artificial Sequence: Synthetic almond; inner sequence

SEQ ID NO: 4585 - DNA, 30 bp, Artificial Sequence
  Description of Artificial Sequence: Synthetic almond; inner sequence
ggcctgaccaaccgaccctcgtgcgtcacg

SEQ ID NO: 4586 - DNA, 30 bp, Artificial Sequence; identical to SEQ ID NO: 317
  Description of Artificial Sequence: Synthetic almond; inner sequence

SEQ ID NO: 4587 - DNA, 30 bp, Artificial Sequence; identical to SEQ ID NO: 686
  Description of Artificial Sequence: Synthetic almond; inner sequence

SEQ ID NO: 4588 - DNA, 30 bp, Artificial Sequence
  Description of Artificial Sequence: Synthetic almond; inner sequence
cgtgcgtcacgcagagggccagctcggaca

SEQ ID NO: 4589 - DNA, 30 bp, Artificial Sequence; identical to SEQ ID NO: 400
  Description of Artificial Sequence: Synthetic almond; inner sequence

SEQ ID NO: 4590 - DNA, 30 bp, Artificial Sequence
  Description of Artificial Sequence: Synthetic almond; inner sequence
cgtccgaaacgcacgtgcaagttgggcata

SEQ ID NO: 4591 - DNA, 30 bp, Artificial Sequence
  Description of Artificial Sequence: Synthetic almond; inner sequence
ggcatgcgcggacattcaagttggcgtgga

SEQ ID NO: 4592 - DNA, 30 bp, Artificial Sequence
  Description of Artificial Sequence: Synthetic almond; inner sequence
tcatgtggacgatcgacccgtacgtggaca

SEQ ID NO: 4593 - DNA, 30 bp, Artificial Sequence; identical to SEQ ID NO: 801
  Description of Artificial Sequence: Synthetic almond; inner sequence

SEQ ID NO: 4594 - DNA, 30 bp, Artificial Sequence; identical to SEQ ID NO: 169
  Description of Artificial Sequence: Synthetic almond; inner sequence

SEQ ID NO: 4595 - DNA, 30 bp, Artificial Sequence; identical to SEQ ID NO: 239
  Description of Artificial Sequence: Synthetic almond; inner sequence

SEQ ID NO: 4596 - DNA, 30 bp, Artificial Sequence; identical to SEQ ID NO: 603
  Description of Artificial Sequence: Synthetic almond; inner sequence

SEQ ID NO: 4597 - DNA, 30 bp, Artificial Sequence
  Description of Artificial Sequence: Synthetic almond; inner sequence
tggacgcaacgtaacgataacgtgggagtg

SEQ ID NO: 4598 - DNA, 30 bp, Artificial Sequence
  Description of Artificial Sequence: Synthetic almond; inner sequence
ccgatcggaccgattcaacgtgtgcatgga

SEQ ID NO: 4599 - DNA, 30 bp, Artificial Sequence; identical to SEQ ID NO: 768
  Description of Artificial Sequence: Synthetic almond; inner sequence

SEQ ID NO: 4600 - DNA, 30 bp, Artificial Sequence; identical to SEQ ID NO: 758
  Description of Artificial Sequence: Synthetic almond; inner sequence

SEQ ID NO: 4601 - DNA, 30 bp, Artificial Sequence; identical to SEQ ID NO: 289
  Description of Artificial Sequence: Synthetic almond; inner sequence

SEQ ID NO: 4602 - DNA, 30 bp, Artificial Sequence; identical to SEQ ID NO: 227
  Description of Artificial Sequence: Synthetic almond; inner sequence

SEQ ID NO: 4603 - DNA, 30 bp, Artificial Sequence
  Description of Artificial Sequence: Synthetic almond; inner sequence
gcacgactcgcaccctatcatgcggccatg

SEQ ID NO: 4604 - DNA, 30 bp, Artificial Sequence; identical to SEQ ID NO: 495
  Description of Artificial Sequence: Synthetic almond; inner sequence

SEQ ID NO: 4605 - DNA, 30 bp, Artificial Sequence
  Description of Artificial Sequence: Synthetic almond; inner sequence
ggacgtagcgaccgaacggtgtgccatgta

SEQ ID NO: 4606 - DNA, 30 bp, Artificial Sequence; identical to SEQ ID NO: 780
  Description of Artificial Sequence: Synthetic almond; inner sequence

SEQ ID NO: 4607 - DNA, 30 bp, Artificial Sequence; identical to SEQ ID NO: 187
  Description of Artificial Sequence: Synthetic almond; inner sequence

SEQ ID NO: 4608 - DNA, 30 bp, Artificial Sequence; identical to SEQ ID NO: 776
  Description of Artificial Sequence: Synthetic almond; inner sequence

SEQ ID NO: 4609 - DNA, 30 bp, Artificial Sequence; identical to SEQ ID NO: 340
  Description of Artificial Sequence: Synthetic almond; inner sequence

SEQ ID NO: 4610 - DNA, 30 bp, Artificial Sequence
  Description of Artificial Sequence: Synthetic almond; inner sequence
ggacgcagcgtggcatatcacgtgatcatg

SEQ ID NO: 4611 - DNA, 30 bp, Artificial Sequence
  Description of Artificial Sequence: Synthetic almond; inner sequence
gtgcgccgatgaccgtcaagtcgtggtgta

SEQ ID NO: 4612 - DNA, 30 bp, Artificial Sequence
  Description of Artificial Sequence: Synthetic almond; inner sequence
cgtgacagcgagcacgtccaacgctgcgca

SEQ ID NO: 4613 - DNA, 30 bp, Artificial Sequence
  Description of Artificial Sequence: Synthetic almond; inner sequence
ggccgactcgaccgcgtcatgaacggcatg

SEQ ID NO: 4614 - DNA, 30 bp, Artificial Sequence; identical to SEQ ID NO: 432
  Description of Artificial Sequence: Synthetic almond; inner sequence

SEQ ID NO: 4615 - DNA, 30 bp, Artificial Sequence; identical to SEQ ID NO: 280
  Description of Artificial Sequence: Synthetic almond; inner sequence

SEQ ID NO: 4616 - DNA, 30 bp, Artificial Sequence
  Description of Artificial Sequence: Synthetic almond; inner sequence
ggccaagcgagcttcaaggcggcatgttgc

SEQ ID NO: 4617 - DNA, 30 bp, Artificial Sequence
  Description of Artificial Sequence: Synthetic almond; inner sequence
ggcatgcgatgaacgaggcattatgcgtca

SEQ ID NO: 4618 - DNA, 30 bp, Artificial Sequence; identical to SEQ ID NO: 624
  Description of Artificial Sequence: Synthetic almond; inner sequence

SEQ ID NO: 4619 - DNA, 31 bp, Artificial Sequence
  Description of Artificial Sequence: Synthetic almond; inner sequence
ggcctgaccggacctagtggctgaacgtggc

SEQ ID NO: 4620 - DNA, 30 bp, Artificial Sequence
  Description of Artificial Sequence: Synthetic almond; inner sequence
gtcatgcacgaacactctcatggcggcatg

SEQ ID NO: 4621 - DNA, 30 bp, Artificial Sequence
  Description of Artificial Sequence: Synthetic almond; inner sequence
tgcatgcgatgaacgaggcatgatgcgtca

SEQ ID NO: 4622 - DNA, 28 bp, Artificial Sequence
  Description of Artificial Sequence: Synthetic almond; inner sequence
cgcaccgtcgatacgtcatgcacgcacc

SEQ ID NO: 4623 - DNA, 30 bp, Artificial Sequence; identical to SEQ ID NO: 130
  Description of Artificial Sequence: Synthetic almond; inner sequence

SEQ ID NO: 4624 - DNA, 30 bp, Artificial Sequence; identical to SEQ ID NO: 189
  Description of Artificial Sequence: Synthetic almond; inner sequence

SEQ ID NO: 4625 - DNA, 30 bp, Artificial Sequence; identical to SEQ ID NO: 571
  Description of Artificial Sequence: Synthetic almond; inner sequence

SEQ ID NO: 4626 - DNA, 30 bp, Artificial Sequence; identical to SEQ ID NO: 420
  Description of Artificial Sequence: Synthetic almond; inner sequence

SEQ ID NO: 4627 - DNA, 30 bp, Artificial Sequence
  Description of Artificial Sequence: Synthetic almond; inner sequence
ggcatgcgatgaacgaggcatgatgcggca

SEQ ID NO: 4628 - DNA, 30 bp, Artificial Sequence; identical to SEQ ID NO: 413
  Description of Artificial Sequence: Synthetic almond; inner sequence

SEQ ID NO: 4629 - DNA, 30 bp, Artificial Sequence; identical to SEQ ID NO: 507
  Description of Artificial Sequence: Synthetic almond; inner sequence

SEQ ID NO: 4630 - DNA, 30 bp, Artificial Sequence; identical to SEQ ID NO: 926
  Description of Artificial Sequence: Synthetic almond; inner sequence

SEQ ID NO: 4631 - DNA, 30 bp, Artificial Sequence
  Description of Artificial Sequence: Synthetic almond; inner sequence
gcaccgatcgcaacgtgtacaaggggtgtg

SEQ ID NO: 4632 - DNA, 30 bp, Artificial Sequence; identical to SEQ ID NO: 405
  Description of Artificial Sequence: Synthetic almond; inner sequence

SEQ ID NO: 4633 - DNA, 30 bp, Artificial Sequence; identical to SEQ ID NO: 486
  Description of Artificial Sequence: Synthetic almond; inner sequence

SEQ ID NO: 4634 - DNA, 30 bp, Artificial Sequence
  Description of Artificial Sequence: Synthetic almond; inner sequence
cgaaccgctgcaaggtgtcagtgcgtggca

SEQ ID NO: 4635 - DNA, 30 bp, Artificial Sequence; identical to SEQ ID NO: 266
  Description of Artificial Sequence: Synthetic almond; inner sequence

SEQ ID NO: 4636 - DNA, 30 bp, Artificial Sequence; identical to SEQ ID NO: 804
  Description of Artificial Sequence: Synthetic almond; inner sequence

SEQ ID NO: 4637 - DNA, 30 bp, Artificial Sequence; identical to SEQ ID NO: 590
  Description of Artificial Sequence: Synthetic almond; inner sequence

SEQ ID NO: 4638 - DNA, 30 bp, Artificial Sequence
  Description of Artificial Sequence: Synthetic almond; inner sequence
gcacgactcgcaccctatcatgagcccatg

SEQ ID NO: 4639 - DNA, 30 bp, Artificial Sequence; identical to SEQ ID NO: 303
  Description of Artificial Sequence: Synthetic almond; inner sequence

SEQ ID NO: 4640 - DNA, 30 bp, Artificial Sequence
  Description of Artificial Sequence: Synthetic almond; inner sequence
ccatgcagcatacgtgcagtctcgtaccga

SEQ ID NO: 4641 - DNA, 30 bp, Artificial Sequence
  Description of Artificial Sequence: Synthetic almond; inner sequence
ggccaagctgaccgtaaaggcaggcgtgca

SEQ ID NO: 4642 - DNA, 30 bp, Artificial Sequence
  Description of Artificial Sequence: Synthetic almond; inner sequence
cgacccgcgaagtgaggcagtgcgacggtg

SEQ ID NO: 4643 - DNA, 30 bp, Artificial Sequence; identical to SEQ ID NO: 351
  Description of Artificial Sequence: Synthetic almond; inner sequence

SEQ ID NO: 4644 - DNA, 30 bp, Artificial Sequence
  Description of Artificial Sequence: Synthetic almond; inner sequence
aatgtgcacgatcgtaccctacatgtggca

SEQ ID NO: 4645 - DNA, 30 bp, Artificial Sequence; identical to SEQ ID NO: 526
  Description of Artificial Sequence: Synthetic almond; inner sequence

SEQ ID NO: 4646 - DNA, 30 bp, Artificial Sequence; identical to SEQ ID NO: 962
  Description of Artificial Sequence: Synthetic almond; inner sequence

SEQ ID NO: 4647 - DNA, 30 bp, Artificial Sequence; identical to SEQ ID NO: 182
  Description of Artificial Sequence: Synthetic almond; inner sequence

SEQ ID NO: 4648 - DNA, 30 bp, Artificial Sequence; identical to SEQ ID NO: 884
  Description of Artificial Sequence: Synthetic almond; inner sequence

SEQ ID NO: 4649 - DNA, 30 bp, Artificial Sequence; identical to SEQ ID NO: 291
  Description of Artificial Sequence: Synthetic almond; inner sequence

SEQ ID NO: 4650 - DNA, 30 bp, Artificial Sequence
  Description of Artificial Sequence: Synthetic almond; inner sequence
ggccgaacgaccgatcgagtggcgcatggc

SEQ ID NO: 4651 - DNA, 30 bp, Artificial Sequence
  Description of Artificial Sequence: Synthetic almond; inner sequence
gtcgtgacgcaaccggtcaagcggtgtgta

SEQ ID NO: 4652 - DNA, 30 bp, Artificial Sequence
  Description of Artificial Sequence: Synthetic almond; inner sequence
cacatgccagtccgtcaccacgccgcgtca

SEQ ID NO: 4653 - DNA, 30 bp, Artificial Sequence
  Description of Artificial Sequence: Synthetic almond; inner sequence
gcacgactcgcaccctatcatgacgccatg

SEQ ID NO: 4654 - DNA, 30 bp, Artificial Sequence
  Description of Artificial Sequence: Synthetic almond; inner sequence
gcgacaagcagcagacgagatcacggcccg

SEQ ID NO: 4655 - DNA, 30 bp, Artificial Sequence
  Description of Artificial Sequence: Synthetic almond; inner sequence
acggtcagggagcagtggacgcgttgcacg

SEQ ID NO: 4656 - DNA, 30 bp, Artificial Sequence; identical to SEQ ID NO: 387
  Description of Artificial Sequence: Synthetic almond; inner sequence

SEQ ID NO: 4657 - DNA, 30 bp, Artificial Sequence; identical to SEQ ID NO: 670
  Description of Artificial Sequence: Synthetic almond; inner sequence

SEQ ID NO: 4658 - DNA, 30 bp, Artificial Sequence
  Description of Artificial Sequence: Synthetic almond; inner sequence
cgcaccgtcaagcgggcaggcactttggtg

SEQ ID NO: 4659 - DNA, 30 bp, Artificial Sequence
  Description of Artificial Sequence: Synthetic almond; inner sequence
cgacacgcatcatgtgtgcctaccgtcacg

SEQ ID NO: 4660 - DNA, 30 bp, Artificial Sequence
  Description of Artificial Sequence: Synthetic almond; inner sequence
gcaacgcagccggacgatcgacacgtgact

SEQ ID NO: 4661 - DNA, 30 bp, Artificial Sequence; identical to SEQ ID NO: 600
  Description of Artificial Sequence: Synthetic almond; inner sequence

SEQ ID NO: 4662 - DNA, 30 bp, Artificial Sequence
  Description of Artificial Sequence: Synthetic almond; inner sequence
cgtccgacaacgacgtaccggtgtgccacg

SEQ ID NO: 4663 - DNA, 30 bp, Artificial Sequence
  Description of Artificial Sequence: Synthetic almond; inner sequence
gcgccaccgcaacatgtgcacgtatcgaca

SEQ ID NO: 4664 - DNA, 30 bp, Artificial Sequence
  Description of Artificial Sequence: Synthetic almond; inner sequence
cgcaccgtgacataggggcattcgcgacac

SEQ ID NO: 4665 - DNA, 30 bp, Artificial Sequence; identical to SEQ ID NO: 863
  Description of Artificial Sequence: Synthetic almond; inner sequence

SEQ ID NO: 4666 - DNA, 30 bp, Artificial Sequence
  Description of Artificial Sequence: Synthetic almond; inner sequence
gcactgagcgtacgtatcagcgggcacgca

SEQ ID NO: 4667 - DNA, 30 bp, Artificial Sequence
  Description of Artificial Sequence: Synthetic almond; inner sequence
gtcatgcgcggacactatcatggcggcatg

SEQ ID NO: 4668 - DNA, 30 bp, Artificial Sequence; identical to SEQ ID NO: 784
  Description of Artificial Sequence: Synthetic almond; inner sequence

SEQ ID NO: 4669 - DNA, 30 bp, Artificial Sequence; identical to SEQ ID NO: 660
  Description of Artificial Sequence: Synthetic almond; inner sequence

SEQ ID NO: 4670 - DNA, 30 bp, Artificial Sequence
  Description of Artificial Sequence: Synthetic almond; inner sequence
tggactgtgcgcaccgattacgtggccatg

SEQ ID NO: 4671 - DNA, 30 bp, Artificial Sequence
  Description of Artificial Sequence: Synthetic almond; inner sequence
cgcagacacacggcatgctctgacctggca

SEQ ID NO: 4672 - DNA, 30 bp, Artificial Sequence; identical to SEQ ID NO: 441
  Description of Artificial Sequence: Synthetic almond; inner sequence

SEQ ID NO: 4673 - DNA, 30 bp, Artificial Sequence
  Description of Artificial Sequence: Synthetic almond; inner sequence
cgtccacgcgcaccggtgagttacggcaca

SEQ ID NO: 4674 - DNA, 30 bp, Artificial Sequence; identical to SEQ ID NO: 721
  Description of Artificial Sequence: Synthetic almond; inner sequence

SEQ ID NO: 4675 - DNA, 30 bp, Artificial Sequence; identical to SEQ ID NO: 490
  Description of Artificial Sequence: Synthetic almond; inner sequence

SEQ ID NO: 4676 - DNA, 30 bp, Artificial Sequence; identical to SEQ ID NO: 636
  Description of Artificial Sequence: Synthetic almond; inner sequence

SEQ ID NO: 4677 - DNA, 30 bp, Artificial Sequence; identical to SEQ ID NO: 345
  Description of Artificial Sequence: Synthetic almond; inner sequence

SEQ ID NO: 4678 - DNA, 30 bp, Artificial Sequence
  Description of Artificial Sequence: Synthetic almond; inner sequence
gcgtaccagcggaacaggactgcgatgaca

SEQ ID NO: 4679 - DNA, 30 bp, Artificial Sequence
  Description of Artificial Sequence: Synthetic almond; inner sequence
cgcaccgagcgtgatcgtggttcgcagtca

SEQ ID NO: 4680 - DNA, 30 bp, Artificial Sequence; identical to SEQ ID NO: 477
  Description of Artificial Sequence: Synthetic almond; inner sequence

SEQ ID NO: 4681 - DNA, 30 bp, Artificial Sequence; identical to SEQ ID NO: 325
  Description of Artificial Sequence: Synthetic almond; inner sequence

SEQ ID NO: 4682 - DNA, 30 bp, Artificial Sequence
  Description of Artificial Sequence: Synthetic almond; inner sequence
ggacgcagcgctgacggtggatcatgcact

SEQ ID NO: 4683 - DNA, 30 bp, Artificial Sequence; identical to SEQ ID NO: 267
  Description of Artificial Sequence: Synthetic almond; inner sequence

SEQ ID NO: 4684 - DNA, 30 bp, Artificial Sequence; identical to SEQ ID NO: 927
  Description of Artificial Sequence: Synthetic almond; inner sequence

SEQ ID NO: 4685 - DNA, 30 bp, Artificial Sequence; identical to SEQ ID NO: 846
  Description of Artificial Sequence: Synthetic almond; inner sequence

SEQ ID NO: 4686 - DNA, 30 bp, Artificial Sequence; identical to SEQ ID NO: 991
  Description of Artificial Sequence: Synthetic almond; inner sequence

SEQ ID NO: 4687 - DNA, 30 bp, Artificial Sequence
  Description of Artificial Sequence: Synthetic almond; inner sequence
ccatgtccgacgataccatacgcatggcca

SEQ ID NO: 4688 - DNA, 30 bp, Artificial Sequence
  Description of Artificial Sequence: Synthetic almond; inner sequence
gtacgcctcggagctagcaggtggtgtgga

SEQ ID NO: 4689 - DNA, 30 bp, Artificial Sequence; identical to SEQ ID NO: 662
  Description of Artificial Sequence: Synthetic almond; inner sequence

SEQ ID NO: 4690 - DNA, 30 bp, Artificial Sequence
  Description of Artificial Sequence: Synthetic almond; inner sequence
ggccggcgaaccctagcaagtgcatgcgtg

SEQ ID NO: 4691 - DNA, 30 bp, Artificial Sequence
  Description of Artificial Sequence: Synthetic almond; inner sequence
ccgcacgtagccctatcagcggtgcatgca

SEQ ID NO: 4692 - DNA, 30 bp, Artificial Sequence
  Description of Artificial Sequence: Synthetic almond; inner sequence
gatgggcagagcggaccgtctcacgtggtg

SEQ ID NO: 4693 - DNA, 30 bp, Artificial Sequence; identical to SEQ ID NO: 534
  Description of Artificial Sequence: Synthetic almond; inner sequence

SEQ ID NO: 4694 - DNA, 30 bp, Artificial Sequence
  Description of Artificial Sequence: Synthetic almond; inner sequence
ggcatgcgatgaacgaggcatgatgtgtca

SEQ ID NO: 4695 - DNA, 30 bp, Artificial Sequence; identical to SEQ ID NO: 374
  Description of Artificial Sequence: Synthetic almond; inner sequence

SEQ ID NO: 4696 - DNA, 30 bp, Artificial Sequence; identical to SEQ ID NO: 386
  Description of Artificial Sequence: Synthetic almond; inner sequence

SEQ ID NO: 4697 - DNA, 30 bp, Artificial Sequence; identical to SEQ ID NO: 788
  Description of Artificial Sequence: Synthetic almond; inner sequence

SEQ ID NO: 4698 - DNA, 30 bp, Artificial Sequence
  Description of Artificial Sequence: Synthetic almond; inner sequence
gcggtacgaagcaacggcctgcactgcgtg

SEQ ID NO: 4699 - DNA, 30 bp, Artificial Sequence; identical to SEQ ID NO: 456
  Description of Artificial Sequence: Synthetic almond; inner sequence

SEQ ID NO: 4700 - DNA, 30 bp, Artificial Sequence
  Description of Artificial Sequence: Synthetic almond; inner sequence
gctactgcgcgtgaccatatcaagcggaca

SEQ ID NO: 4701 - DNA, 30 bp, Artificial Sequence; identical to SEQ ID NO: 607
  Description of Artificial Sequence: Synthetic almond; inner sequence

SEQ ID NO: 4702 - DNA, 30 bp, Artificial Sequence
  Description of Artificial Sequence: Synthetic almond; inner sequence
cgatgcgtcgatcgtacgtcatgcgcgtca

SEQ ID NO: 4703 - DNA, 30 bp, Artificial Sequence; identical to SEQ ID NO: 608
  Description of Artificial Sequence: Synthetic almond; inner sequence

SEQ ID NO: 4704 - DNA, 30 bp, Artificial Sequence; identical to SEQ ID NO: 1001
  Description of Artificial Sequence: Synthetic almond; inner sequence

SEQ ID NO: 4705 - DNA, 30 bp, Artificial Sequence; identical to SEQ ID NO: 754
  Description of Artificial Sequence: Synthetic almond; inner sequence

SEQ ID NO: 4706 - DNA, 30 bp, Artificial Sequence
  Description of Artificial Sequence: Synthetic almond; inner sequence
acgtctcggaacgcaacggtgtgtgtgtgc

SEQ ID NO: 4707 - DNA, 30 bp, Artificial Sequence
  Description of Artificial Sequence: Synthetic almond; inner sequence
ggcatgcgatgaacgagtcatgatgcgtca

SEQ ID NO: 4708 - DNA, 30 bp, Artificial Sequence
  Description of Artificial Sequence: Synthetic almond; inner sequence
ggcatgcacgcacctacacttgggtatgga

SEQ ID NO: 4709 - DNA, 30 bp, Artificial Sequence
  Description of Artificial Sequence: Synthetic almond; inner sequence
gcaacggcatggagtgacctgcgctgaacg

SEQ ID NO: 4710 - DNA, 30 bp, Artificial Sequence
  Description of Artificial Sequence: Synthetic almond; inner sequence
ggcctgaccgaacgtagagcatgtgcttgc

SEQ ID NO: 4711 - DNA, 30 bp, Artificial Sequence
  Description of Artificial Sequence: Synthetic almond; inner sequence
ccatcacggacgaactcacgcacggtgaca

SEQ ID NO: 4712 - DNA, 30 bp, Artificial Sequence; identical to SEQ ID NO: 261
  Description of Artificial Sequence: Synthetic almond; inner sequence

SEQ ID NO: 4713 - DNA, 30 bp, Artificial Sequence
  Description of Artificial Sequence: Synthetic almond; inner sequence
ggatgacgatgcactacacgtggcttggac

SEQ ID NO: 4714 - DNA, 30 bp, Artificial Sequence; identical to SEQ ID NO: 951
  Description of Artificial Sequence: Synthetic almond; inner sequence

SEQ ID NO: 4715 - DNA, 30 bp, Artificial Sequence
  Description of Artificial Sequence: Synthetic almond; inner sequence
cgtaccggagaggcaggcatgggcacggca

SEQ ID NO: 4716 - DNA, 30 bp, Artificial Sequence; identical to SEQ ID NO: 705
  Description of Artificial Sequence: Synthetic almond; inner sequence

SEQ ID NO: 4717 - DNA, 30 bp, Artificial Sequence
  Description of Artificial Sequence: Synthetic almond; inner sequence
ggccaagctgaccgtaaaggcaggcgcgta

SEQ ID NO: 4718 - DNA, 30 bp, Artificial Sequence
  Description of Artificial Sequence: Synthetic almond; inner sequence
gcatggccgaatgcaccctgcagttgcgcg

SEQ ID NO: 4719 - DNA, 30 bp, Artificial Sequence
  Description of Artificial Sequence: Synthetic almond; inner sequence
gcacggaacggaacaacaagggcaggcatg

SEQ ID NO: 4720 - DNA, 30 bp, Artificial Sequence; identical to SEQ ID NO: 461
  Description of Artificial Sequence: Synthetic almond; inner sequence

SEQ ID NO: 4721 - DNA, 30 bp, Artificial Sequence
  Description of Artificial Sequence: Synthetic almond; inner sequence
gcagatggacgatctgagcgtgaccgtggt

SEQ ID NO: 4722 - DNA, 30 bp, Artificial Sequence
  Description of Artificial Sequence: Synthetic almond; inner sequence
ggtcggatcgacactgaacgtggtcacgca

SEQ ID NO: 4723 - DNA, 30 bp, Artificial Sequence; identical to SEQ ID NO: 805
  Description of Artificial Sequence: Synthetic almond; inner sequence

SEQ ID NO: 4724 - DNA, 30 bp, Artificial Sequence; identical to SEQ ID NO: 684
  Description of Artificial Sequence: Synthetic almond; inner sequence

SEQ ID NO: 4725 - DNA, 30 bp, Artificial Sequence; identical to SEQ ID NO: 464
  Description of Artificial Sequence: Synthetic almond; inner sequence

SEQ ID NO: 4726 - DNA, 30 bp, Artificial Sequence
  Description of Artificial Sequence: Synthetic almond; inner sequence
tcgatgcagatggacgacgtcgctacgaca

SEQ ID NO: 4727 - DNA, 30 bp, Artificial Sequence
  Description of Artificial Sequence: Synthetic almond; inner sequence
ggccggaacgaaacgcgtggccatgcacta

SEQ ID NO: 4728 - DNA, 30 bp, Artificial Sequence
  Description of Artificial Sequence: Synthetic almond; inner sequence
cgtaccgacggggacattgcgttggcagtc

SEQ ID NO: 4729 - DNA, 30 bp, Artificial Sequence; identical to SEQ ID NO: 588
  Description of Artificial Sequence: Synthetic almond; inner sequence

SEQ ID NO: 4730 - DNA, 30 bp, Artificial Sequence; identical to SEQ ID NO: 493
  Description of Artificial Sequence: Synthetic almond; inner sequence

SEQ ID NO: 4731 - DNA, 30 bp, Artificial Sequence
  Description of Artificial Sequence: Synthetic almond; inner sequence
cgcaacggcgaggggtcgtgcacgcattca

SEQ ID NO: 4732 - DNA, 30 bp, Artificial Sequence; identical to SEQ ID NO: 677
  Description of Artificial Sequence: Synthetic almond; inner sequence

SEQ ID NO: 4733 - DNA, 30 bp, Artificial Sequence; identical to SEQ ID NO: 560
  Description of Artificial Sequence: Synthetic almond; inner sequence

SEQ ID NO: 4734 - DNA, 30 bp, Artificial Sequence; identical to SEQ ID NO: 328
  Description of Artificial Sequence: Synthetic almond; inner sequence

SEQ ID NO: 4735 - DNA, 30 bp, Artificial Sequence
  Description of Artificial Sequence: Synthetic almond; inner sequence
ccgtagcgacatcaagcggtggtgagcgtg

SEQ ID NO: 4736 - DNA, 30 bp, Artificial Sequence
  Description of Artificial Sequence: Synthetic almond; inner sequence
cgtaccgagagtgatcgtggttcgcagtca

SEQ ID NO: 4737 - DNA, 30 bp, Artificial Sequence
  Description of Artificial Sequence: Synthetic almond; inner sequence
cgcaccgagagtgatcgcggttcgcagtca

SEQ ID NO: 4738 - DNA, 30 bp, Artificial Sequence; identical to SEQ ID NO: 505
  Description of Artificial Sequence: Synthetic almond; inner sequence

SEQ ID NO: 4739 - DNA, 30 bp, Artificial Sequence
  Description of Artificial Sequence: Synthetic almond; inner sequence
tcgatccggcacgtaacgatgggcatggca

SEQ ID NO: 4740 - DNA, 30 bp, Artificial Sequence
  Description of Artificial Sequence: Synthetic almond; inner sequence
cgacccggagaccaagctggacattgcgtc

SEQ ID NO: 4741 - DNA, 30 bp, Artificial Sequence; identical to SEQ ID NO: 851
  Description of Artificial Sequence: Synthetic almond; inner sequence

SEQ ID NO: 4742 - DNA, 30 bp, Artificial Sequence
  Description of Artificial Sequence: Synthetic almond; inner sequence
cgacacgcacaagggtcgagtgacgaggca

SEQ ID NO: 4743 - DNA, 30 bp, Artificial Sequence
  Description of Artificial Sequence: Synthetic almond; inner sequence
gtcctgcacgaacactatcatggcggcatg

SEQ ID NO: 4744 - DNA, 30 bp, Artificial Sequence
  Description of Artificial Sequence: Synthetic almond; inner sequence
gatggcacgatcgtccctagcgcgtgatca

SEQ ID NO: 4745 - DNA, 30 bp, Artificial Sequence
  Description of Artificial Sequence: Synthetic almond; inner sequence
ccgtagcgcaccacgtagacgttaggcatg

SEQ ID NO: 4746 - DNA, 30 bp, Artificial Sequence
  Description of Artificial Sequence: Synthetic almond; inner sequence
cgtcccgtgcgctaggcagtctgcgtcaca

SEQ ID NO: 4747 - DNA, 30 bp, Artificial Sequence; identical to SEQ ID NO: 315
  Description of Artificial Sequence: Synthetic almond; inner sequence

SEQ ID NO: 4748 - DNA, 30 bp, Artificial Sequence
  Description of Artificial Sequence: Synthetic almond; inner sequence
gcacgactcgcaacctatcatgaggccatg

SEQ ID NO: 4749 - DNA, 30 bp, Artificial Sequence
  Description of Artificial Sequence: Synthetic almond; inner sequence
gtgcgtgctaaccgagggcctgtgctgaca

SEQ ID NO: 4750 - DNA, 30 bp, Artificial Sequence; identical to SEQ ID NO: 349
  Description of Artificial Sequence: Synthetic almond; inner sequence

SEQ ID NO: 4751 - DNA, 30 bp, Artificial Sequence; identical to SEQ ID NO: 576
  Description of Artificial Sequence: Synthetic almond; inner sequence

SEQ ID NO: 4752 - DNA, 30 bp, Artificial Sequence; identical to SEQ ID NO: 881
  Description of Artificial Sequence: Synthetic almond; inner sequence

SEQ ID NO: 4753 - DNA, 27 bp, Artificial Sequence
  Description of Artificial Sequence: Synthetic almond; inner sequence
ggccaagctgacctagcatgtgtgtca

SEQ ID NO: 4754 - DNA, 30 bp, Artificial Sequence; identical to SEQ ID NO: 555
  Description of Artificial Sequence: Synthetic almond; inner sequence

SEQ ID NO: 4755 - DNA, 30 bp, Artificial Sequence
  Description of Artificial Sequence: Synthetic almond; inner sequence
ggcggaacggacgtggacatcgtgctcatg

SEQ ID NO: 4756 - DNA, 30 bp, Artificial Sequence
  Description of Artificial Sequence: Synthetic almond; inner sequence
gggcagcgaggagcggaaagtgtgcaggga

SEQ ID NO: 4757 - DNA, 25 bp, Artificial Sequence
  Description of Artificial Sequence: Synthetic almond; inner sequence
ggcctgcgatggatgtgtgcgtgta

SEQ ID NO: 4758 - DNA, 30 bp, Artificial Sequence
  Description of Artificial Sequence: Synthetic almond; inner sequence
ggcccaggacatcgatggcatgcgttcaca

SEQ ID NO: 4759 - DNA, 30 bp, Artificial Sequence
  Description of Artificial Sequence: Synthetic almond; inner sequence
gcaagcacaggtcctgggcacgtacgcacg

SEQ ID NO: 4760 - DNA, 30 bp, Artificial Sequence; identical to SEQ ID NO: 395
  Description of Artificial Sequence: Synthetic almond; inner sequence

SEQ ID NO: 4761 - DNA, 30 bp, Artificial Sequence
  Description of Artificial Sequence: Synthetic almond; inner sequence
ccgtagcgacatcaagcggtggtgtgcggg

SEQ ID NO: 4762 - DNA, 30 bp, Artificial Sequence; identical to SEQ ID NO: 593
  Description of Artificial Sequence: Synthetic almond; inner sequence

SEQ ID NO: 4763 - DNA, 29 bp, Artificial Sequence
  Description of Artificial Sequence: Synthetic almond; inner sequence
ggacgccgatgccctcatgtggccgtgga

SEQ ID NO: 4764 - DNA, 30 bp, Artificial Sequence
  Description of Artificial Sequence: Synthetic almond; inner sequence
ccgatgcggcacgtctctgaccgatgcgga

SEQ ID NO: 4765 - DNA, 30 bp, Artificial Sequence; identical to SEQ ID NO: 574
  Description of Artificial Sequence: Synthetic almond; inner sequence

SEQ ID NO: 4766 - DNA, 30 bp, Artificial Sequence; identical to SEQ ID NO: 586
  Description of Artificial Sequence: Synthetic almond; inner sequence

SEQ ID NO: 4767 - DNA, 30 bp, Artificial Sequence
  Description of Artificial Sequence: Synthetic almond; inner sequence
ccgaaacgaaccgcacgcaacgcagccgca

SEQ ID NO: 4768 - DNA, 30 bp, Artificial Sequence
  Description of Artificial Sequence: Synthetic almond; inner sequence
cgaacagaccgtgtggcctacgcatgcgca

SEQ ID NO: 4769 - DNA, 30 bp, Artificial Sequence; identical to SEQ ID NO: 566
  Description of Artificial Sequence: Synthetic almond; inner sequence

SEQ ID NO: 4770 - DNA, 30 bp, Artificial Sequence; identical to SEQ ID NO: 302
  Description of Artificial Sequence: Synthetic almond; inner sequence

SEQ ID NO: 4771 - DNA, 30 bp, Artificial Sequence; identical to SEQ ID NO: 789
  Description of Artificial Sequence: Synthetic almond; inner sequence

SEQ ID NO: 4772 - DNA, 30 bp, Artificial Sequence
  Description of Artificial Sequence: Synthetic almond; inner sequence
ggcacgacgcgttcccgccacactgccgtg

SEQ ID NO: 4773 - DNA, 30 bp, Artificial Sequence; identical to SEQ ID NO: 619
  Description of Artificial Sequence: Synthetic almond; inner sequence

SEQ ID NO: 4774 - DNA, 30 bp, Artificial Sequence
  Description of Artificial Sequence: Synthetic almond; inner sequence
gggatgcgatgaacgaggcatgatgcgtca

SEQ ID NO: 4775 - DNA, 30 bp, Artificial Sequence
  Description of Artificial Sequence: Synthetic almond; inner sequence
ggcatggcgcgcaccctatcaagtacgtca

SEQ ID NO: 4776 - DNA, 30 bp, Artificial Sequence
  Description of Artificial Sequence: Synthetic almond; inner sequence
cgcatgcacgcacctacacgtgggtatgga

SEQ ID NO: 4777 - DNA, 30 bp, Artificial Sequence
  Description of Artificial Sequence: Synthetic almond; inner sequence
gctgcaggcatacgtgtactgcgctggacc

SEQ ID NO: 4778 - DNA, 30 bp, Artificial Sequence
  Description of Artificial Sequence: Synthetic almond; inner sequence
gtacggaacggaacaacaagggcatgcatg

SEQ ID NO: 4779 - DNA, 30 bp, Artificial Sequence; identical to SEQ ID NO: 388
  Description of Artificial Sequence: Synthetic almond; inner sequence

SEQ ID NO: 4780 - DNA, 30 bp, Artificial Sequence; identical to SEQ ID NO: 943
  Description of Artificial Sequence: Synthetic almond; inner sequence

SEQ ID NO: 4781 - DNA, 30 bp, Artificial Sequence
  Description of Artificial Sequence: Synthetic almond; inner sequence
cgaaccgcaggagagcaggctgtgcgcacg

SEQ ID NO: 4782 - DNA, 30 bp, Artificial Sequence
  Description of Artificial Sequence: Synthetic almond; inner sequence
ggccaagctgaccgtaaaggcaggcgtgga

SEQ ID NO: 4783 - DNA, 30 bp, Artificial Sequence; identical to SEQ ID NO: 498
  Description of Artificial Sequence: Synthetic almond; inner sequence

SEQ ID NO: 4784 - DNA, 30 bp, Artificial Sequence
  Description of Artificial Sequence: Synthetic almond; inner sequence
tgccctggcaatgcgatgttcgatgcgacc

SEQ ID NO: 4785 - DNA, 30 bp, Artificial Sequence
  Description of Artificial Sequence: Synthetic almond; inner sequence
tggactgcgtggaccgtatcgtgcggcatg

SEQ ID NO: 4786 - DNA, 28 bp, Artificial Sequence
  Description of Artificial Sequence: Synthetic almond; inner sequence
ggcatgcacgcacctacacgtgatcatg

SEQ ID NO: 4787 - DNA, 30 bp, Artificial Sequence
  Description of Artificial Sequence: Synthetic almond; inner sequence
gtcatgccatcccttcgcgtgtgacaggta

SEQ ID NO: 4788 - DNA, 29 bp, Artificial Sequence
  Description of Artificial Sequence: Synthetic almond; inner sequence
gtcatgccatcccttcgagtggacaggta

SEQ ID NO: 4789 - DNA, 30 bp, Artificial Sequence; identical to SEQ ID NO: 633
  Description of Artificial Sequence: Synthetic almond; inner sequence

SEQ ID NO: 4790 - DNA, 30 bp, Artificial Sequence
  Description of Artificial Sequence: Synthetic almond; inner sequence
cgtactgagcgcacacgtcctgccgacgcg

SEQ ID NO: 4791 - DNA, 30 bp, Artificial Sequence; identical to SEQ ID NO: 877
  Description of Artificial Sequence: Synthetic almond; inner sequence

SEQ ID NO: 4792 - DNA, 30 bp, Artificial Sequence
  Description of Artificial Sequence: Synthetic almond; inner sequence
cgcagatcgaggccgtaacgcgttgtgggc

SEQ ID NO: 4793 - DNA, 30 bp, Artificial Sequence
  Description of Artificial Sequence: Synthetic almond; inner sequence
cgaacagagcgaggcatgatggacgtgggc

SEQ ID NO: 4794 - DNA, 31 bp, Artificial Sequence; identical to SEQ ID NO: 503
  Description of Artificial Sequence: Synthetic almond; inner sequence

SEQ ID NO: 4795 - DNA, 30 bp, Artificial Sequence; identical to SEQ ID NO: 512
  Description of Artificial Sequence: Synthetic almond; inner sequence

SEQ ID NO: 4796 - DNA, 30 bp, Artificial Sequence
  Description of Artificial Sequence: Synthetic almond; inner sequence
cgacagggcgggcagtccattcgctgcaca

SEQ ID NO: 4797 - DNA, 30 bp, Artificial Sequence; identical to SEQ ID NO: 210
  Description of Artificial Sequence: Synthetic almond; inner sequence

SEQ ID NO: 4798 - DNA, 30 bp, Artificial Sequence
  Description of Artificial Sequence: Synthetic almond; inner sequence
ggcctgaacgaaccgagatgtcagcgcgcg

SEQ ID NO: 4799 - DNA, 30 bp, Artificial Sequence
  Description of Artificial Sequence: Synthetic almond; inner sequence
acatagggcgcaacgtacctatcatgtggt

SEQ ID NO: 4800 - DNA, 30 bp, Artificial Sequence; identical to SEQ ID NO: 580
  Description of Artificial Sequence: Synthetic almond; inner sequence

SEQ ID NO: 4801 - DNA, 30 bp, Artificial Sequence
  Description of Artificial Sequence: Synthetic almond; inner sequence
gtgctgaacgaccagtgggaacgtgctatg

SEQ ID NO: 4802 - DNA, 30 bp, Artificial Sequence
  Description of Artificial Sequence: Synthetic almond; inner sequence
ggcatgcacgcacctacacgtgggtacgta

SEQ ID NO: 4803 - DNA, 30 bp, Artificial Sequence
  Description of Artificial Sequence: Synthetic almond; inner sequence
ccgaacggaacgccatcgtgttgcgcatca

SEQ ID NO: 4804 - DNA, 30 bp, Artificial Sequence
  Description of Artificial Sequence: Synthetic almond; inner sequence
ggcaccgtcaagcgggaaggcactttggtg

SEQ ID NO: 4805 - DNA, 30 bp, Artificial Sequence
  Description of Artificial Sequence: Synthetic almond; inner sequence
tgcgcagtaggtccgcagcgcacatgcacg

SEQ ID NO: 4806 - DNA, 30 bp, Artificial Sequence; identical to SEQ ID NO: 813
  Description of Artificial Sequence: Synthetic almond; inner sequence

SEQ ID NO: 4807 - DNA, 30 bp, Artificial Sequence
  Description of Artificial Sequence: Synthetic almond; inner sequence
gtgcgcgtcgaaccgtatgggcatggcgtg

SEQ ID NO: 4808 - DNA, 30 bp, Artificial Sequence
  Description of Artificial Sequence: Synthetic almond; inner sequence
aggcacagtgtcggtgggactcagcgcaca

SEQ ID NO: 4809 - DNA, 30 bp, Artificial Sequence
  Description of Artificial Sequence: Synthetic almond; inner sequence
gcacgtgcagctgtacgacgattcgccgct

SEQ ID NO: 4810 - DNA, 30 bp, Artificial Sequence
  Description of Artificial Sequence: Synthetic almond; inner sequence
ggcatgaacgcacctacacgtgggtatgga

SEQ ID NO: 4811 - DNA, 30 bp, Artificial Sequence; identical to SEQ ID NO: 497
  Description of Artificial Sequence: Synthetic almond; inner sequence

SEQ ID NO: 4812 - DNA, 30 bp, Artificial Sequence; identical to SEQ ID NO: 466
  Description of Artificial Sequence: Synthetic almond; inner sequence

SEQ ID NO: 4813 - DNA, 30 bp, Artificial Sequence
  Description of Artificial Sequence: Synthetic almond; inner sequence
cacgcacgtagcgcaggacggcactcacgt

SEQ ID NO: 4814 - DNA, 30 bp, Artificial Sequence
  Description of Artificial Sequence: Synthetic almond; inner sequence
ggccagatcgacatagcgagtgagagtgta

SEQ ID NO: 4815 - DNA, 30 bp, Artificial Sequence; identical to SEQ ID NO: 968
  Description of Artificial Sequence: Synthetic almond; inner sequence

SEQ ID NO: 4816 - DNA, 30 bp, Artificial Sequence
  Description of Artificial Sequence: Synthetic almond; inner sequence
ccgtctgagcggcaaggggagcagtacgtg

SEQ ID NO: 4817 - DNA, 30 bp, Artificial Sequence
  Description of Artificial Sequence: Synthetic almond; inner sequence
cgtcacacagggcggtggtgctgcacgtca

SEQ ID NO: 4818 - DNA, 30 bp, Artificial Sequence; identical to SEQ ID NO: 307
  Description of Artificial Sequence: Synthetic almond; inner sequence

SEQ ID NO: 4819 - DNA, 30 bp, Artificial Sequence
  Description of Artificial Sequence: Synthetic almond; inner sequence
gcaatgcgagtgccctcacttcacgtcacg

SEQ ID NO: 4820 - DNA, 30 bp, Artificial Sequence; identical to SEQ ID NO: 338
  Description of Artificial Sequence: Synthetic almond; inner sequence

SEQ ID NO: 4821 - DNA, 30 bp, Artificial Sequence
  Description of Artificial Sequence: Synthetic almond; inner sequence
ggccaagcagcatggacgtgcccacggtga

SEQ ID NO: 4822 - DNA, 30 bp, Artificial Sequence
  Description of Artificial Sequence: Synthetic almond; inner sequence
gccgacgatgacctggacgtgtggttgtca

SEQ ID NO: 4823 - DNA, 30 bp, Artificial Sequence
  Description of Artificial Sequence: Synthetic almond; inner sequence
gcattcgaggccatagcgagtggtagtgga

SEQ ID NO: 4824 - DNA, 30 bp, Artificial Sequence; identical to SEQ ID NO: 914
  Description of Artificial Sequence: Synthetic almond; inner sequence

SEQ ID NO: 4825 - DNA, 30 bp, Artificial Sequence; identical to SEQ ID NO: 898
  Description of Artificial Sequence: Synthetic almond; inner sequence

SEQ ID NO: 4826 - DNA, 30 bp, Artificial Sequence; identical to SEQ ID NO: 935
  Description of Artificial Sequence: Synthetic almond; inner sequence

SEQ ID NO: 4827 - DNA, 30 bp, Artificial Sequence; identical to SEQ ID NO: 717
  Description of Artificial Sequence: Synthetic almond; inner sequence

SEQ ID NO: 4828 - DNA, 30 bp, Artificial Sequence
  Description of Artificial Sequence: Synthetic almond; inner sequence
cgaaccgacgggatcgcgtgcaccagtcca

SEQ ID NO: 4829 - DNA, 30 bp, Artificial Sequence
  Description of Artificial Sequence: Synthetic almond; inner sequence
gcacataggacgaccttcaagcgtggcacg

SEQ ID NO: 4830 - DNA, 30 bp, Artificial Sequence
  Description of Artificial Sequence: Synthetic almond; inner sequence
ggccaagctgaccgtaaaggcatgcgtgta

SEQ ID NO: 4831 - DNA, 30 bp, Artificial Sequence
  Description of Artificial Sequence: Synthetic almond; inner sequence
gcgtcaggcatcatggctcgccgatgcacg

SEQ ID NO: 4832 - DNA, 30 bp, Artificial Sequence; identical to SEQ ID NO: 840
  Description of Artificial Sequence: Synthetic almond; inner sequence

SEQ ID NO: 4833 - DNA, 30 bp, Artificial Sequence
  Description of Artificial Sequence: Synthetic almond; inner sequence
cgacacgaacaggctcaacgtcgtcacggt

SEQ ID NO: 4834 - DNA, 30 bp, Artificial Sequence
  Description of Artificial Sequence: Synthetic almond; inner sequence
gccatgcacgcacctacacgtgggtatgga

SEQ ID NO: 4835 - DNA, 30 bp, Artificial Sequence
  Description of Artificial Sequence: Synthetic almond; inner sequence
tcgatgacgatgagcgtggacgttgccgta

SEQ ID NO: 4836 - DNA, 30 bp, Artificial Sequence
  Description of Artificial Sequence: Synthetic almond; inner sequence
cgcaccgtgagcatagggtatcgctgccta

SEQ ID NO: 4837 - DNA, 30 bp, Artificial Sequence
  Description of Artificial Sequence: Synthetic almond; inner sequence
gcacgactcgcaccctatcattaggccatg

SEQ ID NO: 4838 - DNA, 30 bp, Artificial Sequence; identical to SEQ ID NO: 445
  Description of Artificial Sequence: Synthetic almond; inner sequence

SEQ ID NO: 4839 - DNA, 30 bp, Artificial Sequence; identical to SEQ ID NO: 494
  Description of Artificial Sequence: Synthetic almond; inner sequence

SEQ ID NO: 4840 - DNA, 30 bp, Artificial Sequence; identical to SEQ ID NO: 867
  Description of Artificial Sequence: Synthetic almond; inner sequence

SEQ ID NO: 4841 - DNA, 30 bp, Artificial Sequence; identical to SEQ ID NO: 542
  Description of Artificial Sequence: Synthetic almond; inner sequence

SEQ ID NO: 4842 - DNA, 30 bp, Artificial Sequence; identical to SEQ ID NO: 594
  Description of Artificial Sequence: Synthetic almond; inner sequence

SEQ ID NO: 4843 - DNA, 30 bp, Artificial Sequence; identical to SEQ ID NO: 720
  Description of Artificial Sequence: Synthetic almond; inner sequence

SEQ ID NO: 4844 - DNA, 30 bp, Artificial Sequence
  Description of Artificial Sequence: Synthetic almond; inner sequence
gcgtgagcagaagtggccgacactgcacga

SEQ ID NO: 4845 - DNA, 30 bp, Artificial Sequence
  Description of Artificial Sequence: Synthetic almond; inner sequence
gtcatgcacgaacactatcatgccggcatg

SEQ ID NO: 4846 - DNA, 30 bp, Artificial Sequence; identical to SEQ ID NO: 678
  Description of Artificial Sequence: Synthetic almond; inner sequence

SEQ ID NO: 4847 - DNA, 30 bp, Artificial Sequence; identical to SEQ ID NO: 614
  Description of Artificial Sequence: Synthetic almond; inner sequence

SEQ ID NO: 4848 - DNA, 30 bp, Artificial Sequence
  Description of Artificial Sequence: Synthetic almond; inner sequence
catgctcgacccggcacgctgctgcgcacg

SEQ ID NO: 4849 - DNA, 30 bp, Artificial Sequence
  Description of Artificial Sequence: Synthetic almond; inner sequence
cgaaccgcagtgatgcatctcgcaggcaca

SEQ ID NO: 4850 - DNA, 30 bp, Artificial Sequence; identical to SEQ ID NO: 472
  Description of Artificial Sequence: Synthetic almond; inner sequence

SEQ ID NO: 4851 - DNA, 30 bp, Artificial Sequence; identical to SEQ ID NO: 685
  Description of Artificial Sequence: Synthetic almond; inner sequence

SEQ ID NO: 4852 - DNA, 30 bp, Artificial Sequence
  Description of Artificial Sequence: Synthetic almond; inner sequence
ggtgccagcatacgaccgacacgatgcaca

SEQ ID NO: 4853 - DNA, 30 bp, Artificial Sequence
  Description of Artificial Sequence: Synthetic almond; inner sequence
ggcatgcgcagaactatcaggtgtggcagg

SEQ ID NO: 4854 - DNA, 30 bp, Artificial Sequence
  Description of Artificial Sequence: Synthetic almond; inner sequence
ggcatgcgatgaacgaggcatgatgcgcca

SEQ ID NO: 4855 - DNA, 30 bp, Artificial Sequence; identical to SEQ ID NO: 793
  Description of Artificial Sequence: Synthetic almond; inner sequence

SEQ ID NO: 4856 - DNA, 30 bp, Artificial Sequence
  Description of Artificial Sequence: Synthetic almond; inner sequence
ggcacggaacgaagcctatcaagtgcgaca

SEQ ID NO: 4857 - DNA, 30 bp, Artificial Sequence
  Description of Artificial Sequence: Synthetic almond; inner sequence
ggcatgcacgcacctacacgtgggtatgta

SEQ ID NO: 4858 - DNA, 31 bp, Artificial Sequence
  Description of Artificial Sequence: Synthetic almond; inner sequence
tggccgaagcgcacctacacgtgggcacgta

SEQ ID NO: 4859 - DNA, 30 bp, Artificial Sequence
  Description of Artificial Sequence: Synthetic almond; inner sequence
ggccaagcggactgtgagtgcgtcggtgcc

SEQ ID NO: 4860 - DNA, 30 bp, Artificial Sequence
  Description of Artificial Sequence: Synthetic almond; inner sequence
ggcgtgaccgaacctcaagctggacatgga

SEQ ID NO: 4861 - DNA, 30 bp, Artificial Sequence
  Description of Artificial Sequence: Synthetic almond; inner sequence
ggacggaacgtactgccaggtgagcatgca

SEQ ID NO: 4862 - DNA, 30 bp, Artificial Sequence
  Description of Artificial Sequence: Synthetic almond; inner sequence
acacgcagggtgtcgtccgtatgtgcacga

SEQ ID NO: 4863 - DNA, 30 bp, Artificial Sequence
  Description of Artificial Sequence: Synthetic almond; inner sequence
gcgcatagcaacaacaccattcgcgtcccg

SEQ ID NO: 4864 - DNA, 30 bp, Artificial Sequence
  Description of Artificial Sequence: Synthetic almond; inner sequence
ggccaagctgacctatcaacgtgtcgtgga

SEQ ID NO: 4865 - DNA, 30 bp, Artificial Sequence; identical to SEQ ID NO: 621
  Description of Artificial Sequence: Synthetic almond; inner sequence

SEQ ID NO: 4866 - DNA, 30 bp, Artificial Sequence; identical to SEQ ID NO: 363
  Description of Artificial Sequence: Synthetic almond; inner sequence

SEQ ID NO: 4867 - DNA, 30 bp, Artificial Sequence
  Description of Artificial Sequence: Synthetic almond; inner sequence
gtcatgcacgaacactatcatggcgtcatg

SEQ ID NO: 4868 - DNA, 30 bp, Artificial Sequence
  Description of Artificial Sequence: Synthetic almond; inner sequence
cggaacggatcgtaggcagtcacgtggaca

SEQ ID NO: 4869 - DNA, 29 bp, Artificial Sequence
  Description of Artificial Sequence: Synthetic almond; inner sequence
gtgcaaacggaccgacaagtgcgcatgga

SEQ ID NO: 4870 - DNA, 30 bp, Artificial Sequence
  Description of Artificial Sequence: Synthetic almond; inner sequence
ccgcacgacctcgtgggctgcacttcgaca

SEQ ID NO: 4871 - DNA, 30 bp, Artificial Sequence
  Description of Artificial Sequence: Synthetic almond; inner sequence
cgcgtgacgataaggtgtgatgcgctccgt

SEQ ID NO: 4872 - DNA, 30 bp, Artificial Sequence
  Description of Artificial Sequence: Synthetic almond; inner sequence
ggcatgcacgcacctacacgggggtatgga

SEQ ID NO: 4873 - DNA, 30 bp, Artificial Sequence
  Description of Artificial Sequence: Synthetic almond; inner sequence
cgaccgacgaacaatggtgcatggttgcgt

SEQ ID NO: 4874 - DNA, 30 bp, Artificial Sequence
  Description of Artificial Sequence: Synthetic almond; inner sequence
gtcatgcgatgagctcaagttggccttgta

SEQ ID NO: 4875 - DNA, 30 bp, Artificial Sequence
  Description of Artificial Sequence: Synthetic almond; inner sequence
acacgcacagtgtgatgtgcctctcgtcca

SEQ ID NO: 4876 - DNA, 29 bp, Artificial Sequence
  Description of Artificial Sequence: Synthetic almond; inner sequence
ggcctgcgatggatgtggacgtacgtggc

SEQ ID NO: 4877 - DNA, 30 bp, Artificial Sequence; identical to SEQ ID NO: 921
  Description of Artificial Sequence: Synthetic almond; inner sequence

SEQ ID NO: 4878 - DNA, 30 bp, Artificial Sequence
  Description of Artificial Sequence: Synthetic almond; inner sequence
gtgactgaacgacgtgaccaagcggcatgg

SEQ ID NO: 4879 - DNA, 30 bp, Artificial Sequence
  Description of Artificial Sequence: Synthetic almond; inner sequence
gcgtcagcagcagcacggacgaactgcata

SEQ ID NO: 4880 - DNA, 30 bp, Artificial Sequence
  Description of Artificial Sequence: Synthetic almond; inner sequence
cacgaacggaccggtaagcatggccatgga

SEQ ID NO: 4881 - DNA, 30 bp, Artificial Sequence
  Description of Artificial Sequence: Synthetic almond; inner sequence
gtcatgcgcggacattcaagttgtcgtgga

SEQ ID NO: 4882 - DNA, 30 bp, Artificial Sequence
  Description of Artificial Sequence: Synthetic almond; inner sequence
ggcatgcgatgaacgaggcatgctgcgtca

SEQ ID NO: 4883 - DNA, 30 bp, Artificial Sequence
  Description of Artificial Sequence: Synthetic almond; inner sequence
cgcaccgtcaagcgggacggcactttggtg

SEQ ID NO: 4884 - DNA, 30 bp, Artificial Sequence
  Description of Artificial Sequence: Synthetic almond; inner sequence
gtcgtgagctggaaggagagtgggtacgta

SEQ ID NO: 4885 - DNA, 30 bp, Artificial Sequence; identical to SEQ ID NO: 983
  Description of Artificial Sequence: Synthetic almond; inner sequence

SEQ ID NO: 4886 - DNA, 30 bp, Artificial Sequence
  Description of Artificial Sequence: Synthetic almond; inner sequence
ggccgtaacgcaccaggatgcactgtgtca

SEQ ID NO: 4887 - DNA, 30 bp, Artificial Sequence
  Description of Artificial Sequence: Synthetic almond; inner sequence
tggccgatcgaccctatcgagtgcagcatg

SEQ ID NO: 4888 - DNA, 30 bp, Artificial Sequence
  Description of Artificial Sequence: Synthetic almond; inner sequence
ggcatgcacgcacctacacgtgggtacgga

SEQ ID NO: 4889 - DNA, 30 bp, Artificial Sequence
  Description of Artificial Sequence: Synthetic almond; inner sequence
ggccacacgctgccctaaagtgttcgtgta

SEQ ID NO: 4890 - DNA, 30 bp, Artificial Sequence
  Description of Artificial Sequence: Synthetic almond; inner sequence
gcacgactcgaaccctatcatgaggccatg

SEQ ID NO: 4891 - DNA, 30 bp, Artificial Sequence; identical to SEQ ID NO: 734
  Description of Artificial Sequence: Synthetic almond; inner sequence

SEQ ID NO: 4892 - DNA, 30 bp, Artificial Sequence; identical to SEQ ID NO: 837
  Description of Artificial Sequence: Synthetic almond; inner sequence

SEQ ID NO: 4893 - DNA, 30 bp, Artificial Sequence
  Description of Artificial Sequence: Synthetic almond; inner sequence
ccgtagcgacatcaagcggcggcgtgcgtg

SEQ ID NO: 4894 - DNA, 30 bp, Artificial Sequence
  Description of Artificial Sequence: Synthetic almond; inner sequence
cgaccgtacggaaggggagtggccgtcacg

SEQ ID NO: 4895 - DNA, 30 bp, Artificial Sequence; identical to SEQ ID NO: 984
  Description of Artificial Sequence: Synthetic almond; inner sequence

SEQ ID NO: 4896 - DNA, 30 bp, Artificial Sequence; identical to SEQ ID NO: 421
  Description of Artificial Sequence: Synthetic almond; inner sequence

SEQ ID NO: 4897 - DNA, 30 bp, Artificial Sequence; identical to SEQ ID NO: 910
  Description of Artificial Sequence: Synthetic almond; inner sequence

SEQ ID NO: 4898 - DNA, 30 bp, Artificial Sequence
  Description of Artificial Sequence: Synthetic almond; inner sequence
ccgtagcgacatcaagtggtggtgtgcgtg

SEQ ID NO: 4899 - DNA, 30 bp, Artificial Sequence; identical to SEQ ID NO: 474
  Description of Artificial Sequence: Synthetic almond; inner sequence

SEQ ID NO: 4900 - DNA, 30 bp, Artificial Sequence; identical to SEQ ID NO: 702
  Description of Artificial Sequence: Synthetic almond; inner sequence

SEQ ID NO: 4901 - DNA, 30 bp, Artificial Sequence
  Description of Artificial Sequence: Synthetic almond; inner sequence
ccatcagtggacgcgtaactgacatgggca

SEQ ID NO: 4902 - DNA, 30 bp, Artificial Sequence; identical to SEQ ID NO: 452
  Description of Artificial Sequence: Synthetic almond; inner sequence

SEQ ID NO: 4903 - DNA, 30 bp, Artificial Sequence; identical to SEQ ID NO: 917
  Description of Artificial Sequence: Synthetic almond; inner sequence

SEQ ID NO: 4904 - DNA, 30 bp, Artificial Sequence
  Description of Artificial Sequence: Synthetic almond; inner sequence
cgacccgactaagcgtggtgcacactgtgt

SEQ ID NO: 4905 - DNA, 30 bp, Artificial Sequence
  Description of Artificial Sequence: Synthetic almond; inner sequence
ggacgcgacgtccctgagagtgtgcaggta

SEQ ID NO: 4906 - DNA, 30 bp, Artificial Sequence
  Description of Artificial Sequence: Synthetic almond; inner sequence
cgatcgcagtgagagccgtccgtagccacg

SEQ ID NO: 4907 - DNA, 30 bp, Artificial Sequence
  Description of Artificial Sequence: Synthetic almond; inner sequence
catgtccgtgcgttcccgttgagcgcgtca

SEQ ID NO: 4908 - DNA, 30 bp, Artificial Sequence; identical to SEQ ID NO: 960
  Description of Artificial Sequence: Synthetic almond; inner sequence

SEQ ID NO: 4909 - DNA, 30 bp, Artificial Sequence
  Description of Artificial Sequence: Synthetic almond; inner sequence
acatggcagtagcgcgcactaggtaggaca

SEQ ID NO: 4910 - DNA, 30 bp, Artificial Sequence
  Description of Artificial Sequence: Synthetic almond; inner sequence
tggaccaagctgaacgtcaagcgcgccatg

SEQ ID NO: 4911 - DNA, 30 bp, Artificial Sequence
  Description of Artificial Sequence: Synthetic almond; inner sequence
ggacgcagcggaacgttcgagtggcacgta

SEQ ID NO: 4912 - DNA, 30 bp, Artificial Sequence
  Description of Artificial Sequence: Synthetic almond; inner sequence
acgtgacagccatgggtagcgcacggcaca

SEQ ID NO: 4913 - DNA, 30 bp, Artificial Sequence
  Description of Artificial Sequence: Synthetic almond; inner sequence
gtactgcgccatcccgtcatcatgtggaca

SEQ ID NO: 4914 - DNA, 30 bp, Artificial Sequence; identical to SEQ ID NO: 973
  Description of Artificial Sequence: Synthetic almond; inner sequence

SEQ ID NO: 4915 - DNA, 30 bp, Artificial Sequence
  Description of Artificial Sequence: Synthetic almond; inner sequence
agacgcaacgaaccgtatgcaacgtgcaca

SEQ ID NO: 4916 - DNA, 30 bp, Artificial Sequence
  Description of Artificial Sequence: Synthetic almond; inner sequence
ggcacaaacggaccgacaagagcgcatgga

SEQ ID NO: 4917 - DNA, 30 bp, Artificial Sequence; identical to SEQ ID NO: 824
  Description of Artificial Sequence: Synthetic almond; inner sequence

SEQ ID NO: 4918 - DNA, 30 bp, Artificial Sequence
  Description of Artificial Sequence: Synthetic almond; inner sequence
gcacgactcgtaccctatcatgaggccatg

SEQ ID NO: 4919 - DNA, 30 bp, Artificial Sequence
  Description of Artificial Sequence: Synthetic almond; inner sequence
cacggcaaggacgatcaggtgggactgcgt

SEQ ID NO: 4920 - DNA, 30 bp, Artificial Sequence; identical to SEQ ID NO: 792
  Description of Artificial Sequence: Synthetic almond; inner sequence

SEQ ID NO: 4921 - DNA, 30 bp, Artificial Sequence
  Description of Artificial Sequence: Synthetic almond; inner sequence
ggcacaaacggaccgacaagtgcgcattga

SEQ ID NO: 4922 - DNA, 30 bp, Artificial Sequence
  Description of Artificial Sequence: Synthetic almond; inner sequence
cacgcgcagggaaggcaacctgtggctgca

SEQ ID NO: 4923 - DNA, 30 bp, Artificial Sequence; identical to SEQ ID NO: 295
  Description of Artificial Sequence: Synthetic almond; inner sequence

SEQ ID NO: 4924 - DNA, 30 bp, Artificial Sequence
  Description of Artificial Sequence: Synthetic almond; inner sequence
ggcatgcgatgaacgaggcatgatgcgtta

SEQ ID NO: 4925 - DNA, 30 bp, Artificial Sequence
  Description of Artificial Sequence: Synthetic almond; inner sequence
ggcatgatcgaacgggagagtgcgtcggta

SEQ ID NO: 4926 - DNA, 30 bp, Artificial Sequence
  Description of Artificial Sequence: Synthetic almond; inner sequence
ccgcgaggaacagcaggcctacgcggcacg

SEQ ID NO: 4927 - DNA, 30 bp, Artificial Sequence
  Description of Artificial Sequence: Synthetic almond; inner sequence
cgaccgaacgcagcaatacgtgcgccacgt

SEQ ID NO: 4928 - DNA, 30 bp, Artificial Sequence; identical to SEQ ID NO: 589
  Description of Artificial Sequence: Synthetic almond; inner sequence

SEQ ID NO: 4929 - DNA, 30 bp, Artificial Sequence; identical to SEQ ID NO: 829
  Description of Artificial Sequence: Synthetic almond; inner sequence

SEQ ID NO: 4930 - DNA, 30 bp, Artificial Sequence
  Description of Artificial Sequence: Synthetic almond; inner sequence
gagttggcgaaccgagatgacgtggccatg

SEQ ID NO: 4931 - DNA, 30 bp, Artificial Sequence
  Description of Artificial Sequence: Synthetic almond; inner sequence
gcacgtcacgcacaagcaggccatgtggca

SEQ ID NO: 4932 - DNA, 30 bp, Artificial Sequence; identical to SEQ ID NO: 488
  Description of Artificial Sequence: Synthetic almond; inner sequence

SEQ ID NO: 4933 - DNA, 30 bp, Artificial Sequence
  Description of Artificial Sequence: Synthetic almond; inner sequence
gcccgactcgcaccctatcatgaggccatg

SEQ ID NO: 4934 - DNA, 30 bp, Artificial Sequence; identical to SEQ ID NO: 646
  Description of Artificial Sequence: Synthetic almond; inner sequence

SEQ ID NO: 4935 - DNA, 30 bp, Artificial Sequence
  Description of Artificial Sequence: Synthetic almond; inner sequence
gtacgtgcgacatccctcaagtgcggtgta

SEQ ID NO: 4936 - DNA, 30 bp, Artificial Sequence; identical to SEQ ID NO: 265
  Description of Artificial Sequence: Synthetic almond; inner sequence

SEQ ID NO: 4937 - DNA, 30 bp, Artificial Sequence
  Description of Artificial Sequence: Synthetic almond; inner sequence
catgtgacgacgatgcccacgcgctggaca

SEQ ID NO: 4938 - DNA, 30 bp, Artificial Sequence
  Description of Artificial Sequence: Synthetic almond; inner sequence
gccattccgcatcctacacgtgggcacgta

SEQ ID NO: 4939 - DNA, 30 bp, Artificial Sequence
  Description of Artificial Sequence: Synthetic almond; inner sequence
ggccacgctcgtaccggtcagtgcggcatg

SEQ ID NO: 4940 - DNA, 30 bp, Artificial Sequence
  Description of Artificial Sequence: Synthetic almond; inner sequence
ggcatgcgatgaacgcggcatgatgcgtca

SEQ ID NO: 4941 - DNA, 30 bp, Artificial Sequence
  Description of Artificial Sequence: Synthetic almond; inner sequence
gcgatgcgacagagatccgtcacgccccgt

SEQ ID NO: 4942 - DNA, 30 bp, Artificial Sequence
  Description of Artificial Sequence: Synthetic almond; inner sequence
cacggcaggaagcggacggcactcggcacg

SEQ ID NO: 4943 - DNA, 30 bp, Artificial Sequence
  Description of Artificial Sequence: Synthetic almond; inner sequence
ccacgactcgcaccctatcatgaggccatg

SEQ ID NO: 4944 - DNA, 30 bp, Artificial Sequence
  Description of Artificial Sequence: Synthetic almond; inner sequence
tgcgtgcatacgtatggcattctcggcgca

SEQ ID NO: 4945 - DNA, 30 bp, Artificial Sequence
  Description of Artificial Sequence: Synthetic almond; inner sequence
ggccaacgatgcccaaccaagtgcggtatg

SEQ ID NO: 4946 - DNA, 30 bp, Artificial Sequence
  Description of Artificial Sequence: Synthetic almond; inner sequence
ccgtaacgacatcaagcggtggtgtgcgtg

SEQ ID NO: 4947 - DNA, 30 bp, Artificial Sequence
  Description of Artificial Sequence: Synthetic almond; inner sequence
tcgatggcggcacgaggactgctctgcacg

SEQ ID NO: 4948 - DNA, 30 bp, Artificial Sequence
  Description of Artificial Sequence: Synthetic almond; inner sequence
cgcaccgtcgatacgtcatgcacgctgcca

SEQ ID NO: 4949 - DNA, 30 bp, Artificial Sequence
  Description of Artificial Sequence: Synthetic almond; inner sequence
gcgatgagcatcggacgtacggtgtgtgtc

SEQ ID NO: 4950 - DNA, 30 bp, Artificial Sequence; identical to SEQ ID NO: 554
  Description of Artificial Sequence: Synthetic almond; inner sequence

SEQ ID NO: 4951 - DNA, 30 bp, Artificial Sequence
  Description of Artificial Sequence: Synthetic almond; inner sequence
ccacgggtgcagcaggacgtactctgcacg

SEQ ID NO: 4952 - DNA, 30 bp, Artificial Sequence; identical to SEQ ID NO: 835
  Description of Artificial Sequence: Synthetic almond; inner sequence

SEQ ID NO: 4953 - DNA, 30 bp, Artificial Sequence
  Description of Artificial Sequence: Synthetic almond; inner sequence
ccgcacgaagcccaaccgtcaatggccatg

SEQ ID NO: 4954 - DNA, 30 bp, Artificial Sequence
  Description of Artificial Sequence: Synthetic almond; inner sequence
ggcacagcatcgtacgtactggttgccgta

SEQ ID NO: 4955 - DNA, 30 bp, Artificial Sequence
  Description of Artificial Sequence: Synthetic almond; inner sequence
catgacggtgacggcacatgcgacgcgaca

SEQ ID NO: 4956 - DNA, 30 bp, Artificial Sequence
  Description of Artificial Sequence: Synthetic almond; inner sequence
catgtgcccgatacgaacgacatgtgtgca

SEQ ID NO: 4957 - DNA, 30 bp, Artificial Sequence; identical to SEQ ID NO: 874
  Description of Artificial Sequence: Synthetic almond; inner sequence

SEQ ID NO: 4958 - DNA, 30 bp, Artificial Sequence
  Description of Artificial Sequence: Synthetic almond; inner sequence
catgcgatgacccgtagatcacgtggcgtg

SEQ ID NO: 4959 - DNA, 30 bp, Artificial Sequence
  Description of Artificial Sequence: Synthetic almond; inner sequence
catgtgcataggaccgcaacgagacgtgca

SEQ ID NO: 4960 - DNA, 30 bp, Artificial Sequence
  Description of Artificial Sequence: Synthetic almond; inner sequence
gtacgcatcgtcccgtcatgtggttccgca

SEQ ID NO: 4961 - DNA, 30 bp, Artificial Sequence
  Description of Artificial Sequence: Synthetic almond; inner sequence
cgtgacggcgagagcacaacggcatgacgt

SEQ ID NO: 4962 - DNA, 30 bp, Artificial Sequence
  Description of Artificial Sequence: Synthetic almond; inner sequence
cctgatgcggcacgtcctcgtgatcatgca

SEQ ID NO: 4963 - DNA, 30 bp, Artificial Sequence
  Description of Artificial Sequence: Synthetic almond; inner sequence
cgaccggcggagaacggtgtggcatgcgtg

SEQ ID NO: 4964 - DNA, 30 bp, Artificial Sequence; identical to SEQ ID NO: 902
  Description of Artificial Sequence: Synthetic almond; inner sequence

SEQ ID NO: 4965 - DNA, 30 bp, Artificial Sequence; identical to SEQ ID NO: 339
  Description of Artificial Sequence: Synthetic almond; inner sequence

SEQ ID NO: 4966 - DNA, 30 bp, Artificial Sequence
  Description of Artificial Sequence: Synthetic almond; inner sequence
ggccgaacggacctggcttgcttatgcgcg

SEQ ID NO: 4967 - DNA, 30 bp, Artificial Sequence
  Description of Artificial Sequence: Synthetic almond; inner sequence
tggccgatcgacactatcaagtgcagcatg

SEQ ID NO: 4968 - DNA, 29 bp, Artificial Sequence
  Description of Artificial Sequence: Synthetic almond; inner sequence
gtacgccgatgccctcatgtggccgtgga

SEQ ID NO: 4969 - DNA, 30 bp, Artificial Sequence
  Description of Artificial Sequence: Synthetic almond; inner sequence
ggcatggtctgaccgtgagtgcgtcgggta

SEQ ID NO: 4970 - DNA, 30 bp, Artificial Sequence; identical to SEQ ID NO: 384
  Description of Artificial Sequence: Synthetic almond; inner sequence

SEQ ID NO: 4971 - DNA, 30 bp, Artificial Sequence
  Description of Artificial Sequence: Synthetic almond; inner sequence
cgtgccgcaaagcaaggtcagcacggtccg

SEQ ID NO: 4972 - DNA, 30 bp, Artificial Sequence; identical to SEQ ID NO: 644
  Description of Artificial Sequence: Synthetic almond; inner sequence

SEQ ID NO: 4973 - DNA, 30 bp, Artificial Sequence; identical to SEQ ID NO: 699
  Description of Artificial Sequence: Synthetic almond; inner sequence

SEQ ID NO: 4974 - DNA, 30 bp, Artificial Sequence; identical to SEQ ID NO: 825
  Description of Artificial Sequence: Synthetic almond; inner sequence

SEQ ID NO: 4975 - DNA, 30 bp, Artificial Sequence
  Description of Artificial Sequence: Synthetic almond; inner sequence
cgtatggcctggatgcacgactttgcgtca

SEQ ID NO: 4976 - DNA, 30 bp, Artificial Sequence
  Description of Artificial Sequence: Synthetic almond; inner sequence
cgcgacggaagtggagatgcagtgtgcaca

SEQ ID NO: 4977 - DNA, 30 bp, Artificial Sequence
  Description of Artificial Sequence: Synthetic almond; inner sequence
ggcacaaacggaccgacaagggcgcatgga

SEQ ID NO: 4978 - DNA, 30 bp, Artificial Sequence
  Description of Artificial Sequence: Synthetic almond; inner sequence
ccatcgtgacggacgagtcggaccttgcca

SEQ ID NO: 4979 - DNA, 30 bp, Artificial Sequence
  Description of Artificial Sequence: Synthetic almond; inner sequence
cgacaccgtcaagtgcagtgtgcgatggcg

SEQ ID NO: 4980 - DNA, 30 bp, Artificial Sequence; identical to SEQ ID NO: 410
  Description of Artificial Sequence: Synthetic almond; inner sequence

SEQ ID NO: 4981 - DNA, 30 bp, Artificial Sequence
  Description of Artificial Sequence: Synthetic almond; inner sequence
gcccacctcgaccctatcaacgtgctcatg

SEQ ID NO: 4982 - DNA, 30 bp, Artificial Sequence
  Description of Artificial Sequence: Synthetic almond; inner sequence
ggccgagcgaacctagcatgtgggatcgta

SEQ ID NO: 4983 - DNA, 30 bp, Artificial Sequence; identical to SEQ ID NO: 404
  Description of Artificial Sequence: Synthetic almond; inner sequence

SEQ ID NO: 4984 - DNA, 30 bp, Artificial Sequence
  Description of Artificial Sequence: Synthetic almond; inner sequence
cggaccgtcaagcgggaaggcactttggtg

SEQ ID NO: 4985 - DNA, 30 bp, Artificial Sequence
  Description of Artificial Sequence: Synthetic almond; inner sequence
ggcctgcacggtaacggtggacgcgtcgtg

SEQ ID NO: 4986 - DNA, 30 bp, Artificial Sequence; identical to SEQ ID NO: 959
  Description of Artificial Sequence: Synthetic almond; inner sequence

SEQ ID NO: 4987 - DNA, 30 bp, Artificial Sequence
  Description of Artificial Sequence: Synthetic almond; inner sequence
gcaagactcgcaccctatcatgaggccatg

SEQ ID NO: 4988 - DNA, 30 bp, Artificial Sequence
  Description of Artificial Sequence: Synthetic almond; inner sequence
gcacgactcgcaccatatcatgaggccatg

SEQ ID NO: 4989 - DNA, 30 bp, Artificial Sequence; identical to SEQ ID NO: 263
  Description of Artificial Sequence: Synthetic almond; inner sequence

SEQ ID NO: 4990 - DNA, 31 bp, Artificial Sequence; identical to SEQ ID NO: 652
  Description of Artificial Sequence: Synthetic almond; inner sequence

SEQ ID NO: 4991 - DNA, 30 bp, Artificial Sequence
  Description of Artificial Sequence: Synthetic almond; inner sequence
gcatcagcagactatcggacgagctgcacg

SEQ ID NO: 4992 - DNA, 30 bp, Artificial Sequence
  Description of Artificial Sequence: Synthetic almond; inner sequence
cgacccaagtgcgaaatgtgcgagtgcgcc

SEQ ID NO: 4993 - DNA, 30 bp, Artificial Sequence; identical to SEQ ID NO: 260
  Description of Artificial Sequence: Synthetic almond; inner sequence

SEQ ID NO: 4994 - DNA, 30 bp, Artificial Sequence
  Description of Artificial Sequence: Synthetic almond; inner sequence
cgtaccgctgcggaacaaggtgcgtgcagg

SEQ ID NO: 4995 - DNA, 30 bp, Artificial Sequence
  Description of Artificial Sequence: Synthetic almond; inner sequence
ggccacggacgtgcatcatgccgctgcgcc

SEQ ID NO: 4996 - DNA, 30 bp, Artificial Sequence; identical to SEQ ID NO: 849
  Description of Artificial Sequence: Synthetic almond; inner sequence

SEQ ID NO: 4997 - DNA, 30 bp, Artificial Sequence
  Description of Artificial Sequence: Synthetic almond; inner sequence
gtcatgccatcccttcgagtgtgacaggga

SEQ ID NO: 4998 - DNA, 30 bp, Artificial Sequence
  Description of Artificial Sequence: Synthetic almond; inner sequence
ggcacaaacggaccgacaagtgcgaatgga

SEQ ID NO: 4999 - DNA, 30 bp, Artificial Sequence
  Description of Artificial Sequence: Synthetic almond; inner sequence
gtgcagaacgcgccgcaagtgtgttaggta

SEQ ID NO: 5000 - DNA, 30 bp, Artificial Sequence
  Description of Artificial Sequence: Synthetic almond; inner sequence
ggcatgcgatgaacgaggcatgatgcttca

SEQ ID NO: 5001 - DNA, 30 bp, Artificial Sequence
  Description of Artificial Sequence: Synthetic almond; inner sequence
ccgcacgcagccctatcagtggtgcatgca

SEQ ID NO: 5002 - DNA, 30 bp, Artificial Sequence
  Description of Artificial Sequence: Synthetic almond; inner sequence
gtcatgcacgaacactatcatggcgacatg

SEQ ID NO: 5003 - DNA, 53 bp, Artificial Sequence; identical to SEQ ID NO: 1004
  Description of Artificial Sequence: Synthetic almond; 5' sequence and inner sequence

SEQ ID NO: 5004 - DNA, 53 bp, Artificial Sequence; identical to SEQ ID NO: 1003
  Description of Artificial Sequence: Synthetic almond; 5' sequence and inner sequence

SEQ ID NO: 5005 - DNA, 53 bp, Artificial Sequence; identical to SEQ ID NO: 1008
  Description of Artificial Sequence: Synthetic almond; 5' sequence and inner sequence

SEQ ID NO: 5006 - DNA, 53 bp, Artificial Sequence; identical to SEQ ID NO: 1010
  Description of Artificial Sequence: Synthetic almond; 5' sequence and inner sequence

SEQ ID NO: 5007 - DNA, 53 bp, Artificial Sequence; identical to SEQ ID NO: 1005
  Description of Artificial Sequence: Synthetic almond; 5' sequence and inner sequence

SEQ ID NO: 5008 - DNA, 53 bp, Artificial Sequence; identical to SEQ ID NO: 1012
  Description of Artificial Sequence: Synthetic almond; 5' sequence and inner sequence

SEQ ID NO: 5009 - DNA, 53 bp, Artificial Sequence; identical to SEQ ID NO: 1007
  Description of Artificial Sequence: Synthetic almond; 5' sequence and inner sequence

SEQ ID NO: 5010 - DNA, 53 bp, Artificial Sequence; identical to SEQ ID NO: 1006
  Description of Artificial Sequence: Synthetic almond; 5' sequence and inner sequence

SEQ ID NO: 5011 - DNA, 53 bp, Artificial Sequence; identical to SEQ ID NO: 1013
  Description of Artificial Sequence: Synthetic almond; 5' sequence and inner sequence

SEQ ID NO: 5012 - DNA, 53 bp, Artificial Sequence; identical to SEQ ID NO: 1023
  Description of Artificial Sequence: Synthetic almond; 5' sequence and inner sequence

SEQ ID NO: 5013 - DNA, 53 bp, Artificial Sequence; identical to SEQ ID NO: 1009
  Description of Artificial Sequence: Synthetic almond; 5' sequence and inner sequence

SEQ ID NO: 5014 - DNA, 53 bp, Artificial Sequence; identical to SEQ ID NO: 1016
  Description of Artificial Sequence: Synthetic almond; 5' sequence and inner sequence

SEQ ID NO: 5015 - DNA, 53 bp, Artificial Sequence; identical to SEQ ID NO: 1049
  Description of Artificial Sequence: Synthetic almond; 5' sequence and inner sequence

SEQ ID NO: 5016 - DNA, 53 bp, Artificial Sequence; identical to SEQ ID NO: 1011
  Description of Artificial Sequence: Synthetic almond; 5' sequence and inner sequence

SEQ ID NO: 5017 - DNA, 53 bp, Artificial Sequence; identical to SEQ ID NO: 1018
  Description of Artificial Sequence: Synthetic almond; 5' sequence and inner sequence

SEQ ID NO: 5018 - DNA, 53 bp, Artificial Sequence; identical to SEQ ID NO: 1022
  Description of Artificial Sequence: Synthetic almond; 5' sequence and inner sequence

SEQ ID NO: 5019 - DNA, 53 bp, Artificial Sequence; identical to SEQ ID NO: 1037
  Description of Artificial Sequence: Synthetic almond; 5' sequence and inner sequence

SEQ ID NO: 5020 - DNA, 53 bp, Artificial Sequence; identical to SEQ ID NO: 1017
  Description of Artificial Sequence: Synthetic almond; 5' sequence and inner sequence

SEQ ID NO: 5021 - DNA, 53 bp, Artificial Sequence; identical to SEQ ID NO: 1046
  Description of Artificial Sequence: Synthetic almond; 5' sequence and inner sequence

SEQ ID NO: 5022 - DNA, 53 bp, Artificial Sequence; identical to SEQ ID NO: 1034
  Description of Artificial Sequence: Synthetic almond; 5' sequence and inner sequence

SEQ ID NO: 5023 - DNA, 53 bp, Artificial Sequence; identical to SEQ ID NO: 1030
  Description of Artificial Sequence: Synthetic almond; 5' sequence and inner sequence

SEQ ID NO: 5024 - DNA, 53 bp, Artificial Sequence; identical to SEQ ID NO: 1020
  Description of Artificial Sequence: Synthetic almond; 5' sequence and inner sequence

SEQ ID NO: 5025 - DNA, 53 bp, Artificial Sequence; identical to SEQ ID NO: 1014
  Description of Artificial Sequence: Synthetic almond; 5' sequence and inner sequence

SEQ ID NO: 5026 - DNA, 53 bp, Artificial Sequence; identical to SEQ ID NO: 1036
  Description of Artificial Sequence: Synthetic almond; 5' sequence and inner sequence

SEQ ID NO: 5027 - DNA, 53 bp, Artificial Sequence; identical to SEQ ID NO: 1028
  Description of Artificial Sequence: Synthetic almond; 5' sequence and inner sequence

SEQ ID NO: 5028 - DNA, 53 bp, Artificial Sequence; identical to SEQ ID NO: 1025
  Description of Artificial Sequence: Synthetic almond; 5' sequence and inner sequence

SEQ ID NO: 5029 - DNA, 53 bp, Artificial Sequence; identical to SEQ ID NO: 1041
  Description of Artificial Sequence: Synthetic almond; 5' sequence and inner sequence

SEQ ID NO: 5030 - DNA, 52 bp, Artificial Sequence; identical to SEQ ID NO: 1070
  Description of Artificial Sequence: Synthetic almond; 5' sequence and inner sequence

SEQ ID NO: 5031 - DNA, 53 bp, Artificial Sequence; identical to SEQ ID NO: 1040
  Description of Artificial Sequence: Synthetic almond; 5' sequence and inner sequence

SEQ ID NO: 5032 - DNA, 53 bp, Artificial Sequence; identical to SEQ ID NO: 1033
  Description of Artificial Sequence: Synthetic almond; 5' sequence and inner sequence

SEQ ID NO: 5033 - DNA, 53 bp, Artificial Sequence; identical to SEQ ID NO: 1082
  Description of Artificial Sequence: Synthetic almond; 5' sequence and inner sequence

SEQ ID NO: 5034 - DNA, 53 bp, Artificial Sequence; identical to SEQ ID NO: 1088
  Description of Artificial Sequence: Synthetic almond; 5' sequence and inner sequence

SEQ ID NO: 5035 - DNA, 53 bp, Artificial Sequence; identical to SEQ ID NO: 1066
  Description of Artificial Sequence: Synthetic almond; 5' sequence and inner sequence

SEQ ID NO: 5036 - DNA, 53 bp, Artificial Sequence; identical to SEQ ID NO: 1035
  Description of Artificial Sequence: Synthetic almond; 5' sequence and inner sequence

SEQ ID NO: 5037 - DNA, 53 bp, Artificial Sequence; identical to SEQ ID NO: 1055
  Description of Artificial Sequence: Synthetic almond; 5' sequence and inner sequence

SEQ ID NO: 5038 - DNA, 53 bp, Artificial Sequence; identical to SEQ ID NO: 1064
  Description of Artificial Sequence: Synthetic almond; 5' sequence and inner sequence

SEQ ID NO: 5039 - DNA, 53 bp, Artificial Sequence; identical to SEQ ID NO: 1024
  Description of Artificial Sequence: Synthetic almond; 5' sequence and inner sequence

SEQ ID NO: 5040 - DNA, 53 bp, Artificial Sequence; identical to SEQ ID NO: 1039
  Description of Artificial Sequence: Synthetic almond; 5' sequence and inner sequence

SEQ ID NO: 5041 - DNA, 53 bp, Artificial Sequence; identical to SEQ ID NO: 1074
  Description of Artificial Sequence: Synthetic almond; 5' sequence and inner sequence

SEQ ID NO: 5042 - DNA, 53 bp, Artificial Sequence; identical to SEQ ID NO: 1032
  Description of Artificial Sequence: Synthetic almond; 5' sequence and inner sequence

SEQ ID NO: 5043 - DNA, 53 bp, Artificial Sequence; identical to SEQ ID NO: 1063
  Description of Artificial Sequence: Synthetic almond; 5' sequence and inner sequence

SEQ ID NO: 5044 - DNA, 53 bp, Artificial Sequence; identical to SEQ ID NO: 1061
  Description of Artificial Sequence: Synthetic almond; 5' sequence and inner sequence

SEQ ID NO: 5045 - DNA, 53 bp, Artificial Sequence; identical to SEQ ID NO: 1045
  Description of Artificial Sequence: Synthetic almond; 5' sequence and inner sequence

SEQ ID NO: 5046 - DNA, 53 bp, Artificial Sequence; identical to SEQ ID NO: 1021
  Description of Artificial Sequence: Synthetic almond; 5' sequence and inner sequence

SEQ ID NO: 5047 - DNA, 53 bp, Artificial Sequence; identical to SEQ ID NO: 1052
  Description of Artificial Sequence: Synthetic almond; 5' sequence and inner sequence

SEQ ID NO: 5048 - DNA, 53 bp, Artificial Sequence; identical to SEQ ID NO: 1044
  Description of Artificial Sequence: Synthetic almond; 5' sequence and inner sequence

SEQ ID NO: 5049 - DNA, 53 bp, Artificial Sequence; identical to SEQ ID NO: 1019
  Description of Artificial Sequence: Synthetic almond; 5' sequence and inner sequence

SEQ ID NO: 5050 - DNA, 53 bp, Artificial Sequence; identical to SEQ ID NO: 1015
  Description of Artificial Sequence: Synthetic almond; 5' sequence and inner sequence

SEQ ID NO: 5051 - DNA, 53 bp, Artificial Sequence; identical to SEQ ID NO: 1112
  Description of Artificial Sequence: Synthetic almond; 5' sequence and inner sequence

SEQ ID NO: 5052 - DNA, 53 bp, Artificial Sequence; identical to SEQ ID NO: 1108
  Description of Artificial Sequence: Synthetic almond; 5' sequence and inner sequence

SEQ ID NO: 5053 - DNA, 53 bp, Artificial Sequence; identical to SEQ ID NO: 1058
  Description of Artificial Sequence: Synthetic almond; 5' sequence and inner sequence

SEQ ID NO: 5054 - DNA, 53 bp, Artificial Sequence; identical to SEQ ID NO: 1131
  Description of Artificial Sequence: Synthetic almond; 5' sequence and inner sequence

SEQ ID NO: 5055 - DNA, 53 bp, Artificial Sequence; identical to SEQ ID NO: 1031
  Description of Artificial Sequence: Synthetic almond; 5' sequence and inner sequence

SEQ ID NO: 5056 - DNA, 53 bp, Artificial Sequence; identical to SEQ ID NO: 1029
  Description of Artificial Sequence: Synthetic almond; 5' sequence and inner sequence

SEQ ID NO: 5057 - DNA, 53 bp, Artificial Sequence; identical to SEQ ID NO: 1054
  Description of Artificial Sequence: Synthetic almond; 5' sequence and inner sequence

SEQ ID NO: 5058 - DNA, 53 bp, Artificial Sequence; identical to SEQ ID NO: 1080
  Description of Artificial Sequence: Synthetic almond; 5' sequence and inner sequence

SEQ ID NO: 5059 - DNA, 53 bp, Artificial Sequence; identical to SEQ ID NO: 1168
  Description of Artificial Sequence: Synthetic almond; 5' sequence and inner sequence

SEQ ID NO: 5060 - DNA, 53 bp, Artificial Sequence; identical to SEQ ID NO: 1567
  Description of Artificial Sequence: Synthetic almond; 5' sequence and inner sequence

SEQ ID NO: 5061 - DNA, 53 bp, Artificial Sequence; identical to SEQ ID NO: 1117
  Description of Artificial Sequence: Synthetic almond; 5' sequence and inner sequence

SEQ ID NO: 5062 - DNA, 53 bp, Artificial Sequence; identical to SEQ ID NO: 1078
  Description of Artificial Sequence: Synthetic almond; 5' sequence and inner sequence

SEQ ID NO: 5063 - DNA, 53 bp, Artificial Sequence; identical to SEQ ID NO: 1129
  Description of Artificial Sequence: Synthetic almond; 5' sequence and inner sequence

SEQ ID NO: 5064 - DNA, 53 bp, Artificial Sequence; identical to SEQ ID NO: 1048
  Description of Artificial Sequence: Synthetic almond; 5' sequence and inner sequence

SEQ ID NO: 5065 - DNA, 53 bp, Artificial Sequence; identical to SEQ ID NO: 1207
  Description of Artificial Sequence: Synthetic almond; 5' sequence and inner sequence

SEQ ID NO: 5066 - DNA, 53 bp, Artificial Sequence; identical to SEQ ID NO: 1133
  Description of Artificial Sequence: Synthetic almond; 5' sequence and inner sequence

SEQ ID NO: 5067 - DNA, 53 bp, Artificial Sequence; identical to SEQ ID NO: 1136
  Description of Artificial Sequence: Synthetic almond; 5' sequence and inner sequence

SEQ ID NO: 5068 - DNA, 53 bp, Artificial Sequence; identical to SEQ ID NO: 1097
  Description of Artificial Sequence: Synthetic almond; 5' sequence and inner sequence

SEQ ID NO: 5069 - DNA, 53 bp, Artificial Sequence; identical to SEQ ID NO: 1155
  Description of Artificial Sequence: Synthetic almond; 5' sequence and inner sequence

SEQ ID NO: 5070 - DNA, 53 bp, Artificial Sequence; identical to SEQ ID NO: 1065
  Description of Artificial Sequence: Synthetic almond; 5' sequence and inner sequence

SEQ ID NO: 5071 - DNA, 53 bp, Artificial Sequence; identical to SEQ ID NO: 1183
  Description of Artificial Sequence: Synthetic almond; 5' sequence and inner sequence

SEQ ID NO: 5072 - DNA, 53 bp, Artificial Sequence; identical to SEQ ID NO: 1038
  Description of Artificial Sequence: Synthetic almond; 5' sequence and inner sequence

SEQ ID NO: 5073 - DNA, 52 bp, Artificial Sequence; identical to SEQ ID NO: 1193
  Description of Artificial Sequence: Synthetic almond; 5' sequence and inner sequence

SEQ ID NO: 5074 - DNA, 53 bp, Artificial Sequence; identical to SEQ ID NO: 1081
  Description of Artificial Sequence: Synthetic almond; 5' sequence and inner sequence

SEQ ID NO: 5075 - DNA, 53 bp, Artificial Sequence; identical to SEQ ID NO: 1126
  Description of Artificial Sequence: Synthetic almond; 5' sequence and inner sequence

SEQ ID NO: 5076 - DNA, 53 bp, Artificial Sequence; identical to SEQ ID NO: 1067
  Description of Artificial Sequence: Synthetic almond; 5' sequence and inner sequence

SEQ ID NO: 5077 - DNA, 53 bp, Artificial Sequence; identical to SEQ ID NO: 1142
  Description of Artificial Sequence: Synthetic almond; 5' sequence and inner sequence

SEQ ID NO: 5078 - DNA, 53 bp, Artificial Sequence; identical to SEQ ID NO: 1051
  Description of Artificial Sequence: Synthetic almond; 5' sequence and inner sequence

SEQ ID NO: 5079 - DNA, 53 bp, Artificial Sequence; identical to SEQ ID NO: 1185
  Description of Artificial Sequence: Synthetic almond; 5' sequence and inner sequence

SEQ ID NO: 5080 - DNA, 53 bp, Artificial Sequence; identical to SEQ ID NO: 1195
  Description of Artificial Sequence: Synthetic almond; 5' sequence and inner sequence

SEQ ID NO: 5081 - DNA, 53 bp, Artificial Sequence; identical to SEQ ID NO: 1079
  Description of Artificial Sequence: Synthetic almond; 5' sequence and inner sequence

SEQ ID NO: 5082 - DNA, 53 bp, Artificial Sequence; identical to SEQ ID NO: 1692
  Description of Artificial Sequence: Synthetic almond; 5' sequence and inner sequence

SEQ ID NO: 5083 - DNA, 53 bp, Artificial Sequence; identical to SEQ ID NO: 1103
  Description of Artificial Sequence: Synthetic almond; 5' sequence and inner sequence

SEQ ID NO: 5084 - DNA, 53 bp, Artificial Sequence; identical to SEQ ID NO: 1211
  Description of Artificial Sequence: Synthetic almond; 5' sequence and inner sequence

SEQ ID NO: 5085 - DNA, 53 bp, Artificial Sequence; identical to SEQ ID NO: 1093
  Description of Artificial Sequence: Synthetic almond; 5' sequence and inner sequence

SEQ ID NO: 5086 - DNA, 53 bp, Artificial Sequence; identical to SEQ ID NO: 1092
  Description of Artificial Sequence: Synthetic almond; 5' sequence and inner sequence

SEQ ID NO: 5087 - DNA, 53 bp, Artificial Sequence; identical to SEQ ID NO: 1047
  Description of Artificial Sequence: Synthetic almond; 5' sequence and inner sequence

SEQ ID NO: 5088 - DNA, 53 bp, Artificial Sequence; identical to SEQ ID NO: 1050
  Description of Artificial Sequence: Synthetic almond; 5' sequence and inner sequence

SEQ ID NO: 5089 - DNA, 53 bp, Artificial Sequence; identical to SEQ ID NO: 1120
  Description of Artificial Sequence: Synthetic almond; 5' sequence and inner sequence

SEQ ID NO: 5090 - DNA, 53 bp, Artificial Sequence; identical to SEQ ID NO: 1026
  Description of Artificial Sequence: Synthetic almond; 5' sequence and inner sequence

SEQ ID NO: 5091 - DNA, 53 bp, Artificial Sequence; identical to SEQ ID NO: 1430
  Description of Artificial Sequence: Synthetic almond; 5' sequence and inner sequence

SEQ ID NO: 5092 - DNA, 53 bp, Artificial Sequence; identical to SEQ ID NO: 1229
  Description of Artificial Sequence: Synthetic almond; 5' sequence and inner sequence

SEQ ID NO: 5093 - DNA, 53 bp, Artificial Sequence; identical to SEQ ID NO: 1154
  Description of Artificial Sequence: Synthetic almond; 5' sequence and inner sequence

SEQ ID NO: 5094 - DNA, 53 bp, Artificial Sequence; identical to SEQ ID NO: 1056
  Description of Artificial Sequence: Synthetic almond; 5' sequence and inner sequence

SEQ ID NO: 5095 - DNA, 53 bp, Artificial Sequence; identical to SEQ ID NO: 1083
  Description of Artificial Sequence: Synthetic almond; 5' sequence and inner sequence

SEQ ID NO: 5096 - DNA, 53 bp, Artificial Sequence; identical to SEQ ID NO: 1247
  Description of Artificial Sequence: Synthetic almond; 5' sequence and inner sequence

SEQ ID NO: 5097 - DNA, 53 bp, Artificial Sequence; identical to SEQ ID NO: 1257
  Description of Artificial Sequence: Synthetic almond; 5' sequence and inner sequence

SEQ ID NO: 5098 - DNA, 53 bp, Artificial Sequence; identical to SEQ ID NO: 1287
  Description of Artificial Sequence: Synthetic almond; 5' sequence and inner sequence

SEQ ID NO: 5099 - DNA, 53 bp, Artificial Sequence; identical to SEQ ID NO: 1255
  Description of Artificial Sequence: Synthetic almond; 5' sequence and inner sequence

SEQ ID NO: 5100 - DNA, 53 bp, Artificial Sequence; identical to SEQ ID NO: 1059
  Description of Artificial Sequence: Synthetic almond; 5' sequence and inner sequence

SEQ ID NO: 5101 - DNA, 53 bp, Artificial Sequence; identical to SEQ ID NO: 1288
  Description of Artificial Sequence: Synthetic almond; 5' sequence and inner sequence

SEQ ID NO: 5102 - DNA, 53 bp, Artificial Sequence; identical to SEQ ID NO: 1091
  Description of Artificial Sequence: Synthetic almond; 5' sequence and inner sequence

SEQ ID NO: 5103 - DNA, 53 bp, Artificial Sequence; identical to SEQ ID NO: 1077
  Description of Artificial Sequence: Synthetic almond; 5' sequence and inner sequence

SEQ ID NO: 5104 - DNA, 53 bp, Artificial Sequence; identical to SEQ ID NO: 1151
  Description of Artificial Sequence: Synthetic almond; 5' sequence and inner sequence

SEQ ID NO: 5105 - DNA, 53 bp, Artificial Sequence; identical to SEQ ID NO: 1354
  Description of Artificial Sequence: Synthetic almond; 5' sequence and inner sequence

SEQ ID NO: 5106 - DNA, 53 bp, Artificial Sequence; identical to SEQ ID NO: 1233
  Description of Artificial Sequence: Synthetic almond; 5' sequence and inner sequence

SEQ ID NO: 5107 - DNA, 53 bp, Artificial Sequence; identical to SEQ ID NO: 1147
  Description of Artificial Sequence: Synthetic almond; 5' sequence and inner sequence

SEQ ID NO: 5108 - DNA, 53 bp, Artificial Sequence; identical to SEQ ID NO: 1161
  Description of Artificial Sequence: Synthetic almond; 5' sequence and inner sequence

SEQ ID NO: 5109 - DNA, 53 bp, Artificial Sequence; identical to SEQ ID NO: 1296
  Description of Artificial Sequence: Synthetic almond; 5' sequence and inner sequence

SEQ ID NO: 5110 - DNA, 53 bp, Artificial Sequence; identical to SEQ ID NO: 1355
  Description of Artificial Sequence: Synthetic almond; 5' sequence and inner sequence

SEQ ID NO: 5111 - DNA, 53 bp, Artificial Sequence; identical to SEQ ID NO: 1285
  Description of Artificial Sequence: Synthetic almond; 5' sequence and inner sequence

SEQ ID NO: 5112 - DNA, 53 bp, Artificial Sequence; identical to SEQ ID NO: 1122
  Description of Artificial Sequence: Synthetic almond; 5' sequence and inner sequence

SEQ ID NO: 5113 - DNA, 53 bp, Artificial Sequence; identical to SEQ ID NO: 1098
  Description of Artificial Sequence: Synthetic almond; 5' sequence and inner sequence

SEQ ID NO: 5114 - DNA, 53 bp, Artificial Sequence; identical to SEQ ID NO: 1203
  Description of Artificial Sequence: Synthetic almond; 5' sequence and inner sequence

SEQ ID NO: 5115 - DNA, 53 bp, Artificial Sequence; identical to SEQ ID NO: 1060
  Description of Artificial Sequence: Synthetic almond; 5' sequence and inner sequence

SEQ ID NO: 5116 - DNA, 53 bp, Artificial Sequence; identical to SEQ ID NO: 1144
  Description of Artificial Sequence: Synthetic almond; 5' sequence and inner sequence

SEQ ID NO: 5117 - DNA, 53 bp, Artificial Sequence; identical to SEQ ID NO: 1076
  Description of Artificial Sequence: Synthetic almond; 5' sequence and inner sequence

SEQ ID NO: 5118 - DNA, 53 bp, Artificial Sequence; identical to SEQ ID NO: 1027
  Description of Artificial Sequence: Synthetic almond; 5' sequence and inner sequence

SEQ ID NO: 5119 - DNA, 53 bp, Artificial Sequence; identical to SEQ ID NO: 1465
  Description of Artificial Sequence: Synthetic almond; 5' sequence and inner sequence

SEQ ID NO: 5120 - DNA, 53 bp, Artificial Sequence; identical to SEQ ID NO: 1237
  Description of Artificial Sequence: Synthetic almond; 5' sequence and inner sequence

SEQ ID NO: 5121 - DNA, 53 bp, Artificial Sequence; identical to SEQ ID NO: 1264
  Description of Artificial Sequence: Synthetic almond; 5' sequence and inner sequence

SEQ ID NO: 5122 - DNA, 53 bp, Artificial Sequence; identical to SEQ ID NO: 1198
  Description of Artificial Sequence: Synthetic almond; 5' sequence and inner sequence

SEQ ID NO: 5123 - DNA, 53 bp, Artificial Sequence; identical to SEQ ID NO: 1205
  Description of Artificial Sequence: Synthetic almond; 5' sequence and inner sequence

SEQ ID NO: 5124 - DNA, 53 bp, Artificial Sequence; identical to SEQ ID NO: 1068
  Description of Artificial Sequence: Synthetic almond; 5' sequence and inner sequence

SEQ ID NO: 5125 - DNA, 53 bp, Artificial Sequence; identical to SEQ ID NO: 1188
  Description of Artificial Sequence: Synthetic almond; 5' sequence and inner sequence

SEQ ID NO: 5126 - DNA, 53 bp, Artificial Sequence; identical to SEQ ID NO: 1179
  Description of Artificial Sequence: Synthetic almond; 5' sequence and inner sequence

SEQ ID NO: 5127 - DNA, 53 bp, Artificial Sequence; identical to SEQ ID NO: 1113
  Description of Artificial Sequence: Synthetic almond; 5' sequence and inner sequence

SEQ ID NO: 5128 - DNA, 53 bp, Artificial Sequence; identical to SEQ ID NO: 1094
  Description of Artificial Sequence: Synthetic almond; 5' sequence and inner sequence

SEQ ID NO: 5129 - DNA, 53 bp, Artificial Sequence; identical to SEQ ID NO: 1057
  Description of Artificial Sequence: Synthetic almond; 5' sequence and inner sequence

SEQ ID NO: 5130 - DNA, 53 bp, Artificial Sequence; identical to SEQ ID NO: 1282
  Description of Artificial Sequence: Synthetic almond; 5' sequence and inner sequence

SEQ ID NO: 5131 - DNA, 53 bp, Artificial Sequence; identical to SEQ ID NO: 1073
  Description of Artificial Sequence: Synthetic almond; 5' sequence and inner sequence

SEQ ID NO: 5132 - DNA, 53 bp, Artificial Sequence; identical to SEQ ID NO: 1145
  Description of Artificial Sequence: Synthetic almond; 5' sequence and inner sequence

SEQ ID NO: 5133 - DNA, 53 bp, Artificial Sequence; identical to SEQ ID NO: 1140
  Description of Artificial Sequence: Synthetic almond; 5' sequence and inner sequence

SEQ ID NO: 5134 - DNA, 53 bp, Artificial Sequence; identical to SEQ ID NO: 1691
  Description of Artificial Sequence: Synthetic almond; 5' sequence and inner sequence

SEQ ID NO: 5135 - DNA, 53 bp, Artificial Sequence; identical to SEQ ID NO: 1311
  Description of Artificial Sequence: Synthetic almond; 5' sequence and inner sequence

SEQ ID NO: 5136 - DNA, 53 bp, Artificial Sequence; identical to SEQ ID NO: 1522
  Description of Artificial Sequence: Synthetic almond; 5' sequence and inner sequence

SEQ ID NO: 5137 - DNA, 53 bp, Artificial Sequence; identical to SEQ ID NO: 1095
  Description of Artificial Sequence: Synthetic almond; 5' sequence and inner sequence

SEQ ID NO: 5138 - DNA, 53 bp, Artificial Sequence; identical to SEQ ID NO: 1283
  Description of Artificial Sequence: Synthetic almond; 5' sequence and inner sequence

SEQ ID NO: 5139 - DNA, 53 bp, Artificial Sequence; identical to SEQ ID NO: 1062
  Description of Artificial Sequence: Synthetic almond; 5' sequence and inner sequence

SEQ ID NO: 5140 - DNA, 51 bp, Artificial Sequence; identical to SEQ ID NO: 1148
  Description of Artificial Sequence: Synthetic almond; 5' sequence and inner sequence

SEQ ID NO: 5141 - DNA, 54 bp, Artificial Sequence; identical to SEQ ID NO: 1150
  Description of Artificial Sequence: Synthetic almond; 5' sequence and inner sequence

SEQ ID NO: 5142 - DNA, 53 bp, Artificial Sequence; identical to SEQ ID NO: 1360
  Description of Artificial Sequence: Synthetic almond; 5' sequence and inner sequence

SEQ ID NO: 5143 - DNA, 53 bp, Artificial Sequence; identical to SEQ ID NO: 1673
  Description of Artificial Sequence: Synthetic almond; 5' sequence and inner sequence

SEQ ID NO: 5144 - DNA, 53 bp, Artificial Sequence; identical to SEQ ID NO: 1329
  Description of Artificial Sequence: Synthetic almond; 5' sequence and inner sequence

SEQ ID NO: 5145 - DNA, 53 bp, Artificial Sequence; identical to SEQ ID NO: 1253
  Description of Artificial Sequence: Synthetic almond; 5' sequence and inner sequence

SEQ ID NO: 5146 - DNA, 53 bp, Artificial Sequence; identical to SEQ ID NO: 1293
  Description of Artificial Sequence: Synthetic almond; 5' sequence and inner sequence

SEQ ID NO: 5147 - DNA, 53 bp, Artificial Sequence; identical to SEQ ID NO: 1099
  Description of Artificial Sequence: Synthetic almond; 5' sequence and inner sequence

SEQ ID NO: 5148 - DNA, 53 bp, Artificial Sequence; identical to SEQ ID NO: 1115
  Description of Artificial Sequence: Synthetic almond; 5' sequence and inner sequence

SEQ ID NO: 5149 - DNA, 53 bp, Artificial Sequence; identical to SEQ ID NO: 1053
  Description of Artificial Sequence: Synthetic almond; 5' sequence and inner sequence

SEQ ID NO: 5150 - DNA, 53 bp, Artificial Sequence; identical to SEQ ID NO: 1042
  Description of Artificial Sequence: Synthetic almond; 5' sequence and inner sequence

SEQ ID NO: 5151 - DNA, 53 bp, Artificial Sequence; identical to SEQ ID NO: 1377
  Description of Artificial Sequence: Synthetic almond; 5' sequence and inner sequence

SEQ ID NO: 5152 - DNA, 53 bp, Artificial Sequence; identical to SEQ ID NO: 1362
  Description of Artificial Sequence: Synthetic almond; 5' sequence and inner sequence

SEQ ID NO: 5153 - DNA, 53 bp, Artificial Sequence; identical to SEQ ID NO: 1087
  Description of Artificial Sequence: Synthetic almond; 5' sequence and inner sequence

SEQ ID NO: 5154 - DNA, 53 bp, Artificial Sequence; identical to SEQ ID NO: 1290
  Description of Artificial Sequence: Synthetic almond; 5' sequence and inner sequence

SEQ ID NO: 5155 - DNA, 54 bp, Artificial Sequence; identical to SEQ ID NO: 1258
  Description of Artificial Sequence: Synthetic almond; 5' sequence and inner sequence

SEQ ID NO: 5156 - DNA, 53 bp, Artificial Sequence; identical to SEQ ID NO: 1654
  Description of Artificial Sequence: Synthetic almond; 5' sequence and inner sequence

SEQ ID NO: 5157 - DNA, 53 bp, Artificial Sequence; identical to SEQ ID NO: 1174
  Description of Artificial Sequence: Synthetic almond; 5' sequence and inner sequence

SEQ ID NO: 5158 - DNA, 53 bp, Artificial Sequence; identical to SEQ ID NO: 1118
  Description of Artificial Sequence: Synthetic almond; 5' sequence and inner sequence

SEQ ID NO: 5159 - DNA, 53 bp, Artificial Sequence; identical to SEQ ID NO: 1071
  Description of Artificial Sequence: Synthetic almond; 5' sequence and inner sequence

SEQ ID NO: 5160 - DNA, 53 bp, Artificial Sequence; identical to SEQ ID NO: 1347
  Description of Artificial Sequence: Synthetic almond; 5' sequence and inner sequence

SEQ ID NO: 5161 - DNA, 53 bp, Artificial Sequence; identical to SEQ ID NO: 1208
  Description of Artificial Sequence: Synthetic almond; 5' sequence and inner sequence

SEQ ID NO: 5162 - DNA, 53 bp, Artificial Sequence; identical to SEQ ID NO: 1096
  Description of Artificial Sequence: Synthetic almond; 5' sequence and inner sequence

SEQ ID NO: 5163 - DNA, 53 bp, Artificial Sequence; identical to SEQ ID NO: 1468
  Description of Artificial Sequence: Synthetic almond; 5' sequence and inner sequence

SEQ ID NO: 5164 - DNA, 53 bp, Artificial Sequence; identical to SEQ ID NO: 1245
  Description of Artificial Sequence: Synthetic almond; 5' sequence and inner sequence

SEQ ID NO: 5165 - DNA, 53 bp, Artificial Sequence; identical to SEQ ID NO: 1929
  Description of Artificial Sequence: Synthetic almond; 5' sequence and inner sequence

SEQ ID NO: 5166 - DNA, 53 bp, Artificial Sequence; identical to SEQ ID NO: 1470
  Description of Artificial Sequence: Synthetic almond; 5' sequence and inner sequence

SEQ ID NO: 5167 - DNA, 53 bp, Artificial Sequence; identical to SEQ ID NO: 1153
  Description of Artificial Sequence: Synthetic almond; 5' sequence and inner sequence

SEQ ID NO: 5168 - DNA, 53 bp, Artificial Sequence; identical to SEQ ID NO: 1321
  Description of Artificial Sequence: Synthetic almond; 5' sequence and inner sequence

SEQ ID NO: 5169 - DNA, 53 bp, Artificial Sequence; identical to SEQ ID NO: 1084
  Description of Artificial Sequence: Synthetic almond; 5' sequence and inner sequence

SEQ ID NO: 5170 - DNA, 53 bp, Artificial Sequence; identical to SEQ ID NO: 1663
  Description of Artificial Sequence: Synthetic almond; 5' sequence and inner sequence

SEQ ID NO: 5171 - DNA, 53 bp, Artificial Sequence; identical to SEQ ID NO: 1222
  Description of Artificial Sequence: Synthetic almond; 5' sequence and inner sequence

SEQ ID NO: 5172 - DNA, 53 bp, Artificial Sequence; identical to SEQ ID NO: 1438
  Description of Artificial Sequence: Synthetic almond; 5' sequence and inner sequence

SEQ ID NO: 5173 - DNA, 53 bp, Artificial Sequence; identical to SEQ ID NO: 1152
  Description of Artificial Sequence: Synthetic almond; 5' sequence and inner sequence

SEQ ID NO: 5174 - DNA, 53 bp, Artificial Sequence; identical to SEQ ID NO: 1106
  Description of Artificial Sequence: Synthetic almond; 5' sequence and inner sequence

SEQ ID NO: 5175 - DNA, 53 bp, Artificial Sequence; identical to SEQ ID NO: 1312
  Description of Artificial Sequence: Synthetic almond; 5' sequence and inner sequence

SEQ ID NO: 5176 - DNA, 53 bp, Artificial Sequence; identical to SEQ ID NO: 1234
  Description of Artificial Sequence: Synthetic almond; 5' sequence and inner sequence

SEQ ID NO: 5177 - DNA, 53 bp, Artificial Sequence; identical to SEQ ID NO: 1376
  Description of Artificial Sequence: Synthetic almond; 5' sequence and inner sequence

SEQ ID NO: 5178 - DNA, 53 bp, Artificial Sequence; identical to SEQ ID NO: 1111
  Description of Artificial Sequence: Synthetic almond; 5' sequence and inner sequence

SEQ ID NO: 5179 - DNA, 53 bp, Artificial Sequence; identical to SEQ ID NO: 1164
  Description of Artificial Sequence: Synthetic almond; 5' sequence and inner sequence

SEQ ID NO: 5180 - DNA, 53 bp, Artificial Sequence; identical to SEQ ID NO: 1069
  Description of Artificial Sequence: Synthetic almond; 5' sequence and inner sequence

SEQ ID NO: 5181 - DNA, 53 bp, Artificial Sequence; identical to SEQ ID NO: 1240
  Description of Artificial Sequence: Synthetic almond; 5' sequence and inner sequence

SEQ ID NO: 5182 - DNA, 53 bp, Artificial Sequence; identical to SEQ ID NO: 1149
  Description of Artificial Sequence: Synthetic almond; 5' sequence and inner sequence

SEQ ID NO: 5183 - DNA, 53 bp, Artificial Sequence; identical to SEQ ID NO: 1075
  Description of Artificial Sequence: Synthetic almond; 5' sequence and inner sequence

SEQ ID NO: 5184 - DNA, 53 bp, Artificial Sequence; identical to SEQ ID NO: 1201
  Description of Artificial Sequence: Synthetic almond; 5' sequence and inner sequence

SEQ ID NO: 5185 - DNA, 53 bp, Artificial Sequence; identical to SEQ ID NO: 1043
  Description of Artificial Sequence: Synthetic almond; 5' sequence and inner sequence

SEQ ID NO: 5186 - DNA, 53 bp, Artificial Sequence; identical to SEQ ID NO: 1406
  Description of Artificial Sequence: Synthetic almond; 5' sequence and inner sequence

SEQ ID NO: 5187 - DNA, 53 bp, Artificial Sequence; identical to SEQ ID NO: 1184
  Description of Artificial Sequence: Synthetic almond; 5' sequence and inner sequence

SEQ ID NO: 5188 - DNA, 53 bp, Artificial Sequence; identical to SEQ ID NO: 1308
  Description of Artificial Sequence: Synthetic almond; 5' sequence and inner sequence

SEQ ID NO: 5189 - DNA, 53 bp, Artificial Sequence; identical to SEQ ID NO: 1429
  Description of Artificial Sequence: Synthetic almond; 5' sequence and inner sequence

SEQ ID NO: 5190 - DNA, 53 bp, Artificial Sequence; identical to SEQ ID NO: 1527
  Description of Artificial Sequence: Synthetic almond; 5' sequence and inner sequence

SEQ ID NO: 5191 - DNA, 53 bp, Artificial Sequence; identical to SEQ ID NO: 1392
  Description of Artificial Sequence: Synthetic almond; 5' sequence and inner sequence

SEQ ID NO: 5192 - DNA, 53 bp, Artificial Sequence; identical to SEQ ID NO: 1132
  Description of Artificial Sequence: Synthetic almond; 5' sequence and inner sequence

SEQ ID NO: 5193 - DNA, 53 bp, Artificial Sequence; identical to SEQ ID NO: 1100
  Description of Artificial Sequence: Synthetic almond; 5' sequence and inner sequence

SEQ ID NO: 5194 - DNA, 53 bp, Artificial Sequence; identical to SEQ ID NO: 1729
  Description of Artificial Sequence: Synthetic almond; 5' sequence and inner sequence

SEQ ID NO: 5195 - DNA, 53 bp, Artificial Sequence; identical to SEQ ID NO: 1215
  Description of Artificial Sequence: Synthetic almond; 5' sequence and inner sequence

SEQ ID NO: 5196 - DNA, 53 bp, Artificial Sequence; identical to SEQ ID NO: 1178
  Description of Artificial Sequence: Synthetic almond; 5' sequence and inner sequence

SEQ ID NO: 5197 - DNA, 53 bp, Artificial Sequence; identical to SEQ ID NO: 1353
  Description of Artificial Sequence: Synthetic almond; 5' sequence and inner sequence

SEQ ID NO: 5198 - DNA, 53 bp, Artificial Sequence
  Description of Artificial Sequence: Synthetic almond; 5' sequence and inner sequence
tagggaagagaaggacatatgatgccgcagtgcgaatggtccgacgctgcacg

SEQ ID NO: 5199 - DNA, 53 bp, Artificial Sequence; identical to SEQ ID NO: 1105
  Description of Artificial Sequence: Synthetic almond; 5' sequence and inner sequence

SEQ ID NO: 5200 - DNA, 53 bp, Artificial Sequence; identical to SEQ ID NO: 1359
  Description of Artificial Sequence: Synthetic almond; 5' sequence and inner sequence

SEQ ID NO: 5201 - DNA, 53 bp, Artificial Sequence; identical to SEQ ID NO: 1116
  Description of Artificial Sequence: Synthetic almond; 5' sequence and inner sequence

SEQ ID NO: 5202 - DNA, 53 bp, Artificial Sequence; identical to SEQ ID NO: 1953
  Description of Artificial Sequence: Synthetic almond; 5' sequence and inner sequence

SEQ ID NO: 5203 - DNA, 53 bp, Artificial Sequence; identical to SEQ ID NO: 1645
  Description of Artificial Sequence: Synthetic almond; 5' sequence and inner sequence

SEQ ID NO: 5204 - DNA, 53 bp, Artificial Sequence; identical to SEQ ID NO: 1172
  Description of Artificial Sequence: Synthetic almond; 5' sequence and inner sequence

SEQ ID NO: 5205 - DNA, 53 bp, Artificial Sequence
  Description of Artificial Sequence: Synthetic almond; 5' sequence and inner sequence
tagggaagagaaggacatatgatagtgtggctgcctcgaccaacgtggccatg

SEQ ID NO: 5206 - DNA, 53 bp, Artificial Sequence; identical to SEQ ID NO: 1138
  Description of Artificial Sequence: Synthetic almond; 5' sequence and inner sequence

SEQ ID NO: 5207 - DNA, 53 bp, Artificial Sequence; identical to SEQ ID NO: 1436
  Description of Artificial Sequence: Synthetic almond; 5' sequence and inner sequence

SEQ ID NO: 5208 - DNA, 53 bp, Artificial Sequence; identical to SEQ ID NO: 1299
  Description of Artificial Sequence: Synthetic almond; 5' sequence and inner sequence

SEQ ID NO: 5209 - DNA, 53 bp, Artificial Sequence; identical to SEQ ID NO: 1579
  Description of Artificial Sequence: Synthetic almond; 5' sequence and inner sequence

SEQ ID NO: 5210 - DNA, 53 bp, Artificial Sequence; identical to SEQ ID NO: 1268
  Description of Artificial Sequence: Synthetic almond; 5' sequence and inner sequence

SEQ ID NO: 5211 - DNA, 53 bp, Artificial Sequence; identical to SEQ ID NO: 1159
  Description of Artificial Sequence: Synthetic almond; 5' sequence and inner sequence

SEQ ID NO: 5212 - DNA, 53 bp, Artificial Sequence; identical to SEQ ID NO: 1175
  Description of Artificial Sequence: Synthetic almond; 5' sequence and inner sequence

SEQ ID NO: 5213 - DNA, 53 bp, Artificial Sequence; identical to SEQ ID NO: 1125
  Description of Artificial Sequence: Synthetic almond; 5' sequence and inner sequence

SEQ ID NO: 5214 - DNA, 53 bp, Artificial Sequence; identical to SEQ ID NO: 1901
  Description of Artificial Sequence: Synthetic almond; 5' sequence and inner sequence

SEQ ID NO: 5215 - DNA, 53 bp, Artificial Sequence; identical to SEQ ID NO: 1270
  Description of Artificial Sequence: Synthetic almond; 5' sequence and inner sequence

SEQ ID NO: 5216 - DNA, 53 bp, Artificial Sequence; identical to SEQ ID NO: 1541
  Description of Artificial Sequence: Synthetic almond; 5' sequence and inner sequence

SEQ ID NO: 5217 - DNA, 53 bp, Artificial Sequence; identical to SEQ ID NO: 1230
  Description of Artificial Sequence: Synthetic almond; 5' sequence and inner sequence

SEQ ID NO: 5218 - DNA, 53 bp, Artificial Sequence; identical to SEQ ID NO: 1197
  Description of Artificial Sequence: Synthetic almond; 5' sequence and inner sequence

SEQ ID NO: 5219 - DNA, 53 bp, Artificial Sequence; identical to SEQ ID NO: 1364
  Description of Artificial Sequence: Synthetic almond; 5' sequence and inner sequence

SEQ ID NO: 5220 - DNA, 53 bp, Artificial Sequence; identical to SEQ ID NO: 1139
  Description of Artificial Sequence: Synthetic almond; 5' sequence and inner sequence

SEQ ID NO: 5221 - DNA, 53 bp, Artificial Sequence; identical to SEQ ID NO: 1123
  Description of Artificial Sequence: Synthetic almond; 5' sequence and inner sequence

SEQ ID NO: 5222 - DNA, 53 bp, Artificial Sequence; identical to SEQ ID NO: 1610
  Description of Artificial Sequence: Synthetic almond; 5' sequence and inner sequence

SEQ ID NO: 5223 - DNA, 53 bp, Artificial Sequence; identical to SEQ ID NO: 1570
  Description of Artificial Sequence: Synthetic almond; 5' sequence and inner sequence

SEQ ID NO: 5224 - DNA, 53 bp, Artificial Sequence; identical to SEQ ID NO: 1104
  Description of Artificial Sequence: Synthetic almond; 5' sequence and inner sequence

SEQ ID NO: 5225 - DNA, 53 bp, Artificial Sequence; identical to SEQ ID NO: 1086
  Description of Artificial Sequence: Synthetic almond; 5' sequence and inner sequence

SEQ ID NO: 5226 - DNA, 53 bp, Artificial Sequence; identical to SEQ ID NO: 1783
  Description of Artificial Sequence: Synthetic almond; 5' sequence and inner sequence

SEQ ID NO: 5227 - DNA, 53 bp, Artificial Sequence; identical to SEQ ID NO: 1232
  Description of Artificial Sequence: Synthetic almond; 5' sequence and inner sequence

SEQ ID NO: 5228 - DNA, 53 bp, Artificial Sequence; identical to SEQ ID NO: 1085
  Description of Artificial Sequence: Synthetic almond; 5' sequence and inner sequence

SEQ ID NO: 5229 - DNA, 53 bp, Artificial Sequence
  Description of Artificial Sequence: Synthetic almond; 5' sequence and inner sequence
tagggaagagaaggacatatgatccgaacggacctacgtgggatgcgcgtcgt

SEQ ID NO: 5230 - DNA, 53 bp, Artificial Sequence
  Description of Artificial Sequence: Synthetic almond; 5' sequence and inner sequence
tagggaagagaaggacatatgatggacgcgatgaccacatgccgtgagacatg

SEQ ID NO: 5231 - DNA, 53 bp, Artificial Sequence; identical to SEQ ID NO: 1191
  Description of Artificial Sequence: Synthetic almond; 5' sequence and inner sequence

SEQ ID NO: 5232 - DNA, 53 bp, Artificial Sequence; identical to SEQ ID NO: 1552
  Description of Artificial Sequence: Synthetic almond; 5' sequence and inner sequence

SEQ ID NO: 5233 - DNA, 53 bp, Artificial Sequence; identical to SEQ ID NO: 1194
  Description of Artificial Sequence: Synthetic almond; 5' sequence and inner sequence

SEQ ID NO: 5234 - DNA, 53 bp, Artificial Sequence
  Description of Artificial Sequence: Synthetic almond; 5' sequence and inner sequence
tagggaagagaaggacatatgatggacgcggctgacctcaagctggccaggta

SEQ ID NO: 5235 - DNA, 53 bp, Artificial Sequence; identical to SEQ ID NO: 1209
  Description of Artificial Sequence: Synthetic almond; 5' sequence and inner sequence

SEQ ID NO: 5236 - DNA, 53 bp, Artificial Sequence; identical to SEQ ID NO: 1361
  Description of Artificial Sequence: Synthetic almond; 5' sequence and inner sequence

SEQ ID NO: 5237 - DNA, 53 bp, Artificial Sequence; identical to SEQ ID NO: 1389
  Description of Artificial Sequence: Synthetic almond; 5' sequence and inner sequence

SEQ ID NO: 5238 - DNA, 53 bp, Artificial Sequence
  Description of Artificial Sequence: Synthetic almond; 5' sequence and inner sequence
tagggaagagaaggacatatgatcgatggccgtaacgaaacgtgcaggtggga

SEQ ID NO: 5239 - DNA, 53 bp, Artificial Sequence; identical to SEQ ID NO: 1519
  Description of Artificial Sequence: Synthetic almond; 5' sequence and inner sequence

SEQ ID NO: 5240 - DNA, 53 bp, Artificial Sequence
  Description of Artificial Sequence: Synthetic almond; 5' sequence and inner sequence
tagggaagagaaggacatatgatggccgagctgacctgcacgcacgcatggcc

SEQ ID NO: 5241 - DNA, 53 bp, Artificial Sequence; identical to SEQ ID NO: 1107
  Description of Artificial Sequence: Synthetic almond; 5' sequence and inner sequence

SEQ ID NO: 5242 - DNA, 53 bp, Artificial Sequence; identical to SEQ ID NO: 1269
  Description of Artificial Sequence: Synthetic almond; 5' sequence and inner sequence

SEQ ID NO: 5243 - DNA, 54 bp, Artificial Sequence; identical to SEQ ID NO: 1221
  Description of Artificial Sequence: Synthetic almond; 5' sequence and inner sequence

SEQ ID NO: 5244 - DNA, 53 bp, Artificial Sequence; identical to SEQ ID NO: 1134
  Description of Artificial Sequence: Synthetic almond; 5' sequence and inner sequence

SEQ ID NO: 5245 - DNA, 54 bp, Artificial Sequence
  Description of Artificial Sequence: Synthetic almond; 5' sequence and inner sequence
tagggaagagaaggacatatgatcatggccgcagctgacctagcatgtgtgtca

SEQ ID NO: 5246 - DNA, 53 bp, Artificial Sequence; identical to SEQ ID NO: 1506
  Description of Artificial Sequence: Synthetic almond; 5' sequence and inner sequence

SEQ ID NO: 5247 - DNA, 53 bp, Artificial Sequence; identical to SEQ ID NO: 1243
  Description of Artificial Sequence: Synthetic almond; 5' sequence and inner sequence

SEQ ID NO: 5248 - DNA, 53 bp, Artificial Sequence; identical to SEQ ID NO: 1341
  Description of Artificial Sequence: Synthetic almond; 5' sequence and inner sequence

SEQ ID NO: 5249 - DNA, 53 bp, Artificial Sequence; identical to SEQ ID NO: 1110
  Description of Artificial Sequence: Synthetic almond; 5' sequence and inner sequence

SEQ ID NO: 5250 - DNA, 53 bp, Artificial Sequence; identical to SEQ ID NO: 1314
  Description of Artificial Sequence: Synthetic almond; 5' sequence and inner sequence

SEQ ID NO: 5251 - DNA, 53 bp, Artificial Sequence; identical to SEQ ID NO: 1572
  Description of Artificial Sequence: Synthetic almond; 5' sequence and inner sequence

SEQ ID NO: 5252 - DNA, 53 bp, Artificial Sequence; identical to SEQ ID NO: 1170
  Description of Artificial Sequence: Synthetic almond; 5' sequence and inner sequence

SEQ ID NO: 5253 - DNA, 53 bp, Artificial Sequence; identical to SEQ ID NO: 1165
  Description of Artificial Sequence: Synthetic almond; 5' sequence and inner sequence

SEQ ID NO: 5254 - DNA, 53 bp, Artificial Sequence
  Description of Artificial Sequence: Synthetic almond; 5' sequence and inner sequence
tagggaagagaaggacatatgatggccagagcgaccctacacgtggcacgtac

SEQ ID NO: 5255 - DNA, 53 bp, Artificial Sequence; identical to SEQ ID NO: 1204
  Description of Artificial Sequence: Synthetic almond; 5' sequence and inner sequence

SEQ ID NO: 5256 - DNA, 53 bp, Artificial Sequence; identical to SEQ ID NO: 1836
  Description of Artificial Sequence: Synthetic almond; 5' sequence and inner sequence

SEQ ID NO: 5257 - DNA, 53 bp, Artificial Sequence; identical to SEQ ID NO: 1831
  Description of Artificial Sequence: Synthetic almond; 5' sequence and inner sequence

SEQ ID NO: 5258 - DNA, 53 bp, Artificial Sequence; identical to SEQ ID NO: 1532
  Description of Artificial Sequence: Synthetic almond; 5' sequence and inner sequence

SEQ ID NO: 5259 - DNA, 53 bp, Artificial Sequence; identical to SEQ ID NO: 1336
  Description of Artificial Sequence: Synthetic almond; 5' sequence and inner sequence

SEQ ID NO: 5260 - DNA, 53 bp, Artificial Sequence
  Description of Artificial Sequence: Synthetic almond; 5' sequence and inner sequence
tagggaagagaaggacatatgattggtccgacgctgaccagtgcacgtggcca

SEQ ID NO: 5261 - DNA, 53 bp, Artificial Sequence; identical to SEQ ID NO: 1072
  Description of Artificial Sequence: Synthetic almond; 5' sequence and inner sequence

SEQ ID NO: 5262 - DNA, 53 bp, Artificial Sequence; identical to SEQ ID NO: 1391
  Description of Artificial Sequence: Synthetic almond; 5' sequence and inner sequence

SEQ ID NO: 5263 - DNA, 53 bp, Artificial Sequence; identical to SEQ ID NO: 1956
  Description of Artificial Sequence: Synthetic almond; 5' sequence and inner sequence

SEQ ID NO: 5264 - DNA, 53 bp, Artificial Sequence; identical to SEQ ID NO: 1540
  Description of Artificial Sequence: Synthetic almond; 5' sequence and inner sequence

SEQ ID NO: 5265 - DNA, 53 bp, Artificial Sequence; identical to SEQ ID NO: 1352
  Description of Artificial Sequence: Synthetic almond; 5' sequence and inner sequence

SEQ ID NO: 5266 - DNA, 53 bp, Artificial Sequence; identical to SEQ ID NO: 1146
  Description of Artificial Sequence: Synthetic almond; 5' sequence and inner sequence

SEQ ID NO: 5267 - DNA, 51 bp, Artificial Sequence; identical to SEQ ID NO: 1241
  Description of Artificial Sequence: Synthetic almond; 5' sequence and inner sequence

SEQ ID NO: 5268 - DNA, 53 bp, Artificial Sequence; identical to SEQ ID NO: 1190
  Description of Artificial Sequence: Synthetic almond; 5' sequence and inner sequence

SEQ ID NO: 5269 - DNA, 53 bp, Artificial Sequence; identical to SEQ ID NO: 1485
  Description of Artificial Sequence: Synthetic almond; 5' sequence and inner sequence

SEQ ID NO: 5270 - DNA, 53 bp, Artificial Sequence; identical to SEQ ID NO: 1371
  Description of Artificial Sequence: Synthetic almond; 5' sequence and inner sequence

SEQ ID NO: 5271 - DNA, 53 bp, Artificial Sequence; identical to SEQ ID NO: 1454
  Description of Artificial Sequence: Synthetic almond; 5' sequence and inner sequence

SEQ ID NO: 5272 - DNA, 53 bp, Artificial Sequence
  Description of Artificial Sequence: Synthetic almond; 5' sequence and inner sequence
tagggaagagaaggacatatgatacgtccaggaccacatgtcgttgcgtcacg

SEQ ID NO: 5273 - DNA, 53 bp, Artificial Sequence
  Description of Artificial Sequence: Synthetic almond; 5' sequence and inner sequence
tagggaagagaaggacatatgattcgacatgaccagatgtacctcgcttcacg

SEQ ID NO: 5274 - DNA, 53 bp, Artificial Sequence; identical to SEQ ID NO: 1102
  Description of Artificial Sequence: Synthetic almond; 5' sequence and inner sequence

SEQ ID NO: 5275 - DNA, 53 bp, Artificial Sequence; identical to SEQ ID NO: 1228
  Description of Artificial Sequence: Synthetic almond; 5' sequence and inner sequence

SEQ ID NO: 5276 - DNA, 53 bp, Artificial Sequence; identical to SEQ ID NO: 1200
  Description of Artificial Sequence: Synthetic almond; 5' sequence and inner sequence

SEQ ID NO: 5277 - DNA, 53 bp, Artificial Sequence; identical to SEQ ID NO: 1367
  Description of Artificial Sequence: Synthetic almond; 5' sequence and inner sequence

SEQ ID NO: 5278 - DNA, 53 bp, Artificial Sequence; identical to SEQ ID NO: 1121
  Description of Artificial Sequence: Synthetic almond; 5' sequence and inner sequence

SEQ ID NO: 5279 - DNA, 53 bp, Artificial Sequence; identical to SEQ ID NO: 1481
  Description of Artificial Sequence: Synthetic almond; 5' sequence and inner sequence

SEQ ID NO: 5280 - DNA, 53 bp, Artificial Sequence
  Description of Artificial Sequence: Synthetic almond; 5' sequence and inner sequence
tagggaagagaaggacatatgatggccgcatcgaccgaagtggcatgcgcgca

SEQ ID NO: 5281 - DNA, 53 bp, Artificial Sequence; identical to SEQ ID NO: 1718
  Description of Artificial Sequence: Synthetic almond; 5' sequence and inner sequence

SEQ ID NO: 5282 - DNA, 53 bp, Artificial Sequence; identical to SEQ ID NO: 1171
  Description of Artificial Sequence: Synthetic almond; 5' sequence and inner sequence

SEQ ID NO: 5283 - DNA, 53 bp, Artificial Sequence; identical to SEQ ID NO: 1385
  Description of Artificial Sequence: Synthetic almond; 5' sequence and inner sequence

SEQ ID NO: 5284 - DNA, 53 bp, Artificial Sequence; identical to SEQ ID NO: 1109
  Description of Artificial Sequence: Synthetic almond; 5' sequence and inner sequence

SEQ ID NO: 5285 - DNA, 53 bp, Artificial Sequence; identical to SEQ ID NO: 1089
  Description of Artificial Sequence: Synthetic almond; 5' sequence and inner sequence

SEQ ID NO: 5286 - DNA, 53 bp, Artificial Sequence; identical to SEQ ID NO: 1832
  Description of Artificial Sequence: Synthetic almond; 5' sequence and inner sequence

SEQ ID NO: 5287 - DNA, 53 bp, Artificial Sequence; identical to SEQ ID NO: 1163
  Description of Artificial Sequence: Synthetic almond; 5' sequence and inner sequence

SEQ ID NO: 5288 - DNA, 53 bp, Artificial Sequence; identical to SEQ ID NO: 1634
  Description of Artificial Sequence: Synthetic almond; 5' sequence and inner sequence

SEQ ID NO: 5289 - DNA, 53 bp, Artificial Sequence
  Description of Artificial Sequence: Synthetic almond; 5' sequence and inner sequence
tagggaagagaaggacatatgatgtacgtagcgcaacgatgtggctatgcaca

SEQ ID NO: 5290 - DNA, 53 bp, Artificial Sequence; identical to SEQ ID NO: 1310
  Description of Artificial Sequence: Synthetic almond; 5' sequence and inner sequence

SEQ ID NO: 5291 - DNA, 53 bp, Artificial Sequence; identical to SEQ ID NO: 1484
  Description of Artificial Sequence: Synthetic almond; 5' sequence and inner sequence

SEQ ID NO: 5292 - DNA, 54 bp, Artificial Sequence; identical to SEQ ID NO: 1250
  Description of Artificial Sequence: Synthetic almond; 5' sequence and inner sequence

SEQ ID NO: 5293 - DNA, 53 bp, Artificial Sequence; identical to SEQ ID NO: 1220
  Description of Artificial Sequence: Synthetic almond; 5' sequence and inner sequence

SEQ ID NO: 5294 - DNA, 53 bp, Artificial Sequence; identical to SEQ ID NO: 1196
  Description of Artificial Sequence: Synthetic almond; 5' sequence and inner sequence

SEQ ID NO: 5295 - DNA, 53 bp, Artificial Sequence; identical to SEQ ID NO: 1912
  Description of Artificial Sequence: Synthetic almond; 5' sequence and inner sequence

SEQ ID NO: 5296 - DNA, 53 bp, Artificial Sequence; identical to SEQ ID NO: 1529
  Description of Artificial Sequence: Synthetic almond; 5' sequence and inner sequence

SEQ ID NO: 5297 - DNA, 53 bp, Artificial Sequence
  Description of Artificial Sequence: Synthetic almond; 5' sequence and inner sequence
tagggaagagaaggacatatgatggccgacacttaccgatgcaacgctgcgca

SEQ ID NO: 5298 - DNA, 53 bp, Artificial Sequence; identical to SEQ ID NO: 1343
  Description of Artificial Sequence: Synthetic almond; 5' sequence and inner sequence

SEQ ID NO: 5299 - DNA, 53 bp, Artificial Sequence; identical to SEQ ID NO: 1305
  Description of Artificial Sequence: Synthetic almond; 5' sequence and inner sequence

SEQ ID NO: 5300 - DNA, 53 bp, Artificial Sequence; identical to SEQ ID NO: 1476
  Description of Artificial Sequence: Synthetic almond; 5' sequence and inner sequence

SEQ ID NO: 5301 - DNA, 53 bp, Artificial Sequence
  Description of Artificial Sequence: Synthetic almond; 5' sequence and inner sequence
tagggaagagaaggacatatgatcatggccgcaatcatgaccgcaagtgtgcg

SEQ ID NO: 5302 - DNA, 53 bp, Artificial Sequence; identical to SEQ ID NO: 1613
  Description of Artificial Sequence: Synthetic almond; 5' sequence and inner sequence

SEQ ID NO: 5303 - DNA, 53 bp, Artificial Sequence; identical to SEQ ID NO: 1090
  Description of Artificial Sequence: Synthetic almond; 5' sequence and inner sequence

SEQ ID NO: 5304 - DNA, 53 bp, Artificial Sequence; identical to SEQ ID NO: 1186
  Description of Artificial Sequence: Synthetic almond; 5' sequence and inner sequence

SEQ ID NO: 5305 - DNA, 53 bp, Artificial Sequence; identical to SEQ ID NO: 1218
  Description of Artificial Sequence: Synthetic almond; 5' sequence and inner sequence

SEQ ID NO: 5306 - DNA, 53 bp, Artificial Sequence; identical to SEQ ID NO: 1725
  Description of Artificial Sequence: Synthetic almond; 5' sequence and inner sequence

SEQ ID NO: 5307 - DNA, 53 bp, Artificial Sequence; identical to SEQ ID NO: 1323
  Description of Artificial Sequence: Synthetic almond; 5' sequence and inner sequence

SEQ ID NO: 5308 - DNA, 53 bp, Artificial Sequence; identical to SEQ ID NO: 1520
  Description of Artificial Sequence: Synthetic almond; 5' sequence and inner sequence

SEQ ID NO: 5309 - DNA, 53 bp, Artificial Sequence; identical to SEQ ID NO: 1158
  Description of Artificial Sequence: Synthetic almond; 5' sequence and inner sequence

SEQ ID NO: 5310 - DNA, 53 bp, Artificial Sequence; identical to SEQ ID NO: 1553
  Description of Artificial Sequence: Synthetic almond; 5' sequence and inner sequence

SEQ ID NO: 5311 - DNA, 53 bp, Artificial Sequence; identical to SEQ ID NO: 1246
  Description of Artificial Sequence: Synthetic almond; 5' sequence and inner sequence

SEQ ID NO: 5312 - DNA, 53 bp, Artificial Sequence
  Description of Artificial Sequence: Synthetic almond; 5' sequence and inner sequence
tagggaagagaaggacatatgatggcgtgagtgcaccgtgatcaagcgtggca

SEQ ID NO: 5313 - DNA, 53 bp, Artificial Sequence; identical to SEQ ID NO: 1450
  Description of Artificial Sequence: Synthetic almond; 5' sequence and inner sequence

SEQ ID NO: 5314 - DNA, 53 bp, Artificial Sequence; identical to SEQ ID NO: 1401
  Description of Artificial Sequence: Synthetic almond; 5' sequence and inner sequence

SEQ ID NO: 5315 - DNA, 53 bp, Artificial Sequence; identical to SEQ ID NO: 1511
  Description of Artificial Sequence: Synthetic almond; 5' sequence and inner sequence

SEQ ID NO: 5316 - DNA, 53 bp, Artificial Sequence; identical to SEQ ID NO: 1916
  Description of Artificial Sequence: Synthetic almond; 5' sequence and inner sequence

SEQ ID NO: 5317 - DNA, 53 bp, Artificial Sequence
  Description of Artificial Sequence: Synthetic almond; 5' sequence and inner sequence
tagggaagagaaggacatatgatccgcgcgaggaccgtgtcaagctggtcacg

SEQ ID NO: 5318 - DNA, 53 bp, Artificial Sequence; identical to SEQ ID NO: 1173
  Description of Artificial Sequence: Synthetic almond; 5' sequence and inner sequence

SEQ ID NO: 5319 - DNA, 53 bp, Artificial Sequence; identical to SEQ ID NO: 1523
  Description of Artificial Sequence: Synthetic almond; 5' sequence and inner sequence

SEQ ID NO: 5320 - DNA, 53 bp, Artificial Sequence; identical to SEQ ID NO: 1262
  Description of Artificial Sequence: Synthetic almond; 5' sequence and inner sequence

SEQ ID NO: 5321 - DNA, 53 bp, Artificial Sequence; identical to SEQ ID NO: 1192
  Description of Artificial Sequence: Synthetic almond; 5' sequence and inner sequence

SEQ ID NO: 5322 - DNA, 53 bp, Artificial Sequence; identical to SEQ ID NO: 1517
  Description of Artificial Sequence: Synthetic almond; 5' sequence and inner sequence

SEQ ID NO: 5323 - DNA, 53 bp, Artificial Sequence; identical to SEQ ID NO: 1254
  Description of Artificial Sequence: Synthetic almond; 5' sequence and inner sequence

SEQ ID NO: 5324 - DNA, 53 bp, Artificial Sequence; identical to SEQ ID NO: 1478
  Description of Artificial Sequence: Synthetic almond; 5' sequence and inner sequence

SEQ ID NO: 5325 - DNA, 53 bp, Artificial Sequence; identical to SEQ ID NO: 1167
  Description of Artificial Sequence: Synthetic almond; 5' sequence and inner sequence

SEQ ID NO: 5326 - DNA, 53 bp, Artificial Sequence; identical to SEQ ID NO: 1719
  Description of Artificial Sequence: Synthetic almond; 5' sequence and inner sequence

SEQ ID NO: 5327 - DNA, 53 bp, Artificial Sequence; identical to SEQ ID NO: 1442
  Description of Artificial Sequence: Synthetic almond; 5' sequence and inner sequence

SEQ ID NO: 5328 - DNA, 53 bp, Artificial Sequence; identical to SEQ ID NO: 1214
  Description of Artificial Sequence: Synthetic almond; 5' sequence and inner sequence

SEQ ID NO: 5329 - DNA, 53 bp, Artificial Sequence; identical to SEQ ID NO: 1741
  Description of Artificial Sequence: Synthetic almond; 5' sequence and inner sequence

SEQ ID NO: 5330 - DNA, 53 bp, Artificial Sequence; identical to SEQ ID NO: 1850
  Description of Artificial Sequence: Synthetic almond; 5' sequence and inner sequence

SEQ ID NO: 5331 - DNA, 53 bp, Artificial Sequence; identical to SEQ ID NO: 1350
  Description of Artificial Sequence: Synthetic almond; 5' sequence and inner sequence

SEQ ID NO: 5332 - DNA, 53 bp, Artificial Sequence; identical to SEQ ID NO: 1625
  Description of Artificial Sequence: Synthetic almond; 5' sequence and inner sequence

SEQ ID NO: 5333 - DNA, 53 bp, Artificial Sequence; identical to SEQ ID NO: 1771
  Description of Artificial Sequence: Synthetic almond; 5' sequence and inner sequence

SEQ ID NO: 5334 - DNA, 53 bp, Artificial Sequence; identical to SEQ ID NO: 1137
  Description of Artificial Sequence: Synthetic almond; 5' sequence and inner sequence

SEQ ID NO: 5335 - DNA, 53 bp, Artificial Sequence; identical to SEQ ID NO: 1114
  Description of Artificial Sequence: Synthetic almond; 5' sequence and inner sequence

SEQ ID NO: 5336 - DNA, 53 bp, Artificial Sequence
  Description of Artificial Sequence: Synthetic almond; 5' sequence and inner sequence
tagggaagagaaggacatatgatgcacgcctcgcaccctatcatgaggccatg

SEQ ID NO: 5337 - DNA, 56 bp, Artificial Sequence; identical to SEQ ID NO: 1864
  Description of Artificial Sequence: Synthetic almond; 5' sequence and inner sequence

SEQ ID NO: 5338 - DNA, 53 bp, Artificial Sequence; identical to SEQ ID NO: 1496
  Description of Artificial Sequence: Synthetic almond; 5' sequence and inner sequence

SEQ ID NO: 5339 - DNA, 53 bp, Artificial Sequence
  Description of Artificial Sequence: Synthetic almond; 5' sequence and inner sequence
tagggaagagaaggacatatgatcgtggcgcacgacacggaccttcgctgcgc

SEQ ID NO: 5340 - DNA, 53 bp, Artificial Sequence; identical to SEQ ID NO: 1160
  Description of Artificial Sequence: Synthetic almond; 5' sequence and inner sequence

SEQ ID NO: 5341 - DNA, 53 bp, Artificial Sequence; identical to SEQ ID NO: 1213
  Description of Artificial Sequence: Synthetic almond; 5' sequence and inner sequence

SEQ ID NO: 5342 - DNA, 53 bp, Artificial Sequence; identical to SEQ ID NO: 1606
  Description of Artificial Sequence: Synthetic almond; 5' sequence and inner sequence

SEQ ID NO: 5343 - DNA, 53 bp, Artificial Sequence; identical to SEQ ID NO: 1545
  Description of Artificial Sequence: Synthetic almond; 5' sequence and inner sequence

SEQ ID NO: 5344 - DNA, 53 bp, Artificial Sequence; identical to SEQ ID NO: 1212
  Description of Artificial Sequence: Synthetic almond; 5' sequence and inner sequence

SEQ ID NO: 5345 - DNA, 53 bp, Artificial Sequence; identical to SEQ ID NO: 1811
  Description of Artificial Sequence: Synthetic almond; 5' sequence and inner sequence

SEQ ID NO: 5346 - DNA, 53 bp, Artificial Sequence; identical to SEQ ID NO: 1271
  Description of Artificial Sequence: Synthetic almond; 5' sequence and inner sequence

SEQ ID NO: 5347 - DNA, 53 bp, Artificial Sequence; identical to SEQ ID NO: 1439
  Description of Artificial Sequence: Synthetic almond; 5' sequence and inner sequence

SEQ ID NO: 5348 - DNA, 53 bp, Artificial Sequence
  Description of Artificial Sequence: Synthetic almond; 5' sequence and inner sequence
tagggaagagaaggacatatgatacgtcgcgaacccaagacgcatgtgccagt

SEQ ID NO: 5349 - DNA, 53 bp, Artificial Sequence; identical to SEQ ID NO: 1696
  Description of Artificial Sequence: Synthetic almond; 5' sequence and inner sequence

SEQ ID NO: 5350 - DNA, 53 bp, Artificial Sequence; identical to SEQ ID NO: 1332
  Description of Artificial Sequence: Synthetic almond; 5' sequence and inner sequence

SEQ ID NO: 5351 - DNA, 53 bp, Artificial Sequence
  Description of Artificial Sequence: Synthetic almond; 5' sequence and inner sequence
tagggaagagaaggacatatgatgtgcacagcgaacctaagcgggcatgcacg

SEQ ID NO: 5352 - DNA, 53 bp, Artificial Sequence; identical to SEQ ID NO: 1457
  Description of Artificial Sequence: Synthetic almond; 5' sequence and inner sequence

SEQ ID NO: 5353 - DNA, 53 bp, Artificial Sequence; identical to SEQ ID NO: 1626
  Description of Artificial Sequence: Synthetic almond; 5' sequence and inner sequence

SEQ ID NO: 5354 - DNA, 53 bp, Artificial Sequence; identical to SEQ ID NO: 1713
  Description of Artificial Sequence: Synthetic almond; 5' sequence and inner sequence

SEQ ID NO: 5355 - DNA, 53 bp, Artificial Sequence; identical to SEQ ID NO: 1807
  Description of Artificial Sequence: Synthetic almond; 5' sequence and inner sequence

SEQ ID NO: 5356 - DNA, 53 bp, Artificial Sequence
  Description of Artificial Sequence: Synthetic almond; 5' sequence and inner sequence
tagggaagagaaggacatatgatacgtgcacacgccaaggtccgatcgacgcg

SEQ ID NO: 5357 - DNA, 53 bp, Artificial Sequence
  Description of Artificial Sequence: Synthetic almond; 5' sequence and inner sequence
tagggaagagaaggacatatgatgctaccagcagcatgccgccgagctgcacg

SEQ ID NO: 5358 - DNA, 53 bp, Artificial Sequence; identical to SEQ ID NO: 1313
  Description of Artificial Sequence: Synthetic almond; 5' sequence and inner sequence

SEQ ID NO: 5359 - DNA, 53 bp, Artificial Sequence; identical to SEQ ID NO: 1157
  Description of Artificial Sequence: Synthetic almond; 5' sequence and inner sequence

SEQ ID NO: 5360 - DNA, 53 bp, Artificial Sequence; identical to SEQ ID NO: 1791
  Description of Artificial Sequence: Synthetic almond; 5' sequence and inner sequence

SEQ ID NO: 5361 - DNA, 53 bp, Artificial Sequence; identical to SEQ ID NO: 1666
  Description of Artificial Sequence: Synthetic almond; 5' sequence and inner sequence

SEQ ID NO: 5362 - DNA, 53 bp, Artificial Sequence; identical to SEQ ID NO: 1585
  Description of Artificial Sequence: Synthetic almond; 5' sequence and inner sequence

SEQ ID NO: 5363 - DNA, 53 bp, Artificial Sequence; identical to SEQ ID NO: 1297
  Description of Artificial Sequence: Synthetic almond; 5' sequence and inner sequence

SEQ ID NO: 5364 - DNA, 53 bp, Artificial Sequence
  Description of Artificial Sequence: Synthetic almond; 5' sequence and inner sequence
tagggaagagaaggacatatgatggcatgcacgcacctacacgtggggatgga

SEQ ID NO: 5365 - DNA, 53 bp, Artificial Sequence; identical to SEQ ID NO: 1379
  Description of Artificial Sequence: Synthetic almond; 5' sequence and inner sequence

SEQ ID NO: 5366 - DNA, 53 bp, Artificial Sequence; identical to SEQ ID NO: 1930
  Description of Artificial Sequence: Synthetic almond; 5' sequence and inner sequence

SEQ ID NO: 5367 - DNA, 53 bp, Artificial Sequence; identical to SEQ ID NO: 1316
  Description of Artificial Sequence: Synthetic almond; 5' sequence and inner sequence

SEQ ID NO: 5368 - DNA, 53 bp, Artificial Sequence; identical to SEQ ID NO: 1414
  Description of Artificial Sequence: Synthetic almond; 5' sequence and inner sequence

SEQ ID NO: 5369 - DNA, 53 bp, Artificial Sequence; identical to SEQ ID NO: 1928
  Description of Artificial Sequence: Synthetic almond; 5' sequence and inner sequence

SEQ ID NO: 5370 - DNA, 53 bp, Artificial Sequence; identical to SEQ ID NO: 1671
  Description of Artificial Sequence: Synthetic almond; 5' sequence and inner sequence

SEQ ID NO: 5371 - DNA, 53 bp, Artificial Sequence; identical to SEQ ID NO: 1273
  Description of Artificial Sequence: Synthetic almond; 5' sequence and inner sequence

SEQ ID NO: 5372 - DNA, 53 bp, Artificial Sequence; identical to SEQ ID NO: 1611
  Description of Artificial Sequence: Synthetic almond; 5' sequence and inner sequence

SEQ ID NO: 5373 - DNA, 53 bp, Artificial Sequence
  Description of Artificial Sequence: Synthetic almond; 5' sequence and inner sequence
tagggaagagaaggacatatgatcgcgaagtggcacagggacgcgtctgccca

SEQ ID NO: 5374 - DNA, 53 bp, Artificial Sequence; identical to SEQ ID NO: 1390
  Description of Artificial Sequence: Synthetic almond; 5' sequence and inner sequence

SEQ ID NO: 5375 - DNA, 53 bp, Artificial Sequence; identical to SEQ ID NO: 1380
  Description of Artificial Sequence: Synthetic almond; 5' sequence and inner sequence

SEQ ID NO: 5376 - DNA, 53 bp, Artificial Sequence
  Description of Artificial Sequence: Synthetic almond; 5' sequence and inner sequence
tagggaagagaaggacatatgatgcaacgcagcaccgccatctgccgtgggca

SEQ ID NO: 5377 - DNA, 53 bp, Artificial Sequence
  Description of Artificial Sequence: Synthetic almond; 5' sequence and inner sequence
tagggaagagaaggacatatgatggcatgcacgcacctacacgcgggtatgga

SEQ ID NO: 5378 - DNA, 53 bp, Artificial Sequence; identical to SEQ ID NO: 1276
  Description of Artificial Sequence: Synthetic almond; 5' sequence and inner sequence

SEQ ID NO: 5379 - DNA, 53 bp, Artificial Sequence; identical to SEQ ID NO: 1632
  Description of Artificial Sequence: Synthetic almond; 5' sequence and inner sequence

SEQ ID NO: 5380 - DNA, 53 bp, Artificial Sequence
  Description of Artificial Sequence: Synthetic almond; 5' sequence and inner sequence
tagggaagagaaggacatatgatggacctgcgaagagcgtacacgtggccatg

SEQ ID NO: 5381 - DNA, 53 bp, Artificial Sequence
  Description of Artificial Sequence: Synthetic almond; 5' sequence and inner sequence
tagggaagagaaggacatatgatcgtaccgtcaagcgggaaggcactttggtg

SEQ ID NO: 5382 - DNA, 53 bp, Artificial Sequence; identical to SEQ ID NO: 1127
  Description of Artificial Sequence: Synthetic almond; 5' sequence and inner sequence

SEQ ID NO: 5383 - DNA, 53 bp, Artificial Sequence; identical to SEQ ID NO: 1915
  Description of Artificial Sequence: Synthetic almond; 5' sequence and inner sequence

SEQ ID NO: 5384 - DNA, 53 bp, Artificial Sequence
  Description of Artificial Sequence: Synthetic almond; 5' sequence and inner sequence
tagggaagagaaggacatatgatgcgacagcgacatacgatctgctctgcgcc

SEQ ID NO: 5385 - DNA, 53 bp, Artificial Sequence; identical to SEQ ID NO: 1177
  Description of Artificial Sequence: Synthetic almond; 5' sequence and inner sequence

SEQ ID NO: 5386 - DNA, 53 bp, Artificial Sequence; identical to SEQ ID NO: 1426
  Description of Artificial Sequence: Synthetic almond; 5' sequence and inner sequence

SEQ ID NO: 5387 - DNA, 53 bp, Artificial Sequence; identical to SEQ ID NO: 1274
  Description of Artificial Sequence: Synthetic almond; 5' sequence and inner sequence

SEQ ID NO: 5388 - DNA, 53 bp, Artificial Sequence; identical to SEQ ID NO: 1950
  Description of Artificial Sequence: Synthetic almond; 5' sequence and inner sequence

SEQ ID NO: 5389 - DNA, 53 bp, Artificial Sequence; identical to SEQ ID NO: 1932
  Description of Artificial Sequence: Synthetic almond; 5' sequence and inner sequence

SEQ ID NO: 5390 - DNA, 53 bp, Artificial Sequence; identical to SEQ ID NO: 1869
  Description of Artificial Sequence: Synthetic almond; 5' sequence and inner sequence

SEQ ID NO: 5391 - DNA, 53 bp, Artificial Sequence; identical to SEQ ID NO: 1399
  Description of Artificial Sequence: Synthetic almond; 5' sequence and inner sequence

SEQ ID NO: 5392 - DNA, 53 bp, Artificial Sequence; identical to SEQ ID NO: 1238
  Description of Artificial Sequence: Synthetic almond; 5' sequence and inner sequence

SEQ ID NO: 5393 - DNA, 53 bp, Artificial Sequence
  Description of Artificial Sequence: Synthetic almond; 5' sequence and inner sequence
tagggaagagaaggacatatgattcgtgtcgtgcgatgaaccggtcgtggcca

SEQ ID NO: 5394 - DNA, 53 bp, Artificial Sequence
  Description of Artificial Sequence: Synthetic almond; 5' sequence and inner sequence
tagggaagagaaggacatatgatggccgaacggacctcaatgtgtggcatgca

SEQ ID NO: 5395 - DNA, 53 bp, Artificial Sequence; identical to SEQ ID NO: 1448
  Description of Artificial Sequence: Synthetic almond; 5' sequence and inner sequence

SEQ ID NO: 5396 - DNA, 53 bp, Artificial Sequence; identical to SEQ ID NO: 1369
  Description of Artificial Sequence: Synthetic almond; 5' sequence and inner sequence

SEQ ID NO: 5397 - DNA, 53 bp, Artificial Sequence; identical to SEQ ID NO: 1746
  Description of Artificial Sequence: Synthetic almond; 5' sequence and inner sequence

SEQ ID NO: 5398 - DNA, 53 bp, Artificial Sequence; identical to SEQ ID NO: 1909
  Description of Artificial Sequence: Synthetic almond; 5' sequence and inner sequence

SEQ ID NO: 5399 - DNA, 53 bp, Artificial Sequence; identical to SEQ ID NO: 1333
  Description of Artificial Sequence: Synthetic almond; 5' sequence and inner sequence

SEQ ID NO: 5400 - DNA, 53 bp, Artificial Sequence; identical to SEQ ID NO: 1176
  Description of Artificial Sequence: Synthetic almond; 5' sequence and inner sequence

SEQ ID NO: 5401 - DNA, 53 bp, Artificial Sequence
  Description of Artificial Sequence: Synthetic almond; 5' sequence and inner sequence
tagggaagagaaggacatatgatcgtccgacacgtaccgaccatcggtggcca

SEQ ID NO: 5402 - DNA, 53 bp, Artificial Sequence; identical to SEQ ID NO: 1419
  Description of Artificial Sequence: Synthetic almond; 5' sequence and inner sequence

SEQ ID NO: 5403 - DNA, 53 bp, Artificial Sequence; identical to SEQ ID NO: 1383
  Description of Artificial Sequence: Synthetic almond; 5' sequence and inner sequence

SEQ ID NO: 5404 - DNA, 53 bp, Artificial Sequence; identical to SEQ ID NO: 1279
  Description of Artificial Sequence: Synthetic almond; 5' sequence and inner sequence

SEQ ID NO: 5405 - DNA, 53 bp, Artificial Sequence
  Description of Artificial Sequence: Synthetic almond; 5' sequence and inner sequence
tagggaagagaaggacatatgatcgcaccgacaagggagcacgtacgcggtca

SEQ ID NO: 5406 - DNA, 53 bp, Artificial Sequence
  Description of Artificial Sequence: Synthetic almond; 5' sequence and inner sequence
tagggaagagaaggacatatgatggcatgctcgagcccgattgcgtggccatg

SEQ ID NO: 5407 - DNA, 53 bp, Artificial Sequence
  Description of Artificial Sequence: Synthetic almond; 5' sequence and inner sequence
tagggaagagaaggacatatgattggcacgacgattcccgcaagtgcgccatg

SEQ ID NO: 5408 - DNA, 53 bp, Artificial Sequence; identical to SEQ ID NO: 1156
  Description of Artificial Sequence: Synthetic almond; 5' sequence and inner sequence

SEQ ID NO: 5409 - DNA, 52 bp, Artificial Sequence; identical to SEQ ID NO: 1259
  Description of Artificial Sequence: Synthetic almond; 5' sequence and inner sequence

SEQ ID NO: 5410 - DNA, 53 bp, Artificial Sequence; identical to SEQ ID NO: 1757
  Description of Artificial Sequence: Synthetic almond; 5' sequence and inner sequence

SEQ ID NO: 5411 - DNA, 53 bp, Artificial Sequence; identical to SEQ ID NO: 1417
  Description of Artificial Sequence: Synthetic almond; 5' sequence and inner sequence

SEQ ID NO: 5412 - DNA, 53 bp, Artificial Sequence; identical to SEQ ID NO: 1248
  Description of Artificial Sequence: Synthetic almond; 5' sequence and inner sequence

SEQ ID NO: 5413 - DNA, 53 bp, Artificial Sequence; identical to SEQ ID NO: 1180
  Description of Artificial Sequence: Synthetic almond; 5' sequence and inner sequence

SEQ ID NO: 5414 - DNA, 53 bp, Artificial Sequence; identical to SEQ ID NO: 1668
  Description of Artificial Sequence: Synthetic almond; 5' sequence and inner sequence

SEQ ID NO: 5415 - DNA, 53 bp, Artificial Sequence; identical to SEQ ID NO: 1563
  Description of Artificial Sequence: Synthetic almond; 5' sequence and inner sequence

SEQ ID NO: 5416 - DNA, 53 bp, Artificial Sequence; identical to SEQ ID NO: 1433
  Description of Artificial Sequence: Synthetic almond; 5' sequence and inner sequence

SEQ ID NO: 5417 - DNA, 53 bp, Artificial Sequence; identical to SEQ ID NO: 1344
  Description of Artificial Sequence: Synthetic almond; 5' sequence and inner sequence

SEQ ID NO: 5418 - DNA, 53 bp, Artificial Sequence; identical to SEQ ID NO: 1647
  Description of Artificial Sequence: Synthetic almond; 5' sequence and inner sequence

SEQ ID NO: 5419 - DNA, 53 bp, Artificial Sequence
  Description of Artificial Sequence: Synthetic almond; 5' sequence and inner sequence
tagggaagagaaggacatatgatccgtaccgacatcaagcggtggtgtgcgtg

SEQ ID NO: 5420 - DNA, 53 bp, Artificial Sequence
  Description of Artificial Sequence: Synthetic almond; 5' sequence and inner sequence
tagggaagagaaggacatatgatccgtagcgacatcaagcggtggtgggcgtg

SEQ ID NO: 5421 - DNA, 53 bp, Artificial Sequence; identical to SEQ ID NO: 1358
  Description of Artificial Sequence: Synthetic almond; 5' sequence and inner sequence

SEQ ID NO: 5422 - DNA, 53 bp, Artificial Sequence; identical to SEQ ID NO: 1524
  Description of Artificial Sequence: Synthetic almond; 5' sequence and inner sequence

SEQ ID NO: 5423 - DNA, 53 bp, Artificial Sequence; identical to SEQ ID NO: 1375
  Description of Artificial Sequence: Synthetic almond; 5' sequence and inner sequence

SEQ ID NO: 5424 - DNA, 53 bp, Artificial Sequence; identical to SEQ ID NO: 1181
  Description of Artificial Sequence: Synthetic almond; 5' sequence and inner sequence

SEQ ID NO: 5425 - DNA, 53 bp, Artificial Sequence
  Description of Artificial Sequence: Synthetic almond; 5' sequence and inner sequence
tagggaagagaaggacatatgatgcactgaacggaatgtgctggacgtggcca

SEQ ID NO: 5426 - DNA, 53 bp, Artificial Sequence; identical to SEQ ID NO: 1638
  Description of Artificial Sequence: Synthetic almond; 5' sequence and inner sequence

SEQ ID NO: 5427 - DNA, 53 bp, Artificial Sequence; identical to SEQ ID NO: 1467
  Description of Artificial Sequence: Synthetic almond; 5' sequence and inner sequence

SEQ ID NO: 5428 - DNA, 53 bp, Artificial Sequence
  Description of Artificial Sequence: Synthetic almond; 5' sequence and inner sequence
tagggaagagaaggacatatgattcatgtggccgtgctgacccaacgtgagca

SEQ ID NO: 5429 - DNA, 53 bp, Artificial Sequence
  Description of Artificial Sequence: Synthetic almond; 5' sequence and inner sequence
tagggaagagaaggacatatgatggcatgcgctgaacgaggcatgatgcgtca

SEQ ID NO: 5430 - DNA, 53 bp, Artificial Sequence; identical to SEQ ID NO: 1397
  Description of Artificial Sequence: Synthetic almond; 5' sequence and inner sequence

SEQ ID NO: 5431 - DNA, 53 bp, Artificial Sequence; identical to SEQ ID NO: 1128
  Description of Artificial Sequence: Synthetic almond; 5' sequence and inner sequence

SEQ ID NO: 5432 - DNA, 53 bp, Artificial Sequence; identical to SEQ ID NO: 1284
  Description of Artificial Sequence: Synthetic almond; 5' sequence and inner sequence

SEQ ID NO: 5433 - DNA, 53 bp, Artificial Sequence; identical to SEQ ID NO: 1592
  Description of Artificial Sequence: Synthetic almond; 5' sequence and inner sequence

SEQ ID NO: 5434 - DNA, 54 bp, Artificial Sequence
  Description of Artificial Sequence: Synthetic almond; 5' sequence and inner sequence
tagggaagagaaggacatatgatccgtagcgacaagggagcacgtacgcggtca

SEQ ID NO: 5435 - DNA, 53 bp, Artificial Sequence; identical to SEQ ID NO: 1513
  Description of Artificial Sequence: Synthetic almond; 5' sequence and inner sequence

SEQ ID NO: 5436 - DNA, 53 bp, Artificial Sequence
  Description of Artificial Sequence: Synthetic almond; 5' sequence and inner sequence
tagggaagagaaggacatatgatggccaaacggaccggttgcggtgttgcaca

SEQ ID NO: 5437 - DNA, 53 bp, Artificial Sequence; identical to SEQ ID NO: 1591
  Description of Artificial Sequence: Synthetic almond; 5' sequence and inner sequence

SEQ ID NO: 5438 - DNA, 53 bp, Artificial Sequence; identical to SEQ ID NO: 1272
  Description of Artificial Sequence: Synthetic almond; 5' sequence and inner sequence

SEQ ID NO: 5439 - DNA, 53 bp, Artificial Sequence; identical to SEQ ID NO: 1630
  Description of Artificial Sequence: Synthetic almond; 5' sequence and inner sequence

SEQ ID NO: 5440 - DNA, 53 bp, Artificial Sequence; identical to SEQ ID NO: 1219
  Description of Artificial Sequence: Synthetic almond; 5' sequence and inner sequence

SEQ ID NO: 5441 - DNA, 53 bp, Artificial Sequence; identical to SEQ ID NO: 1504
  Description of Artificial Sequence: Synthetic almond; 5' sequence and inner sequence

SEQ ID NO: 5442 - DNA, 53 bp, Artificial Sequence; identical to SEQ ID NO: 1300
  Description of Artificial Sequence: Synthetic almond; 5' sequence and inner sequence

SEQ ID NO: 5443 - DNA, 53 bp, Artificial Sequence; identical to SEQ ID NO: 1860
  Description of Artificial Sequence: Synthetic almond; 5' sequence and inner sequence

SEQ ID NO: 5444 - DNA, 53 bp, Artificial Sequence; identical to SEQ ID NO: 1356
  Description of Artificial Sequence: Synthetic almond; 5' sequence and inner sequence

SEQ ID NO: 5445 - DNA, 53 bp, Artificial Sequence
  Description of Artificial Sequence: Synthetic almond; 5' sequence and inner sequence
tagggaagagaaggacatatgatgtcatgcacgcaactttcacgtggccatgg

SEQ ID NO: 5446 - DNA, 53 bp, Artificial Sequence; identical to SEQ ID NO: 1256
  Description of Artificial Sequence: Synthetic almond; 5' sequence and inner sequence

SEQ ID NO: 5447 - DNA, 53 bp, Artificial Sequence; identical to SEQ ID NO: 1206
  Description of Artificial Sequence: Synthetic almond; 5' sequence and inner sequence

SEQ ID NO: 5448 - DNA, 53 bp, Artificial Sequence; identical to SEQ ID NO: 1403
  Description of Artificial Sequence: Synthetic almond; 5' sequence and inner sequence

SEQ ID NO: 5449 - DNA, 53 bp, Artificial Sequence
  Description of Artificial Sequence: Synthetic almond; 5' sequence and inner sequence
tagggaagagaaggacatatgattcgacagaccgtgcaccgtggccatgcact

SEQ ID NO: 5450 - DNA, 53 bp, Artificial Sequence; identical to SEQ ID NO: 1815
  Description of Artificial Sequence: Synthetic almond; 5' sequence and inner sequence

SEQ ID NO: 5451 - DNA, 53 bp, Artificial Sequence
  Description of Artificial Sequence: Synthetic almond; 5' sequence and inner sequence
tagggaagagaaggacatatgatggcatgcgaaggacctatcatgtgggcaga

SEQ ID NO: 5452 - DNA, 53 bp, Artificial Sequence; identical to SEQ ID NO: 1236
  Description of Artificial Sequence: Synthetic almond; 5' sequence and inner sequence

SEQ ID NO: 5453 - DNA, 53 bp, Artificial Sequence; identical to SEQ ID NO: 1422
  Description of Artificial Sequence: Synthetic almond; 5' sequence and inner sequence

SEQ ID NO: 5454 - DNA, 53 bp, Artificial Sequence; identical to SEQ ID NO: 1925
  Description of Artificial Sequence: Synthetic almond; 5' sequence and inner sequence

SEQ ID NO: 5455 - DNA, 53 bp, Artificial Sequence; identical to SEQ ID NO: 1409
  Description of Artificial Sequence: Synthetic almond; 5' sequence and inner sequence

SEQ ID NO: 5456 - DNA, 53 bp, Artificial Sequence; identical to SEQ ID NO: 1862
  Description of Artificial Sequence: Synthetic almond; 5' sequence and inner sequence

SEQ ID NO: 5457 - DNA, 53 bp, Artificial Sequence; identical to SEQ ID NO: 1994
  Description of Artificial Sequence: Synthetic almond; 5' sequence and inner sequence

SEQ ID NO: 5458 - DNA, 53 bp, Artificial Sequence; identical to SEQ ID NO: 1217
  Description of Artificial Sequence: Synthetic almond; 5' sequence and inner sequence

SEQ ID NO: 5459 - DNA, 53 bp, Artificial Sequence
  Description of Artificial Sequence: Synthetic almond; 5' sequence and inner sequence
tagggaagagaaggacatatgatggccgagcgtaccgtgcgagtgggagcgta

SEQ ID NO: 5460 - DNA, 53 bp, Artificial Sequence; identical to SEQ ID NO: 1244
  Description of Artificial Sequence: Synthetic almond; 5' sequence and inner sequence

SEQ ID NO: 5461 - DNA, 53 bp, Artificial Sequence; identical to SEQ ID NO: 1357
  Description of Artificial Sequence: Synthetic almond; 5' sequence and inner sequence

SEQ ID NO: 5462 - DNA, 53 bp, Artificial Sequence; identical to SEQ ID NO: 1394
  Description of Artificial Sequence: Synthetic almond; 5' sequence and inner sequence

SEQ ID NO: 5463 - DNA, 53 bp, Artificial Sequence; identical to SEQ ID NO: 1777
  Description of Artificial Sequence: Synthetic almond; 5' sequence and inner sequence

SEQ ID NO: 5464 - DNA, 53 bp, Artificial Sequence; identical to SEQ ID NO: 1492
  Description of Artificial Sequence: Synthetic almond; 5' sequence and inner sequence

SEQ ID NO: 5465 - DNA, 53 bp, Artificial Sequence
  Description of Artificial Sequence: Synthetic almond; 5' sequence and inner sequence
tagggaagagaaggacatatgatcacatggtggcatactgactgcactgcact

SEQ ID NO: 5466 - DNA, 53 bp, Artificial Sequence; identical to SEQ ID NO: 1561
  Description of Artificial Sequence: Synthetic almond; 5' sequence and inner sequence

SEQ ID NO: 5467 - DNA, 53 bp, Artificial Sequence; identical to SEQ ID NO: 1637
  Description of Artificial Sequence: Synthetic almond; 5' sequence and inner sequence

SEQ ID NO: 5468 - DNA, 53 bp, Artificial Sequence; identical to SEQ ID NO: 1530
  Description of Artificial Sequence: Synthetic almond; 5' sequence and inner sequence

SEQ ID NO: 5469 - DNA, 53 bp, Artificial Sequence
  Description of Artificial Sequence: Synthetic almond; 5' sequence and inner sequence
tagggaagagaaggacatatgatcgtcacgcatcactggcctgccttgccgtg

SEQ ID NO: 5470 - DNA, 53 bp, Artificial Sequence
  Description of Artificial Sequence: Synthetic almond; 5' sequence and inner sequence
tagggaagagaaggacatatgatggccgaagcgatacggcaagtcggcatgca

SEQ ID NO: 5471 - DNA, 53 bp, Artificial Sequence; identical to SEQ ID NO: 1620
  Description of Artificial Sequence: Synthetic almond; 5' sequence and inner sequence

SEQ ID NO: 5472 - DNA, 53 bp, Artificial Sequence
  Description of Artificial Sequence: Synthetic almond; 5' sequence and inner sequence
tagggaagagaaggacatatgatcgatcgcaccgccgtgatcatgcacgcgca

SEQ ID NO: 5473 - DNA, 53 bp, Artificial Sequence; identical to SEQ ID NO: 1875
  Description of Artificial Sequence: Synthetic almond; 5' sequence and inner sequence

SEQ ID NO: 5474 - DNA, 53 bp, Artificial Sequence; identical to SEQ ID NO: 1292
  Description of Artificial Sequence: Synthetic almond; 5' sequence and inner sequence

SEQ ID NO: 5475 - DNA, 53 bp, Artificial Sequence; identical to SEQ ID NO: 1294
  Description of Artificial Sequence: Synthetic almond; 5' sequence and inner sequence

SEQ ID NO: 5476 - DNA, 53 bp, Artificial Sequence; identical to SEQ ID NO: 1728
  Description of Artificial Sequence: Synthetic almond; 5' sequence and inner sequence

SEQ ID NO: 5477 - DNA, 53 bp, Artificial Sequence; identical to SEQ ID NO: 1631
  Description of Artificial Sequence: Synthetic almond; 5' sequence and inner sequence

SEQ ID NO: 5478 - DNA, 53 bp, Artificial Sequence; identical to SEQ ID NO: 1278
  Description of Artificial Sequence: Synthetic almond; 5' sequence and inner sequence

SEQ ID NO: 5479 - DNA, 53 bp, Artificial Sequence; identical to SEQ ID NO: 1407
  Description of Artificial Sequence: Synthetic almond; 5' sequence and inner sequence

SEQ ID NO: 5480 - DNA, 53 bp, Artificial Sequence; identical to SEQ ID NO: 1556
  Description of Artificial Sequence: Synthetic almond; 5' sequence and inner sequence

SEQ ID NO: 5481 - DNA, 53 bp, Artificial Sequence; identical to SEQ ID NO: 1706
  Description of Artificial Sequence: Synthetic almond; 5' sequence and inner sequence

SEQ ID NO: 5482 - DNA, 53 bp, Artificial Sequence; identical to SEQ ID NO: 1326
  Description of Artificial Sequence: Synthetic almond; 5' sequence and inner sequence

SEQ ID NO: 5483 - DNA, 53 bp, Artificial Sequence; identical to SEQ ID NO: 1393
  Description of Artificial Sequence: Synthetic almond; 5' sequence and inner sequence

SEQ ID NO: 5484 - DNA, 53 bp, Artificial Sequence; identical to SEQ ID NO: 1764
  Description of Artificial Sequence: Synthetic almond; 5' sequence and inner sequence

SEQ ID NO: 5485 - DNA, 53 bp, Artificial Sequence
  Description of Artificial Sequence: Synthetic almond; 5' sequence and inner sequence
tagggaagagaaggacatatgattgaacgcagtgacgaaacgtatggcgcaca

SEQ ID NO: 5486 - DNA, 53 bp, Artificial Sequence; identical to SEQ ID NO: 1891
  Description of Artificial Sequence: Synthetic almond; 5' sequence and inner sequence

SEQ ID NO: 5487 - DNA, 53 bp, Artificial Sequence; identical to SEQ ID NO: 1617
  Description of Artificial Sequence: Synthetic almond; 5' sequence and inner sequence

SEQ ID NO: 5488 - DNA, 53 bp, Artificial Sequence; identical to SEQ ID NO: 1124
  Description of Artificial Sequence: Synthetic almond; 5' sequence and inner sequence

SEQ ID NO: 5489 - DNA, 53 bp, Artificial Sequence
  Description of Artificial Sequence: Synthetic almond; 5' sequence and inner sequence
tagggaagagaaggacatatgatggcatgcgatgaacgaggcatgatccgtca

SEQ ID NO: 5490 - DNA, 53 bp, Artificial Sequence; identical to SEQ ID NO: 1528
  Description of Artificial Sequence: Synthetic almond; 5' sequence and inner sequence

SEQ ID NO: 5491 - DNA, 53 bp, Artificial Sequence
  Description of Artificial Sequence: Synthetic almond; 5' sequence and inner sequence
tagggaagagaaggacatatgatggcatgagcgaacccgtcgagtgcgtcgta

SEQ ID NO: 5492 - DNA, 53 bp, Artificial Sequence
  Description of Artificial Sequence: Synthetic almond; 5' sequence and inner sequence
tagggaagagaaggacatatgatgtacgccactgaccgaccttgcgtgaggca

SEQ ID NO: 5493 - DNA, 53 bp, Artificial Sequence; identical to SEQ ID NO: 1669
  Description of Artificial Sequence: Synthetic almond; 5' sequence and inner sequence

SEQ ID NO: 5494 - DNA, 53 bp, Artificial Sequence
  Description of Artificial Sequence: Synthetic almond; 5' sequence and inner sequence
tagggaagagaaggacatatgatgacgacgatgagcgtgggattggctggtgt

SEQ ID NO: 5495 - DNA, 53 bp, Artificial Sequence; identical to SEQ ID NO: 1331
  Description of Artificial Sequence: Synthetic almond; 5' sequence and inner sequence

SEQ ID NO: 5496 - DNA, 53 bp, Artificial Sequence; identical to SEQ ID NO: 1628
  Description of Artificial Sequence: Synthetic almond; 5' sequence and inner sequence

SEQ ID NO: 5497 - DNA, 53 bp, Artificial Sequence; identical to SEQ ID NO: 1309
  Description of Artificial Sequence: Synthetic almond; 5' sequence and inner sequence

SEQ ID NO: 5498 - DNA, 53 bp, Artificial Sequence
  Description of Artificial Sequence: Synthetic almond; 5' sequence and inner sequence
tagggaagagaaggacatatgatggcacaaacggaccgacaagcgcgcatgga

SEQ ID NO: 5499 - DNA, 53 bp, Artificial Sequence
  Description of Artificial Sequence: Synthetic almond; 5' sequence and inner sequence
tagggaagagaaggacatatgatccgatcgcacgcacggggacatggtcgagt

SEQ ID NO: 5500 - DNA, 53 bp, Artificial Sequence; identical to SEQ ID NO: 1166
  Description of Artificial Sequence: Synthetic almond; 5' sequence and inner sequence

SEQ ID NO: 5501 - DNA, 53 bp, Artificial Sequence; identical to SEQ ID NO: 1597
  Description of Artificial Sequence: Synthetic almond; 5' sequence and inner sequence

SEQ ID NO: 5502 - DNA, 53 bp, Artificial Sequence
  Description of Artificial Sequence: Synthetic almond; 5' sequence and inner sequence
tagggaagagaaggacatatgatggtgacgcaacgagtgtactgatcgccacg

SEQ ID NO: 5503 - DNA, 53 bp, Artificial Sequence
  Description of Artificial Sequence: Synthetic almond; 5' sequence and inner sequence
tagggaagagaaggacatatgatggcacaaacgtaccgacaagtgcgcatgga

SEQ ID NO: 5504 - DNA, 53 bp, Artificial Sequence
  Description of Artificial Sequence: Synthetic almond; 5' sequence and inner sequence
tagggaagagaaggacatatgatcgtaccgacaagggagcacgtacgctgtca

SEQ ID NO: 5505 - DNA, 53 bp, Artificial Sequence; identical to SEQ ID NO: 1249
  Description of Artificial Sequence: Synthetic almond; 5' sequence and inner sequence

SEQ ID NO: 5506 - DNA, 53 bp, Artificial Sequence; identical to SEQ ID NO: 1365
  Description of Artificial Sequence: Synthetic almond; 5' sequence and inner sequence

SEQ ID NO: 5507 - DNA, 53 bp, Artificial Sequence; identical to SEQ ID NO: 1911
  Description of Artificial Sequence: Synthetic almond; 5' sequence and inner sequence

SEQ ID NO: 5508 - DNA, 53 bp, Artificial Sequence; identical to SEQ ID NO: 1398
  Description of Artificial Sequence: Synthetic almond; 5' sequence and inner sequence

SEQ ID NO: 5509 - DNA, 53 bp, Artificial Sequence
  Description of Artificial Sequence: Synthetic almond; 5' sequence and inner sequence
tagggaagagaaggacatatgatcgcatcgagcataccggtcctcgcttcacg

SEQ ID NO: 5510 - DNA, 53 bp, Artificial Sequence; identical to SEQ ID NO: 1281
  Description of Artificial Sequence: Synthetic almond; 5' sequence and inner sequence

SEQ ID NO: 5511 - DNA, 53 bp, Artificial Sequence; identical to SEQ ID NO: 1487
  Description of Artificial Sequence: Synthetic almond; 5' sequence and inner sequence

SEQ ID NO: 5512 - DNA, 53 bp, Artificial Sequence; identical to SEQ ID NO: 1437
  Description of Artificial Sequence: Synthetic almond; 5' sequence and inner sequence

SEQ ID NO: 5513 - DNA, 53 bp, Artificial Sequence
  Description of Artificial Sequence: Synthetic almond; 5' sequence and inner sequence
tagggaagagaaggacatatgatgtacgcaacgaacctaagagtggccaggga

SEQ ID NO: 5514 - DNA, 53 bp, Artificial Sequence; identical to SEQ ID NO: 1996
  Description of Artificial Sequence: Synthetic almond; 5' sequence and inner sequence

SEQ ID NO: 5515 - DNA, 53 bp, Artificial Sequence; identical to SEQ ID NO: 1224
  Description of Artificial Sequence: Synthetic almond; 5' sequence and inner sequence

SEQ ID NO: 5516 - DNA, 53 bp, Artificial Sequence; identical to SEQ ID NO: 1727
  Description of Artificial Sequence: Synthetic almond; 5' sequence and inner sequence

SEQ ID NO: 5517 - DNA, 53 bp, Artificial Sequence
  Description of Artificial Sequence: Synthetic almond; 5' sequence and inner sequence
tagggaagagaaggacatatgatcgcatgcgatgaacgaggcatgatgcgtca

SEQ ID NO: 5518 - DNA, 53 bp, Artificial Sequence; identical to SEQ ID NO: 1942
  Description of Artificial Sequence: Synthetic almond; 5' sequence and inner sequence

SEQ ID NO: 5519 - DNA, 53 bp, Artificial Sequence
  Description of Artificial Sequence: Synthetic almond; 5' sequence and inner sequence
tagggaagagaaggacatatgatcgaccgtggagaagcgagcatggatgcagc

SEQ ID NO: 5520 - DNA, 53 bp, Artificial Sequence
  Description of Artificial Sequence: Synthetic almond; 5' sequence and inner sequence
tagggaagagaaggacatatgattcgaacgaaccgcatgcatggtcaggcata

SEQ ID NO: 5521 - DNA, 53 bp, Artificial Sequence
  Description of Artificial Sequence: Synthetic almond; 5' sequence and inner sequence
tagggaagagaaggacatatgatggcatgcgatgaacgatgcatgatgcgtca

SEQ ID NO: 5522 - DNA, 53 bp, Artificial Sequence; identical to SEQ ID NO: 1141
  Description of Artificial Sequence: Synthetic almond; 5' sequence and inner sequence

SEQ ID NO: 5523 - DNA, 53 bp, Artificial Sequence; identical to SEQ ID NO: 1596
  Description of Artificial Sequence: Synthetic almond; 5' sequence and inner sequence

SEQ ID NO: 5524 - DNA, 53 bp, Artificial Sequence; identical to SEQ ID NO: 1119
  Description of Artificial Sequence: Synthetic almond; 5' sequence and inner sequence

SEQ ID NO: 5525 - DNA, 53 bp, Artificial Sequence
  Description of Artificial Sequence: Synthetic almond; 5' sequence and inner sequence
tagggaagagaaggacatatgatggccgaacgagcgtcaggtgcgtcggtgta

SEQ ID NO: 5526 - DNA, 53 bp, Artificial Sequence
  Description of Artificial Sequence: Synthetic almond; 5' sequence and inner sequence
tagggaagagaaggacatatgatcgcatgtggagtgagcgtccctgtggcaca

SEQ ID NO: 5527 - DNA, 53 bp, Artificial Sequence; identical to SEQ ID NO: 1101
  Description of Artificial Sequence: Synthetic almond; 5' sequence and inner sequence

SEQ ID NO: 5528 - DNA, 53 bp, Artificial Sequence; identical to SEQ ID NO: 1242
  Description of Artificial Sequence: Synthetic almond; 5' sequence and inner sequence

SEQ ID NO: 5529 - DNA, 53 bp, Artificial Sequence
  Description of Artificial Sequence: Synthetic almond; 5' sequence and inner sequence
tagggaagagaaggacatatgatctgagcggcaagtgcagcacgtacgttggt

SEQ ID NO: 5530 - DNA, 53 bp, Artificial Sequence
  Description of Artificial Sequence: Synthetic almond; 5' sequence and inner sequence
tagggaagagaaggacatatgatcatgcggcatgaacggacctacacgtgggc

SEQ ID NO: 5531 - DNA, 53 bp, Artificial Sequence
  Description of Artificial Sequence: Synthetic almond; 5' sequence and inner sequence
tagggaagagaaggacatatgatgcaacgcagggatacgtccgacgatgcgtg

SEQ ID NO: 5532 - DNA, 53 bp, Artificial Sequence; identical to SEQ ID NO: 1346
  Description of Artificial Sequence: Synthetic almond; 5' sequence and inner sequence

SEQ ID NO: 5533 - DNA, 53 bp, Artificial Sequence; identical to SEQ ID NO: 1680
  Description of Artificial Sequence: Synthetic almond; 5' sequence and inner sequence

SEQ ID NO: 5534 - DNA, 53 bp, Artificial Sequence; identical to SEQ ID NO: 1518
  Description of Artificial Sequence: Synthetic almond; 5' sequence and inner sequence

SEQ ID NO: 5535 - DNA, 53 bp, Artificial Sequence
  Description of Artificial Sequence: Synthetic almond; 5' sequence and inner sequence
tagggaagagaaggacatatgatggactgcactacctacacgtggccacgtac

SEQ ID NO: 5536 - DNA, 53 bp, Artificial Sequence; identical to SEQ ID NO: 1320
  Description of Artificial Sequence: Synthetic almond; 5' sequence and inner sequence

SEQ ID NO: 5537 - DNA, 53 bp, Artificial Sequence; identical to SEQ ID NO: 1277
  Description of Artificial Sequence: Synthetic almond; 5' sequence and inner sequence

SEQ ID NO: 5538 - DNA, 53 bp, Artificial Sequence; identical to SEQ ID NO: 1808
  Description of Artificial Sequence: Synthetic almond; 5' sequence and inner sequence

SEQ ID NO: 5539 - DNA, 53 bp, Artificial Sequence
  Description of Artificial Sequence: Synthetic almond; 5' sequence and inner sequence
tagggaagagaaggacatatgatcataccgtgcagcacatgtccgatgcgacc

SEQ ID NO: 5540 - DNA, 53 bp, Artificial Sequence; identical to SEQ ID NO: 1370
  Description of Artificial Sequence: Synthetic almond; 5' sequence and inner sequence

SEQ ID NO: 5541 - DNA, 53 bp, Artificial Sequence; identical to SEQ ID NO: 1223
  Description of Artificial Sequence: Synthetic almond; 5' sequence and inner sequence

SEQ ID NO: 5542 - DNA, 53 bp, Artificial Sequence; identical to SEQ ID NO: 1463
  Description of Artificial Sequence: Synthetic almond; 5' sequence and inner sequence

SEQ ID NO: 5543 - DNA, 53 bp, Artificial Sequence
  Description of Artificial Sequence: Synthetic almond; 5' sequence and inner sequence
tagggaagagaaggacatatgatccgcacgtagccctatcagtggggcatgca

SEQ ID NO: 5544 - DNA, 53 bp, Artificial Sequence; identical to SEQ ID NO: 1366
  Description of Artificial Sequence: Synthetic almond; 5' sequence and inner sequence

SEQ ID NO: 5545 - DNA, 53 bp, Artificial Sequence; identical to SEQ ID NO: 1583
  Description of Artificial Sequence: Synthetic almond; 5' sequence and inner sequence

SEQ ID NO: 5546 - DNA, 53 bp, Artificial Sequence; identical to SEQ ID NO: 1510
  Description of Artificial Sequence: Synthetic almond; 5' sequence and inner sequence

SEQ ID NO: 5547 - DNA, 53 bp, Artificial Sequence; identical to SEQ ID NO: 1657
  Description of Artificial Sequence: Synthetic almond; 5' sequence and inner sequence

SEQ ID NO: 5548 - DNA, 53 bp, Artificial Sequence; identical to SEQ ID NO: 1319
  Description of Artificial Sequence: Synthetic almond; 5' sequence and inner sequence

SEQ ID NO: 5549 - DNA, 53 bp, Artificial Sequence; identical to SEQ ID NO: 1135
  Description of Artificial Sequence: Synthetic almond; 5' sequence and inner sequence

SEQ ID NO: 5550 - DNA, 53 bp, Artificial Sequence; identical to SEQ ID NO: 1622
  Description of Artificial Sequence: Synthetic almond; 5' sequence and inner sequence

SEQ ID NO: 5551 - DNA, 53 bp, Artificial Sequence; identical to SEQ ID NO: 1324
  Description of Artificial Sequence: Synthetic almond; 5' sequence and inner sequence

SEQ ID NO: 5552 - DNA, 53 bp, Artificial Sequence
  Description of Artificial Sequence: Synthetic almond; 5' sequence and inner sequence
tagggaagagaaggacatatgatggacgcacgatgagcgccaagtgacatgga

SEQ ID NO: 5553 - DNA, 53 bp, Artificial Sequence; identical to SEQ ID NO: 1275
  Description of Artificial Sequence: Synthetic almond; 5' sequence and inner sequence

SEQ ID NO: 5554 - DNA, 53 bp, Artificial Sequence; identical to SEQ ID NO: 1722
  Description of Artificial Sequence: Synthetic almond; 5' sequence and inner sequence

SEQ ID NO: 5555 - DNA, 53 bp, Artificial Sequence
  Description of Artificial Sequence: Synthetic almond; 5' sequence and inner sequence
tagggaagagaaggacatatgatggaccgagcgagccatcaagtcggcatgca

SEQ ID NO: 5556 - DNA, 53 bp, Artificial Sequence; identical to SEQ ID NO: 1816
  Description of Artificial Sequence: Synthetic almond; 5' sequence and inner sequence

SEQ ID NO: 5557 - DNA, 53 bp, Artificial Sequence; identical to SEQ ID NO: 1535
  Description of Artificial Sequence: Synthetic almond; 5' sequence and inner sequence

SEQ ID NO: 5558 - DNA, 53 bp, Artificial Sequence; identical to SEQ ID NO: 1568
  Description of Artificial Sequence: Synthetic almond; 5' sequence and inner sequence

SEQ ID NO: 5559 - DNA, 52 bp, Artificial Sequence
  Description of Artificial Sequence: Synthetic almond; 5' sequence and inner sequence
tagggaagagaaggacatatgatggccgaacggaccgacaagtgcgcatgga

SEQ ID NO: 5560 - DNA, 53 bp, Artificial Sequence; identical to SEQ ID NO: 1695
  Description of Artificial Sequence: Synthetic almond; 5' sequence and inner sequence

SEQ ID NO: 5561 - DNA, 53 bp, Artificial Sequence; identical to SEQ ID NO: 1440
  Description of Artificial Sequence: Synthetic almond; 5' sequence and inner sequence

SEQ ID NO: 5562 - DNA, 52 bp, Artificial Sequence; identical to SEQ ID NO: 1334
  Description of Artificial Sequence: Synthetic almond; 5' sequence and inner sequence

SEQ ID NO: 5563 - DNA, 53 bp, Artificial Sequence; identical to SEQ ID NO: 1615
  Description of Artificial Sequence: Synthetic almond; 5' sequence and inner sequence

SEQ ID NO: 5564 - DNA, 53 bp, Artificial Sequence; identical to SEQ ID NO: 1952
  Description of Artificial Sequence: Synthetic almond; 5' sequence and inner sequence

SEQ ID NO: 5565 - DNA, 53 bp, Artificial Sequence
  Description of Artificial Sequence: Synthetic almond; 5' sequence and inner sequence
tagggaagagaaggacatatgatggcatgcacgcacctacacgtgggtatggc

SEQ ID NO: 5566 - DNA, 53 bp, Artificial Sequence; identical to SEQ ID NO: 1557
  Description of Artificial Sequence: Synthetic almond; 5' sequence and inner sequence

SEQ ID NO: 5567 - DNA, 53 bp, Artificial Sequence; identical to SEQ ID NO: 1818
  Description of Artificial Sequence: Synthetic almond; 5' sequence and inner sequence

SEQ ID NO: 5568 - DNA, 53 bp, Artificial Sequence
  Description of Artificial Sequence: Synthetic almond; 5' sequence and inner sequence
tagggaagagaaggacatatgatgcgtgcagcatagggagcacacgtcccgtg

SEQ ID NO: 5569 - DNA, 53 bp, Artificial Sequence
  Description of Artificial Sequence: Synthetic almond; 5' sequence and inner sequence
tagggaagagaaggacatatgatggccgacgatgaccgcatgcacgattgcca

SEQ ID NO: 5570 - DNA, 53 bp, Artificial Sequence; identical to SEQ ID NO: 1900
  Description of Artificial Sequence: Synthetic almond; 5' sequence and inner sequence

SEQ ID NO: 5571 - DNA, 53 bp, Artificial Sequence
  Description of Artificial Sequence: Synthetic almond; 5' sequence and inner sequence
tagggaagagaaggacatatgatggcatgcgatgaactaggcatgatgcgtca

SEQ ID NO: 5572 - DNA, 53 bp, Artificial Sequence; identical to SEQ ID NO: 1231
  Description of Artificial Sequence: Synthetic almond; 5' sequence and inner sequence

SEQ ID NO: 5573 - DNA, 53 bp, Artificial Sequence
  Description of Artificial Sequence: Synthetic almond; 5' sequence and inner sequence
tagggaagagaaggacatatgatccggagcgacatcaagcggtggtgtgcgtg

SEQ ID NO: 5574 - DNA, 53 bp, Artificial Sequence; identical to SEQ ID NO: 1800
  Description of Artificial Sequence: Synthetic almond; 5' sequence and inner sequence

SEQ ID NO: 5575 - DNA, 53 bp, Artificial Sequence
  Description of Artificial Sequence: Synthetic almond; 5' sequence and inner sequence
tagggaagagaaggacatatgattgcacaaacggaccgacaagtgcgcatgga

SEQ ID NO: 5576 - DNA, 53 bp, Artificial Sequence
  Description of Artificial Sequence: Synthetic almond; 5' sequence and inner sequence
tagggaagagaaggacatatgatggcatgcgatgaacgaggcatgatgcgaca

SEQ ID NO: 5577 - DNA, 53 bp, Artificial Sequence; identical to SEQ ID NO: 1475
  Description of Artificial Sequence: Synthetic almond; 5' sequence and inner sequence

SEQ ID NO: 5578 - DNA, 53 bp, Artificial Sequence; identical to SEQ ID NO: 1373
  Description of Artificial Sequence: Synthetic almond; 5' sequence and inner sequence

SEQ ID NO: 5579 - DNA, 53 bp, Artificial Sequence
  Description of Artificial Sequence: Synthetic almond; 5' sequence and inner sequence
tagggaagagaaggacatatgatccgaagcgacatcaagcggtggtgtgcgtg

SEQ ID NO: 5580 - DNA, 53 bp, Artificial Sequence
  Description of Artificial Sequence: Synthetic almond; 5' sequence and inner sequence
tagggaagagaaggacatatgatcgaaccggaacgtggtgactgggcttgtgt

SEQ ID NO: 5581 - DNA, 53 bp, Artificial Sequence; identical to SEQ ID NO: 1301
  Description of Artificial Sequence: Synthetic almond; 5' sequence and inner sequence

SEQ ID NO: 5582 - DNA, 53 bp, Artificial Sequence; identical to SEQ ID NO: 1979
  Description of Artificial Sequence: Synthetic almond; 5' sequence and inner sequence

SEQ ID NO: 5583 - DNA, 53 bp, Artificial Sequence
  Description of Artificial Sequence: Synthetic almond; 5' sequence and inner sequence
tagggaagagaaggacatatgatgacatgcagcaacgtacgcccttccgtgca

SEQ ID NO: 5584 - DNA, 53 bp, Artificial Sequence; identical to SEQ ID NO: 1889
  Description of Artificial Sequence: Synthetic almond; 5' sequence and inner sequence

SEQ ID NO: 5585 - DNA, 53 bp, Artificial Sequence
  Description of Artificial Sequence: Synthetic almond; 5' sequence and inner sequence
tagggaagagaaggacatatgatggcctgaccaaccgaccctcgtgcgtcacg

SEQ ID NO: 5586 - DNA, 53 bp, Artificial Sequence; identical to SEQ ID NO: 1317
  Description of Artificial Sequence: Synthetic almond; 5' sequence and inner sequence

SEQ ID NO: 5587 - DNA, 53 bp, Artificial Sequence; identical to SEQ ID NO: 1686
  Description of Artificial Sequence: Synthetic almond; 5' sequence and inner sequence

SEQ ID NO: 5588 - DNA, 53 bp, Artificial Sequence
  Description of Artificial Sequence: Synthetic almond; 5' sequence and inner sequence
tagggaagagaaggacatatgatcgtgcgtcacgcagagggccagctcggaca

SEQ ID NO: 5589 - DNA, 53 bp, Artificial Sequence; identical to SEQ ID NO: 1400
  Description of Artificial Sequence: Synthetic almond; 5' sequence and inner sequence

SEQ ID NO: 5590 - DNA, 53 bp, Artificial Sequence
  Description of Artificial Sequence: Synthetic almond; 5' sequence and inner sequence
tagggaagagaaggacatatgatcgtccgaaacgcacgtgcaagttgggcata

SEQ ID NO: 5591 - DNA, 53 bp, Artificial Sequence
  Description of Artificial Sequence: Synthetic almond; 5' sequence and inner sequence
tagggaagagaaggacatatgatggcatgcgcggacattcaagttggcgtgga

SEQ ID NO: 5592 - DNA, 53 bp, Artificial Sequence
  Description of Artificial Sequence: Synthetic almond; 5' sequence and inner sequence
tagggaagagaaggacatatgattcatgtggacgatcgacccgtacgtggaca

SEQ ID NO: 5593 - DNA, 53 bp, Artificial Sequence; identical to SEQ ID NO: 1801
  Description of Artificial Sequence: Synthetic almond; 5' sequence and inner sequence

SEQ ID NO: 5594 - DNA, 53 bp, Artificial Sequence; identical to SEQ ID NO: 1169
  Description of Artificial Sequence: Synthetic almond; 5' sequence and inner sequence

SEQ ID NO: 5595 - DNA, 53 bp, Artificial Sequence; identical to SEQ ID NO: 1239
  Description of Artificial Sequence: Synthetic almond; 5' sequence and inner sequence

SEQ ID NO: 5596 - DNA, 53 bp, Artificial Sequence; identical to SEQ ID NO: 1603
  Description of Artificial Sequence: Synthetic almond; 5' sequence and inner sequence

SEQ ID NO: 5597 - DNA, 53 bp, Artificial Sequence
  Description of Artificial Sequence: Synthetic almond; 5' sequence and inner sequence
tagggaagagaaggacatatgattggacgcaacgtaacgataacgtgggagtg

SEQ ID NO: 5598 - DNA, 53 bp, Artificial Sequence
  Description of Artificial Sequence: Synthetic almond; 5' sequence and inner sequence
tagggaagagaaggacatatgatccgatcggaccgattcaacgtgtgcatgga

SEQ ID NO: 5599 - DNA, 53 bp, Artificial Sequence; identical to SEQ ID NO: 1768
  Description of Artificial Sequence: Synthetic almond; 5' sequence and inner sequence

SEQ ID NO: 5600 - DNA, 53 bp, Artificial Sequence; identical to SEQ ID NO: 1758
  Description of Artificial Sequence: Synthetic almond; 5' sequence and inner sequence

SEQ ID NO: 5601 - DNA, 53 bp, Artificial Sequence; identical to SEQ ID NO: 1289
  Description of Artificial Sequence: Synthetic almond; 5' sequence and inner sequence

SEQ ID NO: 5602 - DNA, 53 bp, Artificial Sequence; identical to SEQ ID NO: 1227
  Description of Artificial Sequence: Synthetic almond; 5' sequence and inner sequence

SEQ ID NO: 5603 - DNA, 53 bp, Artificial Sequence
  Description of Artificial Sequence: Synthetic almond; 5' sequence and inner sequence
tagggaagagaaggacatatgatgcacgactcgcaccctatcatgcggccatg

SEQ ID NO: 5604 - DNA, 53 bp, Artificial Sequence; identical to SEQ ID NO: 1495
  Description of Artificial Sequence: Synthetic almond; 5' sequence and inner sequence

SEQ ID NO: 5605 - DNA, 53 bp, Artificial Sequence
  Description of Artificial Sequence: Synthetic almond; 5' sequence and inner sequence
tagggaagagaaggacatatgatggacgtagcgaccgaacggtgtgccatgta

SEQ ID NO: 5606 - DNA, 53 bp, Artificial Sequence; identical to SEQ ID NO: 1780
  Description of Artificial Sequence: Synthetic almond; 5' sequence and inner sequence

SEQ ID NO: 5607 - DNA, 53 bp, Artificial Sequence; identical to SEQ ID NO: 1187
  Description of Artificial Sequence: Synthetic almond; 5' sequence and inner sequence

SEQ ID NO: 5608 - DNA, 53 bp, Artificial Sequence; identical to SEQ ID NO: 1776
  Description of Artificial Sequence: Synthetic almond; 5' sequence and inner sequence

SEQ ID NO: 5609 - DNA, 53 bp, Artificial Sequence; identical to SEQ ID NO: 1340
  Description of Artificial Sequence: Synthetic almond; 5' sequence and inner sequence

SEQ ID NO: 5610 - DNA, 53 bp, Artificial Sequence
  Description of Artificial Sequence: Synthetic almond; 5' sequence and inner sequence
tagggaagagaaggacatatgatggacgcagcgtggcatatcacgtgatcatg

SEQ ID NO: 5611 - DNA, 53 bp, Artificial Sequence
  Description of Artificial Sequence: Synthetic almond; 5' sequence and inner sequence
tagggaagagaaggacatatgatgtgcgccgatgaccgtcaagtcgtggtgta

SEQ ID NO: 5612 - DNA, 53 bp, Artificial Sequence
  Description of Artificial Sequence: Synthetic almond; 5' sequence and inner sequence
tagggaagagaaggacatatgatcgtgacagcgagcacgtccaacgctgcgca

SEQ ID NO: 5613 - DNA, 53 bp, Artificial Sequence
  Description of Artificial Sequence: Synthetic almond; 5' sequence and inner sequence
tagggaagagaaggacatatgatggccgactcgaccgcgtcatgaacggcatg

SEQ ID NO: 5614 - DNA, 53 bp, Artificial Sequence; identical to SEQ ID NO: 1432
  Description of Artificial Sequence: Synthetic almond; 5' sequence and inner sequence

SEQ ID NO: 5615 - DNA, 53 bp, Artificial Sequence; identical to SEQ ID NO: 1280
  Description of Artificial Sequence: Synthetic almond; 5' sequence and inner sequence

SEQ ID NO: 5616 - DNA, 53 bp, Artificial Sequence
  Description of Artificial Sequence: Synthetic almond; 5' sequence and inner sequence
tagggaagagaaggacatatgatggccaagcgagcttcaaggcggcatgttgc

SEQ ID NO: 5617 - DNA, 53 bp, Artificial Sequence
  Description of Artificial Sequence: Synthetic almond; 5' sequence and inner sequence
tagggaagagaaggacatatgatggcatgcgatgaacgaggcattatgcgtca

SEQ ID NO: 5618 - DNA, 53 bp, Artificial Sequence; identical to SEQ ID NO: 1624
  Description of Artificial Sequence: Synthetic almond; 5' sequence and inner sequence

SEQ ID NO: 5619 - DNA, 54 bp, Artificial Sequence
  Description of Artificial Sequence: Synthetic almond; 5' sequence and inner sequence
tagggaagagaaggacatatgatggcctgaccggacctagtggctgaacgtggc

SEQ ID NO: 5620 - DNA, 53 bp, Artificial Sequence
  Description of Artificial Sequence: Synthetic almond; 5' sequence and inner sequence
tagggaagagaaggacatatgatgtcatgcacgaacactctcatggcggcatg

SEQ ID NO: 5621 - DNA, 53 bp, Artificial Sequence
  Description of Artificial Sequence: Synthetic almond; 5' sequence and inner sequence
tagggaagagaaggacatatgattgcatgcgatgaacgaggcatgatgcgtca

SEQ ID NO: 5622 - DNA, 51 bp, Artificial Sequence; identical to SEQ ID NO: 1423
  Description of Artificial Sequence: Synthetic almond; 5' sequence and inner sequence

SEQ ID NO: 5623 - DNA, 53 bp, Artificial Sequence; identical to SEQ ID NO: 1130
  Description of Artificial Sequence: Synthetic almond; 5' sequence and inner sequence

SEQ ID NO: 5624 - DNA, 53 bp, Artificial Sequence; identical to SEQ ID NO: 1189
  Description of Artificial Sequence: Synthetic almond; 5' sequence and inner sequence

SEQ ID NO: 5625 - DNA, 53 bp, Artificial Sequence; identical to SEQ ID NO: 1571
  Description of Artificial Sequence: Synthetic almond; 5' sequence and inner sequence

SEQ ID NO: 5626 - DNA, 53 bp, Artificial Sequence; identical to SEQ ID NO: 1420
  Description of Artificial Sequence: Synthetic almond; 5' sequence and inner sequence

SEQ ID NO: 5627 - DNA, 53 bp, Artificial Sequence
  Description of Artificial Sequence: Synthetic almond; 5' sequence and inner sequence
tagggaagagaaggacatatgatggcatgcgatgaacgaggcatgatgcggca

SEQ ID NO: 5628 - DNA, 53 bp, Artificial Sequence; identical to SEQ ID NO: 1413
  Description of Artificial Sequence: Synthetic almond; 5' sequence and inner sequence

SEQ ID NO: 5629 - DNA, 53 bp, Artificial Sequence; identical to SEQ ID NO: 1507
  Description of Artificial Sequence: Synthetic almond; 5' sequence and inner sequence

SEQ ID NO: 5630 - DNA, 53 bp, Artificial Sequence; identical to SEQ ID NO: 1926
  Description of Artificial Sequence: Synthetic almond; 5' sequence and inner sequence

SEQ ID NO: 5631 - DNA, 53 bp, Artificial Sequence
  Description of Artificial Sequence: Synthetic almond; 5' sequence and inner sequence
tagggaagagaaggacatatgatgcaccgatcgcaacgtgtacaaggggtgtg

SEQ ID NO: 5632 - DNA, 53 bp, Artificial Sequence; identical to SEQ ID NO: 1405
  Description of Artificial Sequence: Synthetic almond; 5' sequence and inner sequence

SEQ ID NO: 5633 - DNA, 53 bp, Artificial Sequence; identical to SEQ ID NO: 1486
  Description of Artificial Sequence: Synthetic almond; 5' sequence and inner sequence

SEQ ID NO: 5634 - DNA, 53 bp, Artificial Sequence
  Description of Artificial Sequence: Synthetic almond; 5' sequence and inner sequence
tagggaagagaaggacatatgatcgaaccgctgcaaggtgtcagtgcgtggca

SEQ ID NO: 5635 - DNA, 53 bp, Artificial Sequence; identical to SEQ ID NO: 1266
  Description of Artificial Sequence: Synthetic almond; 5' sequence and inner sequence

SEQ ID NO: 5636 - DNA, 53 bp, Artificial Sequence; identical to SEQ ID NO: 1804
  Description of Artificial Sequence: Synthetic almond; 5' sequence and inner sequence

SEQ ID NO: 5637 - DNA, 53 bp, Artificial Sequence; identical to SEQ ID NO: 1590
  Description of Artificial Sequence: Synthetic almond; 5' sequence and inner sequence

SEQ ID NO: 5638 - DNA, 53 bp, Artificial Sequence
  Description of Artificial Sequence: Synthetic almond; 5' sequence and inner sequence
tagggaagagaaggacatatgatgcacgactcgcaccctatcatgagcccatg

SEQ ID NO: 5639 - DNA, 53 bp, Artificial Sequence; identical to SEQ ID NO: 1303
  Description of Artificial Sequence: Synthetic almond; 5' sequence and inner sequence

SEQ ID NO: 5640 - DNA, 53 bp, Artificial Sequence
  Description of Artificial Sequence: Synthetic almond; 5' sequence and inner sequence
tagggaagagaaggacatatgatccatgcagcatacgtgcagtctcgtaccga

SEQ ID NO: 5641 - DNA, 53 bp, Artificial Sequence
  Description of Artificial Sequence: Synthetic almond; 5' sequence and inner sequence
tagggaagagaaggacatatgatggccaagctgaccgtaaaggcaggcgtgca

SEQ ID NO: 5642 - DNA, 53 bp, Artificial Sequence
  Description of Artificial Sequence: Synthetic almond; 5' sequence and inner sequence
tagggaagagaaggacatatgatcgacccgcgaagtgaggcagtgcgacggtg

SEQ ID NO: 5643 - DNA, 53 bp, Artificial Sequence; identical to SEQ ID NO: 1351
  Description of Artificial Sequence: Synthetic almond; 5' sequence and inner sequence

SEQ ID NO: 5644 - DNA, 53 bp, Artificial Sequence
  Description of Artificial Sequence: Synthetic almond; 5' sequence and inner sequence
tagggaagagaaggacatatgataatgtgcacgatcgtaccctacatgtggca

SEQ ID NO: 5645 - DNA, 53 bp, Artificial Sequence; identical to SEQ ID NO: 1526
  Description of Artificial Sequence: Synthetic almond; 5' sequence and inner sequence

SEQ ID NO: 5646 - DNA, 53 bp, Artificial Sequence; identical to SEQ ID NO: 1962
  Description of Artificial Sequence: Synthetic almond; 5' sequence and inner sequence

SEQ ID NO: 5647 - DNA, 53 bp, Artificial Sequence; identical to SEQ ID NO: 1182
  Description of Artificial Sequence: Synthetic almond; 5' sequence and inner sequence

SEQ ID NO: 5648 - DNA, 53 bp, Artificial Sequence; identical to SEQ ID NO: 1884
  Description of Artificial Sequence: Synthetic almond; 5' sequence and inner sequence

SEQ ID NO: 5649 - DNA, 53 bp, Artificial Sequence; identical to SEQ ID NO: 1291
  Description of Artificial Sequence: Synthetic almond; 5' sequence and inner sequence

SEQ ID NO: 5650 - DNA, 53 bp, Artificial Sequence
  Description of Artificial Sequence: Synthetic almond; 5' sequence and inner sequence
tagggaagagaaggacatatgatggccgaacgaccgatcgagtggcgcatggc

SEQ ID NO: 5651 - DNA, 53 bp, Artificial Sequence
  Description of Artificial Sequence: Synthetic almond; 5' sequence and inner sequence
tagggaagagaaggacatatgatgtcgtgacgcaaccggtcaagcggtgtgta

SEQ ID NO: 5652 - DNA, 53 bp, Artificial Sequence
  Description of Artificial Sequence: Synthetic almond; 5' sequence and inner sequence
tagggaagagaaggacatatgatcacatgccagtccgtcaccacgccgcgtca

SEQ ID NO: 5653 - DNA, 53 bp, Artificial Sequence
  Description of Artificial Sequence: Synthetic almond; 5' sequence and inner sequence
tagggaagagaaggacatatgatgcacgactcgcaccctatcatgacgccatg

SEQ ID NO: 5654 - DNA, 53 bp, Artificial Sequence
  Description of Artificial Sequence: Synthetic almond; 5' sequence and inner sequence
tagggaagagaaggacatatgatgcgacaagcagcagacgagatcacggcccg

SEQ ID NO: 5655 - DNA, 53 bp, Artificial Sequence
  Description of Artificial Sequence: Synthetic almond; 5' sequence and inner sequence
tagggaagagaaggacatatgatacggtcagggagcagtggacgcgttgcacg

SEQ ID NO: 5656 - DNA, 53 bp, Artificial Sequence; identical to SEQ ID NO: 1387
  Description of Artificial Sequence: Synthetic almond; 5' sequence and inner sequence

SEQ ID NO: 5657 - DNA, 53 bp, Artificial Sequence; identical to SEQ ID NO: 1670
  Description of Artificial Sequence: Synthetic almond; 5' sequence and inner sequence

SEQ ID NO: 5658 - DNA, 53 bp, Artificial Sequence
  Description of Artificial Sequence: Synthetic almond; 5' sequence and inner sequence
tagggaagagaaggacatatgatcgcaccgtcaagcgggcaggcactttggtg

SEQ ID NO: 5659 - DNA, 53 bp, Artificial Sequence
  Description of Artificial Sequence: Synthetic almond; 5' sequence and inner sequence
tagggaagagaaggacatatgatcgacacgcatcatgtgtgcctaccgtcacg

SEQ ID NO: 5660 - DNA, 53 bp, Artificial Sequence
  Description of Artificial Sequence: Synthetic almond; 5' sequence and inner sequence
tagggaagagaaggacatatgatgcaacgcagccggacgatcgacacgtgact

SEQ ID NO: 5661 - DNA, 53 bp, Artificial Sequence; identical to SEQ ID NO: 1600
  Description of Artificial Sequence: Synthetic almond; 5' sequence and inner sequence

SEQ ID NO: 5662 - DNA, 53 bp, Artificial Sequence
  Description of Artificial Sequence: Synthetic almond; 5' sequence and inner sequence
tagggaagagaaggacatatgatcgtccgacaacgacgtaccggtgtgccacg

SEQ ID NO: 5663 - DNA, 53 bp, Artificial Sequence
  Description of Artificial Sequence: Synthetic almond; 5' sequence and inner sequence
tagggaagagaaggacatatgatgcgccaccgcaacatgtgcacgtatcgaca

SEQ ID NO: 5664 - DNA, 53 bp, Artificial Sequence
  Description of Artificial Sequence: Synthetic almond; 5' sequence and inner sequence
tagggaagagaaggacatatgatcgcaccgtgacataggggcattcgcgacac

SEQ ID NO: 5665 - DNA, 53 bp, Artificial Sequence; identical to SEQ ID NO: 1863
  Description of Artificial Sequence: Synthetic almond; 5' sequence and inner sequence

SEQ ID NO: 5666 - DNA, 53 bp, Artificial Sequence
  Description of Artificial Sequence: Synthetic almond; 5' sequence and inner sequence
tagggaagagaaggacatatgatgcactgagcgtacgtatcagcgggcacgca

SEQ ID NO: 5667 - DNA, 53 bp, Artificial Sequence
  Description of Artificial Sequence: Synthetic almond; 5' sequence and inner sequence
tagggaagagaaggacatatgatgtcatgcgcggacactatcatggcggcatg

SEQ ID NO: 5668 - DNA, 53 bp, Artificial Sequence; identical to SEQ ID NO: 1784
  Description of Artificial Sequence: Synthetic almond; 5' sequence and inner sequence

SEQ ID NO: 5669 - DNA, 53 bp, Artificial Sequence; identical to SEQ ID NO: 1660
  Description of Artificial Sequence: Synthetic almond; 5' sequence and inner sequence

SEQ ID NO: 5670 - DNA, 53 bp, Artificial Sequence
  Description of Artificial Sequence: Synthetic almond; 5' sequence and inner sequence
tagggaagagaaggacatatgattggactgtgcgcaccgattacgtggccatg

SEQ ID NO: 5671 - DNA, 53 bp, Artificial Sequence
  Description of Artificial Sequence: Synthetic almond; 5' sequence and inner sequence
tagggaagagaaggacatatgatcgcagacacacggcatgctctgacctggca

SEQ ID NO: 5672 - DNA, 53 bp, Artificial Sequence; identical to SEQ ID NO: 1441
  Description of Artificial Sequence: Synthetic almond; 5' sequence and inner sequence

SEQ ID NO: 5673 - DNA, 53 bp, Artificial Sequence
  Description of Artificial Sequence: Synthetic almond; 5' sequence and inner sequence
tagggaagagaaggacatatgatcgtccacgcgcaccggtgagttacggcaca

SEQ ID NO: 5674 - DNA, 53 bp, Artificial Sequence; identical to SEQ ID NO: 1721
  Description of Artificial Sequence: Synthetic almond; 5' sequence and inner sequence

SEQ ID NO: 5675 - DNA, 53 bp, Artificial Sequence; identical to SEQ ID NO: 1490
  Description of Artificial Sequence: Synthetic almond; 5' sequence and inner sequence

SEQ ID NO: 5676 - DNA, 53 bp, Artificial Sequence; identical to SEQ ID NO: 1636
  Description of Artificial Sequence: Synthetic almond; 5' sequence and inner sequence

SEQ ID NO: 5677 - DNA, 53 bp, Artificial Sequence; identical to SEQ ID NO: 1345
  Description of Artificial Sequence: Synthetic almond; 5' sequence and inner sequence

SEQ ID NO: 5678 - DNA, 53 bp, Artificial Sequence
  Description of Artificial Sequence: Synthetic almond; 5' sequence and inner sequence
tagggaagagaaggacatatgatgcgtaccagcggaacaggactgcgatgaca

SEQ ID NO: 5679 - DNA, 53 bp, Artificial Sequence
  Description of Artificial Sequence: Synthetic almond; 5' sequence and inner sequence
tagggaagagaaggacatatgatcgcaccgagcgtgatcgtggttcgcagtca

SEQ ID NO: 5680 - DNA, 53 bp, Artificial Sequence; identical to SEQ ID NO: 1477
  Description of Artificial Sequence: Synthetic almond; 5' sequence and inner sequence

SEQ ID NO: 5681 - DNA, 53 bp, Artificial Sequence; identical to SEQ ID NO: 1325
  Description of Artificial Sequence: Synthetic almond; 5' sequence and inner sequence

SEQ ID NO: 5682 - DNA, 53 bp, Artificial Sequence
  Description of Artificial Sequence: Synthetic almond; 5' sequence and inner sequence
tagggaagagaaggacatatgatggacgcagcgctgacggtggatcatgcact

SEQ ID NO: 5683 - DNA, 53 bp, Artificial Sequence; identical to SEQ ID NO: 1267
  Description of Artificial Sequence: Synthetic almond; 5' sequence and inner sequence

SEQ ID NO: 5684 - DNA, 53 bp, Artificial Sequence; identical to SEQ ID NO: 1927
  Description of Artificial Sequence: Synthetic almond; 5' sequence and inner sequence

SEQ ID NO: 5685 - DNA, 53 bp, Artificial Sequence; identical to SEQ ID NO: 1846
  Description of Artificial Sequence: Synthetic almond; 5' sequence and inner sequence

SEQ ID NO: 5686 - DNA, 53 bp, Artificial Sequence; identical to SEQ ID NO: 1991
  Description of Artificial Sequence: Synthetic almond; 5' sequence and inner sequence

SEQ ID NO: 5687 - DNA, 53 bp, Artificial Sequence
  Description of Artificial Sequence: Synthetic almond; 5' sequence and inner sequence
tagggaagagaaggacatatgatccatgtccgacgataccatacgcatggcca

SEQ ID NO: 5688 - DNA, 53 bp, Artificial Sequence
  Description of Artificial Sequence: Synthetic almond; 5' sequence and inner sequence
tagggaagagaaggacatatgatgtacgcctcggagctagcaggtggtgtgga

SEQ ID NO: 5689 - DNA, 53 bp, Artificial Sequence; identical to SEQ ID NO: 1662
  Description of Artificial Sequence: Synthetic almond; 5' sequence and inner sequence

SEQ ID NO: 5690 - DNA, 53 bp, Artificial Sequence
  Description of Artificial Sequence: Synthetic almond; 5' sequence and inner sequence
tagggaagagaaggacatatgatggccggcgaaccctagcaagtgcatgcgtg

SEQ ID NO: 5691 - DNA, 53 bp, Artificial Sequence
  Description of Artificial Sequence: Synthetic almond; 5' sequence and inner sequence
tagggaagagaaggacatatgatccgcacgtagccctatcagcggtgcatgca

SEQ ID NO: 5692 - DNA, 53 bp, Artificial Sequence
  Description of Artificial Sequence: Synthetic almond; 5' sequence and inner sequence
tagggaagagaaggacatatgatgatgggcagagcggaccgtctcacgtggtg

SEQ ID NO: 5693 - DNA, 53 bp, Artificial Sequence; identical to SEQ ID NO: 1534
  Description of Artificial Sequence: Synthetic almond; 5' sequence and inner sequence

SEQ ID NO: 5694 - DNA, 53 bp, Artificial Sequence
  Description of Artificial Sequence: Synthetic almond; 5' sequence and inner sequence
tagggaagagaaggacatatgatggcatgcgatgaacgaggcatgatgtgtca

SEQ ID NO: 5695 - DNA, 53 bp, Artificial Sequence; identical to SEQ ID NO: 1374
  Description of Artificial Sequence: Synthetic almond; 5' sequence and inner sequence

SEQ ID NO: 5696 - DNA, 53 bp, Artificial Sequence; identical to SEQ ID NO: 1386
  Description of Artificial Sequence: Synthetic almond; 5' sequence and inner sequence

SEQ ID NO: 5697 - DNA, 53 bp, Artificial Sequence; identical to SEQ ID NO: 1788
  Description of Artificial Sequence: Synthetic almond; 5' sequence and inner sequence

SEQ ID NO: 5698 - DNA, 53 bp, Artificial Sequence
  Description of Artificial Sequence: Synthetic almond; 5' sequence and inner sequence
tagggaagagaaggacatatgatgcggtacgaagcaacggcctgcactgcgtg

SEQ ID NO: 5699 - DNA, 53 bp, Artificial Sequence; identical to SEQ ID NO: 1456
  Description of Artificial Sequence: Synthetic almond; 5' sequence and inner sequence

SEQ ID NO: 5700 - DNA, 53 bp, Artificial Sequence
  Description of Artificial Sequence: Synthetic almond; 5' sequence and inner sequence
tagggaagagaaggacatatgatgctactgcgcgtgaccatatcaagcggaca

SEQ ID NO: 5701 - DNA, 53 bp, Artificial Sequence; identical to SEQ ID NO: 1607
  Description of Artificial Sequence: Synthetic almond; 5' sequence and inner sequence

SEQ ID NO: 5702 - DNA, 53 bp, Artificial Sequence
  Description of Artificial Sequence: Synthetic almond; 5' sequence and inner sequence
tagggaagagaaggacatatgatcgatgcgtcgatcgtacgtcatgcgcgtca

SEQ ID NO: 5703 - DNA, 53 bp, Artificial Sequence; identical to SEQ ID NO: 1608
  Description of Artificial Sequence: Synthetic almond; 5' sequence and inner sequence

SEQ ID NO: 5704 - DNA, 53 bp, Artificial Sequence; identical to SEQ ID NO: 2001
  Description of Artificial Sequence: Synthetic almond; 5' sequence and inner sequence

SEQ ID NO: 5705 - DNA, 53 bp, Artificial Sequence; identical to SEQ ID NO: 1754
  Description of Artificial Sequence: Synthetic almond; 5' sequence and inner sequence

SEQ ID NO: 5706 - DNA, 53 bp, Artificial Sequence
  Description of Artificial Sequence: Synthetic almond; 5' sequence and inner sequence
tagggaagagaaggacatatgatacgtctcggaacgcaacggtgtgtgtgtgc

SEQ ID NO: 5707 - DNA, 53 bp, Artificial Sequence
  Description of Artificial Sequence: Synthetic almond; 5' sequence and inner sequence
tagggaagagaaggacatatgatggcatgcgatgaacgagtcatgatgcgtca

SEQ ID NO: 5708 - DNA, 53 bp, Artificial Sequence
  Description of Artificial Sequence: Synthetic almond; 5' sequence and inner sequence
tagggaagagaaggacatatgatggcatgcacgcacctacacttgggtatgga

SEQ ID NO: 5709 - DNA, 53 bp, Artificial Sequence
  Description of Artificial Sequence: Synthetic almond; 5' sequence and inner sequence
tagggaagagaaggacatatgatgcaacggcatggagtgacctgcgctgaacg

SEQ ID NO: 5710 - DNA, 53 bp, Artificial Sequence
  Description of Artificial Sequence: Synthetic almond; 5' sequence and inner sequence
tagggaagagaaggacatatgatggcctgaccgaacgtagagcatgtgcttgc

SEQ ID NO: 5711 - DNA, 53 bp, Artificial Sequence
  Description of Artificial Sequence: Synthetic almond; 5' sequence and inner sequence
tagggaagagaaggacatatgatccatcacggacgaactcacgcacggtgaca

SEQ ID NO: 5712 - DNA, 53 bp, Artificial Sequence; identical to SEQ ID NO: 1261
  Description of Artificial Sequence: Synthetic almond; 5' sequence and inner sequence

SEQ ID NO: 5713 - DNA, 53 bp, Artificial Sequence
  Description of Artificial Sequence: Synthetic almond; 5' sequence and inner sequence
tagggaagagaaggacatatgatggatgacgatgcactacacgtggcttggac

SEQ ID NO: 5714 - DNA, 53 bp, Artificial Sequence; identical to SEQ ID NO: 1951
  Description of Artificial Sequence: Synthetic almond; 5' sequence and inner sequence

SEQ ID NO: 5715 - DNA, 53 bp, Artificial Sequence
  Description of Artificial Sequence: Synthetic almond; 5' sequence and inner sequence
tagggaagagaaggacatatgatcgtaccggagaggcaggcatgggcacggca

SEQ ID NO: 5716 - DNA, 53 bp, Artificial Sequence; identical to SEQ ID NO: 1705
  Description of Artificial Sequence: Synthetic almond; 5' sequence and inner sequence

SEQ ID NO: 5717 - DNA, 53 bp, Artificial Sequence
  Description of Artificial Sequence: Synthetic almond; 5' sequence and inner sequence
tagggaagagaaggacatatgatggccaagctgaccgtaaaggcaggcgcgta

SEQ ID NO: 5718 - DNA, 53 bp, Artificial Sequence
  Description of Artificial Sequence: Synthetic almond; 5' sequence and inner sequence
tagggaagagaaggacatatgatgcatggccgaatgcaccctgcagttgcgcg

SEQ ID NO: 5719 - DNA, 53 bp, Artificial Sequence
  Description of Artificial Sequence: Synthetic almond; 5' sequence and inner sequence
tagggaagagaaggacatatgatgcacggaacggaacaacaagggcaggcatg

SEQ ID NO: 5720 - DNA, 53 bp, Artificial Sequence; identical to SEQ ID NO: 1461
  Description of Artificial Sequence: Synthetic almond; 5' sequence and inner sequence

SEQ ID NO: 5721 - DNA, 53 bp, Artificial Sequence
  Description of Artificial Sequence: Synthetic almond; 5' sequence and inner sequence
tagggaagagaaggacatatgatgcagatggacgatctgagcgtgaccgtggt

SEQ ID NO: 5722 - DNA, 53 bp, Artificial Sequence
  Description of Artificial Sequence: Synthetic almond; 5' sequence and inner sequence
tagggaagagaaggacatatgatggtcggatcgacactgaacgtggtcacgca

SEQ ID NO: 5723 - DNA, 53 bp, Artificial Sequence; identical to SEQ ID NO: 1805
  Description of Artificial Sequence: Synthetic almond; 5' sequence and inner sequence

SEQ ID NO: 5724 - DNA, 53 bp, Artificial Sequence; identical to SEQ ID NO: 1684
  Description of Artificial Sequence: Synthetic almond; 5' sequence and inner sequence

SEQ ID NO: 5725 - DNA, 53 bp, Artificial Sequence; identical to SEQ ID NO: 1464
  Description of Artificial Sequence: Synthetic almond; 5' sequence and inner sequence

SEQ ID NO: 5726 - DNA, 53 bp, Artificial Sequence
  Description of Artificial Sequence: Synthetic almond; 5' sequence and inner sequence
tagggaagagaaggacatatgattcgatgcagatggacgacgtcgctacgaca

SEQ ID NO: 5727 - DNA, 53 bp, Artificial Sequence
  Description of Artificial Sequence: Synthetic almond; 5' sequence and inner sequence
tagggaagagaaggacatatgatggccggaacgaaacgcgtggccatgcacta

SEQ ID NO: 5728 - DNA, 53 bp, Artificial Sequence
  Description of Artificial Sequence: Synthetic almond; 5' sequence and inner sequence
tagggaagagaaggacatatgatcgtaccgacggggacattgcgttggcagtc

SEQ ID NO: 5729 - DNA, 53 bp, Artificial Sequence; identical to SEQ ID NO: 1588
  Description of Artificial Sequence: Synthetic almond; 5' sequence and inner sequence

SEQ ID NO: 5730 - DNA, 53 bp, Artificial Sequence; identical to SEQ ID NO: 1493
  Description of Artificial Sequence: Synthetic almond; 5' sequence and inner sequence

SEQ ID NO: 5731 - DNA, 53 bp, Artificial Sequence
  Description of Artificial Sequence: Synthetic almond; 5' sequence and inner sequence
tagggaagagaaggacatatgatcgcaacggcgaggggtcgtgcacgcattca

SEQ ID NO: 5732 - DNA, 53 bp, Artificial Sequence; identical to SEQ ID NO: 1677
  Description of Artificial Sequence: Synthetic almond; 5' sequence and inner sequence

SEQ ID NO: 5733 - DNA, 53 bp, Artificial Sequence; identical to SEQ ID NO: 1560
  Description of Artificial Sequence: Synthetic almond; 5' sequence and inner sequence

SEQ ID NO: 5734 - DNA, 53 bp, Artificial Sequence; identical to SEQ ID NO: 1328
  Description of Artificial Sequence: Synthetic almond; 5' sequence and inner sequence

SEQ ID NO: 5735 - DNA, 53 bp, Artificial Sequence
  Description of Artificial Sequence: Synthetic almond; 5' sequence and inner sequence
tagggaagagaaggacatatgatccgtagcgacatcaagcggtggtgagcgtg

SEQ ID NO: 5736 - DNA, 53 bp, Artificial Sequence
  Description of Artificial Sequence: Synthetic almond; 5' sequence and inner sequence
tagggaagagaaggacatatgatcgtaccgagagtgatcgtggttcgcagtca

SEQ ID NO: 5737 - DNA, 53 bp, Artificial Sequence
  Description of Artificial Sequence: Synthetic almond; 5' sequence and inner sequence
tagggaagagaaggacatatgatcgcaccgagagtgatcgcggttcgcagtca

SEQ ID NO: 5738 - DNA, 53 bp, Artificial Sequence; identical to SEQ ID NO: 1505
  Description of Artificial Sequence: Synthetic almond; 5' sequence and inner sequence

SEQ ID NO: 5739 - DNA, 53 bp, Artificial Sequence
  Description of Artificial Sequence: Synthetic almond; 5' sequence and inner sequence
tagggaagagaaggacatatgattcgatccggcacgtaacgatgggcatggca

SEQ ID NO: 5740 - DNA, 53 bp, Artificial Sequence
  Description of Artificial Sequence: Synthetic almond; 5' sequence and inner sequence
tagggaagagaaggacatatgatcgacccggagaccaagctggacattgcgtc

SEQ ID NO: 5741 - DNA, 53 bp, Artificial Sequence; identical to SEQ ID NO: 1851
  Description of Artificial Sequence: Synthetic almond; 5' sequence and inner sequence

SEQ ID NO: 5742 - DNA, 53 bp, Artificial Sequence
  Description of Artificial Sequence: Synthetic almond; 5' sequence and inner sequence
tagggaagagaaggacatatgatcgacacgcacaagggtcgagtgacgaggca

SEQ ID NO: 5743 - DNA, 53 bp, Artificial Sequence
  Description of Artificial Sequence: Synthetic almond; 5' sequence and inner sequence
tagggaagagaaggacatatgatgtcctgcacgaacactatcatggcggcatg

SEQ ID NO: 5744 - DNA, 53 bp, Artificial Sequence
  Description of Artificial Sequence: Synthetic almond; 5' sequence and inner sequence
tagggaagagaaggacatatgatgatggcacgatcgtccctagcgcgtgatca

SEQ ID NO: 5745 - DNA, 53 bp, Artificial Sequence
  Description of Artificial Sequence: Synthetic almond; 5' sequence and inner sequence
tagggaagagaaggacatatgatccgtagcgcaccacgtagacgttaggcatg

SEQ ID NO: 5746 - DNA, 53 bp, Artificial Sequence
  Description of Artificial Sequence: Synthetic almond; 5' sequence and inner sequence
tagggaagagaaggacatatgatcgtcccgtgcgctaggcagtctgcgtcaca

SEQ ID NO: 5747 - DNA, 53 bp, Artificial Sequence; identical to SEQ ID NO: 1315
  Description of Artificial Sequence: Synthetic almond; 5' sequence and inner sequence

SEQ ID NO: 5748 - DNA, 53 bp, Artificial Sequence
  Description of Artificial Sequence: Synthetic almond; 5' sequence and inner sequence
tagggaagagaaggacatatgatgcacgactcgcaacctatcatgaggccatg

SEQ ID NO: 5749 - DNA, 53 bp, Artificial Sequence
  Description of Artificial Sequence: Synthetic almond; 5' sequence and inner sequence
tagggaagagaaggacatatgatgtgcgtgctaaccgagggcctgtgctgaca

SEQ ID NO: 5750 - DNA, 53 bp, Artificial Sequence; identical to SEQ ID NO: 1349
  Description of Artificial Sequence: Synthetic almond; 5' sequence and inner sequence

SEQ ID NO: 5751 - DNA, 53 bp, Artificial Sequence; identical to SEQ ID NO: 1576
  Description of Artificial Sequence: Synthetic almond; 5' sequence and inner sequence

SEQ ID NO: 5752 - DNA, 53 bp, Artificial Sequence; identical to SEQ ID NO: 1881
  Description of Artificial Sequence: Synthetic almond; 5' sequence and inner sequence

SEQ ID NO: 5753 - DNA, 50 bp, Artificial Sequence; identical to SEQ ID NO: 1885
  Description of Artificial Sequence: Synthetic almond; 5' sequence and inner sequence

SEQ ID NO: 5754 - DNA, 53 bp, Artificial Sequence; identical to SEQ ID NO: 1555
  Description of Artificial Sequence: Synthetic almond; 5' sequence and inner sequence

SEQ ID NO: 5755 - DNA, 53 bp, Artificial Sequence
  Description of Artificial Sequence: Synthetic almond; 5' sequence and inner sequence
tagggaagagaaggacatatgatggcggaacggacgtggacatcgtgctcatg

SEQ ID NO: 5756 - DNA, 53 bp, Artificial Sequence
  Description of Artificial Sequence: Synthetic almond; 5' sequence and inner sequence
tagggaagagaaggacatatgatgggcagcgaggagcggaaagtgtgcaggga

SEQ ID NO: 5757 - DNA, 48 bp, Artificial Sequence; identical to SEQ ID NO: 1427
  Description of Artificial Sequence: Synthetic almond; 5' sequence and inner sequence

SEQ ID NO: 5758 - DNA, 53 bp, Artificial Sequence
  Description of Artificial Sequence: Synthetic almond; 5' sequence and inner sequence
tagggaagagaaggacatatgatggcccaggacatcgatggcatgcgttcaca

SEQ ID NO: 5759 - DNA, 53 bp, Artificial Sequence
  Description of Artificial Sequence: Synthetic almond; 5' sequence and inner sequence
tagggaagagaaggacatatgatgcaagcacaggtcctgggcacgtacgcacg

SEQ ID NO: 5760 - DNA, 53 bp, Artificial Sequence; identical to SEQ ID NO: 1395
  Description of Artificial Sequence: Synthetic almond; 5' sequence and inner sequence

SEQ ID NO: 5761 - DNA, 53 bp, Artificial Sequence
  Description of Artificial Sequence: Synthetic almond; 5' sequence and inner sequence
tagggaagagaaggacatatgatccgtagcgacatcaagcggtggtgtgcggg

SEQ ID NO: 5762 - DNA, 53 bp, Artificial Sequence; identical to SEQ ID NO: 1593
  Description of Artificial Sequence: Synthetic almond; 5' sequence and inner sequence

SEQ ID NO: 5763 - DNA, 52 bp, Artificial Sequence
  Description of Artificial Sequence: Synthetic almond; 5' sequence and inner sequence
tagggaagagaaggacatatgatggacgccgatgccctcatgtggccgtgga

SEQ ID NO: 5764 - DNA, 53 bp, Artificial Sequence
  Description of Artificial Sequence: Synthetic almond; 5' sequence and inner sequence
tagggaagagaaggacatatgatccgatgcggcacgtctctgaccgatgcgga

SEQ ID NO: 5765 - DNA, 53 bp, Artificial Sequence; identical to SEQ ID NO: 1574
  Description of Artificial Sequence: Synthetic almond; 5' sequence and inner sequence

SEQ ID NO: 5766 - DNA, 53 bp, Artificial Sequence; identical to SEQ ID NO: 1586
  Description of Artificial Sequence: Synthetic almond; 5' sequence and inner sequence

SEQ ID NO: 5767 - DNA, 53 bp, Artificial Sequence
  Description of Artificial Sequence: Synthetic almond; 5' sequence and inner sequence
tagggaagagaaggacatatgatccgaaacgaaccgcacgcaacgcagccgca

SEQ ID NO: 5768 - DNA, 53 bp, Artificial Sequence
  Description of Artificial Sequence: Synthetic almond; 5' sequence and inner sequence
tagggaagagaaggacatatgatcgaacagaccgtgtggcctacgcatgcgca

SEQ ID NO: 5769 - DNA, 53 bp, Artificial Sequence; identical to SEQ ID NO: 1566
  Description of Artificial Sequence: Synthetic almond; 5' sequence and inner sequence

SEQ ID NO: 5770 - DNA, 53 bp, Artificial Sequence; identical to SEQ ID NO: 1302
  Description of Artificial Sequence: Synthetic almond; 5' sequence and inner sequence

SEQ ID NO: 5771 - DNA, 53 bp, Artificial Sequence; identical to SEQ ID NO: 1789
  Description of Artificial Sequence: Synthetic almond; 5' sequence and inner sequence

SEQ ID NO: 5772 - DNA, 53 bp, Artificial Sequence
  Description of Artificial Sequence: Synthetic almond; 5' sequence and inner sequence
tagggaagagaaggacatatgatggcacgacgcgttcccgccacactgccgtg

SEQ ID NO: 5773 - DNA, 53 bp, Artificial Sequence; identical to SEQ ID NO: 1619
  Description of Artificial Sequence: Synthetic almond; 5' sequence and inner sequence

SEQ ID NO: 5774 - DNA, 53 bp, Artificial Sequence
  Description of Artificial Sequence: Synthetic almond; 5' sequence and inner sequence
tagggaagagaaggacatatgatgggatgcgatgaacgaggcatgatgcgtca

SEQ ID NO: 5775 - DNA, 53 bp, Artificial Sequence
  Description of Artificial Sequence: Synthetic almond; 5' sequence and inner sequence
tagggaagagaaggacatatgatggcatggcgcgcaccctatcaagtacgtca

SEQ ID NO: 5776 - DNA, 53 bp, Artificial Sequence
  Description of Artificial Sequence: Synthetic almond; 5' sequence and inner sequence
tagggaagagaaggacatatgatcgcatgcacgcacctacacgtgggtatgga

SEQ ID NO: 5777 - DNA, 53 bp, Artificial Sequence
  Description of Artificial Sequence: Synthetic almond; 5' sequence and inner sequence
tagggaagagaaggacatatgatgctgcaggcatacgtgtactgcgctggacc

SEQ ID NO: 5778 - DNA, 53 bp, Artificial Sequence
  Description of Artificial Sequence: Synthetic almond; 5' sequence and inner sequence
tagggaagagaaggacatatgatgtacggaacggaacaacaagggcatgcatg

SEQ ID NO: 5779 - DNA, 53 bp, Artificial Sequence; identical to SEQ ID NO: 1388
  Description of Artificial Sequence: Synthetic almond; 5' sequence and inner sequence

SEQ ID NO: 5780 - DNA, 53 bp, Artificial Sequence; identical to SEQ ID NO: 1943
  Description of Artificial Sequence: Synthetic almond; 5' sequence and inner sequence

SEQ ID NO: 5781 - DNA, 53 bp, Artificial Sequence
  Description of Artificial Sequence: Synthetic almond; 5' sequence and inner sequence
tagggaagagaaggacatatgatcgaaccgcaggagagcaggctgtgcgcacg

SEQ ID NO: 5782 - DNA, 53 bp, Artificial Sequence
  Description of Artificial Sequence: Synthetic almond; 5' sequence and inner sequence
tagggaagagaaggacatatgatggccaagctgaccgtaaaggcaggcgtgga

SEQ ID NO: 5783 - DNA, 53 bp, Artificial Sequence; identical to SEQ ID NO: 1498
  Description of Artificial Sequence: Synthetic almond; 5' sequence and inner sequence

SEQ ID NO: 5784 - DNA, 53 bp, Artificial Sequence
  Description of Artificial Sequence: Synthetic almond; 5' sequence and inner sequence
tagggaagagaaggacatatgattgccctggcaatgcgatgttcgatgcgacc

SEQ ID NO: 5785 - DNA, 53 bp, Artificial Sequence
  Description of Artificial Sequence: Synthetic almond; 5' sequence and inner sequence
tagggaagagaaggacatatgattggactgcgtggaccgtatcgtgcggcatg

SEQ ID NO: 5786 - DNA, 51 bp, Artificial Sequence
  Description of Artificial Sequence: Synthetic almond; 5' sequence and inner sequence
tagggaagagaaggacatatgatggcatgcacgcacctacacgtgatcatg

SEQ ID NO: 5787 - DNA, 53 bp, Artificial Sequence
  Description of Artificial Sequence: Synthetic almond; 5' sequence and inner sequence
tagggaagagaaggacatatgatgtcatgccatcccttcgcgtgtgacaggta

SEQ ID NO: 5788 - DNA, 52 bp, Artificial Sequence; identical to SEQ ID NO: 1251
  Description of Artificial Sequence: Synthetic almond; 5' sequence and inner sequence

SEQ ID NO: 5789 - DNA, 53 bp, Artificial Sequence; identical to SEQ ID NO: 1633
  Description of Artificial Sequence: Synthetic almond; 5' sequence and inner sequence

SEQ ID NO: 5790 - DNA, 53 bp, Artificial Sequence
  Description of Artificial Sequence: Synthetic almond; 5' sequence and inner sequence
tagggaagagaaggacatatgatcgtactgagcgcacacgtcctgccgacgcg

SEQ ID NO: 5791 - DNA, 53 bp, Artificial Sequence; identical to SEQ ID NO: 1877
  Description of Artificial Sequence: Synthetic almond; 5' sequence and inner sequence

SEQ ID NO: 5792 - DNA, 53 bp, Artificial Sequence
  Description of Artificial Sequence: Synthetic almond; 5' sequence and inner sequence
tagggaagagaaggacatatgatcgcagatcgaggccgtaacgcgttgtgggc

SEQ ID NO: 5793 - DNA, 53 bp, Artificial Sequence
  Description of Artificial Sequence: Synthetic almond; 5' sequence and inner sequence
tagggaagagaaggacatatgatcgaacagagcgaggcatgatggacgtgggc

SEQ ID NO: 5794 - DNA, 54 bp, Artificial Sequence; identical to SEQ ID NO: 1503
  Description of Artificial Sequence: Synthetic almond; 5' sequence and inner sequence

SEQ ID NO: 5795 - DNA, 53 bp, Artificial Sequence; identical to SEQ ID NO: 1512
  Description of Artificial Sequence: Synthetic almond; 5' sequence and inner sequence

SEQ ID NO: 5796 - DNA, 53 bp, Artificial Sequence
  Description of Artificial Sequence: Synthetic almond; 5' sequence and inner sequence
tagggaagagaaggacatatgatcgacagggcgggcagtccattcgctgcaca

SEQ ID NO: 5797 - DNA, 53 bp, Artificial Sequence; identical to SEQ ID NO: 1210
  Description of Artificial Sequence: Synthetic almond; 5' sequence and inner sequence

SEQ ID NO: 5798 - DNA, 53 bp, Artificial Sequence
  Description of Artificial Sequence: Synthetic almond; 5' sequence and inner sequence
tagggaagagaaggacatatgatggcctgaacgaaccgagatgtcagcgcgcg

SEQ ID NO: 5799 - DNA, 53 bp, Artificial Sequence
  Description of Artificial Sequence: Synthetic almond; 5' sequence and inner sequence
tagggaagagaaggacatatgatacatagggcgcaacgtacctatcatgtggt

SEQ ID NO: 5800 - DNA, 53 bp, Artificial Sequence; identical to SEQ ID NO: 1580
  Description of Artificial Sequence: Synthetic almond; 5' sequence and inner sequence

SEQ ID NO: 5801 - DNA, 53 bp, Artificial Sequence
  Description of Artificial Sequence: Synthetic almond; 5' sequence and inner sequence
tagggaagagaaggacatatgatgtgctgaacgaccagtgggaacgtgctatg

SEQ ID NO: 5802 - DNA, 53 bp, Artificial Sequence
  Description of Artificial Sequence: Synthetic almond; 5' sequence and inner sequence
tagggaagagaaggacatatgatggcatgcacgcacctacacgtgggtacgta

SEQ ID NO: 5803 - DNA, 53 bp, Artificial Sequence
  Description of Artificial Sequence: Synthetic almond; 5' sequence and inner sequence
tagggaagagaaggacatatgatccgaacggaacgccatcgtgttgcgcatca

SEQ ID NO: 5804 - DNA, 53 bp, Artificial Sequence
  Description of Artificial Sequence: Synthetic almond; 5' sequence and inner sequence
tagggaagagaaggacatatgatggcaccgtcaagcgggaaggcactttggtg

SEQ ID NO: 5805 - DNA, 53 bp, Artificial Sequence
  Description of Artificial Sequence: Synthetic almond; 5' sequence and inner sequence
tagggaagagaaggacatatgattgcgcagtaggtccgcagcgcacatgcacg

SEQ ID NO: 5806 - DNA, 53 bp, Artificial Sequence; identical to SEQ ID NO: 1813
  Description of Artificial Sequence: Synthetic almond; 5' sequence and inner sequence

SEQ ID NO: 5807 - DNA, 53 bp, Artificial Sequence
  Description of Artificial Sequence: Synthetic almond; 5' sequence and inner sequence
tagggaagagaaggacatatgatgtgcgcgtcgaaccgtatgggcatggcgtg

SEQ ID NO: 5808 - DNA, 53 bp, Artificial Sequence
  Description of Artificial Sequence: Synthetic almond; 5' sequence and inner sequence
tagggaagagaaggacatatgataggcacagtgtcggtgggactcagcgcaca

SEQ ID NO: 5809 - DNA, 53 bp, Artificial Sequence
  Description of Artificial Sequence: Synthetic almond; 5' sequence and inner sequence
tagggaagagaaggacatatgatgcacgtgcagctgtacgacgattcgccgct

SEQ ID NO: 5810 - DNA, 53 bp, Artificial Sequence
  Description of Artificial Sequence: Synthetic almond; 5' sequence and inner sequence
tagggaagagaaggacatatgatggcatgaacgcacctacacgtgggtatgga

SEQ ID NO: 5811 - DNA, 53 bp, Artificial Sequence; identical to SEQ ID NO: 1497
  Description of Artificial Sequence: Synthetic almond; 5' sequence and inner sequence

SEQ ID NO: 5812 - DNA, 53 bp, Artificial Sequence; identical to SEQ ID NO: 1466
  Description of Artificial Sequence: Synthetic almond; 5' sequence and inner sequence

SEQ ID NO: 5813 - DNA, 53 bp, Artificial Sequence
  Description of Artificial Sequence: Synthetic almond; 5' sequence and inner sequence
tagggaagagaaggacatatgatcacgcacgtagcgcaggacggcactcacgt

SEQ ID NO: 5814 - DNA, 53 bp, Artificial Sequence
  Description of Artificial Sequence: Synthetic almond; 5' sequence and inner sequence
tagggaagagaaggacatatgatggccagatcgacatagcgagtgagagtgta

SEQ ID NO: 5815 - DNA, 53 bp, Artificial Sequence; identical to SEQ ID NO: 1968
  Description of Artificial Sequence: Synthetic almond; 5' sequence and inner sequence

SEQ ID NO: 5816 - DNA, 53 bp, Artificial Sequence
  Description of Artificial Sequence: Synthetic almond; 5' sequence and inner sequence
tagggaagagaaggacatatgatccgtctgagcggcaaggggagcagtacgtg

SEQ ID NO: 5817 - DNA, 53 bp, Artificial Sequence
  Description of Artificial Sequence: Synthetic almond; 5' sequence and inner sequence
tagggaagagaaggacatatgatcgtcacacagggcggtggtgctgcacgtca

SEQ ID NO: 5818 - DNA, 53 bp, Artificial Sequence; identical to SEQ ID NO: 1307
  Description of Artificial Sequence: Synthetic almond; 5' sequence and inner sequence

SEQ ID NO: 5819 - DNA, 53 bp, Artificial Sequence
  Description of Artificial Sequence: Synthetic almond; 5' sequence and inner sequence
tagggaagagaaggacatatgatgcaatgcgagtgccctcacttcacgtcacg

SEQ ID NO: 5820 - DNA, 53 bp, Artificial Sequence; identical to SEQ ID NO: 1338
  Description of Artificial Sequence: Synthetic almond; 5' sequence and inner sequence

SEQ ID NO: 5821 - DNA, 53 bp, Artificial Sequence
  Description of Artificial Sequence: Synthetic almond; 5' sequence and inner sequence
tagggaagagaaggacatatgatggccaagcagcatggacgtgcccacggtga

SEQ ID NO: 5822 - DNA, 53 bp, Artificial Sequence
  Description of Artificial Sequence: Synthetic almond; 5' sequence and inner sequence
tagggaagagaaggacatatgatgccgacgatgacctggacgtgtggttgtca

SEQ ID NO: 5823 - DNA, 53 bp, Artificial Sequence
  Description of Artificial Sequence: Synthetic almond; 5' sequence and inner sequence
tagggaagagaaggacatatgatgcattcgaggccatagcgagtggtagtgga

SEQ ID NO: 5824 - DNA, 53 bp, Artificial Sequence; identical to SEQ ID NO: 1914
  Description of Artificial Sequence: Synthetic almond; 5' sequence and inner sequence

SEQ ID NO: 5825 - DNA, 53 bp, Artificial Sequence; identical to SEQ ID NO: 1898
  Description of Artificial Sequence: Synthetic almond; 5' sequence and inner sequence

SEQ ID NO: 5826 - DNA, 53 bp, Artificial Sequence; identical to SEQ ID NO: 1935
  Description of Artificial Sequence: Synthetic almond; 5' sequence and inner sequence

SEQ ID NO: 5827 - DNA, 53 bp, Artificial Sequence; identical to SEQ ID NO: 1717
  Description of Artificial Sequence: Synthetic almond; 5' sequence and inner sequence

SEQ ID NO: 5828 - DNA, 53 bp, Artificial Sequence
  Description of Artificial Sequence: Synthetic almond; 5' sequence and inner sequence
tagggaagagaaggacatatgatcgaaccgacgggatcgcgtgcaccagtcca

SEQ ID NO: 5829 - DNA, 53 bp, Artificial Sequence
  Description of Artificial Sequence: Synthetic almond; 5' sequence and inner sequence
tagggaagagaaggacatatgatgcacataggacgaccttcaagcgtggcacg

SEQ ID NO: 5830 - DNA, 53 bp, Artificial Sequence
  Description of Artificial Sequence: Synthetic almond; 5' sequence and inner sequence
tagggaagagaaggacatatgatggccaagctgaccgtaaaggcatgcgtgta

SEQ ID NO: 5831 - DNA, 53 bp, Artificial Sequence
  Description of Artificial Sequence: Synthetic almond; 5' sequence and inner sequence
tagggaagagaaggacatatgatgcgtcaggcatcatggctcgccgatgcacg

SEQ ID NO: 5832 - DNA, 53 bp, Artificial Sequence; identical to SEQ ID NO: 1840
  Description of Artificial Sequence: Synthetic almond; 5' sequence and inner sequence

SEQ ID NO: 5833 - DNA, 53 bp, Artificial Sequence
  Description of Artificial Sequence: Synthetic almond; 5' sequence and inner sequence
tagggaagagaaggacatatgatcgacacgaacaggctcaacgtcgtcacggt

SEQ ID NO: 5834 - DNA, 53 bp, Artificial Sequence
  Description of Artificial Sequence: Synthetic almond; 5' sequence and inner sequence
tagggaagagaaggacatatgatgccatgcacgcacctacacgtgggtatgga

SEQ ID NO: 5835 - DNA, 53 bp, Artificial Sequence
  Description of Artificial Sequence: Synthetic almond; 5' sequence and inner sequence
tagggaagagaaggacatatgattcgatgacgatgagcgtggacgttgccgta

SEQ ID NO: 5836 - DNA, 53 bp, Artificial Sequence
  Description of Artificial Sequence: Synthetic almond; 5' sequence and inner sequence
tagggaagagaaggacatatgatcgcaccgtgagcatagggtatcgctgccta

SEQ ID NO: 5837 - DNA, 53 bp, Artificial Sequence
  Description of Artificial Sequence: Synthetic almond; 5' sequence and inner sequence
tagggaagagaaggacatatgatgcacgactcgcaccctatcattaggccatg

SEQ ID NO: 5838 - DNA, 53 bp, Artificial Sequence; identical to SEQ ID NO: 1445
  Description of Artificial Sequence: Synthetic almond; 5' sequence and inner sequence

SEQ ID NO: 5839 - DNA, 53 bp, Artificial Sequence; identical to SEQ ID NO: 1494
  Description of Artificial Sequence: Synthetic almond; 5' sequence and inner sequence

SEQ ID NO: 5840 - DNA, 53 bp, Artificial Sequence; identical to SEQ ID NO: 1867
  Description of Artificial Sequence: Synthetic almond; 5' sequence and inner sequence

SEQ ID NO: 5841 - DNA, 53 bp, Artificial Sequence; identical to SEQ ID NO: 1542
  Description of Artificial Sequence: Synthetic almond; 5' sequence and inner sequence

SEQ ID NO: 5842 - DNA, 53 bp, Artificial Sequence; identical to SEQ ID NO: 1594
  Description of Artificial Sequence: Synthetic almond; 5' sequence and inner sequence

SEQ ID NO: 5843 - DNA, 53 bp, Artificial Sequence; identical to SEQ ID NO: 1720
  Description of Artificial Sequence: Synthetic almond; 5' sequence and inner sequence

SEQ ID NO: 5844 - DNA, 53 bp, Artificial Sequence
  Description of Artificial Sequence: Synthetic almond; 5' sequence and inner sequence
tagggaagagaaggacatatgatgcgtgagcagaagtggccgacactgcacga

SEQ ID NO: 5845 - DNA, 53 bp, Artificial Sequence
  Description of Artificial Sequence: Synthetic almond; 5' sequence and inner sequence
tagggaagagaaggacatatgatgtcatgcacgaacactatcatgccggcatg

SEQ ID NO: 5846 - DNA, 53 bp, Artificial Sequence; identical to SEQ ID NO: 1678
  Description of Artificial Sequence: Synthetic almond; 5' sequence and inner sequence

SEQ ID NO: 5847 - DNA, 53 bp, Artificial Sequence; identical to SEQ ID NO: 1614
  Description of Artificial Sequence: Synthetic almond; 5' sequence and inner sequence

SEQ ID NO: 5848 - DNA, 53 bp, Artificial Sequence
  Description of Artificial Sequence: Synthetic almond; 5' sequence and inner sequence
tagggaagagaaggacatatgatcatgctcgacccggcacgctgctgcgcacg

SEQ ID NO: 5849 - DNA, 53 bp, Artificial Sequence
  Description of Artificial Sequence: Synthetic almond; 5' sequence and inner sequence
tagggaagagaaggacatatgatcgaaccgcagtgatgcatctcgcaggcaca

SEQ ID NO: 5850 - DNA, 53 bp, Artificial Sequence; identical to SEQ ID NO: 1472
  Description of Artificial Sequence: Synthetic almond; 5' sequence and inner sequence

SEQ ID NO: 5851 - DNA, 53 bp, Artificial Sequence; identical to SEQ ID NO: 1685
  Description of Artificial Sequence: Synthetic almond; 5' sequence and inner sequence

SEQ ID NO: 5852 - DNA, 53 bp, Artificial Sequence
  Description of Artificial Sequence: Synthetic almond; 5' sequence and inner sequence
tagggaagagaaggacatatgatggtgccagcatacgaccgacacgatgcaca

SEQ ID NO: 5853 - DNA, 53 bp, Artificial Sequence
  Description of Artificial Sequence: Synthetic almond; 5' sequence and inner sequence
tagggaagagaaggacatatgatggcatgcgcagaactatcaggtgtggcagg

SEQ ID NO: 5854 - DNA, 53 bp, Artificial Sequence
  Description of Artificial Sequence: Synthetic almond; 5' sequence and inner sequence
tagggaagagaaggacatatgatggcatgcgatgaacgaggcatgatgcgcca

SEQ ID NO: 5855 - DNA, 53 bp, Artificial Sequence; identical to SEQ ID NO: 1793
  Description of Artificial Sequence: Synthetic almond; 5' sequence and inner sequence

SEQ ID NO: 5856 - DNA, 53 bp, Artificial Sequence
  Description of Artificial Sequence: Synthetic almond; 5' sequence and inner sequence
tagggaagagaaggacatatgatggcacggaacgaagcctatcaagtgcgaca

SEQ ID NO: 5857 - DNA, 53 bp, Artificial Sequence
  Description of Artificial Sequence: Synthetic almond; 5' sequence and inner sequence
tagggaagagaaggacatatgatggcatgcacgcacctacacgtgggtatgta

SEQ ID NO: 5858 - DNA, 54 bp, Artificial Sequence
  Description of Artificial Sequence: Synthetic almond; 5' sequence and inner sequence
tagggaagagaaggacatatgattggccgaagcgcacctacacgtgggcacgta

SEQ ID NO: 5859 - DNA, 53 bp, Artificial Sequence
  Description of Artificial Sequence: Synthetic almond; 5' sequence and inner sequence
tagggaagagaaggacatatgatggccaagcggactgtgagtgcgtcggtgcc

SEQ ID NO: 5860 - DNA, 53 bp, Artificial Sequence
  Description of Artificial Sequence: Synthetic almond; 5' sequence and inner sequence
tagggaagagaaggacatatgatggcgtgaccgaacctcaagctggacatgga

SEQ ID NO: 5861 - DNA, 53 bp, Artificial Sequence
  Description of Artificial Sequence: Synthetic almond; 5' sequence and inner sequence
tagggaagagaaggacatatgatggacggaacgtactgccaggtgagcatgca

SEQ ID NO: 5862 - DNA, 53 bp, Artificial Sequence
  Description of Artificial Sequence: Synthetic almond; 5' sequence and inner sequence
tagggaagagaaggacatatgatacacgcagggtgtcgtccgtatgtgcacga

SEQ ID NO: 5863 - DNA, 53 bp, Artificial Sequence
  Description of Artificial Sequence: Synthetic almond; 5' sequence and inner sequence
tagggaagagaaggacatatgatgcgcatagcaacaacaccattcgcgtcccg

SEQ ID NO: 5864 - DNA, 53 bp, Artificial Sequence
  Description of Artificial Sequence: Synthetic almond; 5' sequence and inner sequence
tagggaagagaaggacatatgatggccaagctgacctatcaacgtgtcgtgga

SEQ ID NO: 5865 - DNA, 53 bp, Artificial Sequence; identical to SEQ ID NO: 1621
  Description of Artificial Sequence: Synthetic almond; 5' sequence and inner sequence

SEQ ID NO: 5866 - DNA, 53 bp, Artificial Sequence; identical to SEQ ID NO: 1363
  Description of Artificial Sequence: Synthetic almond; 5' sequence and inner sequence

SEQ ID NO: 5867 - DNA, 53 bp, Artificial Sequence
  Description of Artificial Sequence: Synthetic almond; 5' sequence and inner sequence
tagggaagagaaggacatatgatgtcatgcacgaacactatcatggcgtcatg

SEQ ID NO: 5868 - DNA, 53 bp, Artificial Sequence
  Description of Artificial Sequence: Synthetic almond; 5' sequence and inner sequence
tagggaagagaaggacatatgatcggaacggatcgtaggcagtcacgtggaca

SEQ ID NO: 5869 - DNA, 52 bp, Artificial Sequence
  Description of Artificial Sequence: Synthetic almond; 5' sequence and inner sequence
tagggaagagaaggacatatgatgtgcaaacggaccgacaagtgcgcatgga

SEQ ID NO: 5870 - DNA, 53 bp, Artificial Sequence
  Description of Artificial Sequence: Synthetic almond; 5' sequence and inner sequence
tagggaagagaaggacatatgatccgcacgacctcgtgggctgcacttcgaca

SEQ ID NO: 5871 - DNA, 53 bp, Artificial Sequence
  Description of Artificial Sequence: Synthetic almond; 5' sequence and inner sequence
tagggaagagaaggacatatgatcgcgtgacgataaggtgtgatgcgctccgt

SEQ ID NO: 5872 - DNA, 53 bp, Artificial Sequence
  Description of Artificial Sequence: Synthetic almond; 5' sequence and inner sequence
tagggaagagaaggacatatgatggcatgcacgcacctacacgggggtatgga

SEQ ID NO: 5873 - DNA, 53 bp, Artificial Sequence
  Description of Artificial Sequence: Synthetic almond; 5' sequence and inner sequence
tagggaagagaaggacatatgatcgaccgacgaacaatggtgcatggttgcgt

SEQ ID NO: 5874 - DNA, 53 bp, Artificial Sequence
  Description of Artificial Sequence: Synthetic almond; 5' sequence and inner sequence
tagggaagagaaggacatatgatgtcatgcgatgagctcaagttggccttgta

SEQ ID NO: 5875 - DNA, 53 bp, Artificial Sequence
  Description of Artificial Sequence: Synthetic almond; 5' sequence and inner sequence
tagggaagagaaggacatatgatacacgcacagtgtgatgtgcctctcgtcca

SEQ ID NO: 5876 - DNA, 52 bp, Artificial Sequence; identical to SEQ ID NO: 1453
  Description of Artificial Sequence: Synthetic almond; 5' sequence and inner sequence

SEQ ID NO: 5877 - DNA, 53 bp, Artificial Sequence; identical to SEQ ID NO: 1921
  Description of Artificial Sequence: Synthetic almond; 5' sequence and inner sequence

SEQ ID NO: 5878 - DNA, 53 bp, Artificial Sequence
  Description of Artificial Sequence: Synthetic almond; 5' sequence and inner sequence
tagggaagagaaggacatatgatgtgactgaacgacgtgaccaagcggcatgg

SEQ ID NO: 5879 - DNA, 53 bp, Artificial Sequence
  Description of Artificial Sequence: Synthetic almond; 5' sequence and inner sequence
tagggaagagaaggacatatgatgcgtcagcagcagcacggacgaactgcata

SEQ ID NO: 5880 - DNA, 53 bp, Artificial Sequence
  Description of Artificial Sequence: Synthetic almond; 5' sequence and inner sequence
tagggaagagaaggacatatgatcacgaacggaccggtaagcatggccatgga

SEQ ID NO: 5881 - DNA, 53 bp, Artificial Sequence
  Description of Artificial Sequence: Synthetic almond; 5' sequence and inner sequence
tagggaagagaaggacatatgatgtcatgcgcggacattcaagttgtcgtgga

SEQ ID NO: 5882 - DNA, 53 bp, Artificial Sequence
  Description of Artificial Sequence: Synthetic almond; 5' sequence and inner sequence
tagggaagagaaggacatatgatggcatgcgatgaacgaggcatgctgcgtca

SEQ ID NO: 5883 - DNA, 53 bp, Artificial Sequence
  Description of Artificial Sequence: Synthetic almond; 5' sequence and inner sequence
tagggaagagaaggacatatgatcgcaccgtcaagcgggacggcactttggtg

SEQ ID NO: 5884 - DNA, 53 bp, Artificial Sequence
  Description of Artificial Sequence: Synthetic almond; 5' sequence and inner sequence
tagggaagagaaggacatatgatgtcgtgagctggaaggagagtgggtacgta

SEQ ID NO: 5885 - DNA, 53 bp, Artificial Sequence; identical to SEQ ID NO: 1983
  Description of Artificial Sequence: Synthetic almond; 5' sequence and inner sequence

SEQ ID NO: 5886 - DNA, 53 bp, Artificial Sequence
  Description of Artificial Sequence: Synthetic almond; 5' sequence and inner sequence
tagggaagagaaggacatatgatggccgtaacgcaccaggatgcactgtgtca

SEQ ID NO: 5887 - DNA, 53 bp, Artificial Sequence
  Description of Artificial Sequence: Synthetic almond; 5' sequence and inner sequence
tagggaagagaaggacatatgattggccgatcgaccctatcgagtgcagcatg

SEQ ID NO: 5888 - DNA, 53 bp, Artificial Sequence
  Description of Artificial Sequence: Synthetic almond; 5' sequence and inner sequence
tagggaagagaaggacatatgatggcatgcacgcacctacacgtgggtacgga

SEQ ID NO: 5889 - DNA, 53 bp, Artificial Sequence
  Description of Artificial Sequence: Synthetic almond; 5' sequence and inner sequence
tagggaagagaaggacatatgatggccacacgctgccctaaagtgttcgtgta

SEQ ID NO: 5890 - DNA, 53 bp, Artificial Sequence
  Description of Artificial Sequence: Synthetic almond; 5' sequence and inner sequence
tagggaagagaaggacatatgatgcacgactcgaaccctatcatgaggccatg

SEQ ID NO: 5891 - DNA, 53 bp, Artificial Sequence; identical to SEQ ID NO: 1734
  Description of Artificial Sequence: Synthetic almond; 5' sequence and inner sequence

SEQ ID NO: 5892 - DNA, 53 bp, Artificial Sequence; identical to SEQ ID NO: 1837
  Description of Artificial Sequence: Synthetic almond; 5' sequence and inner sequence

SEQ ID NO: 5893 - DNA, 53 bp, Artificial Sequence
  Description of Artificial Sequence: Synthetic almond; 5' sequence and inner sequence
tagggaagagaaggacatatgatccgtagcgacatcaagcggcggcgtgcgtg

SEQ ID NO: 5894 - DNA, 53 bp, Artificial Sequence
  Description of Artificial Sequence: Synthetic almond; 5' sequence and inner sequence
tagggaagagaaggacatatgatcgaccgtacggaaggggagtggccgtcacg

SEQ ID NO: 5895 - DNA, 53 bp, Artificial Sequence; identical to SEQ ID NO: 1984
  Description of Artificial Sequence: Synthetic almond; 5' sequence and inner sequence

SEQ ID NO: 5896 - DNA, 53 bp, Artificial Sequence; identical to SEQ ID NO: 1421
  Description of Artificial Sequence: Synthetic almond; 5' sequence and inner sequence

SEQ ID NO: 5897 - DNA, 53 bp, Artificial Sequence; identical to SEQ ID NO: 1910
  Description of Artificial Sequence: Synthetic almond; 5' sequence and inner sequence

SEQ ID NO: 5898 - DNA, 53 bp, Artificial Sequence
  Description of Artificial Sequence: Synthetic almond; 5' sequence and inner sequence
tagggaagagaaggacatatgatccgtagcgacatcaagtggtggtgtgcgtg

SEQ ID NO: 5899 - DNA, 53 bp, Artificial Sequence; identical to SEQ ID NO: 1474
  Description of Artificial Sequence: Synthetic almond; 5' sequence and inner sequence

SEQ ID NO: 5900 - DNA, 53 bp, Artificial Sequence; identical to SEQ ID NO: 1702
  Description of Artificial Sequence: Synthetic almond; 5' sequence and inner sequence

SEQ ID NO: 5901 - DNA, 53 bp, Artificial Sequence
  Description of Artificial Sequence: Synthetic almond; 5' sequence and inner sequence
tagggaagagaaggacatatgatccatcagtggacgcgtaactgacatgggca

SEQ ID NO: 5902 - DNA, 53 bp, Artificial Sequence; identical to SEQ ID NO: 1452
  Description of Artificial Sequence: Synthetic almond; 5' sequence and inner sequence

SEQ ID NO: 5903 - DNA, 53 bp, Artificial Sequence; identical to SEQ ID NO: 1917
  Description of Artificial Sequence: Synthetic almond; 5' sequence and inner sequence

SEQ ID NO: 5904 - DNA, 53 bp, Artificial Sequence
  Description of Artificial Sequence: Synthetic almond; 5' sequence and inner sequence
tagggaagagaaggacatatgatcgacccgactaagcgtggtgcacactgtgt

SEQ ID NO: 5905 - DNA, 53 bp, Artificial Sequence
  Description of Artificial Sequence: Synthetic almond; 5' sequence and inner sequence
tagggaagagaaggacatatgatggacgcgacgtccctgagagtgtgcaggta

SEQ ID NO: 5906 - DNA, 53 bp, Artificial Sequence
  Description of Artificial Sequence: Synthetic almond; 5' sequence and inner sequence
tagggaagagaaggacatatgatcgatcgcagtgagagccgtccgtagccacg

SEQ ID NO: 5907 - DNA, 53 bp, Artificial Sequence
  Description of Artificial Sequence: Synthetic almond; 5' sequence and inner sequence
tagggaagagaaggacatatgatcatgtccgtgcgttcccgttgagcgcgtca

SEQ ID NO: 5908 - DNA, 53 bp, Artificial Sequence; identical to SEQ ID NO: 1960
  Description of Artificial Sequence: Synthetic almond; 5' sequence and inner sequence

SEQ ID NO: 5909 - DNA, 53 bp, Artificial Sequence
  Description of Artificial Sequence: Synthetic almond; 5' sequence and inner sequence
tagggaagagaaggacatatgatacatggcagtagcgcgcactaggtaggaca

SEQ ID NO: 5910 - DNA, 53 bp, Artificial Sequence
  Description of Artificial Sequence: Synthetic almond; 5' sequence and inner sequence
tagggaagagaaggacatatgattggaccaagctgaacgtcaagcgcgccatg

SEQ ID NO: 5911 - DNA, 53 bp, Artificial Sequence
  Description of Artificial Sequence: Synthetic almond; 5' sequence and inner sequence
tagggaagagaaggacatatgatggacgcagcggaacgttcgagtggcacgta

SEQ ID NO: 5912 - DNA, 53 bp, Artificial Sequence
  Description of Artificial Sequence: Synthetic almond; 5' sequence and inner sequence
tagggaagagaaggacatatgatacgtgacagccatgggtagcgcacggcaca

SEQ ID NO: 5913 - DNA, 53 bp, Artificial Sequence
  Description of Artificial Sequence: Synthetic almond; 5' sequence and inner sequence
tagggaagagaaggacatatgatgtactgcgccatcccgtcatcatgtggaca

SEQ ID NO: 5914 - DNA, 53 bp, Artificial Sequence; identical to SEQ ID NO: 1973
  Description of Artificial Sequence: Synthetic almond; 5' sequence and inner sequence

SEQ ID NO: 5915 - DNA, 53 bp, Artificial Sequence
  Description of Artificial Sequence: Synthetic almond; 5' sequence and inner sequence
tagggaagagaaggacatatgatagacgcaacgaaccgtatgcaacgtgcaca

SEQ ID NO: 5916 - DNA, 53 bp, Artificial Sequence
  Description of Artificial Sequence: Synthetic almond; 5' sequence and inner sequence
tagggaagagaaggacatatgatggcacaaacggaccgacaagagcgcatgga

SEQ ID NO: 5917 - DNA, 53 bp, Artificial Sequence; identical to SEQ ID NO: 1824
  Description of Artificial Sequence: Synthetic almond; 5' sequence and inner sequence

SEQ ID NO: 5918 - DNA, 53 bp, Artificial Sequence
  Description of Artificial Sequence: Synthetic almond; 5' sequence and inner sequence
tagggaagagaaggacatatgatgcacgactcgtaccctatcatgaggccatg

SEQ ID NO: 5919 - DNA, 53 bp, Artificial Sequence
  Description of Artificial Sequence: Synthetic almond; 5' sequence and inner sequence
tagggaagagaaggacatatgatcacggcaaggacgatcaggtgggactgcgt

SEQ ID NO: 5920 - DNA, 53 bp, Artificial Sequence; identical to SEQ ID NO: 1792
  Description of Artificial Sequence: Synthetic almond; 5' sequence and inner sequence

SEQ ID NO: 5921 - DNA, 53 bp, Artificial Sequence
  Description of Artificial Sequence: Synthetic almond; 5' sequence and inner sequence
tagggaagagaaggacatatgatggcacaaacggaccgacaagtgcgcattga

SEQ ID NO: 5922 - DNA, 53 bp, Artificial Sequence
  Description of Artificial Sequence: Synthetic almond; 5' sequence and inner sequence
tagggaagagaaggacatatgatcacgcgcagggaaggcaacctgtggctgca

SEQ ID NO: 5923 - DNA, 53 bp, Artificial Sequence; identical to SEQ ID NO: 1295
  Description of Artificial Sequence: Synthetic almond; 5' sequence and inner sequence

SEQ ID NO: 5924 - DNA, 53 bp, Artificial Sequence
  Description of Artificial Sequence: Synthetic almond; 5' sequence and inner sequence
tagggaagagaaggacatatgatggcatgcgatgaacgaggcatgatgcgtta

SEQ ID NO: 5925 - DNA, 53 bp, Artificial Sequence
  Description of Artificial Sequence: Synthetic almond; 5' sequence and inner sequence
tagggaagagaaggacatatgatggcatgatcgaacgggagagtgcgtcggta

SEQ ID NO: 5926 - DNA, 53 bp, Artificial Sequence
  Description of Artificial Sequence: Synthetic almond; 5' sequence and inner sequence
tagggaagagaaggacatatgatccgcgaggaacagcaggcctacgcggcacg

SEQ ID NO: 5927 - DNA, 53 bp, Artificial Sequence
  Description of Artificial Sequence: Synthetic almond; 5' sequence and inner sequence
tagggaagagaaggacatatgatcgaccgaacgcagcaatacgtgcgccacgt

SEQ ID NO: 5928 - DNA, 53 bp, Artificial Sequence; identical to SEQ ID NO: 1589
  Description of Artificial Sequence: Synthetic almond; 5' sequence and inner sequence

SEQ ID NO: 5929 - DNA, 53 bp, Artificial Sequence; identical to SEQ ID NO: 1829
  Description of Artificial Sequence: Synthetic almond; 5' sequence and inner sequence

SEQ ID NO: 5930 - DNA, 53 bp, Artificial Sequence
  Description of Artificial Sequence: Synthetic almond; 5' sequence and inner sequence
tagggaagagaaggacatatgatgagttggcgaaccgagatgacgtggccatg

SEQ ID NO: 5931 - DNA, 53 bp, Artificial Sequence
  Description of Artificial Sequence: Synthetic almond; 5' sequence and inner sequence
tagggaagagaaggacatatgatgcacgtcacgcacaagcaggccatgtggca

SEQ ID NO: 5932 - DNA, 53 bp, Artificial Sequence; identical to SEQ ID NO: 1488
  Description of Artificial Sequence: Synthetic almond; 5' sequence and inner sequence

SEQ ID NO: 5933 - DNA, 53 bp, Artificial Sequence
  Description of Artificial Sequence: Synthetic almond; 5' sequence and inner sequence
tagggaagagaaggacatatgatgcccgactcgcaccctatcatgaggccatg

SEQ ID NO: 5934 - DNA, 53 bp, Artificial Sequence; identical to SEQ ID NO: 1646
  Description of Artificial Sequence: Synthetic almond; 5' sequence and inner sequence

SEQ ID NO: 5935 - DNA, 53 bp, Artificial Sequence
  Description of Artificial Sequence: Synthetic almond; 5' sequence and inner sequence
tagggaagagaaggacatatgatgtacgtgcgacatccctcaagtgcggtgta

SEQ ID NO: 5936 - DNA, 53 bp, Artificial Sequence; identical to SEQ ID NO: 1265
  Description of Artificial Sequence: Synthetic almond; 5' sequence and inner sequence

SEQ ID NO: 5937 - DNA, 53 bp, Artificial Sequence
  Description of Artificial Sequence: Synthetic almond; 5' sequence and inner sequence
tagggaagagaaggacatatgatcatgtgacgacgatgcccacgcgctggaca

SEQ ID NO: 5938 - DNA, 53 bp, Artificial Sequence
  Description of Artificial Sequence: Synthetic almond; 5' sequence and inner sequence
tagggaagagaaggacatatgatgccattccgcatcctacacgtgggcacgta

SEQ ID NO: 5939 - DNA, 53 bp, Artificial Sequence
  Description of Artificial Sequence: Synthetic almond; 5' sequence and inner sequence
tagggaagagaaggacatatgatggccacgctcgtaccggtcagtgcggcatg

SEQ ID NO: 5940 - DNA, 53 bp, Artificial Sequence
  Description of Artificial Sequence: Synthetic almond; 5' sequence and inner sequence
tagggaagagaaggacatatgatggcatgcgatgaacgcggcatgatgcgtca

SEQ ID NO: 5941 - DNA, 53 bp, Artificial Sequence
  Description of Artificial Sequence: Synthetic almond; 5' sequence and inner sequence
tagggaagagaaggacatatgatgcgatgcgacagagatccgtcacgccccgt

SEQ ID NO: 5942 - DNA, 53 bp, Artificial Sequence
  Description of Artificial Sequence: Synthetic almond; 5' sequence and inner sequence
tagggaagagaaggacatatgatcacggcaggaagcggacggcactcggcacg

SEQ ID NO: 5943 - DNA, 53 bp, Artificial Sequence
  Description of Artificial Sequence: Synthetic almond; 5' sequence and inner sequence
tagggaagagaaggacatatgatccacgactcgcaccctatcatgaggccatg

SEQ ID NO: 5944 - DNA, 53 bp, Artificial Sequence
  Description of Artificial Sequence: Synthetic almond; 5' sequence and inner sequence
tagggaagagaaggacatatgattgcgtgcatacgtatggcattctcggcgca

SEQ ID NO: 5945 - DNA, 53 bp, Artificial Sequence
  Description of Artificial Sequence: Synthetic almond; 5' sequence and inner sequence
tagggaagagaaggacatatgatggccaacgatgcccaaccaagtgcggtatg

SEQ ID NO: 5946 - DNA, 53 bp, Artificial Sequence
  Description of Artificial Sequence: Synthetic almond; 5' sequence and inner sequence
tagggaagagaaggacatatgatccgtaacgacatcaagcggtggtgtgcgtg

SEQ ID NO: 5947 - DNA, 53 bp, Artificial Sequence
  Description of Artificial Sequence: Synthetic almond; 5' sequence and inner sequence
tagggaagagaaggacatatgattcgatggcggcacgaggactgctctgcacg

SEQ ID NO: 5948 - DNA, 53 bp, Artificial Sequence
  Description of Artificial Sequence: Synthetic almond; 5' sequence and inner sequence
tagggaagagaaggacatatgatcgcaccgtcgatacgtcatgcacgctgcca

SEQ ID NO: 5949 - DNA, 53 bp, Artificial Sequence
  Description of Artificial Sequence: Synthetic almond; 5' sequence and inner sequence
tagggaagagaaggacatatgatgcgatgagcatcggacgtacggtgtgtgtc

SEQ ID NO: 5950 - DNA, 53 bp, Artificial Sequence; identical to SEQ ID NO: 1554
  Description of Artificial Sequence: Synthetic almond; 5' sequence and inner sequence

SEQ ID NO: 5951 - DNA, 53 bp, Artificial Sequence
  Description of Artificial Sequence: Synthetic almond; 5' sequence and inner sequence
tagggaagagaaggacatatgatccacgggtgcagcaggacgtactctgcacg

SEQ ID NO: 5952 - DNA, 53 bp, Artificial Sequence; identical to SEQ ID NO: 1835
  Description of Artificial Sequence: Synthetic almond; 5' sequence and inner sequence

SEQ ID NO: 5953 - DNA, 53 bp, Artificial Sequence
  Description of Artificial Sequence: Synthetic almond; 5' sequence and inner sequence
tagggaagagaaggacatatgatccgcacgaagcccaaccgtcaatggccatg

SEQ ID NO: 5954 - DNA, 53 bp, Artificial Sequence
  Description of Artificial Sequence: Synthetic almond; 5' sequence and inner sequence
tagggaagagaaggacatatgatggcacagcatcgtacgtactggttgccgta

SEQ ID NO: 5955 - DNA, 53 bp, Artificial Sequence
  Description of Artificial Sequence: Synthetic almond; 5' sequence and inner sequence
tagggaagagaaggacatatgatcatgacggtgacggcacatgcgacgcgaca

SEQ ID NO: 5956 - DNA, 53 bp, Artificial Sequence
  Description of Artificial Sequence: Synthetic almond; 5' sequence and inner sequence
tagggaagagaaggacatatgatcatgtgcccgatacgaacgacatgtgtgca

SEQ ID NO: 5957 - DNA, 53 bp, Artificial Sequence; identical to SEQ ID NO: 1874
  Description of Artificial Sequence: Synthetic almond; 5' sequence and inner sequence

SEQ ID NO: 5958 - DNA, 53 bp, Artificial Sequence
  Description of Artificial Sequence: Synthetic almond; 5' sequence and inner sequence
tagggaagagaaggacatatgatcatgcgatgacccgtagatcacgtggcgtg

SEQ ID NO: 5959 - DNA, 53 bp, Artificial Sequence
  Description of Artificial Sequence: Synthetic almond; 5' sequence and inner sequence
tagggaagagaaggacatatgatcatgtgcataggaccgcaacgagacgtgca

SEQ ID NO: 5960 - DNA, 53 bp, Artificial Sequence
  Description of Artificial Sequence: Synthetic almond; 5' sequence and inner sequence
tagggaagagaaggacatatgatgtacgcatcgtcccgtcatgtggttccgca

SEQ ID NO: 5961 - DNA, 53 bp, Artificial Sequence
  Description of Artificial Sequence: Synthetic almond; 5' sequence and inner sequence
tagggaagagaaggacatatgatcgtgacggcgagagcacaacggcatgacgt

SEQ ID NO: 5962 - DNA, 53 bp, Artificial Sequence
  Description of Artificial Sequence: Synthetic almond; 5' sequence and inner sequence
tagggaagagaaggacatatgatcctgatgcggcacgtcctcgtgatcatgca

SEQ ID NO: 5963 - DNA, 53 bp, Artificial Sequence
  Description of Artificial Sequence: Synthetic almond; 5' sequence and inner sequence
tagggaagagaaggacatatgatcgaccggcggagaacggtgtggcatgcgtg

SEQ ID NO: 5964 - DNA, 53 bp, Artificial Sequence; identical to SEQ ID NO: 1902
  Description of Artificial Sequence: Synthetic almond; 5' sequence and inner sequence

SEQ ID NO: 5965 - DNA, 53 bp, Artificial Sequence; identical to SEQ ID NO: 1339
  Description of Artificial Sequence: Synthetic almond; 5' sequence and inner sequence

SEQ ID NO: 5966 - DNA, 53 bp, Artificial Sequence
  Description of Artificial Sequence: Synthetic almond; 5' sequence and inner sequence
tagggaagagaaggacatatgatggccgaacggacctggcttgcttatgcgcg

SEQ ID NO: 5967 - DNA, 53 bp, Artificial Sequence
  Description of Artificial Sequence: Synthetic almond; 5' sequence and inner sequence
tagggaagagaaggacatatgattggccgatcgacactatcaagtgcagcatg

SEQ ID NO: 5968 - DNA, 52 bp, Artificial Sequence
  Description of Artificial Sequence: Synthetic almond; 5' sequence and inner sequence
tagggaagagaaggacatatgatgtacgccgatgccctcatgtggccgtgga

SEQ ID NO: 5969 - DNA, 53 bp, Artificial Sequence
  Description of Artificial Sequence: Synthetic almond; 5' sequence and inner sequence
tagggaagagaaggacatatgatggcatggtctgaccgtgagtgcgtcgggta

SEQ ID NO: 5970 - DNA, 53 bp, Artificial Sequence; identical to SEQ ID NO: 1384
  Description of Artificial Sequence: Synthetic almond; 5' sequence and inner sequence

SEQ ID NO: 5971 - DNA, 53 bp, Artificial Sequence
  Description of Artificial Sequence: Synthetic almond; 5' sequence and inner sequence
tagggaagagaaggacatatgatcgtgccgcaaagcaaggtcagcacggtccg

SEQ ID NO: 5972 - DNA, 53 bp, Artificial Sequence; identical to SEQ ID NO: 1644
  Description of Artificial Sequence: Synthetic almond; 5' sequence and inner sequence

SEQ ID NO: 5973 - DNA, 53 bp, Artificial Sequence; identical to SEQ ID NO: 1699
  Description of Artificial Sequence: Synthetic almond; 5' sequence and inner sequence

SEQ ID NO: 5974 - DNA, 53 bp, Artificial Sequence; identical to SEQ ID NO: 1825
  Description of Artificial Sequence: Synthetic almond; 5' sequence and inner sequence

SEQ ID NO: 5975 - DNA, 53 bp, Artificial Sequence
  Description of Artificial Sequence: Synthetic almond; 5' sequence and inner sequence
tagggaagagaaggacatatgatcgtatggcctggatgcacgactttgcgtca

SEQ ID NO: 5976 - DNA, 53 bp, Artificial Sequence
  Description of Artificial Sequence: Synthetic almond; 5' sequence and inner sequence
tagggaagagaaggacatatgatcgcgacggaagtggagatgcagtgtgcaca

SEQ ID NO: 5977 - DNA, 53 bp, Artificial Sequence
  Description of Artificial Sequence: Synthetic almond; 5' sequence and inner sequence
tagggaagagaaggacatatgatggcacaaacggaccgacaagggcgcatgga

SEQ ID NO: 5978 - DNA, 53 bp, Artificial Sequence
  Description of Artificial Sequence: Synthetic almond; 5' sequence and inner sequence
tagggaagagaaggacatatgatccatcgtgacggacgagtcggaccttgcca

SEQ ID NO: 5979 - DNA, 53 bp, Artificial Sequence
  Description of Artificial Sequence: Synthetic almond; 5' sequence and inner sequence
tagggaagagaaggacatatgatcgacaccgtcaagtgcagtgtgcgatggcg

SEQ ID NO: 5980 - DNA, 53 bp, Artificial Sequence; identical to SEQ ID NO: 1410
  Description of Artificial Sequence: Synthetic almond; 5' sequence and inner sequence

SEQ ID NO: 5981 - DNA, 53 bp, Artificial Sequence
  Description of Artificial Sequence: Synthetic almond; 5' sequence and inner sequence
tagggaagagaaggacatatgatgcccacctcgaccctatcaacgtgctcatg

SEQ ID NO: 5982 - DNA, 53 bp, Artificial Sequence
  Description of Artificial Sequence: Synthetic almond; 5' sequence and inner sequence
tagggaagagaaggacatatgatggccgagcgaacctagcatgtgggatcgta

SEQ ID NO: 5983 - DNA, 53 bp, Artificial Sequence; identical to SEQ ID NO: 1404
  Description of Artificial Sequence: Synthetic almond; 5' sequence and inner sequence

SEQ ID NO: 5984 - DNA, 53 bp, Artificial Sequence
  Description of Artificial Sequence: Synthetic almond; 5' sequence and inner sequence
tagggaagagaaggacatatgatcggaccgtcaagcgggaaggcactttggtg

SEQ ID NO: 5985 - DNA, 53 bp, Artificial Sequence
  Description of Artificial Sequence: Synthetic almond; 5' sequence and inner sequence
tagggaagagaaggacatatgatggcctgcacggtaacggtggacgcgtcgtg

SEQ ID NO: 5986 - DNA, 53 bp, Artificial Sequence; identical to SEQ ID NO: 1959
  Description of Artificial Sequence: Synthetic almond; 5' sequence and inner sequence

SEQ ID NO: 5987 - DNA, 53 bp, Artificial Sequence
  Description of Artificial Sequence: Synthetic almond; 5' sequence and inner sequence
tagggaagagaaggacatatgatgcaagactcgcaccctatcatgaggccatg

SEQ ID NO: 5988 - DNA, 53 bp, Artificial Sequence
  Description of Artificial Sequence: Synthetic almond; 5' sequence and inner sequence
tagggaagagaaggacatatgatgcacgactcgcaccatatcatgaggccatg

SEQ ID NO: 5989 - DNA, 53 bp, Artificial Sequence; identical to SEQ ID NO: 1263
  Description of Artificial Sequence: Synthetic almond; 5' sequence and inner sequence

SEQ ID NO: 5990 - DNA, 54 bp, Artificial Sequence; identical to SEQ ID NO: 1652
  Description of Artificial Sequence: Synthetic almond; 5' sequence and inner sequence

SEQ ID NO: 5991 - DNA, 53 bp, Artificial Sequence
  Description of Artificial Sequence: Synthetic almond; 5' sequence and inner sequence
tagggaagagaaggacatatgatgcatcagcagactatcggacgagctgcacg

SEQ ID NO: 5992 - DNA, 53 bp, Artificial Sequence
  Description of Artificial Sequence: Synthetic almond; 5' sequence and inner sequence
tagggaagagaaggacatatgatcgacccaagtgcgaaatgtgcgagtgcgcc

SEQ ID NO: 5993 - DNA, 53 bp, Artificial Sequence; identical to SEQ ID NO: 1260
  Description of Artificial Sequence: Synthetic almond; 5' sequence and inner sequence

SEQ ID NO: 5994 - DNA, 53 bp, Artificial Sequence
  Description of Artificial Sequence: Synthetic almond; 5' sequence and inner sequence
tagggaagagaaggacatatgatcgtaccgctgcggaacaaggtgcgtgcagg

SEQ ID NO: 5995 - DNA, 53 bp, Artificial Sequence
  Description of Artificial Sequence: Synthetic almond; 5' sequence and inner sequence
tagggaagagaaggacatatgatggccacggacgtgcatcatgccgctgcgcc

SEQ ID NO: 5996 - DNA, 53 bp, Artificial Sequence; identical to SEQ ID NO: 1849
  Description of Artificial Sequence: Synthetic almond; 5' sequence and inner sequence

SEQ ID NO: 5997 - DNA, 53 bp, Artificial Sequence
  Description of Artificial Sequence: Synthetic almond; 5' sequence and inner sequence
tagggaagagaaggacatatgatgtcatgccatcccttcgagtgtgacaggga

SEQ ID NO: 5998 - DNA, 53 bp, Artificial Sequence
  Description of Artificial Sequence: Synthetic almond; 5' sequence and inner sequence
tagggaagagaaggacatatgatggcacaaacggaccgacaagtgcgaatgga

SEQ ID NO: 5999 - DNA, 53 bp, Artificial Sequence
  Description of Artificial Sequence: Synthetic almond; 5' sequence and inner sequence
tagggaagagaaggacatatgatgtgcagaacgcgccgcaagtgtgttaggta

SEQ ID NO: 6000 - DNA, 53 bp, Artificial Sequence
  Description of Artificial Sequence: Synthetic almond; 5' sequence and inner sequence
tagggaagagaaggacatatgatggcatgcgatgaacgaggcatgatgcttca

SEQ ID NO: 6001 - DNA, 53 bp, Artificial Sequence
  Description of Artificial Sequence: Synthetic almond; 5' sequence and inner sequence
tagggaagagaaggacatatgatccgcacgcagccctatcagtggtgcatgca

SEQ ID NO: 6002 - DNA, 53 bp, Artificial Sequence
  Description of Artificial Sequence: Synthetic almond; 5' sequence and inner sequence
tagggaagagaaggacatatgatgtcatgcacgaacactatcatggcgacatg

SEQ ID NO: 6003 - DNA, 53 bp, Artificial Sequence; identical to SEQ ID NO: 2004
  Description of Artificial Sequence: Synthetic almond;  inner sequence and 3' sequence

SEQ ID NO: 6004 - DNA, 53 bp, Artificial Sequence; identical to SEQ ID NO: 2003
  Description of Artificial Sequence: Synthetic almond;  inner sequence and 3' sequence

SEQ ID NO: 6005 - DNA, 53 bp, Artificial Sequence; identical to SEQ ID NO: 2008
  Description of Artificial Sequence: Synthetic almond;  inner sequence and 3' sequence

SEQ ID NO: 6006 - DNA, 53 bp, Artificial Sequence; identical to SEQ ID NO: 2010
  Description of Artificial Sequence: Synthetic almond;  inner sequence and 3' sequence

SEQ ID NO: 6007 - DNA, 53 bp, Artificial Sequence; identical to SEQ ID NO: 2005
  Description of Artificial Sequence: Synthetic almond;  inner sequence and 3' sequence

SEQ ID NO: 6008 - DNA, 53 bp, Artificial Sequence; identical to SEQ ID NO: 2012
  Description of Artificial Sequence: Synthetic almond;  inner sequence and 3' sequence

SEQ ID NO: 6009 - DNA, 53 bp, Artificial Sequence; identical to SEQ ID NO: 2007
  Description of Artificial Sequence: Synthetic almond;  inner sequence and 3' sequence

SEQ ID NO: 6010 - DNA, 53 bp, Artificial Sequence; identical to SEQ ID NO: 2006
  Description of Artificial Sequence: Synthetic almond;  inner sequence and 3' sequence

SEQ ID NO: 6011 - DNA, 53 bp, Artificial Sequence; identical to SEQ ID NO: 2013
  Description of Artificial Sequence: Synthetic almond;  inner sequence and 3' sequence

SEQ ID NO: 6012 - DNA, 53 bp, Artificial Sequence; identical to SEQ ID NO: 2023
  Description of Artificial Sequence: Synthetic almond;  inner sequence and 3' sequence

SEQ ID NO: 6013 - DNA, 53 bp, Artificial Sequence; identical to SEQ ID NO: 2009
  Description of Artificial Sequence: Synthetic almond;  inner sequence and 3' sequence

SEQ ID NO: 6014 - DNA, 53 bp, Artificial Sequence; identical to SEQ ID NO: 2016
  Description of Artificial Sequence: Synthetic almond;  inner sequence and 3' sequence

SEQ ID NO: 6015 - DNA, 53 bp, Artificial Sequence; identical to SEQ ID NO: 2049
  Description of Artificial Sequence: Synthetic almond;  inner sequence and 3' sequence

SEQ ID NO: 6016 - DNA, 53 bp, Artificial Sequence; identical to SEQ ID NO: 2011
  Description of Artificial Sequence: Synthetic almond;  inner sequence and 3' sequence

SEQ ID NO: 6017 - DNA, 53 bp, Artificial Sequence; identical to SEQ ID NO: 2018
  Description of Artificial Sequence: Synthetic almond;  inner sequence and 3' sequence

SEQ ID NO: 6018 - DNA, 53 bp, Artificial Sequence; identical to SEQ ID NO: 2022
  Description of Artificial Sequence: Synthetic almond;  inner sequence and 3' sequence

SEQ ID NO: 6019 - DNA, 53 bp, Artificial Sequence; identical to SEQ ID NO: 2037
  Description of Artificial Sequence: Synthetic almond;  inner sequence and 3' sequence

SEQ ID NO: 6020 - DNA, 53 bp, Artificial Sequence; identical to SEQ ID NO: 2017
  Description of Artificial Sequence: Synthetic almond;  inner sequence and 3' sequence

SEQ ID NO: 6021 - DNA, 53 bp, Artificial Sequence; identical to SEQ ID NO: 2046
  Description of Artificial Sequence: Synthetic almond;  inner sequence and 3' sequence

SEQ ID NO: 6022 - DNA, 53 bp, Artificial Sequence; identical to SEQ ID NO: 2034
  Description of Artificial Sequence: Synthetic almond;  inner sequence and 3' sequence

SEQ ID NO: 6023 - DNA, 53 bp, Artificial Sequence; identical to SEQ ID NO: 2030
  Description of Artificial Sequence: Synthetic almond;  inner sequence and 3' sequence

SEQ ID NO: 6024 - DNA, 53 bp, Artificial Sequence; identical to SEQ ID NO: 2020
  Description of Artificial Sequence: Synthetic almond;  inner sequence and 3' sequence

SEQ ID NO: 6025 - DNA, 53 bp, Artificial Sequence; identical to SEQ ID NO: 2014
  Description of Artificial Sequence: Synthetic almond;  inner sequence and 3' sequence

SEQ ID NO: 6026 - DNA, 53 bp, Artificial Sequence; identical to SEQ ID NO: 2036
  Description of Artificial Sequence: Synthetic almond;  inner sequence and 3' sequence

SEQ ID NO: 6027 - DNA, 53 bp, Artificial Sequence; identical to SEQ ID NO: 2028
  Description of Artificial Sequence: Synthetic almond;  inner sequence and 3' sequence

SEQ ID NO: 6028 - DNA, 53 bp, Artificial Sequence; identical to SEQ ID NO: 2025
  Description of Artificial Sequence: Synthetic almond;  inner sequence and 3' sequence

SEQ ID NO: 6029 - DNA, 53 bp, Artificial Sequence; identical to SEQ ID NO: 2041
  Description of Artificial Sequence: Synthetic almond;  inner sequence and 3' sequence

SEQ ID NO: 6030 - DNA, 52 bp, Artificial Sequence; identical to SEQ ID NO: 2070
  Description of Artificial Sequence: Synthetic almond;  inner sequence and 3' sequence

SEQ ID NO: 6031 - DNA, 53 bp, Artificial Sequence; identical to SEQ ID NO: 2040
  Description of Artificial Sequence: Synthetic almond;  inner sequence and 3' sequence

SEQ ID NO: 6032 - DNA, 53 bp, Artificial Sequence; identical to SEQ ID NO: 2033
  Description of Artificial Sequence: Synthetic almond;  inner sequence and 3' sequence

SEQ ID NO: 6033 - DNA, 53 bp, Artificial Sequence; identical to SEQ ID NO: 2082
  Description of Artificial Sequence: Synthetic almond;  inner sequence and 3' sequence

SEQ ID NO: 6034 - DNA, 53 bp, Artificial Sequence; identical to SEQ ID NO: 2088
  Description of Artificial Sequence: Synthetic almond;  inner sequence and 3' sequence

SEQ ID NO: 6035 - DNA, 53 bp, Artificial Sequence; identical to SEQ ID NO: 2066
  Description of Artificial Sequence: Synthetic almond;  inner sequence and 3' sequence

SEQ ID NO: 6036 - DNA, 53 bp, Artificial Sequence; identical to SEQ ID NO: 2035
  Description of Artificial Sequence: Synthetic almond;  inner sequence and 3' sequence

SEQ ID NO: 6037 - DNA, 53 bp, Artificial Sequence; identical to SEQ ID NO: 2055
  Description of Artificial Sequence: Synthetic almond;  inner sequence and 3' sequence

SEQ ID NO: 6038 - DNA, 53 bp, Artificial Sequence; identical to SEQ ID NO: 2064
  Description of Artificial Sequence: Synthetic almond;  inner sequence and 3' sequence

SEQ ID NO: 6039 - DNA, 53 bp, Artificial Sequence; identical to SEQ ID NO: 2024
  Description of Artificial Sequence: Synthetic almond;  inner sequence and 3' sequence

SEQ ID NO: 6040 - DNA, 53 bp, Artificial Sequence; identical to SEQ ID NO: 2039
  Description of Artificial Sequence: Synthetic almond;  inner sequence and 3' sequence

SEQ ID NO: 6041 - DNA, 53 bp, Artificial Sequence; identical to SEQ ID NO: 2074
  Description of Artificial Sequence: Synthetic almond;  inner sequence and 3' sequence

SEQ ID NO: 6042 - DNA, 53 bp, Artificial Sequence; identical to SEQ ID NO: 2032
  Description of Artificial Sequence: Synthetic almond;  inner sequence and 3' sequence

SEQ ID NO: 6043 - DNA, 53 bp, Artificial Sequence; identical to SEQ ID NO: 2063
  Description of Artificial Sequence: Synthetic almond;  inner sequence and 3' sequence

SEQ ID NO: 6044 - DNA, 53 bp, Artificial Sequence; identical to SEQ ID NO: 2061
  Description of Artificial Sequence: Synthetic almond;  inner sequence and 3' sequence

SEQ ID NO: 6045 - DNA, 53 bp, Artificial Sequence; identical to SEQ ID NO: 2045
  Description of Artificial Sequence: Synthetic almond;  inner sequence and 3' sequence

SEQ ID NO: 6046 - DNA, 53 bp, Artificial Sequence; identical to SEQ ID NO: 2021
  Description of Artificial Sequence: Synthetic almond;  inner sequence and 3' sequence

SEQ ID NO: 6047 - DNA, 53 bp, Artificial Sequence; identical to SEQ ID NO: 2052
  Description of Artificial Sequence: Synthetic almond;  inner sequence and 3' sequence

SEQ ID NO: 6048 - DNA, 53 bp, Artificial Sequence; identical to SEQ ID NO: 2044
  Description of Artificial Sequence: Synthetic almond;  inner sequence and 3' sequence

SEQ ID NO: 6049 - DNA, 53 bp, Artificial Sequence; identical to SEQ ID NO: 2019
  Description of Artificial Sequence: Synthetic almond;  inner sequence and 3' sequence

SEQ ID NO: 6050 - DNA, 53 bp, Artificial Sequence; identical to SEQ ID NO: 2015
  Description of Artificial Sequence: Synthetic almond;  inner sequence and 3' sequence

SEQ ID NO: 6051 - DNA, 53 bp, Artificial Sequence; identical to SEQ ID NO: 2112
  Description of Artificial Sequence: Synthetic almond;  inner sequence and 3' sequence

SEQ ID NO: 6052 - DNA, 53 bp, Artificial Sequence; identical to SEQ ID NO: 2108
  Description of Artificial Sequence: Synthetic almond;  inner sequence and 3' sequence

SEQ ID NO: 6053 - DNA, 53 bp, Artificial Sequence; identical to SEQ ID NO: 2058
  Description of Artificial Sequence: Synthetic almond;  inner sequence and 3' sequence

SEQ ID NO: 6054 - DNA, 53 bp, Artificial Sequence; identical to SEQ ID NO: 2131
  Description of Artificial Sequence: Synthetic almond;  inner sequence and 3' sequence

SEQ ID NO: 6055 - DNA, 53 bp, Artificial Sequence; identical to SEQ ID NO: 2031
  Description of Artificial Sequence: Synthetic almond;  inner sequence and 3' sequence

SEQ ID NO: 6056 - DNA, 53 bp, Artificial Sequence; identical to SEQ ID NO: 2029
  Description of Artificial Sequence: Synthetic almond;  inner sequence and 3' sequence

SEQ ID NO: 6057 - DNA, 53 bp, Artificial Sequence; identical to SEQ ID NO: 2054
  Description of Artificial Sequence: Synthetic almond;  inner sequence and 3' sequence

SEQ ID NO: 6058 - DNA, 53 bp, Artificial Sequence; identical to SEQ ID NO: 2080
  Description of Artificial Sequence: Synthetic almond;  inner sequence and 3' sequence

SEQ ID NO: 6059 - DNA, 53 bp, Artificial Sequence; identical to SEQ ID NO: 2168
  Description of Artificial Sequence: Synthetic almond;  inner sequence and 3' sequence

SEQ ID NO: 6060 - DNA, 53 bp, Artificial Sequence; identical to SEQ ID NO: 2567
  Description of Artificial Sequence: Synthetic almond;  inner sequence and 3' sequence

SEQ ID NO: 6061 - DNA, 53 bp, Artificial Sequence; identical to SEQ ID NO: 2117
  Description of Artificial Sequence: Synthetic almond;  inner sequence and 3' sequence

SEQ ID NO: 6062 - DNA, 53 bp, Artificial Sequence; identical to SEQ ID NO: 2078
  Description of Artificial Sequence: Synthetic almond;  inner sequence and 3' sequence

SEQ ID NO: 6063 - DNA, 53 bp, Artificial Sequence; identical to SEQ ID NO: 2129
  Description of Artificial Sequence: Synthetic almond;  inner sequence and 3' sequence

SEQ ID NO: 6064 - DNA, 53 bp, Artificial Sequence; identical to SEQ ID NO: 2048
  Description of Artificial Sequence: Synthetic almond;  inner sequence and 3' sequence

SEQ ID NO: 6065 - DNA, 53 bp, Artificial Sequence; identical to SEQ ID NO: 2207
  Description of Artificial Sequence: Synthetic almond;  inner sequence and 3' sequence

SEQ ID NO: 6066 - DNA, 53 bp, Artificial Sequence; identical to SEQ ID NO: 2133
  Description of Artificial Sequence: Synthetic almond;  inner sequence and 3' sequence

SEQ ID NO: 6067 - DNA, 53 bp, Artificial Sequence; identical to SEQ ID NO: 2136
  Description of Artificial Sequence: Synthetic almond;  inner sequence and 3' sequence

SEQ ID NO: 6068 - DNA, 53 bp, Artificial Sequence; identical to SEQ ID NO: 2097
  Description of Artificial Sequence: Synthetic almond;  inner sequence and 3' sequence

SEQ ID NO: 6069 - DNA, 53 bp, Artificial Sequence; identical to SEQ ID NO: 2155
  Description of Artificial Sequence: Synthetic almond;  inner sequence and 3' sequence

SEQ ID NO: 6070 - DNA, 53 bp, Artificial Sequence; identical to SEQ ID NO: 2065
  Description of Artificial Sequence: Synthetic almond;  inner sequence and 3' sequence

SEQ ID NO: 6071 - DNA, 53 bp, Artificial Sequence; identical to SEQ ID NO: 2183
  Description of Artificial Sequence: Synthetic almond;  inner sequence and 3' sequence

SEQ ID NO: 6072 - DNA, 53 bp, Artificial Sequence; identical to SEQ ID NO: 2038
  Description of Artificial Sequence: Synthetic almond;  inner sequence and 3' sequence

SEQ ID NO: 6073 - DNA, 52 bp, Artificial Sequence; identical to SEQ ID NO: 2193
  Description of Artificial Sequence: Synthetic almond;  inner sequence and 3' sequence

SEQ ID NO: 6074 - DNA, 53 bp, Artificial Sequence; identical to SEQ ID NO: 2081
  Description of Artificial Sequence: Synthetic almond;  inner sequence and 3' sequence

SEQ ID NO: 6075 - DNA, 53 bp, Artificial Sequence; identical to SEQ ID NO: 2126
  Description of Artificial Sequence: Synthetic almond;  inner sequence and 3' sequence

SEQ ID NO: 6076 - DNA, 53 bp, Artificial Sequence; identical to SEQ ID NO: 2067
  Description of Artificial Sequence: Synthetic almond;  inner sequence and 3' sequence

SEQ ID NO: 6077 - DNA, 53 bp, Artificial Sequence; identical to SEQ ID NO: 2142
  Description of Artificial Sequence: Synthetic almond;  inner sequence and 3' sequence

SEQ ID NO: 6078 - DNA, 53 bp, Artificial Sequence; identical to SEQ ID NO: 2051
  Description of Artificial Sequence: Synthetic almond;  inner sequence and 3' sequence

SEQ ID NO: 6079 - DNA, 53 bp, Artificial Sequence; identical to SEQ ID NO: 2185
  Description of Artificial Sequence: Synthetic almond;  inner sequence and 3' sequence

SEQ ID NO: 6080 - DNA, 53 bp, Artificial Sequence; identical to SEQ ID NO: 2195
  Description of Artificial Sequence: Synthetic almond;  inner sequence and 3' sequence

SEQ ID NO: 6081 - DNA, 53 bp, Artificial Sequence; identical to SEQ ID NO: 2079
  Description of Artificial Sequence: Synthetic almond;  inner sequence and 3' sequence

SEQ ID NO: 6082 - DNA, 53 bp, Artificial Sequence; identical to SEQ ID NO: 2692
  Description of Artificial Sequence: Synthetic almond;  inner sequence and 3' sequence

SEQ ID NO: 6083 - DNA, 53 bp, Artificial Sequence; identical to SEQ ID NO: 2103
  Description of Artificial Sequence: Synthetic almond;  inner sequence and 3' sequence

SEQ ID NO: 6084 - DNA, 53 bp, Artificial Sequence; identical to SEQ ID NO: 2211
  Description of Artificial Sequence: Synthetic almond;  inner sequence and 3' sequence

SEQ ID NO: 6085 - DNA, 53 bp, Artificial Sequence; identical to SEQ ID NO: 2093
  Description of Artificial Sequence: Synthetic almond;  inner sequence and 3' sequence

SEQ ID NO: 6086 - DNA, 53 bp, Artificial Sequence; identical to SEQ ID NO: 2092
  Description of Artificial Sequence: Synthetic almond;  inner sequence and 3' sequence

SEQ ID NO: 6087 - DNA, 53 bp, Artificial Sequence; identical to SEQ ID NO: 2047
  Description of Artificial Sequence: Synthetic almond;  inner sequence and 3' sequence

SEQ ID NO: 6088 - DNA, 53 bp, Artificial Sequence; identical to SEQ ID NO: 2050
  Description of Artificial Sequence: Synthetic almond;  inner sequence and 3' sequence

SEQ ID NO: 6089 - DNA, 53 bp, Artificial Sequence; identical to SEQ ID NO: 2120
  Description of Artificial Sequence: Synthetic almond;  inner sequence and 3' sequence

SEQ ID NO: 6090 - DNA, 53 bp, Artificial Sequence; identical to SEQ ID NO: 2026
  Description of Artificial Sequence: Synthetic almond;  inner sequence and 3' sequence

SEQ ID NO: 6091 - DNA, 53 bp, Artificial Sequence; identical to SEQ ID NO: 2430
  Description of Artificial Sequence: Synthetic almond;  inner sequence and 3' sequence

SEQ ID NO: 6092 - DNA, 53 bp, Artificial Sequence; identical to SEQ ID NO: 2229
  Description of Artificial Sequence: Synthetic almond;  inner sequence and 3' sequence

SEQ ID NO: 6093 - DNA, 53 bp, Artificial Sequence; identical to SEQ ID NO: 2154
  Description of Artificial Sequence: Synthetic almond;  inner sequence and 3' sequence

SEQ ID NO: 6094 - DNA, 53 bp, Artificial Sequence; identical to SEQ ID NO: 2056
  Description of Artificial Sequence: Synthetic almond;  inner sequence and 3' sequence

SEQ ID NO: 6095 - DNA, 53 bp, Artificial Sequence; identical to SEQ ID NO: 2083
  Description of Artificial Sequence: Synthetic almond;  inner sequence and 3' sequence

SEQ ID NO: 6096 - DNA, 53 bp, Artificial Sequence; identical to SEQ ID NO: 2247
  Description of Artificial Sequence: Synthetic almond;  inner sequence and 3' sequence

SEQ ID NO: 6097 - DNA, 53 bp, Artificial Sequence; identical to SEQ ID NO: 2257
  Description of Artificial Sequence: Synthetic almond;  inner sequence and 3' sequence

SEQ ID NO: 6098 - DNA, 53 bp, Artificial Sequence; identical to SEQ ID NO: 2287
  Description of Artificial Sequence: Synthetic almond;  inner sequence and 3' sequence

SEQ ID NO: 6099 - DNA, 53 bp, Artificial Sequence; identical to SEQ ID NO: 2255
  Description of Artificial Sequence: Synthetic almond;  inner sequence and 3' sequence

SEQ ID NO: 6100 - DNA, 53 bp, Artificial Sequence; identical to SEQ ID NO: 2059
  Description of Artificial Sequence: Synthetic almond;  inner sequence and 3' sequence

SEQ ID NO: 6101 - DNA, 53 bp, Artificial Sequence; identical to SEQ ID NO: 2288
  Description of Artificial Sequence: Synthetic almond;  inner sequence and 3' sequence

SEQ ID NO: 6102 - DNA, 53 bp, Artificial Sequence; identical to SEQ ID NO: 2091
  Description of Artificial Sequence: Synthetic almond;  inner sequence and 3' sequence

SEQ ID NO: 6103 - DNA, 53 bp, Artificial Sequence; identical to SEQ ID NO: 2077
  Description of Artificial Sequence: Synthetic almond;  inner sequence and 3' sequence

SEQ ID NO: 6104 - DNA, 53 bp, Artificial Sequence; identical to SEQ ID NO: 2151
  Description of Artificial Sequence: Synthetic almond;  inner sequence and 3' sequence

SEQ ID NO: 6105 - DNA, 53 bp, Artificial Sequence; identical to SEQ ID NO: 2354
  Description of Artificial Sequence: Synthetic almond;  inner sequence and 3' sequence

SEQ ID NO: 6106 - DNA, 53 bp, Artificial Sequence; identical to SEQ ID NO: 2233
  Description of Artificial Sequence: Synthetic almond;  inner sequence and 3' sequence

SEQ ID NO: 6107 - DNA, 53 bp, Artificial Sequence; identical to SEQ ID NO: 2147
  Description of Artificial Sequence: Synthetic almond;  inner sequence and 3' sequence

SEQ ID NO: 6108 - DNA, 53 bp, Artificial Sequence; identical to SEQ ID NO: 2161
  Description of Artificial Sequence: Synthetic almond;  inner sequence and 3' sequence

SEQ ID NO: 6109 - DNA, 53 bp, Artificial Sequence; identical to SEQ ID NO: 2296
  Description of Artificial Sequence: Synthetic almond;  inner sequence and 3' sequence

SEQ ID NO: 6110 - DNA, 53 bp, Artificial Sequence; identical to SEQ ID NO: 2355
  Description of Artificial Sequence: Synthetic almond;  inner sequence and 3' sequence

SEQ ID NO: 6111 - DNA, 53 bp, Artificial Sequence; identical to SEQ ID NO: 2285
  Description of Artificial Sequence: Synthetic almond;  inner sequence and 3' sequence

SEQ ID NO: 6112 - DNA, 53 bp, Artificial Sequence; identical to SEQ ID NO: 2122
  Description of Artificial Sequence: Synthetic almond;  inner sequence and 3' sequence

SEQ ID NO: 6113 - DNA, 53 bp, Artificial Sequence; identical to SEQ ID NO: 2098
  Description of Artificial Sequence: Synthetic almond;  inner sequence and 3' sequence

SEQ ID NO: 6114 - DNA, 53 bp, Artificial Sequence; identical to SEQ ID NO: 2203
  Description of Artificial Sequence: Synthetic almond;  inner sequence and 3' sequence

SEQ ID NO: 6115 - DNA, 53 bp, Artificial Sequence; identical to SEQ ID NO: 2060
  Description of Artificial Sequence: Synthetic almond;  inner sequence and 3' sequence

SEQ ID NO: 6116 - DNA, 53 bp, Artificial Sequence; identical to SEQ ID NO: 2144
  Description of Artificial Sequence: Synthetic almond;  inner sequence and 3' sequence

SEQ ID NO: 6117 - DNA, 53 bp, Artificial Sequence; identical to SEQ ID NO: 2076
  Description of Artificial Sequence: Synthetic almond;  inner sequence and 3' sequence

SEQ ID NO: 6118 - DNA, 53 bp, Artificial Sequence; identical to SEQ ID NO: 2027
  Description of Artificial Sequence: Synthetic almond;  inner sequence and 3' sequence

SEQ ID NO: 6119 - DNA, 53 bp, Artificial Sequence; identical to SEQ ID NO: 2465
  Description of Artificial Sequence: Synthetic almond;  inner sequence and 3' sequence

SEQ ID NO: 6120 - DNA, 53 bp, Artificial Sequence; identical to SEQ ID NO: 2237
  Description of Artificial Sequence: Synthetic almond;  inner sequence and 3' sequence

SEQ ID NO: 6121 - DNA, 53 bp, Artificial Sequence; identical to SEQ ID NO: 2264
  Description of Artificial Sequence: Synthetic almond;  inner sequence and 3' sequence

SEQ ID NO: 6122 - DNA, 53 bp, Artificial Sequence; identical to SEQ ID NO: 2198
  Description of Artificial Sequence: Synthetic almond;  inner sequence and 3' sequence

SEQ ID NO: 6123 - DNA, 53 bp, Artificial Sequence; identical to SEQ ID NO: 2205
  Description of Artificial Sequence: Synthetic almond;  inner sequence and 3' sequence

SEQ ID NO: 6124 - DNA, 53 bp, Artificial Sequence; identical to SEQ ID NO: 2068
  Description of Artificial Sequence: Synthetic almond;  inner sequence and 3' sequence

SEQ ID NO: 6125 - DNA, 53 bp, Artificial Sequence; identical to SEQ ID NO: 2188
  Description of Artificial Sequence: Synthetic almond;  inner sequence and 3' sequence

SEQ ID NO: 6126 - DNA, 53 bp, Artificial Sequence; identical to SEQ ID NO: 2179
  Description of Artificial Sequence: Synthetic almond;  inner sequence and 3' sequence

SEQ ID NO: 6127 - DNA, 53 bp, Artificial Sequence; identical to SEQ ID NO: 2113
  Description of Artificial Sequence: Synthetic almond;  inner sequence and 3' sequence

SEQ ID NO: 6128 - DNA, 53 bp, Artificial Sequence; identical to SEQ ID NO: 2094
  Description of Artificial Sequence: Synthetic almond;  inner sequence and 3' sequence

SEQ ID NO: 6129 - DNA, 53 bp, Artificial Sequence; identical to SEQ ID NO: 2057
  Description of Artificial Sequence: Synthetic almond;  inner sequence and 3' sequence

SEQ ID NO: 6130 - DNA, 53 bp, Artificial Sequence; identical to SEQ ID NO: 2282
  Description of Artificial Sequence: Synthetic almond;  inner sequence and 3' sequence

SEQ ID NO: 6131 - DNA, 53 bp, Artificial Sequence; identical to SEQ ID NO: 2073
  Description of Artificial Sequence: Synthetic almond;  inner sequence and 3' sequence

SEQ ID NO: 6132 - DNA, 53 bp, Artificial Sequence; identical to SEQ ID NO: 2145
  Description of Artificial Sequence: Synthetic almond;  inner sequence and 3' sequence

SEQ ID NO: 6133 - DNA, 53 bp, Artificial Sequence; identical to SEQ ID NO: 2140
  Description of Artificial Sequence: Synthetic almond;  inner sequence and 3' sequence

SEQ ID NO: 6134 - DNA, 53 bp, Artificial Sequence; identical to SEQ ID NO: 2691
  Description of Artificial Sequence: Synthetic almond;  inner sequence and 3' sequence

SEQ ID NO: 6135 - DNA, 53 bp, Artificial Sequence; identical to SEQ ID NO: 2311
  Description of Artificial Sequence: Synthetic almond;  inner sequence and 3' sequence

SEQ ID NO: 6136 - DNA, 53 bp, Artificial Sequence; identical to SEQ ID NO: 2522
  Description of Artificial Sequence: Synthetic almond;  inner sequence and 3' sequence

SEQ ID NO: 6137 - DNA, 53 bp, Artificial Sequence; identical to SEQ ID NO: 2095
  Description of Artificial Sequence: Synthetic almond;  inner sequence and 3' sequence

SEQ ID NO: 6138 - DNA, 53 bp, Artificial Sequence; identical to SEQ ID NO: 2283
  Description of Artificial Sequence: Synthetic almond;  inner sequence and 3' sequence

SEQ ID NO: 6139 - DNA, 53 bp, Artificial Sequence; identical to SEQ ID NO: 2062
  Description of Artificial Sequence: Synthetic almond;  inner sequence and 3' sequence

SEQ ID NO: 6140 - DNA, 51 bp, Artificial Sequence; identical to SEQ ID NO: 2148
  Description of Artificial Sequence: Synthetic almond;  inner sequence and 3' sequence

SEQ ID NO: 6141 - DNA, 54 bp, Artificial Sequence; identical to SEQ ID NO: 2150
  Description of Artificial Sequence: Synthetic almond;  inner sequence and 3' sequence

SEQ ID NO: 6142 - DNA, 53 bp, Artificial Sequence; identical to SEQ ID NO: 2360
  Description of Artificial Sequence: Synthetic almond;  inner sequence and 3' sequence

SEQ ID NO: 6143 - DNA, 53 bp, Artificial Sequence; identical to SEQ ID NO: 2673
  Description of Artificial Sequence: Synthetic almond;  inner sequence and 3' sequence

SEQ ID NO: 6144 - DNA, 53 bp, Artificial Sequence; identical to SEQ ID NO: 2329
  Description of Artificial Sequence: Synthetic almond;  inner sequence and 3' sequence

SEQ ID NO: 6145 - DNA, 53 bp, Artificial Sequence; identical to SEQ ID NO: 2253
  Description of Artificial Sequence: Synthetic almond;  inner sequence and 3' sequence

SEQ ID NO: 6146 - DNA, 53 bp, Artificial Sequence; identical to SEQ ID NO: 2293
  Description of Artificial Sequence: Synthetic almond;  inner sequence and 3' sequence

SEQ ID NO: 6147 - DNA, 53 bp, Artificial Sequence; identical to SEQ ID NO: 2099
  Description of Artificial Sequence: Synthetic almond;  inner sequence and 3' sequence

SEQ ID NO: 6148 - DNA, 53 bp, Artificial Sequence; identical to SEQ ID NO: 2115
  Description of Artificial Sequence: Synthetic almond;  inner sequence and 3' sequence

SEQ ID NO: 6149 - DNA, 53 bp, Artificial Sequence; identical to SEQ ID NO: 2053
  Description of Artificial Sequence: Synthetic almond;  inner sequence and 3' sequence

SEQ ID NO: 6150 - DNA, 53 bp, Artificial Sequence; identical to SEQ ID NO: 2042
  Description of Artificial Sequence: Synthetic almond;  inner sequence and 3' sequence

SEQ ID NO: 6151 - DNA, 53 bp, Artificial Sequence; identical to SEQ ID NO: 2377
  Description of Artificial Sequence: Synthetic almond;  inner sequence and 3' sequence

SEQ ID NO: 6152 - DNA, 53 bp, Artificial Sequence; identical to SEQ ID NO: 2362
  Description of Artificial Sequence: Synthetic almond;  inner sequence and 3' sequence

SEQ ID NO: 6153 - DNA, 53 bp, Artificial Sequence; identical to SEQ ID NO: 2087
  Description of Artificial Sequence: Synthetic almond;  inner sequence and 3' sequence

SEQ ID NO: 6154 - DNA, 53 bp, Artificial Sequence; identical to SEQ ID NO: 2290
  Description of Artificial Sequence: Synthetic almond;  inner sequence and 3' sequence

SEQ ID NO: 6155 - DNA, 54 bp, Artificial Sequence; identical to SEQ ID NO: 2258
  Description of Artificial Sequence: Synthetic almond;  inner sequence and 3' sequence

SEQ ID NO: 6156 - DNA, 53 bp, Artificial Sequence; identical to SEQ ID NO: 2654
  Description of Artificial Sequence: Synthetic almond;  inner sequence and 3' sequence

SEQ ID NO: 6157 - DNA, 53 bp, Artificial Sequence; identical to SEQ ID NO: 2174
  Description of Artificial Sequence: Synthetic almond;  inner sequence and 3' sequence

SEQ ID NO: 6158 - DNA, 53 bp, Artificial Sequence; identical to SEQ ID NO: 2118
  Description of Artificial Sequence: Synthetic almond;  inner sequence and 3' sequence

SEQ ID NO: 6159 - DNA, 53 bp, Artificial Sequence; identical to SEQ ID NO: 2071
  Description of Artificial Sequence: Synthetic almond;  inner sequence and 3' sequence

SEQ ID NO: 6160 - DNA, 53 bp, Artificial Sequence; identical to SEQ ID NO: 2347
  Description of Artificial Sequence: Synthetic almond;  inner sequence and 3' sequence

SEQ ID NO: 6161 - DNA, 53 bp, Artificial Sequence; identical to SEQ ID NO: 2208
  Description of Artificial Sequence: Synthetic almond;  inner sequence and 3' sequence

SEQ ID NO: 6162 - DNA, 53 bp, Artificial Sequence; identical to SEQ ID NO: 2096
  Description of Artificial Sequence: Synthetic almond;  inner sequence and 3' sequence

SEQ ID NO: 6163 - DNA, 53 bp, Artificial Sequence; identical to SEQ ID NO: 2468
  Description of Artificial Sequence: Synthetic almond;  inner sequence and 3' sequence

SEQ ID NO: 6164 - DNA, 53 bp, Artificial Sequence; identical to SEQ ID NO: 2245
  Description of Artificial Sequence: Synthetic almond;  inner sequence and 3' sequence

SEQ ID NO: 6165 - DNA, 53 bp, Artificial Sequence; identical to SEQ ID NO: 2929
  Description of Artificial Sequence: Synthetic almond;  inner sequence and 3' sequence

SEQ ID NO: 6166 - DNA, 53 bp, Artificial Sequence; identical to SEQ ID NO: 2470
  Description of Artificial Sequence: Synthetic almond;  inner sequence and 3' sequence

SEQ ID NO: 6167 - DNA, 53 bp, Artificial Sequence; identical to SEQ ID NO: 2153
  Description of Artificial Sequence: Synthetic almond;  inner sequence and 3' sequence

SEQ ID NO: 6168 - DNA, 53 bp, Artificial Sequence; identical to SEQ ID NO: 2321
  Description of Artificial Sequence: Synthetic almond;  inner sequence and 3' sequence

SEQ ID NO: 6169 - DNA, 53 bp, Artificial Sequence; identical to SEQ ID NO: 2084
  Description of Artificial Sequence: Synthetic almond;  inner sequence and 3' sequence

SEQ ID NO: 6170 - DNA, 53 bp, Artificial Sequence; identical to SEQ ID NO: 2663
  Description of Artificial Sequence: Synthetic almond;  inner sequence and 3' sequence

SEQ ID NO: 6171 - DNA, 53 bp, Artificial Sequence; identical to SEQ ID NO: 2222
  Description of Artificial Sequence: Synthetic almond;  inner sequence and 3' sequence

SEQ ID NO: 6172 - DNA, 53 bp, Artificial Sequence; identical to SEQ ID NO: 2438
  Description of Artificial Sequence: Synthetic almond;  inner sequence and 3' sequence

SEQ ID NO: 6173 - DNA, 53 bp, Artificial Sequence; identical to SEQ ID NO: 2152
  Description of Artificial Sequence: Synthetic almond;  inner sequence and 3' sequence

SEQ ID NO: 6174 - DNA, 53 bp, Artificial Sequence; identical to SEQ ID NO: 2106
  Description of Artificial Sequence: Synthetic almond;  inner sequence and 3' sequence

SEQ ID NO: 6175 - DNA, 53 bp, Artificial Sequence; identical to SEQ ID NO: 2312
  Description of Artificial Sequence: Synthetic almond;  inner sequence and 3' sequence

SEQ ID NO: 6176 - DNA, 53 bp, Artificial Sequence; identical to SEQ ID NO: 2234
  Description of Artificial Sequence: Synthetic almond;  inner sequence and 3' sequence

SEQ ID NO: 6177 - DNA, 53 bp, Artificial Sequence; identical to SEQ ID NO: 2376
  Description of Artificial Sequence: Synthetic almond;  inner sequence and 3' sequence

SEQ ID NO: 6178 - DNA, 53 bp, Artificial Sequence; identical to SEQ ID NO: 2111
  Description of Artificial Sequence: Synthetic almond;  inner sequence and 3' sequence

SEQ ID NO: 6179 - DNA, 53 bp, Artificial Sequence; identical to SEQ ID NO: 2164
  Description of Artificial Sequence: Synthetic almond;  inner sequence and 3' sequence

SEQ ID NO: 6180 - DNA, 53 bp, Artificial Sequence; identical to SEQ ID NO: 2069
  Description of Artificial Sequence: Synthetic almond;  inner sequence and 3' sequence

SEQ ID NO: 6181 - DNA, 53 bp, Artificial Sequence; identical to SEQ ID NO: 2240
  Description of Artificial Sequence: Synthetic almond;  inner sequence and 3' sequence

SEQ ID NO: 6182 - DNA, 53 bp, Artificial Sequence; identical to SEQ ID NO: 2149
  Description of Artificial Sequence: Synthetic almond;  inner sequence and 3' sequence

SEQ ID NO: 6183 - DNA, 53 bp, Artificial Sequence; identical to SEQ ID NO: 2075
  Description of Artificial Sequence: Synthetic almond;  inner sequence and 3' sequence

SEQ ID NO: 6184 - DNA, 53 bp, Artificial Sequence; identical to SEQ ID NO: 2201
  Description of Artificial Sequence: Synthetic almond;  inner sequence and 3' sequence

SEQ ID NO: 6185 - DNA, 53 bp, Artificial Sequence; identical to SEQ ID NO: 2043
  Description of Artificial Sequence: Synthetic almond;  inner sequence and 3' sequence

SEQ ID NO: 6186 - DNA, 53 bp, Artificial Sequence; identical to SEQ ID NO: 2406
  Description of Artificial Sequence: Synthetic almond;  inner sequence and 3' sequence

SEQ ID NO: 6187 - DNA, 53 bp, Artificial Sequence; identical to SEQ ID NO: 2184
  Description of Artificial Sequence: Synthetic almond;  inner sequence and 3' sequence

SEQ ID NO: 6188 - DNA, 53 bp, Artificial Sequence; identical to SEQ ID NO: 2308
  Description of Artificial Sequence: Synthetic almond;  inner sequence and 3' sequence

SEQ ID NO: 6189 - DNA, 53 bp, Artificial Sequence; identical to SEQ ID NO: 2429
  Description of Artificial Sequence: Synthetic almond;  inner sequence and 3' sequence

SEQ ID NO: 6190 - DNA, 53 bp, Artificial Sequence; identical to SEQ ID NO: 2527
  Description of Artificial Sequence: Synthetic almond;  inner sequence and 3' sequence

SEQ ID NO: 6191 - DNA, 53 bp, Artificial Sequence; identical to SEQ ID NO: 2392
  Description of Artificial Sequence: Synthetic almond;  inner sequence and 3' sequence

SEQ ID NO: 6192 - DNA, 53 bp, Artificial Sequence; identical to SEQ ID NO: 2132
  Description of Artificial Sequence: Synthetic almond;  inner sequence and 3' sequence

SEQ ID NO: 6193 - DNA, 53 bp, Artificial Sequence; identical to SEQ ID NO: 2100
  Description of Artificial Sequence: Synthetic almond;  inner sequence and 3' sequence

SEQ ID NO: 6194 - DNA, 53 bp, Artificial Sequence; identical to SEQ ID NO: 2729
  Description of Artificial Sequence: Synthetic almond;  inner sequence and 3' sequence

SEQ ID NO: 6195 - DNA, 53 bp, Artificial Sequence; identical to SEQ ID NO: 2215
  Description of Artificial Sequence: Synthetic almond;  inner sequence and 3' sequence

SEQ ID NO: 6196 - DNA, 53 bp, Artificial Sequence; identical to SEQ ID NO: 2178
  Description of Artificial Sequence: Synthetic almond;  inner sequence and 3' sequence

SEQ ID NO: 6197 - DNA, 53 bp, Artificial Sequence; identical to SEQ ID NO: 2353
  Description of Artificial Sequence: Synthetic almond;  inner sequence and 3' sequence

SEQ ID NO: 6198 - DNA, 53 bp, Artificial Sequence
  Description of Artificial Sequence: Synthetic almond;  inner sequence and 3' sequence
gccgcagtgcgaatggtccgacgctgcacgttgactagtacatgaccacttga

SEQ ID NO: 6199 - DNA, 53 bp, Artificial Sequence; identical to SEQ ID NO: 2105
  Description of Artificial Sequence: Synthetic almond;  inner sequence and 3' sequence

SEQ ID NO: 6200 - DNA, 53 bp, Artificial Sequence; identical to SEQ ID NO: 2359
  Description of Artificial Sequence: Synthetic almond;  inner sequence and 3' sequence

SEQ ID NO: 6201 - DNA, 53 bp, Artificial Sequence; identical to SEQ ID NO: 2116
  Description of Artificial Sequence: Synthetic almond;  inner sequence and 3' sequence

SEQ ID NO: 6202 - DNA, 53 bp, Artificial Sequence; identical to SEQ ID NO: 2953
  Description of Artificial Sequence: Synthetic almond;  inner sequence and 3' sequence

SEQ ID NO: 6203 - DNA, 53 bp, Artificial Sequence; identical to SEQ ID NO: 2645
  Description of Artificial Sequence: Synthetic almond;  inner sequence and 3' sequence

SEQ ID NO: 6204 - DNA, 53 bp, Artificial Sequence; identical to SEQ ID NO: 2172
  Description of Artificial Sequence: Synthetic almond;  inner sequence and 3' sequence

SEQ ID NO: 6205 - DNA, 53 bp, Artificial Sequence
  Description of Artificial Sequence: Synthetic almond;  inner sequence and 3' sequence
agtgtggctgcctcgaccaacgtggccatgttgactagtacatgaccacttga

SEQ ID NO: 6206 - DNA, 53 bp, Artificial Sequence; identical to SEQ ID NO: 2138
  Description of Artificial Sequence: Synthetic almond;  inner sequence and 3' sequence

SEQ ID NO: 6207 - DNA, 53 bp, Artificial Sequence; identical to SEQ ID NO: 2436
  Description of Artificial Sequence: Synthetic almond;  inner sequence and 3' sequence

SEQ ID NO: 6208 - DNA, 53 bp, Artificial Sequence; identical to SEQ ID NO: 2299
  Description of Artificial Sequence: Synthetic almond;  inner sequence and 3' sequence

SEQ ID NO: 6209 - DNA, 53 bp, Artificial Sequence; identical to SEQ ID NO: 2579
  Description of Artificial Sequence: Synthetic almond;  inner sequence and 3' sequence

SEQ ID NO: 6210 - DNA, 53 bp, Artificial Sequence; identical to SEQ ID NO: 2268
  Description of Artificial Sequence: Synthetic almond;  inner sequence and 3' sequence

SEQ ID NO: 6211 - DNA, 53 bp, Artificial Sequence; identical to SEQ ID NO: 2159
  Description of Artificial Sequence: Synthetic almond;  inner sequence and 3' sequence

SEQ ID NO: 6212 - DNA, 53 bp, Artificial Sequence; identical to SEQ ID NO: 2175
  Description of Artificial Sequence: Synthetic almond;  inner sequence and 3' sequence

SEQ ID NO: 6213 - DNA, 53 bp, Artificial Sequence; identical to SEQ ID NO: 2125
  Description of Artificial Sequence: Synthetic almond;  inner sequence and 3' sequence

SEQ ID NO: 6214 - DNA, 53 bp, Artificial Sequence; identical to SEQ ID NO: 2901
  Description of Artificial Sequence: Synthetic almond;  inner sequence and 3' sequence

SEQ ID NO: 6215 - DNA, 53 bp, Artificial Sequence; identical to SEQ ID NO: 2270
  Description of Artificial Sequence: Synthetic almond;  inner sequence and 3' sequence

SEQ ID NO: 6216 - DNA, 53 bp, Artificial Sequence; identical to SEQ ID NO: 2541
  Description of Artificial Sequence: Synthetic almond;  inner sequence and 3' sequence

SEQ ID NO: 6217 - DNA, 53 bp, Artificial Sequence; identical to SEQ ID NO: 2230
  Description of Artificial Sequence: Synthetic almond;  inner sequence and 3' sequence

SEQ ID NO: 6218 - DNA, 53 bp, Artificial Sequence; identical to SEQ ID NO: 2197
  Description of Artificial Sequence: Synthetic almond;  inner sequence and 3' sequence

SEQ ID NO: 6219 - DNA, 53 bp, Artificial Sequence; identical to SEQ ID NO: 2364
  Description of Artificial Sequence: Synthetic almond;  inner sequence and 3' sequence

SEQ ID NO: 6220 - DNA, 53 bp, Artificial Sequence; identical to SEQ ID NO: 2139
  Description of Artificial Sequence: Synthetic almond;  inner sequence and 3' sequence

SEQ ID NO: 6221 - DNA, 53 bp, Artificial Sequence; identical to SEQ ID NO: 2123
  Description of Artificial Sequence: Synthetic almond;  inner sequence and 3' sequence

SEQ ID NO: 6222 - DNA, 53 bp, Artificial Sequence; identical to SEQ ID NO: 2610
  Description of Artificial Sequence: Synthetic almond;  inner sequence and 3' sequence

SEQ ID NO: 6223 - DNA, 53 bp, Artificial Sequence; identical to SEQ ID NO: 2570
  Description of Artificial Sequence: Synthetic almond;  inner sequence and 3' sequence

SEQ ID NO: 6224 - DNA, 53 bp, Artificial Sequence; identical to SEQ ID NO: 2104
  Description of Artificial Sequence: Synthetic almond;  inner sequence and 3' sequence

SEQ ID NO: 6225 - DNA, 53 bp, Artificial Sequence; identical to SEQ ID NO: 2086
  Description of Artificial Sequence: Synthetic almond;  inner sequence and 3' sequence

SEQ ID NO: 6226 - DNA, 53 bp, Artificial Sequence; identical to SEQ ID NO: 2783
  Description of Artificial Sequence: Synthetic almond;  inner sequence and 3' sequence

SEQ ID NO: 6227 - DNA, 53 bp, Artificial Sequence; identical to SEQ ID NO: 2232
  Description of Artificial Sequence: Synthetic almond;  inner sequence and 3' sequence

SEQ ID NO: 6228 - DNA, 53 bp, Artificial Sequence; identical to SEQ ID NO: 2085
  Description of Artificial Sequence: Synthetic almond;  inner sequence and 3' sequence

SEQ ID NO: 6229 - DNA, 53 bp, Artificial Sequence
  Description of Artificial Sequence: Synthetic almond;  inner sequence and 3' sequence
ccgaacggacctacgtgggatgcgcgtcgtttgactagtacatgaccacttga

SEQ ID NO: 6230 - DNA, 53 bp, Artificial Sequence
  Description of Artificial Sequence: Synthetic almond;  inner sequence and 3' sequence
ggacgcgatgaccacatgccgtgagacatgttgactagtacatgaccacttga

SEQ ID NO: 6231 - DNA, 53 bp, Artificial Sequence; identical to SEQ ID NO: 2191
  Description of Artificial Sequence: Synthetic almond;  inner sequence and 3' sequence

SEQ ID NO: 6232 - DNA, 53 bp, Artificial Sequence; identical to SEQ ID NO: 2552
  Description of Artificial Sequence: Synthetic almond;  inner sequence and 3' sequence

SEQ ID NO: 6233 - DNA, 53 bp, Artificial Sequence; identical to SEQ ID NO: 2194
  Description of Artificial Sequence: Synthetic almond;  inner sequence and 3' sequence

SEQ ID NO: 6234 - DNA, 53 bp, Artificial Sequence
  Description of Artificial Sequence: Synthetic almond;  inner sequence and 3' sequence
ggacgcggctgacctcaagctggccaggtattgactagtacatgaccacttga

SEQ ID NO: 6235 - DNA, 53 bp, Artificial Sequence; identical to SEQ ID NO: 2209
  Description of Artificial Sequence: Synthetic almond;  inner sequence and 3' sequence

SEQ ID NO: 6236 - DNA, 53 bp, Artificial Sequence; identical to SEQ ID NO: 2361
  Description of Artificial Sequence: Synthetic almond;  inner sequence and 3' sequence

SEQ ID NO: 6237 - DNA, 53 bp, Artificial Sequence; identical to SEQ ID NO: 2389
  Description of Artificial Sequence: Synthetic almond;  inner sequence and 3' sequence

SEQ ID NO: 6238 - DNA, 53 bp, Artificial Sequence
  Description of Artificial Sequence: Synthetic almond;  inner sequence and 3' sequence
cgatggccgtaacgaaacgtgcaggtgggattgactagtacatgaccacttga

SEQ ID NO: 6239 - DNA, 53 bp, Artificial Sequence; identical to SEQ ID NO: 2519
  Description of Artificial Sequence: Synthetic almond;  inner sequence and 3' sequence

SEQ ID NO: 6240 - DNA, 53 bp, Artificial Sequence
  Description of Artificial Sequence: Synthetic almond;  inner sequence and 3' sequence
ggccgagctgacctgcacgcacgcatggccttgactagtacatgaccacttga

SEQ ID NO: 6241 - DNA, 53 bp, Artificial Sequence; identical to SEQ ID NO: 2107
  Description of Artificial Sequence: Synthetic almond;  inner sequence and 3' sequence

SEQ ID NO: 6242 - DNA, 53 bp, Artificial Sequence; identical to SEQ ID NO: 2269
  Description of Artificial Sequence: Synthetic almond;  inner sequence and 3' sequence

SEQ ID NO: 6243 - DNA, 54 bp, Artificial Sequence; identical to SEQ ID NO: 2221
  Description of Artificial Sequence: Synthetic almond;  inner sequence and 3' sequence

SEQ ID NO: 6244 - DNA, 53 bp, Artificial Sequence; identical to SEQ ID NO: 2134
  Description of Artificial Sequence: Synthetic almond;  inner sequence and 3' sequence

SEQ ID NO: 6245 - DNA, 54 bp, Artificial Sequence
  Description of Artificial Sequence: Synthetic almond;  inner sequence and 3' sequence
catggccgcagctgacctagcatgtgtgtcattgactagtacatgaccacttga

SEQ ID NO: 6246 - DNA, 53 bp, Artificial Sequence; identical to SEQ ID NO: 2506
  Description of Artificial Sequence: Synthetic almond;  inner sequence and 3' sequence

SEQ ID NO: 6247 - DNA, 53 bp, Artificial Sequence; identical to SEQ ID NO: 2243
  Description of Artificial Sequence: Synthetic almond;  inner sequence and 3' sequence

SEQ ID NO: 6248 - DNA, 53 bp, Artificial Sequence; identical to SEQ ID NO: 2341
  Description of Artificial Sequence: Synthetic almond;  inner sequence and 3' sequence

SEQ ID NO: 6249 - DNA, 53 bp, Artificial Sequence; identical to SEQ ID NO: 2110
  Description of Artificial Sequence: Synthetic almond;  inner sequence and 3' sequence

SEQ ID NO: 6250 - DNA, 53 bp, Artificial Sequence; identical to SEQ ID NO: 2314
  Description of Artificial Sequence: Synthetic almond;  inner sequence and 3' sequence

SEQ ID NO: 6251 - DNA, 53 bp, Artificial Sequence; identical to SEQ ID NO: 2572
  Description of Artificial Sequence: Synthetic almond;  inner sequence and 3' sequence

SEQ ID NO: 6252 - DNA, 53 bp, Artificial Sequence; identical to SEQ ID NO: 2170
  Description of Artificial Sequence: Synthetic almond;  inner sequence and 3' sequence

SEQ ID NO: 6253 - DNA, 53 bp, Artificial Sequence; identical to SEQ ID NO: 2165
  Description of Artificial Sequence: Synthetic almond;  inner sequence and 3' sequence

SEQ ID NO: 6254 - DNA, 53 bp, Artificial Sequence
  Description of Artificial Sequence: Synthetic almond;  inner sequence and 3' sequence
ggccagagcgaccctacacgtggcacgtacttgactagtacatgaccacttga

SEQ ID NO: 6255 - DNA, 53 bp, Artificial Sequence; identical to SEQ ID NO: 2204
  Description of Artificial Sequence: Synthetic almond;  inner sequence and 3' sequence

SEQ ID NO: 6256 - DNA, 53 bp, Artificial Sequence; identical to SEQ ID NO: 2836
  Description of Artificial Sequence: Synthetic almond;  inner sequence and 3' sequence

SEQ ID NO: 6257 - DNA, 53 bp, Artificial Sequence; identical to SEQ ID NO: 2831
  Description of Artificial Sequence: Synthetic almond;  inner sequence and 3' sequence

SEQ ID NO: 6258 - DNA, 53 bp, Artificial Sequence; identical to SEQ ID NO: 2532
  Description of Artificial Sequence: Synthetic almond;  inner sequence and 3' sequence

SEQ ID NO: 6259 - DNA, 53 bp, Artificial Sequence; identical to SEQ ID NO: 2336
  Description of Artificial Sequence: Synthetic almond;  inner sequence and 3' sequence

SEQ ID NO: 6260 - DNA, 53 bp, Artificial Sequence
  Description of Artificial Sequence: Synthetic almond;  inner sequence and 3' sequence
tggtccgacgctgaccagtgcacgtggccattgactagtacatgaccacttga

SEQ ID NO: 6261 - DNA, 53 bp, Artificial Sequence; identical to SEQ ID NO: 2072
  Description of Artificial Sequence: Synthetic almond;  inner sequence and 3' sequence

SEQ ID NO: 6262 - DNA, 53 bp, Artificial Sequence; identical to SEQ ID NO: 2391
  Description of Artificial Sequence: Synthetic almond;  inner sequence and 3' sequence

SEQ ID NO: 6263 - DNA, 53 bp, Artificial Sequence; identical to SEQ ID NO: 2956
  Description of Artificial Sequence: Synthetic almond;  inner sequence and 3' sequence

SEQ ID NO: 6264 - DNA, 53 bp, Artificial Sequence; identical to SEQ ID NO: 2540
  Description of Artificial Sequence: Synthetic almond;  inner sequence and 3' sequence

SEQ ID NO: 6265 - DNA, 53 bp, Artificial Sequence; identical to SEQ ID NO: 2352
  Description of Artificial Sequence: Synthetic almond;  inner sequence and 3' sequence

SEQ ID NO: 6266 - DNA, 53 bp, Artificial Sequence; identical to SEQ ID NO: 2146
  Description of Artificial Sequence: Synthetic almond;  inner sequence and 3' sequence

SEQ ID NO: 6267 - DNA, 51 bp, Artificial Sequence; identical to SEQ ID NO: 2241
  Description of Artificial Sequence: Synthetic almond;  inner sequence and 3' sequence

SEQ ID NO: 6268 - DNA, 53 bp, Artificial Sequence; identical to SEQ ID NO: 2190
  Description of Artificial Sequence: Synthetic almond;  inner sequence and 3' sequence

SEQ ID NO: 6269 - DNA, 53 bp, Artificial Sequence; identical to SEQ ID NO: 2485
  Description of Artificial Sequence: Synthetic almond;  inner sequence and 3' sequence

SEQ ID NO: 6270 - DNA, 53 bp, Artificial Sequence; identical to SEQ ID NO: 2371
  Description of Artificial Sequence: Synthetic almond;  inner sequence and 3' sequence

SEQ ID NO: 6271 - DNA, 53 bp, Artificial Sequence; identical to SEQ ID NO: 2454
  Description of Artificial Sequence: Synthetic almond;  inner sequence and 3' sequence

SEQ ID NO: 6272 - DNA, 53 bp, Artificial Sequence
  Description of Artificial Sequence: Synthetic almond;  inner sequence and 3' sequence
acgtccaggaccacatgtcgttgcgtcacgttgactagtacatgaccacttga

SEQ ID NO: 6273 - DNA, 53 bp, Artificial Sequence
  Description of Artificial Sequence: Synthetic almond;  inner sequence and 3' sequence
tcgacatgaccagatgtacctcgcttcacgttgactagtacatgaccacttga

SEQ ID NO: 6274 - DNA, 53 bp, Artificial Sequence; identical to SEQ ID NO: 2102
  Description of Artificial Sequence: Synthetic almond;  inner sequence and 3' sequence

SEQ ID NO: 6275 - DNA, 53 bp, Artificial Sequence; identical to SEQ ID NO: 2228
  Description of Artificial Sequence: Synthetic almond;  inner sequence and 3' sequence

SEQ ID NO: 6276 - DNA, 53 bp, Artificial Sequence; identical to SEQ ID NO: 2200
  Description of Artificial Sequence: Synthetic almond;  inner sequence and 3' sequence

SEQ ID NO: 6277 - DNA, 53 bp, Artificial Sequence; identical to SEQ ID NO: 2367
  Description of Artificial Sequence: Synthetic almond;  inner sequence and 3' sequence

SEQ ID NO: 6278 - DNA, 53 bp, Artificial Sequence; identical to SEQ ID NO: 2121
  Description of Artificial Sequence: Synthetic almond;  inner sequence and 3' sequence

SEQ ID NO: 6279 - DNA, 53 bp, Artificial Sequence; identical to SEQ ID NO: 2481
  Description of Artificial Sequence: Synthetic almond;  inner sequence and 3' sequence

SEQ ID NO: 6280 - DNA, 53 bp, Artificial Sequence
  Description of Artificial Sequence: Synthetic almond;  inner sequence and 3' sequence
ggccgcatcgaccgaagtggcatgcgcgcattgactagtacatgaccacttga

SEQ ID NO: 6281 - DNA, 53 bp, Artificial Sequence; identical to SEQ ID NO: 2718
  Description of Artificial Sequence: Synthetic almond;  inner sequence and 3' sequence

SEQ ID NO: 6282 - DNA, 53 bp, Artificial Sequence; identical to SEQ ID NO: 2171
  Description of Artificial Sequence: Synthetic almond;  inner sequence and 3' sequence

SEQ ID NO: 6283 - DNA, 53 bp, Artificial Sequence; identical to SEQ ID NO: 2385
  Description of Artificial Sequence: Synthetic almond;  inner sequence and 3' sequence

SEQ ID NO: 6284 - DNA, 53 bp, Artificial Sequence; identical to SEQ ID NO: 2109
  Description of Artificial Sequence: Synthetic almond;  inner sequence and 3' sequence

SEQ ID NO: 6285 - DNA, 53 bp, Artificial Sequence; identical to SEQ ID NO: 2089
  Description of Artificial Sequence: Synthetic almond;  inner sequence and 3' sequence

SEQ ID NO: 6286 - DNA, 53 bp, Artificial Sequence; identical to SEQ ID NO: 2832
  Description of Artificial Sequence: Synthetic almond;  inner sequence and 3' sequence

SEQ ID NO: 6287 - DNA, 53 bp, Artificial Sequence; identical to SEQ ID NO: 2163
  Description of Artificial Sequence: Synthetic almond;  inner sequence and 3' sequence

SEQ ID NO: 6288 - DNA, 53 bp, Artificial Sequence; identical to SEQ ID NO: 2634
  Description of Artificial Sequence: Synthetic almond;  inner sequence and 3' sequence

SEQ ID NO: 6289 - DNA, 53 bp, Artificial Sequence
  Description of Artificial Sequence: Synthetic almond;  inner sequence and 3' sequence
gtacgtagcgcaacgatgtggctatgcacattgactagtacatgaccacttga

SEQ ID NO: 6290 - DNA, 53 bp, Artificial Sequence; identical to SEQ ID NO: 2310
  Description of Artificial Sequence: Synthetic almond;  inner sequence and 3' sequence

SEQ ID NO: 6291 - DNA, 53 bp, Artificial Sequence; identical to SEQ ID NO: 2484
  Description of Artificial Sequence: Synthetic almond;  inner sequence and 3' sequence

SEQ ID NO: 6292 - DNA, 54 bp, Artificial Sequence; identical to SEQ ID NO: 2250
  Description of Artificial Sequence: Synthetic almond;  inner sequence and 3' sequence

SEQ ID NO: 6293 - DNA, 53 bp, Artificial Sequence; identical to SEQ ID NO: 2220
  Description of Artificial Sequence: Synthetic almond;  inner sequence and 3' sequence

SEQ ID NO: 6294 - DNA, 53 bp, Artificial Sequence; identical to SEQ ID NO: 2196
  Description of Artificial Sequence: Synthetic almond;  inner sequence and 3' sequence

SEQ ID NO: 6295 - DNA, 53 bp, Artificial Sequence; identical to SEQ ID NO: 2912
  Description of Artificial Sequence: Synthetic almond;  inner sequence and 3' sequence

SEQ ID NO: 6296 - DNA, 53 bp, Artificial Sequence; identical to SEQ ID NO: 2529
  Description of Artificial Sequence: Synthetic almond;  inner sequence and 3' sequence

SEQ ID NO: 6297 - DNA, 53 bp, Artificial Sequence
  Description of Artificial Sequence: Synthetic almond;  inner sequence and 3' sequence
ggccgacacttaccgatgcaacgctgcgcattgactagtacatgaccacttga

SEQ ID NO: 6298 - DNA, 53 bp, Artificial Sequence; identical to SEQ ID NO: 2343
  Description of Artificial Sequence: Synthetic almond;  inner sequence and 3' sequence

SEQ ID NO: 6299 - DNA, 53 bp, Artificial Sequence; identical to SEQ ID NO: 2305
  Description of Artificial Sequence: Synthetic almond;  inner sequence and 3' sequence

SEQ ID NO: 6300 - DNA, 53 bp, Artificial Sequence; identical to SEQ ID NO: 2476
  Description of Artificial Sequence: Synthetic almond;  inner sequence and 3' sequence

SEQ ID NO: 6301 - DNA, 53 bp, Artificial Sequence
  Description of Artificial Sequence: Synthetic almond;  inner sequence and 3' sequence
catggccgcaatcatgaccgcaagtgtgcgttgactagtacatgaccacttga

SEQ ID NO: 6302 - DNA, 53 bp, Artificial Sequence; identical to SEQ ID NO: 2613
  Description of Artificial Sequence: Synthetic almond;  inner sequence and 3' sequence

SEQ ID NO: 6303 - DNA, 53 bp, Artificial Sequence; identical to SEQ ID NO: 2090
  Description of Artificial Sequence: Synthetic almond;  inner sequence and 3' sequence

SEQ ID NO: 6304 - DNA, 53 bp, Artificial Sequence; identical to SEQ ID NO: 2186
  Description of Artificial Sequence: Synthetic almond;  inner sequence and 3' sequence

SEQ ID NO: 6305 - DNA, 53 bp, Artificial Sequence; identical to SEQ ID NO: 2218
  Description of Artificial Sequence: Synthetic almond;  inner sequence and 3' sequence

SEQ ID NO: 6306 - DNA, 53 bp, Artificial Sequence; identical to SEQ ID NO: 2725
  Description of Artificial Sequence: Synthetic almond;  inner sequence and 3' sequence

SEQ ID NO: 6307 - DNA, 53 bp, Artificial Sequence; identical to SEQ ID NO: 2323
  Description of Artificial Sequence: Synthetic almond;  inner sequence and 3' sequence

SEQ ID NO: 6308 - DNA, 53 bp, Artificial Sequence; identical to SEQ ID NO: 2520
  Description of Artificial Sequence: Synthetic almond;  inner sequence and 3' sequence

SEQ ID NO: 6309 - DNA, 53 bp, Artificial Sequence; identical to SEQ ID NO: 2158
  Description of Artificial Sequence: Synthetic almond;  inner sequence and 3' sequence

SEQ ID NO: 6310 - DNA, 53 bp, Artificial Sequence; identical to SEQ ID NO: 2553
  Description of Artificial Sequence: Synthetic almond;  inner sequence and 3' sequence

SEQ ID NO: 6311 - DNA, 53 bp, Artificial Sequence; identical to SEQ ID NO: 2246
  Description of Artificial Sequence: Synthetic almond;  inner sequence and 3' sequence

SEQ ID NO: 6312 - DNA, 53 bp, Artificial Sequence
  Description of Artificial Sequence: Synthetic almond;  inner sequence and 3' sequence
ggcgtgagtgcaccgtgatcaagcgtggcattgactagtacatgaccacttga

SEQ ID NO: 6313 - DNA, 53 bp, Artificial Sequence; identical to SEQ ID NO: 2450
  Description of Artificial Sequence: Synthetic almond;  inner sequence and 3' sequence

SEQ ID NO: 6314 - DNA, 53 bp, Artificial Sequence; identical to SEQ ID NO: 2401
  Description of Artificial Sequence: Synthetic almond;  inner sequence and 3' sequence

SEQ ID NO: 6315 - DNA, 53 bp, Artificial Sequence; identical to SEQ ID NO: 2511
  Description of Artificial Sequence: Synthetic almond;  inner sequence and 3' sequence

SEQ ID NO: 6316 - DNA, 53 bp, Artificial Sequence; identical to SEQ ID NO: 2916
  Description of Artificial Sequence: Synthetic almond;  inner sequence and 3' sequence

SEQ ID NO: 6317 - DNA, 53 bp, Artificial Sequence
  Description of Artificial Sequence: Synthetic almond;  inner sequence and 3' sequence
ccgcgcgaggaccgtgtcaagctggtcacgttgactagtacatgaccacttga

SEQ ID NO: 6318 - DNA, 53 bp, Artificial Sequence; identical to SEQ ID NO: 2173
  Description of Artificial Sequence: Synthetic almond;  inner sequence and 3' sequence

SEQ ID NO: 6319 - DNA, 53 bp, Artificial Sequence; identical to SEQ ID NO: 2523
  Description of Artificial Sequence: Synthetic almond;  inner sequence and 3' sequence

SEQ ID NO: 6320 - DNA, 53 bp, Artificial Sequence; identical to SEQ ID NO: 2262
  Description of Artificial Sequence: Synthetic almond;  inner sequence and 3' sequence

SEQ ID NO: 6321 - DNA, 53 bp, Artificial Sequence; identical to SEQ ID NO: 2192
  Description of Artificial Sequence: Synthetic almond;  inner sequence and 3' sequence

SEQ ID NO: 6322 - DNA, 53 bp, Artificial Sequence; identical to SEQ ID NO: 2517
  Description of Artificial Sequence: Synthetic almond;  inner sequence and 3' sequence

SEQ ID NO: 6323 - DNA, 53 bp, Artificial Sequence; identical to SEQ ID NO: 2254
  Description of Artificial Sequence: Synthetic almond;  inner sequence and 3' sequence

SEQ ID NO: 6324 - DNA, 53 bp, Artificial Sequence; identical to SEQ ID NO: 2478
  Description of Artificial Sequence: Synthetic almond;  inner sequence and 3' sequence

SEQ ID NO: 6325 - DNA, 53 bp, Artificial Sequence; identical to SEQ ID NO: 2167
  Description of Artificial Sequence: Synthetic almond;  inner sequence and 3' sequence

SEQ ID NO: 6326 - DNA, 53 bp, Artificial Sequence; identical to SEQ ID NO: 2719
  Description of Artificial Sequence: Synthetic almond;  inner sequence and 3' sequence

SEQ ID NO: 6327 - DNA, 53 bp, Artificial Sequence; identical to SEQ ID NO: 2442
  Description of Artificial Sequence: Synthetic almond;  inner sequence and 3' sequence

SEQ ID NO: 6328 - DNA, 53 bp, Artificial Sequence; identical to SEQ ID NO: 2214
  Description of Artificial Sequence: Synthetic almond;  inner sequence and 3' sequence

SEQ ID NO: 6329 - DNA, 53 bp, Artificial Sequence; identical to SEQ ID NO: 2741
  Description of Artificial Sequence: Synthetic almond;  inner sequence and 3' sequence

SEQ ID NO: 6330 - DNA, 53 bp, Artificial Sequence; identical to SEQ ID NO: 2850
  Description of Artificial Sequence: Synthetic almond;  inner sequence and 3' sequence

SEQ ID NO: 6331 - DNA, 53 bp, Artificial Sequence; identical to SEQ ID NO: 2350
  Description of Artificial Sequence: Synthetic almond;  inner sequence and 3' sequence

SEQ ID NO: 6332 - DNA, 53 bp, Artificial Sequence; identical to SEQ ID NO: 2625
  Description of Artificial Sequence: Synthetic almond;  inner sequence and 3' sequence

SEQ ID NO: 6333 - DNA, 53 bp, Artificial Sequence; identical to SEQ ID NO: 2771
  Description of Artificial Sequence: Synthetic almond;  inner sequence and 3' sequence

SEQ ID NO: 6334 - DNA, 53 bp, Artificial Sequence; identical to SEQ ID NO: 2137
  Description of Artificial Sequence: Synthetic almond;  inner sequence and 3' sequence

SEQ ID NO: 6335 - DNA, 53 bp, Artificial Sequence; identical to SEQ ID NO: 2114
  Description of Artificial Sequence: Synthetic almond;  inner sequence and 3' sequence

SEQ ID NO: 6336 - DNA, 53 bp, Artificial Sequence
  Description of Artificial Sequence: Synthetic almond;  inner sequence and 3' sequence
gcacgcctcgcaccctatcatgaggccatgttgactagtacatgaccacttga

SEQ ID NO: 6337 - DNA, 56 bp, Artificial Sequence; identical to SEQ ID NO: 2864
  Description of Artificial Sequence: Synthetic almond;  inner sequence and 3' sequence

SEQ ID NO: 6338 - DNA, 53 bp, Artificial Sequence; identical to SEQ ID NO: 2496
  Description of Artificial Sequence: Synthetic almond;  inner sequence and 3' sequence

SEQ ID NO: 6339 - DNA, 53 bp, Artificial Sequence
  Description of Artificial Sequence: Synthetic almond;  inner sequence and 3' sequence
cgtggcgcacgacacggaccttcgctgcgcttgactagtacatgaccacttga

SEQ ID NO: 6340 - DNA, 53 bp, Artificial Sequence; identical to SEQ ID NO: 2160
  Description of Artificial Sequence: Synthetic almond;  inner sequence and 3' sequence

SEQ ID NO: 6341 - DNA, 53 bp, Artificial Sequence; identical to SEQ ID NO: 2213
  Description of Artificial Sequence: Synthetic almond;  inner sequence and 3' sequence

SEQ ID NO: 6342 - DNA, 53 bp, Artificial Sequence; identical to SEQ ID NO: 2606
  Description of Artificial Sequence: Synthetic almond;  inner sequence and 3' sequence

SEQ ID NO: 6343 - DNA, 53 bp, Artificial Sequence; identical to SEQ ID NO: 2545
  Description of Artificial Sequence: Synthetic almond;  inner sequence and 3' sequence

SEQ ID NO: 6344 - DNA, 53 bp, Artificial Sequence; identical to SEQ ID NO: 2212
  Description of Artificial Sequence: Synthetic almond;  inner sequence and 3' sequence

SEQ ID NO: 6345 - DNA, 53 bp, Artificial Sequence; identical to SEQ ID NO: 2811
  Description of Artificial Sequence: Synthetic almond;  inner sequence and 3' sequence

SEQ ID NO: 6346 - DNA, 53 bp, Artificial Sequence; identical to SEQ ID NO: 2271
  Description of Artificial Sequence: Synthetic almond;  inner sequence and 3' sequence

SEQ ID NO: 6347 - DNA, 53 bp, Artificial Sequence; identical to SEQ ID NO: 2439
  Description of Artificial Sequence: Synthetic almond;  inner sequence and 3' sequence

SEQ ID NO: 6348 - DNA, 53 bp, Artificial Sequence
  Description of Artificial Sequence: Synthetic almond;  inner sequence and 3' sequence
acgtcgcgaacccaagacgcatgtgccagtttgactagtacatgaccacttga

SEQ ID NO: 6349 - DNA, 53 bp, Artificial Sequence; identical to SEQ ID NO: 2696
  Description of Artificial Sequence: Synthetic almond;  inner sequence and 3' sequence

SEQ ID NO: 6350 - DNA, 53 bp, Artificial Sequence; identical to SEQ ID NO: 2332
  Description of Artificial Sequence: Synthetic almond;  inner sequence and 3' sequence

SEQ ID NO: 6351 - DNA, 53 bp, Artificial Sequence
  Description of Artificial Sequence: Synthetic almond;  inner sequence and 3' sequence
gtgcacagcgaacctaagcgggcatgcacgttgactagtacatgaccacttga

SEQ ID NO: 6352 - DNA, 53 bp, Artificial Sequence; identical to SEQ ID NO: 2457
  Description of Artificial Sequence: Synthetic almond;  inner sequence and 3' sequence

SEQ ID NO: 6353 - DNA, 53 bp, Artificial Sequence; identical to SEQ ID NO: 2626
  Description of Artificial Sequence: Synthetic almond;  inner sequence and 3' sequence

SEQ ID NO: 6354 - DNA, 53 bp, Artificial Sequence; identical to SEQ ID NO: 2713
  Description of Artificial Sequence: Synthetic almond;  inner sequence and 3' sequence

SEQ ID NO: 6355 - DNA, 53 bp, Artificial Sequence; identical to SEQ ID NO: 2807
  Description of Artificial Sequence: Synthetic almond;  inner sequence and 3' sequence

SEQ ID NO: 6356 - DNA, 53 bp, Artificial Sequence
  Description of Artificial Sequence: Synthetic almond;  inner sequence and 3' sequence
acgtgcacacgccaaggtccgatcgacgcgttgactagtacatgaccacttga

SEQ ID NO: 6357 - DNA, 53 bp, Artificial Sequence
  Description of Artificial Sequence: Synthetic almond;  inner sequence and 3' sequence
gctaccagcagcatgccgccgagctgcacgttgactagtacatgaccacttga

SEQ ID NO: 6358 - DNA, 53 bp, Artificial Sequence; identical to SEQ ID NO: 2313
  Description of Artificial Sequence: Synthetic almond;  inner sequence and 3' sequence

SEQ ID NO: 6359 - DNA, 53 bp, Artificial Sequence; identical to SEQ ID NO: 2157
  Description of Artificial Sequence: Synthetic almond;  inner sequence and 3' sequence

SEQ ID NO: 6360 - DNA, 53 bp, Artificial Sequence; identical to SEQ ID NO: 2791
  Description of Artificial Sequence: Synthetic almond;  inner sequence and 3' sequence

SEQ ID NO: 6361 - DNA, 53 bp, Artificial Sequence; identical to SEQ ID NO: 2666
  Description of Artificial Sequence: Synthetic almond;  inner sequence and 3' sequence

SEQ ID NO: 6362 - DNA, 53 bp, Artificial Sequence; identical to SEQ ID NO: 2585
  Description of Artificial Sequence: Synthetic almond;  inner sequence and 3' sequence

SEQ ID NO: 6363 - DNA, 53 bp, Artificial Sequence; identical to SEQ ID NO: 2297
  Description of Artificial Sequence: Synthetic almond;  inner sequence and 3' sequence

SEQ ID NO: 6364 - DNA, 53 bp, Artificial Sequence
  Description of Artificial Sequence: Synthetic almond;  inner sequence and 3' sequence
ggcatgcacgcacctacacgtggggatggattgactagtacatgaccacttga

SEQ ID NO: 6365 - DNA, 53 bp, Artificial Sequence; identical to SEQ ID NO: 2379
  Description of Artificial Sequence: Synthetic almond;  inner sequence and 3' sequence

SEQ ID NO: 6366 - DNA, 53 bp, Artificial Sequence; identical to SEQ ID NO: 2930
  Description of Artificial Sequence: Synthetic almond;  inner sequence and 3' sequence

SEQ ID NO: 6367 - DNA, 53 bp, Artificial Sequence; identical to SEQ ID NO: 2316
  Description of Artificial Sequence: Synthetic almond;  inner sequence and 3' sequence

SEQ ID NO: 6368 - DNA, 53 bp, Artificial Sequence; identical to SEQ ID NO: 2414
  Description of Artificial Sequence: Synthetic almond;  inner sequence and 3' sequence

SEQ ID NO: 6369 - DNA, 53 bp, Artificial Sequence; identical to SEQ ID NO: 2928
  Description of Artificial Sequence: Synthetic almond;  inner sequence and 3' sequence

SEQ ID NO: 6370 - DNA, 53 bp, Artificial Sequence; identical to SEQ ID NO: 2671
  Description of Artificial Sequence: Synthetic almond;  inner sequence and 3' sequence

SEQ ID NO: 6371 - DNA, 53 bp, Artificial Sequence; identical to SEQ ID NO: 2273
  Description of Artificial Sequence: Synthetic almond;  inner sequence and 3' sequence

SEQ ID NO: 6372 - DNA, 53 bp, Artificial Sequence; identical to SEQ ID NO: 2611
  Description of Artificial Sequence: Synthetic almond;  inner sequence and 3' sequence

SEQ ID NO: 6373 - DNA, 53 bp, Artificial Sequence
  Description of Artificial Sequence: Synthetic almond;  inner sequence and 3' sequence
cgcgaagtggcacagggacgcgtctgcccattgactagtacatgaccacttga

SEQ ID NO: 6374 - DNA, 53 bp, Artificial Sequence; identical to SEQ ID NO: 2390
  Description of Artificial Sequence: Synthetic almond;  inner sequence and 3' sequence

SEQ ID NO: 6375 - DNA, 53 bp, Artificial Sequence; identical to SEQ ID NO: 2380
  Description of Artificial Sequence: Synthetic almond;  inner sequence and 3' sequence

SEQ ID NO: 6376 - DNA, 53 bp, Artificial Sequence
  Description of Artificial Sequence: Synthetic almond;  inner sequence and 3' sequence
gcaacgcagcaccgccatctgccgtgggcattgactagtacatgaccacttga

SEQ ID NO: 6377 - DNA, 53 bp, Artificial Sequence
  Description of Artificial Sequence: Synthetic almond;  inner sequence and 3' sequence
ggcatgcacgcacctacacgcgggtatggattgactagtacatgaccacttga

SEQ ID NO: 6378 - DNA, 53 bp, Artificial Sequence; identical to SEQ ID NO: 2276
  Description of Artificial Sequence: Synthetic almond;  inner sequence and 3' sequence

SEQ ID NO: 6379 - DNA, 53 bp, Artificial Sequence; identical to SEQ ID NO: 2632
  Description of Artificial Sequence: Synthetic almond;  inner sequence and 3' sequence

SEQ ID NO: 6380 - DNA, 53 bp, Artificial Sequence
  Description of Artificial Sequence: Synthetic almond;  inner sequence and 3' sequence
ggacctgcgaagagcgtacacgtggccatgttgactagtacatgaccacttga

SEQ ID NO: 6381 - DNA, 53 bp, Artificial Sequence
  Description of Artificial Sequence: Synthetic almond;  inner sequence and 3' sequence
cgtaccgtcaagcgggaaggcactttggtgttgactagtacatgaccacttga

SEQ ID NO: 6382 - DNA, 53 bp, Artificial Sequence; identical to SEQ ID NO: 2127
  Description of Artificial Sequence: Synthetic almond;  inner sequence and 3' sequence

SEQ ID NO: 6383 - DNA, 53 bp, Artificial Sequence; identical to SEQ ID NO: 2915
  Description of Artificial Sequence: Synthetic almond;  inner sequence and 3' sequence

SEQ ID NO: 6384 - DNA, 53 bp, Artificial Sequence
  Description of Artificial Sequence: Synthetic almond;  inner sequence and 3' sequence
gcgacagcgacatacgatctgctctgcgccttgactagtacatgaccacttga

SEQ ID NO: 6385 - DNA, 53 bp, Artificial Sequence; identical to SEQ ID NO: 2177
  Description of Artificial Sequence: Synthetic almond;  inner sequence and 3' sequence

SEQ ID NO: 6386 - DNA, 53 bp, Artificial Sequence; identical to SEQ ID NO: 2426
  Description of Artificial Sequence: Synthetic almond;  inner sequence and 3' sequence

SEQ ID NO: 6387 - DNA, 53 bp, Artificial Sequence; identical to SEQ ID NO: 2274
  Description of Artificial Sequence: Synthetic almond;  inner sequence and 3' sequence

SEQ ID NO: 6388 - DNA, 53 bp, Artificial Sequence; identical to SEQ ID NO: 2950
  Description of Artificial Sequence: Synthetic almond;  inner sequence and 3' sequence

SEQ ID NO: 6389 - DNA, 53 bp, Artificial Sequence; identical to SEQ ID NO: 2932
  Description of Artificial Sequence: Synthetic almond;  inner sequence and 3' sequence

SEQ ID NO: 6390 - DNA, 53 bp, Artificial Sequence; identical to SEQ ID NO: 2869
  Description of Artificial Sequence: Synthetic almond;  inner sequence and 3' sequence

SEQ ID NO: 6391 - DNA, 53 bp, Artificial Sequence; identical to SEQ ID NO: 2399
  Description of Artificial Sequence: Synthetic almond;  inner sequence and 3' sequence

SEQ ID NO: 6392 - DNA, 53 bp, Artificial Sequence; identical to SEQ ID NO: 2238
  Description of Artificial Sequence: Synthetic almond;  inner sequence and 3' sequence

SEQ ID NO: 6393 - DNA, 53 bp, Artificial Sequence
  Description of Artificial Sequence: Synthetic almond;  inner sequence and 3' sequence
tcgtgtcgtgcgatgaaccggtcgtggccattgactagtacatgaccacttga

SEQ ID NO: 6394 - DNA, 53 bp, Artificial Sequence
  Description of Artificial Sequence: Synthetic almond;  inner sequence and 3' sequence
ggccgaacggacctcaatgtgtggcatgcattgactagtacatgaccacttga

SEQ ID NO: 6395 - DNA, 53 bp, Artificial Sequence; identical to SEQ ID NO: 2448
  Description of Artificial Sequence: Synthetic almond;  inner sequence and 3' sequence

SEQ ID NO: 6396 - DNA, 53 bp, Artificial Sequence; identical to SEQ ID NO: 2369
  Description of Artificial Sequence: Synthetic almond;  inner sequence and 3' sequence

SEQ ID NO: 6397 - DNA, 53 bp, Artificial Sequence; identical to SEQ ID NO: 2746
  Description of Artificial Sequence: Synthetic almond;  inner sequence and 3' sequence

SEQ ID NO: 6398 - DNA, 53 bp, Artificial Sequence; identical to SEQ ID NO: 2909
  Description of Artificial Sequence: Synthetic almond;  inner sequence and 3' sequence

SEQ ID NO: 6399 - DNA, 53 bp, Artificial Sequence; identical to SEQ ID NO: 2333
  Description of Artificial Sequence: Synthetic almond;  inner sequence and 3' sequence

SEQ ID NO: 6400 - DNA, 53 bp, Artificial Sequence; identical to SEQ ID NO: 2176
  Description of Artificial Sequence: Synthetic almond;  inner sequence and 3' sequence

SEQ ID NO: 6401 - DNA, 53 bp, Artificial Sequence
  Description of Artificial Sequence: Synthetic almond;  inner sequence and 3' sequence
cgtccgacacgtaccgaccatcggtggccattgactagtacatgaccacttga

SEQ ID NO: 6402 - DNA, 53 bp, Artificial Sequence; identical to SEQ ID NO: 2419
  Description of Artificial Sequence: Synthetic almond;  inner sequence and 3' sequence

SEQ ID NO: 6403 - DNA, 53 bp, Artificial Sequence; identical to SEQ ID NO: 2383
  Description of Artificial Sequence: Synthetic almond;  inner sequence and 3' sequence

SEQ ID NO: 6404 - DNA, 53 bp, Artificial Sequence; identical to SEQ ID NO: 2279
  Description of Artificial Sequence: Synthetic almond;  inner sequence and 3' sequence

SEQ ID NO: 6405 - DNA, 53 bp, Artificial Sequence
  Description of Artificial Sequence: Synthetic almond;  inner sequence and 3' sequence
cgcaccgacaagggagcacgtacgcggtcattgactagtacatgaccacttga

SEQ ID NO: 6406 - DNA, 53 bp, Artificial Sequence
  Description of Artificial Sequence: Synthetic almond;  inner sequence and 3' sequence
ggcatgctcgagcccgattgcgtggccatgttgactagtacatgaccacttga

SEQ ID NO: 6407 - DNA, 53 bp, Artificial Sequence
  Description of Artificial Sequence: Synthetic almond;  inner sequence and 3' sequence
tggcacgacgattcccgcaagtgcgccatgttgactagtacatgaccacttga

SEQ ID NO: 6408 - DNA, 53 bp, Artificial Sequence; identical to SEQ ID NO: 2156
  Description of Artificial Sequence: Synthetic almond;  inner sequence and 3' sequence

SEQ ID NO: 6409 - DNA, 52 bp, Artificial Sequence; identical to SEQ ID NO: 2259
  Description of Artificial Sequence: Synthetic almond;  inner sequence and 3' sequence

SEQ ID NO: 6410 - DNA, 53 bp, Artificial Sequence; identical to SEQ ID NO: 2757
  Description of Artificial Sequence: Synthetic almond;  inner sequence and 3' sequence

SEQ ID NO: 6411 - DNA, 53 bp, Artificial Sequence; identical to SEQ ID NO: 2417
  Description of Artificial Sequence: Synthetic almond;  inner sequence and 3' sequence

SEQ ID NO: 6412 - DNA, 53 bp, Artificial Sequence; identical to SEQ ID NO: 2248
  Description of Artificial Sequence: Synthetic almond;  inner sequence and 3' sequence

SEQ ID NO: 6413 - DNA, 53 bp, Artificial Sequence; identical to SEQ ID NO: 2180
  Description of Artificial Sequence: Synthetic almond;  inner sequence and 3' sequence

SEQ ID NO: 6414 - DNA, 53 bp, Artificial Sequence; identical to SEQ ID NO: 2668
  Description of Artificial Sequence: Synthetic almond;  inner sequence and 3' sequence

SEQ ID NO: 6415 - DNA, 53 bp, Artificial Sequence; identical to SEQ ID NO: 2563
  Description of Artificial Sequence: Synthetic almond;  inner sequence and 3' sequence

SEQ ID NO: 6416 - DNA, 53 bp, Artificial Sequence; identical to SEQ ID NO: 2433
  Description of Artificial Sequence: Synthetic almond;  inner sequence and 3' sequence

SEQ ID NO: 6417 - DNA, 53 bp, Artificial Sequence; identical to SEQ ID NO: 2344
  Description of Artificial Sequence: Synthetic almond;  inner sequence and 3' sequence

SEQ ID NO: 6418 - DNA, 53 bp, Artificial Sequence; identical to SEQ ID NO: 2647
  Description of Artificial Sequence: Synthetic almond;  inner sequence and 3' sequence

SEQ ID NO: 6419 - DNA, 53 bp, Artificial Sequence
  Description of Artificial Sequence: Synthetic almond;  inner sequence and 3' sequence
ccgtaccgacatcaagcggtggtgtgcgtgttgactagtacatgaccacttga

SEQ ID NO: 6420 - DNA, 53 bp, Artificial Sequence
  Description of Artificial Sequence: Synthetic almond;  inner sequence and 3' sequence
ccgtagcgacatcaagcggtggtgggcgtgttgactagtacatgaccacttga

SEQ ID NO: 6421 - DNA, 53 bp, Artificial Sequence; identical to SEQ ID NO: 2358
  Description of Artificial Sequence: Synthetic almond;  inner sequence and 3' sequence

SEQ ID NO: 6422 - DNA, 53 bp, Artificial Sequence; identical to SEQ ID NO: 2524
  Description of Artificial Sequence: Synthetic almond;  inner sequence and 3' sequence

SEQ ID NO: 6423 - DNA, 53 bp, Artificial Sequence; identical to SEQ ID NO: 2375
  Description of Artificial Sequence: Synthetic almond;  inner sequence and 3' sequence

SEQ ID NO: 6424 - DNA, 53 bp, Artificial Sequence; identical to SEQ ID NO: 2181
  Description of Artificial Sequence: Synthetic almond;  inner sequence and 3' sequence

SEQ ID NO: 6425 - DNA, 53 bp, Artificial Sequence
  Description of Artificial Sequence: Synthetic almond;  inner sequence and 3' sequence
gcactgaacggaatgtgctggacgtggccattgactagtacatgaccacttga

SEQ ID NO: 6426 - DNA, 53 bp, Artificial Sequence; identical to SEQ ID NO: 2638
  Description of Artificial Sequence: Synthetic almond;  inner sequence and 3' sequence

SEQ ID NO: 6427 - DNA, 53 bp, Artificial Sequence; identical to SEQ ID NO: 2467
  Description of Artificial Sequence: Synthetic almond;  inner sequence and 3' sequence

SEQ ID NO: 6428 - DNA, 53 bp, Artificial Sequence
  Description of Artificial Sequence: Synthetic almond;  inner sequence and 3' sequence
tcatgtggccgtgctgacccaacgtgagcattgactagtacatgaccacttga

SEQ ID NO: 6429 - DNA, 53 bp, Artificial Sequence
  Description of Artificial Sequence: Synthetic almond;  inner sequence and 3' sequence
ggcatgcgctgaacgaggcatgatgcgtcattgactagtacatgaccacttga

SEQ ID NO: 6430 - DNA, 53 bp, Artificial Sequence; identical to SEQ ID NO: 2397
  Description of Artificial Sequence: Synthetic almond;  inner sequence and 3' sequence

SEQ ID NO: 6431 - DNA, 53 bp, Artificial Sequence; identical to SEQ ID NO: 2128
  Description of Artificial Sequence: Synthetic almond;  inner sequence and 3' sequence

SEQ ID NO: 6432 - DNA, 53 bp, Artificial Sequence; identical to SEQ ID NO: 2284
  Description of Artificial Sequence: Synthetic almond;  inner sequence and 3' sequence

SEQ ID NO: 6433 - DNA, 53 bp, Artificial Sequence; identical to SEQ ID NO: 2592
  Description of Artificial Sequence: Synthetic almond;  inner sequence and 3' sequence

SEQ ID NO: 6434 - DNA, 54 bp, Artificial Sequence
  Description of Artificial Sequence: Synthetic almond;  inner sequence and 3' sequence
ccgtagcgacaagggagcacgtacgcggtcattgactagtacatgaccacttga

SEQ ID NO: 6435 - DNA, 53 bp, Artificial Sequence; identical to SEQ ID NO: 2513
  Description of Artificial Sequence: Synthetic almond;  inner sequence and 3' sequence

SEQ ID NO: 6436 - DNA, 53 bp, Artificial Sequence
  Description of Artificial Sequence: Synthetic almond;  inner sequence and 3' sequence
ggccaaacggaccggttgcggtgttgcacattgactagtacatgaccacttga

SEQ ID NO: 6437 - DNA, 53 bp, Artificial Sequence; identical to SEQ ID NO: 2591
  Description of Artificial Sequence: Synthetic almond;  inner sequence and 3' sequence

SEQ ID NO: 6438 - DNA, 53 bp, Artificial Sequence; identical to SEQ ID NO: 2272
  Description of Artificial Sequence: Synthetic almond;  inner sequence and 3' sequence

SEQ ID NO: 6439 - DNA, 53 bp, Artificial Sequence; identical to SEQ ID NO: 2630
  Description of Artificial Sequence: Synthetic almond;  inner sequence and 3' sequence

SEQ ID NO: 6440 - DNA, 53 bp, Artificial Sequence; identical to SEQ ID NO: 2219
  Description of Artificial Sequence: Synthetic almond;  inner sequence and 3' sequence

SEQ ID NO: 6441 - DNA, 53 bp, Artificial Sequence; identical to SEQ ID NO: 2504
  Description of Artificial Sequence: Synthetic almond;  inner sequence and 3' sequence

SEQ ID NO: 6442 - DNA, 53 bp, Artificial Sequence; identical to SEQ ID NO: 2300
  Description of Artificial Sequence: Synthetic almond;  inner sequence and 3' sequence

SEQ ID NO: 6443 - DNA, 53 bp, Artificial Sequence; identical to SEQ ID NO: 2860
  Description of Artificial Sequence: Synthetic almond;  inner sequence and 3' sequence

SEQ ID NO: 6444 - DNA, 53 bp, Artificial Sequence; identical to SEQ ID NO: 2356
  Description of Artificial Sequence: Synthetic almond;  inner sequence and 3' sequence

SEQ ID NO: 6445 - DNA, 53 bp, Artificial Sequence
  Description of Artificial Sequence: Synthetic almond;  inner sequence and 3' sequence
gtcatgcacgcaactttcacgtggccatggttgactagtacatgaccacttga

SEQ ID NO: 6446 - DNA, 53 bp, Artificial Sequence; identical to SEQ ID NO: 2256
  Description of Artificial Sequence: Synthetic almond;  inner sequence and 3' sequence

SEQ ID NO: 6447 - DNA, 53 bp, Artificial Sequence; identical to SEQ ID NO: 2206
  Description of Artificial Sequence: Synthetic almond;  inner sequence and 3' sequence

SEQ ID NO: 6448 - DNA, 53 bp, Artificial Sequence; identical to SEQ ID NO: 2403
  Description of Artificial Sequence: Synthetic almond;  inner sequence and 3' sequence

SEQ ID NO: 6449 - DNA, 53 bp, Artificial Sequence
  Description of Artificial Sequence: Synthetic almond;  inner sequence and 3' sequence
tcgacagaccgtgcaccgtggccatgcactttgactagtacatgaccacttga

SEQ ID NO: 6450 - DNA, 53 bp, Artificial Sequence; identical to SEQ ID NO: 2815
  Description of Artificial Sequence: Synthetic almond;  inner sequence and 3' sequence

SEQ ID NO: 6451 - DNA, 53 bp, Artificial Sequence
  Description of Artificial Sequence: Synthetic almond;  inner sequence and 3' sequence
ggcatgcgaaggacctatcatgtgggcagattgactagtacatgaccacttga

SEQ ID NO: 6452 - DNA, 53 bp, Artificial Sequence; identical to SEQ ID NO: 2236
  Description of Artificial Sequence: Synthetic almond;  inner sequence and 3' sequence

SEQ ID NO: 6453 - DNA, 53 bp, Artificial Sequence; identical to SEQ ID NO: 2422
  Description of Artificial Sequence: Synthetic almond;  inner sequence and 3' sequence

SEQ ID NO: 6454 - DNA, 53 bp, Artificial Sequence; identical to SEQ ID NO: 2925
  Description of Artificial Sequence: Synthetic almond;  inner sequence and 3' sequence

SEQ ID NO: 6455 - DNA, 53 bp, Artificial Sequence; identical to SEQ ID NO: 2409
  Description of Artificial Sequence: Synthetic almond;  inner sequence and 3' sequence

SEQ ID NO: 6456 - DNA, 53 bp, Artificial Sequence; identical to SEQ ID NO: 2862
  Description of Artificial Sequence: Synthetic almond;  inner sequence and 3' sequence

SEQ ID NO: 6457 - DNA, 53 bp, Artificial Sequence; identical to SEQ ID NO: 2994
  Description of Artificial Sequence: Synthetic almond;  inner sequence and 3' sequence

SEQ ID NO: 6458 - DNA, 53 bp, Artificial Sequence; identical to SEQ ID NO: 2217
  Description of Artificial Sequence: Synthetic almond;  inner sequence and 3' sequence

SEQ ID NO: 6459 - DNA, 53 bp, Artificial Sequence
  Description of Artificial Sequence: Synthetic almond;  inner sequence and 3' sequence
ggccgagcgtaccgtgcgagtgggagcgtattgactagtacatgaccacttga

SEQ ID NO: 6460 - DNA, 53 bp, Artificial Sequence; identical to SEQ ID NO: 2244
  Description of Artificial Sequence: Synthetic almond;  inner sequence and 3' sequence

SEQ ID NO: 6461 - DNA, 53 bp, Artificial Sequence; identical to SEQ ID NO: 2357
  Description of Artificial Sequence: Synthetic almond;  inner sequence and 3' sequence

SEQ ID NO: 6462 - DNA, 53 bp, Artificial Sequence; identical to SEQ ID NO: 2394
  Description of Artificial Sequence: Synthetic almond;  inner sequence and 3' sequence

SEQ ID NO: 6463 - DNA, 53 bp, Artificial Sequence; identical to SEQ ID NO: 2777
  Description of Artificial Sequence: Synthetic almond;  inner sequence and 3' sequence

SEQ ID NO: 6464 - DNA, 53 bp, Artificial Sequence; identical to SEQ ID NO: 2492
  Description of Artificial Sequence: Synthetic almond;  inner sequence and 3' sequence

SEQ ID NO: 6465 - DNA, 53 bp, Artificial Sequence
  Description of Artificial Sequence: Synthetic almond;  inner sequence and 3' sequence
cacatggtggcatactgactgcactgcactttgactagtacatgaccacttga

SEQ ID NO: 6466 - DNA, 53 bp, Artificial Sequence; identical to SEQ ID NO: 2561
  Description of Artificial Sequence: Synthetic almond;  inner sequence and 3' sequence

SEQ ID NO: 6467 - DNA, 53 bp, Artificial Sequence; identical to SEQ ID NO: 2637
  Description of Artificial Sequence: Synthetic almond;  inner sequence and 3' sequence

SEQ ID NO: 6468 - DNA, 53 bp, Artificial Sequence; identical to SEQ ID NO: 2530
  Description of Artificial Sequence: Synthetic almond;  inner sequence and 3' sequence

SEQ ID NO: 6469 - DNA, 53 bp, Artificial Sequence
  Description of Artificial Sequence: Synthetic almond;  inner sequence and 3' sequence
cgtcacgcatcactggcctgccttgccgtgttgactagtacatgaccacttga

SEQ ID NO: 6470 - DNA, 53 bp, Artificial Sequence
  Description of Artificial Sequence: Synthetic almond;  inner sequence and 3' sequence
ggccgaagcgatacggcaagtcggcatgcattgactagtacatgaccacttga

SEQ ID NO: 6471 - DNA, 53 bp, Artificial Sequence; identical to SEQ ID NO: 2620
  Description of Artificial Sequence: Synthetic almond;  inner sequence and 3' sequence

SEQ ID NO: 6472 - DNA, 53 bp, Artificial Sequence
  Description of Artificial Sequence: Synthetic almond;  inner sequence and 3' sequence
cgatcgcaccgccgtgatcatgcacgcgcattgactagtacatgaccacttga

SEQ ID NO: 6473 - DNA, 53 bp, Artificial Sequence; identical to SEQ ID NO: 2875
  Description of Artificial Sequence: Synthetic almond;  inner sequence and 3' sequence

SEQ ID NO: 6474 - DNA, 53 bp, Artificial Sequence; identical to SEQ ID NO: 2292
  Description of Artificial Sequence: Synthetic almond;  inner sequence and 3' sequence

SEQ ID NO: 6475 - DNA, 53 bp, Artificial Sequence; identical to SEQ ID NO: 2294
  Description of Artificial Sequence: Synthetic almond;  inner sequence and 3' sequence

SEQ ID NO: 6476 - DNA, 53 bp, Artificial Sequence; identical to SEQ ID NO: 2728
  Description of Artificial Sequence: Synthetic almond;  inner sequence and 3' sequence

SEQ ID NO: 6477 - DNA, 53 bp, Artificial Sequence; identical to SEQ ID NO: 2631
  Description of Artificial Sequence: Synthetic almond;  inner sequence and 3' sequence

SEQ ID NO: 6478 - DNA, 53 bp, Artificial Sequence; identical to SEQ ID NO: 2278
  Description of Artificial Sequence: Synthetic almond;  inner sequence and 3' sequence

SEQ ID NO: 6479 - DNA, 53 bp, Artificial Sequence; identical to SEQ ID NO: 2407
  Description of Artificial Sequence: Synthetic almond;  inner sequence and 3' sequence

SEQ ID NO: 6480 - DNA, 53 bp, Artificial Sequence; identical to SEQ ID NO: 2556
  Description of Artificial Sequence: Synthetic almond;  inner sequence and 3' sequence

SEQ ID NO: 6481 - DNA, 53 bp, Artificial Sequence; identical to SEQ ID NO: 2706
  Description of Artificial Sequence: Synthetic almond;  inner sequence and 3' sequence

SEQ ID NO: 6482 - DNA, 53 bp, Artificial Sequence; identical to SEQ ID NO: 2326
  Description of Artificial Sequence: Synthetic almond;  inner sequence and 3' sequence

SEQ ID NO: 6483 - DNA, 53 bp, Artificial Sequence; identical to SEQ ID NO: 2393
  Description of Artificial Sequence: Synthetic almond;  inner sequence and 3' sequence

SEQ ID NO: 6484 - DNA, 53 bp, Artificial Sequence; identical to SEQ ID NO: 2764
  Description of Artificial Sequence: Synthetic almond;  inner sequence and 3' sequence

SEQ ID NO: 6485 - DNA, 53 bp, Artificial Sequence
  Description of Artificial Sequence: Synthetic almond;  inner sequence and 3' sequence
tgaacgcagtgacgaaacgtatggcgcacattgactagtacatgaccacttga

SEQ ID NO: 6486 - DNA, 53 bp, Artificial Sequence; identical to SEQ ID NO: 2891
  Description of Artificial Sequence: Synthetic almond;  inner sequence and 3' sequence

SEQ ID NO: 6487 - DNA, 53 bp, Artificial Sequence; identical to SEQ ID NO: 2617
  Description of Artificial Sequence: Synthetic almond;  inner sequence and 3' sequence

SEQ ID NO: 6488 - DNA, 53 bp, Artificial Sequence; identical to SEQ ID NO: 2124
  Description of Artificial Sequence: Synthetic almond;  inner sequence and 3' sequence

SEQ ID NO: 6489 - DNA, 53 bp, Artificial Sequence
  Description of Artificial Sequence: Synthetic almond;  inner sequence and 3' sequence
ggcatgcgatgaacgaggcatgatccgtcattgactagtacatgaccacttga

SEQ ID NO: 6490 - DNA, 53 bp, Artificial Sequence; identical to SEQ ID NO: 2528
  Description of Artificial Sequence: Synthetic almond;  inner sequence and 3' sequence

SEQ ID NO: 6491 - DNA, 53 bp, Artificial Sequence
  Description of Artificial Sequence: Synthetic almond;  inner sequence and 3' sequence
ggcatgagcgaacccgtcgagtgcgtcgtattgactagtacatgaccacttga

SEQ ID NO: 6492 - DNA, 53 bp, Artificial Sequence
  Description of Artificial Sequence: Synthetic almond;  inner sequence and 3' sequence
gtacgccactgaccgaccttgcgtgaggcattgactagtacatgaccacttga

SEQ ID NO: 6493 - DNA, 53 bp, Artificial Sequence; identical to SEQ ID NO: 2669
  Description of Artificial Sequence: Synthetic almond;  inner sequence and 3' sequence

SEQ ID NO: 6494 - DNA, 53 bp, Artificial Sequence
  Description of Artificial Sequence: Synthetic almond;  inner sequence and 3' sequence
gacgacgatgagcgtgggattggctggtgtttgactagtacatgaccacttga

SEQ ID NO: 6495 - DNA, 53 bp, Artificial Sequence; identical to SEQ ID NO: 2331
  Description of Artificial Sequence: Synthetic almond;  inner sequence and 3' sequence

SEQ ID NO: 6496 - DNA, 53 bp, Artificial Sequence; identical to SEQ ID NO: 2628
  Description of Artificial Sequence: Synthetic almond;  inner sequence and 3' sequence

SEQ ID NO: 6497 - DNA, 53 bp, Artificial Sequence; identical to SEQ ID NO: 2309
  Description of Artificial Sequence: Synthetic almond;  inner sequence and 3' sequence

SEQ ID NO: 6498 - DNA, 53 bp, Artificial Sequence
  Description of Artificial Sequence: Synthetic almond;  inner sequence and 3' sequence
ggcacaaacggaccgacaagcgcgcatggattgactagtacatgaccacttga

SEQ ID NO: 6499 - DNA, 53 bp, Artificial Sequence
  Description of Artificial Sequence: Synthetic almond;  inner sequence and 3' sequence
ccgatcgcacgcacggggacatggtcgagtttgactagtacatgaccacttga

SEQ ID NO: 6500 - DNA, 53 bp, Artificial Sequence; identical to SEQ ID NO: 2166
  Description of Artificial Sequence: Synthetic almond;  inner sequence and 3' sequence

SEQ ID NO: 6501 - DNA, 53 bp, Artificial Sequence; identical to SEQ ID NO: 2597
  Description of Artificial Sequence: Synthetic almond;  inner sequence and 3' sequence

SEQ ID NO: 6502 - DNA, 53 bp, Artificial Sequence
  Description of Artificial Sequence: Synthetic almond;  inner sequence and 3' sequence
ggtgacgcaacgagtgtactgatcgccacgttgactagtacatgaccacttga

SEQ ID NO: 6503 - DNA, 53 bp, Artificial Sequence
  Description of Artificial Sequence: Synthetic almond;  inner sequence and 3' sequence
ggcacaaacgtaccgacaagtgcgcatggattgactagtacatgaccacttga

SEQ ID NO: 6504 - DNA, 53 bp, Artificial Sequence
  Description of Artificial Sequence: Synthetic almond;  inner sequence and 3' sequence
cgtaccgacaagggagcacgtacgctgtcattgactagtacatgaccacttga

SEQ ID NO: 6505 - DNA, 53 bp, Artificial Sequence; identical to SEQ ID NO: 2249
  Description of Artificial Sequence: Synthetic almond;  inner sequence and 3' sequence

SEQ ID NO: 6506 - DNA, 53 bp, Artificial Sequence; identical to SEQ ID NO: 2365
  Description of Artificial Sequence: Synthetic almond;  inner sequence and 3' sequence

SEQ ID NO: 6507 - DNA, 53 bp, Artificial Sequence; identical to SEQ ID NO: 2911
  Description of Artificial Sequence: Synthetic almond;  inner sequence and 3' sequence

SEQ ID NO: 6508 - DNA, 53 bp, Artificial Sequence; identical to SEQ ID NO: 2398
  Description of Artificial Sequence: Synthetic almond;  inner sequence and 3' sequence

SEQ ID NO: 6509 - DNA, 53 bp, Artificial Sequence
  Description of Artificial Sequence: Synthetic almond;  inner sequence and 3' sequence
cgcatcgagcataccggtcctcgcttcacgttgactagtacatgaccacttga

SEQ ID NO: 6510 - DNA, 53 bp, Artificial Sequence; identical to SEQ ID NO: 2281
  Description of Artificial Sequence: Synthetic almond;  inner sequence and 3' sequence

SEQ ID NO: 6511 - DNA, 53 bp, Artificial Sequence; identical to SEQ ID NO: 2487
  Description of Artificial Sequence: Synthetic almond;  inner sequence and 3' sequence

SEQ ID NO: 6512 - DNA, 53 bp, Artificial Sequence; identical to SEQ ID NO: 2437
  Description of Artificial Sequence: Synthetic almond;  inner sequence and 3' sequence

SEQ ID NO: 6513 - DNA, 53 bp, Artificial Sequence
  Description of Artificial Sequence: Synthetic almond;  inner sequence and 3' sequence
gtacgcaacgaacctaagagtggccagggattgactagtacatgaccacttga

SEQ ID NO: 6514 - DNA, 53 bp, Artificial Sequence; identical to SEQ ID NO: 2996
  Description of Artificial Sequence: Synthetic almond;  inner sequence and 3' sequence

SEQ ID NO: 6515 - DNA, 53 bp, Artificial Sequence; identical to SEQ ID NO: 2224
  Description of Artificial Sequence: Synthetic almond;  inner sequence and 3' sequence

SEQ ID NO: 6516 - DNA, 53 bp, Artificial Sequence; identical to SEQ ID NO: 2727
  Description of Artificial Sequence: Synthetic almond;  inner sequence and 3' sequence

SEQ ID NO: 6517 - DNA, 53 bp, Artificial Sequence
  Description of Artificial Sequence: Synthetic almond;  inner sequence and 3' sequence
cgcatgcgatgaacgaggcatgatgcgtcattgactagtacatgaccacttga

SEQ ID NO: 6518 - DNA, 53 bp, Artificial Sequence; identical to SEQ ID NO: 2942
  Description of Artificial Sequence: Synthetic almond;  inner sequence and 3' sequence

SEQ ID NO: 6519 - DNA, 53 bp, Artificial Sequence
  Description of Artificial Sequence: Synthetic almond;  inner sequence and 3' sequence
cgaccgtggagaagcgagcatggatgcagcttgactagtacatgaccacttga

SEQ ID NO: 6520 - DNA, 53 bp, Artificial Sequence
  Description of Artificial Sequence: Synthetic almond;  inner sequence and 3' sequence
tcgaacgaaccgcatgcatggtcaggcatattgactagtacatgaccacttga

SEQ ID NO: 6521 - DNA, 53 bp, Artificial Sequence
  Description of Artificial Sequence: Synthetic almond;  inner sequence and 3' sequence
ggcatgcgatgaacgatgcatgatgcgtcattgactagtacatgaccacttga

SEQ ID NO: 6522 - DNA, 53 bp, Artificial Sequence; identical to SEQ ID NO: 2141
  Description of Artificial Sequence: Synthetic almond;  inner sequence and 3' sequence

SEQ ID NO: 6523 - DNA, 53 bp, Artificial Sequence; identical to SEQ ID NO: 2596
  Description of Artificial Sequence: Synthetic almond;  inner sequence and 3' sequence

SEQ ID NO: 6524 - DNA, 53 bp, Artificial Sequence; identical to SEQ ID NO: 2119
  Description of Artificial Sequence: Synthetic almond;  inner sequence and 3' sequence

SEQ ID NO: 6525 - DNA, 53 bp, Artificial Sequence
  Description of Artificial Sequence: Synthetic almond;  inner sequence and 3' sequence
ggccgaacgagcgtcaggtgcgtcggtgtattgactagtacatgaccacttga

SEQ ID NO: 6526 - DNA, 53 bp, Artificial Sequence
  Description of Artificial Sequence: Synthetic almond;  inner sequence and 3' sequence
cgcatgtggagtgagcgtccctgtggcacattgactagtacatgaccacttga

SEQ ID NO: 6527 - DNA, 53 bp, Artificial Sequence; identical to SEQ ID NO: 2101
  Description of Artificial Sequence: Synthetic almond;  inner sequence and 3' sequence

SEQ ID NO: 6528 - DNA, 53 bp, Artificial Sequence; identical to SEQ ID NO: 2242
  Description of Artificial Sequence: Synthetic almond;  inner sequence and 3' sequence

SEQ ID NO: 6529 - DNA, 53 bp, Artificial Sequence
  Description of Artificial Sequence: Synthetic almond;  inner sequence and 3' sequence
ctgagcggcaagtgcagcacgtacgttggtttgactagtacatgaccacttga

SEQ ID NO: 6530 - DNA, 53 bp, Artificial Sequence
  Description of Artificial Sequence: Synthetic almond;  inner sequence and 3' sequence
catgcggcatgaacggacctacacgtgggcttgactagtacatgaccacttga

SEQ ID NO: 6531 - DNA, 53 bp, Artificial Sequence
  Description of Artificial Sequence: Synthetic almond;  inner sequence and 3' sequence
gcaacgcagggatacgtccgacgatgcgtgttgactagtacatgaccacttga

SEQ ID NO: 6532 - DNA, 53 bp, Artificial Sequence; identical to SEQ ID NO: 2346
  Description of Artificial Sequence: Synthetic almond;  inner sequence and 3' sequence

SEQ ID NO: 6533 - DNA, 53 bp, Artificial Sequence; identical to SEQ ID NO: 2680
  Description of Artificial Sequence: Synthetic almond;  inner sequence and 3' sequence

SEQ ID NO: 6534 - DNA, 53 bp, Artificial Sequence; identical to SEQ ID NO: 2518
  Description of Artificial Sequence: Synthetic almond;  inner sequence and 3' sequence

SEQ ID NO: 6535 - DNA, 53 bp, Artificial Sequence
  Description of Artificial Sequence: Synthetic almond;  inner sequence and 3' sequence
ggactgcactacctacacgtggccacgtacttgactagtacatgaccacttga

SEQ ID NO: 6536 - DNA, 53 bp, Artificial Sequence; identical to SEQ ID NO: 2320
  Description of Artificial Sequence: Synthetic almond;  inner sequence and 3' sequence

SEQ ID NO: 6537 - DNA, 53 bp, Artificial Sequence; identical to SEQ ID NO: 2277
  Description of Artificial Sequence: Synthetic almond;  inner sequence and 3' sequence

SEQ ID NO: 6538 - DNA, 53 bp, Artificial Sequence; identical to SEQ ID NO: 2808
  Description of Artificial Sequence: Synthetic almond;  inner sequence and 3' sequence

SEQ ID NO: 6539 - DNA, 53 bp, Artificial Sequence
  Description of Artificial Sequence: Synthetic almond;  inner sequence and 3' sequence
cataccgtgcagcacatgtccgatgcgaccttgactagtacatgaccacttga

SEQ ID NO: 6540 - DNA, 53 bp, Artificial Sequence; identical to SEQ ID NO: 2370
  Description of Artificial Sequence: Synthetic almond;  inner sequence and 3' sequence

SEQ ID NO: 6541 - DNA, 53 bp, Artificial Sequence; identical to SEQ ID NO: 2223
  Description of Artificial Sequence: Synthetic almond;  inner sequence and 3' sequence

SEQ ID NO: 6542 - DNA, 53 bp, Artificial Sequence; identical to SEQ ID NO: 2463
  Description of Artificial Sequence: Synthetic almond;  inner sequence and 3' sequence

SEQ ID NO: 6543 - DNA, 53 bp, Artificial Sequence
  Description of Artificial Sequence: Synthetic almond;  inner sequence and 3' sequence
ccgcacgtagccctatcagtggggcatgcattgactagtacatgaccacttga

SEQ ID NO: 6544 - DNA, 53 bp, Artificial Sequence; identical to SEQ ID NO: 2366
  Description of Artificial Sequence: Synthetic almond;  inner sequence and 3' sequence

SEQ ID NO: 6545 - DNA, 53 bp, Artificial Sequence; identical to SEQ ID NO: 2583
  Description of Artificial Sequence: Synthetic almond;  inner sequence and 3' sequence

SEQ ID NO: 6546 - DNA, 53 bp, Artificial Sequence; identical to SEQ ID NO: 2510
  Description of Artificial Sequence: Synthetic almond;  inner sequence and 3' sequence

SEQ ID NO: 6547 - DNA, 53 bp, Artificial Sequence; identical to SEQ ID NO: 2657
  Description of Artificial Sequence: Synthetic almond;  inner sequence and 3' sequence

SEQ ID NO: 6548 - DNA, 53 bp, Artificial Sequence; identical to SEQ ID NO: 2319
  Description of Artificial Sequence: Synthetic almond;  inner sequence and 3' sequence

SEQ ID NO: 6549 - DNA, 53 bp, Artificial Sequence; identical to SEQ ID NO: 2135
  Description of Artificial Sequence: Synthetic almond;  inner sequence and 3' sequence

SEQ ID NO: 6550 - DNA, 53 bp, Artificial Sequence; identical to SEQ ID NO: 2622
  Description of Artificial Sequence: Synthetic almond;  inner sequence and 3' sequence

SEQ ID NO: 6551 - DNA, 53 bp, Artificial Sequence; identical to SEQ ID NO: 2324
  Description of Artificial Sequence: Synthetic almond;  inner sequence and 3' sequence

SEQ ID NO: 6552 - DNA, 53 bp, Artificial Sequence
  Description of Artificial Sequence: Synthetic almond;  inner sequence and 3' sequence
ggacgcacgatgagcgccaagtgacatggattgactagtacatgaccacttga

SEQ ID NO: 6553 - DNA, 53 bp, Artificial Sequence; identical to SEQ ID NO: 2275
  Description of Artificial Sequence: Synthetic almond;  inner sequence and 3' sequence

SEQ ID NO: 6554 - DNA, 53 bp, Artificial Sequence; identical to SEQ ID NO: 2722
  Description of Artificial Sequence: Synthetic almond;  inner sequence and 3' sequence

SEQ ID NO: 6555 - DNA, 53 bp, Artificial Sequence
  Description of Artificial Sequence: Synthetic almond;  inner sequence and 3' sequence
ggaccgagcgagccatcaagtcggcatgcattgactagtacatgaccacttga

SEQ ID NO: 6556 - DNA, 53 bp, Artificial Sequence; identical to SEQ ID NO: 2816
  Description of Artificial Sequence: Synthetic almond;  inner sequence and 3' sequence

SEQ ID NO: 6557 - DNA, 53 bp, Artificial Sequence; identical to SEQ ID NO: 2535
  Description of Artificial Sequence: Synthetic almond;  inner sequence and 3' sequence

SEQ ID NO: 6558 - DNA, 53 bp, Artificial Sequence; identical to SEQ ID NO: 2568
  Description of Artificial Sequence: Synthetic almond;  inner sequence and 3' sequence

SEQ ID NO: 6559 - DNA, 52 bp, Artificial Sequence
  Description of Artificial Sequence: Synthetic almond;  inner sequence and 3' sequence
ggccgaacggaccgacaagtgcgcatggattgactagtacatgaccacttga

SEQ ID NO: 6560 - DNA, 53 bp, Artificial Sequence; identical to SEQ ID NO: 2695
  Description of Artificial Sequence: Synthetic almond;  inner sequence and 3' sequence

SEQ ID NO: 6561 - DNA, 53 bp, Artificial Sequence; identical to SEQ ID NO: 2440
  Description of Artificial Sequence: Synthetic almond;  inner sequence and 3' sequence

SEQ ID NO: 6562 - DNA, 52 bp, Artificial Sequence; identical to SEQ ID NO: 2334
  Description of Artificial Sequence: Synthetic almond;  inner sequence and 3' sequence

SEQ ID NO: 6563 - DNA, 53 bp, Artificial Sequence; identical to SEQ ID NO: 2615
  Description of Artificial Sequence: Synthetic almond;  inner sequence and 3' sequence

SEQ ID NO: 6564 - DNA, 53 bp, Artificial Sequence; identical to SEQ ID NO: 2952
  Description of Artificial Sequence: Synthetic almond;  inner sequence and 3' sequence

SEQ ID NO: 6565 - DNA, 53 bp, Artificial Sequence
  Description of Artificial Sequence: Synthetic almond;  inner sequence and 3' sequence
ggcatgcacgcacctacacgtgggtatggcttgactagtacatgaccacttga

SEQ ID NO: 6566 - DNA, 53 bp, Artificial Sequence; identical to SEQ ID NO: 2557
  Description of Artificial Sequence: Synthetic almond;  inner sequence and 3' sequence

SEQ ID NO: 6567 - DNA, 53 bp, Artificial Sequence; identical to SEQ ID NO: 2818
  Description of Artificial Sequence: Synthetic almond;  inner sequence and 3' sequence

SEQ ID NO: 6568 - DNA, 53 bp, Artificial Sequence
  Description of Artificial Sequence: Synthetic almond;  inner sequence and 3' sequence
gcgtgcagcatagggagcacacgtcccgtgttgactagtacatgaccacttga

SEQ ID NO: 6569 - DNA, 53 bp, Artificial Sequence
  Description of Artificial Sequence: Synthetic almond;  inner sequence and 3' sequence
ggccgacgatgaccgcatgcacgattgccattgactagtacatgaccacttga

SEQ ID NO: 6570 - DNA, 53 bp, Artificial Sequence; identical to SEQ ID NO: 2900
  Description of Artificial Sequence: Synthetic almond;  inner sequence and 3' sequence

SEQ ID NO: 6571 - DNA, 53 bp, Artificial Sequence
  Description of Artificial Sequence: Synthetic almond;  inner sequence and 3' sequence
ggcatgcgatgaactaggcatgatgcgtcattgactagtacatgaccacttga

SEQ ID NO: 6572 - DNA, 53 bp, Artificial Sequence; identical to SEQ ID NO: 2231
  Description of Artificial Sequence: Synthetic almond;  inner sequence and 3' sequence

SEQ ID NO: 6573 - DNA, 53 bp, Artificial Sequence
  Description of Artificial Sequence: Synthetic almond;  inner sequence and 3' sequence
ccggagcgacatcaagcggtggtgtgcgtgttgactagtacatgaccacttga

SEQ ID NO: 6574 - DNA, 53 bp, Artificial Sequence; identical to SEQ ID NO: 2800
  Description of Artificial Sequence: Synthetic almond;  inner sequence and 3' sequence

SEQ ID NO: 6575 - DNA, 53 bp, Artificial Sequence
  Description of Artificial Sequence: Synthetic almond;  inner sequence and 3' sequence
tgcacaaacggaccgacaagtgcgcatggattgactagtacatgaccacttga

SEQ ID NO: 6576 - DNA, 53 bp, Artificial Sequence
  Description of Artificial Sequence: Synthetic almond;  inner sequence and 3' sequence
ggcatgcgatgaacgaggcatgatgcgacattgactagtacatgaccacttga

SEQ ID NO: 6577 - DNA, 53 bp, Artificial Sequence; identical to SEQ ID NO: 2475
  Description of Artificial Sequence: Synthetic almond;  inner sequence and 3' sequence

SEQ ID NO: 6578 - DNA, 53 bp, Artificial Sequence; identical to SEQ ID NO: 2373
  Description of Artificial Sequence: Synthetic almond;  inner sequence and 3' sequence

SEQ ID NO: 6579 - DNA, 53 bp, Artificial Sequence
  Description of Artificial Sequence: Synthetic almond;  inner sequence and 3' sequence
ccgaagcgacatcaagcggtggtgtgcgtgttgactagtacatgaccacttga

SEQ ID NO: 6580 - DNA, 53 bp, Artificial Sequence
  Description of Artificial Sequence: Synthetic almond;  inner sequence and 3' sequence
cgaaccggaacgtggtgactgggcttgtgtttgactagtacatgaccacttga

SEQ ID NO: 6581 - DNA, 53 bp, Artificial Sequence; identical to SEQ ID NO: 2301
  Description of Artificial Sequence: Synthetic almond;  inner sequence and 3' sequence

SEQ ID NO: 6582 - DNA, 53 bp, Artificial Sequence; identical to SEQ ID NO: 2979
  Description of Artificial Sequence: Synthetic almond;  inner sequence and 3' sequence

SEQ ID NO: 6583 - DNA, 53 bp, Artificial Sequence
  Description of Artificial Sequence: Synthetic almond;  inner sequence and 3' sequence
gacatgcagcaacgtacgcccttccgtgcattgactagtacatgaccacttga

SEQ ID NO: 6584 - DNA, 53 bp, Artificial Sequence; identical to SEQ ID NO: 2889
  Description of Artificial Sequence: Synthetic almond;  inner sequence and 3' sequence

SEQ ID NO: 6585 - DNA, 53 bp, Artificial Sequence
  Description of Artificial Sequence: Synthetic almond;  inner sequence and 3' sequence
ggcctgaccaaccgaccctcgtgcgtcacgttgactagtacatgaccacttga

SEQ ID NO: 6586 - DNA, 53 bp, Artificial Sequence; identical to SEQ ID NO: 2317
  Description of Artificial Sequence: Synthetic almond;  inner sequence and 3' sequence

SEQ ID NO: 6587 - DNA, 53 bp, Artificial Sequence; identical to SEQ ID NO: 2686
  Description of Artificial Sequence: Synthetic almond;  inner sequence and 3' sequence

SEQ ID NO: 6588 - DNA, 53 bp, Artificial Sequence
  Description of Artificial Sequence: Synthetic almond;  inner sequence and 3' sequence
cgtgcgtcacgcagagggccagctcggacattgactagtacatgaccacttga

SEQ ID NO: 6589 - DNA, 53 bp, Artificial Sequence; identical to SEQ ID NO: 2400
  Description of Artificial Sequence: Synthetic almond;  inner sequence and 3' sequence

SEQ ID NO: 6590 - DNA, 53 bp, Artificial Sequence
  Description of Artificial Sequence: Synthetic almond;  inner sequence and 3' sequence
cgtccgaaacgcacgtgcaagttgggcatattgactagtacatgaccacttga

SEQ ID NO: 6591 - DNA, 53 bp, Artificial Sequence
  Description of Artificial Sequence: Synthetic almond;  inner sequence and 3' sequence
ggcatgcgcggacattcaagttggcgtggattgactagtacatgaccacttga

SEQ ID NO: 6592 - DNA, 53 bp, Artificial Sequence
  Description of Artificial Sequence: Synthetic almond;  inner sequence and 3' sequence
tcatgtggacgatcgacccgtacgtggacattgactagtacatgaccacttga

SEQ ID NO: 6593 - DNA, 53 bp, Artificial Sequence; identical to SEQ ID NO: 2801
  Description of Artificial Sequence: Synthetic almond;  inner sequence and 3' sequence

SEQ ID NO: 6594 - DNA, 53 bp, Artificial Sequence; identical to SEQ ID NO: 2169
  Description of Artificial Sequence: Synthetic almond;  inner sequence and 3' sequence

SEQ ID NO: 6595 - DNA, 53 bp, Artificial Sequence; identical to SEQ ID NO: 2239
  Description of Artificial Sequence: Synthetic almond;  inner sequence and 3' sequence

SEQ ID NO: 6596 - DNA, 53 bp, Artificial Sequence; identical to SEQ ID NO: 2603
  Description of Artificial Sequence: Synthetic almond;  inner sequence and 3' sequence

SEQ ID NO: 6597 - DNA, 53 bp, Artificial Sequence
  Description of Artificial Sequence: Synthetic almond;  inner sequence and 3' sequence
tggacgcaacgtaacgataacgtgggagtgttgactagtacatgaccacttga

SEQ ID NO: 6598 - DNA, 53 bp, Artificial Sequence
  Description of Artificial Sequence: Synthetic almond;  inner sequence and 3' sequence
ccgatcggaccgattcaacgtgtgcatggattgactagtacatgaccacttga

SEQ ID NO: 6599 - DNA, 53 bp, Artificial Sequence; identical to SEQ ID NO: 2768
  Description of Artificial Sequence: Synthetic almond;  inner sequence and 3' sequence

SEQ ID NO: 6600 - DNA, 53 bp, Artificial Sequence; identical to SEQ ID NO: 2758
  Description of Artificial Sequence: Synthetic almond;  inner sequence and 3' sequence

SEQ ID NO: 6601 - DNA, 53 bp, Artificial Sequence; identical to SEQ ID NO: 2289
  Description of Artificial Sequence: Synthetic almond;  inner sequence and 3' sequence

SEQ ID NO: 6602 - DNA, 53 bp, Artificial Sequence; identical to SEQ ID NO: 2227
  Description of Artificial Sequence: Synthetic almond;  inner sequence and 3' sequence

SEQ ID NO: 6603 - DNA, 53 bp, Artificial Sequence
  Description of Artificial Sequence: Synthetic almond;  inner sequence and 3' sequence
gcacgactcgcaccctatcatgcggccatgttgactagtacatgaccacttga

SEQ ID NO: 6604 - DNA, 53 bp, Artificial Sequence; identical to SEQ ID NO: 2495
  Description of Artificial Sequence: Synthetic almond;  inner sequence and 3' sequence

SEQ ID NO: 6605 - DNA, 53 bp, Artificial Sequence
  Description of Artificial Sequence: Synthetic almond;  inner sequence and 3' sequence
ggacgtagcgaccgaacggtgtgccatgtattgactagtacatgaccacttga

SEQ ID NO: 6606 - DNA, 53 bp, Artificial Sequence; identical to SEQ ID NO: 2780
  Description of Artificial Sequence: Synthetic almond;  inner sequence and 3' sequence

SEQ ID NO: 6607 - DNA, 53 bp, Artificial Sequence; identical to SEQ ID NO: 2187
  Description of Artificial Sequence: Synthetic almond;  inner sequence and 3' sequence

SEQ ID NO: 6608 - DNA, 53 bp, Artificial Sequence; identical to SEQ ID NO: 2776
  Description of Artificial Sequence: Synthetic almond;  inner sequence and 3' sequence

SEQ ID NO: 6609 - DNA, 53 bp, Artificial Sequence; identical to SEQ ID NO: 2340
  Description of Artificial Sequence: Synthetic almond;  inner sequence and 3' sequence

SEQ ID NO: 6610 - DNA, 53 bp, Artificial Sequence
  Description of Artificial Sequence: Synthetic almond;  inner sequence and 3' sequence
ggacgcagcgtggcatatcacgtgatcatgttgactagtacatgaccacttga

SEQ ID NO: 6611 - DNA, 53 bp, Artificial Sequence
  Description of Artificial Sequence: Synthetic almond;  inner sequence and 3' sequence
gtgcgccgatgaccgtcaagtcgtggtgtattgactagtacatgaccacttga

SEQ ID NO: 6612 - DNA, 53 bp, Artificial Sequence
  Description of Artificial Sequence: Synthetic almond;  inner sequence and 3' sequence
cgtgacagcgagcacgtccaacgctgcgcattgactagtacatgaccacttga

SEQ ID NO: 6613 - DNA, 53 bp, Artificial Sequence
  Description of Artificial Sequence: Synthetic almond;  inner sequence and 3' sequence
ggccgactcgaccgcgtcatgaacggcatgttgactagtacatgaccacttga

SEQ ID NO: 6614 - DNA, 53 bp, Artificial Sequence; identical to SEQ ID NO: 2432
  Description of Artificial Sequence: Synthetic almond;  inner sequence and 3' sequence

SEQ ID NO: 6615 - DNA, 53 bp, Artificial Sequence; identical to SEQ ID NO: 2280
  Description of Artificial Sequence: Synthetic almond;  inner sequence and 3' sequence

SEQ ID NO: 6616 - DNA, 53 bp, Artificial Sequence
  Description of Artificial Sequence: Synthetic almond;  inner sequence and 3' sequence
ggccaagcgagcttcaaggcggcatgttgcttgactagtacatgaccacttga

SEQ ID NO: 6617 - DNA, 53 bp, Artificial Sequence
  Description of Artificial Sequence: Synthetic almond;  inner sequence and 3' sequence
ggcatgcgatgaacgaggcattatgcgtcattgactagtacatgaccacttga

SEQ ID NO: 6618 - DNA, 53 bp, Artificial Sequence; identical to SEQ ID NO: 2624
  Description of Artificial Sequence: Synthetic almond;  inner sequence and 3' sequence

SEQ ID NO: 6619 - DNA, 54 bp, Artificial Sequence
  Description of Artificial Sequence: Synthetic almond;  inner sequence and 3' sequence
ggcctgaccggacctagtggctgaacgtggcttgactagtacatgaccacttga

SEQ ID NO: 6620 - DNA, 53 bp, Artificial Sequence
  Description of Artificial Sequence: Synthetic almond;  inner sequence and 3' sequence
gtcatgcacgaacactctcatggcggcatgttgactagtacatgaccacttga

SEQ ID NO: 6621 - DNA, 53 bp, Artificial Sequence
  Description of Artificial Sequence: Synthetic almond;  inner sequence and 3' sequence
tgcatgcgatgaacgaggcatgatgcgtcattgactagtacatgaccacttga

SEQ ID NO: 6622 - DNA, 51 bp, Artificial Sequence; identical to SEQ ID NO: 2423
  Description of Artificial Sequence: Synthetic almond;  inner sequence and 3' sequence

SEQ ID NO: 6623 - DNA, 53 bp, Artificial Sequence; identical to SEQ ID NO: 2130
  Description of Artificial Sequence: Synthetic almond;  inner sequence and 3' sequence

SEQ ID NO: 6624 - DNA, 53 bp, Artificial Sequence; identical to SEQ ID NO: 2189
  Description of Artificial Sequence: Synthetic almond;  inner sequence and 3' sequence

SEQ ID NO: 6625 - DNA, 53 bp, Artificial Sequence; identical to SEQ ID NO: 2571
  Description of Artificial Sequence: Synthetic almond;  inner sequence and 3' sequence

SEQ ID NO: 6626 - DNA, 53 bp, Artificial Sequence; identical to SEQ ID NO: 2420
  Description of Artificial Sequence: Synthetic almond;  inner sequence and 3' sequence

SEQ ID NO: 6627 - DNA, 53 bp, Artificial Sequence
  Description of Artificial Sequence: Synthetic almond;  inner sequence and 3' sequence
ggcatgcgatgaacgaggcatgatgcggcattgactagtacatgaccacttga

SEQ ID NO: 6628 - DNA, 53 bp, Artificial Sequence; identical to SEQ ID NO: 2413
  Description of Artificial Sequence: Synthetic almond;  inner sequence and 3' sequence

SEQ ID NO: 6629 - DNA, 53 bp, Artificial Sequence; identical to SEQ ID NO: 2507
  Description of Artificial Sequence: Synthetic almond;  inner sequence and 3' sequence

SEQ ID NO: 6630 - DNA, 53 bp, Artificial Sequence; identical to SEQ ID NO: 2926
  Description of Artificial Sequence: Synthetic almond;  inner sequence and 3' sequence

SEQ ID NO: 6631 - DNA, 53 bp, Artificial Sequence
  Description of Artificial Sequence: Synthetic almond;  inner sequence and 3' sequence
gcaccgatcgcaacgtgtacaaggggtgtgttgactagtacatgaccacttga

SEQ ID NO: 6632 - DNA, 53 bp, Artificial Sequence; identical to SEQ ID NO: 2405
  Description of Artificial Sequence: Synthetic almond;  inner sequence and 3' sequence

SEQ ID NO: 6633 - DNA, 53 bp, Artificial Sequence; identical to SEQ ID NO: 2486
  Description of Artificial Sequence: Synthetic almond;  inner sequence and 3' sequence

SEQ ID NO: 6634 - DNA, 53 bp, Artificial Sequence
  Description of Artificial Sequence: Synthetic almond;  inner sequence and 3' sequence
cgaaccgctgcaaggtgtcagtgcgtggcattgactagtacatgaccacttga

SEQ ID NO: 6635 - DNA, 53 bp, Artificial Sequence; identical to SEQ ID NO: 2266
  Description of Artificial Sequence: Synthetic almond;  inner sequence and 3' sequence

SEQ ID NO: 6636 - DNA, 53 bp, Artificial Sequence; identical to SEQ ID NO: 2804
  Description of Artificial Sequence: Synthetic almond;  inner sequence and 3' sequence

SEQ ID NO: 6637 - DNA, 53 bp, Artificial Sequence; identical to SEQ ID NO: 2590
  Description of Artificial Sequence: Synthetic almond;  inner sequence and 3' sequence

SEQ ID NO: 6638 - DNA, 53 bp, Artificial Sequence
  Description of Artificial Sequence: Synthetic almond;  inner sequence and 3' sequence
gcacgactcgcaccctatcatgagcccatgttgactagtacatgaccacttga

SEQ ID NO: 6639 - DNA, 53 bp, Artificial Sequence; identical to SEQ ID NO: 2303
  Description of Artificial Sequence: Synthetic almond;  inner sequence and 3' sequence

SEQ ID NO: 6640 - DNA, 53 bp, Artificial Sequence
  Description of Artificial Sequence: Synthetic almond;  inner sequence and 3' sequence
ccatgcagcatacgtgcagtctcgtaccgattgactagtacatgaccacttga

SEQ ID NO: 6641 - DNA, 53 bp, Artificial Sequence
  Description of Artificial Sequence: Synthetic almond;  inner sequence and 3' sequence
ggccaagctgaccgtaaaggcaggcgtgcattgactagtacatgaccacttga

SEQ ID NO: 6642 - DNA, 53 bp, Artificial Sequence
  Description of Artificial Sequence: Synthetic almond;  inner sequence and 3' sequence
cgacccgcgaagtgaggcagtgcgacggtgttgactagtacatgaccacttga

SEQ ID NO: 6643 - DNA, 53 bp, Artificial Sequence; identical to SEQ ID NO: 2351
  Description of Artificial Sequence: Synthetic almond;  inner sequence and 3' sequence

SEQ ID NO: 6644 - DNA, 53 bp, Artificial Sequence
  Description of Artificial Sequence: Synthetic almond;  inner sequence and 3' sequence
aatgtgcacgatcgtaccctacatgtggcattgactagtacatgaccacttga

SEQ ID NO: 6645 - DNA, 53 bp, Artificial Sequence; identical to SEQ ID NO: 2526
  Description of Artificial Sequence: Synthetic almond;  inner sequence and 3' sequence

SEQ ID NO: 6646 - DNA, 53 bp, Artificial Sequence; identical to SEQ ID NO: 2962
  Description of Artificial Sequence: Synthetic almond;  inner sequence and 3' sequence

SEQ ID NO: 6647 - DNA, 53 bp, Artificial Sequence; identical to SEQ ID NO: 2182
  Description of Artificial Sequence: Synthetic almond;  inner sequence and 3' sequence

SEQ ID NO: 6648 - DNA, 53 bp, Artificial Sequence; identical to SEQ ID NO: 2884
  Description of Artificial Sequence: Synthetic almond;  inner sequence and 3' sequence

SEQ ID NO: 6649 - DNA, 53 bp, Artificial Sequence; identical to SEQ ID NO: 2291
  Description of Artificial Sequence: Synthetic almond;  inner sequence and 3' sequence

SEQ ID NO: 6650 - DNA, 53 bp, Artificial Sequence
  Description of Artificial Sequence: Synthetic almond;  inner sequence and 3' sequence
ggccgaacgaccgatcgagtggcgcatggcttgactagtacatgaccacttga

SEQ ID NO: 6651 - DNA, 53 bp, Artificial Sequence
  Description of Artificial Sequence: Synthetic almond;  inner sequence and 3' sequence
gtcgtgacgcaaccggtcaagcggtgtgtattgactagtacatgaccacttga

SEQ ID NO: 6652 - DNA, 53 bp, Artificial Sequence
  Description of Artificial Sequence: Synthetic almond;  inner sequence and 3' sequence
cacatgccagtccgtcaccacgccgcgtcattgactagtacatgaccacttga

SEQ ID NO: 6653 - DNA, 53 bp, Artificial Sequence
  Description of Artificial Sequence: Synthetic almond;  inner sequence and 3' sequence
gcacgactcgcaccctatcatgacgccatgttgactagtacatgaccacttga

SEQ ID NO: 6654 - DNA, 53 bp, Artificial Sequence
  Description of Artificial Sequence: Synthetic almond;  inner sequence and 3' sequence
gcgacaagcagcagacgagatcacggcccgttgactagtacatgaccacttga

SEQ ID NO: 6655 - DNA, 53 bp, Artificial Sequence
  Description of Artificial Sequence: Synthetic almond;  inner sequence and 3' sequence
acggtcagggagcagtggacgcgttgcacgttgactagtacatgaccacttga

SEQ ID NO: 6656 - DNA, 53 bp, Artificial Sequence; identical to SEQ ID NO: 2387
  Description of Artificial Sequence: Synthetic almond;  inner sequence and 3' sequence

SEQ ID NO: 6657 - DNA, 53 bp, Artificial Sequence; identical to SEQ ID NO: 2670
  Description of Artificial Sequence: Synthetic almond;  inner sequence and 3' sequence

SEQ ID NO: 6658 - DNA, 53 bp, Artificial Sequence
  Description of Artificial Sequence: Synthetic almond;  inner sequence and 3' sequence
cgcaccgtcaagcgggcaggcactttggtgttgactagtacatgaccacttga

SEQ ID NO: 6659 - DNA, 53 bp, Artificial Sequence
  Description of Artificial Sequence: Synthetic almond;  inner sequence and 3' sequence
cgacacgcatcatgtgtgcctaccgtcacgttgactagtacatgaccacttga

SEQ ID NO: 6660 - DNA, 53 bp, Artificial Sequence
  Description of Artificial Sequence: Synthetic almond;  inner sequence and 3' sequence
gcaacgcagccggacgatcgacacgtgactttgactagtacatgaccacttga

SEQ ID NO: 6661 - DNA, 53 bp, Artificial Sequence; identical to SEQ ID NO: 2600
  Description of Artificial Sequence: Synthetic almond;  inner sequence and 3' sequence

SEQ ID NO: 6662 - DNA, 53 bp, Artificial Sequence
  Description of Artificial Sequence: Synthetic almond;  inner sequence and 3' sequence
cgtccgacaacgacgtaccggtgtgccacgttgactagtacatgaccacttga

SEQ ID NO: 6663 - DNA, 53 bp, Artificial Sequence
  Description of Artificial Sequence: Synthetic almond;  inner sequence and 3' sequence
gcgccaccgcaacatgtgcacgtatcgacattgactagtacatgaccacttga

SEQ ID NO: 6664 - DNA, 53 bp, Artificial Sequence
  Description of Artificial Sequence: Synthetic almond;  inner sequence and 3' sequence
cgcaccgtgacataggggcattcgcgacacttgactagtacatgaccacttga

SEQ ID NO: 6665 - DNA, 53 bp, Artificial Sequence; identical to SEQ ID NO: 2863
  Description of Artificial Sequence: Synthetic almond;  inner sequence and 3' sequence

SEQ ID NO: 6666 - DNA, 53 bp, Artificial Sequence
  Description of Artificial Sequence: Synthetic almond;  inner sequence and 3' sequence
gcactgagcgtacgtatcagcgggcacgcattgactagtacatgaccacttga

SEQ ID NO: 6667 - DNA, 53 bp, Artificial Sequence
  Description of Artificial Sequence: Synthetic almond;  inner sequence and 3' sequence
gtcatgcgcggacactatcatggcggcatgttgactagtacatgaccacttga

SEQ ID NO: 6668 - DNA, 53 bp, Artificial Sequence; identical to SEQ ID NO: 2784
  Description of Artificial Sequence: Synthetic almond;  inner sequence and 3' sequence

SEQ ID NO: 6669 - DNA, 53 bp, Artificial Sequence; identical to SEQ ID NO: 2660
  Description of Artificial Sequence: Synthetic almond;  inner sequence and 3' sequence

SEQ ID NO: 6670 - DNA, 53 bp, Artificial Sequence
  Description of Artificial Sequence: Synthetic almond;  inner sequence and 3' sequence
tggactgtgcgcaccgattacgtggccatgttgactagtacatgaccacttga

SEQ ID NO: 6671 - DNA, 53 bp, Artificial Sequence
  Description of Artificial Sequence: Synthetic almond;  inner sequence and 3' sequence
cgcagacacacggcatgctctgacctggcattgactagtacatgaccacttga

SEQ ID NO: 6672 - DNA, 53 bp, Artificial Sequence; identical to SEQ ID NO: 2441
  Description of Artificial Sequence: Synthetic almond;  inner sequence and 3' sequence

SEQ ID NO: 6673 - DNA, 53 bp, Artificial Sequence
  Description of Artificial Sequence: Synthetic almond;  inner sequence and 3' sequence
cgtccacgcgcaccggtgagttacggcacattgactagtacatgaccacttga

SEQ ID NO: 6674 - DNA, 53 bp, Artificial Sequence; identical to SEQ ID NO: 2721
  Description of Artificial Sequence: Synthetic almond;  inner sequence and 3' sequence

SEQ ID NO: 6675 - DNA, 53 bp, Artificial Sequence; identical to SEQ ID NO: 2490
  Description of Artificial Sequence: Synthetic almond;  inner sequence and 3' sequence

SEQ ID NO: 6676 - DNA, 53 bp, Artificial Sequence; identical to SEQ ID NO: 2636
  Description of Artificial Sequence: Synthetic almond;  inner sequence and 3' sequence

SEQ ID NO: 6677 - DNA, 53 bp, Artificial Sequence; identical to SEQ ID NO: 2345
  Description of Artificial Sequence: Synthetic almond;  inner sequence and 3' sequence

SEQ ID NO: 6678 - DNA, 53 bp, Artificial Sequence
  Description of Artificial Sequence: Synthetic almond;  inner sequence and 3' sequence
gcgtaccagcggaacaggactgcgatgacattgactagtacatgaccacttga

SEQ ID NO: 6679 - DNA, 53 bp, Artificial Sequence
  Description of Artificial Sequence: Synthetic almond;  inner sequence and 3' sequence
cgcaccgagcgtgatcgtggttcgcagtcattgactagtacatgaccacttga

SEQ ID NO: 6680 - DNA, 53 bp, Artificial Sequence; identical to SEQ ID NO: 2477
  Description of Artificial Sequence: Synthetic almond;  inner sequence and 3' sequence

SEQ ID NO: 6681 - DNA, 53 bp, Artificial Sequence; identical to SEQ ID NO: 2325
  Description of Artificial Sequence: Synthetic almond;  inner sequence and 3' sequence

SEQ ID NO: 6682 - DNA, 53 bp, Artificial Sequence
  Description of Artificial Sequence: Synthetic almond;  inner sequence and 3' sequence
ggacgcagcgctgacggtggatcatgcactttgactagtacatgaccacttga

SEQ ID NO: 6683 - DNA, 53 bp, Artificial Sequence; identical to SEQ ID NO: 2267
  Description of Artificial Sequence: Synthetic almond;  inner sequence and 3' sequence

SEQ ID NO: 6684 - DNA, 53 bp, Artificial Sequence; identical to SEQ ID NO: 2927
  Description of Artificial Sequence: Synthetic almond;  inner sequence and 3' sequence

SEQ ID NO: 6685 - DNA, 53 bp, Artificial Sequence; identical to SEQ ID NO: 2846
  Description of Artificial Sequence: Synthetic almond;  inner sequence and 3' sequence

SEQ ID NO: 6686 - DNA, 53 bp, Artificial Sequence; identical to SEQ ID NO: 2991
  Description of Artificial Sequence: Synthetic almond;  inner sequence and 3' sequence

SEQ ID NO: 6687 - DNA, 53 bp, Artificial Sequence
  Description of Artificial Sequence: Synthetic almond;  inner sequence and 3' sequence
ccatgtccgacgataccatacgcatggccattgactagtacatgaccacttga

SEQ ID NO: 6688 - DNA, 53 bp, Artificial Sequence
  Description of Artificial Sequence: Synthetic almond;  inner sequence and 3' sequence
gtacgcctcggagctagcaggtggtgtggattgactagtacatgaccacttga

SEQ ID NO: 6689 - DNA, 53 bp, Artificial Sequence; identical to SEQ ID NO: 2662
  Description of Artificial Sequence: Synthetic almond;  inner sequence and 3' sequence

SEQ ID NO: 6690 - DNA, 53 bp, Artificial Sequence
  Description of Artificial Sequence: Synthetic almond;  inner sequence and 3' sequence
ggccggcgaaccctagcaagtgcatgcgtgttgactagtacatgaccacttga

SEQ ID NO: 6691 - DNA, 53 bp, Artificial Sequence
  Description of Artificial Sequence: Synthetic almond;  inner sequence and 3' sequence
ccgcacgtagccctatcagcggtgcatgcattgactagtacatgaccacttga

SEQ ID NO: 6692 - DNA, 53 bp, Artificial Sequence
  Description of Artificial Sequence: Synthetic almond;  inner sequence and 3' sequence
gatgggcagagcggaccgtctcacgtggtgttgactagtacatgaccacttga

SEQ ID NO: 6693 - DNA, 53 bp, Artificial Sequence; identical to SEQ ID NO: 2534
  Description of Artificial Sequence: Synthetic almond;  inner sequence and 3' sequence

SEQ ID NO: 6694 - DNA, 53 bp, Artificial Sequence
  Description of Artificial Sequence: Synthetic almond;  inner sequence and 3' sequence
ggcatgcgatgaacgaggcatgatgtgtcattgactagtacatgaccacttga

SEQ ID NO: 6695 - DNA, 53 bp, Artificial Sequence; identical to SEQ ID NO: 2374
  Description of Artificial Sequence: Synthetic almond;  inner sequence and 3' sequence

SEQ ID NO: 6696 - DNA, 53 bp, Artificial Sequence; identical to SEQ ID NO: 2386
  Description of Artificial Sequence: Synthetic almond;  inner sequence and 3' sequence

SEQ ID NO: 6697 - DNA, 53 bp, Artificial Sequence; identical to SEQ ID NO: 2788
  Description of Artificial Sequence: Synthetic almond;  inner sequence and 3' sequence

SEQ ID NO: 6698 - DNA, 53 bp, Artificial Sequence
  Description of Artificial Sequence: Synthetic almond;  inner sequence and 3' sequence
gcggtacgaagcaacggcctgcactgcgtgttgactagtacatgaccacttga

SEQ ID NO: 6699 - DNA, 53 bp, Artificial Sequence; identical to SEQ ID NO: 2456
  Description of Artificial Sequence: Synthetic almond;  inner sequence and 3' sequence

SEQ ID NO: 6700 - DNA, 53 bp, Artificial Sequence
  Description of Artificial Sequence: Synthetic almond;  inner sequence and 3' sequence
gctactgcgcgtgaccatatcaagcggacattgactagtacatgaccacttga

SEQ ID NO: 6701 - DNA, 53 bp, Artificial Sequence; identical to SEQ ID NO: 2607
  Description of Artificial Sequence: Synthetic almond;  inner sequence and 3' sequence

SEQ ID NO: 6702 - DNA, 53 bp, Artificial Sequence
  Description of Artificial Sequence: Synthetic almond;  inner sequence and 3' sequence
cgatgcgtcgatcgtacgtcatgcgcgtcattgactagtacatgaccacttga

SEQ ID NO: 6703 - DNA, 53 bp, Artificial Sequence; identical to SEQ ID NO: 2608
  Description of Artificial Sequence: Synthetic almond;  inner sequence and 3' sequence

SEQ ID NO: 6704 - DNA, 53 bp, Artificial Sequence; identical to SEQ ID NO: 3001
  Description of Artificial Sequence: Synthetic almond;  inner sequence and 3' sequence

SEQ ID NO: 6705 - DNA, 53 bp, Artificial Sequence; identical to SEQ ID NO: 2754
  Description of Artificial Sequence: Synthetic almond;  inner sequence and 3' sequence

SEQ ID NO: 6706 - DNA, 53 bp, Artificial Sequence
  Description of Artificial Sequence: Synthetic almond;  inner sequence and 3' sequence
acgtctcggaacgcaacggtgtgtgtgtgcttgactagtacatgaccacttga

SEQ ID NO: 6707 - DNA, 53 bp, Artificial Sequence
  Description of Artificial Sequence: Synthetic almond;  inner sequence and 3' sequence
ggcatgcgatgaacgagtcatgatgcgtcattgactagtacatgaccacttga

SEQ ID NO: 6708 - DNA, 53 bp, Artificial Sequence
  Description of Artificial Sequence: Synthetic almond;  inner sequence and 3' sequence
ggcatgcacgcacctacacttgggtatggattgactagtacatgaccacttga

SEQ ID NO: 6709 - DNA, 53 bp, Artificial Sequence
  Description of Artificial Sequence: Synthetic almond;  inner sequence and 3' sequence
gcaacggcatggagtgacctgcgctgaacgttgactagtacatgaccacttga

SEQ ID NO: 6710 - DNA, 53 bp, Artificial Sequence
  Description of Artificial Sequence: Synthetic almond;  inner sequence and 3' sequence
ggcctgaccgaacgtagagcatgtgcttgcttgactagtacatgaccacttga

SEQ ID NO: 6711 - DNA, 53 bp, Artificial Sequence
  Description of Artificial Sequence: Synthetic almond;  inner sequence and 3' sequence
ccatcacggacgaactcacgcacggtgacattgactagtacatgaccacttga

SEQ ID NO: 6712 - DNA, 53 bp, Artificial Sequence; identical to SEQ ID NO: 2261
  Description of Artificial Sequence: Synthetic almond;  inner sequence and 3' sequence

SEQ ID NO: 6713 - DNA, 53 bp, Artificial Sequence
  Description of Artificial Sequence: Synthetic almond;  inner sequence and 3' sequence
ggatgacgatgcactacacgtggcttggacttgactagtacatgaccacttga

SEQ ID NO: 6714 - DNA, 53 bp, Artificial Sequence; identical to SEQ ID NO: 2951
  Description of Artificial Sequence: Synthetic almond;  inner sequence and 3' sequence

SEQ ID NO: 6715 - DNA, 53 bp, Artificial Sequence
  Description of Artificial Sequence: Synthetic almond;  inner sequence and 3' sequence
cgtaccggagaggcaggcatgggcacggcattgactagtacatgaccacttga

SEQ ID NO: 6716 - DNA, 53 bp, Artificial Sequence; identical to SEQ ID NO: 2705
  Description of Artificial Sequence: Synthetic almond;  inner sequence and 3' sequence

SEQ ID NO: 6717 - DNA, 53 bp, Artificial Sequence
  Description of Artificial Sequence: Synthetic almond;  inner sequence and 3' sequence
ggccaagctgaccgtaaaggcaggcgcgtattgactagtacatgaccacttga

SEQ ID NO: 6718 - DNA, 53 bp, Artificial Sequence
  Description of Artificial Sequence: Synthetic almond;  inner sequence and 3' sequence
gcatggccgaatgcaccctgcagttgcgcgttgactagtacatgaccacttga

SEQ ID NO: 6719 - DNA, 53 bp, Artificial Sequence
  Description of Artificial Sequence: Synthetic almond;  inner sequence and 3' sequence
gcacggaacggaacaacaagggcaggcatgttgactagtacatgaccacttga

SEQ ID NO: 6720 - DNA, 53 bp, Artificial Sequence; identical to SEQ ID NO: 2461
  Description of Artificial Sequence: Synthetic almond;  inner sequence and 3' sequence

SEQ ID NO: 6721 - DNA, 53 bp, Artificial Sequence
  Description of Artificial Sequence: Synthetic almond;  inner sequence and 3' sequence
gcagatggacgatctgagcgtgaccgtggtttgactagtacatgaccacttga

SEQ ID NO: 6722 - DNA, 53 bp, Artificial Sequence
  Description of Artificial Sequence: Synthetic almond;  inner sequence and 3' sequence
ggtcggatcgacactgaacgtggtcacgcattgactagtacatgaccacttga

SEQ ID NO: 6723 - DNA, 53 bp, Artificial Sequence; identical to SEQ ID NO: 2805
  Description of Artificial Sequence: Synthetic almond;  inner sequence and 3' sequence

SEQ ID NO: 6724 - DNA, 53 bp, Artificial Sequence; identical to SEQ ID NO: 2684
  Description of Artificial Sequence: Synthetic almond;  inner sequence and 3' sequence

SEQ ID NO: 6725 - DNA, 53 bp, Artificial Sequence; identical to SEQ ID NO: 2464
  Description of Artificial Sequence: Synthetic almond;  inner sequence and 3' sequence

SEQ ID NO: 6726 - DNA, 53 bp, Artificial Sequence
  Description of Artificial Sequence: Synthetic almond;  inner sequence and 3' sequence
tcgatgcagatggacgacgtcgctacgacattgactagtacatgaccacttga

SEQ ID NO: 6727 - DNA, 53 bp, Artificial Sequence
  Description of Artificial Sequence: Synthetic almond;  inner sequence and 3' sequence
ggccggaacgaaacgcgtggccatgcactattgactagtacatgaccacttga

SEQ ID NO: 6728 - DNA, 53 bp, Artificial Sequence
  Description of Artificial Sequence: Synthetic almond;  inner sequence and 3' sequence
cgtaccgacggggacattgcgttggcagtcttgactagtacatgaccacttga

SEQ ID NO: 6729 - DNA, 53 bp, Artificial Sequence; identical to SEQ ID NO: 2588
  Description of Artificial Sequence: Synthetic almond;  inner sequence and 3' sequence

SEQ ID NO: 6730 - DNA, 53 bp, Artificial Sequence; identical to SEQ ID NO: 2493
  Description of Artificial Sequence: Synthetic almond;  inner sequence and 3' sequence

SEQ ID NO: 6731 - DNA, 53 bp, Artificial Sequence
  Description of Artificial Sequence: Synthetic almond;  inner sequence and 3' sequence
cgcaacggcgaggggtcgtgcacgcattcattgactagtacatgaccacttga

SEQ ID NO: 6732 - DNA, 53 bp, Artificial Sequence; identical to SEQ ID NO: 2677
  Description of Artificial Sequence: Synthetic almond;  inner sequence and 3' sequence

SEQ ID NO: 6733 - DNA, 53 bp, Artificial Sequence; identical to SEQ ID NO: 2560
  Description of Artificial Sequence: Synthetic almond;  inner sequence and 3' sequence

SEQ ID NO: 6734 - DNA, 53 bp, Artificial Sequence; identical to SEQ ID NO: 2328
  Description of Artificial Sequence: Synthetic almond;  inner sequence and 3' sequence

SEQ ID NO: 6735 - DNA, 53 bp, Artificial Sequence
  Description of Artificial Sequence: Synthetic almond;  inner sequence and 3' sequence
ccgtagcgacatcaagcggtggtgagcgtgttgactagtacatgaccacttga

SEQ ID NO: 6736 - DNA, 53 bp, Artificial Sequence
  Description of Artificial Sequence: Synthetic almond;  inner sequence and 3' sequence
cgtaccgagagtgatcgtggttcgcagtcattgactagtacatgaccacttga

SEQ ID NO: 6737 - DNA, 53 bp, Artificial Sequence
  Description of Artificial Sequence: Synthetic almond;  inner sequence and 3' sequence
cgcaccgagagtgatcgcggttcgcagtcattgactagtacatgaccacttga

SEQ ID NO: 6738 - DNA, 53 bp, Artificial Sequence; identical to SEQ ID NO: 2505
  Description of Artificial Sequence: Synthetic almond;  inner sequence and 3' sequence

SEQ ID NO: 6739 - DNA, 53 bp, Artificial Sequence
  Description of Artificial Sequence: Synthetic almond;  inner sequence and 3' sequence
tcgatccggcacgtaacgatgggcatggcattgactagtacatgaccacttga

SEQ ID NO: 6740 - DNA, 53 bp, Artificial Sequence
  Description of Artificial Sequence: Synthetic almond;  inner sequence and 3' sequence
cgacccggagaccaagctggacattgcgtcttgactagtacatgaccacttga

SEQ ID NO: 6741 - DNA, 53 bp, Artificial Sequence; identical to SEQ ID NO: 2851
  Description of Artificial Sequence: Synthetic almond;  inner sequence and 3' sequence

SEQ ID NO: 6742 - DNA, 53 bp, Artificial Sequence
  Description of Artificial Sequence: Synthetic almond;  inner sequence and 3' sequence
cgacacgcacaagggtcgagtgacgaggcattgactagtacatgaccacttga

SEQ ID NO: 6743 - DNA, 53 bp, Artificial Sequence
  Description of Artificial Sequence: Synthetic almond;  inner sequence and 3' sequence
gtcctgcacgaacactatcatggcggcatgttgactagtacatgaccacttga

SEQ ID NO: 6744 - DNA, 53 bp, Artificial Sequence
  Description of Artificial Sequence: Synthetic almond;  inner sequence and 3' sequence
gatggcacgatcgtccctagcgcgtgatcattgactagtacatgaccacttga

SEQ ID NO: 6745 - DNA, 53 bp, Artificial Sequence
  Description of Artificial Sequence: Synthetic almond;  inner sequence and 3' sequence
ccgtagcgcaccacgtagacgttaggcatgttgactagtacatgaccacttga

SEQ ID NO: 6746 - DNA, 53 bp, Artificial Sequence
  Description of Artificial Sequence: Synthetic almond;  inner sequence and 3' sequence
cgtcccgtgcgctaggcagtctgcgtcacattgactagtacatgaccacttga

SEQ ID NO: 6747 - DNA, 53 bp, Artificial Sequence; identical to SEQ ID NO: 2315
  Description of Artificial Sequence: Synthetic almond;  inner sequence and 3' sequence

SEQ ID NO: 6748 - DNA, 53 bp, Artificial Sequence
  Description of Artificial Sequence: Synthetic almond;  inner sequence and 3' sequence
gcacgactcgcaacctatcatgaggccatgttgactagtacatgaccacttga

SEQ ID NO: 6749 - DNA, 53 bp, Artificial Sequence
  Description of Artificial Sequence: Synthetic almond;  inner sequence and 3' sequence
gtgcgtgctaaccgagggcctgtgctgacattgactagtacatgaccacttga

SEQ ID NO: 6750 - DNA, 53 bp, Artificial Sequence; identical to SEQ ID NO: 2349
  Description of Artificial Sequence: Synthetic almond;  inner sequence and 3' sequence

SEQ ID NO: 6751 - DNA, 53 bp, Artificial Sequence; identical to SEQ ID NO: 2576
  Description of Artificial Sequence: Synthetic almond;  inner sequence and 3' sequence

SEQ ID NO: 6752 - DNA, 53 bp, Artificial Sequence; identical to SEQ ID NO: 2881
  Description of Artificial Sequence: Synthetic almond;  inner sequence and 3' sequence

SEQ ID NO: 6753 - DNA, 50 bp, Artificial Sequence; identical to SEQ ID NO: 2885
  Description of Artificial Sequence: Synthetic almond;  inner sequence and 3' sequence

SEQ ID NO: 6754 - DNA, 53 bp, Artificial Sequence; identical to SEQ ID NO: 2555
  Description of Artificial Sequence: Synthetic almond;  inner sequence and 3' sequence

SEQ ID NO: 6755 - DNA, 53 bp, Artificial Sequence
  Description of Artificial Sequence: Synthetic almond;  inner sequence and 3' sequence
ggcggaacggacgtggacatcgtgctcatgttgactagtacatgaccacttga

SEQ ID NO: 6756 - DNA, 53 bp, Artificial Sequence
  Description of Artificial Sequence: Synthetic almond;  inner sequence and 3' sequence
gggcagcgaggagcggaaagtgtgcagggattgactagtacatgaccacttga

SEQ ID NO: 6757 - DNA, 48 bp, Artificial Sequence; identical to SEQ ID NO: 2427
  Description of Artificial Sequence: Synthetic almond;  inner sequence and 3' sequence

SEQ ID NO: 6758 - DNA, 53 bp, Artificial Sequence
  Description of Artificial Sequence: Synthetic almond;  inner sequence and 3' sequence
ggcccaggacatcgatggcatgcgttcacattgactagtacatgaccacttga

SEQ ID NO: 6759 - DNA, 53 bp, Artificial Sequence
  Description of Artificial Sequence: Synthetic almond;  inner sequence and 3' sequence
gcaagcacaggtcctgggcacgtacgcacgttgactagtacatgaccacttga

SEQ ID NO: 6760 - DNA, 53 bp, Artificial Sequence; identical to SEQ ID NO: 2395
  Description of Artificial Sequence: Synthetic almond;  inner sequence and 3' sequence

SEQ ID NO: 6761 - DNA, 53 bp, Artificial Sequence
  Description of Artificial Sequence: Synthetic almond;  inner sequence and 3' sequence
ccgtagcgacatcaagcggtggtgtgcgggttgactagtacatgaccacttga

SEQ ID NO: 6762 - DNA, 53 bp, Artificial Sequence; identical to SEQ ID NO: 2593
  Description of Artificial Sequence: Synthetic almond;  inner sequence and 3' sequence

SEQ ID NO: 6763 - DNA, 52 bp, Artificial Sequence
  Description of Artificial Sequence: Synthetic almond;  inner sequence and 3' sequence
ggacgccgatgccctcatgtggccgtggattgactagtacatgaccacttga

SEQ ID NO: 6764 - DNA, 53 bp, Artificial Sequence
  Description of Artificial Sequence: Synthetic almond;  inner sequence and 3' sequence
ccgatgcggcacgtctctgaccgatgcggattgactagtacatgaccacttga

SEQ ID NO: 6765 - DNA, 53 bp, Artificial Sequence; identical to SEQ ID NO: 2574
  Description of Artificial Sequence: Synthetic almond;  inner sequence and 3' sequence

SEQ ID NO: 6766 - DNA, 53 bp, Artificial Sequence; identical to SEQ ID NO: 2586
  Description of Artificial Sequence: Synthetic almond;  inner sequence and 3' sequence

SEQ ID NO: 6767 - DNA, 53 bp, Artificial Sequence
  Description of Artificial Sequence: Synthetic almond;  inner sequence and 3' sequence
ccgaaacgaaccgcacgcaacgcagccgcattgactagtacatgaccacttga

SEQ ID NO: 6768 - DNA, 53 bp, Artificial Sequence
  Description of Artificial Sequence: Synthetic almond;  inner sequence and 3' sequence
cgaacagaccgtgtggcctacgcatgcgcattgactagtacatgaccacttga

SEQ ID NO: 6769 - DNA, 53 bp, Artificial Sequence; identical to SEQ ID NO: 2566
  Description of Artificial Sequence: Synthetic almond;  inner sequence and 3' sequence

SEQ ID NO: 6770 - DNA, 53 bp, Artificial Sequence; identical to SEQ ID NO: 2302
  Description of Artificial Sequence: Synthetic almond;  inner sequence and 3' sequence

SEQ ID NO: 6771 - DNA, 53 bp, Artificial Sequence; identical to SEQ ID NO: 2789
  Description of Artificial Sequence: Synthetic almond;  inner sequence and 3' sequence

SEQ ID NO: 6772 - DNA, 53 bp, Artificial Sequence
  Description of Artificial Sequence: Synthetic almond;  inner sequence and 3' sequence
ggcacgacgcgttcccgccacactgccgtgttgactagtacatgaccacttga

SEQ ID NO: 6773 - DNA, 53 bp, Artificial Sequence; identical to SEQ ID NO: 2619
  Description of Artificial Sequence: Synthetic almond;  inner sequence and 3' sequence

SEQ ID NO: 6774 - DNA, 53 bp, Artificial Sequence
  Description of Artificial Sequence: Synthetic almond;  inner sequence and 3' sequence
gggatgcgatgaacgaggcatgatgcgtcattgactagtacatgaccacttga

SEQ ID NO: 6775 - DNA, 53 bp, Artificial Sequence
  Description of Artificial Sequence: Synthetic almond;  inner sequence and 3' sequence
ggcatggcgcgcaccctatcaagtacgtcattgactagtacatgaccacttga

SEQ ID NO: 6776 - DNA, 53 bp, Artificial Sequence
  Description of Artificial Sequence: Synthetic almond;  inner sequence and 3' sequence
cgcatgcacgcacctacacgtgggtatggattgactagtacatgaccacttga

SEQ ID NO: 6777 - DNA, 53 bp, Artificial Sequence
  Description of Artificial Sequence: Synthetic almond;  inner sequence and 3' sequence
gctgcaggcatacgtgtactgcgctggaccttgactagtacatgaccacttga

SEQ ID NO: 6778 - DNA, 53 bp, Artificial Sequence
  Description of Artificial Sequence: Synthetic almond;  inner sequence and 3' sequence
gtacggaacggaacaacaagggcatgcatgttgactagtacatgaccacttga

SEQ ID NO: 6779 - DNA, 53 bp, Artificial Sequence; identical to SEQ ID NO: 2388
  Description of Artificial Sequence: Synthetic almond;  inner sequence and 3' sequence

SEQ ID NO: 6780 - DNA, 53 bp, Artificial Sequence; identical to SEQ ID NO: 2943
  Description of Artificial Sequence: Synthetic almond;  inner sequence and 3' sequence

SEQ ID NO: 6781 - DNA, 53 bp, Artificial Sequence
  Description of Artificial Sequence: Synthetic almond;  inner sequence and 3' sequence
cgaaccgcaggagagcaggctgtgcgcacgttgactagtacatgaccacttga

SEQ ID NO: 6782 - DNA, 53 bp, Artificial Sequence
  Description of Artificial Sequence: Synthetic almond;  inner sequence and 3' sequence
ggccaagctgaccgtaaaggcaggcgtggattgactagtacatgaccacttga

SEQ ID NO: 6783 - DNA, 53 bp, Artificial Sequence; identical to SEQ ID NO: 2498
  Description of Artificial Sequence: Synthetic almond;  inner sequence and 3' sequence

SEQ ID NO: 6784 - DNA, 53 bp, Artificial Sequence
  Description of Artificial Sequence: Synthetic almond;  inner sequence and 3' sequence
tgccctggcaatgcgatgttcgatgcgaccttgactagtacatgaccacttga

SEQ ID NO: 6785 - DNA, 53 bp, Artificial Sequence
  Description of Artificial Sequence: Synthetic almond;  inner sequence and 3' sequence
tggactgcgtggaccgtatcgtgcggcatgttgactagtacatgaccacttga

SEQ ID NO: 6786 - DNA, 51 bp, Artificial Sequence
  Description of Artificial Sequence: Synthetic almond;  inner sequence and 3' sequence
ggcatgcacgcacctacacgtgatcatgttgactagtacatgaccacttga

SEQ ID NO: 6787 - DNA, 53 bp, Artificial Sequence
  Description of Artificial Sequence: Synthetic almond;  inner sequence and 3' sequence
gtcatgccatcccttcgcgtgtgacaggtattgactagtacatgaccacttga

SEQ ID NO: 6788 - DNA, 52 bp, Artificial Sequence; identical to SEQ ID NO: 2251
  Description of Artificial Sequence: Synthetic almond;  inner sequence and 3' sequence

SEQ ID NO: 6789 - DNA, 53 bp, Artificial Sequence; identical to SEQ ID NO: 2633
  Description of Artificial Sequence: Synthetic almond;  inner sequence and 3' sequence

SEQ ID NO: 6790 - DNA, 53 bp, Artificial Sequence
  Description of Artificial Sequence: Synthetic almond;  inner sequence and 3' sequence
cgtactgagcgcacacgtcctgccgacgcgttgactagtacatgaccacttga

SEQ ID NO: 6791 - DNA, 53 bp, Artificial Sequence; identical to SEQ ID NO: 2877
  Description of Artificial Sequence: Synthetic almond;  inner sequence and 3' sequence

SEQ ID NO: 6792 - DNA, 53 bp, Artificial Sequence
  Description of Artificial Sequence: Synthetic almond;  inner sequence and 3' sequence
cgcagatcgaggccgtaacgcgttgtgggcttgactagtacatgaccacttga

SEQ ID NO: 6793 - DNA, 53 bp, Artificial Sequence
  Description of Artificial Sequence: Synthetic almond;  inner sequence and 3' sequence
cgaacagagcgaggcatgatggacgtgggcttgactagtacatgaccacttga

SEQ ID NO: 6794 - DNA, 54 bp, Artificial Sequence; identical to SEQ ID NO: 2503
  Description of Artificial Sequence: Synthetic almond;  inner sequence and 3' sequence

SEQ ID NO: 6795 - DNA, 53 bp, Artificial Sequence; identical to SEQ ID NO: 2512
  Description of Artificial Sequence: Synthetic almond;  inner sequence and 3' sequence

SEQ ID NO: 6796 - DNA, 53 bp, Artificial Sequence
  Description of Artificial Sequence: Synthetic almond;  inner sequence and 3' sequence
cgacagggcgggcagtccattcgctgcacattgactagtacatgaccacttga

SEQ ID NO: 6797 - DNA, 53 bp, Artificial Sequence; identical to SEQ ID NO: 2210
  Description of Artificial Sequence: Synthetic almond;  inner sequence and 3' sequence

SEQ ID NO: 6798 - DNA, 53 bp, Artificial Sequence
  Description of Artificial Sequence: Synthetic almond;  inner sequence and 3' sequence
ggcctgaacgaaccgagatgtcagcgcgcgttgactagtacatgaccacttga

SEQ ID NO: 6799 - DNA, 53 bp, Artificial Sequence
  Description of Artificial Sequence: Synthetic almond;  inner sequence and 3' sequence
acatagggcgcaacgtacctatcatgtggtttgactagtacatgaccacttga

SEQ ID NO: 6800 - DNA, 53 bp, Artificial Sequence; identical to SEQ ID NO: 2580
  Description of Artificial Sequence: Synthetic almond;  inner sequence and 3' sequence

SEQ ID NO: 6801 - DNA, 53 bp, Artificial Sequence
  Description of Artificial Sequence: Synthetic almond;  inner sequence and 3' sequence
gtgctgaacgaccagtgggaacgtgctatgttgactagtacatgaccacttga

SEQ ID NO: 6802 - DNA, 53 bp, Artificial Sequence
  Description of Artificial Sequence: Synthetic almond;  inner sequence and 3' sequence
ggcatgcacgcacctacacgtgggtacgtattgactagtacatgaccacttga

SEQ ID NO: 6803 - DNA, 53 bp, Artificial Sequence
  Description of Artificial Sequence: Synthetic almond;  inner sequence and 3' sequence
ccgaacggaacgccatcgtgttgcgcatcattgactagtacatgaccacttga

SEQ ID NO: 6804 - DNA, 53 bp, Artificial Sequence
  Description of Artificial Sequence: Synthetic almond;  inner sequence and 3' sequence
ggcaccgtcaagcgggaaggcactttggtgttgactagtacatgaccacttga

SEQ ID NO: 6805 - DNA, 53 bp, Artificial Sequence
  Description of Artificial Sequence: Synthetic almond;  inner sequence and 3' sequence
tgcgcagtaggtccgcagcgcacatgcacgttgactagtacatgaccacttga

SEQ ID NO: 6806 - DNA, 53 bp, Artificial Sequence; identical to SEQ ID NO: 2813
  Description of Artificial Sequence: Synthetic almond;  inner sequence and 3' sequence

SEQ ID NO: 6807 - DNA, 53 bp, Artificial Sequence
  Description of Artificial Sequence: Synthetic almond;  inner sequence and 3' sequence
gtgcgcgtcgaaccgtatgggcatggcgtgttgactagtacatgaccacttga

SEQ ID NO: 6808 - DNA, 53 bp, Artificial Sequence
  Description of Artificial Sequence: Synthetic almond;  inner sequence and 3' sequence
aggcacagtgtcggtgggactcagcgcacattgactagtacatgaccacttga

SEQ ID NO: 6809 - DNA, 53 bp, Artificial Sequence
  Description of Artificial Sequence: Synthetic almond;  inner sequence and 3' sequence
gcacgtgcagctgtacgacgattcgccgctttgactagtacatgaccacttga

SEQ ID NO: 6810 - DNA, 53 bp, Artificial Sequence
  Description of Artificial Sequence: Synthetic almond;  inner sequence and 3' sequence
ggcatgaacgcacctacacgtgggtatggattgactagtacatgaccacttga

SEQ ID NO: 6811 - DNA, 53 bp, Artificial Sequence; identical to SEQ ID NO: 2497
  Description of Artificial Sequence: Synthetic almond;  inner sequence and 3' sequence

SEQ ID NO: 6812 - DNA, 53 bp, Artificial Sequence; identical to SEQ ID NO: 2466
  Description of Artificial Sequence: Synthetic almond;  inner sequence and 3' sequence

SEQ ID NO: 6813 - DNA, 53 bp, Artificial Sequence
  Description of Artificial Sequence: Synthetic almond;  inner sequence and 3' sequence
cacgcacgtagcgcaggacggcactcacgtttgactagtacatgaccacttga

SEQ ID NO: 6814 - DNA, 53 bp, Artificial Sequence
  Description of Artificial Sequence: Synthetic almond;  inner sequence and 3' sequence
ggccagatcgacatagcgagtgagagtgtattgactagtacatgaccacttga

SEQ ID NO: 6815 - DNA, 53 bp, Artificial Sequence; identical to SEQ ID NO: 2968
  Description of Artificial Sequence: Synthetic almond;  inner sequence and 3' sequence

SEQ ID NO: 6816 - DNA, 53 bp, Artificial Sequence
  Description of Artificial Sequence: Synthetic almond;  inner sequence and 3' sequence
ccgtctgagcggcaaggggagcagtacgtgttgactagtacatgaccacttga

SEQ ID NO: 6817 - DNA, 53 bp, Artificial Sequence
  Description of Artificial Sequence: Synthetic almond;  inner sequence and 3' sequence
cgtcacacagggcggtggtgctgcacgtcattgactagtacatgaccacttga

SEQ ID NO: 6818 - DNA, 53 bp, Artificial Sequence; identical to SEQ ID NO: 2307
  Description of Artificial Sequence: Synthetic almond;  inner sequence and 3' sequence

SEQ ID NO: 6819 - DNA, 53 bp, Artificial Sequence
  Description of Artificial Sequence: Synthetic almond;  inner sequence and 3' sequence
gcaatgcgagtgccctcacttcacgtcacgttgactagtacatgaccacttga

SEQ ID NO: 6820 - DNA, 53 bp, Artificial Sequence; identical to SEQ ID NO: 2338
  Description of Artificial Sequence: Synthetic almond;  inner sequence and 3' sequence

SEQ ID NO: 6821 - DNA, 53 bp, Artificial Sequence
  Description of Artificial Sequence: Synthetic almond;  inner sequence and 3' sequence
ggccaagcagcatggacgtgcccacggtgattgactagtacatgaccacttga

SEQ ID NO: 6822 - DNA, 53 bp, Artificial Sequence
  Description of Artificial Sequence: Synthetic almond;  inner sequence and 3' sequence
gccgacgatgacctggacgtgtggttgtcattgactagtacatgaccacttga

SEQ ID NO: 6823 - DNA, 53 bp, Artificial Sequence
  Description of Artificial Sequence: Synthetic almond;  inner sequence and 3' sequence
gcattcgaggccatagcgagtggtagtggattgactagtacatgaccacttga

SEQ ID NO: 6824 - DNA, 53 bp, Artificial Sequence; identical to SEQ ID NO: 2914
  Description of Artificial Sequence: Synthetic almond;  inner sequence and 3' sequence

SEQ ID NO: 6825 - DNA, 53 bp, Artificial Sequence; identical to SEQ ID NO: 2898
  Description of Artificial Sequence: Synthetic almond;  inner sequence and 3' sequence

SEQ ID NO: 6826 - DNA, 53 bp, Artificial Sequence; identical to SEQ ID NO: 2935
  Description of Artificial Sequence: Synthetic almond;  inner sequence and 3' sequence

SEQ ID NO: 6827 - DNA, 53 bp, Artificial Sequence; identical to SEQ ID NO: 2717
  Description of Artificial Sequence: Synthetic almond;  inner sequence and 3' sequence

SEQ ID NO: 6828 - DNA, 53 bp, Artificial Sequence
  Description of Artificial Sequence: Synthetic almond;  inner sequence and 3' sequence
cgaaccgacgggatcgcgtgcaccagtccattgactagtacatgaccacttga

SEQ ID NO: 6829 - DNA, 53 bp, Artificial Sequence
  Description of Artificial Sequence: Synthetic almond;  inner sequence and 3' sequence
gcacataggacgaccttcaagcgtggcacgttgactagtacatgaccacttga

SEQ ID NO: 6830 - DNA, 53 bp, Artificial Sequence
  Description of Artificial Sequence: Synthetic almond;  inner sequence and 3' sequence
ggccaagctgaccgtaaaggcatgcgtgtattgactagtacatgaccacttga

SEQ ID NO: 6831 - DNA, 53 bp, Artificial Sequence
  Description of Artificial Sequence: Synthetic almond;  inner sequence and 3' sequence
gcgtcaggcatcatggctcgccgatgcacgttgactagtacatgaccacttga

SEQ ID NO: 6832 - DNA, 53 bp, Artificial Sequence; identical to SEQ ID NO: 2840
  Description of Artificial Sequence: Synthetic almond;  inner sequence and 3' sequence

SEQ ID NO: 6833 - DNA, 53 bp, Artificial Sequence
  Description of Artificial Sequence: Synthetic almond;  inner sequence and 3' sequence
cgacacgaacaggctcaacgtcgtcacggtttgactagtacatgaccacttga

SEQ ID NO: 6834 - DNA, 53 bp, Artificial Sequence
  Description of Artificial Sequence: Synthetic almond;  inner sequence and 3' sequence
gccatgcacgcacctacacgtgggtatggattgactagtacatgaccacttga

SEQ ID NO: 6835 - DNA, 53 bp, Artificial Sequence
  Description of Artificial Sequence: Synthetic almond;  inner sequence and 3' sequence
tcgatgacgatgagcgtggacgttgccgtattgactagtacatgaccacttga

SEQ ID NO: 6836 - DNA, 53 bp, Artificial Sequence
  Description of Artificial Sequence: Synthetic almond;  inner sequence and 3' sequence
cgcaccgtgagcatagggtatcgctgcctattgactagtacatgaccacttga

SEQ ID NO: 6837 - DNA, 53 bp, Artificial Sequence
  Description of Artificial Sequence: Synthetic almond;  inner sequence and 3' sequence
gcacgactcgcaccctatcattaggccatgttgactagtacatgaccacttga

SEQ ID NO: 6838 - DNA, 53 bp, Artificial Sequence; identical to SEQ ID NO: 2445
  Description of Artificial Sequence: Synthetic almond;  inner sequence and 3' sequence

SEQ ID NO: 6839 - DNA, 53 bp, Artificial Sequence; identical to SEQ ID NO: 2494
  Description of Artificial Sequence: Synthetic almond;  inner sequence and 3' sequence

SEQ ID NO: 6840 - DNA, 53 bp, Artificial Sequence; identical to SEQ ID NO: 2867
  Description of Artificial Sequence: Synthetic almond;  inner sequence and 3' sequence

SEQ ID NO: 6841 - DNA, 53 bp, Artificial Sequence; identical to SEQ ID NO: 2542
  Description of Artificial Sequence: Synthetic almond;  inner sequence and 3' sequence

SEQ ID NO: 6842 - DNA, 53 bp, Artificial Sequence; identical to SEQ ID NO: 2594
  Description of Artificial Sequence: Synthetic almond;  inner sequence and 3' sequence

SEQ ID NO: 6843 - DNA, 53 bp, Artificial Sequence; identical to SEQ ID NO: 2720
  Description of Artificial Sequence: Synthetic almond;  inner sequence and 3' sequence

SEQ ID NO: 6844 - DNA, 53 bp, Artificial Sequence
  Description of Artificial Sequence: Synthetic almond;  inner sequence and 3' sequence
gcgtgagcagaagtggccgacactgcacgattgactagtacatgaccacttga

SEQ ID NO: 6845 - DNA, 53 bp, Artificial Sequence
  Description of Artificial Sequence: Synthetic almond;  inner sequence and 3' sequence
gtcatgcacgaacactatcatgccggcatgttgactagtacatgaccacttga

SEQ ID NO: 6846 - DNA, 53 bp, Artificial Sequence; identical to SEQ ID NO: 2678
  Description of Artificial Sequence: Synthetic almond;  inner sequence and 3' sequence

SEQ ID NO: 6847 - DNA, 53 bp, Artificial Sequence; identical to SEQ ID NO: 2614
  Description of Artificial Sequence: Synthetic almond;  inner sequence and 3' sequence

SEQ ID NO: 6848 - DNA, 53 bp, Artificial Sequence
  Description of Artificial Sequence: Synthetic almond;  inner sequence and 3' sequence
catgctcgacccggcacgctgctgcgcacgttgactagtacatgaccacttga

SEQ ID NO: 6849 - DNA, 53 bp, Artificial Sequence
  Description of Artificial Sequence: Synthetic almond;  inner sequence and 3' sequence
cgaaccgcagtgatgcatctcgcaggcacattgactagtacatgaccacttga

SEQ ID NO: 6850 - DNA, 53 bp, Artificial Sequence; identical to SEQ ID NO: 2472
  Description of Artificial Sequence: Synthetic almond;  inner sequence and 3' sequence

SEQ ID NO: 6851 - DNA, 53 bp, Artificial Sequence; identical to SEQ ID NO: 2685
  Description of Artificial Sequence: Synthetic almond;  inner sequence and 3' sequence

SEQ ID NO: 6852 - DNA, 53 bp, Artificial Sequence
  Description of Artificial Sequence: Synthetic almond;  inner sequence and 3' sequence
ggtgccagcatacgaccgacacgatgcacattgactagtacatgaccacttga

SEQ ID NO: 6853 - DNA, 53 bp, Artificial Sequence
  Description of Artificial Sequence: Synthetic almond;  inner sequence and 3' sequence
ggcatgcgcagaactatcaggtgtggcaggttgactagtacatgaccacttga

SEQ ID NO: 6854 - DNA, 53 bp, Artificial Sequence
  Description of Artificial Sequence: Synthetic almond;  inner sequence and 3' sequence
ggcatgcgatgaacgaggcatgatgcgccattgactagtacatgaccacttga

SEQ ID NO: 6855 - DNA, 53 bp, Artificial Sequence; identical to SEQ ID NO: 2793
  Description of Artificial Sequence: Synthetic almond;  inner sequence and 3' sequence

SEQ ID NO: 6856 - DNA, 53 bp, Artificial Sequence
  Description of Artificial Sequence: Synthetic almond;  inner sequence and 3' sequence
ggcacggaacgaagcctatcaagtgcgacattgactagtacatgaccacttga

SEQ ID NO: 6857 - DNA, 53 bp, Artificial Sequence
  Description of Artificial Sequence: Synthetic almond;  inner sequence and 3' sequence
ggcatgcacgcacctacacgtgggtatgtattgactagtacatgaccacttga

SEQ ID NO: 6858 - DNA, 54 bp, Artificial Sequence
  Description of Artificial Sequence: Synthetic almond;  inner sequence and 3' sequence
tggccgaagcgcacctacacgtgggcacgtattgactagtacatgaccacttga

SEQ ID NO: 6859 - DNA, 53 bp, Artificial Sequence
  Description of Artificial Sequence: Synthetic almond;  inner sequence and 3' sequence
ggccaagcggactgtgagtgcgtcggtgccttgactagtacatgaccacttga

SEQ ID NO: 6860 - DNA, 53 bp, Artificial Sequence
  Description of Artificial Sequence: Synthetic almond;  inner sequence and 3' sequence
ggcgtgaccgaacctcaagctggacatggattgactagtacatgaccacttga

SEQ ID NO: 6861 - DNA, 53 bp, Artificial Sequence
  Description of Artificial Sequence: Synthetic almond;  inner sequence and 3' sequence
ggacggaacgtactgccaggtgagcatgcattgactagtacatgaccacttga

SEQ ID NO: 6862 - DNA, 53 bp, Artificial Sequence
  Description of Artificial Sequence: Synthetic almond;  inner sequence and 3' sequence
acacgcagggtgtcgtccgtatgtgcacgattgactagtacatgaccacttga

SEQ ID NO: 6863 - DNA, 53 bp, Artificial Sequence
  Description of Artificial Sequence: Synthetic almond;  inner sequence and 3' sequence
gcgcatagcaacaacaccattcgcgtcccgttgactagtacatgaccacttga

SEQ ID NO: 6864 - DNA, 53 bp, Artificial Sequence
  Description of Artificial Sequence: Synthetic almond;  inner sequence and 3' sequence
ggccaagctgacctatcaacgtgtcgtggattgactagtacatgaccacttga

SEQ ID NO: 6865 - DNA, 53 bp, Artificial Sequence; identical to SEQ ID NO: 2621
  Description of Artificial Sequence: Synthetic almond;  inner sequence and 3' sequence

SEQ ID NO: 6866 - DNA, 53 bp, Artificial Sequence; identical to SEQ ID NO: 2363
  Description of Artificial Sequence: Synthetic almond;  inner sequence and 3' sequence

SEQ ID NO: 6867 - DNA, 53 bp, Artificial Sequence
  Description of Artificial Sequence: Synthetic almond;  inner sequence and 3' sequence
gtcatgcacgaacactatcatggcgtcatgttgactagtacatgaccacttga

SEQ ID NO: 6868 - DNA, 53 bp, Artificial Sequence
  Description of Artificial Sequence: Synthetic almond;  inner sequence and 3' sequence
cggaacggatcgtaggcagtcacgtggacattgactagtacatgaccacttga

SEQ ID NO: 6869 - DNA, 52 bp, Artificial Sequence
  Description of Artificial Sequence: Synthetic almond;  inner sequence and 3' sequence
gtgcaaacggaccgacaagtgcgcatggattgactagtacatgaccacttga

SEQ ID NO: 6870 - DNA, 53 bp, Artificial Sequence
  Description of Artificial Sequence: Synthetic almond;  inner sequence and 3' sequence
ccgcacgacctcgtgggctgcacttcgacattgactagtacatgaccacttga

SEQ ID NO: 6871 - DNA, 53 bp, Artificial Sequence
  Description of Artificial Sequence: Synthetic almond;  inner sequence and 3' sequence
cgcgtgacgataaggtgtgatgcgctccgtttgactagtacatgaccacttga

SEQ ID NO: 6872 - DNA, 53 bp, Artificial Sequence
  Description of Artificial Sequence: Synthetic almond;  inner sequence and 3' sequence
ggcatgcacgcacctacacgggggtatggattgactagtacatgaccacttga

SEQ ID NO: 6873 - DNA, 53 bp, Artificial Sequence
  Description of Artificial Sequence: Synthetic almond;  inner sequence and 3' sequence
cgaccgacgaacaatggtgcatggttgcgtttgactagtacatgaccacttga

SEQ ID NO: 6874 - DNA, 53 bp, Artificial Sequence
  Description of Artificial Sequence: Synthetic almond;  inner sequence and 3' sequence
gtcatgcgatgagctcaagttggccttgtattgactagtacatgaccacttga

SEQ ID NO: 6875 - DNA, 53 bp, Artificial Sequence
  Description of Artificial Sequence: Synthetic almond;  inner sequence and 3' sequence
acacgcacagtgtgatgtgcctctcgtccattgactagtacatgaccacttga

SEQ ID NO: 6876 - DNA, 52 bp, Artificial Sequence; identical to SEQ ID NO: 2453
  Description of Artificial Sequence: Synthetic almond;  inner sequence and 3' sequence

SEQ ID NO: 6877 - DNA, 53 bp, Artificial Sequence; identical to SEQ ID NO: 2921
  Description of Artificial Sequence: Synthetic almond;  inner sequence and 3' sequence

SEQ ID NO: 6878 - DNA, 53 bp, Artificial Sequence
  Description of Artificial Sequence: Synthetic almond;  inner sequence and 3' sequence
gtgactgaacgacgtgaccaagcggcatggttgactagtacatgaccacttga

SEQ ID NO: 6879 - DNA, 53 bp, Artificial Sequence
  Description of Artificial Sequence: Synthetic almond;  inner sequence and 3' sequence
gcgtcagcagcagcacggacgaactgcatattgactagtacatgaccacttga

SEQ ID NO: 6880 - DNA, 53 bp, Artificial Sequence
  Description of Artificial Sequence: Synthetic almond;  inner sequence and 3' sequence
cacgaacggaccggtaagcatggccatggattgactagtacatgaccacttga

SEQ ID NO: 6881 - DNA, 53 bp, Artificial Sequence
  Description of Artificial Sequence: Synthetic almond;  inner sequence and 3' sequence
gtcatgcgcggacattcaagttgtcgtggattgactagtacatgaccacttga

SEQ ID NO: 6882 - DNA, 53 bp, Artificial Sequence
  Description of Artificial Sequence: Synthetic almond;  inner sequence and 3' sequence
ggcatgcgatgaacgaggcatgctgcgtcattgactagtacatgaccacttga

SEQ ID NO: 6883 - DNA, 53 bp, Artificial Sequence
  Description of Artificial Sequence: Synthetic almond;  inner sequence and 3' sequence
cgcaccgtcaagcgggacggcactttggtgttgactagtacatgaccacttga

SEQ ID NO: 6884 - DNA, 53 bp, Artificial Sequence
  Description of Artificial Sequence: Synthetic almond;  inner sequence and 3' sequence
gtcgtgagctggaaggagagtgggtacgtattgactagtacatgaccacttga

SEQ ID NO: 6885 - DNA, 53 bp, Artificial Sequence; identical to SEQ ID NO: 2983
  Description of Artificial Sequence: Synthetic almond;  inner sequence and 3' sequence

SEQ ID NO: 6886 - DNA, 53 bp, Artificial Sequence
  Description of Artificial Sequence: Synthetic almond;  inner sequence and 3' sequence
ggccgtaacgcaccaggatgcactgtgtcattgactagtacatgaccacttga

SEQ ID NO: 6887 - DNA, 53 bp, Artificial Sequence
  Description of Artificial Sequence: Synthetic almond;  inner sequence and 3' sequence
tggccgatcgaccctatcgagtgcagcatgttgactagtacatgaccacttga

SEQ ID NO: 6888 - DNA, 53 bp, Artificial Sequence
  Description of Artificial Sequence: Synthetic almond;  inner sequence and 3' sequence
ggcatgcacgcacctacacgtgggtacggattgactagtacatgaccacttga

SEQ ID NO: 6889 - DNA, 53 bp, Artificial Sequence
  Description of Artificial Sequence: Synthetic almond;  inner sequence and 3' sequence
ggccacacgctgccctaaagtgttcgtgtattgactagtacatgaccacttga

SEQ ID NO: 6890 - DNA, 53 bp, Artificial Sequence
  Description of Artificial Sequence: Synthetic almond;  inner sequence and 3' sequence
gcacgactcgaaccctatcatgaggccatgttgactagtacatgaccacttga

SEQ ID NO: 6891 - DNA, 53 bp, Artificial Sequence; identical to SEQ ID NO: 2734
  Description of Artificial Sequence: Synthetic almond;  inner sequence and 3' sequence

SEQ ID NO: 6892 - DNA, 53 bp, Artificial Sequence; identical to SEQ ID NO: 2837
  Description of Artificial Sequence: Synthetic almond;  inner sequence and 3' sequence

SEQ ID NO: 6893 - DNA, 53 bp, Artificial Sequence
  Description of Artificial Sequence: Synthetic almond;  inner sequence and 3' sequence
ccgtagcgacatcaagcggcggcgtgcgtgttgactagtacatgaccacttga

SEQ ID NO: 6894 - DNA, 53 bp, Artificial Sequence
  Description of Artificial Sequence: Synthetic almond;  inner sequence and 3' sequence
cgaccgtacggaaggggagtggccgtcacgttgactagtacatgaccacttga

SEQ ID NO: 6895 - DNA, 53 bp, Artificial Sequence; identical to SEQ ID NO: 2984
  Description of Artificial Sequence: Synthetic almond;  inner sequence and 3' sequence

SEQ ID NO: 6896 - DNA, 53 bp, Artificial Sequence; identical to SEQ ID NO: 2421
  Description of Artificial Sequence: Synthetic almond;  inner sequence and 3' sequence

SEQ ID NO: 6897 - DNA, 53 bp, Artificial Sequence; identical to SEQ ID NO: 2910
  Description of Artificial Sequence: Synthetic almond;  inner sequence and 3' sequence

SEQ ID NO: 6898 - DNA, 53 bp, Artificial Sequence
  Description of Artificial Sequence: Synthetic almond;  inner sequence and 3' sequence
ccgtagcgacatcaagtggtggtgtgcgtgttgactagtacatgaccacttga

SEQ ID NO: 6899 - DNA, 53 bp, Artificial Sequence; identical to SEQ ID NO: 2474
  Description of Artificial Sequence: Synthetic almond;  inner sequence and 3' sequence

SEQ ID NO: 6900 - DNA, 53 bp, Artificial Sequence; identical to SEQ ID NO: 2702
  Description of Artificial Sequence: Synthetic almond;  inner sequence and 3' sequence

SEQ ID NO: 6901 - DNA, 53 bp, Artificial Sequence
  Description of Artificial Sequence: Synthetic almond;  inner sequence and 3' sequence
ccatcagtggacgcgtaactgacatgggcattgactagtacatgaccacttga

SEQ ID NO: 6902 - DNA, 53 bp, Artificial Sequence; identical to SEQ ID NO: 2452
  Description of Artificial Sequence: Synthetic almond;  inner sequence and 3' sequence

SEQ ID NO: 6903 - DNA, 53 bp, Artificial Sequence; identical to SEQ ID NO: 2917
  Description of Artificial Sequence: Synthetic almond;  inner sequence and 3' sequence

SEQ ID NO: 6904 - DNA, 53 bp, Artificial Sequence
  Description of Artificial Sequence: Synthetic almond;  inner sequence and 3' sequence
cgacccgactaagcgtggtgcacactgtgtttgactagtacatgaccacttga

SEQ ID NO: 6905 - DNA, 53 bp, Artificial Sequence
  Description of Artificial Sequence: Synthetic almond;  inner sequence and 3' sequence
ggacgcgacgtccctgagagtgtgcaggtattgactagtacatgaccacttga

SEQ ID NO: 6906 - DNA, 53 bp, Artificial Sequence
  Description of Artificial Sequence: Synthetic almond;  inner sequence and 3' sequence
cgatcgcagtgagagccgtccgtagccacgttgactagtacatgaccacttga

SEQ ID NO: 6907 - DNA, 53 bp, Artificial Sequence
  Description of Artificial Sequence: Synthetic almond;  inner sequence and 3' sequence
catgtccgtgcgttcccgttgagcgcgtcattgactagtacatgaccacttga

SEQ ID NO: 6908 - DNA, 53 bp, Artificial Sequence; identical to SEQ ID NO: 2960
  Description of Artificial Sequence: Synthetic almond;  inner sequence and 3' sequence

SEQ ID NO: 6909 - DNA, 53 bp, Artificial Sequence
  Description of Artificial Sequence: Synthetic almond;  inner sequence and 3' sequence
acatggcagtagcgcgcactaggtaggacattgactagtacatgaccacttga

SEQ ID NO: 6910 - DNA, 53 bp, Artificial Sequence
  Description of Artificial Sequence: Synthetic almond;  inner sequence and 3' sequence
tggaccaagctgaacgtcaagcgcgccatgttgactagtacatgaccacttga

SEQ ID NO: 6911 - DNA, 53 bp, Artificial Sequence
  Description of Artificial Sequence: Synthetic almond;  inner sequence and 3' sequence
ggacgcagcggaacgttcgagtggcacgtattgactagtacatgaccacttga

SEQ ID NO: 6912 - DNA, 53 bp, Artificial Sequence
  Description of Artificial Sequence: Synthetic almond;  inner sequence and 3' sequence
acgtgacagccatgggtagcgcacggcacattgactagtacatgaccacttga

SEQ ID NO: 6913 - DNA, 53 bp, Artificial Sequence
  Description of Artificial Sequence: Synthetic almond;  inner sequence and 3' sequence
gtactgcgccatcccgtcatcatgtggacattgactagtacatgaccacttga

SEQ ID NO: 6914 - DNA, 53 bp, Artificial Sequence; identical to SEQ ID NO: 2973
  Description of Artificial Sequence: Synthetic almond;  inner sequence and 3' sequence

SEQ ID NO: 6915 - DNA, 53 bp, Artificial Sequence
  Description of Artificial Sequence: Synthetic almond;  inner sequence and 3' sequence
agacgcaacgaaccgtatgcaacgtgcacattgactagtacatgaccacttga

SEQ ID NO: 6916 - DNA, 53 bp, Artificial Sequence
  Description of Artificial Sequence: Synthetic almond;  inner sequence and 3' sequence
ggcacaaacggaccgacaagagcgcatggattgactagtacatgaccacttga

SEQ ID NO: 6917 - DNA, 53 bp, Artificial Sequence; identical to SEQ ID NO: 2824
  Description of Artificial Sequence: Synthetic almond;  inner sequence and 3' sequence

SEQ ID NO: 6918 - DNA, 53 bp, Artificial Sequence
  Description of Artificial Sequence: Synthetic almond;  inner sequence and 3' sequence
gcacgactcgtaccctatcatgaggccatgttgactagtacatgaccacttga

SEQ ID NO: 6919 - DNA, 53 bp, Artificial Sequence
  Description of Artificial Sequence: Synthetic almond;  inner sequence and 3' sequence
cacggcaaggacgatcaggtgggactgcgtttgactagtacatgaccacttga

SEQ ID NO: 6920 - DNA, 53 bp, Artificial Sequence; identical to SEQ ID NO: 2792
  Description of Artificial Sequence: Synthetic almond;  inner sequence and 3' sequence

SEQ ID NO: 6921 - DNA, 53 bp, Artificial Sequence
  Description of Artificial Sequence: Synthetic almond;  inner sequence and 3' sequence
ggcacaaacggaccgacaagtgcgcattgattgactagtacatgaccacttga

SEQ ID NO: 6922 - DNA, 53 bp, Artificial Sequence
  Description of Artificial Sequence: Synthetic almond;  inner sequence and 3' sequence
cacgcgcagggaaggcaacctgtggctgcattgactagtacatgaccacttga

SEQ ID NO: 6923 - DNA, 53 bp, Artificial Sequence; identical to SEQ ID NO: 2295
  Description of Artificial Sequence: Synthetic almond;  inner sequence and 3' sequence

SEQ ID NO: 6924 - DNA, 53 bp, Artificial Sequence
  Description of Artificial Sequence: Synthetic almond;  inner sequence and 3' sequence
ggcatgcgatgaacgaggcatgatgcgttattgactagtacatgaccacttga

SEQ ID NO: 6925 - DNA, 53 bp, Artificial Sequence
  Description of Artificial Sequence: Synthetic almond;  inner sequence and 3' sequence
ggcatgatcgaacgggagagtgcgtcggtattgactagtacatgaccacttga

SEQ ID NO: 6926 - DNA, 53 bp, Artificial Sequence
  Description of Artificial Sequence: Synthetic almond;  inner sequence and 3' sequence
ccgcgaggaacagcaggcctacgcggcacgttgactagtacatgaccacttga

SEQ ID NO: 6927 - DNA, 53 bp, Artificial Sequence
  Description of Artificial Sequence: Synthetic almond;  inner sequence and 3' sequence
cgaccgaacgcagcaatacgtgcgccacgtttgactagtacatgaccacttga

SEQ ID NO: 6928 - DNA, 53 bp, Artificial Sequence; identical to SEQ ID NO: 2589
  Description of Artificial Sequence: Synthetic almond;  inner sequence and 3' sequence

SEQ ID NO: 6929 - DNA, 53 bp, Artificial Sequence; identical to SEQ ID NO: 2829
  Description of Artificial Sequence: Synthetic almond;  inner sequence and 3' sequence

SEQ ID NO: 6930 - DNA, 53 bp, Artificial Sequence
  Description of Artificial Sequence: Synthetic almond;  inner sequence and 3' sequence
gagttggcgaaccgagatgacgtggccatgttgactagtacatgaccacttga

SEQ ID NO: 6931 - DNA, 53 bp, Artificial Sequence
  Description of Artificial Sequence: Synthetic almond;  inner sequence and 3' sequence
gcacgtcacgcacaagcaggccatgtggcattgactagtacatgaccacttga

SEQ ID NO: 6932 - DNA, 53 bp, Artificial Sequence; identical to SEQ ID NO: 2488
  Description of Artificial Sequence: Synthetic almond;  inner sequence and 3' sequence

SEQ ID NO: 6933 - DNA, 53 bp, Artificial Sequence
  Description of Artificial Sequence: Synthetic almond;  inner sequence and 3' sequence
gcccgactcgcaccctatcatgaggccatgttgactagtacatgaccacttga

SEQ ID NO: 6934 - DNA, 53 bp, Artificial Sequence; identical to SEQ ID NO: 2646
  Description of Artificial Sequence: Synthetic almond;  inner sequence and 3' sequence

SEQ ID NO: 6935 - DNA, 53 bp, Artificial Sequence
  Description of Artificial Sequence: Synthetic almond;  inner sequence and 3' sequence
gtacgtgcgacatccctcaagtgcggtgtattgactagtacatgaccacttga

SEQ ID NO: 6936 - DNA, 53 bp, Artificial Sequence; identical to SEQ ID NO: 2265
  Description of Artificial Sequence: Synthetic almond;  inner sequence and 3' sequence

SEQ ID NO: 6937 - DNA, 53 bp, Artificial Sequence
  Description of Artificial Sequence: Synthetic almond;  inner sequence and 3' sequence
catgtgacgacgatgcccacgcgctggacattgactagtacatgaccacttga

SEQ ID NO: 6938 - DNA, 53 bp, Artificial Sequence
  Description of Artificial Sequence: Synthetic almond;  inner sequence and 3' sequence
gccattccgcatcctacacgtgggcacgtattgactagtacatgaccacttga

SEQ ID NO: 6939 - DNA, 53 bp, Artificial Sequence
  Description of Artificial Sequence: Synthetic almond;  inner sequence and 3' sequence
ggccacgctcgtaccggtcagtgcggcatgttgactagtacatgaccacttga

SEQ ID NO: 6940 - DNA, 53 bp, Artificial Sequence
  Description of Artificial Sequence: Synthetic almond;  inner sequence and 3' sequence
ggcatgcgatgaacgcggcatgatgcgtcattgactagtacatgaccacttga

SEQ ID NO: 6941 - DNA, 53 bp, Artificial Sequence
  Description of Artificial Sequence: Synthetic almond;  inner sequence and 3' sequence
gcgatgcgacagagatccgtcacgccccgtttgactagtacatgaccacttga

SEQ ID NO: 6942 - DNA, 53 bp, Artificial Sequence
  Description of Artificial Sequence: Synthetic almond;  inner sequence and 3' sequence
cacggcaggaagcggacggcactcggcacgttgactagtacatgaccacttga

SEQ ID NO: 6943 - DNA, 53 bp, Artificial Sequence
  Description of Artificial Sequence: Synthetic almond;  inner sequence and 3' sequence
ccacgactcgcaccctatcatgaggccatgttgactagtacatgaccacttga

SEQ ID NO: 6944 - DNA, 53 bp, Artificial Sequence
  Description of Artificial Sequence: Synthetic almond;  inner sequence and 3' sequence
tgcgtgcatacgtatggcattctcggcgcattgactagtacatgaccacttga

SEQ ID NO: 6945 - DNA, 53 bp, Artificial Sequence
  Description of Artificial Sequence: Synthetic almond;  inner sequence and 3' sequence
ggccaacgatgcccaaccaagtgcggtatgttgactagtacatgaccacttga

SEQ ID NO: 6946 - DNA, 53 bp, Artificial Sequence
  Description of Artificial Sequence: Synthetic almond;  inner sequence and 3' sequence
ccgtaacgacatcaagcggtggtgtgcgtgttgactagtacatgaccacttga

SEQ ID NO: 6947 - DNA, 53 bp, Artificial Sequence
  Description of Artificial Sequence: Synthetic almond;  inner sequence and 3' sequence
tcgatggcggcacgaggactgctctgcacgttgactagtacatgaccacttga

SEQ ID NO: 6948 - DNA, 53 bp, Artificial Sequence
  Description of Artificial Sequence: Synthetic almond;  inner sequence and 3' sequence
cgcaccgtcgatacgtcatgcacgctgccattgactagtacatgaccacttga

SEQ ID NO: 6949 - DNA, 53 bp, Artificial Sequence
  Description of Artificial Sequence: Synthetic almond;  inner sequence and 3' sequence
gcgatgagcatcggacgtacggtgtgtgtcttgactagtacatgaccacttga

SEQ ID NO: 6950 - DNA, 53 bp, Artificial Sequence; identical to SEQ ID NO: 2554
  Description of Artificial Sequence: Synthetic almond;  inner sequence and 3' sequence

SEQ ID NO: 6951 - DNA, 53 bp, Artificial Sequence
  Description of Artificial Sequence: Synthetic almond;  inner sequence and 3' sequence
ccacgggtgcagcaggacgtactctgcacgttgactagtacatgaccacttga

SEQ ID NO: 6952 - DNA, 53 bp, Artificial Sequence; identical to SEQ ID NO: 2835
  Description of Artificial Sequence: Synthetic almond;  inner sequence and 3' sequence

SEQ ID NO: 6953 - DNA, 53 bp, Artificial Sequence
  Description of Artificial Sequence: Synthetic almond;  inner sequence and 3' sequence
ccgcacgaagcccaaccgtcaatggccatgttgactagtacatgaccacttga

SEQ ID NO: 6954 - DNA, 53 bp, Artificial Sequence
  Description of Artificial Sequence: Synthetic almond;  inner sequence and 3' sequence
ggcacagcatcgtacgtactggttgccgtattgactagtacatgaccacttga

SEQ ID NO: 6955 - DNA, 53 bp, Artificial Sequence
  Description of Artificial Sequence: Synthetic almond;  inner sequence and 3' sequence
catgacggtgacggcacatgcgacgcgacattgactagtacatgaccacttga

SEQ ID NO: 6956 - DNA, 53 bp, Artificial Sequence
  Description of Artificial Sequence: Synthetic almond;  inner sequence and 3' sequence
catgtgcccgatacgaacgacatgtgtgcattgactagtacatgaccacttga

SEQ ID NO: 6957 - DNA, 53 bp, Artificial Sequence; identical to SEQ ID NO: 2874
  Description of Artificial Sequence: Synthetic almond;  inner sequence and 3' sequence

SEQ ID NO: 6958 - DNA, 53 bp, Artificial Sequence
  Description of Artificial Sequence: Synthetic almond;  inner sequence and 3' sequence
catgcgatgacccgtagatcacgtggcgtgttgactagtacatgaccacttga

SEQ ID NO: 6959 - DNA, 53 bp, Artificial Sequence
  Description of Artificial Sequence: Synthetic almond;  inner sequence and 3' sequence
catgtgcataggaccgcaacgagacgtgcattgactagtacatgaccacttga

SEQ ID NO: 6960 - DNA, 53 bp, Artificial Sequence
  Description of Artificial Sequence: Synthetic almond;  inner sequence and 3' sequence
gtacgcatcgtcccgtcatgtggttccgcattgactagtacatgaccacttga

SEQ ID NO: 6961 - DNA, 53 bp, Artificial Sequence
  Description of Artificial Sequence: Synthetic almond;  inner sequence and 3' sequence
cgtgacggcgagagcacaacggcatgacgtttgactagtacatgaccacttga

SEQ ID NO: 6962 - DNA, 53 bp, Artificial Sequence
  Description of Artificial Sequence: Synthetic almond;  inner sequence and 3' sequence
cctgatgcggcacgtcctcgtgatcatgcattgactagtacatgaccacttga

SEQ ID NO: 6963 - DNA, 53 bp, Artificial Sequence
  Description of Artificial Sequence: Synthetic almond;  inner sequence and 3' sequence
cgaccggcggagaacggtgtggcatgcgtgttgactagtacatgaccacttga

SEQ ID NO: 6964 - DNA, 53 bp, Artificial Sequence; identical to SEQ ID NO: 2902
  Description of Artificial Sequence: Synthetic almond;  inner sequence and 3' sequence

SEQ ID NO: 6965 - DNA, 53 bp, Artificial Sequence; identical to SEQ ID NO: 2339
  Description of Artificial Sequence: Synthetic almond;  inner sequence and 3' sequence

SEQ ID NO: 6966 - DNA, 53 bp, Artificial Sequence
  Description of Artificial Sequence: Synthetic almond;  inner sequence and 3' sequence
ggccgaacggacctggcttgcttatgcgcgttgactagtacatgaccacttga

SEQ ID NO: 6967 - DNA, 53 bp, Artificial Sequence
  Description of Artificial Sequence: Synthetic almond;  inner sequence and 3' sequence
tggccgatcgacactatcaagtgcagcatgttgactagtacatgaccacttga

SEQ ID NO: 6968 - DNA, 52 bp, Artificial Sequence
  Description of Artificial Sequence: Synthetic almond;  inner sequence and 3' sequence
gtacgccgatgccctcatgtggccgtggattgactagtacatgaccacttga

SEQ ID NO: 6969 - DNA, 53 bp, Artificial Sequence
  Description of Artificial Sequence: Synthetic almond;  inner sequence and 3' sequence
ggcatggtctgaccgtgagtgcgtcgggtattgactagtacatgaccacttga

SEQ ID NO: 6970 - DNA, 53 bp, Artificial Sequence; identical to SEQ ID NO: 2384
  Description of Artificial Sequence: Synthetic almond;  inner sequence and 3' sequence

SEQ ID NO: 6971 - DNA, 53 bp, Artificial Sequence
  Description of Artificial Sequence: Synthetic almond;  inner sequence and 3' sequence
cgtgccgcaaagcaaggtcagcacggtccgttgactagtacatgaccacttga

SEQ ID NO: 6972 - DNA, 53 bp, Artificial Sequence; identical to SEQ ID NO: 2644
  Description of Artificial Sequence: Synthetic almond;  inner sequence and 3' sequence

SEQ ID NO: 6973 - DNA, 53 bp, Artificial Sequence; identical to SEQ ID NO: 2699
  Description of Artificial Sequence: Synthetic almond;  inner sequence and 3' sequence

SEQ ID NO: 6974 - DNA, 53 bp, Artificial Sequence; identical to SEQ ID NO: 2825
  Description of Artificial Sequence: Synthetic almond;  inner sequence and 3' sequence

SEQ ID NO: 6975 - DNA, 53 bp, Artificial Sequence
  Description of Artificial Sequence: Synthetic almond;  inner sequence and 3' sequence
cgtatggcctggatgcacgactttgcgtcattgactagtacatgaccacttga

SEQ ID NO: 6976 - DNA, 53 bp, Artificial Sequence
  Description of Artificial Sequence: Synthetic almond;  inner sequence and 3' sequence
cgcgacggaagtggagatgcagtgtgcacattgactagtacatgaccacttga

SEQ ID NO: 6977 - DNA, 53 bp, Artificial Sequence
  Description of Artificial Sequence: Synthetic almond;  inner sequence and 3' sequence
ggcacaaacggaccgacaagggcgcatggattgactagtacatgaccacttga

SEQ ID NO: 6978 - DNA, 53 bp, Artificial Sequence
  Description of Artificial Sequence: Synthetic almond;  inner sequence and 3' sequence
ccatcgtgacggacgagtcggaccttgccattgactagtacatgaccacttga

SEQ ID NO: 6979 - DNA, 53 bp, Artificial Sequence
  Description of Artificial Sequence: Synthetic almond;  inner sequence and 3' sequence
cgacaccgtcaagtgcagtgtgcgatggcgttgactagtacatgaccacttga

SEQ ID NO: 6980 - DNA, 53 bp, Artificial Sequence; identical to SEQ ID NO: 2410
  Description of Artificial Sequence: Synthetic almond;  inner sequence and 3' sequence

SEQ ID NO: 6981 - DNA, 53 bp, Artificial Sequence
  Description of Artificial Sequence: Synthetic almond;  inner sequence and 3' sequence
gcccacctcgaccctatcaacgtgctcatgttgactagtacatgaccacttga

SEQ ID NO: 6982 - DNA, 53 bp, Artificial Sequence
  Description of Artificial Sequence: Synthetic almond;  inner sequence and 3' sequence
ggccgagcgaacctagcatgtgggatcgtattgactagtacatgaccacttga

SEQ ID NO: 6983 - DNA, 53 bp, Artificial Sequence; identical to SEQ ID NO: 2404
  Description of Artificial Sequence: Synthetic almond;  inner sequence and 3' sequence

SEQ ID NO: 6984 - DNA, 53 bp, Artificial Sequence
  Description of Artificial Sequence: Synthetic almond;  inner sequence and 3' sequence
cggaccgtcaagcgggaaggcactttggtgttgactagtacatgaccacttga

SEQ ID NO: 6985 - DNA, 53 bp, Artificial Sequence
  Description of Artificial Sequence: Synthetic almond;  inner sequence and 3' sequence
ggcctgcacggtaacggtggacgcgtcgtgttgactagtacatgaccacttga

SEQ ID NO: 6986 - DNA, 53 bp, Artificial Sequence; identical to SEQ ID NO: 2959
  Description of Artificial Sequence: Synthetic almond;  inner sequence and 3' sequence

SEQ ID NO: 6987 - DNA, 53 bp, Artificial Sequence
  Description of Artificial Sequence: Synthetic almond;  inner sequence and 3' sequence
gcaagactcgcaccctatcatgaggccatgttgactagtacatgaccacttga

SEQ ID NO: 6988 - DNA, 53 bp, Artificial Sequence
  Description of Artificial Sequence: Synthetic almond;  inner sequence and 3' sequence
gcacgactcgcaccatatcatgaggccatgttgactagtacatgaccacttga

SEQ ID NO: 6989 - DNA, 53 bp, Artificial Sequence; identical to SEQ ID NO: 2263
  Description of Artificial Sequence: Synthetic almond;  inner sequence and 3' sequence

SEQ ID NO: 6990 - DNA, 54 bp, Artificial Sequence; identical to SEQ ID NO: 2652
  Description of Artificial Sequence: Synthetic almond;  inner sequence and 3' sequence

SEQ ID NO: 6991 - DNA, 53 bp, Artificial Sequence
  Description of Artificial Sequence: Synthetic almond;  inner sequence and 3' sequence
gcatcagcagactatcggacgagctgcacgttgactagtacatgaccacttga

SEQ ID NO: 6992 - DNA, 53 bp, Artificial Sequence
  Description of Artificial Sequence: Synthetic almond;  inner sequence and 3' sequence
cgacccaagtgcgaaatgtgcgagtgcgccttgactagtacatgaccacttga

SEQ ID NO: 6993 - DNA, 53 bp, Artificial Sequence; identical to SEQ ID NO: 2260
  Description of Artificial Sequence: Synthetic almond;  inner sequence and 3' sequence

SEQ ID NO: 6994 - DNA, 53 bp, Artificial Sequence
  Description of Artificial Sequence: Synthetic almond;  inner sequence and 3' sequence
cgtaccgctgcggaacaaggtgcgtgcaggttgactagtacatgaccacttga

SEQ ID NO: 6995 - DNA, 53 bp, Artificial Sequence
  Description of Artificial Sequence: Synthetic almond;  inner sequence and 3' sequence
ggccacggacgtgcatcatgccgctgcgccttgactagtacatgaccacttga

SEQ ID NO: 6996 - DNA, 53 bp, Artificial Sequence; identical to SEQ ID NO: 2849
  Description of Artificial Sequence: Synthetic almond;  inner sequence and 3' sequence

SEQ ID NO: 6997 - DNA, 53 bp, Artificial Sequence
  Description of Artificial Sequence: Synthetic almond;  inner sequence and 3' sequence
gtcatgccatcccttcgagtgtgacagggattgactagtacatgaccacttga

SEQ ID NO: 6998 - DNA, 53 bp, Artificial Sequence
  Description of Artificial Sequence: Synthetic almond;  inner sequence and 3' sequence
ggcacaaacggaccgacaagtgcgaatggattgactagtacatgaccacttga

SEQ ID NO: 6999 - DNA, 53 bp, Artificial Sequence
  Description of Artificial Sequence: Synthetic almond;  inner sequence and 3' sequence
gtgcagaacgcgccgcaagtgtgttaggtattgactagtacatgaccacttga

SEQ ID NO: 7000 - DNA, 53 bp, Artificial Sequence
  Description of Artificial Sequence: Synthetic almond;  inner sequence and 3' sequence
ggcatgcgatgaacgaggcatgatgcttcattgactagtacatgaccacttga

SEQ ID NO: 7001 - DNA, 53 bp, Artificial Sequence
  Description of Artificial Sequence: Synthetic almond;  inner sequence and 3' sequence
ccgcacgcagccctatcagtggtgcatgcattgactagtacatgaccacttga

SEQ ID NO: 7002 - DNA, 53 bp, Artificial Sequence
  Description of Artificial Sequence: Synthetic almond;  inner sequence and 3' sequence
gtcatgcacgaacactatcatggcgacatgttgactagtacatgaccacttga

SEQ ID NO: 7003 - DNA, 76 bp, Artificial Sequence; identical to SEQ ID NO: 3004
  Description of Artificial Sequence: Synthetic almond; 5' sequence +inner sequence + 3' sequence

SEQ ID NO: 7004 - DNA, 76 bp, Artificial Sequence; identical to SEQ ID NO: 3003
  Description of Artificial Sequence: Synthetic almond; 5' sequence +inner sequence + 3' sequence

SEQ ID NO: 7005 - DNA, 76 bp, Artificial Sequence; identical to SEQ ID NO: 3008
  Description of Artificial Sequence: Synthetic almond; 5' sequence +inner sequence + 3' sequence

SEQ ID NO: 7006 - DNA, 76 bp, Artificial Sequence; identical to SEQ ID NO: 3010
  Description of Artificial Sequence: Synthetic almond; 5' sequence +inner sequence + 3' sequence

SEQ ID NO: 7007 - DNA, 76 bp, Artificial Sequence; identical to SEQ ID NO: 3005
  Description of Artificial Sequence: Synthetic almond; 5' sequence +inner sequence + 3' sequence

SEQ ID NO: 7008 - DNA, 76 bp, Artificial Sequence; identical to SEQ ID NO: 3012
  Description of Artificial Sequence: Synthetic almond; 5' sequence +inner sequence + 3' sequence

SEQ ID NO: 7009 - DNA, 76 bp, Artificial Sequence; identical to SEQ ID NO: 3007
  Description of Artificial Sequence: Synthetic almond; 5' sequence +inner sequence + 3' sequence

SEQ ID NO: 7010 - DNA, 76 bp, Artificial Sequence; identical to SEQ ID NO: 3006
  Description of Artificial Sequence: Synthetic almond; 5' sequence +inner sequence + 3' sequence

SEQ ID NO: 7011 - DNA, 76 bp, Artificial Sequence; identical to SEQ ID NO: 3013
  Description of Artificial Sequence: Synthetic almond; 5' sequence +inner sequence + 3' sequence

SEQ ID NO: 7012 - DNA, 76 bp, Artificial Sequence; identical to SEQ ID NO: 3023
  Description of Artificial Sequence: Synthetic almond; 5' sequence +inner sequence + 3' sequence

SEQ ID NO: 7013 - DNA, 76 bp, Artificial Sequence; identical to SEQ ID NO: 3009
  Description of Artificial Sequence: Synthetic almond; 5' sequence +inner sequence + 3' sequence

SEQ ID NO: 7014 - DNA, 76 bp, Artificial Sequence; identical to SEQ ID NO: 3016
  Description of Artificial Sequence: Synthetic almond; 5' sequence +inner sequence + 3' sequence

SEQ ID NO: 7015 - DNA, 76 bp, Artificial Sequence; identical to SEQ ID NO: 3049
  Description of Artificial Sequence: Synthetic almond; 5' sequence +inner sequence + 3' sequence

SEQ ID NO: 7016 - DNA, 76 bp, Artificial Sequence; identical to SEQ ID NO: 3011
  Description of Artificial Sequence: Synthetic almond; 5' sequence +inner sequence + 3' sequence

SEQ ID NO: 7017 - DNA, 76 bp, Artificial Sequence; identical to SEQ ID NO: 3018
  Description of Artificial Sequence: Synthetic almond; 5' sequence +inner sequence + 3' sequence

SEQ ID NO: 7018 - DNA, 76 bp, Artificial Sequence; identical to SEQ ID NO: 3022
  Description of Artificial Sequence: Synthetic almond; 5' sequence +inner sequence + 3' sequence

SEQ ID NO: 7019 - DNA, 76 bp, Artificial Sequence; identical to SEQ ID NO: 3037
  Description of Artificial Sequence: Synthetic almond; 5' sequence +inner sequence + 3' sequence

SEQ ID NO: 7020 - DNA, 76 bp, Artificial Sequence; identical to SEQ ID NO: 3017
  Description of Artificial Sequence: Synthetic almond; 5' sequence +inner sequence + 3' sequence

SEQ ID NO: 7021 - DNA, 76 bp, Artificial Sequence; identical to SEQ ID NO: 3046
  Description of Artificial Sequence: Synthetic almond; 5' sequence +inner sequence + 3' sequence

SEQ ID NO: 7022 - DNA, 76 bp, Artificial Sequence; identical to SEQ ID NO: 3034
  Description of Artificial Sequence: Synthetic almond; 5' sequence +inner sequence + 3' sequence

SEQ ID NO: 7023 - DNA, 76 bp, Artificial Sequence; identical to SEQ ID NO: 3030
  Description of Artificial Sequence: Synthetic almond; 5' sequence +inner sequence + 3' sequence

SEQ ID NO: 7024 - DNA, 76 bp, Artificial Sequence; identical to SEQ ID NO: 3020
  Description of Artificial Sequence: Synthetic almond; 5' sequence +inner sequence + 3' sequence

SEQ ID NO: 7025 - DNA, 76 bp, Artificial Sequence; identical to SEQ ID NO: 3014
  Description of Artificial Sequence: Synthetic almond; 5' sequence +inner sequence + 3' sequence

SEQ ID NO: 7026 - DNA, 76 bp, Artificial Sequence; identical to SEQ ID NO: 3036
  Description of Artificial Sequence: Synthetic almond; 5' sequence +inner sequence + 3' sequence

SEQ ID NO: 7027 - DNA, 76 bp, Artificial Sequence; identical to SEQ ID NO: 3028
  Description of Artificial Sequence: Synthetic almond; 5' sequence +inner sequence + 3' sequence

SEQ ID NO: 7028 - DNA, 76 bp, Artificial Sequence; identical to SEQ ID NO: 3025
  Description of Artificial Sequence: Synthetic almond; 5' sequence +inner sequence + 3' sequence

SEQ ID NO: 7029 - DNA, 76 bp, Artificial Sequence; identical to SEQ ID NO: 3041
  Description of Artificial Sequence: Synthetic almond; 5' sequence +inner sequence + 3' sequence

SEQ ID NO: 7030 - DNA, 75 bp, Artificial Sequence; identical to SEQ ID NO: 3070
  Description of Artificial Sequence: Synthetic almond; 5' sequence +inner sequence + 3' sequence

SEQ ID NO: 7031 - DNA, 76 bp, Artificial Sequence; identical to SEQ ID NO: 3040
  Description of Artificial Sequence: Synthetic almond; 5' sequence +inner sequence + 3' sequence

SEQ ID NO: 7032 - DNA, 76 bp, Artificial Sequence; identical to SEQ ID NO: 3033
  Description of Artificial Sequence: Synthetic almond; 5' sequence +inner sequence + 3' sequence

SEQ ID NO: 7033 - DNA, 76 bp, Artificial Sequence; identical to SEQ ID NO: 3082
  Description of Artificial Sequence: Synthetic almond; 5' sequence +inner sequence + 3' sequence

SEQ ID NO: 7034 - DNA, 76 bp, Artificial Sequence; identical to SEQ ID NO: 3088
  Description of Artificial Sequence: Synthetic almond; 5' sequence +inner sequence + 3' sequence

SEQ ID NO: 7035 - DNA, 76 bp, Artificial Sequence; identical to SEQ ID NO: 3066
  Description of Artificial Sequence: Synthetic almond; 5' sequence +inner sequence + 3' sequence

SEQ ID NO: 7036 - DNA, 76 bp, Artificial Sequence; identical to SEQ ID NO: 3035
  Description of Artificial Sequence: Synthetic almond; 5' sequence +inner sequence + 3' sequence

SEQ ID NO: 7037 - DNA, 76 bp, Artificial Sequence; identical to SEQ ID NO: 3055
  Description of Artificial Sequence: Synthetic almond; 5' sequence +inner sequence + 3' sequence

SEQ ID NO: 7038 - DNA, 76 bp, Artificial Sequence; identical to SEQ ID NO: 3064
  Description of Artificial Sequence: Synthetic almond; 5' sequence +inner sequence + 3' sequence

SEQ ID NO: 7039 - DNA, 76 bp, Artificial Sequence; identical to SEQ ID NO: 3024
  Description of Artificial Sequence: Synthetic almond; 5' sequence +inner sequence + 3' sequence

SEQ ID NO: 7040 - DNA, 76 bp, Artificial Sequence; identical to SEQ ID NO: 3039
  Description of Artificial Sequence: Synthetic almond; 5' sequence +inner sequence + 3' sequence

SEQ ID NO: 7041 - DNA, 76 bp, Artificial Sequence; identical to SEQ ID NO: 3074
  Description of Artificial Sequence: Synthetic almond; 5' sequence +inner sequence + 3' sequence

SEQ ID NO: 7042 - DNA, 76 bp, Artificial Sequence; identical to SEQ ID NO: 3032
  Description of Artificial Sequence: Synthetic almond; 5' sequence +inner sequence + 3' sequence

SEQ ID NO: 7043 - DNA, 76 bp, Artificial Sequence; identical to SEQ ID NO: 3063
  Description of Artificial Sequence: Synthetic almond; 5' sequence +inner sequence + 3' sequence

SEQ ID NO: 7044 - DNA, 76 bp, Artificial Sequence; identical to SEQ ID NO: 3061
  Description of Artificial Sequence: Synthetic almond; 5' sequence +inner sequence + 3' sequence

SEQ ID NO: 7045 - DNA, 76 bp, Artificial Sequence; identical to SEQ ID NO: 3045
  Description of Artificial Sequence: Synthetic almond; 5' sequence +inner sequence + 3' sequence

SEQ ID NO: 7046 - DNA, 76 bp, Artificial Sequence; identical to SEQ ID NO: 3021
  Description of Artificial Sequence: Synthetic almond; 5' sequence +inner sequence + 3' sequence

SEQ ID NO: 7047 - DNA, 76 bp, Artificial Sequence; identical to SEQ ID NO: 3052
  Description of Artificial Sequence: Synthetic almond; 5' sequence +inner sequence + 3' sequence

SEQ ID NO: 7048 - DNA, 76 bp, Artificial Sequence; identical to SEQ ID NO: 3044
  Description of Artificial Sequence: Synthetic almond; 5' sequence +inner sequence + 3' sequence

SEQ ID NO: 7049 - DNA, 76 bp, Artificial Sequence; identical to SEQ ID NO: 3019
  Description of Artificial Sequence: Synthetic almond; 5' sequence +inner sequence + 3' sequence

SEQ ID NO: 7050 - DNA, 76 bp, Artificial Sequence; identical to SEQ ID NO: 3015
  Description of Artificial Sequence: Synthetic almond; 5' sequence +inner sequence + 3' sequence

SEQ ID NO: 7051 - DNA, 76 bp, Artificial Sequence; identical to SEQ ID NO: 3112
  Description of Artificial Sequence: Synthetic almond; 5' sequence +inner sequence + 3' sequence

SEQ ID NO: 7052 - DNA, 76 bp, Artificial Sequence; identical to SEQ ID NO: 3108
  Description of Artificial Sequence: Synthetic almond; 5' sequence +inner sequence + 3' sequence

SEQ ID NO: 7053 - DNA, 76 bp, Artificial Sequence; identical to SEQ ID NO: 3058
  Description of Artificial Sequence: Synthetic almond; 5' sequence +inner sequence + 3' sequence

SEQ ID NO: 7054 - DNA, 76 bp, Artificial Sequence; identical to SEQ ID NO: 3131
  Description of Artificial Sequence: Synthetic almond; 5' sequence +inner sequence + 3' sequence

SEQ ID NO: 7055 - DNA, 76 bp, Artificial Sequence; identical to SEQ ID NO: 3031
  Description of Artificial Sequence: Synthetic almond; 5' sequence +inner sequence + 3' sequence

SEQ ID NO: 7056 - DNA, 76 bp, Artificial Sequence; identical to SEQ ID NO: 3029
  Description of Artificial Sequence: Synthetic almond; 5' sequence +inner sequence + 3' sequence

SEQ ID NO: 7057 - DNA, 76 bp, Artificial Sequence; identical to SEQ ID NO: 3054
  Description of Artificial Sequence: Synthetic almond; 5' sequence +inner sequence + 3' sequence

SEQ ID NO: 7058 - DNA, 76 bp, Artificial Sequence; identical to SEQ ID NO: 3080
  Description of Artificial Sequence: Synthetic almond; 5' sequence +inner sequence + 3' sequence

SEQ ID NO: 7059 - DNA, 76 bp, Artificial Sequence; identical to SEQ ID NO: 3168
  Description of Artificial Sequence: Synthetic almond; 5' sequence +inner sequence + 3' sequence

SEQ ID NO: 7060 - DNA, 76 bp, Artificial Sequence; identical to SEQ ID NO: 3567
  Description of Artificial Sequence: Synthetic almond; 5' sequence +inner sequence + 3' sequence

SEQ ID NO: 7061 - DNA, 76 bp, Artificial Sequence; identical to SEQ ID NO: 3117
  Description of Artificial Sequence: Synthetic almond; 5' sequence +inner sequence + 3' sequence

SEQ ID NO: 7062 - DNA, 76 bp, Artificial Sequence; identical to SEQ ID NO: 3078
  Description of Artificial Sequence: Synthetic almond; 5' sequence +inner sequence + 3' sequence

SEQ ID NO: 7063 - DNA, 76 bp, Artificial Sequence; identical to SEQ ID NO: 3129
  Description of Artificial Sequence: Synthetic almond; 5' sequence +inner sequence + 3' sequence

SEQ ID NO: 7064 - DNA, 76 bp, Artificial Sequence; identical to SEQ ID NO: 3048
  Description of Artificial Sequence: Synthetic almond; 5' sequence +inner sequence + 3' sequence

SEQ ID NO: 7065 - DNA, 76 bp, Artificial Sequence; identical to SEQ ID NO: 3207
  Description of Artificial Sequence: Synthetic almond; 5' sequence +inner sequence + 3' sequence

SEQ ID NO: 7066 - DNA, 76 bp, Artificial Sequence; identical to SEQ ID NO: 3133
  Description of Artificial Sequence: Synthetic almond; 5' sequence +inner sequence + 3' sequence

SEQ ID NO: 7067 - DNA, 76 bp, Artificial Sequence; identical to SEQ ID NO: 3136
  Description of Artificial Sequence: Synthetic almond; 5' sequence +inner sequence + 3' sequence

SEQ ID NO: 7068 - DNA, 76 bp, Artificial Sequence; identical to SEQ ID NO: 3097
  Description of Artificial Sequence: Synthetic almond; 5' sequence +inner sequence + 3' sequence

SEQ ID NO: 7069 - DNA, 76 bp, Artificial Sequence; identical to SEQ ID NO: 3155
  Description of Artificial Sequence: Synthetic almond; 5' sequence +inner sequence + 3' sequence

SEQ ID NO: 7070 - DNA, 76 bp, Artificial Sequence; identical to SEQ ID NO: 3065
  Description of Artificial Sequence: Synthetic almond; 5' sequence +inner sequence + 3' sequence

SEQ ID NO: 7071 - DNA, 76 bp, Artificial Sequence; identical to SEQ ID NO: 3183
  Description of Artificial Sequence: Synthetic almond; 5' sequence +inner sequence + 3' sequence

SEQ ID NO: 7072 - DNA, 76 bp, Artificial Sequence; identical to SEQ ID NO: 3038
  Description of Artificial Sequence: Synthetic almond; 5' sequence +inner sequence + 3' sequence

SEQ ID NO: 7073 - DNA, 75 bp, Artificial Sequence; identical to SEQ ID NO: 3193
  Description of Artificial Sequence: Synthetic almond; 5' sequence +inner sequence + 3' sequence

SEQ ID NO: 7074 - DNA, 76 bp, Artificial Sequence; identical to SEQ ID NO: 3081
  Description of Artificial Sequence: Synthetic almond; 5' sequence +inner sequence + 3' sequence

SEQ ID NO: 7075 - DNA, 76 bp, Artificial Sequence; identical to SEQ ID NO: 3126
  Description of Artificial Sequence: Synthetic almond; 5' sequence +inner sequence + 3' sequence

SEQ ID NO: 7076 - DNA, 76 bp, Artificial Sequence; identical to SEQ ID NO: 3067
  Description of Artificial Sequence: Synthetic almond; 5' sequence +inner sequence + 3' sequence

SEQ ID NO: 7077 - DNA, 76 bp, Artificial Sequence; identical to SEQ ID NO: 3142
  Description of Artificial Sequence: Synthetic almond; 5' sequence +inner sequence + 3' sequence

SEQ ID NO: 7078 - DNA, 76 bp, Artificial Sequence; identical to SEQ ID NO: 3051
  Description of Artificial Sequence: Synthetic almond; 5' sequence +inner sequence + 3' sequence

SEQ ID NO: 7079 - DNA, 76 bp, Artificial Sequence; identical to SEQ ID NO: 3185
  Description of Artificial Sequence: Synthetic almond; 5' sequence +inner sequence + 3' sequence

SEQ ID NO: 7080 - DNA, 76 bp, Artificial Sequence; identical to SEQ ID NO: 3195
  Description of Artificial Sequence: Synthetic almond; 5' sequence +inner sequence + 3' sequence

SEQ ID NO: 7081 - DNA, 76 bp, Artificial Sequence; identical to SEQ ID NO: 3079
  Description of Artificial Sequence: Synthetic almond; 5' sequence +inner sequence + 3' sequence

SEQ ID NO: 7082 - DNA, 76 bp, Artificial Sequence; identical to SEQ ID NO: 3692
  Description of Artificial Sequence: Synthetic almond; 5' sequence +inner sequence + 3' sequence

SEQ ID NO: 7083 - DNA, 76 bp, Artificial Sequence; identical to SEQ ID NO: 3103
  Description of Artificial Sequence: Synthetic almond; 5' sequence +inner sequence + 3' sequence

SEQ ID NO: 7084 - DNA, 76 bp, Artificial Sequence; identical to SEQ ID NO: 3211
  Description of Artificial Sequence: Synthetic almond; 5' sequence +inner sequence + 3' sequence

SEQ ID NO: 7085 - DNA, 76 bp, Artificial Sequence; identical to SEQ ID NO: 3093
  Description of Artificial Sequence: Synthetic almond; 5' sequence +inner sequence + 3' sequence

SEQ ID NO: 7086 - DNA, 76 bp, Artificial Sequence; identical to SEQ ID NO: 3092
  Description of Artificial Sequence: Synthetic almond; 5' sequence +inner sequence + 3' sequence

SEQ ID NO: 7087 - DNA, 76 bp, Artificial Sequence; identical to SEQ ID NO: 3047
  Description of Artificial Sequence: Synthetic almond; 5' sequence +inner sequence + 3' sequence

SEQ ID NO: 7088 - DNA, 76 bp, Artificial Sequence; identical to SEQ ID NO: 3050
  Description of Artificial Sequence: Synthetic almond; 5' sequence +inner sequence + 3' sequence

SEQ ID NO: 7089 - DNA, 76 bp, Artificial Sequence; identical to SEQ ID NO: 3120
  Description of Artificial Sequence: Synthetic almond; 5' sequence +inner sequence + 3' sequence

SEQ ID NO: 7090 - DNA, 76 bp, Artificial Sequence; identical to SEQ ID NO: 3026
  Description of Artificial Sequence: Synthetic almond; 5' sequence +inner sequence + 3' sequence

SEQ ID NO: 7091 - DNA, 76 bp, Artificial Sequence; identical to SEQ ID NO: 3430
  Description of Artificial Sequence: Synthetic almond; 5' sequence +inner sequence + 3' sequence

SEQ ID NO: 7092 - DNA, 76 bp, Artificial Sequence; identical to SEQ ID NO: 3229
  Description of Artificial Sequence: Synthetic almond; 5' sequence +inner sequence + 3' sequence

SEQ ID NO: 7093 - DNA, 76 bp, Artificial Sequence; identical to SEQ ID NO: 3154
  Description of Artificial Sequence: Synthetic almond; 5' sequence +inner sequence + 3' sequence

SEQ ID NO: 7094 - DNA, 76 bp, Artificial Sequence; identical to SEQ ID NO: 3056
  Description of Artificial Sequence: Synthetic almond; 5' sequence +inner sequence + 3' sequence

SEQ ID NO: 7095 - DNA, 76 bp, Artificial Sequence; identical to SEQ ID NO: 3083
  Description of Artificial Sequence: Synthetic almond; 5' sequence +inner sequence + 3' sequence

SEQ ID NO: 7096 - DNA, 76 bp, Artificial Sequence; identical to SEQ ID NO: 3247
  Description of Artificial Sequence: Synthetic almond; 5' sequence +inner sequence + 3' sequence

SEQ ID NO: 7097 - DNA, 76 bp, Artificial Sequence; identical to SEQ ID NO: 3257
  Description of Artificial Sequence: Synthetic almond; 5' sequence +inner sequence + 3' sequence

SEQ ID NO: 7098 - DNA, 76 bp, Artificial Sequence; identical to SEQ ID NO: 3287
  Description of Artificial Sequence: Synthetic almond; 5' sequence +inner sequence + 3' sequence

SEQ ID NO: 7099 - DNA, 76 bp, Artificial Sequence; identical to SEQ ID NO: 3255
  Description of Artificial Sequence: Synthetic almond; 5' sequence +inner sequence + 3' sequence

SEQ ID NO: 7100 - DNA, 76 bp, Artificial Sequence; identical to SEQ ID NO: 3059
  Description of Artificial Sequence: Synthetic almond; 5' sequence +inner sequence + 3' sequence

SEQ ID NO: 7101 - DNA, 76 bp, Artificial Sequence; identical to SEQ ID NO: 3288
  Description of Artificial Sequence: Synthetic almond; 5' sequence +inner sequence + 3' sequence

SEQ ID NO: 7102 - DNA, 76 bp, Artificial Sequence; identical to SEQ ID NO: 3091
  Description of Artificial Sequence: Synthetic almond; 5' sequence +inner sequence + 3' sequence

SEQ ID NO: 7103 - DNA, 76 bp, Artificial Sequence; identical to SEQ ID NO: 3077
  Description of Artificial Sequence: Synthetic almond; 5' sequence +inner sequence + 3' sequence

SEQ ID NO: 7104 - DNA, 76 bp, Artificial Sequence; identical to SEQ ID NO: 3151
  Description of Artificial Sequence: Synthetic almond; 5' sequence +inner sequence + 3' sequence

SEQ ID NO: 7105 - DNA, 76 bp, Artificial Sequence; identical to SEQ ID NO: 3354
  Description of Artificial Sequence: Synthetic almond; 5' sequence +inner sequence + 3' sequence

SEQ ID NO: 7106 - DNA, 76 bp, Artificial Sequence; identical to SEQ ID NO: 3233
  Description of Artificial Sequence: Synthetic almond; 5' sequence +inner sequence + 3' sequence

SEQ ID NO: 7107 - DNA, 76 bp, Artificial Sequence; identical to SEQ ID NO: 3147
  Description of Artificial Sequence: Synthetic almond; 5' sequence +inner sequence + 3' sequence

SEQ ID NO: 7108 - DNA, 76 bp, Artificial Sequence; identical to SEQ ID NO: 3161
  Description of Artificial Sequence: Synthetic almond; 5' sequence +inner sequence + 3' sequence

SEQ ID NO: 7109 - DNA, 76 bp, Artificial Sequence; identical to SEQ ID NO: 3296
  Description of Artificial Sequence: Synthetic almond; 5' sequence +inner sequence + 3' sequence

SEQ ID NO: 7110 - DNA, 76 bp, Artificial Sequence; identical to SEQ ID NO: 3355
  Description of Artificial Sequence: Synthetic almond; 5' sequence +inner sequence + 3' sequence

SEQ ID NO: 7111 - DNA, 76 bp, Artificial Sequence; identical to SEQ ID NO: 3285
  Description of Artificial Sequence: Synthetic almond; 5' sequence +inner sequence + 3' sequence

SEQ ID NO: 7112 - DNA, 76 bp, Artificial Sequence; identical to SEQ ID NO: 3122
  Description of Artificial Sequence: Synthetic almond; 5' sequence +inner sequence + 3' sequence

SEQ ID NO: 7113 - DNA, 76 bp, Artificial Sequence; identical to SEQ ID NO: 3098
  Description of Artificial Sequence: Synthetic almond; 5' sequence +inner sequence + 3' sequence

SEQ ID NO: 7114 - DNA, 76 bp, Artificial Sequence; identical to SEQ ID NO: 3203
  Description of Artificial Sequence: Synthetic almond; 5' sequence +inner sequence + 3' sequence

SEQ ID NO: 7115 - DNA, 76 bp, Artificial Sequence; identical to SEQ ID NO: 3060
  Description of Artificial Sequence: Synthetic almond; 5' sequence +inner sequence + 3' sequence

SEQ ID NO: 7116 - DNA, 76 bp, Artificial Sequence; identical to SEQ ID NO: 3144
  Description of Artificial Sequence: Synthetic almond; 5' sequence +inner sequence + 3' sequence

SEQ ID NO: 7117 - DNA, 76 bp, Artificial Sequence; identical to SEQ ID NO: 3076
  Description of Artificial Sequence: Synthetic almond; 5' sequence +inner sequence + 3' sequence

SEQ ID NO: 7118 - DNA, 76 bp, Artificial Sequence; identical to SEQ ID NO: 3027
  Description of Artificial Sequence: Synthetic almond; 5' sequence +inner sequence + 3' sequence

SEQ ID NO: 7119 - DNA, 76 bp, Artificial Sequence; identical to SEQ ID NO: 3465
  Description of Artificial Sequence: Synthetic almond; 5' sequence +inner sequence + 3' sequence

SEQ ID NO: 7120 - DNA, 76 bp, Artificial Sequence; identical to SEQ ID NO: 3237
  Description of Artificial Sequence: Synthetic almond; 5' sequence +inner sequence + 3' sequence

SEQ ID NO: 7121 - DNA, 76 bp, Artificial Sequence; identical to SEQ ID NO: 3264
  Description of Artificial Sequence: Synthetic almond; 5' sequence +inner sequence + 3' sequence

SEQ ID NO: 7122 - DNA, 76 bp, Artificial Sequence; identical to SEQ ID NO: 3198
  Description of Artificial Sequence: Synthetic almond; 5' sequence +inner sequence + 3' sequence

SEQ ID NO: 7123 - DNA, 76 bp, Artificial Sequence; identical to SEQ ID NO: 3205
  Description of Artificial Sequence: Synthetic almond; 5' sequence +inner sequence + 3' sequence

SEQ ID NO: 7124 - DNA, 76 bp, Artificial Sequence; identical to SEQ ID NO: 3068
  Description of Artificial Sequence: Synthetic almond; 5' sequence +inner sequence + 3' sequence

SEQ ID NO: 7125 - DNA, 76 bp, Artificial Sequence; identical to SEQ ID NO: 3188
  Description of Artificial Sequence: Synthetic almond; 5' sequence +inner sequence + 3' sequence

SEQ ID NO: 7126 - DNA, 76 bp, Artificial Sequence; identical to SEQ ID NO: 3179
  Description of Artificial Sequence: Synthetic almond; 5' sequence +inner sequence + 3' sequence

SEQ ID NO: 7127 - DNA, 76 bp, Artificial Sequence; identical to SEQ ID NO: 3113
  Description of Artificial Sequence: Synthetic almond; 5' sequence +inner sequence + 3' sequence

SEQ ID NO: 7128 - DNA, 76 bp, Artificial Sequence; identical to SEQ ID NO: 3094
  Description of Artificial Sequence: Synthetic almond; 5' sequence +inner sequence + 3' sequence

SEQ ID NO: 7129 - DNA, 76 bp, Artificial Sequence; identical to SEQ ID NO: 3057
  Description of Artificial Sequence: Synthetic almond; 5' sequence +inner sequence + 3' sequence

SEQ ID NO: 7130 - DNA, 76 bp, Artificial Sequence; identical to SEQ ID NO: 3282
  Description of Artificial Sequence: Synthetic almond; 5' sequence +inner sequence + 3' sequence

SEQ ID NO: 7131 - DNA, 76 bp, Artificial Sequence; identical to SEQ ID NO: 3073
  Description of Artificial Sequence: Synthetic almond; 5' sequence +inner sequence + 3' sequence

SEQ ID NO: 7132 - DNA, 76 bp, Artificial Sequence; identical to SEQ ID NO: 3145
  Description of Artificial Sequence: Synthetic almond; 5' sequence +inner sequence + 3' sequence

SEQ ID NO: 7133 - DNA, 76 bp, Artificial Sequence; identical to SEQ ID NO: 3140
  Description of Artificial Sequence: Synthetic almond; 5' sequence +inner sequence + 3' sequence

SEQ ID NO: 7134 - DNA, 76 bp, Artificial Sequence; identical to SEQ ID NO: 3691
  Description of Artificial Sequence: Synthetic almond; 5' sequence +inner sequence + 3' sequence

SEQ ID NO: 7135 - DNA, 76 bp, Artificial Sequence; identical to SEQ ID NO: 3311
  Description of Artificial Sequence: Synthetic almond; 5' sequence +inner sequence + 3' sequence

SEQ ID NO: 7136 - DNA, 76 bp, Artificial Sequence; identical to SEQ ID NO: 3522
  Description of Artificial Sequence: Synthetic almond; 5' sequence +inner sequence + 3' sequence

SEQ ID NO: 7137 - DNA, 76 bp, Artificial Sequence; identical to SEQ ID NO: 3095
  Description of Artificial Sequence: Synthetic almond; 5' sequence +inner sequence + 3' sequence

SEQ ID NO: 7138 - DNA, 76 bp, Artificial Sequence; identical to SEQ ID NO: 3283
  Description of Artificial Sequence: Synthetic almond; 5' sequence +inner sequence + 3' sequence

SEQ ID NO: 7139 - DNA, 76 bp, Artificial Sequence; identical to SEQ ID NO: 3062
  Description of Artificial Sequence: Synthetic almond; 5' sequence +inner sequence + 3' sequence

SEQ ID NO: 7140 - DNA, 74 bp, Artificial Sequence; identical to SEQ ID NO: 3148
  Description of Artificial Sequence: Synthetic almond; 5' sequence +inner sequence + 3' sequence

SEQ ID NO: 7141 - DNA, 77 bp, Artificial Sequence; identical to SEQ ID NO: 3150
  Description of Artificial Sequence: Synthetic almond; 5' sequence +inner sequence + 3' sequence

SEQ ID NO: 7142 - DNA, 76 bp, Artificial Sequence; identical to SEQ ID NO: 3360
  Description of Artificial Sequence: Synthetic almond; 5' sequence +inner sequence + 3' sequence

SEQ ID NO: 7143 - DNA, 76 bp, Artificial Sequence; identical to SEQ ID NO: 3673
  Description of Artificial Sequence: Synthetic almond; 5' sequence +inner sequence + 3' sequence

SEQ ID NO: 7144 - DNA, 76 bp, Artificial Sequence; identical to SEQ ID NO: 3329
  Description of Artificial Sequence: Synthetic almond; 5' sequence +inner sequence + 3' sequence

SEQ ID NO: 7145 - DNA, 76 bp, Artificial Sequence; identical to SEQ ID NO: 3253
  Description of Artificial Sequence: Synthetic almond; 5' sequence +inner sequence + 3' sequence

SEQ ID NO: 7146 - DNA, 76 bp, Artificial Sequence; identical to SEQ ID NO: 3293
  Description of Artificial Sequence: Synthetic almond; 5' sequence +inner sequence + 3' sequence

SEQ ID NO: 7147 - DNA, 76 bp, Artificial Sequence; identical to SEQ ID NO: 3099
  Description of Artificial Sequence: Synthetic almond; 5' sequence +inner sequence + 3' sequence

SEQ ID NO: 7148 - DNA, 76 bp, Artificial Sequence; identical to SEQ ID NO: 3115
  Description of Artificial Sequence: Synthetic almond; 5' sequence +inner sequence + 3' sequence

SEQ ID NO: 7149 - DNA, 76 bp, Artificial Sequence; identical to SEQ ID NO: 3053
  Description of Artificial Sequence: Synthetic almond; 5' sequence +inner sequence + 3' sequence

SEQ ID NO: 7150 - DNA, 76 bp, Artificial Sequence; identical to SEQ ID NO: 3042
  Description of Artificial Sequence: Synthetic almond; 5' sequence +inner sequence + 3' sequence

SEQ ID NO: 7151 - DNA, 76 bp, Artificial Sequence; identical to SEQ ID NO: 3377
  Description of Artificial Sequence: Synthetic almond; 5' sequence +inner sequence + 3' sequence

SEQ ID NO: 7152 - DNA, 76 bp, Artificial Sequence; identical to SEQ ID NO: 3362
  Description of Artificial Sequence: Synthetic almond; 5' sequence +inner sequence + 3' sequence

SEQ ID NO: 7153 - DNA, 76 bp, Artificial Sequence; identical to SEQ ID NO: 3087
  Description of Artificial Sequence: Synthetic almond; 5' sequence +inner sequence + 3' sequence

SEQ ID NO: 7154 - DNA, 76 bp, Artificial Sequence; identical to SEQ ID NO: 3290
  Description of Artificial Sequence: Synthetic almond; 5' sequence +inner sequence + 3' sequence

SEQ ID NO: 7155 - DNA, 77 bp, Artificial Sequence; identical to SEQ ID NO: 3258
  Description of Artificial Sequence: Synthetic almond; 5' sequence +inner sequence + 3' sequence

SEQ ID NO: 7156 - DNA, 76 bp, Artificial Sequence; identical to SEQ ID NO: 3654
  Description of Artificial Sequence: Synthetic almond; 5' sequence +inner sequence + 3' sequence

SEQ ID NO: 7157 - DNA, 76 bp, Artificial Sequence; identical to SEQ ID NO: 3174
  Description of Artificial Sequence: Synthetic almond; 5' sequence +inner sequence + 3' sequence

SEQ ID NO: 7158 - DNA, 76 bp, Artificial Sequence; identical to SEQ ID NO: 3118
  Description of Artificial Sequence: Synthetic almond; 5' sequence +inner sequence + 3' sequence

SEQ ID NO: 7159 - DNA, 76 bp, Artificial Sequence; identical to SEQ ID NO: 3071
  Description of Artificial Sequence: Synthetic almond; 5' sequence +inner sequence + 3' sequence

SEQ ID NO: 7160 - DNA, 76 bp, Artificial Sequence; identical to SEQ ID NO: 3347
  Description of Artificial Sequence: Synthetic almond; 5' sequence +inner sequence + 3' sequence

SEQ ID NO: 7161 - DNA, 76 bp, Artificial Sequence; identical to SEQ ID NO: 3208
  Description of Artificial Sequence: Synthetic almond; 5' sequence +inner sequence + 3' sequence

SEQ ID NO: 7162 - DNA, 76 bp, Artificial Sequence; identical to SEQ ID NO: 3096
  Description of Artificial Sequence: Synthetic almond; 5' sequence +inner sequence + 3' sequence

SEQ ID NO: 7163 - DNA, 76 bp, Artificial Sequence; identical to SEQ ID NO: 3468
  Description of Artificial Sequence: Synthetic almond; 5' sequence +inner sequence + 3' sequence

SEQ ID NO: 7164 - DNA, 76 bp, Artificial Sequence; identical to SEQ ID NO: 3245
  Description of Artificial Sequence: Synthetic almond; 5' sequence +inner sequence + 3' sequence

SEQ ID NO: 7165 - DNA, 76 bp, Artificial Sequence; identical to SEQ ID NO: 3929
  Description of Artificial Sequence: Synthetic almond; 5' sequence +inner sequence + 3' sequence

SEQ ID NO: 7166 - DNA, 76 bp, Artificial Sequence; identical to SEQ ID NO: 3470
  Description of Artificial Sequence: Synthetic almond; 5' sequence +inner sequence + 3' sequence

SEQ ID NO: 7167 - DNA, 76 bp, Artificial Sequence; identical to SEQ ID NO: 3153
  Description of Artificial Sequence: Synthetic almond; 5' sequence +inner sequence + 3' sequence

SEQ ID NO: 7168 - DNA, 76 bp, Artificial Sequence; identical to SEQ ID NO: 3321
  Description of Artificial Sequence: Synthetic almond; 5' sequence +inner sequence + 3' sequence

SEQ ID NO: 7169 - DNA, 76 bp, Artificial Sequence; identical to SEQ ID NO: 3084
  Description of Artificial Sequence: Synthetic almond; 5' sequence +inner sequence + 3' sequence

SEQ ID NO: 7170 - DNA, 76 bp, Artificial Sequence; identical to SEQ ID NO: 3663
  Description of Artificial Sequence: Synthetic almond; 5' sequence +inner sequence + 3' sequence

SEQ ID NO: 7171 - DNA, 76 bp, Artificial Sequence; identical to SEQ ID NO: 3222
  Description of Artificial Sequence: Synthetic almond; 5' sequence +inner sequence + 3' sequence

SEQ ID NO: 7172 - DNA, 76 bp, Artificial Sequence; identical to SEQ ID NO: 3438
  Description of Artificial Sequence: Synthetic almond; 5' sequence +inner sequence + 3' sequence

SEQ ID NO: 7173 - DNA, 76 bp, Artificial Sequence; identical to SEQ ID NO: 3152
  Description of Artificial Sequence: Synthetic almond; 5' sequence +inner sequence + 3' sequence

SEQ ID NO: 7174 - DNA, 76 bp, Artificial Sequence; identical to SEQ ID NO: 3106
  Description of Artificial Sequence: Synthetic almond; 5' sequence +inner sequence + 3' sequence

SEQ ID NO: 7175 - DNA, 76 bp, Artificial Sequence; identical to SEQ ID NO: 3312
  Description of Artificial Sequence: Synthetic almond; 5' sequence +inner sequence + 3' sequence

SEQ ID NO: 7176 - DNA, 76 bp, Artificial Sequence; identical to SEQ ID NO: 3234
  Description of Artificial Sequence: Synthetic almond; 5' sequence +inner sequence + 3' sequence

SEQ ID NO: 7177 - DNA, 76 bp, Artificial Sequence; identical to SEQ ID NO: 3376
  Description of Artificial Sequence: Synthetic almond; 5' sequence +inner sequence + 3' sequence

SEQ ID NO: 7178 - DNA, 76 bp, Artificial Sequence; identical to SEQ ID NO: 3111
  Description of Artificial Sequence: Synthetic almond; 5' sequence +inner sequence + 3' sequence

SEQ ID NO: 7179 - DNA, 76 bp, Artificial Sequence; identical to SEQ ID NO: 3164
  Description of Artificial Sequence: Synthetic almond; 5' sequence +inner sequence + 3' sequence

SEQ ID NO: 7180 - DNA, 76 bp, Artificial Sequence; identical to SEQ ID NO: 3069
  Description of Artificial Sequence: Synthetic almond; 5' sequence +inner sequence + 3' sequence

SEQ ID NO: 7181 - DNA, 76 bp, Artificial Sequence; identical to SEQ ID NO: 3240
  Description of Artificial Sequence: Synthetic almond; 5' sequence +inner sequence + 3' sequence

SEQ ID NO: 7182 - DNA, 76 bp, Artificial Sequence; identical to SEQ ID NO: 3149
  Description of Artificial Sequence: Synthetic almond; 5' sequence +inner sequence + 3' sequence

SEQ ID NO: 7183 - DNA, 76 bp, Artificial Sequence; identical to SEQ ID NO: 3075
  Description of Artificial Sequence: Synthetic almond; 5' sequence +inner sequence + 3' sequence

SEQ ID NO: 7184 - DNA, 76 bp, Artificial Sequence; identical to SEQ ID NO: 3201
  Description of Artificial Sequence: Synthetic almond; 5' sequence +inner sequence + 3' sequence

SEQ ID NO: 7185 - DNA, 76 bp, Artificial Sequence; identical to SEQ ID NO: 3043
  Description of Artificial Sequence: Synthetic almond; 5' sequence +inner sequence + 3' sequence

SEQ ID NO: 7186 - DNA, 76 bp, Artificial Sequence; identical to SEQ ID NO: 3406
  Description of Artificial Sequence: Synthetic almond; 5' sequence +inner sequence + 3' sequence

SEQ ID NO: 7187 - DNA, 76 bp, Artificial Sequence; identical to SEQ ID NO: 3184
  Description of Artificial Sequence: Synthetic almond; 5' sequence +inner sequence + 3' sequence

SEQ ID NO: 7188 - DNA, 76 bp, Artificial Sequence; identical to SEQ ID NO: 3308
  Description of Artificial Sequence: Synthetic almond; 5' sequence +inner sequence + 3' sequence

SEQ ID NO: 7189 - DNA, 76 bp, Artificial Sequence; identical to SEQ ID NO: 3429
  Description of Artificial Sequence: Synthetic almond; 5' sequence +inner sequence + 3' sequence

SEQ ID NO: 7190 - DNA, 76 bp, Artificial Sequence; identical to SEQ ID NO: 3527
  Description of Artificial Sequence: Synthetic almond; 5' sequence +inner sequence + 3' sequence

SEQ ID NO: 7191 - DNA, 76 bp, Artificial Sequence; identical to SEQ ID NO: 3392
  Description of Artificial Sequence: Synthetic almond; 5' sequence +inner sequence + 3' sequence

SEQ ID NO: 7192 - DNA, 76 bp, Artificial Sequence; identical to SEQ ID NO: 3132
  Description of Artificial Sequence: Synthetic almond; 5' sequence +inner sequence + 3' sequence

SEQ ID NO: 7193 - DNA, 76 bp, Artificial Sequence; identical to SEQ ID NO: 3100
  Description of Artificial Sequence: Synthetic almond; 5' sequence +inner sequence + 3' sequence

SEQ ID NO: 7194 - DNA, 76 bp, Artificial Sequence; identical to SEQ ID NO: 3729
  Description of Artificial Sequence: Synthetic almond; 5' sequence +inner sequence + 3' sequence

SEQ ID NO: 7195 - DNA, 76 bp, Artificial Sequence; identical to SEQ ID NO: 3215
  Description of Artificial Sequence: Synthetic almond; 5' sequence +inner sequence + 3' sequence

SEQ ID NO: 7196 - DNA, 76 bp, Artificial Sequence; identical to SEQ ID NO: 3178
  Description of Artificial Sequence: Synthetic almond; 5' sequence +inner sequence + 3' sequence

SEQ ID NO: 7197 - DNA, 76 bp, Artificial Sequence; identical to SEQ ID NO: 3353
  Description of Artificial Sequence: Synthetic almond; 5' sequence +inner sequence + 3' sequence

SEQ ID NO: 7198 - DNA, 76 bp, Artificial Sequence
  Description of Artificial Sequence: Synthetic almond; 5' sequence +inner sequence + 3' sequence
tagggaagagaaggacatatgatgccgcagtgcgaatggtccgacgctgcacgttgactagtacatgaccacttga

SEQ ID NO: 7199 - DNA, 76 bp, Artificial Sequence; identical to SEQ ID NO: 3105
  Description of Artificial Sequence: Synthetic almond; 5' sequence +inner sequence + 3' sequence

SEQ ID NO: 7200 - DNA, 76 bp, Artificial Sequence; identical to SEQ ID NO: 3359
  Description of Artificial Sequence: Synthetic almond; 5' sequence +inner sequence + 3' sequence

SEQ ID NO: 7201 - DNA, 76 bp, Artificial Sequence; identical to SEQ ID NO: 3116
  Description of Artificial Sequence: Synthetic almond; 5' sequence +inner sequence + 3' sequence

SEQ ID NO: 7202 - DNA, 76 bp, Artificial Sequence; identical to SEQ ID NO: 3953
  Description of Artificial Sequence: Synthetic almond; 5' sequence +inner sequence + 3' sequence

SEQ ID NO: 7203 - DNA, 76 bp, Artificial Sequence; identical to SEQ ID NO: 3645
  Description of Artificial Sequence: Synthetic almond; 5' sequence +inner sequence + 3' sequence

SEQ ID NO: 7204 - DNA, 76 bp, Artificial Sequence; identical to SEQ ID NO: 3172
  Description of Artificial Sequence: Synthetic almond; 5' sequence +inner sequence + 3' sequence

SEQ ID NO: 7205 - DNA, 76 bp, Artificial Sequence
  Description of Artificial Sequence: Synthetic almond; 5' sequence +inner sequence + 3' sequence
tagggaagagaaggacatatgatagtgtggctgcctcgaccaacgtggccatgttgactagtacatgaccacttga

SEQ ID NO: 7206 - DNA, 76 bp, Artificial Sequence; identical to SEQ ID NO: 3138
  Description of Artificial Sequence: Synthetic almond; 5' sequence +inner sequence + 3' sequence

SEQ ID NO: 7207 - DNA, 76 bp, Artificial Sequence; identical to SEQ ID NO: 3436
  Description of Artificial Sequence: Synthetic almond; 5' sequence +inner sequence + 3' sequence

SEQ ID NO: 7208 - DNA, 76 bp, Artificial Sequence; identical to SEQ ID NO: 3299
  Description of Artificial Sequence: Synthetic almond; 5' sequence +inner sequence + 3' sequence

SEQ ID NO: 7209 - DNA, 76 bp, Artificial Sequence; identical to SEQ ID NO: 3579
  Description of Artificial Sequence: Synthetic almond; 5' sequence +inner sequence + 3' sequence

SEQ ID NO: 7210 - DNA, 76 bp, Artificial Sequence; identical to SEQ ID NO: 3268
  Description of Artificial Sequence: Synthetic almond; 5' sequence +inner sequence + 3' sequence

SEQ ID NO: 7211 - DNA, 76 bp, Artificial Sequence; identical to SEQ ID NO: 3159
  Description of Artificial Sequence: Synthetic almond; 5' sequence +inner sequence + 3' sequence

SEQ ID NO: 7212 - DNA, 76 bp, Artificial Sequence; identical to SEQ ID NO: 3175
  Description of Artificial Sequence: Synthetic almond; 5' sequence +inner sequence + 3' sequence

SEQ ID NO: 7213 - DNA, 76 bp, Artificial Sequence; identical to SEQ ID NO: 3125
  Description of Artificial Sequence: Synthetic almond; 5' sequence +inner sequence + 3' sequence

SEQ ID NO: 7214 - DNA, 76 bp, Artificial Sequence; identical to SEQ ID NO: 3901
  Description of Artificial Sequence: Synthetic almond; 5' sequence +inner sequence + 3' sequence

SEQ ID NO: 7215 - DNA, 76 bp, Artificial Sequence; identical to SEQ ID NO: 3270
  Description of Artificial Sequence: Synthetic almond; 5' sequence +inner sequence + 3' sequence

SEQ ID NO: 7216 - DNA, 76 bp, Artificial Sequence; identical to SEQ ID NO: 3541
  Description of Artificial Sequence: Synthetic almond; 5' sequence +inner sequence + 3' sequence

SEQ ID NO: 7217 - DNA, 76 bp, Artificial Sequence; identical to SEQ ID NO: 3230
  Description of Artificial Sequence: Synthetic almond; 5' sequence +inner sequence + 3' sequence

SEQ ID NO: 7218 - DNA, 76 bp, Artificial Sequence; identical to SEQ ID NO: 3197
  Description of Artificial Sequence: Synthetic almond; 5' sequence +inner sequence + 3' sequence

SEQ ID NO: 7219 - DNA, 76 bp, Artificial Sequence; identical to SEQ ID NO: 3364
  Description of Artificial Sequence: Synthetic almond; 5' sequence +inner sequence + 3' sequence

SEQ ID NO: 7220 - DNA, 76 bp, Artificial Sequence; identical to SEQ ID NO: 3139
  Description of Artificial Sequence: Synthetic almond; 5' sequence +inner sequence + 3' sequence

SEQ ID NO: 7221 - DNA, 76 bp, Artificial Sequence; identical to SEQ ID NO: 3123
  Description of Artificial Sequence: Synthetic almond; 5' sequence +inner sequence + 3' sequence

SEQ ID NO: 7222 - DNA, 76 bp, Artificial Sequence; identical to SEQ ID NO: 3610
  Description of Artificial Sequence: Synthetic almond; 5' sequence +inner sequence + 3' sequence

SEQ ID NO: 7223 - DNA, 76 bp, Artificial Sequence; identical to SEQ ID NO: 3570
  Description of Artificial Sequence: Synthetic almond; 5' sequence +inner sequence + 3' sequence

SEQ ID NO: 7224 - DNA, 76 bp, Artificial Sequence; identical to SEQ ID NO: 3104
  Description of Artificial Sequence: Synthetic almond; 5' sequence +inner sequence + 3' sequence

SEQ ID NO: 7225 - DNA, 76 bp, Artificial Sequence; identical to SEQ ID NO: 3086
  Description of Artificial Sequence: Synthetic almond; 5' sequence +inner sequence + 3' sequence

SEQ ID NO: 7226 - DNA, 76 bp, Artificial Sequence; identical to SEQ ID NO: 3783
  Description of Artificial Sequence: Synthetic almond; 5' sequence +inner sequence + 3' sequence

SEQ ID NO: 7227 - DNA, 76 bp, Artificial Sequence; identical to SEQ ID NO: 3232
  Description of Artificial Sequence: Synthetic almond; 5' sequence +inner sequence + 3' sequence

SEQ ID NO: 7228 - DNA, 76 bp, Artificial Sequence; identical to SEQ ID NO: 3085
  Description of Artificial Sequence: Synthetic almond; 5' sequence +inner sequence + 3' sequence

SEQ ID NO: 7229 - DNA, 76 bp, Artificial Sequence
  Description of Artificial Sequence: Synthetic almond; 5' sequence +inner sequence + 3' sequence
tagggaagagaaggacatatgatccgaacggacctacgtgggatgcgcgtcgtttgactagtacatgaccacttga

SEQ ID NO: 7230 - DNA, 76 bp, Artificial Sequence
  Description of Artificial Sequence: Synthetic almond; 5' sequence +inner sequence + 3' sequence
tagggaagagaaggacatatgatggacgcgatgaccacatgccgtgagacatgttgactagtacatgaccacttga

SEQ ID NO: 7231 - DNA, 76 bp, Artificial Sequence; identical to SEQ ID NO: 3191
  Description of Artificial Sequence: Synthetic almond; 5' sequence +inner sequence + 3' sequence

SEQ ID NO: 7232 - DNA, 76 bp, Artificial Sequence; identical to SEQ ID NO: 3552
  Description of Artificial Sequence: Synthetic almond; 5' sequence +inner sequence + 3' sequence

SEQ ID NO: 7233 - DNA, 76 bp, Artificial Sequence; identical to SEQ ID NO: 3194
  Description of Artificial Sequence: Synthetic almond; 5' sequence +inner sequence + 3' sequence

SEQ ID NO: 7234 - DNA, 76 bp, Artificial Sequence
  Description of Artificial Sequence: Synthetic almond; 5' sequence +inner sequence + 3' sequence
tagggaagagaaggacatatgatggacgcggctgacctcaagctggccaggtattgactagtacatgaccacttga

SEQ ID NO: 7235 - DNA, 76 bp, Artificial Sequence; identical to SEQ ID NO: 3209
  Description of Artificial Sequence: Synthetic almond; 5' sequence +inner sequence + 3' sequence

SEQ ID NO: 7236 - DNA, 76 bp, Artificial Sequence; identical to SEQ ID NO: 3361
  Description of Artificial Sequence: Synthetic almond; 5' sequence +inner sequence + 3' sequence

SEQ ID NO: 7237 - DNA, 76 bp, Artificial Sequence; identical to SEQ ID NO: 3389
  Description of Artificial Sequence: Synthetic almond; 5' sequence +inner sequence + 3' sequence

SEQ ID NO: 7238 - DNA, 76 bp, Artificial Sequence
  Description of Artificial Sequence: Synthetic almond; 5' sequence +inner sequence + 3' sequence
tagggaagagaaggacatatgatcgatggccgtaacgaaacgtgcaggtgggattgactagtacatgaccacttga

SEQ ID NO: 7239 - DNA, 76 bp, Artificial Sequence; identical to SEQ ID NO: 3519
  Description of Artificial Sequence: Synthetic almond; 5' sequence +inner sequence + 3' sequence

SEQ ID NO: 7240 - DNA, 76 bp, Artificial Sequence
  Description of Artificial Sequence: Synthetic almond; 5' sequence +inner sequence + 3' sequence
tagggaagagaaggacatatgatggccgagctgacctgcacgcacgcatggccttgactagtacatgaccacttga

SEQ ID NO: 7241 - DNA, 76 bp, Artificial Sequence; identical to SEQ ID NO: 3107
  Description of Artificial Sequence: Synthetic almond; 5' sequence +inner sequence + 3' sequence

SEQ ID NO: 7242 - DNA, 76 bp, Artificial Sequence; identical to SEQ ID NO: 3269
  Description of Artificial Sequence: Synthetic almond; 5' sequence +inner sequence + 3' sequence

SEQ ID NO: 7243 - DNA, 77 bp, Artificial Sequence; identical to SEQ ID NO: 3221
  Description of Artificial Sequence: Synthetic almond; 5' sequence +inner sequence + 3' sequence

SEQ ID NO: 7244 - DNA, 76 bp, Artificial Sequence; identical to SEQ ID NO: 3134
  Description of Artificial Sequence: Synthetic almond; 5' sequence +inner sequence + 3' sequence

SEQ ID NO: 7245 - DNA, 77 bp, Artificial Sequence
  Description of Artificial Sequence: Synthetic almond; 5' sequence +inner sequence + 3' sequence
tagggaagagaaggacatatgatcatggccgcagctgacctagcatgtgtgtcattgactagtacatgaccacttga

SEQ ID NO: 7246 - DNA, 76 bp, Artificial Sequence; identical to SEQ ID NO: 3506
  Description of Artificial Sequence: Synthetic almond; 5' sequence +inner sequence + 3' sequence

SEQ ID NO: 7247 - DNA, 76 bp, Artificial Sequence; identical to SEQ ID NO: 3243
  Description of Artificial Sequence: Synthetic almond; 5' sequence +inner sequence + 3' sequence

SEQ ID NO: 7248 - DNA, 76 bp, Artificial Sequence; identical to SEQ ID NO: 3341
  Description of Artificial Sequence: Synthetic almond; 5' sequence +inner sequence + 3' sequence

SEQ ID NO: 7249 - DNA, 76 bp, Artificial Sequence; identical to SEQ ID NO: 3110
  Description of Artificial Sequence: Synthetic almond; 5' sequence +inner sequence + 3' sequence

SEQ ID NO: 7250 - DNA, 76 bp, Artificial Sequence; identical to SEQ ID NO: 3314
  Description of Artificial Sequence: Synthetic almond; 5' sequence +inner sequence + 3' sequence

SEQ ID NO: 7251 - DNA, 76 bp, Artificial Sequence; identical to SEQ ID NO: 3572
  Description of Artificial Sequence: Synthetic almond; 5' sequence +inner sequence + 3' sequence

SEQ ID NO: 7252 - DNA, 76 bp, Artificial Sequence; identical to SEQ ID NO: 3170
  Description of Artificial Sequence: Synthetic almond; 5' sequence +inner sequence + 3' sequence

SEQ ID NO: 7253 - DNA, 76 bp, Artificial Sequence; identical to SEQ ID NO: 3165
  Description of Artificial Sequence: Synthetic almond; 5' sequence +inner sequence + 3' sequence

SEQ ID NO: 7254 - DNA, 76 bp, Artificial Sequence
  Description of Artificial Sequence: Synthetic almond; 5' sequence +inner sequence + 3' sequence
tagggaagagaaggacatatgatggccagagcgaccctacacgtggcacgtacttgactagtacatgaccacttga

SEQ ID NO: 7255 - DNA, 76 bp, Artificial Sequence; identical to SEQ ID NO: 3204
  Description of Artificial Sequence: Synthetic almond; 5' sequence +inner sequence + 3' sequence

SEQ ID NO: 7256 - DNA, 76 bp, Artificial Sequence; identical to SEQ ID NO: 3836
  Description of Artificial Sequence: Synthetic almond; 5' sequence +inner sequence + 3' sequence

SEQ ID NO: 7257 - DNA, 76 bp, Artificial Sequence; identical to SEQ ID NO: 3831
  Description of Artificial Sequence: Synthetic almond; 5' sequence +inner sequence + 3' sequence

SEQ ID NO: 7258 - DNA, 76 bp, Artificial Sequence; identical to SEQ ID NO: 3532
  Description of Artificial Sequence: Synthetic almond; 5' sequence +inner sequence + 3' sequence

SEQ ID NO: 7259 - DNA, 76 bp, Artificial Sequence; identical to SEQ ID NO: 3336
  Description of Artificial Sequence: Synthetic almond; 5' sequence +inner sequence + 3' sequence

SEQ ID NO: 7260 - DNA, 76 bp, Artificial Sequence
  Description of Artificial Sequence: Synthetic almond; 5' sequence +inner sequence + 3' sequence
tagggaagagaaggacatatgattggtccgacgctgaccagtgcacgtggccattgactagtacatgaccacttga

SEQ ID NO: 7261 - DNA, 76 bp, Artificial Sequence; identical to SEQ ID NO: 3072
  Description of Artificial Sequence: Synthetic almond; 5' sequence +inner sequence + 3' sequence

SEQ ID NO: 7262 - DNA, 76 bp, Artificial Sequence; identical to SEQ ID NO: 3391
  Description of Artificial Sequence: Synthetic almond; 5' sequence +inner sequence + 3' sequence

SEQ ID NO: 7263 - DNA, 76 bp, Artificial Sequence; identical to SEQ ID NO: 3956
  Description of Artificial Sequence: Synthetic almond; 5' sequence +inner sequence + 3' sequence

SEQ ID NO: 7264 - DNA, 76 bp, Artificial Sequence; identical to SEQ ID NO: 3540
  Description of Artificial Sequence: Synthetic almond; 5' sequence +inner sequence + 3' sequence

SEQ ID NO: 7265 - DNA, 76 bp, Artificial Sequence; identical to SEQ ID NO: 3352
  Description of Artificial Sequence: Synthetic almond; 5' sequence +inner sequence + 3' sequence

SEQ ID NO: 7266 - DNA, 76 bp, Artificial Sequence; identical to SEQ ID NO: 3146
  Description of Artificial Sequence: Synthetic almond; 5' sequence +inner sequence + 3' sequence

SEQ ID NO: 7267 - DNA, 74 bp, Artificial Sequence; identical to SEQ ID NO: 3241
  Description of Artificial Sequence: Synthetic almond; 5' sequence +inner sequence + 3' sequence

SEQ ID NO: 7268 - DNA, 76 bp, Artificial Sequence; identical to SEQ ID NO: 3190
  Description of Artificial Sequence: Synthetic almond; 5' sequence +inner sequence + 3' sequence

SEQ ID NO: 7269 - DNA, 76 bp, Artificial Sequence; identical to SEQ ID NO: 3485
  Description of Artificial Sequence: Synthetic almond; 5' sequence +inner sequence + 3' sequence

SEQ ID NO: 7270 - DNA, 76 bp, Artificial Sequence; identical to SEQ ID NO: 3371
  Description of Artificial Sequence: Synthetic almond; 5' sequence +inner sequence + 3' sequence

SEQ ID NO: 7271 - DNA, 76 bp, Artificial Sequence; identical to SEQ ID NO: 3454
  Description of Artificial Sequence: Synthetic almond; 5' sequence +inner sequence + 3' sequence

SEQ ID NO: 7272 - DNA, 76 bp, Artificial Sequence
  Description of Artificial Sequence: Synthetic almond; 5' sequence +inner sequence + 3' sequence
tagggaagagaaggacatatgatacgtccaggaccacatgtcgttgcgtcacgttgactagtacatgaccacttga

SEQ ID NO: 7273 - DNA, 76 bp, Artificial Sequence
  Description of Artificial Sequence: Synthetic almond; 5' sequence +inner sequence + 3' sequence
tagggaagagaaggacatatgattcgacatgaccagatgtacctcgcttcacgttgactagtacatgaccacttga

SEQ ID NO: 7274 - DNA, 76 bp, Artificial Sequence; identical to SEQ ID NO: 3102
  Description of Artificial Sequence: Synthetic almond; 5' sequence +inner sequence + 3' sequence

SEQ ID NO: 7275 - DNA, 76 bp, Artificial Sequence; identical to SEQ ID NO: 3228
  Description of Artificial Sequence: Synthetic almond; 5' sequence +inner sequence + 3' sequence

SEQ ID NO: 7276 - DNA, 76 bp, Artificial Sequence; identical to SEQ ID NO: 3200
  Description of Artificial Sequence: Synthetic almond; 5' sequence +inner sequence + 3' sequence

SEQ ID NO: 7277 - DNA, 76 bp, Artificial Sequence; identical to SEQ ID NO: 3367
  Description of Artificial Sequence: Synthetic almond; 5' sequence +inner sequence + 3' sequence

SEQ ID NO: 7278 - DNA, 76 bp, Artificial Sequence; identical to SEQ ID NO: 3121
  Description of Artificial Sequence: Synthetic almond; 5' sequence +inner sequence + 3' sequence

SEQ ID NO: 7279 - DNA, 76 bp, Artificial Sequence; identical to SEQ ID NO: 3481
  Description of Artificial Sequence: Synthetic almond; 5' sequence +inner sequence + 3' sequence

SEQ ID NO: 7280 - DNA, 76 bp, Artificial Sequence
  Description of Artificial Sequence: Synthetic almond; 5' sequence +inner sequence + 3' sequence
tagggaagagaaggacatatgatggccgcatcgaccgaagtggcatgcgcgcattgactagtacatgaccacttga

SEQ ID NO: 7281 - DNA, 76 bp, Artificial Sequence; identical to SEQ ID NO: 3718
  Description of Artificial Sequence: Synthetic almond; 5' sequence +inner sequence + 3' sequence

SEQ ID NO: 7282 - DNA, 76 bp, Artificial Sequence; identical to SEQ ID NO: 3171
  Description of Artificial Sequence: Synthetic almond; 5' sequence +inner sequence + 3' sequence

SEQ ID NO: 7283 - DNA, 76 bp, Artificial Sequence; identical to SEQ ID NO: 3385
  Description of Artificial Sequence: Synthetic almond; 5' sequence +inner sequence + 3' sequence

SEQ ID NO: 7284 - DNA, 76 bp, Artificial Sequence; identical to SEQ ID NO: 3109
  Description of Artificial Sequence: Synthetic almond; 5' sequence +inner sequence + 3' sequence

SEQ ID NO: 7285 - DNA, 76 bp, Artificial Sequence; identical to SEQ ID NO: 3089
  Description of Artificial Sequence: Synthetic almond; 5' sequence +inner sequence + 3' sequence

SEQ ID NO: 7286 - DNA, 76 bp, Artificial Sequence; identical to SEQ ID NO: 3832
  Description of Artificial Sequence: Synthetic almond; 5' sequence +inner sequence + 3' sequence

SEQ ID NO: 7287 - DNA, 76 bp, Artificial Sequence; identical to SEQ ID NO: 3163
  Description of Artificial Sequence: Synthetic almond; 5' sequence +inner sequence + 3' sequence

SEQ ID NO: 7288 - DNA, 76 bp, Artificial Sequence; identical to SEQ ID NO: 3634
  Description of Artificial Sequence: Synthetic almond; 5' sequence +inner sequence + 3' sequence

SEQ ID NO: 7289 - DNA, 76 bp, Artificial Sequence
  Description of Artificial Sequence: Synthetic almond; 5' sequence +inner sequence + 3' sequence
tagggaagagaaggacatatgatgtacgtagcgcaacgatgtggctatgcacattgactagtacatgaccacttga

SEQ ID NO: 7290 - DNA, 76 bp, Artificial Sequence; identical to SEQ ID NO: 3310
  Description of Artificial Sequence: Synthetic almond; 5' sequence +inner sequence + 3' sequence

SEQ ID NO: 7291 - DNA, 76 bp, Artificial Sequence; identical to SEQ ID NO: 3484
  Description of Artificial Sequence: Synthetic almond; 5' sequence +inner sequence + 3' sequence

SEQ ID NO: 7292 - DNA, 77 bp, Artificial Sequence; identical to SEQ ID NO: 3250
  Description of Artificial Sequence: Synthetic almond; 5' sequence +inner sequence + 3' sequence

SEQ ID NO: 7293 - DNA, 76 bp, Artificial Sequence; identical to SEQ ID NO: 3220
  Description of Artificial Sequence: Synthetic almond; 5' sequence +inner sequence + 3' sequence

SEQ ID NO: 7294 - DNA, 76 bp, Artificial Sequence; identical to SEQ ID NO: 3196
  Description of Artificial Sequence: Synthetic almond; 5' sequence +inner sequence + 3' sequence

SEQ ID NO: 7295 - DNA, 76 bp, Artificial Sequence; identical to SEQ ID NO: 3912
  Description of Artificial Sequence: Synthetic almond; 5' sequence +inner sequence + 3' sequence

SEQ ID NO: 7296 - DNA, 76 bp, Artificial Sequence; identical to SEQ ID NO: 3529
  Description of Artificial Sequence: Synthetic almond; 5' sequence +inner sequence + 3' sequence

SEQ ID NO: 7297 - DNA, 76 bp, Artificial Sequence
  Description of Artificial Sequence: Synthetic almond; 5' sequence +inner sequence + 3' sequence
tagggaagagaaggacatatgatggccgacacttaccgatgcaacgctgcgcattgactagtacatgaccacttga

SEQ ID NO: 7298 - DNA, 76 bp, Artificial Sequence; identical to SEQ ID NO: 3343
  Description of Artificial Sequence: Synthetic almond; 5' sequence +inner sequence + 3' sequence

SEQ ID NO: 7299 - DNA, 76 bp, Artificial Sequence; identical to SEQ ID NO: 3305
  Description of Artificial Sequence: Synthetic almond; 5' sequence +inner sequence + 3' sequence

SEQ ID NO: 7300 - DNA, 76 bp, Artificial Sequence; identical to SEQ ID NO: 3476
  Description of Artificial Sequence: Synthetic almond; 5' sequence +inner sequence + 3' sequence

SEQ ID NO: 7301 - DNA, 76 bp, Artificial Sequence
  Description of Artificial Sequence: Synthetic almond; 5' sequence +inner sequence + 3' sequence
tagggaagagaaggacatatgatcatggccgcaatcatgaccgcaagtgtgcgttgactagtacatgaccacttga

SEQ ID NO: 7302 - DNA, 76 bp, Artificial Sequence; identical to SEQ ID NO: 3613
  Description of Artificial Sequence: Synthetic almond; 5' sequence +inner sequence + 3' sequence

SEQ ID NO: 7303 - DNA, 76 bp, Artificial Sequence; identical to SEQ ID NO: 3090
  Description of Artificial Sequence: Synthetic almond; 5' sequence +inner sequence + 3' sequence

SEQ ID NO: 7304 - DNA, 76 bp, Artificial Sequence; identical to SEQ ID NO: 3186
  Description of Artificial Sequence: Synthetic almond; 5' sequence +inner sequence + 3' sequence

SEQ ID NO: 7305 - DNA, 76 bp, Artificial Sequence; identical to SEQ ID NO: 3218
  Description of Artificial Sequence: Synthetic almond; 5' sequence +inner sequence + 3' sequence

SEQ ID NO: 7306 - DNA, 76 bp, Artificial Sequence; identical to SEQ ID NO: 3725
  Description of Artificial Sequence: Synthetic almond; 5' sequence +inner sequence + 3' sequence

SEQ ID NO: 7307 - DNA, 76 bp, Artificial Sequence; identical to SEQ ID NO: 3323
  Description of Artificial Sequence: Synthetic almond; 5' sequence +inner sequence + 3' sequence

SEQ ID NO: 7308 - DNA, 76 bp, Artificial Sequence; identical to SEQ ID NO: 3520
  Description of Artificial Sequence: Synthetic almond; 5' sequence +inner sequence + 3' sequence

SEQ ID NO: 7309 - DNA, 76 bp, Artificial Sequence; identical to SEQ ID NO: 3158
  Description of Artificial Sequence: Synthetic almond; 5' sequence +inner sequence + 3' sequence

SEQ ID NO: 7310 - DNA, 76 bp, Artificial Sequence; identical to SEQ ID NO: 3553
  Description of Artificial Sequence: Synthetic almond; 5' sequence +inner sequence + 3' sequence

SEQ ID NO: 7311 - DNA, 76 bp, Artificial Sequence; identical to SEQ ID NO: 3246
  Description of Artificial Sequence: Synthetic almond; 5' sequence +inner sequence + 3' sequence

SEQ ID NO: 7312 - DNA, 76 bp, Artificial Sequence
  Description of Artificial Sequence: Synthetic almond; 5' sequence +inner sequence + 3' sequence
tagggaagagaaggacatatgatggcgtgagtgcaccgtgatcaagcgtggcattgactagtacatgaccacttga

SEQ ID NO: 7313 - DNA, 76 bp, Artificial Sequence; identical to SEQ ID NO: 3450
  Description of Artificial Sequence: Synthetic almond; 5' sequence +inner sequence + 3' sequence

SEQ ID NO: 7314 - DNA, 76 bp, Artificial Sequence; identical to SEQ ID NO: 3401
  Description of Artificial Sequence: Synthetic almond; 5' sequence +inner sequence + 3' sequence

SEQ ID NO: 7315 - DNA, 76 bp, Artificial Sequence; identical to SEQ ID NO: 3511
  Description of Artificial Sequence: Synthetic almond; 5' sequence +inner sequence + 3' sequence

SEQ ID NO: 7316 - DNA, 76 bp, Artificial Sequence; identical to SEQ ID NO: 3916
  Description of Artificial Sequence: Synthetic almond; 5' sequence +inner sequence + 3' sequence

SEQ ID NO: 7317 - DNA, 76 bp, Artificial Sequence
  Description of Artificial Sequence: Synthetic almond; 5' sequence +inner sequence + 3' sequence
tagggaagagaaggacatatgatccgcgcgaggaccgtgtcaagctggtcacgttgactagtacatgaccacttga

SEQ ID NO: 7318 - DNA, 76 bp, Artificial Sequence; identical to SEQ ID NO: 3173
  Description of Artificial Sequence: Synthetic almond; 5' sequence +inner sequence + 3' sequence

SEQ ID NO: 7319 - DNA, 76 bp, Artificial Sequence; identical to SEQ ID NO: 3523
  Description of Artificial Sequence: Synthetic almond; 5' sequence +inner sequence + 3' sequence

SEQ ID NO: 7320 - DNA, 76 bp, Artificial Sequence; identical to SEQ ID NO: 3262
  Description of Artificial Sequence: Synthetic almond; 5' sequence +inner sequence + 3' sequence

SEQ ID NO: 7321 - DNA, 76 bp, Artificial Sequence; identical to SEQ ID NO: 3192
  Description of Artificial Sequence: Synthetic almond; 5' sequence +inner sequence + 3' sequence

SEQ ID NO: 7322 - DNA, 76 bp, Artificial Sequence; identical to SEQ ID NO: 3517
  Description of Artificial Sequence: Synthetic almond; 5' sequence +inner sequence + 3' sequence

SEQ ID NO: 7323 - DNA, 76 bp, Artificial Sequence; identical to SEQ ID NO: 3254
  Description of Artificial Sequence: Synthetic almond; 5' sequence +inner sequence + 3' sequence

SEQ ID NO: 7324 - DNA, 76 bp, Artificial Sequence; identical to SEQ ID NO: 3478
  Description of Artificial Sequence: Synthetic almond; 5' sequence +inner sequence + 3' sequence

SEQ ID NO: 7325 - DNA, 76 bp, Artificial Sequence; identical to SEQ ID NO: 3167
  Description of Artificial Sequence: Synthetic almond; 5' sequence +inner sequence + 3' sequence

SEQ ID NO: 7326 - DNA, 76 bp, Artificial Sequence; identical to SEQ ID NO: 3719
  Description of Artificial Sequence: Synthetic almond; 5' sequence +inner sequence + 3' sequence

SEQ ID NO: 7327 - DNA, 76 bp, Artificial Sequence; identical to SEQ ID NO: 3442
  Description of Artificial Sequence: Synthetic almond; 5' sequence +inner sequence + 3' sequence

SEQ ID NO: 7328 - DNA, 76 bp, Artificial Sequence; identical to SEQ ID NO: 3214
  Description of Artificial Sequence: Synthetic almond; 5' sequence +inner sequence + 3' sequence

SEQ ID NO: 7329 - DNA, 76 bp, Artificial Sequence; identical to SEQ ID NO: 3741
  Description of Artificial Sequence: Synthetic almond; 5' sequence +inner sequence + 3' sequence

SEQ ID NO: 7330 - DNA, 76 bp, Artificial Sequence; identical to SEQ ID NO: 3850
  Description of Artificial Sequence: Synthetic almond; 5' sequence +inner sequence + 3' sequence

SEQ ID NO: 7331 - DNA, 76 bp, Artificial Sequence; identical to SEQ ID NO: 3350
  Description of Artificial Sequence: Synthetic almond; 5' sequence +inner sequence + 3' sequence

SEQ ID NO: 7332 - DNA, 76 bp, Artificial Sequence; identical to SEQ ID NO: 3625
  Description of Artificial Sequence: Synthetic almond; 5' sequence +inner sequence + 3' sequence

SEQ ID NO: 7333 - DNA, 76 bp, Artificial Sequence; identical to SEQ ID NO: 3771
  Description of Artificial Sequence: Synthetic almond; 5' sequence +inner sequence + 3' sequence

SEQ ID NO: 7334 - DNA, 76 bp, Artificial Sequence; identical to SEQ ID NO: 3137
  Description of Artificial Sequence: Synthetic almond; 5' sequence +inner sequence + 3' sequence

SEQ ID NO: 7335 - DNA, 76 bp, Artificial Sequence; identical to SEQ ID NO: 3114
  Description of Artificial Sequence: Synthetic almond; 5' sequence +inner sequence + 3' sequence

SEQ ID NO: 7336 - DNA, 76 bp, Artificial Sequence
  Description of Artificial Sequence: Synthetic almond; 5' sequence +inner sequence + 3' sequence
tagggaagagaaggacatatgatgcacgcctcgcaccctatcatgaggccatgttgactagtacatgaccacttga

SEQ ID NO: 7337 - DNA, 79 bp, Artificial Sequence; identical to SEQ ID NO: 3864
  Description of Artificial Sequence: Synthetic almond; 5' sequence +inner sequence + 3' sequence

SEQ ID NO: 7338 - DNA, 76 bp, Artificial Sequence; identical to SEQ ID NO: 3496
  Description of Artificial Sequence: Synthetic almond; 5' sequence +inner sequence + 3' sequence

SEQ ID NO: 7339 - DNA, 76 bp, Artificial Sequence
  Description of Artificial Sequence: Synthetic almond; 5' sequence +inner sequence + 3' sequence
tagggaagagaaggacatatgatcgtggcgcacgacacggaccttcgctgcgcttgactagtacatgaccacttga

SEQ ID NO: 7340 - DNA, 76 bp, Artificial Sequence; identical to SEQ ID NO: 3160
  Description of Artificial Sequence: Synthetic almond; 5' sequence +inner sequence + 3' sequence

SEQ ID NO: 7341 - DNA, 76 bp, Artificial Sequence; identical to SEQ ID NO: 3213
  Description of Artificial Sequence: Synthetic almond; 5' sequence +inner sequence + 3' sequence

SEQ ID NO: 7342 - DNA, 76 bp, Artificial Sequence; identical to SEQ ID NO: 3606
  Description of Artificial Sequence: Synthetic almond; 5' sequence +inner sequence + 3' sequence

SEQ ID NO: 7343 - DNA, 76 bp, Artificial Sequence; identical to SEQ ID NO: 3545
  Description of Artificial Sequence: Synthetic almond; 5' sequence +inner sequence + 3' sequence

SEQ ID NO: 7344 - DNA, 76 bp, Artificial Sequence; identical to SEQ ID NO: 3212
  Description of Artificial Sequence: Synthetic almond; 5' sequence +inner sequence + 3' sequence

SEQ ID NO: 7345 - DNA, 76 bp, Artificial Sequence; identical to SEQ ID NO: 3811
  Description of Artificial Sequence: Synthetic almond; 5' sequence +inner sequence + 3' sequence

SEQ ID NO: 7346 - DNA, 76 bp, Artificial Sequence; identical to SEQ ID NO: 3271
  Description of Artificial Sequence: Synthetic almond; 5' sequence +inner sequence + 3' sequence

SEQ ID NO: 7347 - DNA, 76 bp, Artificial Sequence; identical to SEQ ID NO: 3439
  Description of Artificial Sequence: Synthetic almond; 5' sequence +inner sequence + 3' sequence

SEQ ID NO: 7348 - DNA, 76 bp, Artificial Sequence
  Description of Artificial Sequence: Synthetic almond; 5' sequence +inner sequence + 3' sequence
tagggaagagaaggacatatgatacgtcgcgaacccaagacgcatgtgccagtttgactagtacatgaccacttga

SEQ ID NO: 7349 - DNA, 76 bp, Artificial Sequence; identical to SEQ ID NO: 3696
  Description of Artificial Sequence: Synthetic almond; 5' sequence +inner sequence + 3' sequence

SEQ ID NO: 7350 - DNA, 76 bp, Artificial Sequence; identical to SEQ ID NO: 3332
  Description of Artificial Sequence: Synthetic almond; 5' sequence +inner sequence + 3' sequence

SEQ ID NO: 7351 - DNA, 76 bp, Artificial Sequence
  Description of Artificial Sequence: Synthetic almond; 5' sequence +inner sequence + 3' sequence
tagggaagagaaggacatatgatgtgcacagcgaacctaagcgggcatgcacgttgactagtacatgaccacttga

SEQ ID NO: 7352 - DNA, 76 bp, Artificial Sequence; identical to SEQ ID NO: 3457
  Description of Artificial Sequence: Synthetic almond; 5' sequence +inner sequence + 3' sequence

SEQ ID NO: 7353 - DNA, 76 bp, Artificial Sequence; identical to SEQ ID NO: 3626
  Description of Artificial Sequence: Synthetic almond; 5' sequence +inner sequence + 3' sequence

SEQ ID NO: 7354 - DNA, 76 bp, Artificial Sequence; identical to SEQ ID NO: 3713
  Description of Artificial Sequence: Synthetic almond; 5' sequence +inner sequence + 3' sequence

SEQ ID NO: 7355 - DNA, 76 bp, Artificial Sequence; identical to SEQ ID NO: 3807
  Description of Artificial Sequence: Synthetic almond; 5' sequence +inner sequence + 3' sequence

SEQ ID NO: 7356 - DNA, 76 bp, Artificial Sequence
  Description of Artificial Sequence: Synthetic almond; 5' sequence +inner sequence + 3' sequence
tagggaagagaaggacatatgatacgtgcacacgccaaggtccgatcgacgcgttgactagtacatgaccacttga

SEQ ID NO: 7357 - DNA, 76 bp, Artificial Sequence
  Description of Artificial Sequence: Synthetic almond; 5' sequence +inner sequence + 3' sequence
tagggaagagaaggacatatgatgctaccagcagcatgccgccgagctgcacgttgactagtacatgaccacttga

SEQ ID NO: 7358 - DNA, 76 bp, Artificial Sequence; identical to SEQ ID NO: 3313
  Description of Artificial Sequence: Synthetic almond; 5' sequence +inner sequence + 3' sequence

SEQ ID NO: 7359 - DNA, 76 bp, Artificial Sequence; identical to SEQ ID NO: 3157
  Description of Artificial Sequence: Synthetic almond; 5' sequence +inner sequence + 3' sequence

SEQ ID NO: 7360 - DNA, 76 bp, Artificial Sequence; identical to SEQ ID NO: 3791
  Description of Artificial Sequence: Synthetic almond; 5' sequence +inner sequence + 3' sequence

SEQ ID NO: 7361 - DNA, 76 bp, Artificial Sequence; identical to SEQ ID NO: 3666
  Description of Artificial Sequence: Synthetic almond; 5' sequence +inner sequence + 3' sequence

SEQ ID NO: 7362 - DNA, 76 bp, Artificial Sequence; identical to SEQ ID NO: 3585
  Description of Artificial Sequence: Synthetic almond; 5' sequence +inner sequence + 3' sequence

SEQ ID NO: 7363 - DNA, 76 bp, Artificial Sequence; identical to SEQ ID NO: 3297
  Description of Artificial Sequence: Synthetic almond; 5' sequence +inner sequence + 3' sequence

SEQ ID NO: 7364 - DNA, 76 bp, Artificial Sequence
  Description of Artificial Sequence: Synthetic almond; 5' sequence +inner sequence + 3' sequence
tagggaagagaaggacatatgatggcatgcacgcacctacacgtggggatggattgactagtacatgaccacttga

SEQ ID NO: 7365 - DNA, 76 bp, Artificial Sequence; identical to SEQ ID NO: 3379
  Description of Artificial Sequence: Synthetic almond; 5' sequence +inner sequence + 3' sequence

SEQ ID NO: 7366 - DNA, 76 bp, Artificial Sequence; identical to SEQ ID NO: 3930
  Description of Artificial Sequence: Synthetic almond; 5' sequence +inner sequence + 3' sequence

SEQ ID NO: 7367 - DNA, 76 bp, Artificial Sequence; identical to SEQ ID NO: 3316
  Description of Artificial Sequence: Synthetic almond; 5' sequence +inner sequence + 3' sequence

SEQ ID NO: 7368 - DNA, 76 bp, Artificial Sequence; identical to SEQ ID NO: 3414
  Description of Artificial Sequence: Synthetic almond; 5' sequence +inner sequence + 3' sequence

SEQ ID NO: 7369 - DNA, 76 bp, Artificial Sequence; identical to SEQ ID NO: 3928
  Description of Artificial Sequence: Synthetic almond; 5' sequence +inner sequence + 3' sequence

SEQ ID NO: 7370 - DNA, 76 bp, Artificial Sequence; identical to SEQ ID NO: 3671
  Description of Artificial Sequence: Synthetic almond; 5' sequence +inner sequence + 3' sequence

SEQ ID NO: 7371 - DNA, 76 bp, Artificial Sequence; identical to SEQ ID NO: 3273
  Description of Artificial Sequence: Synthetic almond; 5' sequence +inner sequence + 3' sequence

SEQ ID NO: 7372 - DNA, 76 bp, Artificial Sequence; identical to SEQ ID NO: 3611
  Description of Artificial Sequence: Synthetic almond; 5' sequence +inner sequence + 3' sequence

SEQ ID NO: 7373 - DNA, 76 bp, Artificial Sequence
  Description of Artificial Sequence: Synthetic almond; 5' sequence +inner sequence + 3' sequence
tagggaagagaaggacatatgatcgcgaagtggcacagggacgcgtctgcccattgactagtacatgaccacttga

SEQ ID NO: 7374 - DNA, 76 bp, Artificial Sequence; identical to SEQ ID NO: 3390
  Description of Artificial Sequence: Synthetic almond; 5' sequence +inner sequence + 3' sequence

SEQ ID NO: 7375 - DNA, 76 bp, Artificial Sequence; identical to SEQ ID NO: 3380
  Description of Artificial Sequence: Synthetic almond; 5' sequence +inner sequence + 3' sequence

SEQ ID NO: 7376 - DNA, 76 bp, Artificial Sequence
  Description of Artificial Sequence: Synthetic almond; 5' sequence +inner sequence + 3' sequence
tagggaagagaaggacatatgatgcaacgcagcaccgccatctgccgtgggcattgactagtacatgaccacttga

SEQ ID NO: 7377 - DNA, 76 bp, Artificial Sequence
  Description of Artificial Sequence: Synthetic almond; 5' sequence +inner sequence + 3' sequence
tagggaagagaaggacatatgatggcatgcacgcacctacacgcgggtatggattgactagtacatgaccacttga

SEQ ID NO: 7378 - DNA, 76 bp, Artificial Sequence; identical to SEQ ID NO: 3276
  Description of Artificial Sequence: Synthetic almond; 5' sequence +inner sequence + 3' sequence

SEQ ID NO: 7379 - DNA, 76 bp, Artificial Sequence; identical to SEQ ID NO: 3632
  Description of Artificial Sequence: Synthetic almond; 5' sequence +inner sequence + 3' sequence

SEQ ID NO: 7380 - DNA, 76 bp, Artificial Sequence
  Description of Artificial Sequence: Synthetic almond; 5' sequence +inner sequence + 3' sequence
tagggaagagaaggacatatgatggacctgcgaagagcgtacacgtggccatgttgactagtacatgaccacttga

SEQ ID NO: 7381 - DNA, 76 bp, Artificial Sequence
  Description of Artificial Sequence: Synthetic almond; 5' sequence +inner sequence + 3' sequence
tagggaagagaaggacatatgatcgtaccgtcaagcgggaaggcactttggtgttgactagtacatgaccacttga

SEQ ID NO: 7382 - DNA, 76 bp, Artificial Sequence; identical to SEQ ID NO: 3127
  Description of Artificial Sequence: Synthetic almond; 5' sequence +inner sequence + 3' sequence

SEQ ID NO: 7383 - DNA, 76 bp, Artificial Sequence; identical to SEQ ID NO: 3915
  Description of Artificial Sequence: Synthetic almond; 5' sequence +inner sequence + 3' sequence

SEQ ID NO: 7384 - DNA, 76 bp, Artificial Sequence
  Description of Artificial Sequence: Synthetic almond; 5' sequence +inner sequence + 3' sequence
tagggaagagaaggacatatgatgcgacagcgacatacgatctgctctgcgccttgactagtacatgaccacttga

SEQ ID NO: 7385 - DNA, 76 bp, Artificial Sequence; identical to SEQ ID NO: 3177
  Description of Artificial Sequence: Synthetic almond; 5' sequence +inner sequence + 3' sequence

SEQ ID NO: 7386 - DNA, 76 bp, Artificial Sequence; identical to SEQ ID NO: 3426
  Description of Artificial Sequence: Synthetic almond; 5' sequence +inner sequence + 3' sequence

SEQ ID NO: 7387 - DNA, 76 bp, Artificial Sequence; identical to SEQ ID NO: 3274
  Description of Artificial Sequence: Synthetic almond; 5' sequence +inner sequence + 3' sequence

SEQ ID NO: 7388 - DNA, 76 bp, Artificial Sequence; identical to SEQ ID NO: 3950
  Description of Artificial Sequence: Synthetic almond; 5' sequence +inner sequence + 3' sequence

SEQ ID NO: 7389 - DNA, 76 bp, Artificial Sequence; identical to SEQ ID NO: 3932
  Description of Artificial Sequence: Synthetic almond; 5' sequence +inner sequence + 3' sequence

SEQ ID NO: 7390 - DNA, 76 bp, Artificial Sequence; identical to SEQ ID NO: 3869
  Description of Artificial Sequence: Synthetic almond; 5' sequence +inner sequence + 3' sequence

SEQ ID NO: 7391 - DNA, 76 bp, Artificial Sequence; identical to SEQ ID NO: 3399
  Description of Artificial Sequence: Synthetic almond; 5' sequence +inner sequence + 3' sequence

SEQ ID NO: 7392 - DNA, 76 bp, Artificial Sequence; identical to SEQ ID NO: 3238
  Description of Artificial Sequence: Synthetic almond; 5' sequence +inner sequence + 3' sequence

SEQ ID NO: 7393 - DNA, 76 bp, Artificial Sequence
  Description of Artificial Sequence: Synthetic almond; 5' sequence +inner sequence + 3' sequence
tagggaagagaaggacatatgattcgtgtcgtgcgatgaaccggtcgtggccattgactagtacatgaccacttga

SEQ ID NO: 7394 - DNA, 76 bp, Artificial Sequence
  Description of Artificial Sequence: Synthetic almond; 5' sequence +inner sequence + 3' sequence
tagggaagagaaggacatatgatggccgaacggacctcaatgtgtggcatgcattgactagtacatgaccacttga

SEQ ID NO: 7395 - DNA, 76 bp, Artificial Sequence; identical to SEQ ID NO: 3448
  Description of Artificial Sequence: Synthetic almond; 5' sequence +inner sequence + 3' sequence

SEQ ID NO: 7396 - DNA, 76 bp, Artificial Sequence; identical to SEQ ID NO: 3369
  Description of Artificial Sequence: Synthetic almond; 5' sequence +inner sequence + 3' sequence

SEQ ID NO: 7397 - DNA, 76 bp, Artificial Sequence; identical to SEQ ID NO: 3746
  Description of Artificial Sequence: Synthetic almond; 5' sequence +inner sequence + 3' sequence

SEQ ID NO: 7398 - DNA, 76 bp, Artificial Sequence; identical to SEQ ID NO: 3909
  Description of Artificial Sequence: Synthetic almond; 5' sequence +inner sequence + 3' sequence

SEQ ID NO: 7399 - DNA, 76 bp, Artificial Sequence; identical to SEQ ID NO: 3333
  Description of Artificial Sequence: Synthetic almond; 5' sequence +inner sequence + 3' sequence

SEQ ID NO: 7400 - DNA, 76 bp, Artificial Sequence; identical to SEQ ID NO: 3176
  Description of Artificial Sequence: Synthetic almond; 5' sequence +inner sequence + 3' sequence

SEQ ID NO: 7401 - DNA, 76 bp, Artificial Sequence
  Description of Artificial Sequence: Synthetic almond; 5' sequence +inner sequence + 3' sequence
tagggaagagaaggacatatgatcgtccgacacgtaccgaccatcggtggccattgactagtacatgaccacttga

SEQ ID NO: 7402 - DNA, 76 bp, Artificial Sequence; identical to SEQ ID NO: 3419
  Description of Artificial Sequence: Synthetic almond; 5' sequence +inner sequence + 3' sequence

SEQ ID NO: 7403 - DNA, 76 bp, Artificial Sequence; identical to SEQ ID NO: 3383
  Description of Artificial Sequence: Synthetic almond; 5' sequence +inner sequence + 3' sequence

SEQ ID NO: 7404 - DNA, 76 bp, Artificial Sequence; identical to SEQ ID NO: 3279
  Description of Artificial Sequence: Synthetic almond; 5' sequence +inner sequence + 3' sequence

SEQ ID NO: 7405 - DNA, 76 bp, Artificial Sequence
  Description of Artificial Sequence: Synthetic almond; 5' sequence +inner sequence + 3' sequence
tagggaagagaaggacatatgatcgcaccgacaagggagcacgtacgcggtcattgactagtacatgaccacttga

SEQ ID NO: 7406 - DNA, 76 bp, Artificial Sequence
  Description of Artificial Sequence: Synthetic almond; 5' sequence +inner sequence + 3' sequence
tagggaagagaaggacatatgatggcatgctcgagcccgattgcgtggccatgttgactagtacatgaccacttga

SEQ ID NO: 7407 - DNA, 76 bp, Artificial Sequence
  Description of Artificial Sequence: Synthetic almond; 5' sequence +inner sequence + 3' sequence
tagggaagagaaggacatatgattggcacgacgattcccgcaagtgcgccatgttgactagtacatgaccacttga

SEQ ID NO: 7408 - DNA, 76 bp, Artificial Sequence; identical to SEQ ID NO: 3156
  Description of Artificial Sequence: Synthetic almond; 5' sequence +inner sequence + 3' sequence

SEQ ID NO: 7409 - DNA, 75 bp, Artificial Sequence; identical to SEQ ID NO: 3259
  Description of Artificial Sequence: Synthetic almond; 5' sequence +inner sequence + 3' sequence

SEQ ID NO: 7410 - DNA, 76 bp, Artificial Sequence; identical to SEQ ID NO: 3757
  Description of Artificial Sequence: Synthetic almond; 5' sequence +inner sequence + 3' sequence

SEQ ID NO: 7411 - DNA, 76 bp, Artificial Sequence; identical to SEQ ID NO: 3417
  Description of Artificial Sequence: Synthetic almond; 5' sequence +inner sequence + 3' sequence

SEQ ID NO: 7412 - DNA, 76 bp, Artificial Sequence; identical to SEQ ID NO: 3248
  Description of Artificial Sequence: Synthetic almond; 5' sequence +inner sequence + 3' sequence

SEQ ID NO: 7413 - DNA, 76 bp, Artificial Sequence; identical to SEQ ID NO: 3180
  Description of Artificial Sequence: Synthetic almond; 5' sequence +inner sequence + 3' sequence

SEQ ID NO: 7414 - DNA, 76 bp, Artificial Sequence; identical to SEQ ID NO: 3668
  Description of Artificial Sequence: Synthetic almond; 5' sequence +inner sequence + 3' sequence

SEQ ID NO: 7415 - DNA, 76 bp, Artificial Sequence; identical to SEQ ID NO: 3563
  Description of Artificial Sequence: Synthetic almond; 5' sequence +inner sequence + 3' sequence

SEQ ID NO: 7416 - DNA, 76 bp, Artificial Sequence; identical to SEQ ID NO: 3433
  Description of Artificial Sequence: Synthetic almond; 5' sequence +inner sequence + 3' sequence

SEQ ID NO: 7417 - DNA, 76 bp, Artificial Sequence; identical to SEQ ID NO: 3344
  Description of Artificial Sequence: Synthetic almond; 5' sequence +inner sequence + 3' sequence

SEQ ID NO: 7418 - DNA, 76 bp, Artificial Sequence; identical to SEQ ID NO: 3647
  Description of Artificial Sequence: Synthetic almond; 5' sequence +inner sequence + 3' sequence

SEQ ID NO: 7419 - DNA, 76 bp, Artificial Sequence
  Description of Artificial Sequence: Synthetic almond; 5' sequence +inner sequence + 3' sequence
tagggaagagaaggacatatgatccgtaccgacatcaagcggtggtgtgcgtgttgactagtacatgaccacttga

SEQ ID NO: 7420 - DNA, 76 bp, Artificial Sequence
  Description of Artificial Sequence: Synthetic almond; 5' sequence +inner sequence + 3' sequence
tagggaagagaaggacatatgatccgtagcgacatcaagcggtggtgggcgtgttgactagtacatgaccacttga

SEQ ID NO: 7421 - DNA, 76 bp, Artificial Sequence; identical to SEQ ID NO: 3358
  Description of Artificial Sequence: Synthetic almond; 5' sequence +inner sequence + 3' sequence

SEQ ID NO: 7422 - DNA, 76 bp, Artificial Sequence; identical to SEQ ID NO: 3524
  Description of Artificial Sequence: Synthetic almond; 5' sequence +inner sequence + 3' sequence

SEQ ID NO: 7423 - DNA, 76 bp, Artificial Sequence; identical to SEQ ID NO: 3375
  Description of Artificial Sequence: Synthetic almond; 5' sequence +inner sequence + 3' sequence

SEQ ID NO: 7424 - DNA, 76 bp, Artificial Sequence; identical to SEQ ID NO: 3181
  Description of Artificial Sequence: Synthetic almond; 5' sequence +inner sequence + 3' sequence

SEQ ID NO: 7425 - DNA, 76 bp, Artificial Sequence
  Description of Artificial Sequence: Synthetic almond; 5' sequence +inner sequence + 3' sequence
tagggaagagaaggacatatgatgcactgaacggaatgtgctggacgtggccattgactagtacatgaccacttga

SEQ ID NO: 7426 - DNA, 76 bp, Artificial Sequence; identical to SEQ ID NO: 3638
  Description of Artificial Sequence: Synthetic almond; 5' sequence +inner sequence + 3' sequence

SEQ ID NO: 7427 - DNA, 76 bp, Artificial Sequence; identical to SEQ ID NO: 3467
  Description of Artificial Sequence: Synthetic almond; 5' sequence +inner sequence + 3' sequence

SEQ ID NO: 7428 - DNA, 76 bp, Artificial Sequence
  Description of Artificial Sequence: Synthetic almond; 5' sequence +inner sequence + 3' sequence
tagggaagagaaggacatatgattcatgtggccgtgctgacccaacgtgagcattgactagtacatgaccacttga

SEQ ID NO: 7429 - DNA, 76 bp, Artificial Sequence
  Description of Artificial Sequence: Synthetic almond; 5' sequence +inner sequence + 3' sequence
tagggaagagaaggacatatgatggcatgcgctgaacgaggcatgatgcgtcattgactagtacatgaccacttga

SEQ ID NO: 7430 - DNA, 76 bp, Artificial Sequence; identical to SEQ ID NO: 3397
  Description of Artificial Sequence: Synthetic almond; 5' sequence +inner sequence + 3' sequence

SEQ ID NO: 7431 - DNA, 76 bp, Artificial Sequence; identical to SEQ ID NO: 3128
  Description of Artificial Sequence: Synthetic almond; 5' sequence +inner sequence + 3' sequence

SEQ ID NO: 7432 - DNA, 76 bp, Artificial Sequence; identical to SEQ ID NO: 3284
  Description of Artificial Sequence: Synthetic almond; 5' sequence +inner sequence + 3' sequence

SEQ ID NO: 7433 - DNA, 76 bp, Artificial Sequence; identical to SEQ ID NO: 3592
  Description of Artificial Sequence: Synthetic almond; 5' sequence +inner sequence + 3' sequence

SEQ ID NO: 7434 - DNA, 77 bp, Artificial Sequence
  Description of Artificial Sequence: Synthetic almond; 5' sequence +inner sequence + 3' sequence
tagggaagagaaggacatatgatccgtagcgacaagggagcacgtacgcggtcattgactagtacatgaccacttga

SEQ ID NO: 7435 - DNA, 76 bp, Artificial Sequence; identical to SEQ ID NO: 3513
  Description of Artificial Sequence: Synthetic almond; 5' sequence +inner sequence + 3' sequence

SEQ ID NO: 7436 - DNA, 76 bp, Artificial Sequence
  Description of Artificial Sequence: Synthetic almond; 5' sequence +inner sequence + 3' sequence
tagggaagagaaggacatatgatggccaaacggaccggttgcggtgttgcacattgactagtacatgaccacttga

SEQ ID NO: 7437 - DNA, 76 bp, Artificial Sequence; identical to SEQ ID NO: 3591
  Description of Artificial Sequence: Synthetic almond; 5' sequence +inner sequence + 3' sequence

SEQ ID NO: 7438 - DNA, 76 bp, Artificial Sequence; identical to SEQ ID NO: 3272
  Description of Artificial Sequence: Synthetic almond; 5' sequence +inner sequence + 3' sequence

SEQ ID NO: 7439 - DNA, 76 bp, Artificial Sequence; identical to SEQ ID NO: 3630
  Description of Artificial Sequence: Synthetic almond; 5' sequence +inner sequence + 3' sequence

SEQ ID NO: 7440 - DNA, 76 bp, Artificial Sequence; identical to SEQ ID NO: 3219
  Description of Artificial Sequence: Synthetic almond; 5' sequence +inner sequence + 3' sequence

SEQ ID NO: 7441 - DNA, 76 bp, Artificial Sequence; identical to SEQ ID NO: 3504
  Description of Artificial Sequence: Synthetic almond; 5' sequence +inner sequence + 3' sequence

SEQ ID NO: 7442 - DNA, 76 bp, Artificial Sequence; identical to SEQ ID NO: 3300
  Description of Artificial Sequence: Synthetic almond; 5' sequence +inner sequence + 3' sequence

SEQ ID NO: 7443 - DNA, 76 bp, Artificial Sequence; identical to SEQ ID NO: 3860
  Description of Artificial Sequence: Synthetic almond; 5' sequence +inner sequence + 3' sequence

SEQ ID NO: 7444 - DNA, 76 bp, Artificial Sequence; identical to SEQ ID NO: 3356
  Description of Artificial Sequence: Synthetic almond; 5' sequence +inner sequence + 3' sequence

SEQ ID NO: 7445 - DNA, 76 bp, Artificial Sequence
  Description of Artificial Sequence: Synthetic almond; 5' sequence +inner sequence + 3' sequence
tagggaagagaaggacatatgatgtcatgcacgcaactttcacgtggccatggttgactagtacatgaccacttga

SEQ ID NO: 7446 - DNA, 76 bp, Artificial Sequence; identical to SEQ ID NO: 3256
  Description of Artificial Sequence: Synthetic almond; 5' sequence +inner sequence + 3' sequence

SEQ ID NO: 7447 - DNA, 76 bp, Artificial Sequence; identical to SEQ ID NO: 3206
  Description of Artificial Sequence: Synthetic almond; 5' sequence +inner sequence + 3' sequence

SEQ ID NO: 7448 - DNA, 76 bp, Artificial Sequence; identical to SEQ ID NO: 3403
  Description of Artificial Sequence: Synthetic almond; 5' sequence +inner sequence + 3' sequence

SEQ ID NO: 7449 - DNA, 76 bp, Artificial Sequence
  Description of Artificial Sequence: Synthetic almond; 5' sequence +inner sequence + 3' sequence
tagggaagagaaggacatatgattcgacagaccgtgcaccgtggccatgcactttgactagtacatgaccacttga

SEQ ID NO: 7450 - DNA, 76 bp, Artificial Sequence; identical to SEQ ID NO: 3815
  Description of Artificial Sequence: Synthetic almond; 5' sequence +inner sequence + 3' sequence

SEQ ID NO: 7451 - DNA, 76 bp, Artificial Sequence
  Description of Artificial Sequence: Synthetic almond; 5' sequence +inner sequence + 3' sequence
tagggaagagaaggacatatgatggcatgcgaaggacctatcatgtgggcagattgactagtacatgaccacttga

SEQ ID NO: 7452 - DNA, 76 bp, Artificial Sequence; identical to SEQ ID NO: 3236
  Description of Artificial Sequence: Synthetic almond; 5' sequence +inner sequence + 3' sequence

SEQ ID NO: 7453 - DNA, 76 bp, Artificial Sequence; identical to SEQ ID NO: 3422
  Description of Artificial Sequence: Synthetic almond; 5' sequence +inner sequence + 3' sequence

SEQ ID NO: 7454 - DNA, 76 bp, Artificial Sequence; identical to SEQ ID NO: 3925
  Description of Artificial Sequence: Synthetic almond; 5' sequence +inner sequence + 3' sequence

SEQ ID NO: 7455 - DNA, 76 bp, Artificial Sequence; identical to SEQ ID NO: 3409
  Description of Artificial Sequence: Synthetic almond; 5' sequence +inner sequence + 3' sequence

SEQ ID NO: 7456 - DNA, 76 bp, Artificial Sequence; identical to SEQ ID NO: 3862
  Description of Artificial Sequence: Synthetic almond; 5' sequence +inner sequence + 3' sequence

SEQ ID NO: 7457 - DNA, 76 bp, Artificial Sequence; identical to SEQ ID NO: 3994
  Description of Artificial Sequence: Synthetic almond; 5' sequence +inner sequence + 3' sequence

SEQ ID NO: 7458 - DNA, 76 bp, Artificial Sequence; identical to SEQ ID NO: 3217
  Description of Artificial Sequence: Synthetic almond; 5' sequence +inner sequence + 3' sequence

SEQ ID NO: 7459 - DNA, 76 bp, Artificial Sequence
  Description of Artificial Sequence: Synthetic almond; 5' sequence +inner sequence + 3' sequence
tagggaagagaaggacatatgatggccgagcgtaccgtgcgagtgggagcgtattgactagtacatgaccacttga

SEQ ID NO: 7460 - DNA, 76 bp, Artificial Sequence; identical to SEQ ID NO: 3244
  Description of Artificial Sequence: Synthetic almond; 5' sequence +inner sequence + 3' sequence

SEQ ID NO: 7461 - DNA, 76 bp, Artificial Sequence; identical to SEQ ID NO: 3357
  Description of Artificial Sequence: Synthetic almond; 5' sequence +inner sequence + 3' sequence

SEQ ID NO: 7462 - DNA, 76 bp, Artificial Sequence; identical to SEQ ID NO: 3394
  Description of Artificial Sequence: Synthetic almond; 5' sequence +inner sequence + 3' sequence

SEQ ID NO: 7463 - DNA, 76 bp, Artificial Sequence; identical to SEQ ID NO: 3777
  Description of Artificial Sequence: Synthetic almond; 5' sequence +inner sequence + 3' sequence

SEQ ID NO: 7464 - DNA, 76 bp, Artificial Sequence; identical to SEQ ID NO: 3492
  Description of Artificial Sequence: Synthetic almond; 5' sequence +inner sequence + 3' sequence

SEQ ID NO: 7465 - DNA, 76 bp, Artificial Sequence
  Description of Artificial Sequence: Synthetic almond; 5' sequence +inner sequence + 3' sequence
tagggaagagaaggacatatgatcacatggtggcatactgactgcactgcactttgactagtacatgaccacttga

SEQ ID NO: 7466 - DNA, 76 bp, Artificial Sequence; identical to SEQ ID NO: 3561
  Description of Artificial Sequence: Synthetic almond; 5' sequence +inner sequence + 3' sequence

SEQ ID NO: 7467 - DNA, 76 bp, Artificial Sequence; identical to SEQ ID NO: 3637
  Description of Artificial Sequence: Synthetic almond; 5' sequence +inner sequence + 3' sequence

SEQ ID NO: 7468 - DNA, 76 bp, Artificial Sequence; identical to SEQ ID NO: 3530
  Description of Artificial Sequence: Synthetic almond; 5' sequence +inner sequence + 3' sequence

SEQ ID NO: 7469 - DNA, 76 bp, Artificial Sequence
  Description of Artificial Sequence: Synthetic almond; 5' sequence +inner sequence + 3' sequence
tagggaagagaaggacatatgatcgtcacgcatcactggcctgccttgccgtgttgactagtacatgaccacttga

SEQ ID NO: 7470 - DNA, 76 bp, Artificial Sequence
  Description of Artificial Sequence: Synthetic almond; 5' sequence +inner sequence + 3' sequence
tagggaagagaaggacatatgatggccgaagcgatacggcaagtcggcatgcattgactagtacatgaccacttga

SEQ ID NO: 7471 - DNA, 76 bp, Artificial Sequence; identical to SEQ ID NO: 3620
  Description of Artificial Sequence: Synthetic almond; 5' sequence +inner sequence + 3' sequence

SEQ ID NO: 7472 - DNA, 76 bp, Artificial Sequence
  Description of Artificial Sequence: Synthetic almond; 5' sequence +inner sequence + 3' sequence
tagggaagagaaggacatatgatcgatcgcaccgccgtgatcatgcacgcgcattgactagtacatgaccacttga

SEQ ID NO: 7473 - DNA, 76 bp, Artificial Sequence; identical to SEQ ID NO: 3875
  Description of Artificial Sequence: Synthetic almond; 5' sequence +inner sequence + 3' sequence

SEQ ID NO: 7474 - DNA, 76 bp, Artificial Sequence; identical to SEQ ID NO: 3292
  Description of Artificial Sequence: Synthetic almond; 5' sequence +inner sequence + 3' sequence

SEQ ID NO: 7475 - DNA, 76 bp, Artificial Sequence; identical to SEQ ID NO: 3294
  Description of Artificial Sequence: Synthetic almond; 5' sequence +inner sequence + 3' sequence

SEQ ID NO: 7476 - DNA, 76 bp, Artificial Sequence; identical to SEQ ID NO: 3728
  Description of Artificial Sequence: Synthetic almond; 5' sequence +inner sequence + 3' sequence

SEQ ID NO: 7477 - DNA, 76 bp, Artificial Sequence; identical to SEQ ID NO: 3631
  Description of Artificial Sequence: Synthetic almond; 5' sequence +inner sequence + 3' sequence

SEQ ID NO: 7478 - DNA, 76 bp, Artificial Sequence; identical to SEQ ID NO: 3278
  Description of Artificial Sequence: Synthetic almond; 5' sequence +inner sequence + 3' sequence

SEQ ID NO: 7479 - DNA, 76 bp, Artificial Sequence; identical to SEQ ID NO: 3407
  Description of Artificial Sequence: Synthetic almond; 5' sequence +inner sequence + 3' sequence

SEQ ID NO: 7480 - DNA, 76 bp, Artificial Sequence; identical to SEQ ID NO: 3556
  Description of Artificial Sequence: Synthetic almond; 5' sequence +inner sequence + 3' sequence

SEQ ID NO: 7481 - DNA, 76 bp, Artificial Sequence; identical to SEQ ID NO: 3706
  Description of Artificial Sequence: Synthetic almond; 5' sequence +inner sequence + 3' sequence

SEQ ID NO: 7482 - DNA, 76 bp, Artificial Sequence; identical to SEQ ID NO: 3326
  Description of Artificial Sequence: Synthetic almond; 5' sequence +inner sequence + 3' sequence

SEQ ID NO: 7483 - DNA, 76 bp, Artificial Sequence; identical to SEQ ID NO: 3393
  Description of Artificial Sequence: Synthetic almond; 5' sequence +inner sequence + 3' sequence

SEQ ID NO: 7484 - DNA, 76 bp, Artificial Sequence; identical to SEQ ID NO: 3764
  Description of Artificial Sequence: Synthetic almond; 5' sequence +inner sequence + 3' sequence

SEQ ID NO: 7485 - DNA, 76 bp, Artificial Sequence
  Description of Artificial Sequence: Synthetic almond; 5' sequence +inner sequence + 3' sequence
tagggaagagaaggacatatgattgaacgcagtgacgaaacgtatggcgcacattgactagtacatgaccacttga

SEQ ID NO: 7486 - DNA, 76 bp, Artificial Sequence; identical to SEQ ID NO: 3891
  Description of Artificial Sequence: Synthetic almond; 5' sequence +inner sequence + 3' sequence

SEQ ID NO: 7487 - DNA, 76 bp, Artificial Sequence; identical to SEQ ID NO: 3617
  Description of Artificial Sequence: Synthetic almond; 5' sequence +inner sequence + 3' sequence

SEQ ID NO: 7488 - DNA, 76 bp, Artificial Sequence; identical to SEQ ID NO: 3124
  Description of Artificial Sequence: Synthetic almond; 5' sequence +inner sequence + 3' sequence

SEQ ID NO: 7489 - DNA, 76 bp, Artificial Sequence
  Description of Artificial Sequence: Synthetic almond; 5' sequence +inner sequence + 3' sequence
tagggaagagaaggacatatgatggcatgcgatgaacgaggcatgatccgtcattgactagtacatgaccacttga

SEQ ID NO: 7490 - DNA, 76 bp, Artificial Sequence; identical to SEQ ID NO: 3528
  Description of Artificial Sequence: Synthetic almond; 5' sequence +inner sequence + 3' sequence

SEQ ID NO: 7491 - DNA, 76 bp, Artificial Sequence
  Description of Artificial Sequence: Synthetic almond; 5' sequence +inner sequence + 3' sequence
tagggaagagaaggacatatgatggcatgagcgaacccgtcgagtgcgtcgtattgactagtacatgaccacttga

SEQ ID NO: 7492 - DNA, 76 bp, Artificial Sequence
  Description of Artificial Sequence: Synthetic almond; 5' sequence +inner sequence + 3' sequence
tagggaagagaaggacatatgatgtacgccactgaccgaccttgcgtgaggcattgactagtacatgaccacttga

SEQ ID NO: 7493 - DNA, 76 bp, Artificial Sequence; identical to SEQ ID NO: 3669
  Description of Artificial Sequence: Synthetic almond; 5' sequence +inner sequence + 3' sequence

SEQ ID NO: 7494 - DNA, 76 bp, Artificial Sequence
  Description of Artificial Sequence: Synthetic almond; 5' sequence +inner sequence + 3' sequence
tagggaagagaaggacatatgatgacgacgatgagcgtgggattggctggtgtttgactagtacatgaccacttga

SEQ ID NO: 7495 - DNA, 76 bp, Artificial Sequence; identical to SEQ ID NO: 3331
  Description of Artificial Sequence: Synthetic almond; 5' sequence +inner sequence + 3' sequence

SEQ ID NO: 7496 - DNA, 76 bp, Artificial Sequence; identical to SEQ ID NO: 3628
  Description of Artificial Sequence: Synthetic almond; 5' sequence +inner sequence + 3' sequence

SEQ ID NO: 7497 - DNA, 76 bp, Artificial Sequence; identical to SEQ ID NO: 3309
  Description of Artificial Sequence: Synthetic almond; 5' sequence +inner sequence + 3' sequence

SEQ ID NO: 7498 - DNA, 76 bp, Artificial Sequence
  Description of Artificial Sequence: Synthetic almond; 5' sequence +inner sequence + 3' sequence
tagggaagagaaggacatatgatggcacaaacggaccgacaagcgcgcatggattgactagtacatgaccacttga

SEQ ID NO: 7499 - DNA, 76 bp, Artificial Sequence
  Description of Artificial Sequence: Synthetic almond; 5' sequence +inner sequence + 3' sequence
tagggaagagaaggacatatgatccgatcgcacgcacggggacatggtcgagtttgactagtacatgaccacttga

SEQ ID NO: 7500 - DNA, 76 bp, Artificial Sequence; identical to SEQ ID NO: 3166
  Description of Artificial Sequence: Synthetic almond; 5' sequence +inner sequence + 3' sequence

SEQ ID NO: 7501 - DNA, 76 bp, Artificial Sequence; identical to SEQ ID NO: 3597
  Description of Artificial Sequence: Synthetic almond; 5' sequence +inner sequence + 3' sequence

SEQ ID NO: 7502 - DNA, 76 bp, Artificial Sequence
  Description of Artificial Sequence: Synthetic almond; 5' sequence +inner sequence + 3' sequence
tagggaagagaaggacatatgatggtgacgcaacgagtgtactgatcgccacgttgactagtacatgaccacttga

SEQ ID NO: 7503 - DNA, 76 bp, Artificial Sequence
  Description of Artificial Sequence: Synthetic almond; 5' sequence +inner sequence + 3' sequence
tagggaagagaaggacatatgatggcacaaacgtaccgacaagtgcgcatggattgactagtacatgaccacttga

SEQ ID NO: 7504 - DNA, 76 bp, Artificial Sequence
  Description of Artificial Sequence: Synthetic almond; 5' sequence +inner sequence + 3' sequence
tagggaagagaaggacatatgatcgtaccgacaagggagcacgtacgctgtcattgactagtacatgaccacttga

SEQ ID NO: 7505 - DNA, 76 bp, Artificial Sequence; identical to SEQ ID NO: 3249
  Description of Artificial Sequence: Synthetic almond; 5' sequence +inner sequence + 3' sequence

SEQ ID NO: 7506 - DNA, 76 bp, Artificial Sequence; identical to SEQ ID NO: 3365
  Description of Artificial Sequence: Synthetic almond; 5' sequence +inner sequence + 3' sequence

SEQ ID NO: 7507 - DNA, 76 bp, Artificial Sequence; identical to SEQ ID NO: 3911
  Description of Artificial Sequence: Synthetic almond; 5' sequence +inner sequence + 3' sequence

SEQ ID NO: 7508 - DNA, 76 bp, Artificial Sequence; identical to SEQ ID NO: 3398
  Description of Artificial Sequence: Synthetic almond; 5' sequence +inner sequence + 3' sequence

SEQ ID NO: 7509 - DNA, 76 bp, Artificial Sequence
  Description of Artificial Sequence: Synthetic almond; 5' sequence +inner sequence + 3' sequence
tagggaagagaaggacatatgatcgcatcgagcataccggtcctcgcttcacgttgactagtacatgaccacttga

SEQ ID NO: 7510 - DNA, 76 bp, Artificial Sequence; identical to SEQ ID NO: 3281
  Description of Artificial Sequence: Synthetic almond; 5' sequence +inner sequence + 3' sequence

SEQ ID NO: 7511 - DNA, 76 bp, Artificial Sequence; identical to SEQ ID NO: 3487
  Description of Artificial Sequence: Synthetic almond; 5' sequence +inner sequence + 3' sequence

SEQ ID NO: 7512 - DNA, 76 bp, Artificial Sequence; identical to SEQ ID NO: 3437
  Description of Artificial Sequence: Synthetic almond; 5' sequence +inner sequence + 3' sequence

SEQ ID NO: 7513 - DNA, 76 bp, Artificial Sequence
  Description of Artificial Sequence: Synthetic almond; 5' sequence +inner sequence + 3' sequence
tagggaagagaaggacatatgatgtacgcaacgaacctaagagtggccagggattgactagtacatgaccacttga

SEQ ID NO: 7514 - DNA, 76 bp, Artificial Sequence; identical to SEQ ID NO: 3996
  Description of Artificial Sequence: Synthetic almond; 5' sequence +inner sequence + 3' sequence

SEQ ID NO: 7515 - DNA, 76 bp, Artificial Sequence; identical to SEQ ID NO: 3224
  Description of Artificial Sequence: Synthetic almond; 5' sequence +inner sequence + 3' sequence

SEQ ID NO: 7516 - DNA, 76 bp, Artificial Sequence; identical to SEQ ID NO: 3727
  Description of Artificial Sequence: Synthetic almond; 5' sequence +inner sequence + 3' sequence

SEQ ID NO: 7517 - DNA, 76 bp, Artificial Sequence
  Description of Artificial Sequence: Synthetic almond; 5' sequence +inner sequence + 3' sequence
tagggaagagaaggacatatgatcgcatgcgatgaacgaggcatgatgcgtcattgactagtacatgaccacttga

SEQ ID NO: 7518 - DNA, 76 bp, Artificial Sequence; identical to SEQ ID NO: 3942
  Description of Artificial Sequence: Synthetic almond; 5' sequence +inner sequence + 3' sequence

SEQ ID NO: 7519 - DNA, 76 bp, Artificial Sequence
  Description of Artificial Sequence: Synthetic almond; 5' sequence +inner sequence + 3' sequence
tagggaagagaaggacatatgatcgaccgtggagaagcgagcatggatgcagcttgactagtacatgaccacttga

SEQ ID NO: 7520 - DNA, 76 bp, Artificial Sequence
  Description of Artificial Sequence: Synthetic almond; 5' sequence +inner sequence + 3' sequence
tagggaagagaaggacatatgattcgaacgaaccgcatgcatggtcaggcatattgactagtacatgaccacttga

SEQ ID NO: 7521 - DNA, 76 bp, Artificial Sequence
  Description of Artificial Sequence: Synthetic almond; 5' sequence +inner sequence + 3' sequence
tagggaagagaaggacatatgatggcatgcgatgaacgatgcatgatgcgtcattgactagtacatgaccacttga

SEQ ID NO: 7522 - DNA, 76 bp, Artificial Sequence; identical to SEQ ID NO: 3141
  Description of Artificial Sequence: Synthetic almond; 5' sequence +inner sequence + 3' sequence

SEQ ID NO: 7523 - DNA, 76 bp, Artificial Sequence; identical to SEQ ID NO: 3596
  Description of Artificial Sequence: Synthetic almond; 5' sequence +inner sequence + 3' sequence

SEQ ID NO: 7524 - DNA, 76 bp, Artificial Sequence; identical to SEQ ID NO: 3119
  Description of Artificial Sequence: Synthetic almond; 5' sequence +inner sequence + 3' sequence

SEQ ID NO: 7525 - DNA, 76 bp, Artificial Sequence
  Description of Artificial Sequence: Synthetic almond; 5' sequence +inner sequence + 3' sequence
tagggaagagaaggacatatgatggccgaacgagcgtcaggtgcgtcggtgtattgactagtacatgaccacttga

SEQ ID NO: 7526 - DNA, 76 bp, Artificial Sequence
  Description of Artificial Sequence: Synthetic almond; 5' sequence +inner sequence + 3' sequence
tagggaagagaaggacatatgatcgcatgtggagtgagcgtccctgtggcacattgactagtacatgaccacttga

SEQ ID NO: 7527 - DNA, 76 bp, Artificial Sequence; identical to SEQ ID NO: 3101
  Description of Artificial Sequence: Synthetic almond; 5' sequence +inner sequence + 3' sequence

SEQ ID NO: 7528 - DNA, 76 bp, Artificial Sequence; identical to SEQ ID NO: 3242
  Description of Artificial Sequence: Synthetic almond; 5' sequence +inner sequence + 3' sequence

SEQ ID NO: 7529 - DNA, 76 bp, Artificial Sequence
  Description of Artificial Sequence: Synthetic almond; 5' sequence +inner sequence + 3' sequence
tagggaagagaaggacatatgatctgagcggcaagtgcagcacgtacgttggtttgactagtacatgaccacttga

SEQ ID NO: 7530 - DNA, 76 bp, Artificial Sequence
  Description of Artificial Sequence: Synthetic almond; 5' sequence +inner sequence + 3' sequence
tagggaagagaaggacatatgatcatgcggcatgaacggacctacacgtgggcttgactagtacatgaccacttga

SEQ ID NO: 7531 - DNA, 76 bp, Artificial Sequence
  Description of Artificial Sequence: Synthetic almond; 5' sequence +inner sequence + 3' sequence
tagggaagagaaggacatatgatgcaacgcagggatacgtccgacgatgcgtgttgactagtacatgaccacttga

SEQ ID NO: 7532 - DNA, 76 bp, Artificial Sequence; identical to SEQ ID NO: 3346
  Description of Artificial Sequence: Synthetic almond; 5' sequence +inner sequence + 3' sequence

SEQ ID NO: 7533 - DNA, 76 bp, Artificial Sequence; identical to SEQ ID NO: 3680
  Description of Artificial Sequence: Synthetic almond; 5' sequence +inner sequence + 3' sequence

SEQ ID NO: 7534 - DNA, 76 bp, Artificial Sequence; identical to SEQ ID NO: 3518
  Description of Artificial Sequence: Synthetic almond; 5' sequence +inner sequence + 3' sequence

SEQ ID NO: 7535 - DNA, 76 bp, Artificial Sequence
  Description of Artificial Sequence: Synthetic almond; 5' sequence +inner sequence + 3' sequence
tagggaagagaaggacatatgatggactgcactacctacacgtggccacgtacttgactagtacatgaccacttga

SEQ ID NO: 7536 - DNA, 76 bp, Artificial Sequence; identical to SEQ ID NO: 3320
  Description of Artificial Sequence: Synthetic almond; 5' sequence +inner sequence + 3' sequence

SEQ ID NO: 7537 - DNA, 76 bp, Artificial Sequence; identical to SEQ ID NO: 3277
  Description of Artificial Sequence: Synthetic almond; 5' sequence +inner sequence + 3' sequence

SEQ ID NO: 7538 - DNA, 76 bp, Artificial Sequence; identical to SEQ ID NO: 3808
  Description of Artificial Sequence: Synthetic almond; 5' sequence +inner sequence + 3' sequence

SEQ ID NO: 7539 - DNA, 76 bp, Artificial Sequence
  Description of Artificial Sequence: Synthetic almond; 5' sequence +inner sequence + 3' sequence
tagggaagagaaggacatatgatcataccgtgcagcacatgtccgatgcgaccttgactagtacatgaccacttga

SEQ ID NO: 7540 - DNA, 76 bp, Artificial Sequence; identical to SEQ ID NO: 3370
  Description of Artificial Sequence: Synthetic almond; 5' sequence +inner sequence + 3' sequence

SEQ ID NO: 7541 - DNA, 76 bp, Artificial Sequence; identical to SEQ ID NO: 3223
  Description of Artificial Sequence: Synthetic almond; 5' sequence +inner sequence + 3' sequence

SEQ ID NO: 7542 - DNA, 76 bp, Artificial Sequence; identical to SEQ ID NO: 3463
  Description of Artificial Sequence: Synthetic almond; 5' sequence +inner sequence + 3' sequence

SEQ ID NO: 7543 - DNA, 76 bp, Artificial Sequence
  Description of Artificial Sequence: Synthetic almond; 5' sequence +inner sequence + 3' sequence
tagggaagagaaggacatatgatccgcacgtagccctatcagtggggcatgcattgactagtacatgaccacttga

SEQ ID NO: 7544 - DNA, 76 bp, Artificial Sequence; identical to SEQ ID NO: 3366
  Description of Artificial Sequence: Synthetic almond; 5' sequence +inner sequence + 3' sequence

SEQ ID NO: 7545 - DNA, 76 bp, Artificial Sequence; identical to SEQ ID NO: 3583
  Description of Artificial Sequence: Synthetic almond; 5' sequence +inner sequence + 3' sequence

SEQ ID NO: 7546 - DNA, 76 bp, Artificial Sequence; identical to SEQ ID NO: 3510
  Description of Artificial Sequence: Synthetic almond; 5' sequence +inner sequence + 3' sequence

SEQ ID NO: 7547 - DNA, 76 bp, Artificial Sequence; identical to SEQ ID NO: 3657
  Description of Artificial Sequence: Synthetic almond; 5' sequence +inner sequence + 3' sequence

SEQ ID NO: 7548 - DNA, 76 bp, Artificial Sequence; identical to SEQ ID NO: 3319
  Description of Artificial Sequence: Synthetic almond; 5' sequence +inner sequence + 3' sequence

SEQ ID NO: 7549 - DNA, 76 bp, Artificial Sequence; identical to SEQ ID NO: 3135
  Description of Artificial Sequence: Synthetic almond; 5' sequence +inner sequence + 3' sequence

SEQ ID NO: 7550 - DNA, 76 bp, Artificial Sequence; identical to SEQ ID NO: 3622
  Description of Artificial Sequence: Synthetic almond; 5' sequence +inner sequence + 3' sequence

SEQ ID NO: 7551 - DNA, 76 bp, Artificial Sequence; identical to SEQ ID NO: 3324
  Description of Artificial Sequence: Synthetic almond; 5' sequence +inner sequence + 3' sequence

SEQ ID NO: 7552 - DNA, 76 bp, Artificial Sequence
  Description of Artificial Sequence: Synthetic almond; 5' sequence +inner sequence + 3' sequence
tagggaagagaaggacatatgatggacgcacgatgagcgccaagtgacatggattgactagtacatgaccacttga

SEQ ID NO: 7553 - DNA, 76 bp, Artificial Sequence; identical to SEQ ID NO: 3275
  Description of Artificial Sequence: Synthetic almond; 5' sequence +inner sequence + 3' sequence

SEQ ID NO: 7554 - DNA, 76 bp, Artificial Sequence; identical to SEQ ID NO: 3722
  Description of Artificial Sequence: Synthetic almond; 5' sequence +inner sequence + 3' sequence

SEQ ID NO: 7555 - DNA, 76 bp, Artificial Sequence
  Description of Artificial Sequence: Synthetic almond; 5' sequence +inner sequence + 3' sequence
tagggaagagaaggacatatgatggaccgagcgagccatcaagtcggcatgcattgactagtacatgaccacttga

SEQ ID NO: 7556 - DNA, 76 bp, Artificial Sequence; identical to SEQ ID NO: 3816
  Description of Artificial Sequence: Synthetic almond; 5' sequence +inner sequence + 3' sequence

SEQ ID NO: 7557 - DNA, 76 bp, Artificial Sequence; identical to SEQ ID NO: 3535
  Description of Artificial Sequence: Synthetic almond; 5' sequence +inner sequence + 3' sequence

SEQ ID NO: 7558 - DNA, 76 bp, Artificial Sequence; identical to SEQ ID NO: 3568
  Description of Artificial Sequence: Synthetic almond; 5' sequence +inner sequence + 3' sequence

SEQ ID NO: 7559 - DNA, 75 bp, Artificial Sequence
  Description of Artificial Sequence: Synthetic almond; 5' sequence +inner sequence + 3' sequence
tagggaagagaaggacatatgatggccgaacggaccgacaagtgcgcatggattgactagtacatgaccacttga

SEQ ID NO: 7560 - DNA, 76 bp, Artificial Sequence; identical to SEQ ID NO: 3695
  Description of Artificial Sequence: Synthetic almond; 5' sequence +inner sequence + 3' sequence

SEQ ID NO: 7561 - DNA, 76 bp, Artificial Sequence; identical to SEQ ID NO: 3440
  Description of Artificial Sequence: Synthetic almond; 5' sequence +inner sequence + 3' sequence

SEQ ID NO: 7562 - DNA, 75 bp, Artificial Sequence; identical to SEQ ID NO: 3334
  Description of Artificial Sequence: Synthetic almond; 5' sequence +inner sequence + 3' sequence

SEQ ID NO: 7563 - DNA, 76 bp, Artificial Sequence; identical to SEQ ID NO: 3615
  Description of Artificial Sequence: Synthetic almond; 5' sequence +inner sequence + 3' sequence

SEQ ID NO: 7564 - DNA, 76 bp, Artificial Sequence; identical to SEQ ID NO: 3952
  Description of Artificial Sequence: Synthetic almond; 5' sequence +inner sequence + 3' sequence

SEQ ID NO: 7565 - DNA, 76 bp, Artificial Sequence
  Description of Artificial Sequence: Synthetic almond; 5' sequence +inner sequence + 3' sequence
tagggaagagaaggacatatgatggcatgcacgcacctacacgtgggtatggcttgactagtacatgaccacttga

SEQ ID NO: 7566 - DNA, 76 bp, Artificial Sequence; identical to SEQ ID NO: 3557
  Description of Artificial Sequence: Synthetic almond; 5' sequence +inner sequence + 3' sequence

SEQ ID NO: 7567 - DNA, 76 bp, Artificial Sequence; identical to SEQ ID NO: 3818
  Description of Artificial Sequence: Synthetic almond; 5' sequence +inner sequence + 3' sequence

SEQ ID NO: 7568 - DNA, 76 bp, Artificial Sequence
  Description of Artificial Sequence: Synthetic almond; 5' sequence +inner sequence + 3' sequence
tagggaagagaaggacatatgatgcgtgcagcatagggagcacacgtcccgtgttgactagtacatgaccacttga

SEQ ID NO: 7569 - DNA, 76 bp, Artificial Sequence
  Description of Artificial Sequence: Synthetic almond; 5' sequence +inner sequence + 3' sequence
tagggaagagaaggacatatgatggccgacgatgaccgcatgcacgattgccattgactagtacatgaccacttga

SEQ ID NO: 7570 - DNA, 76 bp, Artificial Sequence; identical to SEQ ID NO: 3900
  Description of Artificial Sequence: Synthetic almond; 5' sequence +inner sequence + 3' sequence

SEQ ID NO: 7571 - DNA, 76 bp, Artificial Sequence
  Description of Artificial Sequence: Synthetic almond; 5' sequence +inner sequence + 3' sequence
tagggaagagaaggacatatgatggcatgcgatgaactaggcatgatgcgtcattgactagtacatgaccacttga

SEQ ID NO: 7572 - DNA, 76 bp, Artificial Sequence; identical to SEQ ID NO: 3231
  Description of Artificial Sequence: Synthetic almond; 5' sequence +inner sequence + 3' sequence

SEQ ID NO: 7573 - DNA, 76 bp, Artificial Sequence
  Description of Artificial Sequence: Synthetic almond; 5' sequence +inner sequence + 3' sequence
tagggaagagaaggacatatgatccggagcgacatcaagcggtggtgtgcgtgttgactagtacatgaccacttga

SEQ ID NO: 7574 - DNA, 76 bp, Artificial Sequence; identical to SEQ ID NO: 3800
  Description of Artificial Sequence: Synthetic almond; 5' sequence +inner sequence + 3' sequence

SEQ ID NO: 7575 - DNA, 76 bp, Artificial Sequence
  Description of Artificial Sequence: Synthetic almond; 5' sequence +inner sequence + 3' sequence
tagggaagagaaggacatatgattgcacaaacggaccgacaagtgcgcatggattgactagtacatgaccacttga

SEQ ID NO: 7576 - DNA, 76 bp, Artificial Sequence
  Description of Artificial Sequence: Synthetic almond; 5' sequence +inner sequence + 3' sequence
tagggaagagaaggacatatgatggcatgcgatgaacgaggcatgatgcgacattgactagtacatgaccacttga

SEQ ID NO: 7577 - DNA, 76 bp, Artificial Sequence; identical to SEQ ID NO: 3475
  Description of Artificial Sequence: Synthetic almond; 5' sequence +inner sequence + 3' sequence

SEQ ID NO: 7578 - DNA, 76 bp, Artificial Sequence; identical to SEQ ID NO: 3373
  Description of Artificial Sequence: Synthetic almond; 5' sequence +inner sequence + 3' sequence

SEQ ID NO: 7579 - DNA, 76 bp, Artificial Sequence
  Description of Artificial Sequence: Synthetic almond; 5' sequence +inner sequence + 3' sequence
tagggaagagaaggacatatgatccgaagcgacatcaagcggtggtgtgcgtgttgactagtacatgaccacttga

SEQ ID NO: 7580 - DNA, 76 bp, Artificial Sequence
  Description of Artificial Sequence: Synthetic almond; 5' sequence +inner sequence + 3' sequence
tagggaagagaaggacatatgatcgaaccggaacgtggtgactgggcttgtgtttgactagtacatgaccacttga

SEQ ID NO: 7581 - DNA, 76 bp, Artificial Sequence; identical to SEQ ID NO: 3301
  Description of Artificial Sequence: Synthetic almond; 5' sequence +inner sequence + 3' sequence

SEQ ID NO: 7582 - DNA, 76 bp, Artificial Sequence; identical to SEQ ID NO: 3979
  Description of Artificial Sequence: Synthetic almond; 5' sequence +inner sequence + 3' sequence

SEQ ID NO: 7583 - DNA, 76 bp, Artificial Sequence
  Description of Artificial Sequence: Synthetic almond; 5' sequence +inner sequence + 3' sequence
tagggaagagaaggacatatgatgacatgcagcaacgtacgcccttccgtgcattgactagtacatgaccacttga

SEQ ID NO: 7584 - DNA, 76 bp, Artificial Sequence; identical to SEQ ID NO: 3889
  Description of Artificial Sequence: Synthetic almond; 5' sequence +inner sequence + 3' sequence

SEQ ID NO: 7585 - DNA, 76 bp, Artificial Sequence
  Description of Artificial Sequence: Synthetic almond; 5' sequence +inner sequence + 3' sequence
tagggaagagaaggacatatgatggcctgaccaaccgaccctcgtgcgtcacgttgactagtacatgaccacttga

SEQ ID NO: 7586 - DNA, 76 bp, Artificial Sequence; identical to SEQ ID NO: 3317
  Description of Artificial Sequence: Synthetic almond; 5' sequence +inner sequence + 3' sequence

SEQ ID NO: 7587 - DNA, 76 bp, Artificial Sequence; identical to SEQ ID NO: 3686
  Description of Artificial Sequence: Synthetic almond; 5' sequence +inner sequence + 3' sequence

SEQ ID NO: 7588 - DNA, 76 bp, Artificial Sequence
  Description of Artificial Sequence: Synthetic almond; 5' sequence +inner sequence + 3' sequence
tagggaagagaaggacatatgatcgtgcgtcacgcagagggccagctcggacattgactagtacatgaccacttga

SEQ ID NO: 7589 - DNA, 76 bp, Artificial Sequence; identical to SEQ ID NO: 3400
  Description of Artificial Sequence: Synthetic almond; 5' sequence +inner sequence + 3' sequence

SEQ ID NO: 7590 - DNA, 76 bp, Artificial Sequence
  Description of Artificial Sequence: Synthetic almond; 5' sequence +inner sequence + 3' sequence
tagggaagagaaggacatatgatcgtccgaaacgcacgtgcaagttgggcatattgactagtacatgaccacttga

SEQ ID NO: 7591 - DNA, 76 bp, Artificial Sequence
  Description of Artificial Sequence: Synthetic almond; 5' sequence +inner sequence + 3' sequence
tagggaagagaaggacatatgatggcatgcgcggacattcaagttggcgtggattgactagtacatgaccacttga

SEQ ID NO: 7592 - DNA, 76 bp, Artificial Sequence
  Description of Artificial Sequence: Synthetic almond; 5' sequence +inner sequence + 3' sequence
tagggaagagaaggacatatgattcatgtggacgatcgacccgtacgtggacattgactagtacatgaccacttga

SEQ ID NO: 7593 - DNA, 76 bp, Artificial Sequence; identical to SEQ ID NO: 3801
  Description of Artificial Sequence: Synthetic almond; 5' sequence +inner sequence + 3' sequence

SEQ ID NO: 7594 - DNA, 76 bp, Artificial Sequence; identical to SEQ ID NO: 3169
  Description of Artificial Sequence: Synthetic almond; 5' sequence +inner sequence + 3' sequence

SEQ ID NO: 7595 - DNA, 76 bp, Artificial Sequence; identical to SEQ ID NO: 3239
  Description of Artificial Sequence: Synthetic almond; 5' sequence +inner sequence + 3' sequence

SEQ ID NO: 7596 - DNA, 76 bp, Artificial Sequence; identical to SEQ ID NO: 3603
  Description of Artificial Sequence: Synthetic almond; 5' sequence +inner sequence + 3' sequence

SEQ ID NO: 7597 - DNA, 76 bp, Artificial Sequence
  Description of Artificial Sequence: Synthetic almond; 5' sequence +inner sequence + 3' sequence
tagggaagagaaggacatatgattggacgcaacgtaacgataacgtgggagtgttgactagtacatgaccacttga

SEQ ID NO: 7598 - DNA, 76 bp, Artificial Sequence
  Description of Artificial Sequence: Synthetic almond; 5' sequence +inner sequence + 3' sequence
tagggaagagaaggacatatgatccgatcggaccgattcaacgtgtgcatggattgactagtacatgaccacttga

SEQ ID NO: 7599 - DNA, 76 bp, Artificial Sequence; identical to SEQ ID NO: 3768
  Description of Artificial Sequence: Synthetic almond; 5' sequence +inner sequence + 3' sequence

SEQ ID NO: 7600 - DNA, 76 bp, Artificial Sequence; identical to SEQ ID NO: 3758
  Description of Artificial Sequence: Synthetic almond; 5' sequence +inner sequence + 3' sequence

SEQ ID NO: 7601 - DNA, 76 bp, Artificial Sequence; identical to SEQ ID NO: 3289
  Description of Artificial Sequence: Synthetic almond; 5' sequence +inner sequence + 3' sequence

SEQ ID NO: 7602 - DNA, 76 bp, Artificial Sequence; identical to SEQ ID NO: 3227
  Description of Artificial Sequence: Synthetic almond; 5' sequence +inner sequence + 3' sequence

SEQ ID NO: 7603 - DNA, 76 bp, Artificial Sequence
  Description of Artificial Sequence: Synthetic almond; 5' sequence +inner sequence + 3' sequence
tagggaagagaaggacatatgatgcacgactcgcaccctatcatgcggccatgttgactagtacatgaccacttga

SEQ ID NO: 7604 - DNA, 76 bp, Artificial Sequence; identical to SEQ ID NO: 3495
  Description of Artificial Sequence: Synthetic almond; 5' sequence +inner sequence + 3' sequence

SEQ ID NO: 7605 - DNA, 76 bp, Artificial Sequence
  Description of Artificial Sequence: Synthetic almond; 5' sequence +inner sequence + 3' sequence
tagggaagagaaggacatatgatggacgtagcgaccgaacggtgtgccatgtattgactagtacatgaccacttga

SEQ ID NO: 7606 - DNA, 76 bp, Artificial Sequence; identical to SEQ ID NO: 3780
  Description of Artificial Sequence: Synthetic almond; 5' sequence +inner sequence + 3' sequence

SEQ ID NO: 7607 - DNA, 76 bp, Artificial Sequence; identical to SEQ ID NO: 3187
  Description of Artificial Sequence: Synthetic almond; 5' sequence +inner sequence + 3' sequence

SEQ ID NO: 7608 - DNA, 76 bp, Artificial Sequence; identical to SEQ ID NO: 3776
  Description of Artificial Sequence: Synthetic almond; 5' sequence +inner sequence + 3' sequence

SEQ ID NO: 7609 - DNA, 76 bp, Artificial Sequence; identical to SEQ ID NO: 3340
  Description of Artificial Sequence: Synthetic almond; 5' sequence +inner sequence + 3' sequence

SEQ ID NO: 7610 - DNA, 76 bp, Artificial Sequence
  Description of Artificial Sequence: Synthetic almond; 5' sequence +inner sequence + 3' sequence
tagggaagagaaggacatatgatggacgcagcgtggcatatcacgtgatcatgttgactagtacatgaccacttga

SEQ ID NO: 7611 - DNA, 76 bp, Artificial Sequence
  Description of Artificial Sequence: Synthetic almond; 5' sequence +inner sequence + 3' sequence
tagggaagagaaggacatatgatgtgcgccgatgaccgtcaagtcgtggtgtattgactagtacatgaccacttga

SEQ ID NO: 7612 - DNA, 76 bp, Artificial Sequence
  Description of Artificial Sequence: Synthetic almond; 5' sequence +inner sequence + 3' sequence
tagggaagagaaggacatatgatcgtgacagcgagcacgtccaacgctgcgcattgactagtacatgaccacttga

SEQ ID NO: 7613 - DNA, 76 bp, Artificial Sequence
  Description of Artificial Sequence: Synthetic almond; 5' sequence +inner sequence + 3' sequence
tagggaagagaaggacatatgatggccgactcgaccgcgtcatgaacggcatgttgactagtacatgaccacttga

SEQ ID NO: 7614 - DNA, 76 bp, Artificial Sequence; identical to SEQ ID NO: 3432
  Description of Artificial Sequence: Synthetic almond; 5' sequence +inner sequence + 3' sequence

SEQ ID NO: 7615 - DNA, 76 bp, Artificial Sequence; identical to SEQ ID NO: 3280
  Description of Artificial Sequence: Synthetic almond; 5' sequence +inner sequence + 3' sequence

SEQ ID NO: 7616 - DNA, 76 bp, Artificial Sequence
  Description of Artificial Sequence: Synthetic almond; 5' sequence +inner sequence + 3' sequence
tagggaagagaaggacatatgatggccaagcgagcttcaaggcggcatgttgcttgactagtacatgaccacttga

SEQ ID NO: 7617 - DNA, 76 bp, Artificial Sequence
  Description of Artificial Sequence: Synthetic almond; 5' sequence +inner sequence + 3' sequence
tagggaagagaaggacatatgatggcatgcgatgaacgaggcattatgcgtcattgactagtacatgaccacttga

SEQ ID NO: 7618 - DNA, 76 bp, Artificial Sequence; identical to SEQ ID NO: 3624
  Description of Artificial Sequence: Synthetic almond; 5' sequence +inner sequence + 3' sequence

SEQ ID NO: 7619 - DNA, 77 bp, Artificial Sequence
  Description of Artificial Sequence: Synthetic almond; 5' sequence +inner sequence + 3' sequence
tagggaagagaaggacatatgatggcctgaccggacctagtggctgaacgtggcttgactagtacatgaccacttga

SEQ ID NO: 7620 - DNA, 76 bp, Artificial Sequence
  Description of Artificial Sequence: Synthetic almond; 5' sequence +inner sequence + 3' sequence
tagggaagagaaggacatatgatgtcatgcacgaacactctcatggcggcatgttgactagtacatgaccacttga

SEQ ID NO: 7621 - DNA, 76 bp, Artificial Sequence
  Description of Artificial Sequence: Synthetic almond; 5' sequence +inner sequence + 3' sequence
tagggaagagaaggacatatgattgcatgcgatgaacgaggcatgatgcgtcattgactagtacatgaccacttga

SEQ ID NO: 7622 - DNA, 74 bp, Artificial Sequence; identical to SEQ ID NO: 3423
  Description of Artificial Sequence: Synthetic almond; 5' sequence +inner sequence + 3' sequence

SEQ ID NO: 7623 - DNA, 76 bp, Artificial Sequence; identical to SEQ ID NO: 3130
  Description of Artificial Sequence: Synthetic almond; 5' sequence +inner sequence + 3' sequence

SEQ ID NO: 7624 - DNA, 76 bp, Artificial Sequence; identical to SEQ ID NO: 3189
  Description of Artificial Sequence: Synthetic almond; 5' sequence +inner sequence + 3' sequence

SEQ ID NO: 7625 - DNA, 76 bp, Artificial Sequence; identical to SEQ ID NO: 3571
  Description of Artificial Sequence: Synthetic almond; 5' sequence +inner sequence + 3' sequence

SEQ ID NO: 7626 - DNA, 76 bp, Artificial Sequence; identical to SEQ ID NO: 3420
  Description of Artificial Sequence: Synthetic almond; 5' sequence +inner sequence + 3' sequence

SEQ ID NO: 7627 - DNA, 76 bp, Artificial Sequence
  Description of Artificial Sequence: Synthetic almond; 5' sequence +inner sequence + 3' sequence
tagggaagagaaggacatatgatggcatgcgatgaacgaggcatgatgcggcattgactagtacatgaccacttga

SEQ ID NO: 7628 - DNA, 76 bp, Artificial Sequence; identical to SEQ ID NO: 3413
  Description of Artificial Sequence: Synthetic almond; 5' sequence +inner sequence + 3' sequence

SEQ ID NO: 7629 - DNA, 76 bp, Artificial Sequence; identical to SEQ ID NO: 3507
  Description of Artificial Sequence: Synthetic almond; 5' sequence +inner sequence + 3' sequence

SEQ ID NO: 7630 - DNA, 76 bp, Artificial Sequence; identical to SEQ ID NO: 3926
  Description of Artificial Sequence: Synthetic almond; 5' sequence +inner sequence + 3' sequence

SEQ ID NO: 7631 - DNA, 76 bp, Artificial Sequence
  Description of Artificial Sequence: Synthetic almond; 5' sequence +inner sequence + 3' sequence
tagggaagagaaggacatatgatgcaccgatcgcaacgtgtacaaggggtgtgttgactagtacatgaccacttga

SEQ ID NO: 7632 - DNA, 76 bp, Artificial Sequence; identical to SEQ ID NO: 3405
  Description of Artificial Sequence: Synthetic almond; 5' sequence +inner sequence + 3' sequence

SEQ ID NO: 7633 - DNA, 76 bp, Artificial Sequence; identical to SEQ ID NO: 3486
  Description of Artificial Sequence: Synthetic almond; 5' sequence +inner sequence + 3' sequence

SEQ ID NO: 7634 - DNA, 76 bp, Artificial Sequence
  Description of Artificial Sequence: Synthetic almond; 5' sequence +inner sequence + 3' sequence
tagggaagagaaggacatatgatcgaaccgctgcaaggtgtcagtgcgtggcattgactagtacatgaccacttga

SEQ ID NO: 7635 - DNA, 76 bp, Artificial Sequence; identical to SEQ ID NO: 3266
  Description of Artificial Sequence: Synthetic almond; 5' sequence +inner sequence + 3' sequence

SEQ ID NO: 7636 - DNA, 76 bp, Artificial Sequence; identical to SEQ ID NO: 3804
  Description of Artificial Sequence: Synthetic almond; 5' sequence +inner sequence + 3' sequence

SEQ ID NO: 7637 - DNA, 76 bp, Artificial Sequence; identical to SEQ ID NO: 3590
  Description of Artificial Sequence: Synthetic almond; 5' sequence +inner sequence + 3' sequence

SEQ ID NO: 7638 - DNA, 76 bp, Artificial Sequence
  Description of Artificial Sequence: Synthetic almond; 5' sequence +inner sequence + 3' sequence
tagggaagagaaggacatatgatgcacgactcgcaccctatcatgagcccatgttgactagtacatgaccacttga

SEQ ID NO: 7639 - DNA, 76 bp, Artificial Sequence; identical to SEQ ID NO: 3303
  Description of Artificial Sequence: Synthetic almond; 5' sequence +inner sequence + 3' sequence

SEQ ID NO: 7640 - DNA, 76 bp, Artificial Sequence
  Description of Artificial Sequence: Synthetic almond; 5' sequence +inner sequence + 3' sequence
tagggaagagaaggacatatgatccatgcagcatacgtgcagtctcgtaccgattgactagtacatgaccacttga

SEQ ID NO: 7641 - DNA, 76 bp, Artificial Sequence
  Description of Artificial Sequence: Synthetic almond; 5' sequence +inner sequence + 3' sequence
tagggaagagaaggacatatgatggccaagctgaccgtaaaggcaggcgtgcattgactagtacatgaccacttga

SEQ ID NO: 7642 - DNA, 76 bp, Artificial Sequence
  Description of Artificial Sequence: Synthetic almond; 5' sequence +inner sequence + 3' sequence
tagggaagagaaggacatatgatcgacccgcgaagtgaggcagtgcgacggtgttgactagtacatgaccacttga

SEQ ID NO: 7643 - DNA, 76 bp, Artificial Sequence; identical to SEQ ID NO: 3351
  Description of Artificial Sequence: Synthetic almond; 5' sequence +inner sequence + 3' sequence

SEQ ID NO: 7644 - DNA, 76 bp, Artificial Sequence
  Description of Artificial Sequence: Synthetic almond; 5' sequence +inner sequence + 3' sequence
tagggaagagaaggacatatgataatgtgcacgatcgtaccctacatgtggcattgactagtacatgaccacttga

SEQ ID NO: 7645 - DNA, 76 bp, Artificial Sequence; identical to SEQ ID NO: 3526
  Description of Artificial Sequence: Synthetic almond; 5' sequence +inner sequence + 3' sequence

SEQ ID NO: 7646 - DNA, 76 bp, Artificial Sequence; identical to SEQ ID NO: 3962
  Description of Artificial Sequence: Synthetic almond; 5' sequence +inner sequence + 3' sequence

SEQ ID NO: 7647 - DNA, 76 bp, Artificial Sequence; identical to SEQ ID NO: 3182
  Description of Artificial Sequence: Synthetic almond; 5' sequence +inner sequence + 3' sequence

SEQ ID NO: 7648 - DNA, 76 bp, Artificial Sequence; identical to SEQ ID NO: 3884
  Description of Artificial Sequence: Synthetic almond; 5' sequence +inner sequence + 3' sequence

SEQ ID NO: 7649 - DNA, 76 bp, Artificial Sequence; identical to SEQ ID NO: 3291
  Description of Artificial Sequence: Synthetic almond; 5' sequence +inner sequence + 3' sequence

SEQ ID NO: 7650 - DNA, 76 bp, Artificial Sequence
  Description of Artificial Sequence: Synthetic almond; 5' sequence +inner sequence + 3' sequence
tagggaagagaaggacatatgatggccgaacgaccgatcgagtggcgcatggcttgactagtacatgaccacttga

SEQ ID NO: 7651 - DNA, 76 bp, Artificial Sequence
  Description of Artificial Sequence: Synthetic almond; 5' sequence +inner sequence + 3' sequence
tagggaagagaaggacatatgatgtcgtgacgcaaccggtcaagcggtgtgtattgactagtacatgaccacttga

SEQ ID NO: 7652 - DNA, 76 bp, Artificial Sequence
  Description of Artificial Sequence: Synthetic almond; 5' sequence +inner sequence + 3' sequence
tagggaagagaaggacatatgatcacatgccagtccgtcaccacgccgcgtcattgactagtacatgaccacttga

SEQ ID NO: 7653 - DNA, 76 bp, Artificial Sequence
  Description of Artificial Sequence: Synthetic almond; 5' sequence +inner sequence + 3' sequence
tagggaagagaaggacatatgatgcacgactcgcaccctatcatgacgccatgttgactagtacatgaccacttga

SEQ ID NO: 7654 - DNA, 76 bp, Artificial Sequence
  Description of Artificial Sequence: Synthetic almond; 5' sequence +inner sequence + 3' sequence
tagggaagagaaggacatatgatgcgacaagcagcagacgagatcacggcccgttgactagtacatgaccacttga

SEQ ID NO: 7655 - DNA, 76 bp, Artificial Sequence
  Description of Artificial Sequence: Synthetic almond; 5' sequence +inner sequence + 3' sequence
tagggaagagaaggacatatgatacggtcagggagcagtggacgcgttgcacgttgactagtacatgaccacttga

SEQ ID NO: 7656 - DNA, 76 bp, Artificial Sequence; identical to SEQ ID NO: 3387
  Description of Artificial Sequence: Synthetic almond; 5' sequence +inner sequence + 3' sequence

SEQ ID NO: 7657 - DNA, 76 bp, Artificial Sequence; identical to SEQ ID NO: 3670
  Description of Artificial Sequence: Synthetic almond; 5' sequence +inner sequence + 3' sequence

SEQ ID NO: 7658 - DNA, 76 bp, Artificial Sequence
  Description of Artificial Sequence: Synthetic almond; 5' sequence +inner sequence + 3' sequence
tagggaagagaaggacatatgatcgcaccgtcaagcgggcaggcactttggtgttgactagtacatgaccacttga

SEQ ID NO: 7659 - DNA, 76 bp, Artificial Sequence
  Description of Artificial Sequence: Synthetic almond; 5' sequence +inner sequence + 3' sequence
tagggaagagaaggacatatgatcgacacgcatcatgtgtgcctaccgtcacgttgactagtacatgaccacttga

SEQ ID NO: 7660 - DNA, 76 bp, Artificial Sequence
  Description of Artificial Sequence: Synthetic almond; 5' sequence +inner sequence + 3' sequence
tagggaagagaaggacatatgatgcaacgcagccggacgatcgacacgtgactttgactagtacatgaccacttga

SEQ ID NO: 7661 - DNA, 76 bp, Artificial Sequence; identical to SEQ ID NO: 3600
  Description of Artificial Sequence: Synthetic almond; 5' sequence +inner sequence + 3' sequence

SEQ ID NO: 7662 - DNA, 76 bp, Artificial Sequence
  Description of Artificial Sequence: Synthetic almond; 5' sequence +inner sequence + 3' sequence
tagggaagagaaggacatatgatcgtccgacaacgacgtaccggtgtgccacgttgactagtacatgaccacttga

SEQ ID NO: 7663 - DNA, 76 bp, Artificial Sequence
  Description of Artificial Sequence: Synthetic almond; 5' sequence +inner sequence + 3' sequence
tagggaagagaaggacatatgatgcgccaccgcaacatgtgcacgtatcgacattgactagtacatgaccacttga

SEQ ID NO: 7664 - DNA, 76 bp, Artificial Sequence
  Description of Artificial Sequence: Synthetic almond; 5' sequence +inner sequence + 3' sequence
tagggaagagaaggacatatgatcgcaccgtgacataggggcattcgcgacacttgactagtacatgaccacttga

SEQ ID NO: 7665 - DNA, 76 bp, Artificial Sequence; identical to SEQ ID NO: 3863
  Description of Artificial Sequence: Synthetic almond; 5' sequence +inner sequence + 3' sequence

SEQ ID NO: 7666 - DNA, 76 bp, Artificial Sequence
  Description of Artificial Sequence: Synthetic almond; 5' sequence +inner sequence + 3' sequence
tagggaagagaaggacatatgatgcactgagcgtacgtatcagcgggcacgcattgactagtacatgaccacttga

SEQ ID NO: 7667 - DNA, 76 bp, Artificial Sequence
  Description of Artificial Sequence: Synthetic almond; 5' sequence +inner sequence + 3' sequence
tagggaagagaaggacatatgatgtcatgcgcggacactatcatggcggcatgttgactagtacatgaccacttga

SEQ ID NO: 7668 - DNA, 76 bp, Artificial Sequence; identical to SEQ ID NO: 3784
  Description of Artificial Sequence: Synthetic almond; 5' sequence +inner sequence + 3' sequence

SEQ ID NO: 7669 - DNA, 76 bp, Artificial Sequence; identical to SEQ ID NO: 3660
  Description of Artificial Sequence: Synthetic almond; 5' sequence +inner sequence + 3' sequence

SEQ ID NO: 7670 - DNA, 76 bp, Artificial Sequence
  Description of Artificial Sequence: Synthetic almond; 5' sequence +inner sequence + 3' sequence
tagggaagagaaggacatatgattggactgtgcgcaccgattacgtggccatgttgactagtacatgaccacttga

SEQ ID NO: 7671 - DNA, 76 bp, Artificial Sequence
  Description of Artificial Sequence: Synthetic almond; 5' sequence +inner sequence + 3' sequence
tagggaagagaaggacatatgatcgcagacacacggcatgctctgacctggcattgactagtacatgaccacttga

SEQ ID NO: 7672 - DNA, 76 bp, Artificial Sequence; identical to SEQ ID NO: 3441
  Description of Artificial Sequence: Synthetic almond; 5' sequence +inner sequence + 3' sequence

SEQ ID NO: 7673 - DNA, 76 bp, Artificial Sequence
  Description of Artificial Sequence: Synthetic almond; 5' sequence +inner sequence + 3' sequence
tagggaagagaaggacatatgatcgtccacgcgcaccggtgagttacggcacattgactagtacatgaccacttga

SEQ ID NO: 7674 - DNA, 76 bp, Artificial Sequence; identical to SEQ ID NO: 3721
  Description of Artificial Sequence: Synthetic almond; 5' sequence +inner sequence + 3' sequence

SEQ ID NO: 7675 - DNA, 76 bp, Artificial Sequence; identical to SEQ ID NO: 3490
  Description of Artificial Sequence: Synthetic almond; 5' sequence +inner sequence + 3' sequence

SEQ ID NO: 7676 - DNA, 76 bp, Artificial Sequence; identical to SEQ ID NO: 3636
  Description of Artificial Sequence: Synthetic almond; 5' sequence +inner sequence + 3' sequence

SEQ ID NO: 7677 - DNA, 76 bp, Artificial Sequence; identical to SEQ ID NO: 3345
  Description of Artificial Sequence: Synthetic almond; 5' sequence +inner sequence + 3' sequence

SEQ ID NO: 7678 - DNA, 76 bp, Artificial Sequence
  Description of Artificial Sequence: Synthetic almond; 5' sequence +inner sequence + 3' sequence
tagggaagagaaggacatatgatgcgtaccagcggaacaggactgcgatgacattgactagtacatgaccacttga

SEQ ID NO: 7679 - DNA, 76 bp, Artificial Sequence
  Description of Artificial Sequence: Synthetic almond; 5' sequence +inner sequence + 3' sequence
tagggaagagaaggacatatgatcgcaccgagcgtgatcgtggttcgcagtcattgactagtacatgaccacttga

SEQ ID NO: 7680 - DNA, 76 bp, Artificial Sequence; identical to SEQ ID NO: 3477
  Description of Artificial Sequence: Synthetic almond; 5' sequence +inner sequence + 3' sequence

SEQ ID NO: 7681 - DNA, 76 bp, Artificial Sequence; identical to SEQ ID NO: 3325
  Description of Artificial Sequence: Synthetic almond; 5' sequence +inner sequence + 3' sequence

SEQ ID NO: 7682 - DNA, 76 bp, Artificial Sequence
  Description of Artificial Sequence: Synthetic almond; 5' sequence +inner sequence + 3' sequence
tagggaagagaaggacatatgatggacgcagcgctgacggtggatcatgcactttgactagtacatgaccacttga

SEQ ID NO: 7683 - DNA, 76 bp, Artificial Sequence; identical to SEQ ID NO: 3267
  Description of Artificial Sequence: Synthetic almond; 5' sequence +inner sequence + 3' sequence

SEQ ID NO: 7684 - DNA, 76 bp, Artificial Sequence; identical to SEQ ID NO: 3927
  Description of Artificial Sequence: Synthetic almond; 5' sequence +inner sequence + 3' sequence

SEQ ID NO: 7685 - DNA, 76 bp, Artificial Sequence; identical to SEQ ID NO: 3846
  Description of Artificial Sequence: Synthetic almond; 5' sequence +inner sequence + 3' sequence

SEQ ID NO: 7686 - DNA, 76 bp, Artificial Sequence; identical to SEQ ID NO: 3991
  Description of Artificial Sequence: Synthetic almond; 5' sequence +inner sequence + 3' sequence

SEQ ID NO: 7687 - DNA, 76 bp, Artificial Sequence
  Description of Artificial Sequence: Synthetic almond; 5' sequence +inner sequence + 3' sequence
tagggaagagaaggacatatgatccatgtccgacgataccatacgcatggccattgactagtacatgaccacttga

SEQ ID NO: 7688 - DNA, 76 bp, Artificial Sequence
  Description of Artificial Sequence: Synthetic almond; 5' sequence +inner sequence + 3' sequence
tagggaagagaaggacatatgatgtacgcctcggagctagcaggtggtgtggattgactagtacatgaccacttga

SEQ ID NO: 7689 - DNA, 76 bp, Artificial Sequence; identical to SEQ ID NO: 3662
  Description of Artificial Sequence: Synthetic almond; 5' sequence +inner sequence + 3' sequence

SEQ ID NO: 7690 - DNA, 76 bp, Artificial Sequence
  Description of Artificial Sequence: Synthetic almond; 5' sequence +inner sequence + 3' sequence
tagggaagagaaggacatatgatggccggcgaaccctagcaagtgcatgcgtgttgactagtacatgaccacttga

SEQ ID NO: 7691 - DNA, 76 bp, Artificial Sequence
  Description of Artificial Sequence: Synthetic almond; 5' sequence +inner sequence + 3' sequence
tagggaagagaaggacatatgatccgcacgtagccctatcagcggtgcatgcattgactagtacatgaccacttga

SEQ ID NO: 7692 - DNA, 76 bp, Artificial Sequence
  Description of Artificial Sequence: Synthetic almond; 5' sequence +inner sequence + 3' sequence
tagggaagagaaggacatatgatgatgggcagagcggaccgtctcacgtggtgttgactagtacatgaccacttga

SEQ ID NO: 7693 - DNA, 76 bp, Artificial Sequence; identical to SEQ ID NO: 3534
  Description of Artificial Sequence: Synthetic almond; 5' sequence +inner sequence + 3' sequence

SEQ ID NO: 7694 - DNA, 76 bp, Artificial Sequence
  Description of Artificial Sequence: Synthetic almond; 5' sequence +inner sequence + 3' sequence
tagggaagagaaggacatatgatggcatgcgatgaacgaggcatgatgtgtcattgactagtacatgaccacttga

SEQ ID NO: 7695 - DNA, 76 bp, Artificial Sequence; identical to SEQ ID NO: 3374
  Description of Artificial Sequence: Synthetic almond; 5' sequence +inner sequence + 3' sequence

SEQ ID NO: 7696 - DNA, 76 bp, Artificial Sequence; identical to SEQ ID NO: 3386
  Description of Artificial Sequence: Synthetic almond; 5' sequence +inner sequence + 3' sequence

SEQ ID NO: 7697 - DNA, 76 bp, Artificial Sequence; identical to SEQ ID NO: 3788
  Description of Artificial Sequence: Synthetic almond; 5' sequence +inner sequence + 3' sequence

SEQ ID NO: 7698 - DNA, 76 bp, Artificial Sequence
  Description of Artificial Sequence: Synthetic almond; 5' sequence +inner sequence + 3' sequence
tagggaagagaaggacatatgatgcggtacgaagcaacggcctgcactgcgtgttgactagtacatgaccacttga

SEQ ID NO: 7699 - DNA, 76 bp, Artificial Sequence; identical to SEQ ID NO: 3456
  Description of Artificial Sequence: Synthetic almond; 5' sequence +inner sequence + 3' sequence

SEQ ID NO: 7700 - DNA, 76 bp, Artificial Sequence
  Description of Artificial Sequence: Synthetic almond; 5' sequence +inner sequence + 3' sequence
tagggaagagaaggacatatgatgctactgcgcgtgaccatatcaagcggacattgactagtacatgaccacttga

SEQ ID NO: 7701 - DNA, 76 bp, Artificial Sequence; identical to SEQ ID NO: 3607
  Description of Artificial Sequence: Synthetic almond; 5' sequence +inner sequence + 3' sequence

SEQ ID NO: 7702 - DNA, 76 bp, Artificial Sequence
  Description of Artificial Sequence: Synthetic almond; 5' sequence +inner sequence + 3' sequence
tagggaagagaaggacatatgatcgatgcgtcgatcgtacgtcatgcgcgtcattgactagtacatgaccacttga

SEQ ID NO: 7703 - DNA, 76 bp, Artificial Sequence; identical to SEQ ID NO: 3608
  Description of Artificial Sequence: Synthetic almond; 5' sequence +inner sequence + 3' sequence

SEQ ID NO: 7704 - DNA, 76 bp, Artificial Sequence; identical to SEQ ID NO: 4001
  Description of Artificial Sequence: Synthetic almond; 5' sequence +inner sequence + 3' sequence

SEQ ID NO: 7705 - DNA, 76 bp, Artificial Sequence; identical to SEQ ID NO: 3754
  Description of Artificial Sequence: Synthetic almond; 5' sequence +inner sequence + 3' sequence

SEQ ID NO: 7706 - DNA, 76 bp, Artificial Sequence
  Description of Artificial Sequence: Synthetic almond; 5' sequence +inner sequence + 3' sequence
tagggaagagaaggacatatgatacgtctcggaacgcaacggtgtgtgtgtgcttgactagtacatgaccacttga

SEQ ID NO: 7707 - DNA, 76 bp, Artificial Sequence
  Description of Artificial Sequence: Synthetic almond; 5' sequence +inner sequence + 3' sequence
tagggaagagaaggacatatgatggcatgcgatgaacgagtcatgatgcgtcattgactagtacatgaccacttga

SEQ ID NO: 7708 - DNA, 76 bp, Artificial Sequence
  Description of Artificial Sequence: Synthetic almond; 5' sequence +inner sequence + 3' sequence
tagggaagagaaggacatatgatggcatgcacgcacctacacttgggtatggattgactagtacatgaccacttga

SEQ ID NO: 7709 - DNA, 76 bp, Artificial Sequence
  Description of Artificial Sequence: Synthetic almond; 5' sequence +inner sequence + 3' sequence
tagggaagagaaggacatatgatgcaacggcatggagtgacctgcgctgaacgttgactagtacatgaccacttga

SEQ ID NO: 7710 - DNA, 76 bp, Artificial Sequence
  Description of Artificial Sequence: Synthetic almond; 5' sequence +inner sequence + 3' sequence
tagggaagagaaggacatatgatggcctgaccgaacgtagagcatgtgcttgcttgactagtacatgaccacttga

SEQ ID NO: 7711 - DNA, 76 bp, Artificial Sequence
  Description of Artificial Sequence: Synthetic almond; 5' sequence +inner sequence + 3' sequence
tagggaagagaaggacatatgatccatcacggacgaactcacgcacggtgacattgactagtacatgaccacttga

SEQ ID NO: 7712 - DNA, 76 bp, Artificial Sequence; identical to SEQ ID NO: 3261
  Description of Artificial Sequence: Synthetic almond; 5' sequence +inner sequence + 3' sequence

SEQ ID NO: 7713 - DNA, 76 bp, Artificial Sequence
  Description of Artificial Sequence: Synthetic almond; 5' sequence +inner sequence + 3' sequence
tagggaagagaaggacatatgatggatgacgatgcactacacgtggcttggacttgactagtacatgaccacttga

SEQ ID NO: 7714 - DNA, 76 bp, Artificial Sequence; identical to SEQ ID NO: 3951
  Description of Artificial Sequence: Synthetic almond; 5' sequence +inner sequence + 3' sequence

SEQ ID NO: 7715 - DNA, 76 bp, Artificial Sequence
  Description of Artificial Sequence: Synthetic almond; 5' sequence +inner sequence + 3' sequence
tagggaagagaaggacatatgatcgtaccggagaggcaggcatgggcacggcattgactagtacatgaccacttga

SEQ ID NO: 7716 - DNA, 76 bp, Artificial Sequence; identical to SEQ ID NO: 3705
  Description of Artificial Sequence: Synthetic almond; 5' sequence +inner sequence + 3' sequence

SEQ ID NO: 7717 - DNA, 76 bp, Artificial Sequence
  Description of Artificial Sequence: Synthetic almond; 5' sequence +inner sequence + 3' sequence
tagggaagagaaggacatatgatggccaagctgaccgtaaaggcaggcgcgtattgactagtacatgaccacttga

SEQ ID NO: 7718 - DNA, 76 bp, Artificial Sequence
  Description of Artificial Sequence: Synthetic almond; 5' sequence +inner sequence + 3' sequence
tagggaagagaaggacatatgatgcatggccgaatgcaccctgcagttgcgcgttgactagtacatgaccacttga

SEQ ID NO: 7719 - DNA, 76 bp, Artificial Sequence
  Description of Artificial Sequence: Synthetic almond; 5' sequence +inner sequence + 3' sequence
tagggaagagaaggacatatgatgcacggaacggaacaacaagggcaggcatgttgactagtacatgaccacttga

SEQ ID NO: 7720 - DNA, 76 bp, Artificial Sequence; identical to SEQ ID NO: 3461
  Description of Artificial Sequence: Synthetic almond; 5' sequence +inner sequence + 3' sequence

SEQ ID NO: 7721 - DNA, 76 bp, Artificial Sequence
  Description of Artificial Sequence: Synthetic almond; 5' sequence +inner sequence + 3' sequence
tagggaagagaaggacatatgatgcagatggacgatctgagcgtgaccgtggtttgactagtacatgaccacttga

SEQ ID NO: 7722 - DNA, 76 bp, Artificial Sequence
  Description of Artificial Sequence: Synthetic almond; 5' sequence +inner sequence + 3' sequence
tagggaagagaaggacatatgatggtcggatcgacactgaacgtggtcacgcattgactagtacatgaccacttga

SEQ ID NO: 7723 - DNA, 76 bp, Artificial Sequence; identical to SEQ ID NO: 3805
  Description of Artificial Sequence: Synthetic almond; 5' sequence +inner sequence + 3' sequence

SEQ ID NO: 7724 - DNA, 76 bp, Artificial Sequence; identical to SEQ ID NO: 3684
  Description of Artificial Sequence: Synthetic almond; 5' sequence +inner sequence + 3' sequence

SEQ ID NO: 7725 - DNA, 76 bp, Artificial Sequence; identical to SEQ ID NO: 3464
  Description of Artificial Sequence: Synthetic almond; 5' sequence +inner sequence + 3' sequence

SEQ ID NO: 7726 - DNA, 76 bp, Artificial Sequence
  Description of Artificial Sequence: Synthetic almond; 5' sequence +inner sequence + 3' sequence
tagggaagagaaggacatatgattcgatgcagatggacgacgtcgctacgacattgactagtacatgaccacttga

SEQ ID NO: 7727 - DNA, 76 bp, Artificial Sequence
  Description of Artificial Sequence: Synthetic almond; 5' sequence +inner sequence + 3' sequence
tagggaagagaaggacatatgatggccggaacgaaacgcgtggccatgcactattgactagtacatgaccacttga

SEQ ID NO: 7728 - DNA, 76 bp, Artificial Sequence
  Description of Artificial Sequence: Synthetic almond; 5' sequence +inner sequence + 3' sequence
tagggaagagaaggacatatgatcgtaccgacggggacattgcgttggcagtcttgactagtacatgaccacttga

SEQ ID NO: 7729 - DNA, 76 bp, Artificial Sequence; identical to SEQ ID NO: 3588
  Description of Artificial Sequence: Synthetic almond; 5' sequence +inner sequence + 3' sequence

SEQ ID NO: 7730 - DNA, 76 bp, Artificial Sequence; identical to SEQ ID NO: 3493
  Description of Artificial Sequence: Synthetic almond; 5' sequence +inner sequence + 3' sequence

SEQ ID NO: 7731 - DNA, 76 bp, Artificial Sequence
  Description of Artificial Sequence: Synthetic almond; 5' sequence +inner sequence + 3' sequence
tagggaagagaaggacatatgatcgcaacggcgaggggtcgtgcacgcattcattgactagtacatgaccacttga

SEQ ID NO: 7732 - DNA, 76 bp, Artificial Sequence; identical to SEQ ID NO: 3677
  Description of Artificial Sequence: Synthetic almond; 5' sequence +inner sequence + 3' sequence

SEQ ID NO: 7733 - DNA, 76 bp, Artificial Sequence; identical to SEQ ID NO: 3560
  Description of Artificial Sequence: Synthetic almond; 5' sequence +inner sequence + 3' sequence

SEQ ID NO: 7734 - DNA, 76 bp, Artificial Sequence; identical to SEQ ID NO: 3328
  Description of Artificial Sequence: Synthetic almond; 5' sequence +inner sequence + 3' sequence

SEQ ID NO: 7735 - DNA, 76 bp, Artificial Sequence
  Description of Artificial Sequence: Synthetic almond; 5' sequence +inner sequence + 3' sequence
tagggaagagaaggacatatgatccgtagcgacatcaagcggtggtgagcgtgttgactagtacatgaccacttga

SEQ ID NO: 7736 - DNA, 76 bp, Artificial Sequence
  Description of Artificial Sequence: Synthetic almond; 5' sequence +inner sequence + 3' sequence
tagggaagagaaggacatatgatcgtaccgagagtgatcgtggttcgcagtcattgactagtacatgaccacttga

SEQ ID NO: 7737 - DNA, 76 bp, Artificial Sequence
  Description of Artificial Sequence: Synthetic almond; 5' sequence +inner sequence + 3' sequence
tagggaagagaaggacatatgatcgcaccgagagtgatcgcggttcgcagtcattgactagtacatgaccacttga

SEQ ID NO: 7738 - DNA, 76 bp, Artificial Sequence; identical to SEQ ID NO: 3505
  Description of Artificial Sequence: Synthetic almond; 5' sequence +inner sequence + 3' sequence

SEQ ID NO: 7739 - DNA, 76 bp, Artificial Sequence
  Description of Artificial Sequence: Synthetic almond; 5' sequence +inner sequence + 3' sequence
tagggaagagaaggacatatgattcgatccggcacgtaacgatgggcatggcattgactagtacatgaccacttga

SEQ ID NO: 7740 - DNA, 76 bp, Artificial Sequence
  Description of Artificial Sequence: Synthetic almond; 5' sequence +inner sequence + 3' sequence
tagggaagagaaggacatatgatcgacccggagaccaagctggacattgcgtcttgactagtacatgaccacttga

SEQ ID NO: 7741 - DNA, 76 bp, Artificial Sequence; identical to SEQ ID NO: 3851
  Description of Artificial Sequence: Synthetic almond; 5' sequence +inner sequence + 3' sequence

SEQ ID NO: 7742 - DNA, 76 bp, Artificial Sequence
  Description of Artificial Sequence: Synthetic almond; 5' sequence +inner sequence + 3' sequence
tagggaagagaaggacatatgatcgacacgcacaagggtcgagtgacgaggcattgactagtacatgaccacttga

SEQ ID NO: 7743 - DNA, 76 bp, Artificial Sequence
  Description of Artificial Sequence: Synthetic almond; 5' sequence +inner sequence + 3' sequence
tagggaagagaaggacatatgatgtcctgcacgaacactatcatggcggcatgttgactagtacatgaccacttga

SEQ ID NO: 7744 - DNA, 76 bp, Artificial Sequence
  Description of Artificial Sequence: Synthetic almond; 5' sequence +inner sequence + 3' sequence
tagggaagagaaggacatatgatgatggcacgatcgtccctagcgcgtgatcattgactagtacatgaccacttga

SEQ ID NO: 7745 - DNA, 76 bp, Artificial Sequence
  Description of Artificial Sequence: Synthetic almond; 5' sequence +inner sequence + 3' sequence
tagggaagagaaggacatatgatccgtagcgcaccacgtagacgttaggcatgttgactagtacatgaccacttga

SEQ ID NO: 7746 - DNA, 76 bp, Artificial Sequence
  Description of Artificial Sequence: Synthetic almond; 5' sequence +inner sequence + 3' sequence
tagggaagagaaggacatatgatcgtcccgtgcgctaggcagtctgcgtcacattgactagtacatgaccacttga

SEQ ID NO: 7747 - DNA, 76 bp, Artificial Sequence; identical to SEQ ID NO: 3315
  Description of Artificial Sequence: Synthetic almond; 5' sequence +inner sequence + 3' sequence

SEQ ID NO: 7748 - DNA, 76 bp, Artificial Sequence
  Description of Artificial Sequence: Synthetic almond; 5' sequence +inner sequence + 3' sequence
tagggaagagaaggacatatgatgcacgactcgcaacctatcatgaggccatgttgactagtacatgaccacttga

SEQ ID NO: 7749 - DNA, 76 bp, Artificial Sequence
  Description of Artificial Sequence: Synthetic almond; 5' sequence +inner sequence + 3' sequence
tagggaagagaaggacatatgatgtgcgtgctaaccgagggcctgtgctgacattgactagtacatgaccacttga

SEQ ID NO: 7750 - DNA, 76 bp, Artificial Sequence; identical to SEQ ID NO: 3349
  Description of Artificial Sequence: Synthetic almond; 5' sequence +inner sequence + 3' sequence

SEQ ID NO: 7751 - DNA, 76 bp, Artificial Sequence; identical to SEQ ID NO: 3576
  Description of Artificial Sequence: Synthetic almond; 5' sequence +inner sequence + 3' sequence

SEQ ID NO: 7752 - DNA, 76 bp, Artificial Sequence; identical to SEQ ID NO: 3881
  Description of Artificial Sequence: Synthetic almond; 5' sequence +inner sequence + 3' sequence

SEQ ID NO: 7753 - DNA, 73 bp, Artificial Sequence; identical to SEQ ID NO: 3885
  Description of Artificial Sequence: Synthetic almond; 5' sequence +inner sequence + 3' sequence

SEQ ID NO: 7754 - DNA, 76 bp, Artificial Sequence; identical to SEQ ID NO: 3555
  Description of Artificial Sequence: Synthetic almond; 5' sequence +inner sequence + 3' sequence

SEQ ID NO: 7755 - DNA, 76 bp, Artificial Sequence
  Description of Artificial Sequence: Synthetic almond; 5' sequence +inner sequence + 3' sequence
tagggaagagaaggacatatgatggcggaacggacgtggacatcgtgctcatgttgactagtacatgaccacttga

SEQ ID NO: 7756 - DNA, 76 bp, Artificial Sequence
  Description of Artificial Sequence: Synthetic almond; 5' sequence +inner sequence + 3' sequence
tagggaagagaaggacatatgatgggcagcgaggagcggaaagtgtgcagggattgactagtacatgaccacttga

SEQ ID NO: 7757 - DNA, 71 bp, Artificial Sequence; identical to SEQ ID NO: 3427
  Description of Artificial Sequence: Synthetic almond; 5' sequence +inner sequence + 3' sequence

SEQ ID NO: 7758 - DNA, 76 bp, Artificial Sequence
  Description of Artificial Sequence: Synthetic almond; 5' sequence +inner sequence + 3' sequence
tagggaagagaaggacatatgatggcccaggacatcgatggcatgcgttcacattgactagtacatgaccacttga

SEQ ID NO: 7759 - DNA, 76 bp, Artificial Sequence
  Description of Artificial Sequence: Synthetic almond; 5' sequence +inner sequence + 3' sequence
tagggaagagaaggacatatgatgcaagcacaggtcctgggcacgtacgcacgttgactagtacatgaccacttga

SEQ ID NO: 7760 - DNA, 76 bp, Artificial Sequence; identical to SEQ ID NO: 3395
  Description of Artificial Sequence: Synthetic almond; 5' sequence +inner sequence + 3' sequence

SEQ ID NO: 7761 - DNA, 76 bp, Artificial Sequence
  Description of Artificial Sequence: Synthetic almond; 5' sequence +inner sequence + 3' sequence
tagggaagagaaggacatatgatccgtagcgacatcaagcggtggtgtgcgggttgactagtacatgaccacttga

SEQ ID NO: 7762 - DNA, 76 bp, Artificial Sequence; identical to SEQ ID NO: 3593
  Description of Artificial Sequence: Synthetic almond; 5' sequence +inner sequence + 3' sequence

SEQ ID NO: 7763 - DNA, 75 bp, Artificial Sequence
  Description of Artificial Sequence: Synthetic almond; 5' sequence +inner sequence + 3' sequence
tagggaagagaaggacatatgatggacgccgatgccctcatgtggccgtggattgactagtacatgaccacttga

SEQ ID NO: 7764 - DNA, 76 bp, Artificial Sequence
  Description of Artificial Sequence: Synthetic almond; 5' sequence +inner sequence + 3' sequence
tagggaagagaaggacatatgatccgatgcggcacgtctctgaccgatgcggattgactagtacatgaccacttga

SEQ ID NO: 7765 - DNA, 76 bp, Artificial Sequence; identical to SEQ ID NO: 3574
  Description of Artificial Sequence: Synthetic almond; 5' sequence +inner sequence + 3' sequence

SEQ ID NO: 7766 - DNA, 76 bp, Artificial Sequence; identical to SEQ ID NO: 3586
  Description of Artificial Sequence: Synthetic almond; 5' sequence +inner sequence + 3' sequence

SEQ ID NO: 7767 - DNA, 76 bp, Artificial Sequence
  Description of Artificial Sequence: Synthetic almond; 5' sequence +inner sequence + 3' sequence
tagggaagagaaggacatatgatccgaaacgaaccgcacgcaacgcagccgcattgactagtacatgaccacttga

SEQ ID NO: 7768 - DNA, 76 bp, Artificial Sequence
  Description of Artificial Sequence: Synthetic almond; 5' sequence +inner sequence + 3' sequence
tagggaagagaaggacatatgatcgaacagaccgtgtggcctacgcatgcgcattgactagtacatgaccacttga

SEQ ID NO: 7769 - DNA, 76 bp, Artificial Sequence; identical to SEQ ID NO: 3566
  Description of Artificial Sequence: Synthetic almond; 5' sequence +inner sequence + 3' sequence

SEQ ID NO: 7770 - DNA, 76 bp, Artificial Sequence; identical to SEQ ID NO: 3302
  Description of Artificial Sequence: Synthetic almond; 5' sequence +inner sequence + 3' sequence

SEQ ID NO: 7771 - DNA, 76 bp, Artificial Sequence; identical to SEQ ID NO: 3789
  Description of Artificial Sequence: Synthetic almond; 5' sequence +inner sequence + 3' sequence

SEQ ID NO: 7772 - DNA, 76 bp, Artificial Sequence
  Description of Artificial Sequence: Synthetic almond; 5' sequence +inner sequence + 3' sequence
tagggaagagaaggacatatgatggcacgacgcgttcccgccacactgccgtgttgactagtacatgaccacttga

SEQ ID NO: 7773 - DNA, 76 bp, Artificial Sequence; identical to SEQ ID NO: 3619
  Description of Artificial Sequence: Synthetic almond; 5' sequence +inner sequence + 3' sequence

SEQ ID NO: 7774 - DNA, 76 bp, Artificial Sequence
  Description of Artificial Sequence: Synthetic almond; 5' sequence +inner sequence + 3' sequence
tagggaagagaaggacatatgatgggatgcgatgaacgaggcatgatgcgtcattgactagtacatgaccacttga

SEQ ID NO: 7775 - DNA, 76 bp, Artificial Sequence
  Description of Artificial Sequence: Synthetic almond; 5' sequence +inner sequence + 3' sequence
tagggaagagaaggacatatgatggcatggcgcgcaccctatcaagtacgtcattgactagtacatgaccacttga

SEQ ID NO: 7776 - DNA, 76 bp, Artificial Sequence
  Description of Artificial Sequence: Synthetic almond; 5' sequence +inner sequence + 3' sequence
tagggaagagaaggacatatgatcgcatgcacgcacctacacgtgggtatggattgactagtacatgaccacttga

SEQ ID NO: 7777 - DNA, 76 bp, Artificial Sequence
  Description of Artificial Sequence: Synthetic almond; 5' sequence +inner sequence + 3' sequence
tagggaagagaaggacatatgatgctgcaggcatacgtgtactgcgctggaccttgactagtacatgaccacttga

SEQ ID NO: 7778 - DNA, 76 bp, Artificial Sequence
  Description of Artificial Sequence: Synthetic almond; 5' sequence +inner sequence + 3' sequence
tagggaagagaaggacatatgatgtacggaacggaacaacaagggcatgcatgttgactagtacatgaccacttga

SEQ ID NO: 7779 - DNA, 76 bp, Artificial Sequence; identical to SEQ ID NO: 3388
  Description of Artificial Sequence: Synthetic almond; 5' sequence +inner sequence + 3' sequence

SEQ ID NO: 7780 - DNA, 76 bp, Artificial Sequence; identical to SEQ ID NO: 3943
  Description of Artificial Sequence: Synthetic almond; 5' sequence +inner sequence + 3' sequence

SEQ ID NO: 7781 - DNA, 76 bp, Artificial Sequence
  Description of Artificial Sequence: Synthetic almond; 5' sequence +inner sequence + 3' sequence
tagggaagagaaggacatatgatcgaaccgcaggagagcaggctgtgcgcacgttgactagtacatgaccacttga

SEQ ID NO: 7782 - DNA, 76 bp, Artificial Sequence
  Description of Artificial Sequence: Synthetic almond; 5' sequence +inner sequence + 3' sequence
tagggaagagaaggacatatgatggccaagctgaccgtaaaggcaggcgtggattgactagtacatgaccacttga

SEQ ID NO: 7783 - DNA, 76 bp, Artificial Sequence; identical to SEQ ID NO: 3498
  Description of Artificial Sequence: Synthetic almond; 5' sequence +inner sequence + 3' sequence

SEQ ID NO: 7784 - DNA, 76 bp, Artificial Sequence
  Description of Artificial Sequence: Synthetic almond; 5' sequence +inner sequence + 3' sequence
tagggaagagaaggacatatgattgccctggcaatgcgatgttcgatgcgaccttgactagtacatgaccacttga

SEQ ID NO: 7785 - DNA, 76 bp, Artificial Sequence
  Description of Artificial Sequence: Synthetic almond; 5' sequence +inner sequence + 3' sequence
tagggaagagaaggacatatgattggactgcgtggaccgtatcgtgcggcatgttgactagtacatgaccacttga

SEQ ID NO: 7786 - DNA, 74 bp, Artificial Sequence
  Description of Artificial Sequence: Synthetic almond; 5' sequence +inner sequence + 3' sequence
tagggaagagaaggacatatgatggcatgcacgcacctacacgtgatcatgttgactagtacatgaccacttga

SEQ ID NO: 7787 - DNA, 76 bp, Artificial Sequence
  Description of Artificial Sequence: Synthetic almond; 5' sequence +inner sequence + 3' sequence
tagggaagagaaggacatatgatgtcatgccatcccttcgcgtgtgacaggtattgactagtacatgaccacttga

SEQ ID NO: 7788 - DNA, 75 bp, Artificial Sequence; identical to SEQ ID NO: 3251
  Description of Artificial Sequence: Synthetic almond; 5' sequence +inner sequence + 3' sequence

SEQ ID NO: 7789 - DNA, 76 bp, Artificial Sequence; identical to SEQ ID NO: 3633
  Description of Artificial Sequence: Synthetic almond; 5' sequence +inner sequence + 3' sequence

SEQ ID NO: 7790 - DNA, 76 bp, Artificial Sequence
  Description of Artificial Sequence: Synthetic almond; 5' sequence +inner sequence + 3' sequence
tagggaagagaaggacatatgatcgtactgagcgcacacgtcctgccgacgcgttgactagtacatgaccacttga

SEQ ID NO: 7791 - DNA, 76 bp, Artificial Sequence; identical to SEQ ID NO: 3877
  Description of Artificial Sequence: Synthetic almond; 5' sequence +inner sequence + 3' sequence

SEQ ID NO: 7792 - DNA, 76 bp, Artificial Sequence
  Description of Artificial Sequence: Synthetic almond; 5' sequence +inner sequence + 3' sequence
tagggaagagaaggacatatgatcgcagatcgaggccgtaacgcgttgtgggcttgactagtacatgaccacttga

SEQ ID NO: 7793 - DNA, 76 bp, Artificial Sequence
  Description of Artificial Sequence: Synthetic almond; 5' sequence +inner sequence + 3' sequence
tagggaagagaaggacatatgatcgaacagagcgaggcatgatggacgtgggcttgactagtacatgaccacttga

SEQ ID NO: 7794 - DNA, 77 bp, Artificial Sequence; identical to SEQ ID NO: 3503
  Description of Artificial Sequence: Synthetic almond; 5' sequence +inner sequence + 3' sequence

SEQ ID NO: 7795 - DNA, 76 bp, Artificial Sequence; identical to SEQ ID NO: 3512
  Description of Artificial Sequence: Synthetic almond; 5' sequence +inner sequence + 3' sequence

SEQ ID NO: 7796 - DNA, 76 bp, Artificial Sequence
  Description of Artificial Sequence: Synthetic almond; 5' sequence +inner sequence + 3' sequence
tagggaagagaaggacatatgatcgacagggcgggcagtccattcgctgcacattgactagtacatgaccacttga

SEQ ID NO: 7797 - DNA, 76 bp, Artificial Sequence; identical to SEQ ID NO: 3210
  Description of Artificial Sequence: Synthetic almond; 5' sequence +inner sequence + 3' sequence

SEQ ID NO: 7798 - DNA, 76 bp, Artificial Sequence
  Description of Artificial Sequence: Synthetic almond; 5' sequence +inner sequence + 3' sequence
tagggaagagaaggacatatgatggcctgaacgaaccgagatgtcagcgcgcgttgactagtacatgaccacttga

SEQ ID NO: 7799 - DNA, 76 bp, Artificial Sequence
  Description of Artificial Sequence: Synthetic almond; 5' sequence +inner sequence + 3' sequence
tagggaagagaaggacatatgatacatagggcgcaacgtacctatcatgtggtttgactagtacatgaccacttga

SEQ ID NO: 7800 - DNA, 76 bp, Artificial Sequence; identical to SEQ ID NO: 3580
  Description of Artificial Sequence: Synthetic almond; 5' sequence +inner sequence + 3' sequence

SEQ ID NO: 7801 - DNA, 76 bp, Artificial Sequence
  Description of Artificial Sequence: Synthetic almond; 5' sequence +inner sequence + 3' sequence
tagggaagagaaggacatatgatgtgctgaacgaccagtgggaacgtgctatgttgactagtacatgaccacttga

SEQ ID NO: 7802 - DNA, 76 bp, Artificial Sequence
  Description of Artificial Sequence: Synthetic almond; 5' sequence +inner sequence + 3' sequence
tagggaagagaaggacatatgatggcatgcacgcacctacacgtgggtacgtattgactagtacatgaccacttga

SEQ ID NO: 7803 - DNA, 76 bp, Artificial Sequence
  Description of Artificial Sequence: Synthetic almond; 5' sequence +inner sequence + 3' sequence
tagggaagagaaggacatatgatccgaacggaacgccatcgtgttgcgcatcattgactagtacatgaccacttga

SEQ ID NO: 7804 - DNA, 76 bp, Artificial Sequence
  Description of Artificial Sequence: Synthetic almond; 5' sequence +inner sequence + 3' sequence
tagggaagagaaggacatatgatggcaccgtcaagcgggaaggcactttggtgttgactagtacatgaccacttga

SEQ ID NO: 7805 - DNA, 76 bp, Artificial Sequence
  Description of Artificial Sequence: Synthetic almond; 5' sequence +inner sequence + 3' sequence
tagggaagagaaggacatatgattgcgcagtaggtccgcagcgcacatgcacgttgactagtacatgaccacttga

SEQ ID NO: 7806 - DNA, 76 bp, Artificial Sequence; identical to SEQ ID NO: 3813
  Description of Artificial Sequence: Synthetic almond; 5' sequence +inner sequence + 3' sequence

SEQ ID NO: 7807 - DNA, 76 bp, Artificial Sequence
  Description of Artificial Sequence: Synthetic almond; 5' sequence +inner sequence + 3' sequence
tagggaagagaaggacatatgatgtgcgcgtcgaaccgtatgggcatggcgtgttgactagtacatgaccacttga

SEQ ID NO: 7808 - DNA, 76 bp, Artificial Sequence
  Description of Artificial Sequence: Synthetic almond; 5' sequence +inner sequence + 3' sequence
tagggaagagaaggacatatgataggcacagtgtcggtgggactcagcgcacattgactagtacatgaccacttga

SEQ ID NO: 7809 - DNA, 76 bp, Artificial Sequence
  Description of Artificial Sequence: Synthetic almond; 5' sequence +inner sequence + 3' sequence
tagggaagagaaggacatatgatgcacgtgcagctgtacgacgattcgccgctttgactagtacatgaccacttga

SEQ ID NO: 7810 - DNA, 76 bp, Artificial Sequence
  Description of Artificial Sequence: Synthetic almond; 5' sequence +inner sequence + 3' sequence
tagggaagagaaggacatatgatggcatgaacgcacctacacgtgggtatggattgactagtacatgaccacttga

SEQ ID NO: 7811 - DNA, 76 bp, Artificial Sequence; identical to SEQ ID NO: 3497
  Description of Artificial Sequence: Synthetic almond; 5' sequence +inner sequence + 3' sequence

SEQ ID NO: 7812 - DNA, 76 bp, Artificial Sequence; identical to SEQ ID NO: 3466
  Description of Artificial Sequence: Synthetic almond; 5' sequence +inner sequence + 3' sequence

SEQ ID NO: 7813 - DNA, 76 bp, Artificial Sequence
  Description of Artificial Sequence: Synthetic almond; 5' sequence +inner sequence + 3' sequence
tagggaagagaaggacatatgatcacgcacgtagcgcaggacggcactcacgtttgactagtacatgaccacttga

SEQ ID NO: 7814 - DNA, 76 bp, Artificial Sequence
  Description of Artificial Sequence: Synthetic almond; 5' sequence +inner sequence + 3' sequence
tagggaagagaaggacatatgatggccagatcgacatagcgagtgagagtgtattgactagtacatgaccacttga

SEQ ID NO: 7815 - DNA, 76 bp, Artificial Sequence; identical to SEQ ID NO: 3968
  Description of Artificial Sequence: Synthetic almond; 5' sequence +inner sequence + 3' sequence

SEQ ID NO: 7816 - DNA, 76 bp, Artificial Sequence
  Description of Artificial Sequence: Synthetic almond; 5' sequence +inner sequence + 3' sequence
tagggaagagaaggacatatgatccgtctgagcggcaaggggagcagtacgtgttgactagtacatgaccacttga

SEQ ID NO: 7817 - DNA, 76 bp, Artificial Sequence
  Description of Artificial Sequence: Synthetic almond; 5' sequence +inner sequence + 3' sequence
tagggaagagaaggacatatgatcgtcacacagggcggtggtgctgcacgtcattgactagtacatgaccacttga

SEQ ID NO: 7818 - DNA, 76 bp, Artificial Sequence; identical to SEQ ID NO: 3307
  Description of Artificial Sequence: Synthetic almond; 5' sequence +inner sequence + 3' sequence

SEQ ID NO: 7819 - DNA, 76 bp, Artificial Sequence
  Description of Artificial Sequence: Synthetic almond; 5' sequence +inner sequence + 3' sequence
tagggaagagaaggacatatgatgcaatgcgagtgccctcacttcacgtcacgttgactagtacatgaccacttga

SEQ ID NO: 7820 - DNA, 76 bp, Artificial Sequence; identical to SEQ ID NO: 3338
  Description of Artificial Sequence: Synthetic almond; 5' sequence +inner sequence + 3' sequence

SEQ ID NO: 7821 - DNA, 76 bp, Artificial Sequence
  Description of Artificial Sequence: Synthetic almond; 5' sequence +inner sequence + 3' sequence
tagggaagagaaggacatatgatggccaagcagcatggacgtgcccacggtgattgactagtacatgaccacttga

SEQ ID NO: 7822 - DNA, 76 bp, Artificial Sequence
  Description of Artificial Sequence: Synthetic almond; 5' sequence +inner sequence + 3' sequence
tagggaagagaaggacatatgatgccgacgatgacctggacgtgtggttgtcattgactagtacatgaccacttga

SEQ ID NO: 7823 - DNA, 76 bp, Artificial Sequence
  Description of Artificial Sequence: Synthetic almond; 5' sequence +inner sequence + 3' sequence
tagggaagagaaggacatatgatgcattcgaggccatagcgagtggtagtggattgactagtacatgaccacttga

SEQ ID NO: 7824 - DNA, 76 bp, Artificial Sequence; identical to SEQ ID NO: 3914
  Description of Artificial Sequence: Synthetic almond; 5' sequence +inner sequence + 3' sequence

SEQ ID NO: 7825 - DNA, 76 bp, Artificial Sequence; identical to SEQ ID NO: 3898
  Description of Artificial Sequence: Synthetic almond; 5' sequence +inner sequence + 3' sequence

SEQ ID NO: 7826 - DNA, 76 bp, Artificial Sequence; identical to SEQ ID NO: 3935
  Description of Artificial Sequence: Synthetic almond; 5' sequence +inner sequence + 3' sequence

SEQ ID NO: 7827 - DNA, 76 bp, Artificial Sequence; identical to SEQ ID NO: 3717
  Description of Artificial Sequence: Synthetic almond; 5' sequence +inner sequence + 3' sequence

SEQ ID NO: 7828 - DNA, 76 bp, Artificial Sequence
  Description of Artificial Sequence: Synthetic almond; 5' sequence +inner sequence + 3' sequence
tagggaagagaaggacatatgatcgaaccgacgggatcgcgtgcaccagtccattgactagtacatgaccacttga

SEQ ID NO: 7829 - DNA, 76 bp, Artificial Sequence
  Description of Artificial Sequence: Synthetic almond; 5' sequence +inner sequence + 3' sequence
tagggaagagaaggacatatgatgcacataggacgaccttcaagcgtggcacgttgactagtacatgaccacttga

SEQ ID NO: 7830 - DNA, 76 bp, Artificial Sequence
  Description of Artificial Sequence: Synthetic almond; 5' sequence +inner sequence + 3' sequence
tagggaagagaaggacatatgatggccaagctgaccgtaaaggcatgcgtgtattgactagtacatgaccacttga

SEQ ID NO: 7831 - DNA, 76 bp, Artificial Sequence
  Description of Artificial Sequence: Synthetic almond; 5' sequence +inner sequence + 3' sequence
tagggaagagaaggacatatgatgcgtcaggcatcatggctcgccgatgcacgttgactagtacatgaccacttga

SEQ ID NO: 7832 - DNA, 76 bp, Artificial Sequence; identical to SEQ ID NO: 3840
  Description of Artificial Sequence: Synthetic almond; 5' sequence +inner sequence + 3' sequence

SEQ ID NO: 7833 - DNA, 76 bp, Artificial Sequence
  Description of Artificial Sequence: Synthetic almond; 5' sequence +inner sequence + 3' sequence
tagggaagagaaggacatatgatcgacacgaacaggctcaacgtcgtcacggtttgactagtacatgaccacttga

SEQ ID NO: 7834 - DNA, 76 bp, Artificial Sequence
  Description of Artificial Sequence: Synthetic almond; 5' sequence +inner sequence + 3' sequence
tagggaagagaaggacatatgatgccatgcacgcacctacacgtgggtatggattgactagtacatgaccacttga

SEQ ID NO: 7835 - DNA, 76 bp, Artificial Sequence
  Description of Artificial Sequence: Synthetic almond; 5' sequence +inner sequence + 3' sequence
tagggaagagaaggacatatgattcgatgacgatgagcgtggacgttgccgtattgactagtacatgaccacttga

SEQ ID NO: 7836 - DNA, 76 bp, Artificial Sequence
  Description of Artificial Sequence: Synthetic almond; 5' sequence +inner sequence + 3' sequence
tagggaagagaaggacatatgatcgcaccgtgagcatagggtatcgctgcctattgactagtacatgaccacttga

SEQ ID NO: 7837 - DNA, 76 bp, Artificial Sequence
  Description of Artificial Sequence: Synthetic almond; 5' sequence +inner sequence + 3' sequence
tagggaagagaaggacatatgatgcacgactcgcaccctatcattaggccatgttgactagtacatgaccacttga

SEQ ID NO: 7838 - DNA, 76 bp, Artificial Sequence; identical to SEQ ID NO: 3445
  Description of Artificial Sequence: Synthetic almond; 5' sequence +inner sequence + 3' sequence

SEQ ID NO: 7839 - DNA, 76 bp, Artificial Sequence; identical to SEQ ID NO: 3494
  Description of Artificial Sequence: Synthetic almond; 5' sequence +inner sequence + 3' sequence

SEQ ID NO: 7840 - DNA, 76 bp, Artificial Sequence; identical to SEQ ID NO: 3867
  Description of Artificial Sequence: Synthetic almond; 5' sequence +inner sequence + 3' sequence

SEQ ID NO: 7841 - DNA, 76 bp, Artificial Sequence; identical to SEQ ID NO: 3542
  Description of Artificial Sequence: Synthetic almond; 5' sequence +inner sequence + 3' sequence

SEQ ID NO: 7842 - DNA, 76 bp, Artificial Sequence; identical to SEQ ID NO: 3594
  Description of Artificial Sequence: Synthetic almond; 5' sequence +inner sequence + 3' sequence

SEQ ID NO: 7843 - DNA, 76 bp, Artificial Sequence; identical to SEQ ID NO: 3720
  Description of Artificial Sequence: Synthetic almond; 5' sequence +inner sequence + 3' sequence

SEQ ID NO: 7844 - DNA, 76 bp, Artificial Sequence
  Description of Artificial Sequence: Synthetic almond; 5' sequence +inner sequence + 3' sequence
tagggaagagaaggacatatgatgcgtgagcagaagtggccgacactgcacgattgactagtacatgaccacttga

SEQ ID NO: 7845 - DNA, 76 bp, Artificial Sequence
  Description of Artificial Sequence: Synthetic almond; 5' sequence +inner sequence + 3' sequence
tagggaagagaaggacatatgatgtcatgcacgaacactatcatgccggcatgttgactagtacatgaccacttga

SEQ ID NO: 7846 - DNA, 76 bp, Artificial Sequence; identical to SEQ ID NO: 3678
  Description of Artificial Sequence: Synthetic almond; 5' sequence +inner sequence + 3' sequence

SEQ ID NO: 7847 - DNA, 76 bp, Artificial Sequence; identical to SEQ ID NO: 3614
  Description of Artificial Sequence: Synthetic almond; 5' sequence +inner sequence + 3' sequence

SEQ ID NO: 7848 - DNA, 76 bp, Artificial Sequence
  Description of Artificial Sequence: Synthetic almond; 5' sequence +inner sequence + 3' sequence
tagggaagagaaggacatatgatcatgctcgacccggcacgctgctgcgcacgttgactagtacatgaccacttga

SEQ ID NO: 7849 - DNA, 76 bp, Artificial Sequence
  Description of Artificial Sequence: Synthetic almond; 5' sequence +inner sequence + 3' sequence
tagggaagagaaggacatatgatcgaaccgcagtgatgcatctcgcaggcacattgactagtacatgaccacttga

SEQ ID NO: 7850 - DNA, 76 bp, Artificial Sequence; identical to SEQ ID NO: 3472
  Description of Artificial Sequence: Synthetic almond; 5' sequence +inner sequence + 3' sequence

SEQ ID NO: 7851 - DNA, 76 bp, Artificial Sequence; identical to SEQ ID NO: 3685
  Description of Artificial Sequence: Synthetic almond; 5' sequence +inner sequence + 3' sequence

SEQ ID NO: 7852 - DNA, 76 bp, Artificial Sequence
  Description of Artificial Sequence: Synthetic almond; 5' sequence +inner sequence + 3' sequence
tagggaagagaaggacatatgatggtgccagcatacgaccgacacgatgcacattgactagtacatgaccacttga

SEQ ID NO: 7853 - DNA, 76 bp, Artificial Sequence
  Description of Artificial Sequence: Synthetic almond; 5' sequence +inner sequence + 3' sequence
tagggaagagaaggacatatgatggcatgcgcagaactatcaggtgtggcaggttgactagtacatgaccacttga

SEQ ID NO: 7854 - DNA, 76 bp, Artificial Sequence
  Description of Artificial Sequence: Synthetic almond; 5' sequence +inner sequence + 3' sequence
tagggaagagaaggacatatgatggcatgcgatgaacgaggcatgatgcgccattgactagtacatgaccacttga

SEQ ID NO: 7855 - DNA, 76 bp, Artificial Sequence; identical to SEQ ID NO: 3793
  Description of Artificial Sequence: Synthetic almond; 5' sequence +inner sequence + 3' sequence

SEQ ID NO: 7856 - DNA, 76 bp, Artificial Sequence
  Description of Artificial Sequence: Synthetic almond; 5' sequence +inner sequence + 3' sequence
tagggaagagaaggacatatgatggcacggaacgaagcctatcaagtgcgacattgactagtacatgaccacttga

SEQ ID NO: 7857 - DNA, 76 bp, Artificial Sequence
  Description of Artificial Sequence: Synthetic almond; 5' sequence +inner sequence + 3' sequence
tagggaagagaaggacatatgatggcatgcacgcacctacacgtgggtatgtattgactagtacatgaccacttga

SEQ ID NO: 7858 - DNA, 77 bp, Artificial Sequence
  Description of Artificial Sequence: Synthetic almond; 5' sequence +inner sequence + 3' sequence
tagggaagagaaggacatatgattggccgaagcgcacctacacgtgggcacgtattgactagtacatgaccacttga

SEQ ID NO: 7859 - DNA, 76 bp, Artificial Sequence
  Description of Artificial Sequence: Synthetic almond; 5' sequence +inner sequence + 3' sequence
tagggaagagaaggacatatgatggccaagcggactgtgagtgcgtcggtgccttgactagtacatgaccacttga

SEQ ID NO: 7860 - DNA, 76 bp, Artificial Sequence
  Description of Artificial Sequence: Synthetic almond; 5' sequence +inner sequence + 3' sequence
tagggaagagaaggacatatgatggcgtgaccgaacctcaagctggacatggattgactagtacatgaccacttga

SEQ ID NO: 7861 - DNA, 76 bp, Artificial Sequence
  Description of Artificial Sequence: Synthetic almond; 5' sequence +inner sequence + 3' sequence
tagggaagagaaggacatatgatggacggaacgtactgccaggtgagcatgcattgactagtacatgaccacttga

SEQ ID NO: 7862 - DNA, 76 bp, Artificial Sequence
  Description of Artificial Sequence: Synthetic almond; 5' sequence +inner sequence + 3' sequence
tagggaagagaaggacatatgatacacgcagggtgtcgtccgtatgtgcacgattgactagtacatgaccacttga

SEQ ID NO: 7863 - DNA, 76 bp, Artificial Sequence
  Description of Artificial Sequence: Synthetic almond; 5' sequence +inner sequence + 3' sequence
tagggaagagaaggacatatgatgcgcatagcaacaacaccattcgcgtcccgttgactagtacatgaccacttga

SEQ ID NO: 7864 - DNA, 76 bp, Artificial Sequence
  Description of Artificial Sequence: Synthetic almond; 5' sequence +inner sequence + 3' sequence
tagggaagagaaggacatatgatggccaagctgacctatcaacgtgtcgtggattgactagtacatgaccacttga

SEQ ID NO: 7865 - DNA, 76 bp, Artificial Sequence; identical to SEQ ID NO: 3621
  Description of Artificial Sequence: Synthetic almond; 5' sequence +inner sequence + 3' sequence

SEQ ID NO: 7866 - DNA, 76 bp, Artificial Sequence; identical to SEQ ID NO: 3363
  Description of Artificial Sequence: Synthetic almond; 5' sequence +inner sequence + 3' sequence

SEQ ID NO: 7867 - DNA, 76 bp, Artificial Sequence
  Description of Artificial Sequence: Synthetic almond; 5' sequence +inner sequence + 3' sequence
tagggaagagaaggacatatgatgtcatgcacgaacactatcatggcgtcatgttgactagtacatgaccacttga

SEQ ID NO: 7868 - DNA, 76 bp, Artificial Sequence
  Description of Artificial Sequence: Synthetic almond; 5' sequence +inner sequence + 3' sequence
tagggaagagaaggacatatgatcggaacggatcgtaggcagtcacgtggacattgactagtacatgaccacttga

SEQ ID NO: 7869 - DNA, 75 bp, Artificial Sequence
  Description of Artificial Sequence: Synthetic almond; 5' sequence +inner sequence + 3' sequence
tagggaagagaaggacatatgatgtgcaaacggaccgacaagtgcgcatggattgactagtacatgaccacttga

SEQ ID NO: 7870 - DNA, 76 bp, Artificial Sequence
  Description of Artificial Sequence: Synthetic almond; 5' sequence +inner sequence + 3' sequence
tagggaagagaaggacatatgatccgcacgacctcgtgggctgcacttcgacattgactagtacatgaccacttga

SEQ ID NO: 7871 - DNA, 76 bp, Artificial Sequence
  Description of Artificial Sequence: Synthetic almond; 5' sequence +inner sequence + 3' sequence
tagggaagagaaggacatatgatcgcgtgacgataaggtgtgatgcgctccgtttgactagtacatgaccacttga

SEQ ID NO: 7872 - DNA, 76 bp, Artificial Sequence
  Description of Artificial Sequence: Synthetic almond; 5' sequence +inner sequence + 3' sequence
tagggaagagaaggacatatgatggcatgcacgcacctacacgggggtatggattgactagtacatgaccacttga

SEQ ID NO: 7873 - DNA, 76 bp, Artificial Sequence
  Description of Artificial Sequence: Synthetic almond; 5' sequence +inner sequence + 3' sequence
tagggaagagaaggacatatgatcgaccgacgaacaatggtgcatggttgcgtttgactagtacatgaccacttga

SEQ ID NO: 7874 - DNA, 76 bp, Artificial Sequence
  Description of Artificial Sequence: Synthetic almond; 5' sequence +inner sequence + 3' sequence
tagggaagagaaggacatatgatgtcatgcgatgagctcaagttggccttgtattgactagtacatgaccacttga

SEQ ID NO: 7875 - DNA, 76 bp, Artificial Sequence
  Description of Artificial Sequence: Synthetic almond; 5' sequence +inner sequence + 3' sequence
tagggaagagaaggacatatgatacacgcacagtgtgatgtgcctctcgtccattgactagtacatgaccacttga

SEQ ID NO: 7876 - DNA, 75 bp, Artificial Sequence; identical to SEQ ID NO: 3453
  Description of Artificial Sequence: Synthetic almond; 5' sequence +inner sequence + 3' sequence

SEQ ID NO: 7877 - DNA, 76 bp, Artificial Sequence; identical to SEQ ID NO: 3921
  Description of Artificial Sequence: Synthetic almond; 5' sequence +inner sequence + 3' sequence

SEQ ID NO: 7878 - DNA, 76 bp, Artificial Sequence
  Description of Artificial Sequence: Synthetic almond; 5' sequence +inner sequence + 3' sequence
tagggaagagaaggacatatgatgtgactgaacgacgtgaccaagcggcatggttgactagtacatgaccacttga

SEQ ID NO: 7879 - DNA, 76 bp, Artificial Sequence
  Description of Artificial Sequence: Synthetic almond; 5' sequence +inner sequence + 3' sequence
tagggaagagaaggacatatgatgcgtcagcagcagcacggacgaactgcatattgactagtacatgaccacttga

SEQ ID NO: 7880 - DNA, 76 bp, Artificial Sequence
  Description of Artificial Sequence: Synthetic almond; 5' sequence +inner sequence + 3' sequence
tagggaagagaaggacatatgatcacgaacggaccggtaagcatggccatggattgactagtacatgaccacttga

SEQ ID NO: 7881 - DNA, 76 bp, Artificial Sequence
  Description of Artificial Sequence: Synthetic almond; 5' sequence +inner sequence + 3' sequence
tagggaagagaaggacatatgatgtcatgcgcggacattcaagttgtcgtggattgactagtacatgaccacttga

SEQ ID NO: 7882 - DNA, 76 bp, Artificial Sequence
  Description of Artificial Sequence: Synthetic almond; 5' sequence +inner sequence + 3' sequence
tagggaagagaaggacatatgatggcatgcgatgaacgaggcatgctgcgtcattgactagtacatgaccacttga

SEQ ID NO: 7883 - DNA, 76 bp, Artificial Sequence
  Description of Artificial Sequence: Synthetic almond; 5' sequence +inner sequence + 3' sequence
tagggaagagaaggacatatgatcgcaccgtcaagcgggacggcactttggtgttgactagtacatgaccacttga

SEQ ID NO: 7884 - DNA, 76 bp, Artificial Sequence
  Description of Artificial Sequence: Synthetic almond; 5' sequence +inner sequence + 3' sequence
tagggaagagaaggacatatgatgtcgtgagctggaaggagagtgggtacgtattgactagtacatgaccacttga

SEQ ID NO: 7885 - DNA, 76 bp, Artificial Sequence; identical to SEQ ID NO: 3983
  Description of Artificial Sequence: Synthetic almond; 5' sequence +inner sequence + 3' sequence

SEQ ID NO: 7886 - DNA, 76 bp, Artificial Sequence
  Description of Artificial Sequence: Synthetic almond; 5' sequence +inner sequence + 3' sequence
tagggaagagaaggacatatgatggccgtaacgcaccaggatgcactgtgtcattgactagtacatgaccacttga

SEQ ID NO: 7887 - DNA, 76 bp, Artificial Sequence
  Description of Artificial Sequence: Synthetic almond; 5' sequence +inner sequence + 3' sequence
tagggaagagaaggacatatgattggccgatcgaccctatcgagtgcagcatgttgactagtacatgaccacttga

SEQ ID NO: 7888 - DNA, 76 bp, Artificial Sequence
  Description of Artificial Sequence: Synthetic almond; 5' sequence +inner sequence + 3' sequence
tagggaagagaaggacatatgatggcatgcacgcacctacacgtgggtacggattgactagtacatgaccacttga

SEQ ID NO: 7889 - DNA, 76 bp, Artificial Sequence
  Description of Artificial Sequence: Synthetic almond; 5' sequence +inner sequence + 3' sequence
tagggaagagaaggacatatgatggccacacgctgccctaaagtgttcgtgtattgactagtacatgaccacttga

SEQ ID NO: 7890 - DNA, 76 bp, Artificial Sequence
  Description of Artificial Sequence: Synthetic almond; 5' sequence +inner sequence + 3' sequence
tagggaagagaaggacatatgatgcacgactcgaaccctatcatgaggccatgttgactagtacatgaccacttga

SEQ ID NO: 7891 - DNA, 76 bp, Artificial Sequence; identical to SEQ ID NO: 3734
  Description of Artificial Sequence: Synthetic almond; 5' sequence +inner sequence + 3' sequence

SEQ ID NO: 7892 - DNA, 76 bp, Artificial Sequence; identical to SEQ ID NO: 3837
  Description of Artificial Sequence: Synthetic almond; 5' sequence +inner sequence + 3' sequence

SEQ ID NO: 7893 - DNA, 76 bp, Artificial Sequence
  Description of Artificial Sequence: Synthetic almond; 5' sequence +inner sequence + 3' sequence
tagggaagagaaggacatatgatccgtagcgacatcaagcggcggcgtgcgtgttgactagtacatgaccacttga

SEQ ID NO: 7894 - DNA, 76 bp, Artificial Sequence
  Description of Artificial Sequence: Synthetic almond; 5' sequence +inner sequence + 3' sequence
tagggaagagaaggacatatgatcgaccgtacggaaggggagtggccgtcacgttgactagtacatgaccacttga

SEQ ID NO: 7895 - DNA, 76 bp, Artificial Sequence; identical to SEQ ID NO: 3984
  Description of Artificial Sequence: Synthetic almond; 5' sequence +inner sequence + 3' sequence

SEQ ID NO: 7896 - DNA, 76 bp, Artificial Sequence; identical to SEQ ID NO: 3421
  Description of Artificial Sequence: Synthetic almond; 5' sequence +inner sequence + 3' sequence

SEQ ID NO: 7897 - DNA, 76 bp, Artificial Sequence; identical to SEQ ID NO: 3910
  Description of Artificial Sequence: Synthetic almond; 5' sequence +inner sequence + 3' sequence

SEQ ID NO: 7898 - DNA, 76 bp, Artificial Sequence
  Description of Artificial Sequence: Synthetic almond; 5' sequence +inner sequence + 3' sequence
tagggaagagaaggacatatgatccgtagcgacatcaagtggtggtgtgcgtgttgactagtacatgaccacttga

SEQ ID NO: 7899 - DNA, 76 bp, Artificial Sequence; identical to SEQ ID NO: 3474
  Description of Artificial Sequence: Synthetic almond; 5' sequence +inner sequence + 3' sequence

SEQ ID NO: 7900 - DNA, 76 bp, Artificial Sequence; identical to SEQ ID NO: 3702
  Description of Artificial Sequence: Synthetic almond; 5' sequence +inner sequence + 3' sequence

SEQ ID NO: 7901 - DNA, 76 bp, Artificial Sequence
  Description of Artificial Sequence: Synthetic almond; 5' sequence +inner sequence + 3' sequence
tagggaagagaaggacatatgatccatcagtggacgcgtaactgacatgggcattgactagtacatgaccacttga

SEQ ID NO: 7902 - DNA, 76 bp, Artificial Sequence; identical to SEQ ID NO: 3452
  Description of Artificial Sequence: Synthetic almond; 5' sequence +inner sequence + 3' sequence

SEQ ID NO: 7903 - DNA, 76 bp, Artificial Sequence; identical to SEQ ID NO: 3917
  Description of Artificial Sequence: Synthetic almond; 5' sequence +inner sequence + 3' sequence

SEQ ID NO: 7904 - DNA, 76 bp, Artificial Sequence
  Description of Artificial Sequence: Synthetic almond; 5' sequence +inner sequence + 3' sequence
tagggaagagaaggacatatgatcgacccgactaagcgtggtgcacactgtgtttgactagtacatgaccacttga

SEQ ID NO: 7905 - DNA, 76 bp, Artificial Sequence
  Description of Artificial Sequence: Synthetic almond; 5' sequence +inner sequence + 3' sequence
tagggaagagaaggacatatgatggacgcgacgtccctgagagtgtgcaggtattgactagtacatgaccacttga

SEQ ID NO: 7906 - DNA, 76 bp, Artificial Sequence
  Description of Artificial Sequence: Synthetic almond; 5' sequence +inner sequence + 3' sequence
tagggaagagaaggacatatgatcgatcgcagtgagagccgtccgtagccacgttgactagtacatgaccacttga

SEQ ID NO: 7907 - DNA, 76 bp, Artificial Sequence
  Description of Artificial Sequence: Synthetic almond; 5' sequence +inner sequence + 3' sequence
tagggaagagaaggacatatgatcatgtccgtgcgttcccgttgagcgcgtcattgactagtacatgaccacttga

SEQ ID NO: 7908 - DNA, 76 bp, Artificial Sequence; identical to SEQ ID NO: 3960
  Description of Artificial Sequence: Synthetic almond; 5' sequence +inner sequence + 3' sequence

SEQ ID NO: 7909 - DNA, 76 bp, Artificial Sequence
  Description of Artificial Sequence: Synthetic almond; 5' sequence +inner sequence + 3' sequence
tagggaagagaaggacatatgatacatggcagtagcgcgcactaggtaggacattgactagtacatgaccacttga

SEQ ID NO: 7910 - DNA, 76 bp, Artificial Sequence
  Description of Artificial Sequence: Synthetic almond; 5' sequence +inner sequence + 3' sequence
tagggaagagaaggacatatgattggaccaagctgaacgtcaagcgcgccatgttgactagtacatgaccacttga

SEQ ID NO: 7911 - DNA, 76 bp, Artificial Sequence
  Description of Artificial Sequence: Synthetic almond; 5' sequence +inner sequence + 3' sequence
tagggaagagaaggacatatgatggacgcagcggaacgttcgagtggcacgtattgactagtacatgaccacttga

SEQ ID NO: 7912 - DNA, 76 bp, Artificial Sequence
  Description of Artificial Sequence: Synthetic almond; 5' sequence +inner sequence + 3' sequence
tagggaagagaaggacatatgatacgtgacagccatgggtagcgcacggcacattgactagtacatgaccacttga

SEQ ID NO: 7913 - DNA, 76 bp, Artificial Sequence
  Description of Artificial Sequence: Synthetic almond; 5' sequence +inner sequence + 3' sequence
tagggaagagaaggacatatgatgtactgcgccatcccgtcatcatgtggacattgactagtacatgaccacttga

SEQ ID NO: 7914 - DNA, 76 bp, Artificial Sequence; identical to SEQ ID NO: 3973
  Description of Artificial Sequence: Synthetic almond; 5' sequence +inner sequence + 3' sequence

SEQ ID NO: 7915 - DNA, 76 bp, Artificial Sequence
  Description of Artificial Sequence: Synthetic almond; 5' sequence +inner sequence + 3' sequence
tagggaagagaaggacatatgatagacgcaacgaaccgtatgcaacgtgcacattgactagtacatgaccacttga

SEQ ID NO: 7916 - DNA, 76 bp, Artificial Sequence
  Description of Artificial Sequence: Synthetic almond; 5' sequence +inner sequence + 3' sequence
tagggaagagaaggacatatgatggcacaaacggaccgacaagagcgcatggattgactagtacatgaccacttga

SEQ ID NO: 7917 - DNA, 76 bp, Artificial Sequence; identical to SEQ ID NO: 3824
  Description of Artificial Sequence: Synthetic almond; 5' sequence +inner sequence + 3' sequence

SEQ ID NO: 7918 - DNA, 76 bp, Artificial Sequence
  Description of Artificial Sequence: Synthetic almond; 5' sequence +inner sequence + 3' sequence
tagggaagagaaggacatatgatgcacgactcgtaccctatcatgaggccatgttgactagtacatgaccacttga

SEQ ID NO: 7919 - DNA, 76 bp, Artificial Sequence
  Description of Artificial Sequence: Synthetic almond; 5' sequence +inner sequence + 3' sequence
tagggaagagaaggacatatgatcacggcaaggacgatcaggtgggactgcgtttgactagtacatgaccacttga

SEQ ID NO: 7920 - DNA, 76 bp, Artificial Sequence; identical to SEQ ID NO: 3792
  Description of Artificial Sequence: Synthetic almond; 5' sequence +inner sequence + 3' sequence

SEQ ID NO: 7921 - DNA, 76 bp, Artificial Sequence
  Description of Artificial Sequence: Synthetic almond; 5' sequence +inner sequence + 3' sequence
tagggaagagaaggacatatgatggcacaaacggaccgacaagtgcgcattgattgactagtacatgaccacttga

SEQ ID NO: 7922 - DNA, 76 bp, Artificial Sequence
  Description of Artificial Sequence: Synthetic almond; 5' sequence +inner sequence + 3' sequence
tagggaagagaaggacatatgatcacgcgcagggaaggcaacctgtggctgcattgactagtacatgaccacttga

SEQ ID NO: 7923 - DNA, 76 bp, Artificial Sequence; identical to SEQ ID NO: 3295
  Description of Artificial Sequence: Synthetic almond; 5' sequence +inner sequence + 3' sequence

SEQ ID NO: 7924 - DNA, 76 bp, Artificial Sequence
  Description of Artificial Sequence: Synthetic almond; 5' sequence +inner sequence + 3' sequence
tagggaagagaaggacatatgatggcatgcgatgaacgaggcatgatgcgttattgactagtacatgaccacttga

SEQ ID NO: 7925 - DNA, 76 bp, Artificial Sequence
  Description of Artificial Sequence: Synthetic almond; 5' sequence +inner sequence + 3' sequence
tagggaagagaaggacatatgatggcatgatcgaacgggagagtgcgtcggtattgactagtacatgaccacttga

SEQ ID NO: 7926 - DNA, 76 bp, Artificial Sequence
  Description of Artificial Sequence: Synthetic almond; 5' sequence +inner sequence + 3' sequence
tagggaagagaaggacatatgatccgcgaggaacagcaggcctacgcggcacgttgactagtacatgaccacttga

SEQ ID NO: 7927 - DNA, 76 bp, Artificial Sequence
  Description of Artificial Sequence: Synthetic almond; 5' sequence +inner sequence + 3' sequence
tagggaagagaaggacatatgatcgaccgaacgcagcaatacgtgcgccacgtttgactagtacatgaccacttga

SEQ ID NO: 7928 - DNA, 76 bp, Artificial Sequence; identical to SEQ ID NO: 3589
  Description of Artificial Sequence: Synthetic almond; 5' sequence +inner sequence + 3' sequence

SEQ ID NO: 7929 - DNA, 76 bp, Artificial Sequence; identical to SEQ ID NO: 3829
  Description of Artificial Sequence: Synthetic almond; 5' sequence +inner sequence + 3' sequence

SEQ ID NO: 7930 - DNA, 76 bp, Artificial Sequence
  Description of Artificial Sequence: Synthetic almond; 5' sequence +inner sequence + 3' sequence
tagggaagagaaggacatatgatgagttggcgaaccgagatgacgtggccatgttgactagtacatgaccacttga

SEQ ID NO: 7931 - DNA, 76 bp, Artificial Sequence
  Description of Artificial Sequence: Synthetic almond; 5' sequence +inner sequence + 3' sequence
tagggaagagaaggacatatgatgcacgtcacgcacaagcaggccatgtggcattgactagtacatgaccacttga

SEQ ID NO: 7932 - DNA, 76 bp, Artificial Sequence; identical to SEQ ID NO: 3488
  Description of Artificial Sequence: Synthetic almond; 5' sequence +inner sequence + 3' sequence

SEQ ID NO: 7933 - DNA, 76 bp, Artificial Sequence
  Description of Artificial Sequence: Synthetic almond; 5' sequence +inner sequence + 3' sequence
tagggaagagaaggacatatgatgcccgactcgcaccctatcatgaggccatgttgactagtacatgaccacttga

SEQ ID NO: 7934 - DNA, 76 bp, Artificial Sequence; identical to SEQ ID NO: 3646
  Description of Artificial Sequence: Synthetic almond; 5' sequence +inner sequence + 3' sequence

SEQ ID NO: 7935 - DNA, 76 bp, Artificial Sequence
  Description of Artificial Sequence: Synthetic almond; 5' sequence +inner sequence + 3' sequence
tagggaagagaaggacatatgatgtacgtgcgacatccctcaagtgcggtgtattgactagtacatgaccacttga

SEQ ID NO: 7936 - DNA, 76 bp, Artificial Sequence; identical to SEQ ID NO: 3265
  Description of Artificial Sequence: Synthetic almond; 5' sequence +inner sequence + 3' sequence

SEQ ID NO: 7937 - DNA, 76 bp, Artificial Sequence
  Description of Artificial Sequence: Synthetic almond; 5' sequence +inner sequence + 3' sequence
tagggaagagaaggacatatgatcatgtgacgacgatgcccacgcgctggacattgactagtacatgaccacttga

SEQ ID NO: 7938 - DNA, 76 bp, Artificial Sequence
  Description of Artificial Sequence: Synthetic almond; 5' sequence +inner sequence + 3' sequence
tagggaagagaaggacatatgatgccattccgcatcctacacgtgggcacgtattgactagtacatgaccacttga

SEQ ID NO: 7939 - DNA, 76 bp, Artificial Sequence
  Description of Artificial Sequence: Synthetic almond; 5' sequence +inner sequence + 3' sequence
tagggaagagaaggacatatgatggccacgctcgtaccggtcagtgcggcatgttgactagtacatgaccacttga

SEQ ID NO: 7940 - DNA, 76 bp, Artificial Sequence
  Description of Artificial Sequence: Synthetic almond; 5' sequence +inner sequence + 3' sequence
tagggaagagaaggacatatgatggcatgcgatgaacgcggcatgatgcgtcattgactagtacatgaccacttga

SEQ ID NO: 7941 - DNA, 76 bp, Artificial Sequence
  Description of Artificial Sequence: Synthetic almond; 5' sequence +inner sequence + 3' sequence
tagggaagagaaggacatatgatgcgatgcgacagagatccgtcacgccccgtttgactagtacatgaccacttga

SEQ ID NO: 7942 - DNA, 76 bp, Artificial Sequence
  Description of Artificial Sequence: Synthetic almond; 5' sequence +inner sequence + 3' sequence
tagggaagagaaggacatatgatcacggcaggaagcggacggcactcggcacgttgactagtacatgaccacttga

SEQ ID NO: 7943 - DNA, 76 bp, Artificial Sequence
  Description of Artificial Sequence: Synthetic almond; 5' sequence +inner sequence + 3' sequence
tagggaagagaaggacatatgatccacgactcgcaccctatcatgaggccatgttgactagtacatgaccacttga

SEQ ID NO: 7944 - DNA, 76 bp, Artificial Sequence
  Description of Artificial Sequence: Synthetic almond; 5' sequence +inner sequence + 3' sequence
tagggaagagaaggacatatgattgcgtgcatacgtatggcattctcggcgcattgactagtacatgaccacttga

SEQ ID NO: 7945 - DNA, 76 bp, Artificial Sequence
  Description of Artificial Sequence: Synthetic almond; 5' sequence +inner sequence + 3' sequence
tagggaagagaaggacatatgatggccaacgatgcccaaccaagtgcggtatgttgactagtacatgaccacttga

SEQ ID NO: 7946 - DNA, 76 bp, Artificial Sequence
  Description of Artificial Sequence: Synthetic almond; 5' sequence +inner sequence + 3' sequence
tagggaagagaaggacatatgatccgtaacgacatcaagcggtggtgtgcgtgttgactagtacatgaccacttga

SEQ ID NO: 7947 - DNA, 76 bp, Artificial Sequence
  Description of Artificial Sequence: Synthetic almond; 5' sequence +inner sequence + 3' sequence
tagggaagagaaggacatatgattcgatggcggcacgaggactgctctgcacgttgactagtacatgaccacttga

SEQ ID NO: 7948 - DNA, 76 bp, Artificial Sequence
  Description of Artificial Sequence: Synthetic almond; 5' sequence +inner sequence + 3' sequence
tagggaagagaaggacatatgatcgcaccgtcgatacgtcatgcacgctgccattgactagtacatgaccacttga

SEQ ID NO: 7949 - DNA, 76 bp, Artificial Sequence
  Description of Artificial Sequence: Synthetic almond; 5' sequence +inner sequence + 3' sequence
tagggaagagaaggacatatgatgcgatgagcatcggacgtacggtgtgtgtcttgactagtacatgaccacttga

SEQ ID NO: 7950 - DNA, 76 bp, Artificial Sequence; identical to SEQ ID NO: 3554
  Description of Artificial Sequence: Synthetic almond; 5' sequence +inner sequence + 3' sequence

SEQ ID NO: 7951 - DNA, 76 bp, Artificial Sequence
  Description of Artificial Sequence: Synthetic almond; 5' sequence +inner sequence + 3' sequence
tagggaagagaaggacatatgatccacgggtgcagcaggacgtactctgcacgttgactagtacatgaccacttga

SEQ ID NO: 7952 - DNA, 76 bp, Artificial Sequence; identical to SEQ ID NO: 3835
  Description of Artificial Sequence: Synthetic almond; 5' sequence +inner sequence + 3' sequence

SEQ ID NO: 7953 - DNA, 76 bp, Artificial Sequence
  Description of Artificial Sequence: Synthetic almond; 5' sequence +inner sequence + 3' sequence
tagggaagagaaggacatatgatccgcacgaagcccaaccgtcaatggccatgttgactagtacatgaccacttga

SEQ ID NO: 7954 - DNA, 76 bp, Artificial Sequence
  Description of Artificial Sequence: Synthetic almond; 5' sequence +inner sequence + 3' sequence
tagggaagagaaggacatatgatggcacagcatcgtacgtactggttgccgtattgactagtacatgaccacttga

SEQ ID NO: 7955 - DNA, 76 bp, Artificial Sequence
  Description of Artificial Sequence: Synthetic almond; 5' sequence +inner sequence + 3' sequence
tagggaagagaaggacatatgatcatgacggtgacggcacatgcgacgcgacattgactagtacatgaccacttga

SEQ ID NO: 7956 - DNA, 76 bp, Artificial Sequence
  Description of Artificial Sequence: Synthetic almond; 5' sequence +inner sequence + 3' sequence
tagggaagagaaggacatatgatcatgtgcccgatacgaacgacatgtgtgcattgactagtacatgaccacttga

SEQ ID NO: 7957 - DNA, 76 bp, Artificial Sequence; identical to SEQ ID NO: 3874
  Description of Artificial Sequence: Synthetic almond; 5' sequence +inner sequence + 3' sequence

SEQ ID NO: 7958 - DNA, 76 bp, Artificial Sequence
  Description of Artificial Sequence: Synthetic almond; 5' sequence +inner sequence + 3' sequence
tagggaagagaaggacatatgatcatgcgatgacccgtagatcacgtggcgtgttgactagtacatgaccacttga

SEQ ID NO: 7959 - DNA, 76 bp, Artificial Sequence
  Description of Artificial Sequence: Synthetic almond; 5' sequence +inner sequence + 3' sequence
tagggaagagaaggacatatgatcatgtgcataggaccgcaacgagacgtgcattgactagtacatgaccacttga

SEQ ID NO: 7960 - DNA, 76 bp, Artificial Sequence
  Description of Artificial Sequence: Synthetic almond; 5' sequence +inner sequence + 3' sequence
tagggaagagaaggacatatgatgtacgcatcgtcccgtcatgtggttccgcattgactagtacatgaccacttga

SEQ ID NO: 7961 - DNA, 76 bp, Artificial Sequence
  Description of Artificial Sequence: Synthetic almond; 5' sequence +inner sequence + 3' sequence
tagggaagagaaggacatatgatcgtgacggcgagagcacaacggcatgacgtttgactagtacatgaccacttga

SEQ ID NO: 7962 - DNA, 76 bp, Artificial Sequence
  Description of Artificial Sequence: Synthetic almond; 5' sequence +inner sequence + 3' sequence
tagggaagagaaggacatatgatcctgatgcggcacgtcctcgtgatcatgcattgactagtacatgaccacttga

SEQ ID NO: 7963 - DNA, 76 bp, Artificial Sequence
  Description of Artificial Sequence: Synthetic almond; 5' sequence +inner sequence + 3' sequence
tagggaagagaaggacatatgatcgaccggcggagaacggtgtggcatgcgtgttgactagtacatgaccacttga

SEQ ID NO: 7964 - DNA, 76 bp, Artificial Sequence; identical to SEQ ID NO: 3902
  Description of Artificial Sequence: Synthetic almond; 5' sequence +inner sequence + 3' sequence

SEQ ID NO: 7965 - DNA, 76 bp, Artificial Sequence; identical to SEQ ID NO: 3339
  Description of Artificial Sequence: Synthetic almond; 5' sequence +inner sequence + 3' sequence

SEQ ID NO: 7966 - DNA, 76 bp, Artificial Sequence
  Description of Artificial Sequence: Synthetic almond; 5' sequence +inner sequence + 3' sequence
tagggaagagaaggacatatgatggccgaacggacctggcttgcttatgcgcgttgactagtacatgaccacttga

SEQ ID NO: 7967 - DNA, 76 bp, Artificial Sequence
  Description of Artificial Sequence: Synthetic almond; 5' sequence +inner sequence + 3' sequence
tagggaagagaaggacatatgattggccgatcgacactatcaagtgcagcatgttgactagtacatgaccacttga

SEQ ID NO: 7968 - DNA, 75 bp, Artificial Sequence
  Description of Artificial Sequence: Synthetic almond; 5' sequence +inner sequence + 3' sequence
tagggaagagaaggacatatgatgtacgccgatgccctcatgtggccgtggattgactagtacatgaccacttga

SEQ ID NO: 7969 - DNA, 76 bp, Artificial Sequence
  Description of Artificial Sequence: Synthetic almond; 5' sequence +inner sequence + 3' sequence
tagggaagagaaggacatatgatggcatggtctgaccgtgagtgcgtcgggtattgactagtacatgaccacttga

SEQ ID NO: 7970 - DNA, 76 bp, Artificial Sequence; identical to SEQ ID NO: 3384
  Description of Artificial Sequence: Synthetic almond; 5' sequence +inner sequence + 3' sequence

SEQ ID NO: 7971 - DNA, 76 bp, Artificial Sequence
  Description of Artificial Sequence: Synthetic almond; 5' sequence +inner sequence + 3' sequence
tagggaagagaaggacatatgatcgtgccgcaaagcaaggtcagcacggtccgttgactagtacatgaccacttga

SEQ ID NO: 7972 - DNA, 76 bp, Artificial Sequence; identical to SEQ ID NO: 3644
  Description of Artificial Sequence: Synthetic almond; 5' sequence +inner sequence + 3' sequence

SEQ ID NO: 7973 - DNA, 76 bp, Artificial Sequence; identical to SEQ ID NO: 3699
  Description of Artificial Sequence: Synthetic almond; 5' sequence +inner sequence + 3' sequence

SEQ ID NO: 7974 - DNA, 76 bp, Artificial Sequence; identical to SEQ ID NO: 3825
  Description of Artificial Sequence: Synthetic almond; 5' sequence +inner sequence + 3' sequence

SEQ ID NO: 7975 - DNA, 76 bp, Artificial Sequence
  Description of Artificial Sequence: Synthetic almond; 5' sequence +inner sequence + 3' sequence
tagggaagagaaggacatatgatcgtatggcctggatgcacgactttgcgtcattgactagtacatgaccacttga

SEQ ID NO: 7976 - DNA, 76 bp, Artificial Sequence
  Description of Artificial Sequence: Synthetic almond; 5' sequence +inner sequence + 3' sequence
tagggaagagaaggacatatgatcgcgacggaagtggagatgcagtgtgcacattgactagtacatgaccacttga

SEQ ID NO: 7977 - DNA, 76 bp, Artificial Sequence
  Description of Artificial Sequence: Synthetic almond; 5' sequence +inner sequence + 3' sequence
tagggaagagaaggacatatgatggcacaaacggaccgacaagggcgcatggattgactagtacatgaccacttga

SEQ ID NO: 7978 - DNA, 76 bp, Artificial Sequence
  Description of Artificial Sequence: Synthetic almond; 5' sequence +inner sequence + 3' sequence
tagggaagagaaggacatatgatccatcgtgacggacgagtcggaccttgccattgactagtacatgaccacttga

SEQ ID NO: 7979 - DNA, 76 bp, Artificial Sequence
  Description of Artificial Sequence: Synthetic almond; 5' sequence +inner sequence + 3' sequence
tagggaagagaaggacatatgatcgacaccgtcaagtgcagtgtgcgatggcgttgactagtacatgaccacttga

SEQ ID NO: 7980 - DNA, 76 bp, Artificial Sequence; identical to SEQ ID NO: 3410
  Description of Artificial Sequence: Synthetic almond; 5' sequence +inner sequence + 3' sequence

SEQ ID NO: 7981 - DNA, 76 bp, Artificial Sequence
  Description of Artificial Sequence: Synthetic almond; 5' sequence +inner sequence + 3' sequence
tagggaagagaaggacatatgatgcccacctcgaccctatcaacgtgctcatgttgactagtacatgaccacttga

SEQ ID NO: 7982 - DNA, 76 bp, Artificial Sequence
  Description of Artificial Sequence: Synthetic almond; 5' sequence +inner sequence + 3' sequence
tagggaagagaaggacatatgatggccgagcgaacctagcatgtgggatcgtattgactagtacatgaccacttga

SEQ ID NO: 7983 - DNA, 76 bp, Artificial Sequence; identical to SEQ ID NO: 3404
  Description of Artificial Sequence: Synthetic almond; 5' sequence +inner sequence + 3' sequence

SEQ ID NO: 7984 - DNA, 76 bp, Artificial Sequence
  Description of Artificial Sequence: Synthetic almond; 5' sequence +inner sequence + 3' sequence
tagggaagagaaggacatatgatcggaccgtcaagcgggaaggcactttggtgttgactagtacatgaccacttga

SEQ ID NO: 7985 - DNA, 76 bp, Artificial Sequence
  Description of Artificial Sequence: Synthetic almond; 5' sequence +inner sequence + 3' sequence
tagggaagagaaggacatatgatggcctgcacggtaacggtggacgcgtcgtgttgactagtacatgaccacttga

SEQ ID NO: 7986 - DNA, 76 bp, Artificial Sequence; identical to SEQ ID NO: 3959
  Description of Artificial Sequence: Synthetic almond; 5' sequence +inner sequence + 3' sequence

SEQ ID NO: 7987 - DNA, 76 bp, Artificial Sequence
  Description of Artificial Sequence: Synthetic almond; 5' sequence +inner sequence + 3' sequence
tagggaagagaaggacatatgatgcaagactcgcaccctatcatgaggccatgttgactagtacatgaccacttga

SEQ ID NO: 7988 - DNA, 76 bp, Artificial Sequence
  Description of Artificial Sequence: Synthetic almond; 5' sequence +inner sequence + 3' sequence
tagggaagagaaggacatatgatgcacgactcgcaccatatcatgaggccatgttgactagtacatgaccacttga

SEQ ID NO: 7989 - DNA, 76 bp, Artificial Sequence; identical to SEQ ID NO: 3263
  Description of Artificial Sequence: Synthetic almond; 5' sequence +inner sequence + 3' sequence

SEQ ID NO: 7990 - DNA, 77 bp, Artificial Sequence; identical to SEQ ID NO: 3652
  Description of Artificial Sequence: Synthetic almond; 5' sequence +inner sequence + 3' sequence

SEQ ID NO: 7991 - DNA, 76 bp, Artificial Sequence
  Description of Artificial Sequence: Synthetic almond; 5' sequence +inner sequence + 3' sequence
tagggaagagaaggacatatgatgcatcagcagactatcggacgagctgcacgttgactagtacatgaccacttga

SEQ ID NO: 7992 - DNA, 76 bp, Artificial Sequence
  Description of Artificial Sequence: Synthetic almond; 5' sequence +inner sequence + 3' sequence
tagggaagagaaggacatatgatcgacccaagtgcgaaatgtgcgagtgcgccttgactagtacatgaccacttga

SEQ ID NO: 7993 - DNA, 76 bp, Artificial Sequence; identical to SEQ ID NO: 3260
  Description of Artificial Sequence: Synthetic almond; 5' sequence +inner sequence + 3' sequence

SEQ ID NO: 7994 - DNA, 76 bp, Artificial Sequence
  Description of Artificial Sequence: Synthetic almond; 5' sequence +inner sequence + 3' sequence
tagggaagagaaggacatatgatcgtaccgctgcggaacaaggtgcgtgcaggttgactagtacatgaccacttga

SEQ ID NO: 7995 - DNA, 76 bp, Artificial Sequence
  Description of Artificial Sequence: Synthetic almond; 5' sequence +inner sequence + 3' sequence
tagggaagagaaggacatatgatggccacggacgtgcatcatgccgctgcgccttgactagtacatgaccacttga

SEQ ID NO: 7996 - DNA, 76 bp, Artificial Sequence; identical to SEQ ID NO: 3849
  Description of Artificial Sequence: Synthetic almond; 5' sequence +inner sequence + 3' sequence

SEQ ID NO: 7997 - DNA, 76 bp, Artificial Sequence
  Description of Artificial Sequence: Synthetic almond; 5' sequence +inner sequence + 3' sequence
tagggaagagaaggacatatgatgtcatgccatcccttcgagtgtgacagggattgactagtacatgaccacttga

SEQ ID NO: 7998 - DNA, 76 bp, Artificial Sequence
  Description of Artificial Sequence: Synthetic almond; 5' sequence +inner sequence + 3' sequence
tagggaagagaaggacatatgatggcacaaacggaccgacaagtgcgaatggattgactagtacatgaccacttga

SEQ ID NO: 7999 - DNA, 76 bp, Artificial Sequence
  Description of Artificial Sequence: Synthetic almond; 5' sequence +inner sequence + 3' sequence
tagggaagagaaggacatatgatgtgcagaacgcgccgcaagtgtgttaggtattgactagtacatgaccacttga

SEQ ID NO: 8000 - DNA, 76 bp, Artificial Sequence
  Description of Artificial Sequence: Synthetic almond; 5' sequence +inner sequence + 3' sequence
tagggaagagaaggacatatgatggcatgcgatgaacgaggcatgatgcttcattgactagtacatgaccacttga

SEQ ID NO: 8001 - DNA, 76 bp, Artificial Sequence
  Description of Artificial Sequence: Synthetic almond; 5' sequence +inner sequence + 3' sequence
tagggaagagaaggacatatgatccgcacgcagccctatcagtggtgcatgcattgactagtacatgaccacttga

SEQ ID NO: 8002 - DNA, 76 bp, Artificial Sequence
  Description of Artificial Sequence: Synthetic almond; 5' sequence +inner sequence + 3' sequence
tagggaagagaaggacatatgatgtcatgcacgaacactatcatggcgacatgttgactagtacatgaccacttga

SEQ ID NO: 8003 - DNA, 30 bp, Artificial Sequence; identical to SEQ ID NO: 4
  Description of Artificial Sequence: Synthetic brazil nut; inner sequence

SEQ ID NO: 8004 - DNA, 30 bp, Artificial Sequence; identical to SEQ ID NO: 3
  Description of Artificial Sequence: Synthetic brazil nut; inner sequence

SEQ ID NO: 8005 - DNA, 30 bp, Artificial Sequence; identical to SEQ ID NO: 8
  Description of Artificial Sequence: Synthetic brazil nut; inner sequence

SEQ ID NO: 8006 - DNA, 30 bp, Artificial Sequence; identical to SEQ ID NO: 6
  Description of Artificial Sequence: Synthetic brazil nut; inner sequence

SEQ ID NO: 8007 - DNA, 30 bp, Artificial Sequence; identical to SEQ ID NO: 5
  Description of Artificial Sequence: Synthetic brazil nut; inner sequence

SEQ ID NO: 8008 - DNA, 30 bp, Artificial Sequence; identical to SEQ ID NO: 10
  Description of Artificial Sequence: Synthetic brazil nut; inner sequence

SEQ ID NO: 8009 - DNA, 30 bp, Artificial Sequence; identical to SEQ ID NO: 7
  Description of Artificial Sequence: Synthetic brazil nut; inner sequence

SEQ ID NO: 8010 - DNA, 30 bp, Artificial Sequence; identical to SEQ ID NO: 9
  Description of Artificial Sequence: Synthetic brazil nut; inner sequence

SEQ ID NO: 8011 - DNA, 30 bp, Artificial Sequence; identical to SEQ ID NO: 12
  Description of Artificial Sequence: Synthetic brazil nut; inner sequence

SEQ ID NO: 8012 - DNA, 30 bp, Artificial Sequence; identical to SEQ ID NO: 11
  Description of Artificial Sequence: Synthetic brazil nut; inner sequence

SEQ ID NO: 8013 - DNA, 30 bp, Artificial Sequence; identical to SEQ ID NO: 23
  Description of Artificial Sequence: Synthetic brazil nut; inner sequence

SEQ ID NO: 8014 - DNA, 30 bp, Artificial Sequence; identical to SEQ ID NO: 18
  Description of Artificial Sequence: Synthetic brazil nut; inner sequence

SEQ ID NO: 8015 - DNA, 30 bp, Artificial Sequence; identical to SEQ ID NO: 14
  Description of Artificial Sequence: Synthetic brazil nut; inner sequence

SEQ ID NO: 8016 - DNA, 30 bp, Artificial Sequence; identical to SEQ ID NO: 13
  Description of Artificial Sequence: Synthetic brazil nut; inner sequence

SEQ ID NO: 8017 - DNA, 30 bp, Artificial Sequence; identical to SEQ ID NO: 17
  Description of Artificial Sequence: Synthetic brazil nut; inner sequence

SEQ ID NO: 8018 - DNA, 30 bp, Artificial Sequence; identical to SEQ ID NO: 37
  Description of Artificial Sequence: Synthetic brazil nut; inner sequence

SEQ ID NO: 8019 - DNA, 30 bp, Artificial Sequence; identical to SEQ ID NO: 20
  Description of Artificial Sequence: Synthetic brazil nut; inner sequence

SEQ ID NO: 8020 - DNA, 30 bp, Artificial Sequence; identical to SEQ ID NO: 22
  Description of Artificial Sequence: Synthetic brazil nut; inner sequence

SEQ ID NO: 8021 - DNA, 30 bp, Artificial Sequence; identical to SEQ ID NO: 49
  Description of Artificial Sequence: Synthetic brazil nut; inner sequence

SEQ ID NO: 8022 - DNA, 30 bp, Artificial Sequence; identical to SEQ ID NO: 30
  Description of Artificial Sequence: Synthetic brazil nut; inner sequence

SEQ ID NO: 8023 - DNA, 30 bp, Artificial Sequence; identical to SEQ ID NO: 28
  Description of Artificial Sequence: Synthetic brazil nut; inner sequence

SEQ ID NO: 8024 - DNA, 30 bp, Artificial Sequence; identical to SEQ ID NO: 16
  Description of Artificial Sequence: Synthetic brazil nut; inner sequence

SEQ ID NO: 8025 - DNA, 30 bp, Artificial Sequence; identical to SEQ ID NO: 46
  Description of Artificial Sequence: Synthetic brazil nut; inner sequence

SEQ ID NO: 8026 - DNA, 30 bp, Artificial Sequence; identical to SEQ ID NO: 34
  Description of Artificial Sequence: Synthetic brazil nut; inner sequence

SEQ ID NO: 8027 - DNA, 30 bp, Artificial Sequence; identical to SEQ ID NO: 41
  Description of Artificial Sequence: Synthetic brazil nut; inner sequence

SEQ ID NO: 8028 - DNA, 30 bp, Artificial Sequence; identical to SEQ ID NO: 60
  Description of Artificial Sequence: Synthetic brazil nut; inner sequence

SEQ ID NO: 8029 - DNA, 30 bp, Artificial Sequence; identical to SEQ ID NO: 45
  Description of Artificial Sequence: Synthetic brazil nut; inner sequence

SEQ ID NO: 8030 - DNA, 30 bp, Artificial Sequence; identical to SEQ ID NO: 21
  Description of Artificial Sequence: Synthetic brazil nut; inner sequence

SEQ ID NO: 8031 - DNA, 30 bp, Artificial Sequence; identical to SEQ ID NO: 15
  Description of Artificial Sequence: Synthetic brazil nut; inner sequence

SEQ ID NO: 8032 - DNA, 30 bp, Artificial Sequence; identical to SEQ ID NO: 33
  Description of Artificial Sequence: Synthetic brazil nut; inner sequence

SEQ ID NO: 8033 - DNA, 30 bp, Artificial Sequence; identical to SEQ ID NO: 32
  Description of Artificial Sequence: Synthetic brazil nut; inner sequence

SEQ ID NO: 8034 - DNA, 30 bp, Artificial Sequence; identical to SEQ ID NO: 64
  Description of Artificial Sequence: Synthetic brazil nut; inner sequence

SEQ ID NO: 8035 - DNA, 30 bp, Artificial Sequence; identical to SEQ ID NO: 55
  Description of Artificial Sequence: Synthetic brazil nut; inner sequence

SEQ ID NO: 8036 - DNA, 30 bp, Artificial Sequence; identical to SEQ ID NO: 24
  Description of Artificial Sequence: Synthetic brazil nut; inner sequence

SEQ ID NO: 8037 - DNA, 30 bp, Artificial Sequence; identical to SEQ ID NO: 40
  Description of Artificial Sequence: Synthetic brazil nut; inner sequence

SEQ ID NO: 8038 - DNA, 30 bp, Artificial Sequence; identical to SEQ ID NO: 44
  Description of Artificial Sequence: Synthetic brazil nut; inner sequence

SEQ ID NO: 8039 - DNA, 29 bp, Artificial Sequence
  Description of Artificial Sequence: Synthetic brazil nut; inner sequence
gcacgccgatgccctcatgtggccgtgga

SEQ ID NO: 8040 - DNA, 30 bp, Artificial Sequence; identical to SEQ ID NO: 52
  Description of Artificial Sequence: Synthetic brazil nut; inner sequence

SEQ ID NO: 8041 - DNA, 30 bp, Artificial Sequence; identical to SEQ ID NO: 131
  Description of Artificial Sequence: Synthetic brazil nut; inner sequence

SEQ ID NO: 8042 - DNA, 30 bp, Artificial Sequence; identical to SEQ ID NO: 29
  Description of Artificial Sequence: Synthetic brazil nut; inner sequence

SEQ ID NO: 8043 - DNA, 30 bp, Artificial Sequence; identical to SEQ ID NO: 61
  Description of Artificial Sequence: Synthetic brazil nut; inner sequence

SEQ ID NO: 8044 - DNA, 30 bp, Artificial Sequence; identical to SEQ ID NO: 35
  Description of Artificial Sequence: Synthetic brazil nut; inner sequence

SEQ ID NO: 8045 - DNA, 30 bp, Artificial Sequence; identical to SEQ ID NO: 38
  Description of Artificial Sequence: Synthetic brazil nut; inner sequence

SEQ ID NO: 8046 - DNA, 30 bp, Artificial Sequence; identical to SEQ ID NO: 88
  Description of Artificial Sequence: Synthetic brazil nut; inner sequence

SEQ ID NO: 8047 - DNA, 30 bp, Artificial Sequence; identical to SEQ ID NO: 63
  Description of Artificial Sequence: Synthetic brazil nut; inner sequence

SEQ ID NO: 8048 - DNA, 30 bp, Artificial Sequence; identical to SEQ ID NO: 19
  Description of Artificial Sequence: Synthetic brazil nut; inner sequence

SEQ ID NO: 8049 - DNA, 30 bp, Artificial Sequence; identical to SEQ ID NO: 74
  Description of Artificial Sequence: Synthetic brazil nut; inner sequence

SEQ ID NO: 8050 - DNA, 30 bp, Artificial Sequence; identical to SEQ ID NO: 129
  Description of Artificial Sequence: Synthetic brazil nut; inner sequence

SEQ ID NO: 8051 - DNA, 30 bp, Artificial Sequence; identical to SEQ ID NO: 54
  Description of Artificial Sequence: Synthetic brazil nut; inner sequence

SEQ ID NO: 8052 - DNA, 30 bp, Artificial Sequence; identical to SEQ ID NO: 31
  Description of Artificial Sequence: Synthetic brazil nut; inner sequence

SEQ ID NO: 8053 - DNA, 30 bp, Artificial Sequence; identical to SEQ ID NO: 82
  Description of Artificial Sequence: Synthetic brazil nut; inner sequence

SEQ ID NO: 8054 - DNA, 30 bp, Artificial Sequence; identical to SEQ ID NO: 39
  Description of Artificial Sequence: Synthetic brazil nut; inner sequence

SEQ ID NO: 8055 - DNA, 30 bp, Artificial Sequence; identical to SEQ ID NO: 51
  Description of Artificial Sequence: Synthetic brazil nut; inner sequence

SEQ ID NO: 8056 - DNA, 30 bp, Artificial Sequence; identical to SEQ ID NO: 66
  Description of Artificial Sequence: Synthetic brazil nut; inner sequence

SEQ ID NO: 8057 - DNA, 30 bp, Artificial Sequence; identical to SEQ ID NO: 48
  Description of Artificial Sequence: Synthetic brazil nut; inner sequence

SEQ ID NO: 8058 - DNA, 30 bp, Artificial Sequence; identical to SEQ ID NO: 77
  Description of Artificial Sequence: Synthetic brazil nut; inner sequence

SEQ ID NO: 8059 - DNA, 30 bp, Artificial Sequence; identical to SEQ ID NO: 81
  Description of Artificial Sequence: Synthetic brazil nut; inner sequence

SEQ ID NO: 8060 - DNA, 30 bp, Artificial Sequence; identical to SEQ ID NO: 117
  Description of Artificial Sequence: Synthetic brazil nut; inner sequence

SEQ ID NO: 8061 - DNA, 30 bp, Artificial Sequence; identical to SEQ ID NO: 50
  Description of Artificial Sequence: Synthetic brazil nut; inner sequence

SEQ ID NO: 8062 - DNA, 30 bp, Artificial Sequence; identical to SEQ ID NO: 183
  Description of Artificial Sequence: Synthetic brazil nut; inner sequence

SEQ ID NO: 8063 - DNA, 30 bp, Artificial Sequence; identical to SEQ ID NO: 58
  Description of Artificial Sequence: Synthetic brazil nut; inner sequence

SEQ ID NO: 8064 - DNA, 30 bp, Artificial Sequence; identical to SEQ ID NO: 112
  Description of Artificial Sequence: Synthetic brazil nut; inner sequence

SEQ ID NO: 8065 - DNA, 29 bp, Artificial Sequence
  Description of Artificial Sequence: Synthetic brazil nut; inner sequence
gcacgtcgaaacacgtagccatgcacggt

SEQ ID NO: 8066 - DNA, 30 bp, Artificial Sequence; identical to SEQ ID NO: 80
  Description of Artificial Sequence: Synthetic brazil nut; inner sequence

SEQ ID NO: 8067 - DNA, 30 bp, Artificial Sequence; identical to SEQ ID NO: 185
  Description of Artificial Sequence: Synthetic brazil nut; inner sequence

SEQ ID NO: 8068 - DNA, 30 bp, Artificial Sequence; identical to SEQ ID NO: 430
  Description of Artificial Sequence: Synthetic brazil nut; inner sequence

SEQ ID NO: 8069 - DNA, 30 bp, Artificial Sequence; identical to SEQ ID NO: 76
  Description of Artificial Sequence: Synthetic brazil nut; inner sequence

SEQ ID NO: 8070 - DNA, 30 bp, Artificial Sequence; identical to SEQ ID NO: 97
  Description of Artificial Sequence: Synthetic brazil nut; inner sequence

SEQ ID NO: 8071 - DNA, 30 bp, Artificial Sequence; identical to SEQ ID NO: 133
  Description of Artificial Sequence: Synthetic brazil nut; inner sequence

SEQ ID NO: 8072 - DNA, 30 bp, Artificial Sequence; identical to SEQ ID NO: 57
  Description of Artificial Sequence: Synthetic brazil nut; inner sequence

SEQ ID NO: 8073 - DNA, 30 bp, Artificial Sequence; identical to SEQ ID NO: 120
  Description of Artificial Sequence: Synthetic brazil nut; inner sequence

SEQ ID NO: 8074 - DNA, 30 bp, Artificial Sequence; identical to SEQ ID NO: 43
  Description of Artificial Sequence: Synthetic brazil nut; inner sequence

SEQ ID NO: 8075 - DNA, 30 bp, Artificial Sequence; identical to SEQ ID NO: 25
  Description of Artificial Sequence: Synthetic brazil nut; inner sequence

SEQ ID NO: 8076 - DNA, 30 bp, Artificial Sequence; identical to SEQ ID NO: 126
  Description of Artificial Sequence: Synthetic brazil nut; inner sequence

SEQ ID NO: 8077 - DNA, 30 bp, Artificial Sequence; identical to SEQ ID NO: 53
  Description of Artificial Sequence: Synthetic brazil nut; inner sequence

SEQ ID NO: 8078 - DNA, 30 bp, Artificial Sequence; identical to SEQ ID NO: 59
  Description of Artificial Sequence: Synthetic brazil nut; inner sequence

SEQ ID NO: 8079 - DNA, 30 bp, Artificial Sequence; identical to SEQ ID NO: 67
  Description of Artificial Sequence: Synthetic brazil nut; inner sequence

SEQ ID NO: 8080 - DNA, 30 bp, Artificial Sequence; identical to SEQ ID NO: 211
  Description of Artificial Sequence: Synthetic brazil nut; inner sequence

SEQ ID NO: 8081 - DNA, 30 bp, Artificial Sequence; identical to SEQ ID NO: 93
  Description of Artificial Sequence: Synthetic brazil nut; inner sequence

SEQ ID NO: 8082 - DNA, 30 bp, Artificial Sequence; identical to SEQ ID NO: 36
  Description of Artificial Sequence: Synthetic brazil nut; inner sequence

SEQ ID NO: 8083 - DNA, 30 bp, Artificial Sequence; identical to SEQ ID NO: 136
  Description of Artificial Sequence: Synthetic brazil nut; inner sequence

SEQ ID NO: 8084 - DNA, 30 bp, Artificial Sequence; identical to SEQ ID NO: 68
  Description of Artificial Sequence: Synthetic brazil nut; inner sequence

SEQ ID NO: 8085 - DNA, 30 bp, Artificial Sequence; identical to SEQ ID NO: 65
  Description of Artificial Sequence: Synthetic brazil nut; inner sequence

SEQ ID NO: 8086 - DNA, 30 bp, Artificial Sequence; identical to SEQ ID NO: 311
  Description of Artificial Sequence: Synthetic brazil nut; inner sequence

SEQ ID NO: 8087 - DNA, 30 bp, Artificial Sequence; identical to SEQ ID NO: 42
  Description of Artificial Sequence: Synthetic brazil nut; inner sequence

SEQ ID NO: 8088 - DNA, 30 bp, Artificial Sequence; identical to SEQ ID NO: 96
  Description of Artificial Sequence: Synthetic brazil nut; inner sequence

SEQ ID NO: 8089 - DNA, 30 bp, Artificial Sequence; identical to SEQ ID NO: 47
  Description of Artificial Sequence: Synthetic brazil nut; inner sequence

SEQ ID NO: 8090 - DNA, 30 bp, Artificial Sequence; identical to SEQ ID NO: 92
  Description of Artificial Sequence: Synthetic brazil nut; inner sequence

SEQ ID NO: 8091 - DNA, 30 bp, Artificial Sequence; identical to SEQ ID NO: 207
  Description of Artificial Sequence: Synthetic brazil nut; inner sequence

SEQ ID NO: 8092 - DNA, 30 bp, Artificial Sequence; identical to SEQ ID NO: 26
  Description of Artificial Sequence: Synthetic brazil nut; inner sequence

SEQ ID NO: 8093 - DNA, 30 bp, Artificial Sequence; identical to SEQ ID NO: 154
  Description of Artificial Sequence: Synthetic brazil nut; inner sequence

SEQ ID NO: 8094 - DNA, 30 bp, Artificial Sequence; identical to SEQ ID NO: 91
  Description of Artificial Sequence: Synthetic brazil nut; inner sequence

SEQ ID NO: 8095 - DNA, 30 bp, Artificial Sequence; identical to SEQ ID NO: 151
  Description of Artificial Sequence: Synthetic brazil nut; inner sequence

SEQ ID NO: 8096 - DNA, 30 bp, Artificial Sequence; identical to SEQ ID NO: 103
  Description of Artificial Sequence: Synthetic brazil nut; inner sequence

SEQ ID NO: 8097 - DNA, 30 bp, Artificial Sequence; identical to SEQ ID NO: 79
  Description of Artificial Sequence: Synthetic brazil nut; inner sequence

SEQ ID NO: 8098 - DNA, 30 bp, Artificial Sequence; identical to SEQ ID NO: 122
  Description of Artificial Sequence: Synthetic brazil nut; inner sequence

SEQ ID NO: 8099 - DNA, 30 bp, Artificial Sequence; identical to SEQ ID NO: 78
  Description of Artificial Sequence: Synthetic brazil nut; inner sequence

SEQ ID NO: 8100 - DNA, 30 bp, Artificial Sequence; identical to SEQ ID NO: 118
  Description of Artificial Sequence: Synthetic brazil nut; inner sequence

SEQ ID NO: 8101 - DNA, 30 bp, Artificial Sequence; identical to SEQ ID NO: 567
  Description of Artificial Sequence: Synthetic brazil nut; inner sequence

SEQ ID NO: 8102 - DNA, 30 bp, Artificial Sequence; identical to SEQ ID NO: 257
  Description of Artificial Sequence: Synthetic brazil nut; inner sequence

SEQ ID NO: 8103 - DNA, 30 bp, Artificial Sequence; identical to SEQ ID NO: 168
  Description of Artificial Sequence: Synthetic brazil nut; inner sequence

SEQ ID NO: 8104 - DNA, 30 bp, Artificial Sequence; identical to SEQ ID NO: 142
  Description of Artificial Sequence: Synthetic brazil nut; inner sequence

SEQ ID NO: 8105 - DNA, 30 bp, Artificial Sequence; identical to SEQ ID NO: 287
  Description of Artificial Sequence: Synthetic brazil nut; inner sequence

SEQ ID NO: 8106 - DNA, 30 bp, Artificial Sequence; identical to SEQ ID NO: 247
  Description of Artificial Sequence: Synthetic brazil nut; inner sequence

SEQ ID NO: 8107 - DNA, 30 bp, Artificial Sequence; identical to SEQ ID NO: 144
  Description of Artificial Sequence: Synthetic brazil nut; inner sequence

SEQ ID NO: 8108 - DNA, 30 bp, Artificial Sequence; identical to SEQ ID NO: 83
  Description of Artificial Sequence: Synthetic brazil nut; inner sequence

SEQ ID NO: 8109 - DNA, 30 bp, Artificial Sequence; identical to SEQ ID NO: 73
  Description of Artificial Sequence: Synthetic brazil nut; inner sequence

SEQ ID NO: 8110 - DNA, 30 bp, Artificial Sequence; identical to SEQ ID NO: 100
  Description of Artificial Sequence: Synthetic brazil nut; inner sequence

SEQ ID NO: 8111 - DNA, 30 bp, Artificial Sequence; identical to SEQ ID NO: 355
  Description of Artificial Sequence: Synthetic brazil nut; inner sequence

SEQ ID NO: 8112 - DNA, 30 bp, Artificial Sequence; identical to SEQ ID NO: 229
  Description of Artificial Sequence: Synthetic brazil nut; inner sequence

SEQ ID NO: 8113 - DNA, 30 bp, Artificial Sequence; identical to SEQ ID NO: 237
  Description of Artificial Sequence: Synthetic brazil nut; inner sequence

SEQ ID NO: 8114 - DNA, 30 bp, Artificial Sequence; identical to SEQ ID NO: 233
  Description of Artificial Sequence: Synthetic brazil nut; inner sequence

SEQ ID NO: 8115 - DNA, 30 bp, Artificial Sequence; identical to SEQ ID NO: 99
  Description of Artificial Sequence: Synthetic brazil nut; inner sequence

SEQ ID NO: 8116 - DNA, 30 bp, Artificial Sequence; identical to SEQ ID NO: 94
  Description of Artificial Sequence: Synthetic brazil nut; inner sequence

SEQ ID NO: 8117 - DNA, 30 bp, Artificial Sequence; identical to SEQ ID NO: 27
  Description of Artificial Sequence: Synthetic brazil nut; inner sequence

SEQ ID NO: 8118 - DNA, 30 bp, Artificial Sequence; identical to SEQ ID NO: 179
  Description of Artificial Sequence: Synthetic brazil nut; inner sequence

SEQ ID NO: 8119 - DNA, 30 bp, Artificial Sequence; identical to SEQ ID NO: 147
  Description of Artificial Sequence: Synthetic brazil nut; inner sequence

SEQ ID NO: 8120 - DNA, 30 bp, Artificial Sequence; identical to SEQ ID NO: 56
  Description of Artificial Sequence: Synthetic brazil nut; inner sequence

SEQ ID NO: 8121 - DNA, 30 bp, Artificial Sequence; identical to SEQ ID NO: 285
  Description of Artificial Sequence: Synthetic brazil nut; inner sequence

SEQ ID NO: 8122 - DNA, 30 bp, Artificial Sequence; identical to SEQ ID NO: 115
  Description of Artificial Sequence: Synthetic brazil nut; inner sequence

SEQ ID NO: 8123 - DNA, 30 bp, Artificial Sequence; identical to SEQ ID NO: 188
  Description of Artificial Sequence: Synthetic brazil nut; inner sequence

SEQ ID NO: 8124 - DNA, 30 bp, Artificial Sequence; identical to SEQ ID NO: 203
  Description of Artificial Sequence: Synthetic brazil nut; inner sequence

SEQ ID NO: 8125 - DNA, 30 bp, Artificial Sequence; identical to SEQ ID NO: 288
  Description of Artificial Sequence: Synthetic brazil nut; inner sequence

SEQ ID NO: 8126 - DNA, 30 bp, Artificial Sequence; identical to SEQ ID NO: 155
  Description of Artificial Sequence: Synthetic brazil nut; inner sequence

SEQ ID NO: 8127 - DNA, 30 bp, Artificial Sequence; identical to SEQ ID NO: 468
  Description of Artificial Sequence: Synthetic brazil nut; inner sequence

SEQ ID NO: 8128 - DNA, 30 bp, Artificial Sequence; identical to SEQ ID NO: 354
  Description of Artificial Sequence: Synthetic brazil nut; inner sequence

SEQ ID NO: 8129 - DNA, 28 bp, Artificial Sequence
  Description of Artificial Sequence: Synthetic brazil nut; inner sequence
ggacgcagctgacctagcatgtgtgtca

SEQ ID NO: 8130 - DNA, 30 bp, Artificial Sequence; identical to SEQ ID NO: 264
  Description of Artificial Sequence: Synthetic brazil nut; inner sequence

SEQ ID NO: 8131 - DNA, 30 bp, Artificial Sequence; identical to SEQ ID NO: 107
  Description of Artificial Sequence: Synthetic brazil nut; inner sequence

SEQ ID NO: 8132 - DNA, 30 bp, Artificial Sequence; identical to SEQ ID NO: 282
  Description of Artificial Sequence: Synthetic brazil nut; inner sequence

SEQ ID NO: 8133 - DNA, 30 bp, Artificial Sequence; identical to SEQ ID NO: 360
  Description of Artificial Sequence: Synthetic brazil nut; inner sequence

SEQ ID NO: 8134 - DNA, 30 bp, Artificial Sequence; identical to SEQ ID NO: 470
  Description of Artificial Sequence: Synthetic brazil nut; inner sequence

SEQ ID NO: 8135 - DNA, 30 bp, Artificial Sequence; identical to SEQ ID NO: 145
  Description of Artificial Sequence: Synthetic brazil nut; inner sequence

SEQ ID NO: 8136 - DNA, 30 bp, Artificial Sequence; identical to SEQ ID NO: 161
  Description of Artificial Sequence: Synthetic brazil nut; inner sequence

SEQ ID NO: 8137 - DNA, 30 bp, Artificial Sequence; identical to SEQ ID NO: 95
  Description of Artificial Sequence: Synthetic brazil nut; inner sequence

SEQ ID NO: 8138 - DNA, 30 bp, Artificial Sequence; identical to SEQ ID NO: 71
  Description of Artificial Sequence: Synthetic brazil nut; inner sequence

SEQ ID NO: 8139 - DNA, 30 bp, Artificial Sequence; identical to SEQ ID NO: 4205
  Description of Artificial Sequence: Synthetic brazil nut; inner sequence

SEQ ID NO: 8140 - DNA, 30 bp, Artificial Sequence; identical to SEQ ID NO: 245
  Description of Artificial Sequence: Synthetic brazil nut; inner sequence

SEQ ID NO: 8141 - DNA, 30 bp, Artificial Sequence; identical to SEQ ID NO: 208
  Description of Artificial Sequence: Synthetic brazil nut; inner sequence

SEQ ID NO: 8142 - DNA, 30 bp, Artificial Sequence; identical to SEQ ID NO: 230
  Description of Artificial Sequence: Synthetic brazil nut; inner sequence

SEQ ID NO: 8143 - DNA, 30 bp, Artificial Sequence; identical to SEQ ID NO: 164
  Description of Artificial Sequence: Synthetic brazil nut; inner sequence

SEQ ID NO: 8144 - DNA, 30 bp, Artificial Sequence; identical to SEQ ID NO: 146
  Description of Artificial Sequence: Synthetic brazil nut; inner sequence

SEQ ID NO: 8145 - DNA, 30 bp, Artificial Sequence; identical to SEQ ID NO: 125
  Description of Artificial Sequence: Synthetic brazil nut; inner sequence

SEQ ID NO: 8146 - DNA, 30 bp, Artificial Sequence; identical to SEQ ID NO: 174
  Description of Artificial Sequence: Synthetic brazil nut; inner sequence

SEQ ID NO: 8147 - DNA, 30 bp, Artificial Sequence; identical to SEQ ID NO: 196
  Description of Artificial Sequence: Synthetic brazil nut; inner sequence

SEQ ID NO: 8148 - DNA, 30 bp, Artificial Sequence; identical to SEQ ID NO: 293
  Description of Artificial Sequence: Synthetic brazil nut; inner sequence

SEQ ID NO: 8149 - DNA, 30 bp, Artificial Sequence; identical to SEQ ID NO: 105
  Description of Artificial Sequence: Synthetic brazil nut; inner sequence

SEQ ID NO: 8150 - DNA, 30 bp, Artificial Sequence; identical to SEQ ID NO: 436
  Description of Artificial Sequence: Synthetic brazil nut; inner sequence

SEQ ID NO: 8151 - DNA, 30 bp, Artificial Sequence; identical to SEQ ID NO: 240
  Description of Artificial Sequence: Synthetic brazil nut; inner sequence

SEQ ID NO: 8152 - DNA, 30 bp, Artificial Sequence; identical to SEQ ID NO: 127
  Description of Artificial Sequence: Synthetic brazil nut; inner sequence

SEQ ID NO: 8153 - DNA, 30 bp, Artificial Sequence; identical to SEQ ID NO: 113
  Description of Artificial Sequence: Synthetic brazil nut; inner sequence

SEQ ID NO: 8154 - DNA, 30 bp, Artificial Sequence; identical to SEQ ID NO: 283
  Description of Artificial Sequence: Synthetic brazil nut; inner sequence

SEQ ID NO: 8155 - DNA, 30 bp, Artificial Sequence; identical to SEQ ID NO: 111
  Description of Artificial Sequence: Synthetic brazil nut; inner sequence

SEQ ID NO: 8156 - DNA, 30 bp, Artificial Sequence; identical to SEQ ID NO: 552
  Description of Artificial Sequence: Synthetic brazil nut; inner sequence

SEQ ID NO: 8157 - DNA, 30 bp, Artificial Sequence; identical to SEQ ID NO: 153
  Description of Artificial Sequence: Synthetic brazil nut; inner sequence

SEQ ID NO: 8158 - DNA, 30 bp, Artificial Sequence; identical to SEQ ID NO: 692
  Description of Artificial Sequence: Synthetic brazil nut; inner sequence

SEQ ID NO: 8159 - DNA, 30 bp, Artificial Sequence; identical to SEQ ID NO: 140
  Description of Artificial Sequence: Synthetic brazil nut; inner sequence

SEQ ID NO: 8160 - DNA, 30 bp, Artificial Sequence; identical to SEQ ID NO: 253
  Description of Artificial Sequence: Synthetic brazil nut; inner sequence

SEQ ID NO: 8161 - DNA, 30 bp, Artificial Sequence; identical to SEQ ID NO: 108
  Description of Artificial Sequence: Synthetic brazil nut; inner sequence

SEQ ID NO: 8162 - DNA, 30 bp, Artificial Sequence; identical to SEQ ID NO: 371
  Description of Artificial Sequence: Synthetic brazil nut; inner sequence

SEQ ID NO: 8163 - DNA, 30 bp, Artificial Sequence; identical to SEQ ID NO: 385
  Description of Artificial Sequence: Synthetic brazil nut; inner sequence

SEQ ID NO: 8164 - DNA, 30 bp, Artificial Sequence; identical to SEQ ID NO: 163
  Description of Artificial Sequence: Synthetic brazil nut; inner sequence

SEQ ID NO: 8165 - DNA, 30 bp, Artificial Sequence; identical to SEQ ID NO: 86
  Description of Artificial Sequence: Synthetic brazil nut; inner sequence

SEQ ID NO: 8166 - DNA, 30 bp, Artificial Sequence; identical to SEQ ID NO: 270
  Description of Artificial Sequence: Synthetic brazil nut; inner sequence

SEQ ID NO: 8167 - DNA, 30 bp, Artificial Sequence; identical to SEQ ID NO: 290
  Description of Artificial Sequence: Synthetic brazil nut; inner sequence

SEQ ID NO: 8168 - DNA, 30 bp, Artificial Sequence; identical to SEQ ID NO: 184
  Description of Artificial Sequence: Synthetic brazil nut; inner sequence

SEQ ID NO: 8169 - DNA, 30 bp, Artificial Sequence; identical to SEQ ID NO: 171
  Description of Artificial Sequence: Synthetic brazil nut; inner sequence

SEQ ID NO: 8170 - DNA, 30 bp, Artificial Sequence; identical to SEQ ID NO: 269
  Description of Artificial Sequence: Synthetic brazil nut; inner sequence

SEQ ID NO: 8171 - DNA, 30 bp, Artificial Sequence; identical to SEQ ID NO: 673
  Description of Artificial Sequence: Synthetic brazil nut; inner sequence

SEQ ID NO: 8172 - DNA, 30 bp, Artificial Sequence; identical to SEQ ID NO: 110
  Description of Artificial Sequence: Synthetic brazil nut; inner sequence

SEQ ID NO: 8173 - DNA, 30 bp, Artificial Sequence; identical to SEQ ID NO: 362
  Description of Artificial Sequence: Synthetic brazil nut; inner sequence

SEQ ID NO: 8174 - DNA, 30 bp, Artificial Sequence; identical to SEQ ID NO: 106
  Description of Artificial Sequence: Synthetic brazil nut; inner sequence

SEQ ID NO: 8175 - DNA, 30 bp, Artificial Sequence; identical to SEQ ID NO: 198
  Description of Artificial Sequence: Synthetic brazil nut; inner sequence

SEQ ID NO: 8176 - DNA, 30 bp, Artificial Sequence; identical to SEQ ID NO: 69
  Description of Artificial Sequence: Synthetic brazil nut; inner sequence

SEQ ID NO: 8177 - DNA, 30 bp, Artificial Sequence; identical to SEQ ID NO: 321
  Description of Artificial Sequence: Synthetic brazil nut; inner sequence

SEQ ID NO: 8178 - DNA, 30 bp, Artificial Sequence; identical to SEQ ID NO: 205
  Description of Artificial Sequence: Synthetic brazil nut; inner sequence

SEQ ID NO: 8179 - DNA, 30 bp, Artificial Sequence; identical to SEQ ID NO: 541
  Description of Artificial Sequence: Synthetic brazil nut; inner sequence

SEQ ID NO: 8180 - DNA, 30 bp, Artificial Sequence; identical to SEQ ID NO: 89
  Description of Artificial Sequence: Synthetic brazil nut; inner sequence

SEQ ID NO: 8181 - DNA, 30 bp, Artificial Sequence; identical to SEQ ID NO: 157
  Description of Artificial Sequence: Synthetic brazil nut; inner sequence

SEQ ID NO: 8182 - DNA, 30 bp, Artificial Sequence; identical to SEQ ID NO: 312
  Description of Artificial Sequence: Synthetic brazil nut; inner sequence

SEQ ID NO: 8183 - DNA, 31 bp, Artificial Sequence; identical to SEQ ID NO: 150
  Description of Artificial Sequence: Synthetic brazil nut; inner sequence

SEQ ID NO: 8184 - DNA, 30 bp, Artificial Sequence; identical to SEQ ID NO: 200
  Description of Artificial Sequence: Synthetic brazil nut; inner sequence

SEQ ID NO: 8185 - DNA, 30 bp, Artificial Sequence; identical to SEQ ID NO: 377
  Description of Artificial Sequence: Synthetic brazil nut; inner sequence

SEQ ID NO: 8186 - DNA, 30 bp, Artificial Sequence; identical to SEQ ID NO: 522
  Description of Artificial Sequence: Synthetic brazil nut; inner sequence

SEQ ID NO: 8187 - DNA, 30 bp, Artificial Sequence; identical to SEQ ID NO: 347
  Description of Artificial Sequence: Synthetic brazil nut; inner sequence

SEQ ID NO: 8188 - DNA, 30 bp, Artificial Sequence; identical to SEQ ID NO: 201
  Description of Artificial Sequence: Synthetic brazil nut; inner sequence

SEQ ID NO: 8189 - DNA, 30 bp, Artificial Sequence; identical to SEQ ID NO: 62
  Description of Artificial Sequence: Synthetic brazil nut; inner sequence

SEQ ID NO: 8190 - DNA, 30 bp, Artificial Sequence; identical to SEQ ID NO: 438
  Description of Artificial Sequence: Synthetic brazil nut; inner sequence

SEQ ID NO: 8191 - DNA, 30 bp, Artificial Sequence; identical to SEQ ID NO: 308
  Description of Artificial Sequence: Synthetic brazil nut; inner sequence

SEQ ID NO: 8192 - DNA, 30 bp, Artificial Sequence; identical to SEQ ID NO: 175
  Description of Artificial Sequence: Synthetic brazil nut; inner sequence

SEQ ID NO: 8193 - DNA, 30 bp, Artificial Sequence; identical to SEQ ID NO: 186
  Description of Artificial Sequence: Synthetic brazil nut; inner sequence

SEQ ID NO: 8194 - DNA, 30 bp, Artificial Sequence; identical to SEQ ID NO: 158
  Description of Artificial Sequence: Synthetic brazil nut; inner sequence

SEQ ID NO: 8195 - DNA, 30 bp, Artificial Sequence; identical to SEQ ID NO: 4229
  Description of Artificial Sequence: Synthetic brazil nut; inner sequence

SEQ ID NO: 8196 - DNA, 30 bp, Artificial Sequence; identical to SEQ ID NO: 134
  Description of Artificial Sequence: Synthetic brazil nut; inner sequence

SEQ ID NO: 8197 - DNA, 30 bp, Artificial Sequence; identical to SEQ ID NO: 159
  Description of Artificial Sequence: Synthetic brazil nut; inner sequence

SEQ ID NO: 8198 - DNA, 30 bp, Artificial Sequence; identical to SEQ ID NO: 132
  Description of Artificial Sequence: Synthetic brazil nut; inner sequence

SEQ ID NO: 8199 - DNA, 30 bp, Artificial Sequence; identical to SEQ ID NO: 353
  Description of Artificial Sequence: Synthetic brazil nut; inner sequence

SEQ ID NO: 8200 - DNA, 30 bp, Artificial Sequence; identical to SEQ ID NO: 165
  Description of Artificial Sequence: Synthetic brazil nut; inner sequence

SEQ ID NO: 8201 - DNA, 30 bp, Artificial Sequence; identical to SEQ ID NO: 448
  Description of Artificial Sequence: Synthetic brazil nut; inner sequence

SEQ ID NO: 8202 - DNA, 31 bp, Artificial Sequence; identical to SEQ ID NO: 221
  Description of Artificial Sequence: Synthetic brazil nut; inner sequence

SEQ ID NO: 8203 - DNA, 30 bp, Artificial Sequence; identical to SEQ ID NO: 109
  Description of Artificial Sequence: Synthetic brazil nut; inner sequence

SEQ ID NO: 8204 - DNA, 31 bp, Artificial Sequence; identical to SEQ ID NO: 258
  Description of Artificial Sequence: Synthetic brazil nut; inner sequence

SEQ ID NO: 8205 - DNA, 30 bp, Artificial Sequence; identical to SEQ ID NO: 654
  Description of Artificial Sequence: Synthetic brazil nut; inner sequence

SEQ ID NO: 8206 - DNA, 30 bp, Artificial Sequence; identical to SEQ ID NO: 299
  Description of Artificial Sequence: Synthetic brazil nut; inner sequence

SEQ ID NO: 8207 - DNA, 30 bp, Artificial Sequence; identical to SEQ ID NO: 149
  Description of Artificial Sequence: Synthetic brazil nut; inner sequence

SEQ ID NO: 8208 - DNA, 30 bp, Artificial Sequence; identical to SEQ ID NO: 138
  Description of Artificial Sequence: Synthetic brazil nut; inner sequence

SEQ ID NO: 8209 - DNA, 30 bp, Artificial Sequence; identical to SEQ ID NO: 329
  Description of Artificial Sequence: Synthetic brazil nut; inner sequence

SEQ ID NO: 8210 - DNA, 30 bp, Artificial Sequence; identical to SEQ ID NO: 266
  Description of Artificial Sequence: Synthetic brazil nut; inner sequence

SEQ ID NO: 8211 - DNA, 30 bp, Artificial Sequence; identical to SEQ ID NO: 172
  Description of Artificial Sequence: Synthetic brazil nut; inner sequence

SEQ ID NO: 8212 - DNA, 30 bp, Artificial Sequence; identical to SEQ ID NO: 234
  Description of Artificial Sequence: Synthetic brazil nut; inner sequence

SEQ ID NO: 8213 - DNA, 30 bp, Artificial Sequence; identical to SEQ ID NO: 123
  Description of Artificial Sequence: Synthetic brazil nut; inner sequence

SEQ ID NO: 8214 - DNA, 30 bp, Artificial Sequence; identical to SEQ ID NO: 75
  Description of Artificial Sequence: Synthetic brazil nut; inner sequence

SEQ ID NO: 8215 - DNA, 30 bp, Artificial Sequence; identical to SEQ ID NO: 215
  Description of Artificial Sequence: Synthetic brazil nut; inner sequence

SEQ ID NO: 8216 - DNA, 30 bp, Artificial Sequence; identical to SEQ ID NO: 406
  Description of Artificial Sequence: Synthetic brazil nut; inner sequence

SEQ ID NO: 8217 - DNA, 30 bp, Artificial Sequence; identical to SEQ ID NO: 139
  Description of Artificial Sequence: Synthetic brazil nut; inner sequence

SEQ ID NO: 8218 - DNA, 30 bp, Artificial Sequence; identical to SEQ ID NO: 104
  Description of Artificial Sequence: Synthetic brazil nut; inner sequence

SEQ ID NO: 8219 - DNA, 30 bp, Artificial Sequence; identical to SEQ ID NO: 121
  Description of Artificial Sequence: Synthetic brazil nut; inner sequence

SEQ ID NO: 8220 - DNA, 30 bp, Artificial Sequence; identical to SEQ ID NO: 579
  Description of Artificial Sequence: Synthetic brazil nut; inner sequence

SEQ ID NO: 8221 - DNA, 30 bp, Artificial Sequence; identical to SEQ ID NO: 102
  Description of Artificial Sequence: Synthetic brazil nut; inner sequence

SEQ ID NO: 8222 - DNA, 30 bp, Artificial Sequence; identical to SEQ ID NO: 268
  Description of Artificial Sequence: Synthetic brazil nut; inner sequence

SEQ ID NO: 8223 - DNA, 30 bp, Artificial Sequence; identical to SEQ ID NO: 429
  Description of Artificial Sequence: Synthetic brazil nut; inner sequence

SEQ ID NO: 8224 - DNA, 30 bp, Artificial Sequence; identical to SEQ ID NO: 389
  Description of Artificial Sequence: Synthetic brazil nut; inner sequence

SEQ ID NO: 8225 - DNA, 30 bp, Artificial Sequence; identical to SEQ ID NO: 4449
  Description of Artificial Sequence: Synthetic brazil nut; inner sequence

SEQ ID NO: 8226 - DNA, 30 bp, Artificial Sequence; identical to SEQ ID NO: 454
  Description of Artificial Sequence: Synthetic brazil nut; inner sequence

SEQ ID NO: 8227 - DNA, 30 bp, Artificial Sequence; identical to SEQ ID NO: 232
  Description of Artificial Sequence: Synthetic brazil nut; inner sequence

SEQ ID NO: 8228 - DNA, 30 bp, Artificial Sequence; identical to SEQ ID NO: 191
  Description of Artificial Sequence: Synthetic brazil nut; inner sequence

SEQ ID NO: 8229 - DNA, 30 bp, Artificial Sequence; identical to SEQ ID NO: 527
  Description of Artificial Sequence: Synthetic brazil nut; inner sequence

SEQ ID NO: 8230 - DNA, 30 bp, Artificial Sequence; identical to SEQ ID NO: 630
  Description of Artificial Sequence: Synthetic brazil nut; inner sequence

SEQ ID NO: 8231 - DNA, 30 bp, Artificial Sequence; identical to SEQ ID NO: 156
  Description of Artificial Sequence: Synthetic brazil nut; inner sequence

SEQ ID NO: 8232 - DNA, 30 bp, Artificial Sequence; identical to SEQ ID NO: 645
  Description of Artificial Sequence: Synthetic brazil nut; inner sequence

SEQ ID NO: 8233 - DNA, 30 bp, Artificial Sequence; identical to SEQ ID NO: 369
  Description of Artificial Sequence: Synthetic brazil nut; inner sequence

SEQ ID NO: 8234 - DNA, 30 bp, Artificial Sequence; identical to SEQ ID NO: 194
  Description of Artificial Sequence: Synthetic brazil nut; inner sequence

SEQ ID NO: 8235 - DNA, 31 bp, Artificial Sequence; identical to SEQ ID NO: 250
  Description of Artificial Sequence: Synthetic brazil nut; inner sequence

SEQ ID NO: 8236 - DNA, 30 bp, Artificial Sequence; identical to SEQ ID NO: 4376
  Description of Artificial Sequence: Synthetic brazil nut; inner sequence

SEQ ID NO: 8237 - DNA, 30 bp, Artificial Sequence; identical to SEQ ID NO: 439
  Description of Artificial Sequence: Synthetic brazil nut; inner sequence

SEQ ID NO: 8238 - DNA, 30 bp, Artificial Sequence; identical to SEQ ID NO: 570
  Description of Artificial Sequence: Synthetic brazil nut; inner sequence

SEQ ID NO: 8239 - DNA, 30 bp, Artificial Sequence; identical to SEQ ID NO: 352
  Description of Artificial Sequence: Synthetic brazil nut; inner sequence

SEQ ID NO: 8240 - DNA, 30 bp, Artificial Sequence; identical to SEQ ID NO: 243
  Description of Artificial Sequence: Synthetic brazil nut; inner sequence

SEQ ID NO: 8241 - DNA, 30 bp, Artificial Sequence; identical to SEQ ID NO: 367
  Description of Artificial Sequence: Synthetic brazil nut; inner sequence

SEQ ID NO: 8242 - DNA, 30 bp, Artificial Sequence; identical to SEQ ID NO: 341
  Description of Artificial Sequence: Synthetic brazil nut; inner sequence

SEQ ID NO: 8243 - DNA, 30 bp, Artificial Sequence; identical to SEQ ID NO: 262
  Description of Artificial Sequence: Synthetic brazil nut; inner sequence

SEQ ID NO: 8244 - DNA, 30 bp, Artificial Sequence; identical to SEQ ID NO: 85
  Description of Artificial Sequence: Synthetic brazil nut; inner sequence

SEQ ID NO: 8245 - DNA, 30 bp, Artificial Sequence; identical to SEQ ID NO: 359
  Description of Artificial Sequence: Synthetic brazil nut; inner sequence

SEQ ID NO: 8246 - DNA, 30 bp, Artificial Sequence; identical to SEQ ID NO: 190
  Description of Artificial Sequence: Synthetic brazil nut; inner sequence

SEQ ID NO: 8247 - DNA, 30 bp, Artificial Sequence; identical to SEQ ID NO: 4230
  Description of Artificial Sequence: Synthetic brazil nut; inner sequence

SEQ ID NO: 8248 - DNA, 30 bp, Artificial Sequence; identical to SEQ ID NO: 116
  Description of Artificial Sequence: Synthetic brazil nut; inner sequence

SEQ ID NO: 8249 - DNA, 30 bp, Artificial Sequence; identical to SEQ ID NO: 532
  Description of Artificial Sequence: Synthetic brazil nut; inner sequence

SEQ ID NO: 8250 - DNA, 30 bp, Artificial Sequence; identical to SEQ ID NO: 336
  Description of Artificial Sequence: Synthetic brazil nut; inner sequence

SEQ ID NO: 8251 - DNA, 30 bp, Artificial Sequence; identical to SEQ ID NO: 401
  Description of Artificial Sequence: Synthetic brazil nut; inner sequence

SEQ ID NO: 8252 - DNA, 30 bp, Artificial Sequence; identical to SEQ ID NO: 553
  Description of Artificial Sequence: Synthetic brazil nut; inner sequence

SEQ ID NO: 8253 - DNA, 30 bp, Artificial Sequence; identical to SEQ ID NO: 696
  Description of Artificial Sequence: Synthetic brazil nut; inner sequence

SEQ ID NO: 8254 - DNA, 30 bp, Artificial Sequence; identical to SEQ ID NO: 222
  Description of Artificial Sequence: Synthetic brazil nut; inner sequence

SEQ ID NO: 8255 - DNA, 30 bp, Artificial Sequence; identical to SEQ ID NO: 634
  Description of Artificial Sequence: Synthetic brazil nut; inner sequence

SEQ ID NO: 8256 - DNA, 30 bp, Artificial Sequence; identical to SEQ ID NO: 496
  Description of Artificial Sequence: Synthetic brazil nut; inner sequence

SEQ ID NO: 8257 - DNA, 30 bp, Artificial Sequence; identical to SEQ ID NO: 195
  Description of Artificial Sequence: Synthetic brazil nut; inner sequence

SEQ ID NO: 8258 - DNA, 30 bp, Artificial Sequence; identical to SEQ ID NO: 160
  Description of Artificial Sequence: Synthetic brazil nut; inner sequence

SEQ ID NO: 8259 - DNA, 30 bp, Artificial Sequence; identical to SEQ ID NO: 204
  Description of Artificial Sequence: Synthetic brazil nut; inner sequence

SEQ ID NO: 8260 - DNA, 30 bp, Artificial Sequence; identical to SEQ ID NO: 309
  Description of Artificial Sequence: Synthetic brazil nut; inner sequence

SEQ ID NO: 8261 - DNA, 30 bp, Artificial Sequence; identical to SEQ ID NO: 585
  Description of Artificial Sequence: Synthetic brazil nut; inner sequence

SEQ ID NO: 8262 - DNA, 30 bp, Artificial Sequence; identical to SEQ ID NO: 4336
  Description of Artificial Sequence: Synthetic brazil nut; inner sequence

SEQ ID NO: 8263 - DNA, 30 bp, Artificial Sequence; identical to SEQ ID NO: 72
  Description of Artificial Sequence: Synthetic brazil nut; inner sequence

SEQ ID NO: 8264 - DNA, 30 bp, Artificial Sequence; identical to SEQ ID NO: 187
  Description of Artificial Sequence: Synthetic brazil nut; inner sequence

SEQ ID NO: 8265 - DNA, 30 bp, Artificial Sequence; identical to SEQ ID NO: 228
  Description of Artificial Sequence: Synthetic brazil nut; inner sequence

SEQ ID NO: 8266 - DNA, 30 bp, Artificial Sequence; identical to SEQ ID NO: 953
  Description of Artificial Sequence: Synthetic brazil nut; inner sequence

SEQ ID NO: 8267 - DNA, 30 bp, Artificial Sequence; identical to SEQ ID NO: 373
  Description of Artificial Sequence: Synthetic brazil nut; inner sequence

SEQ ID NO: 8268 - DNA, 30 bp, Artificial Sequence; identical to SEQ ID NO: 217
  Description of Artificial Sequence: Synthetic brazil nut; inner sequence

SEQ ID NO: 8269 - DNA, 30 bp, Artificial Sequence; identical to SEQ ID NO: 376
  Description of Artificial Sequence: Synthetic brazil nut; inner sequence

SEQ ID NO: 8270 - DNA, 30 bp, Artificial Sequence; identical to SEQ ID NO: 224
  Description of Artificial Sequence: Synthetic brazil nut; inner sequence

SEQ ID NO: 8271 - DNA, 30 bp, Artificial Sequence; identical to SEQ ID NO: 524
  Description of Artificial Sequence: Synthetic brazil nut; inner sequence

SEQ ID NO: 8272 - DNA, 30 bp, Artificial Sequence; identical to SEQ ID NO: 166
  Description of Artificial Sequence: Synthetic brazil nut; inner sequence

SEQ ID NO: 8273 - DNA, 30 bp, Artificial Sequence; identical to SEQ ID NO: 392
  Description of Artificial Sequence: Synthetic brazil nut; inner sequence

SEQ ID NO: 8274 - DNA, 30 bp, Artificial Sequence; identical to SEQ ID NO: 98
  Description of Artificial Sequence: Synthetic brazil nut; inner sequence

SEQ ID NO: 8275 - DNA, 30 bp, Artificial Sequence; identical to SEQ ID NO: 671
  Description of Artificial Sequence: Synthetic brazil nut; inner sequence

SEQ ID NO: 8276 - DNA, 30 bp, Artificial Sequence; identical to SEQ ID NO: 152
  Description of Artificial Sequence: Synthetic brazil nut; inner sequence

SEQ ID NO: 8277 - DNA, 30 bp, Artificial Sequence; identical to SEQ ID NO: 506
  Description of Artificial Sequence: Synthetic brazil nut; inner sequence

SEQ ID NO: 8278 - DNA, 30 bp, Artificial Sequence; identical to SEQ ID NO: 192
  Description of Artificial Sequence: Synthetic brazil nut; inner sequence

SEQ ID NO: 8279 - DNA, 30 bp, Artificial Sequence; identical to SEQ ID NO: 556
  Description of Artificial Sequence: Synthetic brazil nut; inner sequence

SEQ ID NO: 8280 - DNA, 30 bp, Artificial Sequence; identical to SEQ ID NO: 305
  Description of Artificial Sequence: Synthetic brazil nut; inner sequence

SEQ ID NO: 8281 - DNA, 30 bp, Artificial Sequence; identical to SEQ ID NO: 90
  Description of Artificial Sequence: Synthetic brazil nut; inner sequence

SEQ ID NO: 8282 - DNA, 30 bp, Artificial Sequence; identical to SEQ ID NO: 540
  Description of Artificial Sequence: Synthetic brazil nut; inner sequence

SEQ ID NO: 8283 - DNA, 30 bp, Artificial Sequence; identical to SEQ ID NO: 323
  Description of Artificial Sequence: Synthetic brazil nut; inner sequence

SEQ ID NO: 8284 - DNA, 30 bp, Artificial Sequence; identical to SEQ ID NO: 365
  Description of Artificial Sequence: Synthetic brazil nut; inner sequence

SEQ ID NO: 8285 - DNA, 30 bp, Artificial Sequence; identical to SEQ ID NO: 572
  Description of Artificial Sequence: Synthetic brazil nut; inner sequence

SEQ ID NO: 8286 - DNA, 30 bp, Artificial Sequence; identical to SEQ ID NO: 529
  Description of Artificial Sequence: Synthetic brazil nut; inner sequence

SEQ ID NO: 8287 - DNA, 30 bp, Artificial Sequence; identical to SEQ ID NO: 481
  Description of Artificial Sequence: Synthetic brazil nut; inner sequence

SEQ ID NO: 8288 - DNA, 28 bp, Artificial Sequence
  Description of Artificial Sequence: Synthetic brazil nut; inner sequence
ggacgcaacgtaccgtatcgtggccatg

SEQ ID NO: 8289 - DNA, 30 bp, Artificial Sequence; identical to SEQ ID NO: 511
  Description of Artificial Sequence: Synthetic brazil nut; inner sequence

SEQ ID NO: 8290 - DNA, 30 bp, Artificial Sequence; identical to SEQ ID NO: 343
  Description of Artificial Sequence: Synthetic brazil nut; inner sequence

SEQ ID NO: 8291 - DNA, 30 bp, Artificial Sequence; identical to SEQ ID NO: 613
  Description of Artificial Sequence: Synthetic brazil nut; inner sequence

SEQ ID NO: 8292 - DNA, 30 bp, Artificial Sequence; identical to SEQ ID NO: 246
  Description of Artificial Sequence: Synthetic brazil nut; inner sequence

SEQ ID NO: 8293 - DNA, 30 bp, Artificial Sequence; identical to SEQ ID NO: 611
  Description of Artificial Sequence: Synthetic brazil nut; inner sequence

SEQ ID NO: 8294 - DNA, 30 bp, Artificial Sequence; identical to SEQ ID NO: 182
  Description of Artificial Sequence: Synthetic brazil nut; inner sequence

SEQ ID NO: 8295 - DNA, 30 bp, Artificial Sequence; identical to SEQ ID NO: 413
  Description of Artificial Sequence: Synthetic brazil nut; inner sequence

SEQ ID NO: 8296 - DNA, 30 bp, Artificial Sequence; identical to SEQ ID NO: 450
  Description of Artificial Sequence: Synthetic brazil nut; inner sequence

SEQ ID NO: 8297 - DNA, 30 bp, Artificial Sequence; identical to SEQ ID NO: 485
  Description of Artificial Sequence: Synthetic brazil nut; inner sequence

SEQ ID NO: 8298 - DNA, 30 bp, Artificial Sequence; identical to SEQ ID NO: 783
  Description of Artificial Sequence: Synthetic brazil nut; inner sequence

SEQ ID NO: 8299 - DNA, 30 bp, Artificial Sequence; identical to SEQ ID NO: 310
  Description of Artificial Sequence: Synthetic brazil nut; inner sequence

SEQ ID NO: 8300 - DNA, 30 bp, Artificial Sequence; identical to SEQ ID NO: 178
  Description of Artificial Sequence: Synthetic brazil nut; inner sequence

SEQ ID NO: 8301 - DNA, 30 bp, Artificial Sequence; identical to SEQ ID NO: 520
  Description of Artificial Sequence: Synthetic brazil nut; inner sequence

SEQ ID NO: 8302 - DNA, 30 bp, Artificial Sequence; identical to SEQ ID NO: 4348
  Description of Artificial Sequence: Synthetic brazil nut; inner sequence

SEQ ID NO: 8303 - DNA, 30 bp, Artificial Sequence; identical to SEQ ID NO: 916
  Description of Artificial Sequence: Synthetic brazil nut; inner sequence

SEQ ID NO: 8304 - DNA, 30 bp, Artificial Sequence; identical to SEQ ID NO: 254
  Description of Artificial Sequence: Synthetic brazil nut; inner sequence

SEQ ID NO: 8305 - DNA, 30 bp, Artificial Sequence; identical to SEQ ID NO: 391
  Description of Artificial Sequence: Synthetic brazil nut; inner sequence

SEQ ID NO: 8306 - DNA, 30 bp, Artificial Sequence; identical to SEQ ID NO: 414
  Description of Artificial Sequence: Synthetic brazil nut; inner sequence

SEQ ID NO: 8307 - DNA, 30 bp, Artificial Sequence; identical to SEQ ID NO: 220
  Description of Artificial Sequence: Synthetic brazil nut; inner sequence

SEQ ID NO: 8308 - DNA, 30 bp, Artificial Sequence; identical to SEQ ID NO: 271
  Description of Artificial Sequence: Synthetic brazil nut; inner sequence

SEQ ID NO: 8309 - DNA, 30 bp, Artificial Sequence; identical to SEQ ID NO: 4234
  Description of Artificial Sequence: Synthetic brazil nut; inner sequence

SEQ ID NO: 8310 - DNA, 30 bp, Artificial Sequence; identical to SEQ ID NO: 4907
  Description of Artificial Sequence: Synthetic brazil nut; inner sequence

SEQ ID NO: 8311 - DNA, 30 bp, Artificial Sequence; identical to SEQ ID NO: 214
  Description of Artificial Sequence: Synthetic brazil nut; inner sequence

SEQ ID NO: 8312 - DNA, 30 bp, Artificial Sequence; identical to SEQ ID NO: 791
  Description of Artificial Sequence: Synthetic brazil nut; inner sequence

SEQ ID NO: 8313 - DNA, 30 bp, Artificial Sequence; identical to SEQ ID NO: 4406
  Description of Artificial Sequence: Synthetic brazil nut; inner sequence

SEQ ID NO: 8314 - DNA, 30 bp, Artificial Sequence; identical to SEQ ID NO: 173
  Description of Artificial Sequence: Synthetic brazil nut; inner sequence

SEQ ID NO: 8315 - DNA, 30 bp, Artificial Sequence; identical to SEQ ID NO: 850
  Description of Artificial Sequence: Synthetic brazil nut; inner sequence

SEQ ID NO: 8316 - DNA, 30 bp, Artificial Sequence; identical to SEQ ID NO: 528
  Description of Artificial Sequence: Synthetic brazil nut; inner sequence

SEQ ID NO: 8317 - DNA, 30 bp, Artificial Sequence; identical to SEQ ID NO: 442
  Description of Artificial Sequence: Synthetic brazil nut; inner sequence

SEQ ID NO: 8318 - DNA, 30 bp, Artificial Sequence; identical to SEQ ID NO: 349
  Description of Artificial Sequence: Synthetic brazil nut; inner sequence

SEQ ID NO: 8319 - DNA, 31 bp, Artificial Sequence; identical to SEQ ID NO: 4245
  Description of Artificial Sequence: Synthetic brazil nut; inner sequence

SEQ ID NO: 8320 - DNA, 30 bp, Artificial Sequence; identical to SEQ ID NO: 4238
  Description of Artificial Sequence: Synthetic brazil nut; inner sequence

SEQ ID NO: 8321 - DNA, 30 bp, Artificial Sequence; identical to SEQ ID NO: 274
  Description of Artificial Sequence: Synthetic brazil nut; inner sequence

SEQ ID NO: 8322 - DNA, 30 bp, Artificial Sequence; identical to SEQ ID NO: 344
  Description of Artificial Sequence: Synthetic brazil nut; inner sequence

SEQ ID NO: 8323 - DNA, 30 bp, Artificial Sequence; identical to SEQ ID NO: 218
  Description of Artificial Sequence: Synthetic brazil nut; inner sequence

SEQ ID NO: 8324 - DNA, 30 bp, Artificial Sequence; identical to SEQ ID NO: 379
  Description of Artificial Sequence: Synthetic brazil nut; inner sequence

SEQ ID NO: 8325 - DNA, 30 bp, Artificial Sequence; identical to SEQ ID NO: 4613
  Description of Artificial Sequence: Synthetic brazil nut; inner sequence

SEQ ID NO: 8326 - DNA, 30 bp, Artificial Sequence; identical to SEQ ID NO: 394
  Description of Artificial Sequence: Synthetic brazil nut; inner sequence

SEQ ID NO: 8327 - DNA, 30 bp, Artificial Sequence; identical to SEQ ID NO: 4254
  Description of Artificial Sequence: Synthetic brazil nut; inner sequence

SEQ ID NO: 8328 - DNA, 30 bp, Artificial Sequence; identical to SEQ ID NO: 390
  Description of Artificial Sequence: Synthetic brazil nut; inner sequence

SEQ ID NO: 8329 - DNA, 30 bp, Artificial Sequence; identical to SEQ ID NO: 563
  Description of Artificial Sequence: Synthetic brazil nut; inner sequence

SEQ ID NO: 8330 - DNA, 30 bp, Artificial Sequence; identical to SEQ ID NO: 387
  Description of Artificial Sequence: Synthetic brazil nut; inner sequence

SEQ ID NO: 8331 - DNA, 30 bp, Artificial Sequence; identical to SEQ ID NO: 135
  Description of Artificial Sequence: Synthetic brazil nut; inner sequence

SEQ ID NO: 8332 - DNA, 30 bp, Artificial Sequence; identical to SEQ ID NO: 4380
  Description of Artificial Sequence: Synthetic brazil nut; inner sequence

SEQ ID NO: 8333 - DNA, 30 bp, Artificial Sequence; identical to SEQ ID NO: 189
  Description of Artificial Sequence: Synthetic brazil nut; inner sequence

SEQ ID NO: 8334 - DNA, 30 bp, Artificial Sequence; identical to SEQ ID NO: 137
  Description of Artificial Sequence: Synthetic brazil nut; inner sequence

SEQ ID NO: 8335 - DNA, 30 bp, Artificial Sequence; identical to SEQ ID NO: 84
  Description of Artificial Sequence: Synthetic brazil nut; inner sequence

SEQ ID NO: 8336 - DNA, 30 bp, Artificial Sequence; identical to SEQ ID NO: 433
  Description of Artificial Sequence: Synthetic brazil nut; inner sequence

SEQ ID NO: 8337 - DNA, 30 bp, Artificial Sequence; identical to SEQ ID NO: 457
  Description of Artificial Sequence: Synthetic brazil nut; inner sequence

SEQ ID NO: 8338 - DNA, 30 bp, Artificial Sequence; identical to SEQ ID NO: 4792
  Description of Artificial Sequence: Synthetic brazil nut; inner sequence

SEQ ID NO: 8339 - DNA, 30 bp, Artificial Sequence; identical to SEQ ID NO: 167
  Description of Artificial Sequence: Synthetic brazil nut; inner sequence

SEQ ID NO: 8340 - DNA, 30 bp, Artificial Sequence; identical to SEQ ID NO: 370
  Description of Artificial Sequence: Synthetic brazil nut; inner sequence

SEQ ID NO: 8341 - DNA, 30 bp, Artificial Sequence; identical to SEQ ID NO: 523
  Description of Artificial Sequence: Synthetic brazil nut; inner sequence

SEQ ID NO: 8342 - DNA, 30 bp, Artificial Sequence; identical to SEQ ID NO: 114
  Description of Artificial Sequence: Synthetic brazil nut; inner sequence

SEQ ID NO: 8343 - DNA, 30 bp, Artificial Sequence; identical to SEQ ID NO: 4280
  Description of Artificial Sequence: Synthetic brazil nut; inner sequence

SEQ ID NO: 8344 - DNA, 30 bp, Artificial Sequence; identical to SEQ ID NO: 272
  Description of Artificial Sequence: Synthetic brazil nut; inner sequence

SEQ ID NO: 8345 - DNA, 30 bp, Artificial Sequence; identical to SEQ ID NO: 358
  Description of Artificial Sequence: Synthetic brazil nut; inner sequence

SEQ ID NO: 8346 - DNA, 30 bp, Artificial Sequence; identical to SEQ ID NO: 426
  Description of Artificial Sequence: Synthetic brazil nut; inner sequence

SEQ ID NO: 8347 - DNA, 30 bp, Artificial Sequence; identical to SEQ ID NO: 320
  Description of Artificial Sequence: Synthetic brazil nut; inner sequence

SEQ ID NO: 8348 - DNA, 30 bp, Artificial Sequence; identical to SEQ ID NO: 256
  Description of Artificial Sequence: Synthetic brazil nut; inner sequence

SEQ ID NO: 8349 - DNA, 30 bp, Artificial Sequence; identical to SEQ ID NO: 303
  Description of Artificial Sequence: Synthetic brazil nut; inner sequence

SEQ ID NO: 8350 - DNA, 30 bp, Artificial Sequence; identical to SEQ ID NO: 950
  Description of Artificial Sequence: Synthetic brazil nut; inner sequence

SEQ ID NO: 8351 - DNA, 30 bp, Artificial Sequence; identical to SEQ ID NO: 399
  Description of Artificial Sequence: Synthetic brazil nut; inner sequence

SEQ ID NO: 8352 - DNA, 30 bp, Artificial Sequence; identical to SEQ ID NO: 409
  Description of Artificial Sequence: Synthetic brazil nut; inner sequence

SEQ ID NO: 8353 - DNA, 30 bp, Artificial Sequence; identical to SEQ ID NO: 4755
  Description of Artificial Sequence: Synthetic brazil nut; inner sequence

SEQ ID NO: 8354 - DNA, 30 bp, Artificial Sequence; identical to SEQ ID NO: 279
  Description of Artificial Sequence: Synthetic brazil nut; inner sequence

SEQ ID NO: 8355 - DNA, 30 bp, Artificial Sequence; identical to SEQ ID NO: 487
  Description of Artificial Sequence: Synthetic brazil nut; inner sequence

SEQ ID NO: 8356 - DNA, 30 bp, Artificial Sequence; identical to SEQ ID NO: 928
  Description of Artificial Sequence: Synthetic brazil nut; inner sequence

SEQ ID NO: 8357 - DNA, 30 bp, Artificial Sequence; identical to SEQ ID NO: 901
  Description of Artificial Sequence: Synthetic brazil nut; inner sequence

SEQ ID NO: 8358 - DNA, 30 bp, Artificial Sequence; identical to SEQ ID NO: 197
  Description of Artificial Sequence: Synthetic brazil nut; inner sequence

SEQ ID NO: 8359 - DNA, 33 bp, Artificial Sequence; identical to SEQ ID NO: 864
  Description of Artificial Sequence: Synthetic brazil nut; inner sequence

SEQ ID NO: 8360 - DNA, 30 bp, Artificial Sequence; identical to SEQ ID NO: 403
  Description of Artificial Sequence: Synthetic brazil nut; inner sequence

SEQ ID NO: 8361 - DNA, 30 bp, Artificial Sequence; identical to SEQ ID NO: 4260
  Description of Artificial Sequence: Synthetic brazil nut; inner sequence

SEQ ID NO: 8362 - DNA, 30 bp, Artificial Sequence; identical to SEQ ID NO: 170
  Description of Artificial Sequence: Synthetic brazil nut; inner sequence

SEQ ID NO: 8363 - DNA, 30 bp, Artificial Sequence; identical to SEQ ID NO: 419
  Description of Artificial Sequence: Synthetic brazil nut; inner sequence

SEQ ID NO: 8364 - DNA, 30 bp, Artificial Sequence; identical to SEQ ID NO: 741
  Description of Artificial Sequence: Synthetic brazil nut; inner sequence

SEQ ID NO: 8365 - DNA, 30 bp, Artificial Sequence; identical to SEQ ID NO: 176
  Description of Artificial Sequence: Synthetic brazil nut; inner sequence

SEQ ID NO: 8366 - DNA, 30 bp, Artificial Sequence; identical to SEQ ID NO: 383
  Description of Artificial Sequence: Synthetic brazil nut; inner sequence

SEQ ID NO: 8367 - DNA, 30 bp, Artificial Sequence; identical to SEQ ID NO: 212
  Description of Artificial Sequence: Synthetic brazil nut; inner sequence

SEQ ID NO: 8368 - DNA, 29 bp, Artificial Sequence
  Description of Artificial Sequence: Synthetic brazil nut; inner sequence
cgaccagcgcaagtaagtggcgtgatgca

SEQ ID NO: 8369 - DNA, 30 bp, Artificial Sequence; identical to SEQ ID NO: 4301
  Description of Artificial Sequence: Synthetic brazil nut; inner sequence

SEQ ID NO: 8370 - DNA, 30 bp, Artificial Sequence; identical to SEQ ID NO: 437
  Description of Artificial Sequence: Synthetic brazil nut; inner sequence

SEQ ID NO: 8371 - DNA, 30 bp, Artificial Sequence; identical to SEQ ID NO: 298
  Description of Artificial Sequence: Synthetic brazil nut; inner sequence

SEQ ID NO: 8372 - DNA, 30 bp, Artificial Sequence; identical to SEQ ID NO: 278
  Description of Artificial Sequence: Synthetic brazil nut; inner sequence

SEQ ID NO: 8373 - DNA, 30 bp, Artificial Sequence; identical to SEQ ID NO: 467
  Description of Artificial Sequence: Synthetic brazil nut; inner sequence

SEQ ID NO: 8374 - DNA, 30 bp, Artificial Sequence; identical to SEQ ID NO: 994
  Description of Artificial Sequence: Synthetic brazil nut; inner sequence

SEQ ID NO: 8375 - DNA, 30 bp, Artificial Sequence; identical to SEQ ID NO: 836
  Description of Artificial Sequence: Synthetic brazil nut; inner sequence

SEQ ID NO: 8376 - DNA, 30 bp, Artificial Sequence; identical to SEQ ID NO: 319
  Description of Artificial Sequence: Synthetic brazil nut; inner sequence

SEQ ID NO: 8377 - DNA, 30 bp, Artificial Sequence; identical to SEQ ID NO: 4425
  Description of Artificial Sequence: Synthetic brazil nut; inner sequence

SEQ ID NO: 8378 - DNA, 30 bp, Artificial Sequence; identical to SEQ ID NO: 530
  Description of Artificial Sequence: Synthetic brazil nut; inner sequence

SEQ ID NO: 8379 - DNA, 30 bp, Artificial Sequence; identical to SEQ ID NO: 350
  Description of Artificial Sequence: Synthetic brazil nut; inner sequence

SEQ ID NO: 8380 - DNA, 30 bp, Artificial Sequence; identical to SEQ ID NO: 340
  Description of Artificial Sequence: Synthetic brazil nut; inner sequence

SEQ ID NO: 8381 - DNA, 30 bp, Artificial Sequence; identical to SEQ ID NO: 811
  Description of Artificial Sequence: Synthetic brazil nut; inner sequence

SEQ ID NO: 8382 - DNA, 30 bp, Artificial Sequence; identical to SEQ ID NO: 332
  Description of Artificial Sequence: Synthetic brazil nut; inner sequence

SEQ ID NO: 8383 - DNA, 30 bp, Artificial Sequence; identical to SEQ ID NO: 534
  Description of Artificial Sequence: Synthetic brazil nut; inner sequence

SEQ ID NO: 8384 - DNA, 30 bp, Artificial Sequence; identical to SEQ ID NO: 380
  Description of Artificial Sequence: Synthetic brazil nut; inner sequence

SEQ ID NO: 8385 - DNA, 30 bp, Artificial Sequence; identical to SEQ ID NO: 545
  Description of Artificial Sequence: Synthetic brazil nut; inner sequence

SEQ ID NO: 8386 - DNA, 30 bp, Artificial Sequence; identical to SEQ ID NO: 912
  Description of Artificial Sequence: Synthetic brazil nut; inner sequence

SEQ ID NO: 8387 - DNA, 30 bp, Artificial Sequence; identical to SEQ ID NO: 280
  Description of Artificial Sequence: Synthetic brazil nut; inner sequence

SEQ ID NO: 8388 - DNA, 30 bp, Artificial Sequence; identical to SEQ ID NO: 130
  Description of Artificial Sequence: Synthetic brazil nut; inner sequence

SEQ ID NO: 8389 - DNA, 30 bp, Artificial Sequence; identical to SEQ ID NO: 478
  Description of Artificial Sequence: Synthetic brazil nut; inner sequence

SEQ ID NO: 8390 - DNA, 30 bp, Artificial Sequence; identical to SEQ ID NO: 400
  Description of Artificial Sequence: Synthetic brazil nut; inner sequence

SEQ ID NO: 8391 - DNA, 30 bp, Artificial Sequence; identical to SEQ ID NO: 255
  Description of Artificial Sequence: Synthetic brazil nut; inner sequence

SEQ ID NO: 8392 - DNA, 30 bp, Artificial Sequence; identical to SEQ ID NO: 557
  Description of Artificial Sequence: Synthetic brazil nut; inner sequence

SEQ ID NO: 8393 - DNA, 30 bp, Artificial Sequence; identical to SEQ ID NO: 273
  Description of Artificial Sequence: Synthetic brazil nut; inner sequence

SEQ ID NO: 8394 - DNA, 30 bp, Artificial Sequence; identical to SEQ ID NO: 119
  Description of Artificial Sequence: Synthetic brazil nut; inner sequence

SEQ ID NO: 8395 - DNA, 30 bp, Artificial Sequence; identical to SEQ ID NO: 4419
  Description of Artificial Sequence: Synthetic brazil nut; inner sequence

SEQ ID NO: 8396 - DNA, 30 bp, Artificial Sequence; identical to SEQ ID NO: 771
  Description of Artificial Sequence: Synthetic brazil nut; inner sequence

SEQ ID NO: 8397 - DNA, 30 bp, Artificial Sequence; identical to SEQ ID NO: 4401
  Description of Artificial Sequence: Synthetic brazil nut; inner sequence

SEQ ID NO: 8398 - DNA, 30 bp, Artificial Sequence; identical to SEQ ID NO: 277
  Description of Artificial Sequence: Synthetic brazil nut; inner sequence

SEQ ID NO: 8399 - DNA, 30 bp, Artificial Sequence; identical to SEQ ID NO: 4351
  Description of Artificial Sequence: Synthetic brazil nut; inner sequence

SEQ ID NO: 8400 - DNA, 30 bp, Artificial Sequence; identical to SEQ ID NO: 517
  Description of Artificial Sequence: Synthetic brazil nut; inner sequence

SEQ ID NO: 8401 - DNA, 30 bp, Artificial Sequence
  Description of Artificial Sequence: Synthetic brazil nut; inner sequence
ggccaacgctggatgagggctgtatgtggc

SEQ ID NO: 8402 - DNA, 30 bp, Artificial Sequence; identical to SEQ ID NO: 764
  Description of Artificial Sequence: Synthetic brazil nut; inner sequence

SEQ ID NO: 8403 - DNA, 30 bp, Artificial Sequence; identical to SEQ ID NO: 346
  Description of Artificial Sequence: Synthetic brazil nut; inner sequence

SEQ ID NO: 8404 - DNA, 30 bp, Artificial Sequence; identical to SEQ ID NO: 915
  Description of Artificial Sequence: Synthetic brazil nut; inner sequence

SEQ ID NO: 8405 - DNA, 30 bp, Artificial Sequence; identical to SEQ ID NO: 177
  Description of Artificial Sequence: Synthetic brazil nut; inner sequence

SEQ ID NO: 8406 - DNA, 30 bp, Artificial Sequence; identical to SEQ ID NO: 181
  Description of Artificial Sequence: Synthetic brazil nut; inner sequence

SEQ ID NO: 8407 - DNA, 30 bp, Artificial Sequence; identical to SEQ ID NO: 301
  Description of Artificial Sequence: Synthetic brazil nut; inner sequence

SEQ ID NO: 8408 - DNA, 30 bp, Artificial Sequence; identical to SEQ ID NO: 4317
  Description of Artificial Sequence: Synthetic brazil nut; inner sequence

SEQ ID NO: 8409 - DNA, 30 bp, Artificial Sequence; identical to SEQ ID NO: 244
  Description of Artificial Sequence: Synthetic brazil nut; inner sequence

SEQ ID NO: 8410 - DNA, 30 bp, Artificial Sequence; identical to SEQ ID NO: 375
  Description of Artificial Sequence: Synthetic brazil nut; inner sequence

SEQ ID NO: 8411 - DNA, 30 bp, Artificial Sequence; identical to SEQ ID NO: 932
  Description of Artificial Sequence: Synthetic brazil nut; inner sequence

SEQ ID NO: 8412 - DNA, 30 bp, Artificial Sequence; identical to SEQ ID NO: 807
  Description of Artificial Sequence: Synthetic brazil nut; inner sequence

SEQ ID NO: 8413 - DNA, 30 bp, Artificial Sequence; identical to SEQ ID NO: 4420
  Description of Artificial Sequence: Synthetic brazil nut; inner sequence

SEQ ID NO: 8414 - DNA, 30 bp, Artificial Sequence; identical to SEQ ID NO: 625
  Description of Artificial Sequence: Synthetic brazil nut; inner sequence

SEQ ID NO: 8415 - DNA, 30 bp, Artificial Sequence; identical to SEQ ID NO: 4492
  Description of Artificial Sequence: Synthetic brazil nut; inner sequence

SEQ ID NO: 8416 - DNA, 30 bp, Artificial Sequence; identical to SEQ ID NO: 4445
  Description of Artificial Sequence: Synthetic brazil nut; inner sequence

SEQ ID NO: 8417 - DNA, 30 bp, Artificial Sequence; identical to SEQ ID NO: 846
  Description of Artificial Sequence: Synthetic brazil nut; inner sequence

SEQ ID NO: 8418 - DNA, 30 bp, Artificial Sequence; identical to SEQ ID NO: 361
  Description of Artificial Sequence: Synthetic brazil nut; inner sequence

SEQ ID NO: 8419 - DNA, 30 bp, Artificial Sequence; identical to SEQ ID NO: 314
  Description of Artificial Sequence: Synthetic brazil nut; inner sequence

SEQ ID NO: 8420 - DNA, 30 bp, Artificial Sequence; identical to SEQ ID NO: 432
  Description of Artificial Sequence: Synthetic brazil nut; inner sequence

SEQ ID NO: 8421 - DNA, 30 bp, Artificial Sequence; identical to SEQ ID NO: 313
  Description of Artificial Sequence: Synthetic brazil nut; inner sequence

SEQ ID NO: 8422 - DNA, 30 bp, Artificial Sequence; identical to SEQ ID NO: 757
  Description of Artificial Sequence: Synthetic brazil nut; inner sequence

SEQ ID NO: 8423 - DNA, 30 bp, Artificial Sequence; identical to SEQ ID NO: 4585
  Description of Artificial Sequence: Synthetic brazil nut; inner sequence

SEQ ID NO: 8424 - DNA, 30 bp, Artificial Sequence; identical to SEQ ID NO: 209
  Description of Artificial Sequence: Synthetic brazil nut; inner sequence

SEQ ID NO: 8425 - DNA, 30 bp, Artificial Sequence; identical to SEQ ID NO: 231
  Description of Artificial Sequence: Synthetic brazil nut; inner sequence

SEQ ID NO: 8426 - DNA, 30 bp, Artificial Sequence; identical to SEQ ID NO: 210
  Description of Artificial Sequence: Synthetic brazil nut; inner sequence

SEQ ID NO: 8427 - DNA, 30 bp, Artificial Sequence; identical to SEQ ID NO: 568
  Description of Artificial Sequence: Synthetic brazil nut; inner sequence

SEQ ID NO: 8428 - DNA, 30 bp, Artificial Sequence; identical to SEQ ID NO: 315
  Description of Artificial Sequence: Synthetic brazil nut; inner sequence

SEQ ID NO: 8429 - DNA, 30 bp, Artificial Sequence; identical to SEQ ID NO: 87
  Description of Artificial Sequence: Synthetic brazil nut; inner sequence

SEQ ID NO: 8430 - DNA, 30 bp, Artificial Sequence; identical to SEQ ID NO: 213
  Description of Artificial Sequence: Synthetic brazil nut; inner sequence

SEQ ID NO: 8431 - DNA, 30 bp, Artificial Sequence; identical to SEQ ID NO: 4407
  Description of Artificial Sequence: Synthetic brazil nut; inner sequence

SEQ ID NO: 8432 - DNA, 30 bp, Artificial Sequence; identical to SEQ ID NO: 4394
  Description of Artificial Sequence: Synthetic brazil nut; inner sequence

SEQ ID NO: 8433 - DNA, 30 bp, Artificial Sequence; identical to SEQ ID NO: 405
  Description of Artificial Sequence: Synthetic brazil nut; inner sequence

SEQ ID NO: 8434 - DNA, 30 bp, Artificial Sequence; identical to SEQ ID NO: 238
  Description of Artificial Sequence: Synthetic brazil nut; inner sequence

SEQ ID NO: 8435 - DNA, 30 bp, Artificial Sequence; identical to SEQ ID NO: 396
  Description of Artificial Sequence: Synthetic brazil nut; inner sequence

SEQ ID NO: 8436 - DNA, 30 bp, Artificial Sequence; identical to SEQ ID NO: 227
  Description of Artificial Sequence: Synthetic brazil nut; inner sequence

SEQ ID NO: 8437 - DNA, 30 bp, Artificial Sequence; identical to SEQ ID NO: 325
  Description of Artificial Sequence: Synthetic brazil nut; inner sequence

SEQ ID NO: 8438 - DNA, 30 bp, Artificial Sequence; identical to SEQ ID NO: 4543
  Description of Artificial Sequence: Synthetic brazil nut; inner sequence

SEQ ID NO: 8439 - DNA, 30 bp, Artificial Sequence; identical to SEQ ID NO: 393
  Description of Artificial Sequence: Synthetic brazil nut; inner sequence

SEQ ID NO: 8440 - DNA, 30 bp, Artificial Sequence; identical to SEQ ID NO: 284
  Description of Artificial Sequence: Synthetic brazil nut; inner sequence

SEQ ID NO: 8441 - DNA, 30 bp, Artificial Sequence; identical to SEQ ID NO: 991
  Description of Artificial Sequence: Synthetic brazil nut; inner sequence

SEQ ID NO: 8442 - DNA, 30 bp, Artificial Sequence; identical to SEQ ID NO: 860
  Description of Artificial Sequence: Synthetic brazil nut; inner sequence

SEQ ID NO: 8443 - DNA, 30 bp, Artificial Sequence; identical to SEQ ID NO: 407
  Description of Artificial Sequence: Synthetic brazil nut; inner sequence

SEQ ID NO: 8444 - DNA, 30 bp, Artificial Sequence; identical to SEQ ID NO: 862
  Description of Artificial Sequence: Synthetic brazil nut; inner sequence

SEQ ID NO: 8445 - DNA, 30 bp, Artificial Sequence; identical to SEQ ID NO: 695
  Description of Artificial Sequence: Synthetic brazil nut; inner sequence

SEQ ID NO: 8446 - DNA, 30 bp, Artificial Sequence; identical to SEQ ID NO: 248
  Description of Artificial Sequence: Synthetic brazil nut; inner sequence

SEQ ID NO: 8447 - DNA, 30 bp, Artificial Sequence; identical to SEQ ID NO: 484
  Description of Artificial Sequence: Synthetic brazil nut; inner sequence

SEQ ID NO: 8448 - DNA, 30 bp, Artificial Sequence; identical to SEQ ID NO: 397
  Description of Artificial Sequence: Synthetic brazil nut; inner sequence

SEQ ID NO: 8449 - DNA, 30 bp, Artificial Sequence; identical to SEQ ID NO: 239
  Description of Artificial Sequence: Synthetic brazil nut; inner sequence

SEQ ID NO: 8450 - DNA, 30 bp, Artificial Sequence; identical to SEQ ID NO: 831
  Description of Artificial Sequence: Synthetic brazil nut; inner sequence

SEQ ID NO: 8451 - DNA, 30 bp, Artificial Sequence; identical to SEQ ID NO: 647
  Description of Artificial Sequence: Synthetic brazil nut; inner sequence

SEQ ID NO: 8452 - DNA, 30 bp, Artificial Sequence; identical to SEQ ID NO: 561
  Description of Artificial Sequence: Synthetic brazil nut; inner sequence

SEQ ID NO: 8453 - DNA, 30 bp, Artificial Sequence; identical to SEQ ID NO: 4377
  Description of Artificial Sequence: Synthetic brazil nut; inner sequence

SEQ ID NO: 8454 - DNA, 30 bp, Artificial Sequence; identical to SEQ ID NO: 128
  Description of Artificial Sequence: Synthetic brazil nut; inner sequence

SEQ ID NO: 8455 - DNA, 30 bp, Artificial Sequence; identical to SEQ ID NO: 884
  Description of Artificial Sequence: Synthetic brazil nut; inner sequence

SEQ ID NO: 8456 - DNA, 30 bp, Artificial Sequence; identical to SEQ ID NO: 281
  Description of Artificial Sequence: Synthetic brazil nut; inner sequence

SEQ ID NO: 8457 - DNA, 30 bp, Artificial Sequence; identical to SEQ ID NO: 4428
  Description of Artificial Sequence: Synthetic brazil nut; inner sequence

SEQ ID NO: 8458 - DNA, 30 bp, Artificial Sequence
  Description of Artificial Sequence: Synthetic brazil nut; inner sequence
acggcatggtgctgcgatccctgctggtca

SEQ ID NO: 8459 - DNA, 30 bp, Artificial Sequence; identical to SEQ ID NO: 891
  Description of Artificial Sequence: Synthetic brazil nut; inner sequence

SEQ ID NO: 8460 - DNA, 30 bp, Artificial Sequence; identical to SEQ ID NO: 4393
  Description of Artificial Sequence: Synthetic brazil nut; inner sequence

SEQ ID NO: 8461 - DNA, 30 bp, Artificial Sequence; identical to SEQ ID NO: 628
  Description of Artificial Sequence: Synthetic brazil nut; inner sequence

SEQ ID NO: 8462 - DNA, 30 bp, Artificial Sequence; identical to SEQ ID NO: 476
  Description of Artificial Sequence: Synthetic brazil nut; inner sequence

SEQ ID NO: 8463 - DNA, 30 bp, Artificial Sequence; identical to SEQ ID NO: 331
  Description of Artificial Sequence: Synthetic brazil nut; inner sequence

SEQ ID NO: 8464 - DNA, 30 bp, Artificial Sequence; identical to SEQ ID NO: 326
  Description of Artificial Sequence: Synthetic brazil nut; inner sequence

SEQ ID NO: 8465 - DNA, 30 bp, Artificial Sequence; identical to SEQ ID NO: 4312
  Description of Artificial Sequence: Synthetic brazil nut; inner sequence

SEQ ID NO: 8466 - DNA, 30 bp, Artificial Sequence; identical to SEQ ID NO: 631
  Description of Artificial Sequence: Synthetic brazil nut; inner sequence

SEQ ID NO: 8467 - DNA, 30 bp, Artificial Sequence; identical to SEQ ID NO: 296
  Description of Artificial Sequence: Synthetic brazil nut; inner sequence

SEQ ID NO: 8468 - DNA, 30 bp, Artificial Sequence; identical to SEQ ID NO: 317
  Description of Artificial Sequence: Synthetic brazil nut; inner sequence

SEQ ID NO: 8469 - DNA, 30 bp, Artificial Sequence; identical to SEQ ID NO: 226
  Description of Artificial Sequence: Synthetic brazil nut; inner sequence

SEQ ID NO: 8470 - DNA, 30 bp, Artificial Sequence; identical to SEQ ID NO: 657
  Description of Artificial Sequence: Synthetic brazil nut; inner sequence

SEQ ID NO: 8471 - DNA, 30 bp, Artificial Sequence; identical to SEQ ID NO: 395
  Description of Artificial Sequence: Synthetic brazil nut; inner sequence

SEQ ID NO: 8472 - DNA, 30 bp, Artificial Sequence; identical to SEQ ID NO: 141
  Description of Artificial Sequence: Synthetic brazil nut; inner sequence

SEQ ID NO: 8473 - DNA, 30 bp, Artificial Sequence; identical to SEQ ID NO: 684
  Description of Artificial Sequence: Synthetic brazil nut; inner sequence

SEQ ID NO: 8474 - DNA, 30 bp, Artificial Sequence; identical to SEQ ID NO: 686
  Description of Artificial Sequence: Synthetic brazil nut; inner sequence

SEQ ID NO: 8475 - DNA, 30 bp, Artificial Sequence; identical to SEQ ID NO: 632
  Description of Artificial Sequence: Synthetic brazil nut; inner sequence

SEQ ID NO: 8476 - DNA, 30 bp, Artificial Sequence; identical to SEQ ID NO: 4682
  Description of Artificial Sequence: Synthetic brazil nut; inner sequence

SEQ ID NO: 8477 - DNA, 30 bp, Artificial Sequence; identical to SEQ ID NO: 4364
  Description of Artificial Sequence: Synthetic brazil nut; inner sequence

SEQ ID NO: 8478 - DNA, 30 bp, Artificial Sequence; identical to SEQ ID NO: 867
  Description of Artificial Sequence: Synthetic brazil nut; inner sequence

SEQ ID NO: 8479 - DNA, 30 bp, Artificial Sequence; identical to SEQ ID NO: 586
  Description of Artificial Sequence: Synthetic brazil nut; inner sequence

SEQ ID NO: 8480 - DNA, 30 bp, Artificial Sequence; identical to SEQ ID NO: 267
  Description of Artificial Sequence: Synthetic brazil nut; inner sequence

SEQ ID NO: 8481 - DNA, 30 bp, Artificial Sequence; identical to SEQ ID NO: 202
  Description of Artificial Sequence: Synthetic brazil nut; inner sequence

SEQ ID NO: 8482 - DNA, 30 bp, Artificial Sequence; identical to SEQ ID NO: 4787
  Description of Artificial Sequence: Synthetic brazil nut; inner sequence

SEQ ID NO: 8483 - DNA, 29 bp, Artificial Sequence
  Description of Artificial Sequence: Synthetic brazil nut; inner sequence
ggccgatcgaccctatcaagtgcagcatg

SEQ ID NO: 8484 - DNA, 30 bp, Artificial Sequence; identical to SEQ ID NO: 364
  Description of Artificial Sequence: Synthetic brazil nut; inner sequence

SEQ ID NO: 8485 - DNA, 30 bp, Artificial Sequence; identical to SEQ ID NO: 504
  Description of Artificial Sequence: Synthetic brazil nut; inner sequence

SEQ ID NO: 8486 - DNA, 30 bp, Artificial Sequence; identical to SEQ ID NO: 666
  Description of Artificial Sequence: Synthetic brazil nut; inner sequence

SEQ ID NO: 8487 - DNA, 30 bp, Artificial Sequence; identical to SEQ ID NO: 615
  Description of Artificial Sequence: Synthetic brazil nut; inner sequence

SEQ ID NO: 8488 - DNA, 30 bp, Artificial Sequence; identical to SEQ ID NO: 4592
  Description of Artificial Sequence: Synthetic brazil nut; inner sequence

SEQ ID NO: 8489 - DNA, 30 bp, Artificial Sequence; identical to SEQ ID NO: 728
  Description of Artificial Sequence: Synthetic brazil nut; inner sequence

SEQ ID NO: 8490 - DNA, 30 bp, Artificial Sequence; identical to SEQ ID NO: 291
  Description of Artificial Sequence: Synthetic brazil nut; inner sequence

SEQ ID NO: 8491 - DNA, 30 bp, Artificial Sequence; identical to SEQ ID NO: 4651
  Description of Artificial Sequence: Synthetic brazil nut; inner sequence

SEQ ID NO: 8492 - DNA, 30 bp, Artificial Sequence; identical to SEQ ID NO: 4691
  Description of Artificial Sequence: Synthetic brazil nut; inner sequence

SEQ ID NO: 8493 - DNA, 30 bp, Artificial Sequence; identical to SEQ ID NO: 4494
  Description of Artificial Sequence: Synthetic brazil nut; inner sequence

SEQ ID NO: 8494 - DNA, 29 bp, Artificial Sequence
  Description of Artificial Sequence: Synthetic brazil nut; inner sequence
gtcatgccatcccttcgagtggacaggta

SEQ ID NO: 8495 - DNA, 30 bp, Artificial Sequence; identical to SEQ ID NO: 617
  Description of Artificial Sequence: Synthetic brazil nut; inner sequence

SEQ ID NO: 8496 - DNA, 30 bp, Artificial Sequence; identical to SEQ ID NO: 909
  Description of Artificial Sequence: Synthetic brazil nut; inner sequence

SEQ ID NO: 8497 - DNA, 30 bp, Artificial Sequence; identical to SEQ ID NO: 4525
  Description of Artificial Sequence: Synthetic brazil nut; inner sequence

SEQ ID NO: 8498 - DNA, 30 bp, Artificial Sequence; identical to SEQ ID NO: 236
  Description of Artificial Sequence: Synthetic brazil nut; inner sequence

SEQ ID NO: 8499 - DNA, 30 bp, Artificial Sequence; identical to SEQ ID NO: 440
  Description of Artificial Sequence: Synthetic brazil nut; inner sequence

SEQ ID NO: 8500 - DNA, 30 bp, Artificial Sequence; identical to SEQ ID NO: 518
  Description of Artificial Sequence: Synthetic brazil nut; inner sequence

SEQ ID NO: 8501 - DNA, 30 bp, Artificial Sequence; identical to SEQ ID NO: 4535
  Description of Artificial Sequence: Synthetic brazil nut; inner sequence

SEQ ID NO: 8502 - DNA, 30 bp, Artificial Sequence; identical to SEQ ID NO: 4472
  Description of Artificial Sequence: Synthetic brazil nut; inner sequence

SEQ ID NO: 8503 - DNA, 30 bp, Artificial Sequence; identical to SEQ ID NO: 338
  Description of Artificial Sequence: Synthetic brazil nut; inner sequence

SEQ ID NO: 8504 - DNA, 30 bp, Artificial Sequence; identical to SEQ ID NO: 463
  Description of Artificial Sequence: Synthetic brazil nut; inner sequence

SEQ ID NO: 8505 - DNA, 30 bp, Artificial Sequence; identical to SEQ ID NO: 465
  Description of Artificial Sequence: Synthetic brazil nut; inner sequence

SEQ ID NO: 8506 - DNA, 30 bp, Artificial Sequence; identical to SEQ ID NO: 180
  Description of Artificial Sequence: Synthetic brazil nut; inner sequence

SEQ ID NO: 8507 - DNA, 30 bp, Artificial Sequence; identical to SEQ ID NO: 4429
  Description of Artificial Sequence: Synthetic brazil nut; inner sequence

SEQ ID NO: 8508 - DNA, 30 bp, Artificial Sequence; identical to SEQ ID NO: 4590
  Description of Artificial Sequence: Synthetic brazil nut; inner sequence

SEQ ID NO: 8509 - DNA, 30 bp, Artificial Sequence; identical to SEQ ID NO: 461
  Description of Artificial Sequence: Synthetic brazil nut; inner sequence

SEQ ID NO: 8510 - DNA, 30 bp, Artificial Sequence; identical to SEQ ID NO: 124
  Description of Artificial Sequence: Synthetic brazil nut; inner sequence

SEQ ID NO: 8511 - DNA, 30 bp, Artificial Sequence; identical to SEQ ID NO: 780
  Description of Artificial Sequence: Synthetic brazil nut; inner sequence

SEQ ID NO: 8512 - DNA, 30 bp, Artificial Sequence; identical to SEQ ID NO: 4499
  Description of Artificial Sequence: Synthetic brazil nut; inner sequence

SEQ ID NO: 8513 - DNA, 30 bp, Artificial Sequence; identical to SEQ ID NO: 620
  Description of Artificial Sequence: Synthetic brazil nut; inner sequence

SEQ ID NO: 8514 - DNA, 30 bp, Artificial Sequence; identical to SEQ ID NO: 4727
  Description of Artificial Sequence: Synthetic brazil nut; inner sequence

SEQ ID NO: 8515 - DNA, 30 bp, Artificial Sequence; identical to SEQ ID NO: 493
  Description of Artificial Sequence: Synthetic brazil nut; inner sequence

SEQ ID NO: 8516 - DNA, 30 bp, Artificial Sequence; identical to SEQ ID NO: 292
  Description of Artificial Sequence: Synthetic brazil nut; inner sequence

SEQ ID NO: 8517 - DNA, 30 bp, Artificial Sequence; identical to SEQ ID NO: 869
  Description of Artificial Sequence: Synthetic brazil nut; inner sequence

SEQ ID NO: 8518 - DNA, 30 bp, Artificial Sequence; identical to SEQ ID NO: 294
  Description of Artificial Sequence: Synthetic brazil nut; inner sequence

SEQ ID NO: 8519 - DNA, 30 bp, Artificial Sequence; identical to SEQ ID NO: 4808
  Description of Artificial Sequence: Synthetic brazil nut; inner sequence

SEQ ID NO: 8520 - DNA, 30 bp, Artificial Sequence; identical to SEQ ID NO: 900
  Description of Artificial Sequence: Synthetic brazil nut; inner sequence

SEQ ID NO: 8521 - DNA, 30 bp, Artificial Sequence; identical to SEQ ID NO: 519
  Description of Artificial Sequence: Synthetic brazil nut; inner sequence

SEQ ID NO: 8522 - DNA, 30 bp, Artificial Sequence; identical to SEQ ID NO: 663
  Description of Artificial Sequence: Synthetic brazil nut; inner sequence

SEQ ID NO: 8523 - DNA, 30 bp, Artificial Sequence; identical to SEQ ID NO: 422
  Description of Artificial Sequence: Synthetic brazil nut; inner sequence

SEQ ID NO: 8524 - DNA, 30 bp, Artificial Sequence; identical to SEQ ID NO: 4597
  Description of Artificial Sequence: Synthetic brazil nut; inner sequence

SEQ ID NO: 8525 - DNA, 30 bp, Artificial Sequence; identical to SEQ ID NO: 793
  Description of Artificial Sequence: Synthetic brazil nut; inner sequence

SEQ ID NO: 8526 - DNA, 30 bp, Artificial Sequence; identical to SEQ ID NO: 714
  Description of Artificial Sequence: Synthetic brazil nut; inner sequence

SEQ ID NO: 8527 - DNA, 30 bp, Artificial Sequence; identical to SEQ ID NO: 366
  Description of Artificial Sequence: Synthetic brazil nut; inner sequence

SEQ ID NO: 8528 - DNA, 30 bp, Artificial Sequence; identical to SEQ ID NO: 4573
  Description of Artificial Sequence: Synthetic brazil nut; inner sequence

SEQ ID NO: 8529 - DNA, 30 bp, Artificial Sequence; identical to SEQ ID NO: 800
  Description of Artificial Sequence: Synthetic brazil nut; inner sequence

SEQ ID NO: 8530 - DNA, 30 bp, Artificial Sequence; identical to SEQ ID NO: 633
  Description of Artificial Sequence: Synthetic brazil nut; inner sequence

SEQ ID NO: 8531 - DNA, 30 bp, Artificial Sequence; identical to SEQ ID NO: 513
  Description of Artificial Sequence: Synthetic brazil nut; inner sequence

SEQ ID NO: 8532 - DNA, 30 bp, Artificial Sequence; identical to SEQ ID NO: 746
  Description of Artificial Sequence: Synthetic brazil nut; inner sequence

SEQ ID NO: 8533 - DNA, 30 bp, Artificial Sequence; identical to SEQ ID NO: 789
  Description of Artificial Sequence: Synthetic brazil nut; inner sequence

SEQ ID NO: 8534 - DNA, 30 bp, Artificial Sequence; identical to SEQ ID NO: 475
  Description of Artificial Sequence: Synthetic brazil nut; inner sequence

SEQ ID NO: 8535 - DNA, 30 bp, Artificial Sequence; identical to SEQ ID NO: 699
  Description of Artificial Sequence: Synthetic brazil nut; inner sequence

SEQ ID NO: 8536 - DNA, 30 bp, Artificial Sequence; identical to SEQ ID NO: 386
  Description of Artificial Sequence: Synthetic brazil nut; inner sequence

SEQ ID NO: 8537 - DNA, 30 bp, Artificial Sequence; identical to SEQ ID NO: 351
  Description of Artificial Sequence: Synthetic brazil nut; inner sequence

SEQ ID NO: 8538 - DNA, 30 bp, Artificial Sequence; identical to SEQ ID NO: 777
  Description of Artificial Sequence: Synthetic brazil nut; inner sequence

SEQ ID NO: 8539 - DNA, 30 bp, Artificial Sequence; identical to SEQ ID NO: 441
  Description of Artificial Sequence: Synthetic brazil nut; inner sequence

SEQ ID NO: 8540 - DNA, 30 bp, Artificial Sequence; identical to SEQ ID NO: 775
  Description of Artificial Sequence: Synthetic brazil nut; inner sequence

SEQ ID NO: 8541 - DNA, 30 bp, Artificial Sequence; identical to SEQ ID NO: 926
  Description of Artificial Sequence: Synthetic brazil nut; inner sequence

SEQ ID NO: 8542 - DNA, 30 bp, Artificial Sequence; identical to SEQ ID NO: 914
  Description of Artificial Sequence: Synthetic brazil nut; inner sequence

SEQ ID NO: 8543 - DNA, 30 bp, Artificial Sequence; identical to SEQ ID NO: 4289
  Description of Artificial Sequence: Synthetic brazil nut; inner sequence

SEQ ID NO: 8544 - DNA, 30 bp, Artificial Sequence; identical to SEQ ID NO: 921
  Description of Artificial Sequence: Synthetic brazil nut; inner sequence

SEQ ID NO: 8545 - DNA, 30 bp, Artificial Sequence; identical to SEQ ID NO: 316
  Description of Artificial Sequence: Synthetic brazil nut; inner sequence

SEQ ID NO: 8546 - DNA, 30 bp, Artificial Sequence
  Description of Artificial Sequence: Synthetic brazil nut; inner sequence
cacactgtccgtcgcagcctacgtgcgtca

SEQ ID NO: 8547 - DNA, 30 bp, Artificial Sequence; identical to SEQ ID NO: 404
  Description of Artificial Sequence: Synthetic brazil nut; inner sequence

SEQ ID NO: 8548 - DNA, 30 bp, Artificial Sequence; identical to SEQ ID NO: 984
  Description of Artificial Sequence: Synthetic brazil nut; inner sequence

SEQ ID NO: 8549 - DNA, 30 bp, Artificial Sequence; identical to SEQ ID NO: 951
  Description of Artificial Sequence: Synthetic brazil nut; inner sequence

SEQ ID NO: 8550 - DNA, 30 bp, Artificial Sequence; identical to SEQ ID NO: 808
  Description of Artificial Sequence: Synthetic brazil nut; inner sequence

SEQ ID NO: 8551 - DNA, 30 bp, Artificial Sequence; identical to SEQ ID NO: 477
  Description of Artificial Sequence: Synthetic brazil nut; inner sequence

SEQ ID NO: 8552 - DNA, 30 bp, Artificial Sequence; identical to SEQ ID NO: 4870
  Description of Artificial Sequence: Synthetic brazil nut; inner sequence

SEQ ID NO: 8553 - DNA, 30 bp, Artificial Sequence; identical to SEQ ID NO: 637
  Description of Artificial Sequence: Synthetic brazil nut; inner sequence

SEQ ID NO: 8554 - DNA, 30 bp, Artificial Sequence; identical to SEQ ID NO: 816
  Description of Artificial Sequence: Synthetic brazil nut; inner sequence

SEQ ID NO: 8555 - DNA, 30 bp, Artificial Sequence; identical to SEQ ID NO: 420
  Description of Artificial Sequence: Synthetic brazil nut; inner sequence

SEQ ID NO: 8556 - DNA, 30 bp, Artificial Sequence; identical to SEQ ID NO: 4739
  Description of Artificial Sequence: Synthetic brazil nut; inner sequence

SEQ ID NO: 8557 - DNA, 30 bp, Artificial Sequence; identical to SEQ ID NO: 324
  Description of Artificial Sequence: Synthetic brazil nut; inner sequence

SEQ ID NO: 8558 - DNA, 27 bp, Artificial Sequence
  Description of Artificial Sequence: Synthetic brazil nut; inner sequence
ggccaagctgacctagcatgtgtgtca

SEQ ID NO: 8559 - DNA, 30 bp, Artificial Sequence; identical to SEQ ID NO: 583
  Description of Artificial Sequence: Synthetic brazil nut; inner sequence

SEQ ID NO: 8560 - DNA, 30 bp, Artificial Sequence; identical to SEQ ID NO: 4521
  Description of Artificial Sequence: Synthetic brazil nut; inner sequence

SEQ ID NO: 8561 - DNA, 30 bp, Artificial Sequence; identical to SEQ ID NO: 374
  Description of Artificial Sequence: Synthetic brazil nut; inner sequence

SEQ ID NO: 8562 - DNA, 30 bp, Artificial Sequence; identical to SEQ ID NO: 801
  Description of Artificial Sequence: Synthetic brazil nut; inner sequence

SEQ ID NO: 8563 - DNA, 30 bp, Artificial Sequence; identical to SEQ ID NO: 596
  Description of Artificial Sequence: Synthetic brazil nut; inner sequence

SEQ ID NO: 8564 - DNA, 30 bp, Artificial Sequence
  Description of Artificial Sequence: Synthetic brazil nut; inner sequence
gcatgcagtggacgctcaaccgcgtggaca

SEQ ID NO: 8565 - DNA, 30 bp, Artificial Sequence; identical to SEQ ID NO: 877
  Description of Artificial Sequence: Synthetic brazil nut; inner sequence

SEQ ID NO: 8566 - DNA, 30 bp, Artificial Sequence; identical to SEQ ID NO: 348
  Description of Artificial Sequence: Synthetic brazil nut; inner sequence

SEQ ID NO: 8567 - DNA, 30 bp, Artificial Sequence; identical to SEQ ID NO: 498
  Description of Artificial Sequence: Synthetic brazil nut; inner sequence

SEQ ID NO: 8568 - DNA, 30 bp, Artificial Sequence; identical to SEQ ID NO: 925
  Description of Artificial Sequence: Synthetic brazil nut; inner sequence

SEQ ID NO: 8569 - DNA, 30 bp, Artificial Sequence; identical to SEQ ID NO: 507
  Description of Artificial Sequence: Synthetic brazil nut; inner sequence

SEQ ID NO: 8570 - DNA, 30 bp, Artificial Sequence; identical to SEQ ID NO: 606
  Description of Artificial Sequence: Synthetic brazil nut; inner sequence

SEQ ID NO: 8571 - DNA, 30 bp, Artificial Sequence; identical to SEQ ID NO: 697
  Description of Artificial Sequence: Synthetic brazil nut; inner sequence

SEQ ID NO: 8572 - DNA, 30 bp, Artificial Sequence; identical to SEQ ID NO: 4579
  Description of Artificial Sequence: Synthetic brazil nut; inner sequence

SEQ ID NO: 8573 - DNA, 29 bp, Artificial Sequence
  Description of Artificial Sequence: Synthetic brazil nut; inner sequence
ggccgaacggaccgacaagtgcgcatgga

SEQ ID NO: 8574 - DNA, 30 bp, Artificial Sequence; identical to SEQ ID NO: 4519
  Description of Artificial Sequence: Synthetic brazil nut; inner sequence

SEQ ID NO: 8575 - DNA, 30 bp, Artificial Sequence; identical to SEQ ID NO: 276
  Description of Artificial Sequence: Synthetic brazil nut; inner sequence

SEQ ID NO: 8576 - DNA, 30 bp, Artificial Sequence; identical to SEQ ID NO: 603
  Description of Artificial Sequence: Synthetic brazil nut; inner sequence

SEQ ID NO: 8577 - DNA, 30 bp, Artificial Sequence; identical to SEQ ID NO: 622
  Description of Artificial Sequence: Synthetic brazil nut; inner sequence

SEQ ID NO: 8578 - DNA, 30 bp, Artificial Sequence; identical to SEQ ID NO: 410
  Description of Artificial Sequence: Synthetic brazil nut; inner sequence

SEQ ID NO: 8579 - DNA, 30 bp, Artificial Sequence
  Description of Artificial Sequence: Synthetic brazil nut; inner sequence
gtcatgccatcccttcgagtgcgacaggta

SEQ ID NO: 8580 - DNA, 30 bp, Artificial Sequence; identical to SEQ ID NO: 306
  Description of Artificial Sequence: Synthetic brazil nut; inner sequence

SEQ ID NO: 8581 - DNA, 30 bp, Artificial Sequence; identical to SEQ ID NO: 4650
  Description of Artificial Sequence: Synthetic brazil nut; inner sequence

SEQ ID NO: 8582 - DNA, 30 bp, Artificial Sequence; identical to SEQ ID NO: 636
  Description of Artificial Sequence: Synthetic brazil nut; inner sequence

SEQ ID NO: 8583 - DNA, 30 bp, Artificial Sequence; identical to SEQ ID NO: 223
  Description of Artificial Sequence: Synthetic brazil nut; inner sequence

SEQ ID NO: 8584 - DNA, 30 bp, Artificial Sequence; identical to SEQ ID NO: 574
  Description of Artificial Sequence: Synthetic brazil nut; inner sequence

SEQ ID NO: 8585 - DNA, 30 bp, Artificial Sequence; identical to SEQ ID NO: 4240
  Description of Artificial Sequence: Synthetic brazil nut; inner sequence

SEQ ID NO: 8586 - DNA, 30 bp, Artificial Sequence
  Description of Artificial Sequence: Synthetic brazil nut; inner sequence
cgtagcgcaggcaaaggtcgtgtcgtcagt

SEQ ID NO: 8587 - DNA, 30 bp, Artificial Sequence; identical to SEQ ID NO: 881
  Description of Artificial Sequence: Synthetic brazil nut; inner sequence

SEQ ID NO: 8588 - DNA, 30 bp, Artificial Sequence; identical to SEQ ID NO: 776
  Description of Artificial Sequence: Synthetic brazil nut; inner sequence

SEQ ID NO: 8589 - DNA, 30 bp, Artificial Sequence; identical to SEQ ID NO: 4571
  Description of Artificial Sequence: Synthetic brazil nut; inner sequence

SEQ ID NO: 8590 - DNA, 30 bp, Artificial Sequence; identical to SEQ ID NO: 576
  Description of Artificial Sequence: Synthetic brazil nut; inner sequence

SEQ ID NO: 8591 - DNA, 30 bp, Artificial Sequence; identical to SEQ ID NO: 930
  Description of Artificial Sequence: Synthetic brazil nut; inner sequence

SEQ ID NO: 8592 - DNA, 30 bp, Artificial Sequence; identical to SEQ ID NO: 4603
  Description of Artificial Sequence: Synthetic brazil nut; inner sequence

SEQ ID NO: 8593 - DNA, 30 bp, Artificial Sequence; identical to SEQ ID NO: 660
  Description of Artificial Sequence: Synthetic brazil nut; inner sequence

SEQ ID NO: 8594 - DNA, 30 bp, Artificial Sequence; identical to SEQ ID NO: 805
  Description of Artificial Sequence: Synthetic brazil nut; inner sequence

SEQ ID NO: 8595 - DNA, 30 bp, Artificial Sequence; identical to SEQ ID NO: 4498
  Description of Artificial Sequence: Synthetic brazil nut; inner sequence

SEQ ID NO: 8596 - DNA, 30 bp, Artificial Sequence; identical to SEQ ID NO: 835
  Description of Artificial Sequence: Synthetic brazil nut; inner sequence

SEQ ID NO: 8597 - DNA, 30 bp, Artificial Sequence; identical to SEQ ID NO: 4692
  Description of Artificial Sequence: Synthetic brazil nut; inner sequence

SEQ ID NO: 8598 - DNA, 30 bp, Artificial Sequence; identical to SEQ ID NO: 4610
  Description of Artificial Sequence: Synthetic brazil nut; inner sequence

SEQ ID NO: 8599 - DNA, 30 bp, Artificial Sequence; identical to SEQ ID NO: 4638
  Description of Artificial Sequence: Synthetic brazil nut; inner sequence

SEQ ID NO: 8600 - DNA, 30 bp, Artificial Sequence; identical to SEQ ID NO: 4748
  Description of Artificial Sequence: Synthetic brazil nut; inner sequence

SEQ ID NO: 8601 - DNA, 30 bp, Artificial Sequence; identical to SEQ ID NO: 4605
  Description of Artificial Sequence: Synthetic brazil nut; inner sequence

SEQ ID NO: 8602 - DNA, 30 bp, Artificial Sequence; identical to SEQ ID NO: 4799
  Description of Artificial Sequence: Synthetic brazil nut; inner sequence

SEQ ID NO: 8603 - DNA, 30 bp, Artificial Sequence; identical to SEQ ID NO: 4491
  Description of Artificial Sequence: Synthetic brazil nut; inner sequence

SEQ ID NO: 8604 - DNA, 30 bp, Artificial Sequence; identical to SEQ ID NO: 669
  Description of Artificial Sequence: Synthetic brazil nut; inner sequence

SEQ ID NO: 8605 - DNA, 30 bp, Artificial Sequence; identical to SEQ ID NO: 591
  Description of Artificial Sequence: Synthetic brazil nut; inner sequence

SEQ ID NO: 8606 - DNA, 30 bp, Artificial Sequence; identical to SEQ ID NO: 4459
  Description of Artificial Sequence: Synthetic brazil nut; inner sequence

SEQ ID NO: 8607 - DNA, 30 bp, Artificial Sequence; identical to SEQ ID NO: 297
  Description of Artificial Sequence: Synthetic brazil nut; inner sequence

SEQ ID NO: 8608 - DNA, 30 bp, Artificial Sequence; identical to SEQ ID NO: 4997
  Description of Artificial Sequence: Synthetic brazil nut; inner sequence

SEQ ID NO: 8609 - DNA, 30 bp, Artificial Sequence; identical to SEQ ID NO: 4598
  Description of Artificial Sequence: Synthetic brazil nut; inner sequence

SEQ ID NO: 8610 - DNA, 30 bp, Artificial Sequence; identical to SEQ ID NO: 289
  Description of Artificial Sequence: Synthetic brazil nut; inner sequence

SEQ ID NO: 8611 - DNA, 30 bp, Artificial Sequence; identical to SEQ ID NO: 260
  Description of Artificial Sequence: Synthetic brazil nut; inner sequence

SEQ ID NO: 8612 - DNA, 30 bp, Artificial Sequence; identical to SEQ ID NO: 4552
  Description of Artificial Sequence: Synthetic brazil nut; inner sequence

SEQ ID NO: 8613 - DNA, 30 bp, Artificial Sequence; identical to SEQ ID NO: 242
  Description of Artificial Sequence: Synthetic brazil nut; inner sequence

SEQ ID NO: 8614 - DNA, 30 bp, Artificial Sequence; identical to SEQ ID NO: 4642
  Description of Artificial Sequence: Synthetic brazil nut; inner sequence

SEQ ID NO: 8615 - DNA, 30 bp, Artificial Sequence; identical to SEQ ID NO: 560
  Description of Artificial Sequence: Synthetic brazil nut; inner sequence

SEQ ID NO: 8616 - DNA, 30 bp, Artificial Sequence; identical to SEQ ID NO: 356
  Description of Artificial Sequence: Synthetic brazil nut; inner sequence

SEQ ID NO: 8617 - DNA, 30 bp, Artificial Sequence; identical to SEQ ID NO: 680
  Description of Artificial Sequence: Synthetic brazil nut; inner sequence

SEQ ID NO: 8618 - DNA, 30 bp, Artificial Sequence
  Description of Artificial Sequence: Synthetic brazil nut; inner sequence
gtcatgccatcccttcgagcgtgacaggta

SEQ ID NO: 8619 - DNA, 30 bp, Artificial Sequence; identical to SEQ ID NO: 727
  Description of Artificial Sequence: Synthetic brazil nut; inner sequence

SEQ ID NO: 8620 - DNA, 30 bp, Artificial Sequence; identical to SEQ ID NO: 206
  Description of Artificial Sequence: Synthetic brazil nut; inner sequence

SEQ ID NO: 8621 - DNA, 30 bp, Artificial Sequence; identical to SEQ ID NO: 4653
  Description of Artificial Sequence: Synthetic brazil nut; inner sequence

SEQ ID NO: 8622 - DNA, 30 bp, Artificial Sequence; identical to SEQ ID NO: 919
  Description of Artificial Sequence: Synthetic brazil nut; inner sequence

SEQ ID NO: 8623 - DNA, 30 bp, Artificial Sequence; identical to SEQ ID NO: 956
  Description of Artificial Sequence: Synthetic brazil nut; inner sequence

SEQ ID NO: 8624 - DNA, 30 bp, Artificial Sequence; identical to SEQ ID NO: 610
  Description of Artificial Sequence: Synthetic brazil nut; inner sequence

SEQ ID NO: 8625 - DNA, 30 bp, Artificial Sequence; identical to SEQ ID NO: 4775
  Description of Artificial Sequence: Synthetic brazil nut; inner sequence

SEQ ID NO: 8626 - DNA, 31 bp, Artificial Sequence; identical to SEQ ID NO: 503
  Description of Artificial Sequence: Synthetic brazil nut; inner sequence

SEQ ID NO: 8627 - DNA, 30 bp, Artificial Sequence
  Description of Artificial Sequence: Synthetic brazil nut; inner sequence
ggacgcagcttgcctactggtggccacgta

SEQ ID NO: 8628 - DNA, 30 bp, Artificial Sequence; identical to SEQ ID NO: 4814
  Description of Artificial Sequence: Synthetic brazil nut; inner sequence

SEQ ID NO: 8629 - DNA, 30 bp, Artificial Sequence; identical to SEQ ID NO: 857
  Description of Artificial Sequence: Synthetic brazil nut; inner sequence

SEQ ID NO: 8630 - DNA, 30 bp, Artificial Sequence; identical to SEQ ID NO: 4761
  Description of Artificial Sequence: Synthetic brazil nut; inner sequence

SEQ ID NO: 8631 - DNA, 30 bp, Artificial Sequence; identical to SEQ ID NO: 542
  Description of Artificial Sequence: Synthetic brazil nut; inner sequence

SEQ ID NO: 8632 - DNA, 30 bp, Artificial Sequence; identical to SEQ ID NO: 640
  Description of Artificial Sequence: Synthetic brazil nut; inner sequence

SEQ ID NO: 8633 - DNA, 30 bp, Artificial Sequence
  Description of Artificial Sequence: Synthetic brazil nut; inner sequence
tgtgcgtccgatcctgccctctacgtggca

SEQ ID NO: 8634 - DNA, 30 bp, Artificial Sequence; identical to SEQ ID NO: 4580
  Description of Artificial Sequence: Synthetic brazil nut; inner sequence

SEQ ID NO: 8635 - DNA, 30 bp, Artificial Sequence; identical to SEQ ID NO: 225
  Description of Artificial Sequence: Synthetic brazil nut; inner sequence

SEQ ID NO: 8636 - DNA, 31 bp, Artificial Sequence; identical to SEQ ID NO: 4619
  Description of Artificial Sequence: Synthetic brazil nut; inner sequence

SEQ ID NO: 8637 - DNA, 30 bp, Artificial Sequence; identical to SEQ ID NO: 452
  Description of Artificial Sequence: Synthetic brazil nut; inner sequence

SEQ ID NO: 8638 - DNA, 30 bp, Artificial Sequence; identical to SEQ ID NO: 874
  Description of Artificial Sequence: Synthetic brazil nut; inner sequence

SEQ ID NO: 8639 - DNA, 30 bp, Artificial Sequence; identical to SEQ ID NO: 608
  Description of Artificial Sequence: Synthetic brazil nut; inner sequence

SEQ ID NO: 8640 - DNA, 30 bp, Artificial Sequence; identical to SEQ ID NO: 754
  Description of Artificial Sequence: Synthetic brazil nut; inner sequence

SEQ ID NO: 8641 - DNA, 30 bp, Artificial Sequence; identical to SEQ ID NO: 4721
  Description of Artificial Sequence: Synthetic brazil nut; inner sequence

SEQ ID NO: 8642 - DNA, 30 bp, Artificial Sequence; identical to SEQ ID NO: 4513
  Description of Artificial Sequence: Synthetic brazil nut; inner sequence

SEQ ID NO: 8643 - DNA, 30 bp, Artificial Sequence; identical to SEQ ID NO: 286
  Description of Artificial Sequence: Synthetic brazil nut; inner sequence

SEQ ID NO: 8644 - DNA, 30 bp, Artificial Sequence; identical to SEQ ID NO: 4890
  Description of Artificial Sequence: Synthetic brazil nut; inner sequence

SEQ ID NO: 8645 - DNA, 30 bp, Artificial Sequence; identical to SEQ ID NO: 4722
  Description of Artificial Sequence: Synthetic brazil nut; inner sequence

SEQ ID NO: 8646 - DNA, 30 bp, Artificial Sequence; identical to SEQ ID NO: 4356
  Description of Artificial Sequence: Synthetic brazil nut; inner sequence

SEQ ID NO: 8647 - DNA, 30 bp, Artificial Sequence; identical to SEQ ID NO: 275
  Description of Artificial Sequence: Synthetic brazil nut; inner sequence

SEQ ID NO: 8648 - DNA, 30 bp, Artificial Sequence; identical to SEQ ID NO: 4451
  Description of Artificial Sequence: Synthetic brazil nut; inner sequence

SEQ ID NO: 8649 - DNA, 28 bp, Artificial Sequence
  Description of Artificial Sequence: Synthetic brazil nut; inner sequence
cgcaccgtcgatacgtcatgcacgcacc

SEQ ID NO: 8650 - DNA, 30 bp, Artificial Sequence; identical to SEQ ID NO: 328
  Description of Artificial Sequence: Synthetic brazil nut; inner sequence

SEQ ID NO: 8651 - DNA, 30 bp, Artificial Sequence; identical to SEQ ID NO: 717
  Description of Artificial Sequence: Synthetic brazil nut; inner sequence

SEQ ID NO: 8652 - DNA, 30 bp, Artificial Sequence; identical to SEQ ID NO: 434
  Description of Artificial Sequence: Synthetic brazil nut; inner sequence

SEQ ID NO: 8653 - DNA, 30 bp, Artificial Sequence; identical to SEQ ID NO: 4644
  Description of Artificial Sequence: Synthetic brazil nut; inner sequence

SEQ ID NO: 8654 - DNA, 30 bp, Artificial Sequence; identical to SEQ ID NO: 4710
  Description of Artificial Sequence: Synthetic brazil nut; inner sequence

SEQ ID NO: 8655 - DNA, 30 bp, Artificial Sequence; identical to SEQ ID NO: 363
  Description of Artificial Sequence: Synthetic brazil nut; inner sequence

SEQ ID NO: 8656 - DNA, 30 bp, Artificial Sequence; identical to SEQ ID NO: 4627
  Description of Artificial Sequence: Synthetic brazil nut; inner sequence

SEQ ID NO: 8657 - DNA, 30 bp, Artificial Sequence; identical to SEQ ID NO: 219
  Description of Artificial Sequence: Synthetic brazil nut; inner sequence

SEQ ID NO: 8658 - DNA, 30 bp, Artificial Sequence; identical to SEQ ID NO: 486
  Description of Artificial Sequence: Synthetic brazil nut; inner sequence

SEQ ID NO: 8659 - DNA, 30 bp, Artificial Sequence
  Description of Artificial Sequence: Synthetic brazil nut; inner sequence
cgtgtgtacgaaacttgccgcgtggccatg

SEQ ID NO: 8660 - DNA, 30 bp, Artificial Sequence; identical to SEQ ID NO: 968
  Description of Artificial Sequence: Synthetic brazil nut; inner sequence

SEQ ID NO: 8661 - DNA, 30 bp, Artificial Sequence; identical to SEQ ID NO: 510
  Description of Artificial Sequence: Synthetic brazil nut; inner sequence

SEQ ID NO: 8662 - DNA, 30 bp, Artificial Sequence; identical to SEQ ID NO: 4873
  Description of Artificial Sequence: Synthetic brazil nut; inner sequence

SEQ ID NO: 8663 - DNA, 30 bp, Artificial Sequence; identical to SEQ ID NO: 4717
  Description of Artificial Sequence: Synthetic brazil nut; inner sequence

SEQ ID NO: 8664 - DNA, 30 bp, Artificial Sequence; identical to SEQ ID NO: 720
  Description of Artificial Sequence: Synthetic brazil nut; inner sequence

SEQ ID NO: 8665 - DNA, 30 bp, Artificial Sequence; identical to SEQ ID NO: 4565
  Description of Artificial Sequence: Synthetic brazil nut; inner sequence

SEQ ID NO: 8666 - DNA, 30 bp, Artificial Sequence; identical to SEQ ID NO: 4489
  Description of Artificial Sequence: Synthetic brazil nut; inner sequence

SEQ ID NO: 8667 - DNA, 30 bp, Artificial Sequence; identical to SEQ ID NO: 4679
  Description of Artificial Sequence: Synthetic brazil nut; inner sequence

SEQ ID NO: 8668 - DNA, 30 bp, Artificial Sequence; identical to SEQ ID NO: 758
  Description of Artificial Sequence: Synthetic brazil nut; inner sequence

SEQ ID NO: 8669 - DNA, 30 bp, Artificial Sequence; identical to SEQ ID NO: 722
  Description of Artificial Sequence: Synthetic brazil nut; inner sequence

SEQ ID NO: 8670 - DNA, 30 bp, Artificial Sequence
  Description of Artificial Sequence: Synthetic brazil nut; inner sequence
gtgcgacagaccctagcgagtgaacgtgta

SEQ ID NO: 8671 - DNA, 30 bp, Artificial Sequence; identical to SEQ ID NO: 889
  Description of Artificial Sequence: Synthetic brazil nut; inner sequence

SEQ ID NO: 8672 - DNA, 30 bp, Artificial Sequence; identical to SEQ ID NO: 4670
  Description of Artificial Sequence: Synthetic brazil nut; inner sequence

SEQ ID NO: 8673 - DNA, 30 bp, Artificial Sequence; identical to SEQ ID NO: 677
  Description of Artificial Sequence: Synthetic brazil nut; inner sequence

SEQ ID NO: 8674 - DNA, 30 bp, Artificial Sequence; identical to SEQ ID NO: 4504
  Description of Artificial Sequence: Synthetic brazil nut; inner sequence

SEQ ID NO: 8675 - DNA, 30 bp, Artificial Sequence; identical to SEQ ID NO: 4405
  Description of Artificial Sequence: Synthetic brazil nut; inner sequence

SEQ ID NO: 8676 - DNA, 30 bp, Artificial Sequence
  Description of Artificial Sequence: Synthetic brazil nut; inner sequence
tgacctgcgtgttcaccgtggccatgcacg

SEQ ID NO: 8677 - DNA, 30 bp, Artificial Sequence; identical to SEQ ID NO: 575
  Description of Artificial Sequence: Synthetic brazil nut; inner sequence

SEQ ID NO: 8678 - DNA, 30 bp, Artificial Sequence
  Description of Artificial Sequence: Synthetic brazil nut; inner sequence
ggcacgtaacgcacgacgcaacggtgggta

SEQ ID NO: 8679 - DNA, 30 bp, Artificial Sequence; identical to SEQ ID NO: 4631
  Description of Artificial Sequence: Synthetic brazil nut; inner sequence

SEQ ID NO: 8680 - DNA, 30 bp, Artificial Sequence; identical to SEQ ID NO: 718
  Description of Artificial Sequence: Synthetic brazil nut; inner sequence

SEQ ID NO: 8681 - DNA, 30 bp, Artificial Sequence; identical to SEQ ID NO: 4530
  Description of Artificial Sequence: Synthetic brazil nut; inner sequence

SEQ ID NO: 8682 - DNA, 30 bp, Artificial Sequence
  Description of Artificial Sequence: Synthetic brazil nut; inner sequence
gtcacgcgctcgtaccctaacgagtggaca

SEQ ID NO: 8683 - DNA, 30 bp, Artificial Sequence; identical to SEQ ID NO: 464
  Description of Artificial Sequence: Synthetic brazil nut; inner sequence

SEQ ID NO: 8684 - DNA, 30 bp, Artificial Sequence; identical to SEQ ID NO: 664
  Description of Artificial Sequence: Synthetic brazil nut; inner sequence

SEQ ID NO: 8685 - DNA, 30 bp, Artificial Sequence; identical to SEQ ID NO: 837
  Description of Artificial Sequence: Synthetic brazil nut; inner sequence

SEQ ID NO: 8686 - DNA, 30 bp, Artificial Sequence; identical to SEQ ID NO: 4611
  Description of Artificial Sequence: Synthetic brazil nut; inner sequence

SEQ ID NO: 8687 - DNA, 30 bp, Artificial Sequence; identical to SEQ ID NO: 300
  Description of Artificial Sequence: Synthetic brazil nut; inner sequence

SEQ ID NO: 8688 - DNA, 30 bp, Artificial Sequence; identical to SEQ ID NO: 979
  Description of Artificial Sequence: Synthetic brazil nut; inner sequence

SEQ ID NO: 8689 - DNA, 30 bp, Artificial Sequence; identical to SEQ ID NO: 398
  Description of Artificial Sequence: Synthetic brazil nut; inner sequence

SEQ ID NO: 8690 - DNA, 30 bp, Artificial Sequence; identical to SEQ ID NO: 4503
  Description of Artificial Sequence: Synthetic brazil nut; inner sequence

SEQ ID NO: 8691 - DNA, 30 bp, Artificial Sequence; identical to SEQ ID NO: 4707
  Description of Artificial Sequence: Synthetic brazil nut; inner sequence

SEQ ID NO: 8692 - DNA, 30 bp, Artificial Sequence; identical to SEQ ID NO: 635
  Description of Artificial Sequence: Synthetic brazil nut; inner sequence

SEQ ID NO: 8693 - DNA, 30 bp, Artificial Sequence; identical to SEQ ID NO: 4938
  Description of Artificial Sequence: Synthetic brazil nut; inner sequence

SEQ ID NO: 8694 - DNA, 30 bp, Artificial Sequence; identical to SEQ ID NO: 4939
  Description of Artificial Sequence: Synthetic brazil nut; inner sequence

SEQ ID NO: 8695 - DNA, 30 bp, Artificial Sequence; identical to SEQ ID NO: 5001
  Description of Artificial Sequence: Synthetic brazil nut; inner sequence

SEQ ID NO: 8696 - DNA, 30 bp, Artificial Sequence; identical to SEQ ID NO: 333
  Description of Artificial Sequence: Synthetic brazil nut; inner sequence

SEQ ID NO: 8697 - DNA, 30 bp, Artificial Sequence; identical to SEQ ID NO: 840
  Description of Artificial Sequence: Synthetic brazil nut; inner sequence

SEQ ID NO: 8698 - DNA, 30 bp, Artificial Sequence; identical to SEQ ID NO: 322
  Description of Artificial Sequence: Synthetic brazil nut; inner sequence

SEQ ID NO: 8699 - DNA, 30 bp, Artificial Sequence; identical to SEQ ID NO: 4999
  Description of Artificial Sequence: Synthetic brazil nut; inner sequence

SEQ ID NO: 8700 - DNA, 30 bp, Artificial Sequence; identical to SEQ ID NO: 4943
  Description of Artificial Sequence: Synthetic brazil nut; inner sequence

SEQ ID NO: 8701 - DNA, 30 bp, Artificial Sequence; identical to SEQ ID NO: 4898
  Description of Artificial Sequence: Synthetic brazil nut; inner sequence

SEQ ID NO: 8702 - DNA, 30 bp, Artificial Sequence; identical to SEQ ID NO: 580
  Description of Artificial Sequence: Synthetic brazil nut; inner sequence

SEQ ID NO: 8703 - DNA, 30 bp, Artificial Sequence; identical to SEQ ID NO: 691
  Description of Artificial Sequence: Synthetic brazil nut; inner sequence

SEQ ID NO: 8704 - DNA, 30 bp, Artificial Sequence; identical to SEQ ID NO: 4735
  Description of Artificial Sequence: Synthetic brazil nut; inner sequence

SEQ ID NO: 8705 - DNA, 30 bp, Artificial Sequence; identical to SEQ ID NO: 502
  Description of Artificial Sequence: Synthetic brazil nut; inner sequence

SEQ ID NO: 8706 - DNA, 30 bp, Artificial Sequence; identical to SEQ ID NO: 4933
  Description of Artificial Sequence: Synthetic brazil nut; inner sequence

SEQ ID NO: 8707 - DNA, 30 bp, Artificial Sequence; identical to SEQ ID NO: 917
  Description of Artificial Sequence: Synthetic brazil nut; inner sequence

SEQ ID NO: 8708 - DNA, 30 bp, Artificial Sequence; identical to SEQ ID NO: 601
  Description of Artificial Sequence: Synthetic brazil nut; inner sequence

SEQ ID NO: 8709 - DNA, 30 bp, Artificial Sequence; identical to SEQ ID NO: 788
  Description of Artificial Sequence: Synthetic brazil nut; inner sequence

SEQ ID NO: 8710 - DNA, 30 bp, Artificial Sequence; identical to SEQ ID NO: 4807
  Description of Artificial Sequence: Synthetic brazil nut; inner sequence

SEQ ID NO: 8711 - DNA, 30 bp, Artificial Sequence; identical to SEQ ID NO: 566
  Description of Artificial Sequence: Synthetic brazil nut; inner sequence

SEQ ID NO: 8712 - DNA, 30 bp, Artificial Sequence
  Description of Artificial Sequence: Synthetic brazil nut; inner sequence
gcattggacgatcgtgccctacacgtggcc

SEQ ID NO: 8713 - DNA, 30 bp, Artificial Sequence; identical to SEQ ID NO: 768
  Description of Artificial Sequence: Synthetic brazil nut; inner sequence

SEQ ID NO: 8714 - DNA, 30 bp, Artificial Sequence; identical to SEQ ID NO: 4956
  Description of Artificial Sequence: Synthetic brazil nut; inner sequence

SEQ ID NO: 8715 - DNA, 30 bp, Artificial Sequence; identical to SEQ ID NO: 249
  Description of Artificial Sequence: Synthetic brazil nut; inner sequence

SEQ ID NO: 8716 - DNA, 30 bp, Artificial Sequence; identical to SEQ ID NO: 4517
  Description of Artificial Sequence: Synthetic brazil nut; inner sequence

SEQ ID NO: 8717 - DNA, 30 bp, Artificial Sequence; identical to SEQ ID NO: 911
  Description of Artificial Sequence: Synthetic brazil nut; inner sequence

SEQ ID NO: 8718 - DNA, 30 bp, Artificial Sequence; identical to SEQ ID NO: 4737
  Description of Artificial Sequence: Synthetic brazil nut; inner sequence

SEQ ID NO: 8719 - DNA, 30 bp, Artificial Sequence; identical to SEQ ID NO: 4706
  Description of Artificial Sequence: Synthetic brazil nut; inner sequence

SEQ ID NO: 8720 - DNA, 30 bp, Artificial Sequence; identical to SEQ ID NO: 466
  Description of Artificial Sequence: Synthetic brazil nut; inner sequence

SEQ ID NO: 8721 - DNA, 30 bp, Artificial Sequence; identical to SEQ ID NO: 199
  Description of Artificial Sequence: Synthetic brazil nut; inner sequence

SEQ ID NO: 8722 - DNA, 30 bp, Artificial Sequence
  Description of Artificial Sequence: Synthetic brazil nut; inner sequence
catgcccatgccacgcacactgagcggtca

SEQ ID NO: 8723 - DNA, 30 bp, Artificial Sequence; identical to SEQ ID NO: 787
  Description of Artificial Sequence: Synthetic brazil nut; inner sequence

SEQ ID NO: 8724 - DNA, 30 bp, Artificial Sequence; identical to SEQ ID NO: 4985
  Description of Artificial Sequence: Synthetic brazil nut; inner sequence

SEQ ID NO: 8725 - DNA, 30 bp, Artificial Sequence; identical to SEQ ID NO: 4198
  Description of Artificial Sequence: Synthetic brazil nut; inner sequence

SEQ ID NO: 8726 - DNA, 30 bp, Artificial Sequence; identical to SEQ ID NO: 458
  Description of Artificial Sequence: Synthetic brazil nut; inner sequence

SEQ ID NO: 8727 - DNA, 31 bp, Artificial Sequence; identical to SEQ ID NO: 216
  Description of Artificial Sequence: Synthetic brazil nut; inner sequence

SEQ ID NO: 8728 - DNA, 30 bp, Artificial Sequence; identical to SEQ ID NO: 4884
  Description of Artificial Sequence: Synthetic brazil nut; inner sequence

SEQ ID NO: 8729 - DNA, 30 bp, Artificial Sequence; identical to SEQ ID NO: 318
  Description of Artificial Sequence: Synthetic brazil nut; inner sequence

SEQ ID NO: 8730 - DNA, 30 bp, Artificial Sequence; identical to SEQ ID NO: 4576
  Description of Artificial Sequence: Synthetic brazil nut; inner sequence

SEQ ID NO: 8731 - DNA, 30 bp, Artificial Sequence; identical to SEQ ID NO: 834
  Description of Artificial Sequence: Synthetic brazil nut; inner sequence

SEQ ID NO: 8732 - DNA, 30 bp, Artificial Sequence; identical to SEQ ID NO: 521
  Description of Artificial Sequence: Synthetic brazil nut; inner sequence

SEQ ID NO: 8733 - DNA, 30 bp, Artificial Sequence; identical to SEQ ID NO: 4719
  Description of Artificial Sequence: Synthetic brazil nut; inner sequence

SEQ ID NO: 8734 - DNA, 30 bp, Artificial Sequence; identical to SEQ ID NO: 4641
  Description of Artificial Sequence: Synthetic brazil nut; inner sequence

SEQ ID NO: 8735 - DNA, 30 bp, Artificial Sequence; identical to SEQ ID NO: 456
  Description of Artificial Sequence: Synthetic brazil nut; inner sequence

SEQ ID NO: 8736 - DNA, 30 bp, Artificial Sequence; identical to SEQ ID NO: 500
  Description of Artificial Sequence: Synthetic brazil nut; inner sequence

SEQ ID NO: 8737 - DNA, 30 bp, Artificial Sequence; identical to SEQ ID NO: 751
  Description of Artificial Sequence: Synthetic brazil nut; inner sequence

SEQ ID NO: 8738 - DNA, 30 bp, Artificial Sequence; identical to SEQ ID NO: 705
  Description of Artificial Sequence: Synthetic brazil nut; inner sequence

SEQ ID NO: 8739 - DNA, 30 bp, Artificial Sequence; identical to SEQ ID NO: 4981
  Description of Artificial Sequence: Synthetic brazil nut; inner sequence

SEQ ID NO: 8740 - DNA, 30 bp, Artificial Sequence; identical to SEQ ID NO: 773
  Description of Artificial Sequence: Synthetic brazil nut; inner sequence

SEQ ID NO: 8741 - DNA, 30 bp, Artificial Sequence; identical to SEQ ID NO: 4960
  Description of Artificial Sequence: Synthetic brazil nut; inner sequence

SEQ ID NO: 8742 - DNA, 30 bp, Artificial Sequence; identical to SEQ ID NO: 980
  Description of Artificial Sequence: Synthetic brazil nut; inner sequence

SEQ ID NO: 8743 - DNA, 30 bp, Artificial Sequence; identical to SEQ ID NO: 702
  Description of Artificial Sequence: Synthetic brazil nut; inner sequence

SEQ ID NO: 8744 - DNA, 30 bp, Artificial Sequence; identical to SEQ ID NO: 4616
  Description of Artificial Sequence: Synthetic brazil nut; inner sequence

SEQ ID NO: 8745 - DNA, 30 bp, Artificial Sequence; identical to SEQ ID NO: 4930
  Description of Artificial Sequence: Synthetic brazil nut; inner sequence

SEQ ID NO: 8746 - DNA, 30 bp, Artificial Sequence; identical to SEQ ID NO: 4816
  Description of Artificial Sequence: Synthetic brazil nut; inner sequence

SEQ ID NO: 8747 - DNA, 30 bp, Artificial Sequence; identical to SEQ ID NO: 4913
  Description of Artificial Sequence: Synthetic brazil nut; inner sequence

SEQ ID NO: 8748 - DNA, 30 bp, Artificial Sequence
  Description of Artificial Sequence: Synthetic brazil nut; inner sequence
gttacgcagcggacctggtgttcatgcaca

SEQ ID NO: 8749 - DNA, 30 bp, Artificial Sequence; identical to SEQ ID NO: 943
  Description of Artificial Sequence: Synthetic brazil nut; inner sequence

SEQ ID NO: 8750 - DNA, 30 bp, Artificial Sequence; identical to SEQ ID NO: 813
  Description of Artificial Sequence: Synthetic brazil nut; inner sequence

SEQ ID NO: 8751 - DNA, 30 bp, Artificial Sequence; identical to SEQ ID NO: 4526
  Description of Artificial Sequence: Synthetic brazil nut; inner sequence

SEQ ID NO: 8752 - DNA, 30 bp, Artificial Sequence
  Description of Artificial Sequence: Synthetic brazil nut; inner sequence
gtcgtgcggatcgctacacgtggccgtgga

SEQ ID NO: 8753 - DNA, 30 bp, Artificial Sequence; identical to SEQ ID NO: 4744
  Description of Artificial Sequence: Synthetic brazil nut; inner sequence

SEQ ID NO: 8754 - DNA, 30 bp, Artificial Sequence; identical to SEQ ID NO: 4776
  Description of Artificial Sequence: Synthetic brazil nut; inner sequence

SEQ ID NO: 8755 - DNA, 30 bp, Artificial Sequence; identical to SEQ ID NO: 4745
  Description of Artificial Sequence: Synthetic brazil nut; inner sequence

SEQ ID NO: 8756 - DNA, 30 bp, Artificial Sequence
  Description of Artificial Sequence: Synthetic brazil nut; inner sequence
cgacacgcaagtaggctacgtacacgtcac

SEQ ID NO: 8757 - DNA, 30 bp, Artificial Sequence; identical to SEQ ID NO: 515
  Description of Artificial Sequence: Synthetic brazil nut; inner sequence

SEQ ID NO: 8758 - DNA, 30 bp, Artificial Sequence
  Description of Artificial Sequence: Synthetic brazil nut; inner sequence
cgcaccgcatgacggacgtgggactgcgct

SEQ ID NO: 8759 - DNA, 30 bp, Artificial Sequence; identical to SEQ ID NO: 763
  Description of Artificial Sequence: Synthetic brazil nut; inner sequence

SEQ ID NO: 8760 - DNA, 30 bp, Artificial Sequence; identical to SEQ ID NO: 4384
  Description of Artificial Sequence: Synthetic brazil nut; inner sequence

SEQ ID NO: 8761 - DNA, 30 bp, Artificial Sequence; identical to SEQ ID NO: 906
  Description of Artificial Sequence: Synthetic brazil nut; inner sequence

SEQ ID NO: 8762 - DNA, 30 bp, Artificial Sequence; identical to SEQ ID NO: 497
  Description of Artificial Sequence: Synthetic brazil nut; inner sequence

SEQ ID NO: 8763 - DNA, 30 bp, Artificial Sequence
  Description of Artificial Sequence: Synthetic brazil nut; inner sequence
cgatgcgaaccggaagtgcatgtcgccagc

SEQ ID NO: 8764 - DNA, 30 bp, Artificial Sequence; identical to SEQ ID NO: 252
  Description of Artificial Sequence: Synthetic brazil nut; inner sequence

SEQ ID NO: 8765 - DNA, 30 bp, Artificial Sequence; identical to SEQ ID NO: 621
  Description of Artificial Sequence: Synthetic brazil nut; inner sequence

SEQ ID NO: 8766 - DNA, 30 bp, Artificial Sequence; identical to SEQ ID NO: 960
  Description of Artificial Sequence: Synthetic brazil nut; inner sequence

SEQ ID NO: 8767 - DNA, 30 bp, Artificial Sequence
  Description of Artificial Sequence: Synthetic brazil nut; inner sequence
ggacgcagcttgcctactggcggtcacgta

SEQ ID NO: 8768 - DNA, 30 bp, Artificial Sequence; identical to SEQ ID NO: 676
  Description of Artificial Sequence: Synthetic brazil nut; inner sequence

SEQ ID NO: 8769 - DNA, 30 bp, Artificial Sequence
  Description of Artificial Sequence: Synthetic brazil nut; inner sequence
ggacgcagcttgcctactggtgttcacgta

SEQ ID NO: 8770 - DNA, 30 bp, Artificial Sequence
  Description of Artificial Sequence: Synthetic brazil nut; inner sequence
ggaccaaagcgaacgtggacgtacgacgca

SEQ ID NO: 8771 - DNA, 30 bp, Artificial Sequence; identical to SEQ ID NO: 4740
  Description of Artificial Sequence: Synthetic brazil nut; inner sequence

SEQ ID NO: 8772 - DNA, 30 bp, Artificial Sequence; identical to SEQ ID NO: 4953
  Description of Artificial Sequence: Synthetic brazil nut; inner sequence

SEQ ID NO: 8773 - DNA, 30 bp, Artificial Sequence; identical to SEQ ID NO: 4694
  Description of Artificial Sequence: Synthetic brazil nut; inner sequence

SEQ ID NO: 8774 - DNA, 30 bp, Artificial Sequence; identical to SEQ ID NO: 670
  Description of Artificial Sequence: Synthetic brazil nut; inner sequence

SEQ ID NO: 8775 - DNA, 30 bp, Artificial Sequence; identical to SEQ ID NO: 4742
  Description of Artificial Sequence: Synthetic brazil nut; inner sequence

SEQ ID NO: 8776 - DNA, 28 bp, Artificial Sequence
  Description of Artificial Sequence: Synthetic brazil nut; inner sequence
ggcatgcacgcacctacacgtgatcatg

SEQ ID NO: 8777 - DNA, 30 bp, Artificial Sequence; identical to SEQ ID NO: 4700
  Description of Artificial Sequence: Synthetic brazil nut; inner sequence

SEQ ID NO: 8778 - DNA, 30 bp, Artificial Sequence; identical to SEQ ID NO: 4381
  Description of Artificial Sequence: Synthetic brazil nut; inner sequence

SEQ ID NO: 8779 - DNA, 30 bp, Artificial Sequence; identical to SEQ ID NO: 4859
  Description of Artificial Sequence: Synthetic brazil nut; inner sequence

SEQ ID NO: 8780 - DNA, 30 bp, Artificial Sequence; identical to SEQ ID NO: 449
  Description of Artificial Sequence: Synthetic brazil nut; inner sequence

SEQ ID NO: 8781 - DNA, 30 bp, Artificial Sequence; identical to SEQ ID NO: 1002
  Description of Artificial Sequence: Synthetic brazil nut; inner sequence

SEQ ID NO: 8782 - DNA, 30 bp, Artificial Sequence
  Description of Artificial Sequence: Synthetic brazil nut; inner sequence
gcacgactcgcactctatcatgaggccatg

SEQ ID NO: 8783 - DNA, 30 bp, Artificial Sequence; identical to SEQ ID NO: 849
  Description of Artificial Sequence: Synthetic brazil nut; inner sequence

SEQ ID NO: 8784 - DNA, 30 bp, Artificial Sequence; identical to SEQ ID NO: 629
  Description of Artificial Sequence: Synthetic brazil nut; inner sequence

SEQ ID NO: 8785 - DNA, 30 bp, Artificial Sequence; identical to SEQ ID NO: 263
  Description of Artificial Sequence: Synthetic brazil nut; inner sequence

SEQ ID NO: 8786 - DNA, 30 bp, Artificial Sequence; identical to SEQ ID NO: 4520
  Description of Artificial Sequence: Synthetic brazil nut; inner sequence

SEQ ID NO: 8787 - DNA, 30 bp, Artificial Sequence
  Description of Artificial Sequence: Synthetic brazil nut; inner sequence
gcaatgcgtgtcacgaacttgccgttgggc

SEQ ID NO: 8788 - DNA, 30 bp, Artificial Sequence; identical to SEQ ID NO: 920
  Description of Artificial Sequence: Synthetic brazil nut; inner sequence

SEQ ID NO: 8789 - DNA, 30 bp, Artificial Sequence; identical to SEQ ID NO: 4575
  Description of Artificial Sequence: Synthetic brazil nut; inner sequence

SEQ ID NO: 8790 - DNA, 30 bp, Artificial Sequence; identical to SEQ ID NO: 650
  Description of Artificial Sequence: Synthetic brazil nut; inner sequence

SEQ ID NO: 8791 - DNA, 30 bp, Artificial Sequence; identical to SEQ ID NO: 830
  Description of Artificial Sequence: Synthetic brazil nut; inner sequence

SEQ ID NO: 8792 - DNA, 30 bp, Artificial Sequence
  Description of Artificial Sequence: Synthetic brazil nut; inner sequence
ggcacggtgcgtccctaactcatgtggaca

SEQ ID NO: 8793 - DNA, 30 bp, Artificial Sequence; identical to SEQ ID NO: 505
  Description of Artificial Sequence: Synthetic brazil nut; inner sequence

SEQ ID NO: 8794 - DNA, 30 bp, Artificial Sequence; identical to SEQ ID NO: 701
  Description of Artificial Sequence: Synthetic brazil nut; inner sequence

SEQ ID NO: 8795 - DNA, 30 bp, Artificial Sequence; identical to SEQ ID NO: 4940
  Description of Artificial Sequence: Synthetic brazil nut; inner sequence

SEQ ID NO: 8796 - DNA, 30 bp, Artificial Sequence; identical to SEQ ID NO: 4743
  Description of Artificial Sequence: Synthetic brazil nut; inner sequence

SEQ ID NO: 8797 - DNA, 30 bp, Artificial Sequence; identical to SEQ ID NO: 4856
  Description of Artificial Sequence: Synthetic brazil nut; inner sequence

SEQ ID NO: 8798 - DNA, 30 bp, Artificial Sequence
  Description of Artificial Sequence: Synthetic brazil nut; inner sequence
gcacgactcgcaccctatcatgaggctatg

SEQ ID NO: 8799 - DNA, 30 bp, Artificial Sequence; identical to SEQ ID NO: 4867
  Description of Artificial Sequence: Synthetic brazil nut; inner sequence

SEQ ID NO: 8800 - DNA, 30 bp, Artificial Sequence; identical to SEQ ID NO: 668
  Description of Artificial Sequence: Synthetic brazil nut; inner sequence

SEQ ID NO: 8801 - DNA, 30 bp, Artificial Sequence
  Description of Artificial Sequence: Synthetic brazil nut; inner sequence
cgtgcgatgaccaagtggcgatgctacacg

SEQ ID NO: 8802 - DNA, 30 bp, Artificial Sequence; identical to SEQ ID NO: 4889
  Description of Artificial Sequence: Synthetic brazil nut; inner sequence

SEQ ID NO: 8803 - DNA, 30 bp, Artificial Sequence; identical to SEQ ID NO: 772
  Description of Artificial Sequence: Synthetic brazil nut; inner sequence

SEQ ID NO: 8804 - DNA, 30 bp, Artificial Sequence
  Description of Artificial Sequence: Synthetic brazil nut; inner sequence
gtcatgcggaccgaactggatgtgtgcatg

SEQ ID NO: 8805 - DNA, 30 bp, Artificial Sequence; identical to SEQ ID NO: 330
  Description of Artificial Sequence: Synthetic brazil nut; inner sequence

SEQ ID NO: 8806 - DNA, 30 bp, Artificial Sequence; identical to SEQ ID NO: 4802
  Description of Artificial Sequence: Synthetic brazil nut; inner sequence

SEQ ID NO: 8807 - DNA, 30 bp, Artificial Sequence
  Description of Artificial Sequence: Synthetic brazil nut; inner sequence
ggacgcatcgccccttcgagtggacaggca

SEQ ID NO: 8808 - DNA, 30 bp, Artificial Sequence; identical to SEQ ID NO: 962
  Description of Artificial Sequence: Synthetic brazil nut; inner sequence

SEQ ID NO: 8809 - DNA, 30 bp, Artificial Sequence; identical to SEQ ID NO: 357
  Description of Artificial Sequence: Synthetic brazil nut; inner sequence

SEQ ID NO: 8810 - DNA, 30 bp, Artificial Sequence
  Description of Artificial Sequence: Synthetic brazil nut; inner sequence
gcacgactcgcaccctatcatgaggacatg

SEQ ID NO: 8811 - DNA, 30 bp, Artificial Sequence; identical to SEQ ID NO: 4874
  Description of Artificial Sequence: Synthetic brazil nut; inner sequence

SEQ ID NO: 8812 - DNA, 30 bp, Artificial Sequence; identical to SEQ ID NO: 679
  Description of Artificial Sequence: Synthetic brazil nut; inner sequence

SEQ ID NO: 8813 - DNA, 30 bp, Artificial Sequence; identical to SEQ ID NO: 4935
  Description of Artificial Sequence: Synthetic brazil nut; inner sequence

SEQ ID NO: 8814 - DNA, 30 bp, Artificial Sequence; identical to SEQ ID NO: 4886
  Description of Artificial Sequence: Synthetic brazil nut; inner sequence

SEQ ID NO: 8815 - DNA, 30 bp, Artificial Sequence; identical to SEQ ID NO: 417
  Description of Artificial Sequence: Synthetic brazil nut; inner sequence

SEQ ID NO: 8816 - DNA, 30 bp, Artificial Sequence
  Description of Artificial Sequence: Synthetic brazil nut; inner sequence
cgcgcaccgacaacgtgcaggcactacggc

SEQ ID NO: 8817 - DNA, 30 bp, Artificial Sequence; identical to SEQ ID NO: 644
  Description of Artificial Sequence: Synthetic brazil nut; inner sequence

SEQ ID NO: 8818 - DNA, 30 bp, Artificial Sequence; identical to SEQ ID NO: 4591
  Description of Artificial Sequence: Synthetic brazil nut; inner sequence

SEQ ID NO: 8819 - DNA, 30 bp, Artificial Sequence; identical to SEQ ID NO: 4470
  Description of Artificial Sequence: Synthetic brazil nut; inner sequence

SEQ ID NO: 8820 - DNA, 30 bp, Artificial Sequence; identical to SEQ ID NO: 685
  Description of Artificial Sequence: Synthetic brazil nut; inner sequence

SEQ ID NO: 8821 - DNA, 30 bp, Artificial Sequence; identical to SEQ ID NO: 4893
  Description of Artificial Sequence: Synthetic brazil nut; inner sequence

SEQ ID NO: 8822 - DNA, 30 bp, Artificial Sequence; identical to SEQ ID NO: 4817
  Description of Artificial Sequence: Synthetic brazil nut; inner sequence

SEQ ID NO: 8823 - DNA, 30 bp, Artificial Sequence; identical to SEQ ID NO: 4634
  Description of Artificial Sequence: Synthetic brazil nut; inner sequence

SEQ ID NO: 8824 - DNA, 30 bp, Artificial Sequence
  Description of Artificial Sequence: Synthetic brazil nut; inner sequence
cacgatccgacaaggcgtgacgtggccatg

SEQ ID NO: 8825 - DNA, 30 bp, Artificial Sequence
  Description of Artificial Sequence: Synthetic brazil nut; inner sequence
gtggttcgcagcccgttcaagtcaggcatg

SEQ ID NO: 8826 - DNA, 30 bp, Artificial Sequence
  Description of Artificial Sequence: Synthetic brazil nut; inner sequence
gcgatgcagcaccgtaacgaccagcgtgga

SEQ ID NO: 8827 - DNA, 30 bp, Artificial Sequence; identical to SEQ ID NO: 4837
  Description of Artificial Sequence: Synthetic brazil nut; inner sequence

SEQ ID NO: 8828 - DNA, 30 bp, Artificial Sequence; identical to SEQ ID NO: 4988
  Description of Artificial Sequence: Synthetic brazil nut; inner sequence

SEQ ID NO: 8829 - DNA, 30 bp, Artificial Sequence; identical to SEQ ID NO: 592
  Description of Artificial Sequence: Synthetic brazil nut; inner sequence

SEQ ID NO: 8830 - DNA, 30 bp, Artificial Sequence; identical to SEQ ID NO: 942
  Description of Artificial Sequence: Synthetic brazil nut; inner sequence

SEQ ID NO: 8831 - DNA, 30 bp, Artificial Sequence; identical to SEQ ID NO: 4688
  Description of Artificial Sequence: Synthetic brazil nut; inner sequence

SEQ ID NO: 8832 - DNA, 30 bp, Artificial Sequence; identical to SEQ ID NO: 1001
  Description of Artificial Sequence: Synthetic brazil nut; inner sequence

SEQ ID NO: 8833 - DNA, 30 bp, Artificial Sequence; identical to SEQ ID NO: 662
  Description of Artificial Sequence: Synthetic brazil nut; inner sequence

SEQ ID NO: 8834 - DNA, 30 bp, Artificial Sequence; identical to SEQ ID NO: 913
  Description of Artificial Sequence: Synthetic brazil nut; inner sequence

SEQ ID NO: 8835 - DNA, 30 bp, Artificial Sequence; identical to SEQ ID NO: 4620
  Description of Artificial Sequence: Synthetic brazil nut; inner sequence

SEQ ID NO: 8836 - DNA, 30 bp, Artificial Sequence; identical to SEQ ID NO: 4621
  Description of Artificial Sequence: Synthetic brazil nut; inner sequence

SEQ ID NO: 8837 - DNA, 30 bp, Artificial Sequence
  Description of Artificial Sequence: Synthetic brazil nut; inner sequence
gtgcaacacgacctagcaagtgagctggca

SEQ ID NO: 8838 - DNA, 30 bp, Artificial Sequence; identical to SEQ ID NO: 961
  Description of Artificial Sequence: Synthetic brazil nut; inner sequence

SEQ ID NO: 8839 - DNA, 30 bp, Artificial Sequence; identical to SEQ ID NO: 435
  Description of Artificial Sequence: Synthetic brazil nut; inner sequence

SEQ ID NO: 8840 - DNA, 30 bp, Artificial Sequence; identical to SEQ ID NO: 832
  Description of Artificial Sequence: Synthetic brazil nut; inner sequence

SEQ ID NO: 8841 - DNA, 30 bp, Artificial Sequence; identical to SEQ ID NO: 4822
  Description of Artificial Sequence: Synthetic brazil nut; inner sequence

SEQ ID NO: 8842 - DNA, 30 bp, Artificial Sequence; identical to SEQ ID NO: 734
  Description of Artificial Sequence: Synthetic brazil nut; inner sequence

SEQ ID NO: 8843 - DNA, 30 bp, Artificial Sequence; identical to SEQ ID NO: 4713
  Description of Artificial Sequence: Synthetic brazil nut; inner sequence

SEQ ID NO: 8844 - DNA, 30 bp, Artificial Sequence
  Description of Artificial Sequence: Synthetic brazil nut; inner sequence
ggcacgcactcgattcgccttcacgtggtt

SEQ ID NO: 8845 - DNA, 30 bp, Artificial Sequence; identical to SEQ ID NO: 626
  Description of Artificial Sequence: Synthetic brazil nut; inner sequence

SEQ ID NO: 8846 - DNA, 30 bp, Artificial Sequence; identical to SEQ ID NO: 474
  Description of Artificial Sequence: Synthetic brazil nut; inner sequence

SEQ ID NO: 8847 - DNA, 30 bp, Artificial Sequence; identical to SEQ ID NO: 482
  Description of Artificial Sequence: Synthetic brazil nut; inner sequence

SEQ ID NO: 8848 - DNA, 30 bp, Artificial Sequence; identical to SEQ ID NO: 547
  Description of Artificial Sequence: Synthetic brazil nut; inner sequence

SEQ ID NO: 8849 - DNA, 30 bp, Artificial Sequence; identical to SEQ ID NO: 424
  Description of Artificial Sequence: Synthetic brazil nut; inner sequence

SEQ ID NO: 8850 - DNA, 30 bp, Artificial Sequence
  Description of Artificial Sequence: Synthetic brazil nut; inner sequence
ggacagcaatgaccgatcaggtggcgtgga

SEQ ID NO: 8851 - DNA, 30 bp, Artificial Sequence; identical to SEQ ID NO: 101
  Description of Artificial Sequence: Synthetic brazil nut; inner sequence

SEQ ID NO: 8852 - DNA, 30 bp, Artificial Sequence; identical to SEQ ID NO: 472
  Description of Artificial Sequence: Synthetic brazil nut; inner sequence

SEQ ID NO: 8853 - DNA, 30 bp, Artificial Sequence; identical to SEQ ID NO: 4690
  Description of Artificial Sequence: Synthetic brazil nut; inner sequence

SEQ ID NO: 8854 - DNA, 30 bp, Artificial Sequence; identical to SEQ ID NO: 4555
  Description of Artificial Sequence: Synthetic brazil nut; inner sequence

SEQ ID NO: 8855 - DNA, 30 bp, Artificial Sequence
  Description of Artificial Sequence: Synthetic brazil nut; inner sequence
acatgccagtgggtacgtcgctgtgccaca

SEQ ID NO: 8856 - DNA, 30 bp, Artificial Sequence; identical to SEQ ID NO: 4835
  Description of Artificial Sequence: Synthetic brazil nut; inner sequence

SEQ ID NO: 8857 - DNA, 30 bp, Artificial Sequence; identical to SEQ ID NO: 4949
  Description of Artificial Sequence: Synthetic brazil nut; inner sequence

SEQ ID NO: 8858 - DNA, 30 bp, Artificial Sequence; identical to SEQ ID NO: 4774
  Description of Artificial Sequence: Synthetic brazil nut; inner sequence

SEQ ID NO: 8859 - DNA, 30 bp, Artificial Sequence; identical to SEQ ID NO: 948
  Description of Artificial Sequence: Synthetic brazil nut; inner sequence

SEQ ID NO: 8860 - DNA, 30 bp, Artificial Sequence
  Description of Artificial Sequence: Synthetic brazil nut; inner sequence
gacgcgtgctcccgtagacaacgtgtgtca

SEQ ID NO: 8861 - DNA, 30 bp, Artificial Sequence; identical to SEQ ID NO: 479
  Description of Artificial Sequence: Synthetic brazil nut; inner sequence

SEQ ID NO: 8862 - DNA, 30 bp, Artificial Sequence; identical to SEQ ID NO: 4987
  Description of Artificial Sequence: Synthetic brazil nut; inner sequence

SEQ ID NO: 8863 - DNA, 30 bp, Artificial Sequence; identical to SEQ ID NO: 4845
  Description of Artificial Sequence: Synthetic brazil nut; inner sequence

SEQ ID NO: 8864 - DNA, 29 bp, Artificial Sequence
  Description of Artificial Sequence: Synthetic brazil nut; inner sequence
gtcatgccatcccttcgagtgtgcaggta

SEQ ID NO: 8865 - DNA, 30 bp, Artificial Sequence; identical to SEQ ID NO: 646
  Description of Artificial Sequence: Synthetic brazil nut; inner sequence

SEQ ID NO: 8866 - DNA, 30 bp, Artificial Sequence; identical to SEQ ID NO: 4894
  Description of Artificial Sequence: Synthetic brazil nut; inner sequence

SEQ ID NO: 8867 - DNA, 30 bp, Artificial Sequence; identical to SEQ ID NO: 302
  Description of Artificial Sequence: Synthetic brazil nut; inner sequence

SEQ ID NO: 8868 - DNA, 30 bp, Artificial Sequence
  Description of Artificial Sequence: Synthetic brazil nut; inner sequence
ggcatgccatcccttcgagtgtgacaggta

SEQ ID NO: 8869 - DNA, 30 bp, Artificial Sequence
  Description of Artificial Sequence: Synthetic brazil nut; inner sequence
gcgcatgaactgaccctacaatgtgcggca

SEQ ID NO: 8870 - DNA, 29 bp, Artificial Sequence
  Description of Artificial Sequence: Synthetic brazil nut; inner sequence
ggcctgcgatggatgtggacgtacgtggc

SEQ ID NO: 8871 - DNA, 30 bp, Artificial Sequence
  Description of Artificial Sequence: Synthetic brazil nut; inner sequence
ggctgccgtgaccctagctggtgcgtcgtg

SEQ ID NO: 8872 - DNA, 30 bp, Artificial Sequence
  Description of Artificial Sequence: Synthetic brazil nut; inner sequence
gccatgccatcccttcgagtgtgacaggta

SEQ ID NO: 8873 - DNA, 30 bp, Artificial Sequence; identical to SEQ ID NO: 492
  Description of Artificial Sequence: Synthetic brazil nut; inner sequence

SEQ ID NO: 8874 - DNA, 30 bp, Artificial Sequence; identical to SEQ ID NO: 514
  Description of Artificial Sequence: Synthetic brazil nut; inner sequence

SEQ ID NO: 8875 - DNA, 30 bp, Artificial Sequence; identical to SEQ ID NO: 4801
  Description of Artificial Sequence: Synthetic brazil nut; inner sequence

SEQ ID NO: 8876 - DNA, 30 bp, Artificial Sequence
  Description of Artificial Sequence: Synthetic brazil nut; inner sequence
gtcatgccatcccttcgagtgggacaggta

SEQ ID NO: 8877 - DNA, 30 bp, Artificial Sequence
  Description of Artificial Sequence: Synthetic brazil nut; inner sequence
gtgttgcgatgagctgctggtggacacgta

SEQ ID NO: 8878 - DNA, 30 bp, Artificial Sequence; identical to SEQ ID NO: 756
  Description of Artificial Sequence: Synthetic brazil nut; inner sequence

SEQ ID NO: 8879 - DNA, 30 bp, Artificial Sequence
  Description of Artificial Sequence: Synthetic brazil nut; inner sequence
cacatcaacgtccgccgcgatgacgtggtt

SEQ ID NO: 8880 - DNA, 30 bp, Artificial Sequence; identical to SEQ ID NO: 698
  Description of Artificial Sequence: Synthetic brazil nut; inner sequence

SEQ ID NO: 8881 - DNA, 30 bp, Artificial Sequence; identical to SEQ ID NO: 742
  Description of Artificial Sequence: Synthetic brazil nut; inner sequence

SEQ ID NO: 8882 - DNA, 30 bp, Artificial Sequence; identical to SEQ ID NO: 4728
  Description of Artificial Sequence: Synthetic brazil nut; inner sequence

SEQ ID NO: 8883 - DNA, 30 bp, Artificial Sequence; identical to SEQ ID NO: 802
  Description of Artificial Sequence: Synthetic brazil nut; inner sequence

SEQ ID NO: 8884 - DNA, 30 bp, Artificial Sequence
  Description of Artificial Sequence: Synthetic brazil nut; inner sequence
ccgtagcgacatcaagcggtggcgtgcgcg

SEQ ID NO: 8885 - DNA, 30 bp, Artificial Sequence; identical to SEQ ID NO: 4931
  Description of Artificial Sequence: Synthetic brazil nut; inner sequence

SEQ ID NO: 8886 - DNA, 30 bp, Artificial Sequence; identical to SEQ ID NO: 597
  Description of Artificial Sequence: Synthetic brazil nut; inner sequence

SEQ ID NO: 8887 - DNA, 30 bp, Artificial Sequence; identical to SEQ ID NO: 863
  Description of Artificial Sequence: Synthetic brazil nut; inner sequence

SEQ ID NO: 8888 - DNA, 30 bp, Artificial Sequence; identical to SEQ ID NO: 4339
  Description of Artificial Sequence: Synthetic brazil nut; inner sequence

SEQ ID NO: 8889 - DNA, 30 bp, Artificial Sequence
  Description of Artificial Sequence: Synthetic brazil nut; inner sequence
gtacacaacggacctacacgtggcgcatgt

SEQ ID NO: 8890 - DNA, 30 bp, Artificial Sequence; identical to SEQ ID NO: 4736
  Description of Artificial Sequence: Synthetic brazil nut; inner sequence

SEQ ID NO: 8891 - DNA, 30 bp, Artificial Sequence
  Description of Artificial Sequence: Synthetic brazil nut; inner sequence
cgcaccgagagcgatcgtggttcgcagtca

SEQ ID NO: 8892 - DNA, 30 bp, Artificial Sequence
  Description of Artificial Sequence: Synthetic brazil nut; inner sequence
gcactgagcgtacgtatcagctggcacgta

SEQ ID NO: 8893 - DNA, 29 bp, Artificial Sequence
  Description of Artificial Sequence: Synthetic brazil nut; inner sequence
gtgcaaacggaccgacaagtgcgcatgga

SEQ ID NO: 8894 - DNA, 30 bp, Artificial Sequence; identical to SEQ ID NO: 929
  Description of Artificial Sequence: Synthetic brazil nut; inner sequence

SEQ ID NO: 8895 - DNA, 30 bp, Artificial Sequence; identical to SEQ ID NO: 931
  Description of Artificial Sequence: Synthetic brazil nut; inner sequence

SEQ ID NO: 8896 - DNA, 30 bp, Artificial Sequence; identical to SEQ ID NO: 955
  Description of Artificial Sequence: Synthetic brazil nut; inner sequence

SEQ ID NO: 8897 - DNA, 30 bp, Artificial Sequence
  Description of Artificial Sequence: Synthetic brazil nut; inner sequence
cacgtgacgaacgtgagcctagcggtgatg

SEQ ID NO: 8898 - DNA, 30 bp, Artificial Sequence; identical to SEQ ID NO: 729
  Description of Artificial Sequence: Synthetic brazil nut; inner sequence

SEQ ID NO: 8899 - DNA, 30 bp, Artificial Sequence; identical to SEQ ID NO: 4715
  Description of Artificial Sequence: Synthetic brazil nut; inner sequence

SEQ ID NO: 8900 - DNA, 30 bp, Artificial Sequence; identical to SEQ ID NO: 678
  Description of Artificial Sequence: Synthetic brazil nut; inner sequence

SEQ ID NO: 8901 - DNA, 30 bp, Artificial Sequence; identical to SEQ ID NO: 4958
  Description of Artificial Sequence: Synthetic brazil nut; inner sequence

SEQ ID NO: 8902 - DNA, 30 bp, Artificial Sequence
  Description of Artificial Sequence: Synthetic brazil nut; inner sequence
tcacgcaagggcaggcatactcgtcgcaca

SEQ ID NO: 8903 - DNA, 30 bp, Artificial Sequence; identical to SEQ ID NO: 4785
  Description of Artificial Sequence: Synthetic brazil nut; inner sequence

SEQ ID NO: 8904 - DNA, 30 bp, Artificial Sequence; identical to SEQ ID NO: 415
  Description of Artificial Sequence: Synthetic brazil nut; inner sequence

SEQ ID NO: 8905 - DNA, 30 bp, Artificial Sequence; identical to SEQ ID NO: 4924
  Description of Artificial Sequence: Synthetic brazil nut; inner sequence

SEQ ID NO: 8906 - DNA, 30 bp, Artificial Sequence; identical to SEQ ID NO: 713
  Description of Artificial Sequence: Synthetic brazil nut; inner sequence

SEQ ID NO: 8907 - DNA, 30 bp, Artificial Sequence
  Description of Artificial Sequence: Synthetic brazil nut; inner sequence
ggccagagcgaccctacacgtgggcacgta

SEQ ID NO: 8908 - DNA, 30 bp, Artificial Sequence; identical to SEQ ID NO: 782
  Description of Artificial Sequence: Synthetic brazil nut; inner sequence

SEQ ID NO: 8909 - DNA, 30 bp, Artificial Sequence
  Description of Artificial Sequence: Synthetic brazil nut; inner sequence
gcacgcagctgccctgtcgtggtcgaggtg

SEQ ID NO: 8910 - DNA, 30 bp, Artificial Sequence
  Description of Artificial Sequence: Synthetic brazil nut; inner sequence
gtcattccgcctcctacacgtgggcacgta

SEQ ID NO: 8911 - DNA, 30 bp, Artificial Sequence; identical to SEQ ID NO: 624
  Description of Artificial Sequence: Synthetic brazil nut; inner sequence

SEQ ID NO: 8912 - DNA, 30 bp, Artificial Sequence; identical to SEQ ID NO: 4708
  Description of Artificial Sequence: Synthetic brazil nut; inner sequence

SEQ ID NO: 8913 - DNA, 30 bp, Artificial Sequence; identical to SEQ ID NO: 4829
  Description of Artificial Sequence: Synthetic brazil nut; inner sequence

SEQ ID NO: 8914 - DNA, 30 bp, Artificial Sequence; identical to SEQ ID NO: 512
  Description of Artificial Sequence: Synthetic brazil nut; inner sequence

SEQ ID NO: 8915 - DNA, 30 bp, Artificial Sequence; identical to SEQ ID NO: 4878
  Description of Artificial Sequence: Synthetic brazil nut; inner sequence

SEQ ID NO: 8916 - DNA, 30 bp, Artificial Sequence; identical to SEQ ID NO: 898
  Description of Artificial Sequence: Synthetic brazil nut; inner sequence

SEQ ID NO: 8917 - DNA, 30 bp, Artificial Sequence; identical to SEQ ID NO: 4918
  Description of Artificial Sequence: Synthetic brazil nut; inner sequence

SEQ ID NO: 8918 - DNA, 30 bp, Artificial Sequence; identical to SEQ ID NO: 939
  Description of Artificial Sequence: Synthetic brazil nut; inner sequence

SEQ ID NO: 8919 - DNA, 30 bp, Artificial Sequence; identical to SEQ ID NO: 4617
  Description of Artificial Sequence: Synthetic brazil nut; inner sequence

SEQ ID NO: 8920 - DNA, 30 bp, Artificial Sequence; identical to SEQ ID NO: 949
  Description of Artificial Sequence: Synthetic brazil nut; inner sequence

SEQ ID NO: 8921 - DNA, 30 bp, Artificial Sequence; identical to SEQ ID NO: 4946
  Description of Artificial Sequence: Synthetic brazil nut; inner sequence

SEQ ID NO: 8922 - DNA, 30 bp, Artificial Sequence
  Description of Artificial Sequence: Synthetic brazil nut; inner sequence
cgatatggacgacctccctatcacgtgggc

SEQ ID NO: 8923 - DNA, 30 bp, Artificial Sequence; identical to SEQ ID NO: 715
  Description of Artificial Sequence: Synthetic brazil nut; inner sequence

SEQ ID NO: 8924 - DNA, 30 bp, Artificial Sequence; identical to SEQ ID NO: 638
  Description of Artificial Sequence: Synthetic brazil nut; inner sequence

SEQ ID NO: 8925 - DNA, 30 bp, Artificial Sequence
  Description of Artificial Sequence: Synthetic brazil nut; inner sequence
catgcataggcagccagcagtgacgatgcg

SEQ ID NO: 8926 - DNA, 30 bp, Artificial Sequence
  Description of Artificial Sequence: Synthetic brazil nut; inner sequence
gcacggctcgcaccctatcatgaggccatg

SEQ ID NO: 8927 - DNA, 30 bp, Artificial Sequence
  Description of Artificial Sequence: Synthetic brazil nut; inner sequence
ggacgcatcggcccggtcaagttcggcatg

SEQ ID NO: 8928 - DNA, 30 bp, Artificial Sequence
  Description of Artificial Sequence: Synthetic brazil nut; inner sequence
ccgcacgtagcactatcagtggtgcatgca

SEQ ID NO: 8929 - DNA, 30 bp, Artificial Sequence; identical to SEQ ID NO: 4904
  Description of Artificial Sequence: Synthetic brazil nut; inner sequence

SEQ ID NO: 8930 - DNA, 30 bp, Artificial Sequence; identical to SEQ ID NO: 4948
  Description of Artificial Sequence: Synthetic brazil nut; inner sequence

SEQ ID NO: 8931 - DNA, 30 bp, Artificial Sequence; identical to SEQ ID NO: 748
  Description of Artificial Sequence: Synthetic brazil nut; inner sequence

SEQ ID NO: 8932 - DNA, 30 bp, Artificial Sequence; identical to SEQ ID NO: 957
  Description of Artificial Sequence: Synthetic brazil nut; inner sequence

SEQ ID NO: 8933 - DNA, 30 bp, Artificial Sequence; identical to SEQ ID NO: 4967
  Description of Artificial Sequence: Synthetic brazil nut; inner sequence

SEQ ID NO: 8934 - DNA, 30 bp, Artificial Sequence; identical to SEQ ID NO: 753
  Description of Artificial Sequence: Synthetic brazil nut; inner sequence

SEQ ID NO: 8935 - DNA, 30 bp, Artificial Sequence
  Description of Artificial Sequence: Synthetic brazil nut; inner sequence
gacacggcactgacctacacgtggcaggta

SEQ ID NO: 8936 - DNA, 30 bp, Artificial Sequence
  Description of Artificial Sequence: Synthetic brazil nut; inner sequence
ccgcacgtagccctatcagtggagcatgca

SEQ ID NO: 8937 - DNA, 30 bp, Artificial Sequence
  Description of Artificial Sequence: Synthetic brazil nut; inner sequence
cgcgcagttggccgaacatcccgttgggca

SEQ ID NO: 8938 - DNA, 30 bp, Artificial Sequence
  Description of Artificial Sequence: Synthetic brazil nut; inner sequence
gtcattccgcatcctacacgtggccacgta

SEQ ID NO: 8939 - DNA, 30 bp, Artificial Sequence
  Description of Artificial Sequence: Synthetic brazil nut; inner sequence
gtacgtgcgatgtcccgatcaacgtgtgtc

SEQ ID NO: 8940 - DNA, 30 bp, Artificial Sequence; identical to SEQ ID NO: 987
  Description of Artificial Sequence: Synthetic brazil nut; inner sequence

SEQ ID NO: 8941 - DNA, 30 bp, Artificial Sequence; identical to SEQ ID NO: 4778
  Description of Artificial Sequence: Synthetic brazil nut; inner sequence

SEQ ID NO: 8942 - DNA, 30 bp, Artificial Sequence
  Description of Artificial Sequence: Synthetic brazil nut; inner sequence
gcatcgcagcgaggtccgattgccgtcatg

SEQ ID NO: 8943 - DNA, 30 bp, Artificial Sequence; identical to SEQ ID NO: 4992
  Description of Artificial Sequence: Synthetic brazil nut; inner sequence

SEQ ID NO: 8944 - DNA, 30 bp, Artificial Sequence; identical to SEQ ID NO: 559
  Description of Artificial Sequence: Synthetic brazil nut; inner sequence

SEQ ID NO: 8945 - DNA, 30 bp, Artificial Sequence; identical to SEQ ID NO: 4731
  Description of Artificial Sequence: Synthetic brazil nut; inner sequence

SEQ ID NO: 8946 - DNA, 30 bp, Artificial Sequence
  Description of Artificial Sequence: Synthetic brazil nut; inner sequence
ccatcgcgtcactctcatgtgtgtcacgta

SEQ ID NO: 8947 - DNA, 30 bp, Artificial Sequence; identical to SEQ ID NO: 4963
  Description of Artificial Sequence: Synthetic brazil nut; inner sequence

SEQ ID NO: 8948 - DNA, 30 bp, Artificial Sequence; identical to SEQ ID NO: 388
  Description of Artificial Sequence: Synthetic brazil nut; inner sequence

SEQ ID NO: 8949 - DNA, 30 bp, Artificial Sequence
  Description of Artificial Sequence: Synthetic brazil nut; inner sequence
gcatgactcgcaccctatcatgaggccatg

SEQ ID NO: 8950 - DNA, 30 bp, Artificial Sequence
  Description of Artificial Sequence: Synthetic brazil nut; inner sequence
ggccgcaatcctccctacacgtggcgtgta

SEQ ID NO: 8951 - DNA, 30 bp, Artificial Sequence; identical to SEQ ID NO: 384
  Description of Artificial Sequence: Synthetic brazil nut; inner sequence

SEQ ID NO: 8952 - DNA, 30 bp, Artificial Sequence; identical to SEQ ID NO: 488
  Description of Artificial Sequence: Synthetic brazil nut; inner sequence

SEQ ID NO: 8953 - DNA, 30 bp, Artificial Sequence
  Description of Artificial Sequence: Synthetic brazil nut; inner sequence
gtcattccgcatactacacgtgggcacgta

SEQ ID NO: 8954 - DNA, 30 bp, Artificial Sequence; identical to SEQ ID NO: 875
  Description of Artificial Sequence: Synthetic brazil nut; inner sequence

SEQ ID NO: 8955 - DNA, 30 bp, Artificial Sequence; identical to SEQ ID NO: 4905
  Description of Artificial Sequence: Synthetic brazil nut; inner sequence

SEQ ID NO: 8956 - DNA, 30 bp, Artificial Sequence; identical to SEQ ID NO: 4652
  Description of Artificial Sequence: Synthetic brazil nut; inner sequence

SEQ ID NO: 8957 - DNA, 30 bp, Artificial Sequence; identical to SEQ ID NO: 826
  Description of Artificial Sequence: Synthetic brazil nut; inner sequence

SEQ ID NO: 8958 - DNA, 30 bp, Artificial Sequence; identical to SEQ ID NO: 996
  Description of Artificial Sequence: Synthetic brazil nut; inner sequence

SEQ ID NO: 8959 - DNA, 30 bp, Artificial Sequence; identical to SEQ ID NO: 4979
  Description of Artificial Sequence: Synthetic brazil nut; inner sequence

SEQ ID NO: 8960 - DNA, 30 bp, Artificial Sequence
  Description of Artificial Sequence: Synthetic brazil nut; inner sequence
ccgacgcaaccgtacagcatgtcacgtggc

SEQ ID NO: 8961 - DNA, 30 bp, Artificial Sequence
  Description of Artificial Sequence: Synthetic brazil nut; inner sequence
ccggcacgaacggaacgggtcttgtgcatg

SEQ ID NO: 8962 - DNA, 30 bp, Artificial Sequence
  Description of Artificial Sequence: Synthetic brazil nut; inner sequence
tgcatgcacgcacctacacgtgggtatgga

SEQ ID NO: 8963 - DNA, 30 bp, Artificial Sequence
  Description of Artificial Sequence: Synthetic brazil nut; inner sequence
ggcatgacgagctgaacggtgcagtgtgct

SEQ ID NO: 8964 - DNA, 30 bp, Artificial Sequence
  Description of Artificial Sequence: Synthetic brazil nut; inner sequence
ggccgcagcttgcctactggtggtcacgta

SEQ ID NO: 8965 - DNA, 30 bp, Artificial Sequence; identical to SEQ ID NO: 4854
  Description of Artificial Sequence: Synthetic brazil nut; inner sequence

SEQ ID NO: 8966 - DNA, 25 bp, Artificial Sequence
  Description of Artificial Sequence: Synthetic brazil nut; inner sequence
ggcctgcgatggatgtgtgcgtgta

SEQ ID NO: 8967 - DNA, 30 bp, Artificial Sequence; identical to SEQ ID NO: 4864
  Description of Artificial Sequence: Synthetic brazil nut; inner sequence

SEQ ID NO: 8968 - DNA, 30 bp, Artificial Sequence
  Description of Artificial Sequence: Synthetic brazil nut; inner sequence
cgcaccgtcgatacgtcatccacgctgaca

SEQ ID NO: 8969 - DNA, 30 bp, Artificial Sequence
  Description of Artificial Sequence: Synthetic brazil nut; inner sequence
catggcaaggcagcggtcgatccattcgcg

SEQ ID NO: 8970 - DNA, 30 bp, Artificial Sequence; identical to SEQ ID NO: 703
  Description of Artificial Sequence: Synthetic brazil nut; inner sequence

SEQ ID NO: 8971 - DNA, 30 bp, Artificial Sequence
  Description of Artificial Sequence: Synthetic brazil nut; inner sequence
gtacgcacgcagaccgacgagtggcatgga

SEQ ID NO: 8972 - DNA, 30 bp, Artificial Sequence; identical to SEQ ID NO: 4667
  Description of Artificial Sequence: Synthetic brazil nut; inner sequence

SEQ ID NO: 8973 - DNA, 30 bp, Artificial Sequence; identical to SEQ ID NO: 5002
  Description of Artificial Sequence: Synthetic brazil nut; inner sequence

SEQ ID NO: 8974 - DNA, 30 bp, Artificial Sequence
  Description of Artificial Sequence: Synthetic brazil nut; inner sequence
gcacggtcggaccaggacacgagatgggca

SEQ ID NO: 8975 - DNA, 30 bp, Artificial Sequence; identical to SEQ ID NO: 345
  Description of Artificial Sequence: Synthetic brazil nut; inner sequence

SEQ ID NO: 8976 - DNA, 30 bp, Artificial Sequence; identical to SEQ ID NO: 162
  Description of Artificial Sequence: Synthetic brazil nut; inner sequence

SEQ ID NO: 8977 - DNA, 29 bp, Artificial Sequence
  Description of Artificial Sequence: Synthetic brazil nut; inner sequence
ccacatggacgacgatggcttagcgtggt

SEQ ID NO: 8978 - DNA, 30 bp, Artificial Sequence
  Description of Artificial Sequence: Synthetic brazil nut; inner sequence
ccgtagcgacatcaagcggtggcgcgcgtg

SEQ ID NO: 8979 - DNA, 30 bp, Artificial Sequence; identical to SEQ ID NO: 598
  Description of Artificial Sequence: Synthetic brazil nut; inner sequence

SEQ ID NO: 8980 - DNA, 30 bp, Artificial Sequence; identical to SEQ ID NO: 823
  Description of Artificial Sequence: Synthetic brazil nut; inner sequence

SEQ ID NO: 8981 - DNA, 30 bp, Artificial Sequence; identical to SEQ ID NO: 4666
  Description of Artificial Sequence: Synthetic brazil nut; inner sequence

SEQ ID NO: 8982 - DNA, 30 bp, Artificial Sequence; identical to SEQ ID NO: 4887
  Description of Artificial Sequence: Synthetic brazil nut; inner sequence

SEQ ID NO: 8983 - DNA, 28 bp, Artificial Sequence
  Description of Artificial Sequence: Synthetic brazil nut; inner sequence
gtgctgcgatgacctcacgtggacgggt

SEQ ID NO: 8984 - DNA, 30 bp, Artificial Sequence
  Description of Artificial Sequence: Synthetic brazil nut; inner sequence
acgatacgcaccagggacattgacggcatg

SEQ ID NO: 8985 - DNA, 30 bp, Artificial Sequence
  Description of Artificial Sequence: Synthetic brazil nut; inner sequence
ccgcacgtacccctatcagtggtgcatgca

SEQ ID NO: 8986 - DNA, 29 bp, Artificial Sequence
  Description of Artificial Sequence: Synthetic brazil nut; inner sequence
ggacgccgatgccctcatgtggccgtgga

SEQ ID NO: 8987 - DNA, 30 bp, Artificial Sequence; identical to SEQ ID NO: 842
  Description of Artificial Sequence: Synthetic brazil nut; inner sequence

SEQ ID NO: 8988 - DNA, 30 bp, Artificial Sequence
  Description of Artificial Sequence: Synthetic brazil nut; inner sequence
gtacgtcgcggaccctatcaagacggcatg

SEQ ID NO: 8989 - DNA, 30 bp, Artificial Sequence; identical to SEQ ID NO: 683
  Description of Artificial Sequence: Synthetic brazil nut; inner sequence

SEQ ID NO: 8990 - DNA, 30 bp, Artificial Sequence; identical to SEQ ID NO: 866
  Description of Artificial Sequence: Synthetic brazil nut; inner sequence

SEQ ID NO: 8991 - DNA, 30 bp, Artificial Sequence
  Description of Artificial Sequence: Synthetic brazil nut; inner sequence
ccgacgaagacctggtcgtggaaggcatga

SEQ ID NO: 8992 - DNA, 30 bp, Artificial Sequence; identical to SEQ ID NO: 4857
  Description of Artificial Sequence: Synthetic brazil nut; inner sequence

SEQ ID NO: 8993 - DNA, 30 bp, Artificial Sequence
  Description of Artificial Sequence: Synthetic brazil nut; inner sequence
ccgcccgtagccctatcagtggtgcatgca

SEQ ID NO: 8994 - DNA, 30 bp, Artificial Sequence
  Description of Artificial Sequence: Synthetic brazil nut; inner sequence
cgcacacgtcaggtcaaggtcatcgcgtgg

SEQ ID NO: 8995 - DNA, 30 bp, Artificial Sequence; identical to SEQ ID NO: 535
  Description of Artificial Sequence: Synthetic brazil nut; inner sequence

SEQ ID NO: 8996 - DNA, 29 bp, Artificial Sequence
  Description of Artificial Sequence: Synthetic brazil nut; inner sequence
ggcatgcgatggatgtggtggtgctgtca

SEQ ID NO: 8997 - DNA, 30 bp, Artificial Sequence; identical to SEQ ID NO: 681
  Description of Artificial Sequence: Synthetic brazil nut; inner sequence

SEQ ID NO: 8998 - DNA, 30 bp, Artificial Sequence
  Description of Artificial Sequence: Synthetic brazil nut; inner sequence
cgcaccgcgagtgatcgtggttcgcagtca

SEQ ID NO: 8999 - DNA, 30 bp, Artificial Sequence
  Description of Artificial Sequence: Synthetic brazil nut; inner sequence
cgtaccgccttggtctacgtgacgccatgt

SEQ ID NO: 9000 - DNA, 29 bp, Artificial Sequence
  Description of Artificial Sequence: Synthetic brazil nut; inner sequence
gtacgccgatgccctcatgtggccgtgga

SEQ ID NO: 9001 - DNA, 30 bp, Artificial Sequence; identical to SEQ ID NO: 4882
  Description of Artificial Sequence: Synthetic brazil nut; inner sequence

SEQ ID NO: 9002 - DNA, 30 bp, Artificial Sequence; identical to SEQ ID NO: 265
  Description of Artificial Sequence: Synthetic brazil nut; inner sequence

SEQ ID NO: 9003 - DNA, 53 bp, Artificial Sequence; identical to SEQ ID NO: 1004
  Description of Artificial Sequence: Synthetic brazil nut; 5' sequence and inner sequence

SEQ ID NO: 9004 - DNA, 53 bp, Artificial Sequence; identical to SEQ ID NO: 1003
  Description of Artificial Sequence: Synthetic brazil nut; 5' sequence and inner sequence

SEQ ID NO: 9005 - DNA, 53 bp, Artificial Sequence; identical to SEQ ID NO: 1008
  Description of Artificial Sequence: Synthetic brazil nut; 5' sequence and inner sequence

SEQ ID NO: 9006 - DNA, 53 bp, Artificial Sequence; identical to SEQ ID NO: 1006
  Description of Artificial Sequence: Synthetic brazil nut; 5' sequence and inner sequence

SEQ ID NO: 9007 - DNA, 53 bp, Artificial Sequence; identical to SEQ ID NO: 1005
  Description of Artificial Sequence: Synthetic brazil nut; 5' sequence and inner sequence

SEQ ID NO: 9008 - DNA, 53 bp, Artificial Sequence; identical to SEQ ID NO: 1010
  Description of Artificial Sequence: Synthetic brazil nut; 5' sequence and inner sequence

SEQ ID NO: 9009 - DNA, 53 bp, Artificial Sequence; identical to SEQ ID NO: 1007
  Description of Artificial Sequence: Synthetic brazil nut; 5' sequence and inner sequence

SEQ ID NO: 9010 - DNA, 53 bp, Artificial Sequence; identical to SEQ ID NO: 1009
  Description of Artificial Sequence: Synthetic brazil nut; 5' sequence and inner sequence

SEQ ID NO: 9011 - DNA, 53 bp, Artificial Sequence; identical to SEQ ID NO: 1012
  Description of Artificial Sequence: Synthetic brazil nut; 5' sequence and inner sequence

SEQ ID NO: 9012 - DNA, 53 bp, Artificial Sequence; identical to SEQ ID NO: 1011
  Description of Artificial Sequence: Synthetic brazil nut; 5' sequence and inner sequence

SEQ ID NO: 9013 - DNA, 53 bp, Artificial Sequence; identical to SEQ ID NO: 1023
  Description of Artificial Sequence: Synthetic brazil nut; 5' sequence and inner sequence

SEQ ID NO: 9014 - DNA, 53 bp, Artificial Sequence; identical to SEQ ID NO: 1018
  Description of Artificial Sequence: Synthetic brazil nut; 5' sequence and inner sequence

SEQ ID NO: 9015 - DNA, 53 bp, Artificial Sequence; identical to SEQ ID NO: 1014
  Description of Artificial Sequence: Synthetic brazil nut; 5' sequence and inner sequence

SEQ ID NO: 9016 - DNA, 53 bp, Artificial Sequence; identical to SEQ ID NO: 1013
  Description of Artificial Sequence: Synthetic brazil nut; 5' sequence and inner sequence

SEQ ID NO: 9017 - DNA, 53 bp, Artificial Sequence; identical to SEQ ID NO: 1017
  Description of Artificial Sequence: Synthetic brazil nut; 5' sequence and inner sequence

SEQ ID NO: 9018 - DNA, 53 bp, Artificial Sequence; identical to SEQ ID NO: 1037
  Description of Artificial Sequence: Synthetic brazil nut; 5' sequence and inner sequence

SEQ ID NO: 9019 - DNA, 53 bp, Artificial Sequence; identical to SEQ ID NO: 1020
  Description of Artificial Sequence: Synthetic brazil nut; 5' sequence and inner sequence

SEQ ID NO: 9020 - DNA, 53 bp, Artificial Sequence; identical to SEQ ID NO: 1022
  Description of Artificial Sequence: Synthetic brazil nut; 5' sequence and inner sequence

SEQ ID NO: 9021 - DNA, 53 bp, Artificial Sequence; identical to SEQ ID NO: 1049
  Description of Artificial Sequence: Synthetic brazil nut; 5' sequence and inner sequence

SEQ ID NO: 9022 - DNA, 53 bp, Artificial Sequence; identical to SEQ ID NO: 1030
  Description of Artificial Sequence: Synthetic brazil nut; 5' sequence and inner sequence

SEQ ID NO: 9023 - DNA, 53 bp, Artificial Sequence; identical to SEQ ID NO: 1028
  Description of Artificial Sequence: Synthetic brazil nut; 5' sequence and inner sequence

SEQ ID NO: 9024 - DNA, 53 bp, Artificial Sequence; identical to SEQ ID NO: 1016
  Description of Artificial Sequence: Synthetic brazil nut; 5' sequence and inner sequence

SEQ ID NO: 9025 - DNA, 53 bp, Artificial Sequence; identical to SEQ ID NO: 1046
  Description of Artificial Sequence: Synthetic brazil nut; 5' sequence and inner sequence

SEQ ID NO: 9026 - DNA, 53 bp, Artificial Sequence; identical to SEQ ID NO: 1034
  Description of Artificial Sequence: Synthetic brazil nut; 5' sequence and inner sequence

SEQ ID NO: 9027 - DNA, 53 bp, Artificial Sequence; identical to SEQ ID NO: 1041
  Description of Artificial Sequence: Synthetic brazil nut; 5' sequence and inner sequence

SEQ ID NO: 9028 - DNA, 53 bp, Artificial Sequence; identical to SEQ ID NO: 1060
  Description of Artificial Sequence: Synthetic brazil nut; 5' sequence and inner sequence

SEQ ID NO: 9029 - DNA, 53 bp, Artificial Sequence; identical to SEQ ID NO: 1045
  Description of Artificial Sequence: Synthetic brazil nut; 5' sequence and inner sequence

SEQ ID NO: 9030 - DNA, 53 bp, Artificial Sequence; identical to SEQ ID NO: 1021
  Description of Artificial Sequence: Synthetic brazil nut; 5' sequence and inner sequence

SEQ ID NO: 9031 - DNA, 53 bp, Artificial Sequence; identical to SEQ ID NO: 1015
  Description of Artificial Sequence: Synthetic brazil nut; 5' sequence and inner sequence

SEQ ID NO: 9032 - DNA, 53 bp, Artificial Sequence; identical to SEQ ID NO: 1033
  Description of Artificial Sequence: Synthetic brazil nut; 5' sequence and inner sequence

SEQ ID NO: 9033 - DNA, 53 bp, Artificial Sequence; identical to SEQ ID NO: 1032
  Description of Artificial Sequence: Synthetic brazil nut; 5' sequence and inner sequence

SEQ ID NO: 9034 - DNA, 53 bp, Artificial Sequence; identical to SEQ ID NO: 1064
  Description of Artificial Sequence: Synthetic brazil nut; 5' sequence and inner sequence

SEQ ID NO: 9035 - DNA, 53 bp, Artificial Sequence; identical to SEQ ID NO: 1055
  Description of Artificial Sequence: Synthetic brazil nut; 5' sequence and inner sequence

SEQ ID NO: 9036 - DNA, 53 bp, Artificial Sequence; identical to SEQ ID NO: 1024
  Description of Artificial Sequence: Synthetic brazil nut; 5' sequence and inner sequence

SEQ ID NO: 9037 - DNA, 53 bp, Artificial Sequence; identical to SEQ ID NO: 1040
  Description of Artificial Sequence: Synthetic brazil nut; 5' sequence and inner sequence

SEQ ID NO: 9038 - DNA, 53 bp, Artificial Sequence; identical to SEQ ID NO: 1044
  Description of Artificial Sequence: Synthetic brazil nut; 5' sequence and inner sequence

SEQ ID NO: 9039 - DNA, 52 bp, Artificial Sequence; identical to SEQ ID NO: 1070
  Description of Artificial Sequence: Synthetic brazil nut; 5' sequence and inner sequence

SEQ ID NO: 9040 - DNA, 53 bp, Artificial Sequence; identical to SEQ ID NO: 1052
  Description of Artificial Sequence: Synthetic brazil nut; 5' sequence and inner sequence

SEQ ID NO: 9041 - DNA, 53 bp, Artificial Sequence; identical to SEQ ID NO: 1131
  Description of Artificial Sequence: Synthetic brazil nut; 5' sequence and inner sequence

SEQ ID NO: 9042 - DNA, 53 bp, Artificial Sequence; identical to SEQ ID NO: 1029
  Description of Artificial Sequence: Synthetic brazil nut; 5' sequence and inner sequence

SEQ ID NO: 9043 - DNA, 53 bp, Artificial Sequence; identical to SEQ ID NO: 1061
  Description of Artificial Sequence: Synthetic brazil nut; 5' sequence and inner sequence

SEQ ID NO: 9044 - DNA, 53 bp, Artificial Sequence; identical to SEQ ID NO: 1035
  Description of Artificial Sequence: Synthetic brazil nut; 5' sequence and inner sequence

SEQ ID NO: 9045 - DNA, 53 bp, Artificial Sequence; identical to SEQ ID NO: 1038
  Description of Artificial Sequence: Synthetic brazil nut; 5' sequence and inner sequence

SEQ ID NO: 9046 - DNA, 53 bp, Artificial Sequence; identical to SEQ ID NO: 1088
  Description of Artificial Sequence: Synthetic brazil nut; 5' sequence and inner sequence

SEQ ID NO: 9047 - DNA, 53 bp, Artificial Sequence; identical to SEQ ID NO: 1063
  Description of Artificial Sequence: Synthetic brazil nut; 5' sequence and inner sequence

SEQ ID NO: 9048 - DNA, 53 bp, Artificial Sequence; identical to SEQ ID NO: 1019
  Description of Artificial Sequence: Synthetic brazil nut; 5' sequence and inner sequence

SEQ ID NO: 9049 - DNA, 53 bp, Artificial Sequence; identical to SEQ ID NO: 1074
  Description of Artificial Sequence: Synthetic brazil nut; 5' sequence and inner sequence

SEQ ID NO: 9050 - DNA, 53 bp, Artificial Sequence; identical to SEQ ID NO: 1129
  Description of Artificial Sequence: Synthetic brazil nut; 5' sequence and inner sequence

SEQ ID NO: 9051 - DNA, 53 bp, Artificial Sequence; identical to SEQ ID NO: 1054
  Description of Artificial Sequence: Synthetic brazil nut; 5' sequence and inner sequence

SEQ ID NO: 9052 - DNA, 53 bp, Artificial Sequence; identical to SEQ ID NO: 1031
  Description of Artificial Sequence: Synthetic brazil nut; 5' sequence and inner sequence

SEQ ID NO: 9053 - DNA, 53 bp, Artificial Sequence; identical to SEQ ID NO: 1082
  Description of Artificial Sequence: Synthetic brazil nut; 5' sequence and inner sequence

SEQ ID NO: 9054 - DNA, 53 bp, Artificial Sequence; identical to SEQ ID NO: 1039
  Description of Artificial Sequence: Synthetic brazil nut; 5' sequence and inner sequence

SEQ ID NO: 9055 - DNA, 53 bp, Artificial Sequence; identical to SEQ ID NO: 1051
  Description of Artificial Sequence: Synthetic brazil nut; 5' sequence and inner sequence

SEQ ID NO: 9056 - DNA, 53 bp, Artificial Sequence; identical to SEQ ID NO: 1066
  Description of Artificial Sequence: Synthetic brazil nut; 5' sequence and inner sequence

SEQ ID NO: 9057 - DNA, 53 bp, Artificial Sequence; identical to SEQ ID NO: 1048
  Description of Artificial Sequence: Synthetic brazil nut; 5' sequence and inner sequence

SEQ ID NO: 9058 - DNA, 53 bp, Artificial Sequence; identical to SEQ ID NO: 1077
  Description of Artificial Sequence: Synthetic brazil nut; 5' sequence and inner sequence

SEQ ID NO: 9059 - DNA, 53 bp, Artificial Sequence; identical to SEQ ID NO: 1081
  Description of Artificial Sequence: Synthetic brazil nut; 5' sequence and inner sequence

SEQ ID NO: 9060 - DNA, 53 bp, Artificial Sequence; identical to SEQ ID NO: 1117
  Description of Artificial Sequence: Synthetic brazil nut; 5' sequence and inner sequence

SEQ ID NO: 9061 - DNA, 53 bp, Artificial Sequence; identical to SEQ ID NO: 1050
  Description of Artificial Sequence: Synthetic brazil nut; 5' sequence and inner sequence

SEQ ID NO: 9062 - DNA, 53 bp, Artificial Sequence; identical to SEQ ID NO: 1183
  Description of Artificial Sequence: Synthetic brazil nut; 5' sequence and inner sequence

SEQ ID NO: 9063 - DNA, 53 bp, Artificial Sequence; identical to SEQ ID NO: 1058
  Description of Artificial Sequence: Synthetic brazil nut; 5' sequence and inner sequence

SEQ ID NO: 9064 - DNA, 53 bp, Artificial Sequence; identical to SEQ ID NO: 1112
  Description of Artificial Sequence: Synthetic brazil nut; 5' sequence and inner sequence

SEQ ID NO: 9065 - DNA, 52 bp, Artificial Sequence; identical to SEQ ID NO: 1193
  Description of Artificial Sequence: Synthetic brazil nut; 5' sequence and inner sequence

SEQ ID NO: 9066 - DNA, 53 bp, Artificial Sequence; identical to SEQ ID NO: 1080
  Description of Artificial Sequence: Synthetic brazil nut; 5' sequence and inner sequence

SEQ ID NO: 9067 - DNA, 53 bp, Artificial Sequence; identical to SEQ ID NO: 1185
  Description of Artificial Sequence: Synthetic brazil nut; 5' sequence and inner sequence

SEQ ID NO: 9068 - DNA, 53 bp, Artificial Sequence; identical to SEQ ID NO: 1430
  Description of Artificial Sequence: Synthetic brazil nut; 5' sequence and inner sequence

SEQ ID NO: 9069 - DNA, 53 bp, Artificial Sequence; identical to SEQ ID NO: 1076
  Description of Artificial Sequence: Synthetic brazil nut; 5' sequence and inner sequence

SEQ ID NO: 9070 - DNA, 53 bp, Artificial Sequence; identical to SEQ ID NO: 1097
  Description of Artificial Sequence: Synthetic brazil nut; 5' sequence and inner sequence

SEQ ID NO: 9071 - DNA, 53 bp, Artificial Sequence; identical to SEQ ID NO: 1133
  Description of Artificial Sequence: Synthetic brazil nut; 5' sequence and inner sequence

SEQ ID NO: 9072 - DNA, 53 bp, Artificial Sequence; identical to SEQ ID NO: 1057
  Description of Artificial Sequence: Synthetic brazil nut; 5' sequence and inner sequence

SEQ ID NO: 9073 - DNA, 53 bp, Artificial Sequence; identical to SEQ ID NO: 1120
  Description of Artificial Sequence: Synthetic brazil nut; 5' sequence and inner sequence

SEQ ID NO: 9074 - DNA, 53 bp, Artificial Sequence; identical to SEQ ID NO: 1043
  Description of Artificial Sequence: Synthetic brazil nut; 5' sequence and inner sequence

SEQ ID NO: 9075 - DNA, 53 bp, Artificial Sequence; identical to SEQ ID NO: 1025
  Description of Artificial Sequence: Synthetic brazil nut; 5' sequence and inner sequence

SEQ ID NO: 9076 - DNA, 53 bp, Artificial Sequence; identical to SEQ ID NO: 1126
  Description of Artificial Sequence: Synthetic brazil nut; 5' sequence and inner sequence

SEQ ID NO: 9077 - DNA, 53 bp, Artificial Sequence; identical to SEQ ID NO: 1053
  Description of Artificial Sequence: Synthetic brazil nut; 5' sequence and inner sequence

SEQ ID NO: 9078 - DNA, 53 bp, Artificial Sequence; identical to SEQ ID NO: 1059
  Description of Artificial Sequence: Synthetic brazil nut; 5' sequence and inner sequence

SEQ ID NO: 9079 - DNA, 53 bp, Artificial Sequence; identical to SEQ ID NO: 1067
  Description of Artificial Sequence: Synthetic brazil nut; 5' sequence and inner sequence

SEQ ID NO: 9080 - DNA, 53 bp, Artificial Sequence; identical to SEQ ID NO: 1211
  Description of Artificial Sequence: Synthetic brazil nut; 5' sequence and inner sequence

SEQ ID NO: 9081 - DNA, 53 bp, Artificial Sequence; identical to SEQ ID NO: 1093
  Description of Artificial Sequence: Synthetic brazil nut; 5' sequence and inner sequence

SEQ ID NO: 9082 - DNA, 53 bp, Artificial Sequence; identical to SEQ ID NO: 1036
  Description of Artificial Sequence: Synthetic brazil nut; 5' sequence and inner sequence

SEQ ID NO: 9083 - DNA, 53 bp, Artificial Sequence; identical to SEQ ID NO: 1136
  Description of Artificial Sequence: Synthetic brazil nut; 5' sequence and inner sequence

SEQ ID NO: 9084 - DNA, 53 bp, Artificial Sequence; identical to SEQ ID NO: 1068
  Description of Artificial Sequence: Synthetic brazil nut; 5' sequence and inner sequence

SEQ ID NO: 9085 - DNA, 53 bp, Artificial Sequence; identical to SEQ ID NO: 1065
  Description of Artificial Sequence: Synthetic brazil nut; 5' sequence and inner sequence

SEQ ID NO: 9086 - DNA, 53 bp, Artificial Sequence; identical to SEQ ID NO: 1311
  Description of Artificial Sequence: Synthetic brazil nut; 5' sequence and inner sequence

SEQ ID NO: 9087 - DNA, 53 bp, Artificial Sequence; identical to SEQ ID NO: 1042
  Description of Artificial Sequence: Synthetic brazil nut; 5' sequence and inner sequence

SEQ ID NO: 9088 - DNA, 53 bp, Artificial Sequence; identical to SEQ ID NO: 1096
  Description of Artificial Sequence: Synthetic brazil nut; 5' sequence and inner sequence

SEQ ID NO: 9089 - DNA, 53 bp, Artificial Sequence; identical to SEQ ID NO: 1047
  Description of Artificial Sequence: Synthetic brazil nut; 5' sequence and inner sequence

SEQ ID NO: 9090 - DNA, 53 bp, Artificial Sequence; identical to SEQ ID NO: 1092
  Description of Artificial Sequence: Synthetic brazil nut; 5' sequence and inner sequence

SEQ ID NO: 9091 - DNA, 53 bp, Artificial Sequence; identical to SEQ ID NO: 1207
  Description of Artificial Sequence: Synthetic brazil nut; 5' sequence and inner sequence

SEQ ID NO: 9092 - DNA, 53 bp, Artificial Sequence; identical to SEQ ID NO: 1026
  Description of Artificial Sequence: Synthetic brazil nut; 5' sequence and inner sequence

SEQ ID NO: 9093 - DNA, 53 bp, Artificial Sequence; identical to SEQ ID NO: 1154
  Description of Artificial Sequence: Synthetic brazil nut; 5' sequence and inner sequence

SEQ ID NO: 9094 - DNA, 53 bp, Artificial Sequence; identical to SEQ ID NO: 1091
  Description of Artificial Sequence: Synthetic brazil nut; 5' sequence and inner sequence

SEQ ID NO: 9095 - DNA, 53 bp, Artificial Sequence; identical to SEQ ID NO: 1151
  Description of Artificial Sequence: Synthetic brazil nut; 5' sequence and inner sequence

SEQ ID NO: 9096 - DNA, 53 bp, Artificial Sequence; identical to SEQ ID NO: 1103
  Description of Artificial Sequence: Synthetic brazil nut; 5' sequence and inner sequence

SEQ ID NO: 9097 - DNA, 53 bp, Artificial Sequence; identical to SEQ ID NO: 1079
  Description of Artificial Sequence: Synthetic brazil nut; 5' sequence and inner sequence

SEQ ID NO: 9098 - DNA, 53 bp, Artificial Sequence; identical to SEQ ID NO: 1122
  Description of Artificial Sequence: Synthetic brazil nut; 5' sequence and inner sequence

SEQ ID NO: 9099 - DNA, 53 bp, Artificial Sequence; identical to SEQ ID NO: 1078
  Description of Artificial Sequence: Synthetic brazil nut; 5' sequence and inner sequence

SEQ ID NO: 9100 - DNA, 53 bp, Artificial Sequence; identical to SEQ ID NO: 1118
  Description of Artificial Sequence: Synthetic brazil nut; 5' sequence and inner sequence

SEQ ID NO: 9101 - DNA, 53 bp, Artificial Sequence; identical to SEQ ID NO: 1567
  Description of Artificial Sequence: Synthetic brazil nut; 5' sequence and inner sequence

SEQ ID NO: 9102 - DNA, 53 bp, Artificial Sequence; identical to SEQ ID NO: 1257
  Description of Artificial Sequence: Synthetic brazil nut; 5' sequence and inner sequence

SEQ ID NO: 9103 - DNA, 53 bp, Artificial Sequence; identical to SEQ ID NO: 1168
  Description of Artificial Sequence: Synthetic brazil nut; 5' sequence and inner sequence

SEQ ID NO: 9104 - DNA, 53 bp, Artificial Sequence; identical to SEQ ID NO: 1142
  Description of Artificial Sequence: Synthetic brazil nut; 5' sequence and inner sequence

SEQ ID NO: 9105 - DNA, 53 bp, Artificial Sequence; identical to SEQ ID NO: 1287
  Description of Artificial Sequence: Synthetic brazil nut; 5' sequence and inner sequence

SEQ ID NO: 9106 - DNA, 53 bp, Artificial Sequence; identical to SEQ ID NO: 1247
  Description of Artificial Sequence: Synthetic brazil nut; 5' sequence and inner sequence

SEQ ID NO: 9107 - DNA, 53 bp, Artificial Sequence; identical to SEQ ID NO: 1144
  Description of Artificial Sequence: Synthetic brazil nut; 5' sequence and inner sequence

SEQ ID NO: 9108 - DNA, 53 bp, Artificial Sequence; identical to SEQ ID NO: 1083
  Description of Artificial Sequence: Synthetic brazil nut; 5' sequence and inner sequence

SEQ ID NO: 9109 - DNA, 53 bp, Artificial Sequence; identical to SEQ ID NO: 1073
  Description of Artificial Sequence: Synthetic brazil nut; 5' sequence and inner sequence

SEQ ID NO: 9110 - DNA, 53 bp, Artificial Sequence; identical to SEQ ID NO: 1100
  Description of Artificial Sequence: Synthetic brazil nut; 5' sequence and inner sequence

SEQ ID NO: 9111 - DNA, 53 bp, Artificial Sequence; identical to SEQ ID NO: 1355
  Description of Artificial Sequence: Synthetic brazil nut; 5' sequence and inner sequence

SEQ ID NO: 9112 - DNA, 53 bp, Artificial Sequence; identical to SEQ ID NO: 1229
  Description of Artificial Sequence: Synthetic brazil nut; 5' sequence and inner sequence

SEQ ID NO: 9113 - DNA, 53 bp, Artificial Sequence; identical to SEQ ID NO: 1237
  Description of Artificial Sequence: Synthetic brazil nut; 5' sequence and inner sequence

SEQ ID NO: 9114 - DNA, 53 bp, Artificial Sequence; identical to SEQ ID NO: 1233
  Description of Artificial Sequence: Synthetic brazil nut; 5' sequence and inner sequence

SEQ ID NO: 9115 - DNA, 53 bp, Artificial Sequence; identical to SEQ ID NO: 1099
  Description of Artificial Sequence: Synthetic brazil nut; 5' sequence and inner sequence

SEQ ID NO: 9116 - DNA, 53 bp, Artificial Sequence; identical to SEQ ID NO: 1094
  Description of Artificial Sequence: Synthetic brazil nut; 5' sequence and inner sequence

SEQ ID NO: 9117 - DNA, 53 bp, Artificial Sequence; identical to SEQ ID NO: 1027
  Description of Artificial Sequence: Synthetic brazil nut; 5' sequence and inner sequence

SEQ ID NO: 9118 - DNA, 53 bp, Artificial Sequence; identical to SEQ ID NO: 1179
  Description of Artificial Sequence: Synthetic brazil nut; 5' sequence and inner sequence

SEQ ID NO: 9119 - DNA, 53 bp, Artificial Sequence; identical to SEQ ID NO: 1147
  Description of Artificial Sequence: Synthetic brazil nut; 5' sequence and inner sequence

SEQ ID NO: 9120 - DNA, 53 bp, Artificial Sequence; identical to SEQ ID NO: 1056
  Description of Artificial Sequence: Synthetic brazil nut; 5' sequence and inner sequence

SEQ ID NO: 9121 - DNA, 53 bp, Artificial Sequence; identical to SEQ ID NO: 1285
  Description of Artificial Sequence: Synthetic brazil nut; 5' sequence and inner sequence

SEQ ID NO: 9122 - DNA, 53 bp, Artificial Sequence; identical to SEQ ID NO: 1115
  Description of Artificial Sequence: Synthetic brazil nut; 5' sequence and inner sequence

SEQ ID NO: 9123 - DNA, 53 bp, Artificial Sequence; identical to SEQ ID NO: 1188
  Description of Artificial Sequence: Synthetic brazil nut; 5' sequence and inner sequence

SEQ ID NO: 9124 - DNA, 53 bp, Artificial Sequence; identical to SEQ ID NO: 1203
  Description of Artificial Sequence: Synthetic brazil nut; 5' sequence and inner sequence

SEQ ID NO: 9125 - DNA, 53 bp, Artificial Sequence; identical to SEQ ID NO: 1288
  Description of Artificial Sequence: Synthetic brazil nut; 5' sequence and inner sequence

SEQ ID NO: 9126 - DNA, 53 bp, Artificial Sequence; identical to SEQ ID NO: 1155
  Description of Artificial Sequence: Synthetic brazil nut; 5' sequence and inner sequence

SEQ ID NO: 9127 - DNA, 53 bp, Artificial Sequence; identical to SEQ ID NO: 1468
  Description of Artificial Sequence: Synthetic brazil nut; 5' sequence and inner sequence

SEQ ID NO: 9128 - DNA, 53 bp, Artificial Sequence; identical to SEQ ID NO: 1354
  Description of Artificial Sequence: Synthetic brazil nut; 5' sequence and inner sequence

SEQ ID NO: 9129 - DNA, 51 bp, Artificial Sequence; identical to SEQ ID NO: 1148
  Description of Artificial Sequence: Synthetic brazil nut; 5' sequence and inner sequence

SEQ ID NO: 9130 - DNA, 53 bp, Artificial Sequence; identical to SEQ ID NO: 1264
  Description of Artificial Sequence: Synthetic brazil nut; 5' sequence and inner sequence

SEQ ID NO: 9131 - DNA, 53 bp, Artificial Sequence; identical to SEQ ID NO: 1107
  Description of Artificial Sequence: Synthetic brazil nut; 5' sequence and inner sequence

SEQ ID NO: 9132 - DNA, 53 bp, Artificial Sequence; identical to SEQ ID NO: 1282
  Description of Artificial Sequence: Synthetic brazil nut; 5' sequence and inner sequence

SEQ ID NO: 9133 - DNA, 53 bp, Artificial Sequence; identical to SEQ ID NO: 1360
  Description of Artificial Sequence: Synthetic brazil nut; 5' sequence and inner sequence

SEQ ID NO: 9134 - DNA, 53 bp, Artificial Sequence; identical to SEQ ID NO: 1470
  Description of Artificial Sequence: Synthetic brazil nut; 5' sequence and inner sequence

SEQ ID NO: 9135 - DNA, 53 bp, Artificial Sequence; identical to SEQ ID NO: 1145
  Description of Artificial Sequence: Synthetic brazil nut; 5' sequence and inner sequence

SEQ ID NO: 9136 - DNA, 53 bp, Artificial Sequence; identical to SEQ ID NO: 1161
  Description of Artificial Sequence: Synthetic brazil nut; 5' sequence and inner sequence

SEQ ID NO: 9137 - DNA, 53 bp, Artificial Sequence; identical to SEQ ID NO: 1095
  Description of Artificial Sequence: Synthetic brazil nut; 5' sequence and inner sequence

SEQ ID NO: 9138 - DNA, 53 bp, Artificial Sequence; identical to SEQ ID NO: 1071
  Description of Artificial Sequence: Synthetic brazil nut; 5' sequence and inner sequence

SEQ ID NO: 9139 - DNA, 53 bp, Artificial Sequence; identical to SEQ ID NO: 5205
  Description of Artificial Sequence: Synthetic brazil nut; 5' sequence and inner sequence

SEQ ID NO: 9140 - DNA, 53 bp, Artificial Sequence; identical to SEQ ID NO: 1245
  Description of Artificial Sequence: Synthetic brazil nut; 5' sequence and inner sequence

SEQ ID NO: 9141 - DNA, 53 bp, Artificial Sequence; identical to SEQ ID NO: 1208
  Description of Artificial Sequence: Synthetic brazil nut; 5' sequence and inner sequence

SEQ ID NO: 9142 - DNA, 53 bp, Artificial Sequence; identical to SEQ ID NO: 1230
  Description of Artificial Sequence: Synthetic brazil nut; 5' sequence and inner sequence

SEQ ID NO: 9143 - DNA, 53 bp, Artificial Sequence; identical to SEQ ID NO: 1164
  Description of Artificial Sequence: Synthetic brazil nut; 5' sequence and inner sequence

SEQ ID NO: 9144 - DNA, 53 bp, Artificial Sequence; identical to SEQ ID NO: 1146
  Description of Artificial Sequence: Synthetic brazil nut; 5' sequence and inner sequence

SEQ ID NO: 9145 - DNA, 53 bp, Artificial Sequence; identical to SEQ ID NO: 1125
  Description of Artificial Sequence: Synthetic brazil nut; 5' sequence and inner sequence

SEQ ID NO: 9146 - DNA, 53 bp, Artificial Sequence; identical to SEQ ID NO: 1174
  Description of Artificial Sequence: Synthetic brazil nut; 5' sequence and inner sequence

SEQ ID NO: 9147 - DNA, 53 bp, Artificial Sequence; identical to SEQ ID NO: 1196
  Description of Artificial Sequence: Synthetic brazil nut; 5' sequence and inner sequence

SEQ ID NO: 9148 - DNA, 53 bp, Artificial Sequence; identical to SEQ ID NO: 1293
  Description of Artificial Sequence: Synthetic brazil nut; 5' sequence and inner sequence

SEQ ID NO: 9149 - DNA, 53 bp, Artificial Sequence; identical to SEQ ID NO: 1105
  Description of Artificial Sequence: Synthetic brazil nut; 5' sequence and inner sequence

SEQ ID NO: 9150 - DNA, 53 bp, Artificial Sequence; identical to SEQ ID NO: 1436
  Description of Artificial Sequence: Synthetic brazil nut; 5' sequence and inner sequence

SEQ ID NO: 9151 - DNA, 53 bp, Artificial Sequence; identical to SEQ ID NO: 1240
  Description of Artificial Sequence: Synthetic brazil nut; 5' sequence and inner sequence

SEQ ID NO: 9152 - DNA, 53 bp, Artificial Sequence; identical to SEQ ID NO: 1127
  Description of Artificial Sequence: Synthetic brazil nut; 5' sequence and inner sequence

SEQ ID NO: 9153 - DNA, 53 bp, Artificial Sequence; identical to SEQ ID NO: 1113
  Description of Artificial Sequence: Synthetic brazil nut; 5' sequence and inner sequence

SEQ ID NO: 9154 - DNA, 53 bp, Artificial Sequence; identical to SEQ ID NO: 1283
  Description of Artificial Sequence: Synthetic brazil nut; 5' sequence and inner sequence

SEQ ID NO: 9155 - DNA, 53 bp, Artificial Sequence; identical to SEQ ID NO: 1111
  Description of Artificial Sequence: Synthetic brazil nut; 5' sequence and inner sequence

SEQ ID NO: 9156 - DNA, 53 bp, Artificial Sequence; identical to SEQ ID NO: 1552
  Description of Artificial Sequence: Synthetic brazil nut; 5' sequence and inner sequence

SEQ ID NO: 9157 - DNA, 53 bp, Artificial Sequence; identical to SEQ ID NO: 1153
  Description of Artificial Sequence: Synthetic brazil nut; 5' sequence and inner sequence

SEQ ID NO: 9158 - DNA, 53 bp, Artificial Sequence; identical to SEQ ID NO: 1692
  Description of Artificial Sequence: Synthetic brazil nut; 5' sequence and inner sequence

SEQ ID NO: 9159 - DNA, 53 bp, Artificial Sequence; identical to SEQ ID NO: 1140
  Description of Artificial Sequence: Synthetic brazil nut; 5' sequence and inner sequence

SEQ ID NO: 9160 - DNA, 53 bp, Artificial Sequence; identical to SEQ ID NO: 1253
  Description of Artificial Sequence: Synthetic brazil nut; 5' sequence and inner sequence

SEQ ID NO: 9161 - DNA, 53 bp, Artificial Sequence; identical to SEQ ID NO: 1108
  Description of Artificial Sequence: Synthetic brazil nut; 5' sequence and inner sequence

SEQ ID NO: 9162 - DNA, 53 bp, Artificial Sequence; identical to SEQ ID NO: 1371
  Description of Artificial Sequence: Synthetic brazil nut; 5' sequence and inner sequence

SEQ ID NO: 9163 - DNA, 53 bp, Artificial Sequence; identical to SEQ ID NO: 1385
  Description of Artificial Sequence: Synthetic brazil nut; 5' sequence and inner sequence

SEQ ID NO: 9164 - DNA, 53 bp, Artificial Sequence; identical to SEQ ID NO: 1163
  Description of Artificial Sequence: Synthetic brazil nut; 5' sequence and inner sequence

SEQ ID NO: 9165 - DNA, 53 bp, Artificial Sequence; identical to SEQ ID NO: 1086
  Description of Artificial Sequence: Synthetic brazil nut; 5' sequence and inner sequence

SEQ ID NO: 9166 - DNA, 53 bp, Artificial Sequence; identical to SEQ ID NO: 1270
  Description of Artificial Sequence: Synthetic brazil nut; 5' sequence and inner sequence

SEQ ID NO: 9167 - DNA, 53 bp, Artificial Sequence; identical to SEQ ID NO: 1290
  Description of Artificial Sequence: Synthetic brazil nut; 5' sequence and inner sequence

SEQ ID NO: 9168 - DNA, 53 bp, Artificial Sequence; identical to SEQ ID NO: 1184
  Description of Artificial Sequence: Synthetic brazil nut; 5' sequence and inner sequence

SEQ ID NO: 9169 - DNA, 53 bp, Artificial Sequence; identical to SEQ ID NO: 1171
  Description of Artificial Sequence: Synthetic brazil nut; 5' sequence and inner sequence

SEQ ID NO: 9170 - DNA, 53 bp, Artificial Sequence; identical to SEQ ID NO: 1269
  Description of Artificial Sequence: Synthetic brazil nut; 5' sequence and inner sequence

SEQ ID NO: 9171 - DNA, 53 bp, Artificial Sequence; identical to SEQ ID NO: 1673
  Description of Artificial Sequence: Synthetic brazil nut; 5' sequence and inner sequence

SEQ ID NO: 9172 - DNA, 53 bp, Artificial Sequence; identical to SEQ ID NO: 1110
  Description of Artificial Sequence: Synthetic brazil nut; 5' sequence and inner sequence

SEQ ID NO: 9173 - DNA, 53 bp, Artificial Sequence; identical to SEQ ID NO: 1362
  Description of Artificial Sequence: Synthetic brazil nut; 5' sequence and inner sequence

SEQ ID NO: 9174 - DNA, 53 bp, Artificial Sequence; identical to SEQ ID NO: 1106
  Description of Artificial Sequence: Synthetic brazil nut; 5' sequence and inner sequence

SEQ ID NO: 9175 - DNA, 53 bp, Artificial Sequence; identical to SEQ ID NO: 1198
  Description of Artificial Sequence: Synthetic brazil nut; 5' sequence and inner sequence

SEQ ID NO: 9176 - DNA, 53 bp, Artificial Sequence; identical to SEQ ID NO: 1069
  Description of Artificial Sequence: Synthetic brazil nut; 5' sequence and inner sequence

SEQ ID NO: 9177 - DNA, 53 bp, Artificial Sequence; identical to SEQ ID NO: 1321
  Description of Artificial Sequence: Synthetic brazil nut; 5' sequence and inner sequence

SEQ ID NO: 9178 - DNA, 53 bp, Artificial Sequence; identical to SEQ ID NO: 1205
  Description of Artificial Sequence: Synthetic brazil nut; 5' sequence and inner sequence

SEQ ID NO: 9179 - DNA, 53 bp, Artificial Sequence; identical to SEQ ID NO: 1541
  Description of Artificial Sequence: Synthetic brazil nut; 5' sequence and inner sequence

SEQ ID NO: 9180 - DNA, 53 bp, Artificial Sequence; identical to SEQ ID NO: 1089
  Description of Artificial Sequence: Synthetic brazil nut; 5' sequence and inner sequence

SEQ ID NO: 9181 - DNA, 53 bp, Artificial Sequence; identical to SEQ ID NO: 1157
  Description of Artificial Sequence: Synthetic brazil nut; 5' sequence and inner sequence

SEQ ID NO: 9182 - DNA, 53 bp, Artificial Sequence; identical to SEQ ID NO: 1312
  Description of Artificial Sequence: Synthetic brazil nut; 5' sequence and inner sequence

SEQ ID NO: 9183 - DNA, 54 bp, Artificial Sequence; identical to SEQ ID NO: 1150
  Description of Artificial Sequence: Synthetic brazil nut; 5' sequence and inner sequence

SEQ ID NO: 9184 - DNA, 53 bp, Artificial Sequence; identical to SEQ ID NO: 1200
  Description of Artificial Sequence: Synthetic brazil nut; 5' sequence and inner sequence

SEQ ID NO: 9185 - DNA, 53 bp, Artificial Sequence; identical to SEQ ID NO: 1377
  Description of Artificial Sequence: Synthetic brazil nut; 5' sequence and inner sequence

SEQ ID NO: 9186 - DNA, 53 bp, Artificial Sequence; identical to SEQ ID NO: 1522
  Description of Artificial Sequence: Synthetic brazil nut; 5' sequence and inner sequence

SEQ ID NO: 9187 - DNA, 53 bp, Artificial Sequence; identical to SEQ ID NO: 1347
  Description of Artificial Sequence: Synthetic brazil nut; 5' sequence and inner sequence

SEQ ID NO: 9188 - DNA, 53 bp, Artificial Sequence; identical to SEQ ID NO: 1201
  Description of Artificial Sequence: Synthetic brazil nut; 5' sequence and inner sequence

SEQ ID NO: 9189 - DNA, 53 bp, Artificial Sequence; identical to SEQ ID NO: 1062
  Description of Artificial Sequence: Synthetic brazil nut; 5' sequence and inner sequence

SEQ ID NO: 9190 - DNA, 53 bp, Artificial Sequence; identical to SEQ ID NO: 1438
  Description of Artificial Sequence: Synthetic brazil nut; 5' sequence and inner sequence

SEQ ID NO: 9191 - DNA, 53 bp, Artificial Sequence; identical to SEQ ID NO: 1308
  Description of Artificial Sequence: Synthetic brazil nut; 5' sequence and inner sequence

SEQ ID NO: 9192 - DNA, 53 bp, Artificial Sequence; identical to SEQ ID NO: 1175
  Description of Artificial Sequence: Synthetic brazil nut; 5' sequence and inner sequence

SEQ ID NO: 9193 - DNA, 53 bp, Artificial Sequence; identical to SEQ ID NO: 1186
  Description of Artificial Sequence: Synthetic brazil nut; 5' sequence and inner sequence

SEQ ID NO: 9194 - DNA, 53 bp, Artificial Sequence; identical to SEQ ID NO: 1158
  Description of Artificial Sequence: Synthetic brazil nut; 5' sequence and inner sequence

SEQ ID NO: 9195 - DNA, 53 bp, Artificial Sequence; identical to SEQ ID NO: 5229
  Description of Artificial Sequence: Synthetic brazil nut; 5' sequence and inner sequence

SEQ ID NO: 9196 - DNA, 53 bp, Artificial Sequence; identical to SEQ ID NO: 1134
  Description of Artificial Sequence: Synthetic brazil nut; 5' sequence and inner sequence

SEQ ID NO: 9197 - DNA, 53 bp, Artificial Sequence; identical to SEQ ID NO: 1159
  Description of Artificial Sequence: Synthetic brazil nut; 5' sequence and inner sequence

SEQ ID NO: 9198 - DNA, 53 bp, Artificial Sequence; identical to SEQ ID NO: 1132
  Description of Artificial Sequence: Synthetic brazil nut; 5' sequence and inner sequence

SEQ ID NO: 9199 - DNA, 53 bp, Artificial Sequence; identical to SEQ ID NO: 1353
  Description of Artificial Sequence: Synthetic brazil nut; 5' sequence and inner sequence

SEQ ID NO: 9200 - DNA, 53 bp, Artificial Sequence; identical to SEQ ID NO: 1165
  Description of Artificial Sequence: Synthetic brazil nut; 5' sequence and inner sequence

SEQ ID NO: 9201 - DNA, 53 bp, Artificial Sequence; identical to SEQ ID NO: 1448
  Description of Artificial Sequence: Synthetic brazil nut; 5' sequence and inner sequence

SEQ ID NO: 9202 - DNA, 54 bp, Artificial Sequence; identical to SEQ ID NO: 1221
  Description of Artificial Sequence: Synthetic brazil nut; 5' sequence and inner sequence

SEQ ID NO: 9203 - DNA, 53 bp, Artificial Sequence; identical to SEQ ID NO: 1109
  Description of Artificial Sequence: Synthetic brazil nut; 5' sequence and inner sequence

SEQ ID NO: 9204 - DNA, 54 bp, Artificial Sequence; identical to SEQ ID NO: 1258
  Description of Artificial Sequence: Synthetic brazil nut; 5' sequence and inner sequence

SEQ ID NO: 9205 - DNA, 53 bp, Artificial Sequence; identical to SEQ ID NO: 1654
  Description of Artificial Sequence: Synthetic brazil nut; 5' sequence and inner sequence

SEQ ID NO: 9206 - DNA, 53 bp, Artificial Sequence; identical to SEQ ID NO: 1299
  Description of Artificial Sequence: Synthetic brazil nut; 5' sequence and inner sequence

SEQ ID NO: 9207 - DNA, 53 bp, Artificial Sequence; identical to SEQ ID NO: 1149
  Description of Artificial Sequence: Synthetic brazil nut; 5' sequence and inner sequence

SEQ ID NO: 9208 - DNA, 53 bp, Artificial Sequence; identical to SEQ ID NO: 1138
  Description of Artificial Sequence: Synthetic brazil nut; 5' sequence and inner sequence

SEQ ID NO: 9209 - DNA, 53 bp, Artificial Sequence; identical to SEQ ID NO: 1329
  Description of Artificial Sequence: Synthetic brazil nut; 5' sequence and inner sequence

SEQ ID NO: 9210 - DNA, 53 bp, Artificial Sequence; identical to SEQ ID NO: 1266
  Description of Artificial Sequence: Synthetic brazil nut; 5' sequence and inner sequence

SEQ ID NO: 9211 - DNA, 53 bp, Artificial Sequence; identical to SEQ ID NO: 1172
  Description of Artificial Sequence: Synthetic brazil nut; 5' sequence and inner sequence

SEQ ID NO: 9212 - DNA, 53 bp, Artificial Sequence; identical to SEQ ID NO: 1234
  Description of Artificial Sequence: Synthetic brazil nut; 5' sequence and inner sequence

SEQ ID NO: 9213 - DNA, 53 bp, Artificial Sequence; identical to SEQ ID NO: 1123
  Description of Artificial Sequence: Synthetic brazil nut; 5' sequence and inner sequence

SEQ ID NO: 9214 - DNA, 53 bp, Artificial Sequence; identical to SEQ ID NO: 1075
  Description of Artificial Sequence: Synthetic brazil nut; 5' sequence and inner sequence

SEQ ID NO: 9215 - DNA, 53 bp, Artificial Sequence; identical to SEQ ID NO: 1215
  Description of Artificial Sequence: Synthetic brazil nut; 5' sequence and inner sequence

SEQ ID NO: 9216 - DNA, 53 bp, Artificial Sequence; identical to SEQ ID NO: 1406
  Description of Artificial Sequence: Synthetic brazil nut; 5' sequence and inner sequence

SEQ ID NO: 9217 - DNA, 53 bp, Artificial Sequence; identical to SEQ ID NO: 1139
  Description of Artificial Sequence: Synthetic brazil nut; 5' sequence and inner sequence

SEQ ID NO: 9218 - DNA, 53 bp, Artificial Sequence; identical to SEQ ID NO: 1104
  Description of Artificial Sequence: Synthetic brazil nut; 5' sequence and inner sequence

SEQ ID NO: 9219 - DNA, 53 bp, Artificial Sequence; identical to SEQ ID NO: 1121
  Description of Artificial Sequence: Synthetic brazil nut; 5' sequence and inner sequence

SEQ ID NO: 9220 - DNA, 53 bp, Artificial Sequence; identical to SEQ ID NO: 1579
  Description of Artificial Sequence: Synthetic brazil nut; 5' sequence and inner sequence

SEQ ID NO: 9221 - DNA, 53 bp, Artificial Sequence; identical to SEQ ID NO: 1102
  Description of Artificial Sequence: Synthetic brazil nut; 5' sequence and inner sequence

SEQ ID NO: 9222 - DNA, 53 bp, Artificial Sequence; identical to SEQ ID NO: 1268
  Description of Artificial Sequence: Synthetic brazil nut; 5' sequence and inner sequence

SEQ ID NO: 9223 - DNA, 53 bp, Artificial Sequence; identical to SEQ ID NO: 1429
  Description of Artificial Sequence: Synthetic brazil nut; 5' sequence and inner sequence

SEQ ID NO: 9224 - DNA, 53 bp, Artificial Sequence; identical to SEQ ID NO: 1389
  Description of Artificial Sequence: Synthetic brazil nut; 5' sequence and inner sequence

SEQ ID NO: 9225 - DNA, 53 bp, Artificial Sequence; identical to SEQ ID NO: 5449
  Description of Artificial Sequence: Synthetic brazil nut; 5' sequence and inner sequence

SEQ ID NO: 9226 - DNA, 53 bp, Artificial Sequence; identical to SEQ ID NO: 1454
  Description of Artificial Sequence: Synthetic brazil nut; 5' sequence and inner sequence

SEQ ID NO: 9227 - DNA, 53 bp, Artificial Sequence; identical to SEQ ID NO: 1232
  Description of Artificial Sequence: Synthetic brazil nut; 5' sequence and inner sequence

SEQ ID NO: 9228 - DNA, 53 bp, Artificial Sequence; identical to SEQ ID NO: 1191
  Description of Artificial Sequence: Synthetic brazil nut; 5' sequence and inner sequence

SEQ ID NO: 9229 - DNA, 53 bp, Artificial Sequence; identical to SEQ ID NO: 1527
  Description of Artificial Sequence: Synthetic brazil nut; 5' sequence and inner sequence

SEQ ID NO: 9230 - DNA, 53 bp, Artificial Sequence; identical to SEQ ID NO: 1630
  Description of Artificial Sequence: Synthetic brazil nut; 5' sequence and inner sequence

SEQ ID NO: 9231 - DNA, 53 bp, Artificial Sequence; identical to SEQ ID NO: 1156
  Description of Artificial Sequence: Synthetic brazil nut; 5' sequence and inner sequence

SEQ ID NO: 9232 - DNA, 53 bp, Artificial Sequence; identical to SEQ ID NO: 1645
  Description of Artificial Sequence: Synthetic brazil nut; 5' sequence and inner sequence

SEQ ID NO: 9233 - DNA, 53 bp, Artificial Sequence; identical to SEQ ID NO: 1369
  Description of Artificial Sequence: Synthetic brazil nut; 5' sequence and inner sequence

SEQ ID NO: 9234 - DNA, 53 bp, Artificial Sequence; identical to SEQ ID NO: 1194
  Description of Artificial Sequence: Synthetic brazil nut; 5' sequence and inner sequence

SEQ ID NO: 9235 - DNA, 54 bp, Artificial Sequence; identical to SEQ ID NO: 1250
  Description of Artificial Sequence: Synthetic brazil nut; 5' sequence and inner sequence

SEQ ID NO: 9236 - DNA, 53 bp, Artificial Sequence; identical to SEQ ID NO: 5376
  Description of Artificial Sequence: Synthetic brazil nut; 5' sequence and inner sequence

SEQ ID NO: 9237 - DNA, 53 bp, Artificial Sequence; identical to SEQ ID NO: 1439
  Description of Artificial Sequence: Synthetic brazil nut; 5' sequence and inner sequence

SEQ ID NO: 9238 - DNA, 53 bp, Artificial Sequence; identical to SEQ ID NO: 1570
  Description of Artificial Sequence: Synthetic brazil nut; 5' sequence and inner sequence

SEQ ID NO: 9239 - DNA, 53 bp, Artificial Sequence; identical to SEQ ID NO: 1352
  Description of Artificial Sequence: Synthetic brazil nut; 5' sequence and inner sequence

SEQ ID NO: 9240 - DNA, 53 bp, Artificial Sequence; identical to SEQ ID NO: 1243
  Description of Artificial Sequence: Synthetic brazil nut; 5' sequence and inner sequence

SEQ ID NO: 9241 - DNA, 53 bp, Artificial Sequence; identical to SEQ ID NO: 1367
  Description of Artificial Sequence: Synthetic brazil nut; 5' sequence and inner sequence

SEQ ID NO: 9242 - DNA, 53 bp, Artificial Sequence; identical to SEQ ID NO: 1341
  Description of Artificial Sequence: Synthetic brazil nut; 5' sequence and inner sequence

SEQ ID NO: 9243 - DNA, 53 bp, Artificial Sequence; identical to SEQ ID NO: 1262
  Description of Artificial Sequence: Synthetic brazil nut; 5' sequence and inner sequence

SEQ ID NO: 9244 - DNA, 53 bp, Artificial Sequence; identical to SEQ ID NO: 1085
  Description of Artificial Sequence: Synthetic brazil nut; 5' sequence and inner sequence

SEQ ID NO: 9245 - DNA, 53 bp, Artificial Sequence; identical to SEQ ID NO: 1359
  Description of Artificial Sequence: Synthetic brazil nut; 5' sequence and inner sequence

SEQ ID NO: 9246 - DNA, 53 bp, Artificial Sequence; identical to SEQ ID NO: 1190
  Description of Artificial Sequence: Synthetic brazil nut; 5' sequence and inner sequence

SEQ ID NO: 9247 - DNA, 53 bp, Artificial Sequence; identical to SEQ ID NO: 5230
  Description of Artificial Sequence: Synthetic brazil nut; 5' sequence and inner sequence

SEQ ID NO: 9248 - DNA, 53 bp, Artificial Sequence; identical to SEQ ID NO: 1116
  Description of Artificial Sequence: Synthetic brazil nut; 5' sequence and inner sequence

SEQ ID NO: 9249 - DNA, 53 bp, Artificial Sequence; identical to SEQ ID NO: 1532
  Description of Artificial Sequence: Synthetic brazil nut; 5' sequence and inner sequence

SEQ ID NO: 9250 - DNA, 53 bp, Artificial Sequence; identical to SEQ ID NO: 1336
  Description of Artificial Sequence: Synthetic brazil nut; 5' sequence and inner sequence

SEQ ID NO: 9251 - DNA, 53 bp, Artificial Sequence; identical to SEQ ID NO: 1401
  Description of Artificial Sequence: Synthetic brazil nut; 5' sequence and inner sequence

SEQ ID NO: 9252 - DNA, 53 bp, Artificial Sequence; identical to SEQ ID NO: 1553
  Description of Artificial Sequence: Synthetic brazil nut; 5' sequence and inner sequence

SEQ ID NO: 9253 - DNA, 53 bp, Artificial Sequence; identical to SEQ ID NO: 1696
  Description of Artificial Sequence: Synthetic brazil nut; 5' sequence and inner sequence

SEQ ID NO: 9254 - DNA, 53 bp, Artificial Sequence; identical to SEQ ID NO: 1222
  Description of Artificial Sequence: Synthetic brazil nut; 5' sequence and inner sequence

SEQ ID NO: 9255 - DNA, 53 bp, Artificial Sequence; identical to SEQ ID NO: 1634
  Description of Artificial Sequence: Synthetic brazil nut; 5' sequence and inner sequence

SEQ ID NO: 9256 - DNA, 53 bp, Artificial Sequence; identical to SEQ ID NO: 1496
  Description of Artificial Sequence: Synthetic brazil nut; 5' sequence and inner sequence

SEQ ID NO: 9257 - DNA, 53 bp, Artificial Sequence; identical to SEQ ID NO: 1195
  Description of Artificial Sequence: Synthetic brazil nut; 5' sequence and inner sequence

SEQ ID NO: 9258 - DNA, 53 bp, Artificial Sequence; identical to SEQ ID NO: 1160
  Description of Artificial Sequence: Synthetic brazil nut; 5' sequence and inner sequence

SEQ ID NO: 9259 - DNA, 53 bp, Artificial Sequence; identical to SEQ ID NO: 1204
  Description of Artificial Sequence: Synthetic brazil nut; 5' sequence and inner sequence

SEQ ID NO: 9260 - DNA, 53 bp, Artificial Sequence; identical to SEQ ID NO: 1309
  Description of Artificial Sequence: Synthetic brazil nut; 5' sequence and inner sequence

SEQ ID NO: 9261 - DNA, 53 bp, Artificial Sequence; identical to SEQ ID NO: 1585
  Description of Artificial Sequence: Synthetic brazil nut; 5' sequence and inner sequence

SEQ ID NO: 9262 - DNA, 53 bp, Artificial Sequence; identical to SEQ ID NO: 5336
  Description of Artificial Sequence: Synthetic brazil nut; 5' sequence and inner sequence

SEQ ID NO: 9263 - DNA, 53 bp, Artificial Sequence; identical to SEQ ID NO: 1072
  Description of Artificial Sequence: Synthetic brazil nut; 5' sequence and inner sequence

SEQ ID NO: 9264 - DNA, 53 bp, Artificial Sequence; identical to SEQ ID NO: 1187
  Description of Artificial Sequence: Synthetic brazil nut; 5' sequence and inner sequence

SEQ ID NO: 9265 - DNA, 53 bp, Artificial Sequence; identical to SEQ ID NO: 1228
  Description of Artificial Sequence: Synthetic brazil nut; 5' sequence and inner sequence

SEQ ID NO: 9266 - DNA, 53 bp, Artificial Sequence; identical to SEQ ID NO: 1953
  Description of Artificial Sequence: Synthetic brazil nut; 5' sequence and inner sequence

SEQ ID NO: 9267 - DNA, 53 bp, Artificial Sequence; identical to SEQ ID NO: 1373
  Description of Artificial Sequence: Synthetic brazil nut; 5' sequence and inner sequence

SEQ ID NO: 9268 - DNA, 53 bp, Artificial Sequence; identical to SEQ ID NO: 1217
  Description of Artificial Sequence: Synthetic brazil nut; 5' sequence and inner sequence

SEQ ID NO: 9269 - DNA, 53 bp, Artificial Sequence; identical to SEQ ID NO: 1376
  Description of Artificial Sequence: Synthetic brazil nut; 5' sequence and inner sequence

SEQ ID NO: 9270 - DNA, 53 bp, Artificial Sequence; identical to SEQ ID NO: 1224
  Description of Artificial Sequence: Synthetic brazil nut; 5' sequence and inner sequence

SEQ ID NO: 9271 - DNA, 53 bp, Artificial Sequence; identical to SEQ ID NO: 1524
  Description of Artificial Sequence: Synthetic brazil nut; 5' sequence and inner sequence

SEQ ID NO: 9272 - DNA, 53 bp, Artificial Sequence; identical to SEQ ID NO: 1166
  Description of Artificial Sequence: Synthetic brazil nut; 5' sequence and inner sequence

SEQ ID NO: 9273 - DNA, 53 bp, Artificial Sequence; identical to SEQ ID NO: 1392
  Description of Artificial Sequence: Synthetic brazil nut; 5' sequence and inner sequence

SEQ ID NO: 9274 - DNA, 53 bp, Artificial Sequence; identical to SEQ ID NO: 1098
  Description of Artificial Sequence: Synthetic brazil nut; 5' sequence and inner sequence

SEQ ID NO: 9275 - DNA, 53 bp, Artificial Sequence; identical to SEQ ID NO: 1671
  Description of Artificial Sequence: Synthetic brazil nut; 5' sequence and inner sequence

SEQ ID NO: 9276 - DNA, 53 bp, Artificial Sequence; identical to SEQ ID NO: 1152
  Description of Artificial Sequence: Synthetic brazil nut; 5' sequence and inner sequence

SEQ ID NO: 9277 - DNA, 53 bp, Artificial Sequence; identical to SEQ ID NO: 1506
  Description of Artificial Sequence: Synthetic brazil nut; 5' sequence and inner sequence

SEQ ID NO: 9278 - DNA, 53 bp, Artificial Sequence; identical to SEQ ID NO: 1192
  Description of Artificial Sequence: Synthetic brazil nut; 5' sequence and inner sequence

SEQ ID NO: 9279 - DNA, 53 bp, Artificial Sequence; identical to SEQ ID NO: 1556
  Description of Artificial Sequence: Synthetic brazil nut; 5' sequence and inner sequence

SEQ ID NO: 9280 - DNA, 53 bp, Artificial Sequence; identical to SEQ ID NO: 1305
  Description of Artificial Sequence: Synthetic brazil nut; 5' sequence and inner sequence

SEQ ID NO: 9281 - DNA, 53 bp, Artificial Sequence; identical to SEQ ID NO: 1090
  Description of Artificial Sequence: Synthetic brazil nut; 5' sequence and inner sequence

SEQ ID NO: 9282 - DNA, 53 bp, Artificial Sequence; identical to SEQ ID NO: 1540
  Description of Artificial Sequence: Synthetic brazil nut; 5' sequence and inner sequence

SEQ ID NO: 9283 - DNA, 53 bp, Artificial Sequence; identical to SEQ ID NO: 1323
  Description of Artificial Sequence: Synthetic brazil nut; 5' sequence and inner sequence

SEQ ID NO: 9284 - DNA, 53 bp, Artificial Sequence; identical to SEQ ID NO: 1365
  Description of Artificial Sequence: Synthetic brazil nut; 5' sequence and inner sequence

SEQ ID NO: 9285 - DNA, 53 bp, Artificial Sequence; identical to SEQ ID NO: 1572
  Description of Artificial Sequence: Synthetic brazil nut; 5' sequence and inner sequence

SEQ ID NO: 9286 - DNA, 53 bp, Artificial Sequence; identical to SEQ ID NO: 1529
  Description of Artificial Sequence: Synthetic brazil nut; 5' sequence and inner sequence

SEQ ID NO: 9287 - DNA, 53 bp, Artificial Sequence; identical to SEQ ID NO: 1481
  Description of Artificial Sequence: Synthetic brazil nut; 5' sequence and inner sequence

SEQ ID NO: 9288 - DNA, 51 bp, Artificial Sequence; identical to SEQ ID NO: 1241
  Description of Artificial Sequence: Synthetic brazil nut; 5' sequence and inner sequence

SEQ ID NO: 9289 - DNA, 53 bp, Artificial Sequence; identical to SEQ ID NO: 1511
  Description of Artificial Sequence: Synthetic brazil nut; 5' sequence and inner sequence

SEQ ID NO: 9290 - DNA, 53 bp, Artificial Sequence; identical to SEQ ID NO: 1343
  Description of Artificial Sequence: Synthetic brazil nut; 5' sequence and inner sequence

SEQ ID NO: 9291 - DNA, 53 bp, Artificial Sequence; identical to SEQ ID NO: 1613
  Description of Artificial Sequence: Synthetic brazil nut; 5' sequence and inner sequence

SEQ ID NO: 9292 - DNA, 53 bp, Artificial Sequence; identical to SEQ ID NO: 1246
  Description of Artificial Sequence: Synthetic brazil nut; 5' sequence and inner sequence

SEQ ID NO: 9293 - DNA, 53 bp, Artificial Sequence; identical to SEQ ID NO: 1611
  Description of Artificial Sequence: Synthetic brazil nut; 5' sequence and inner sequence

SEQ ID NO: 9294 - DNA, 53 bp, Artificial Sequence; identical to SEQ ID NO: 1182
  Description of Artificial Sequence: Synthetic brazil nut; 5' sequence and inner sequence

SEQ ID NO: 9295 - DNA, 53 bp, Artificial Sequence; identical to SEQ ID NO: 1413
  Description of Artificial Sequence: Synthetic brazil nut; 5' sequence and inner sequence

SEQ ID NO: 9296 - DNA, 53 bp, Artificial Sequence; identical to SEQ ID NO: 1450
  Description of Artificial Sequence: Synthetic brazil nut; 5' sequence and inner sequence

SEQ ID NO: 9297 - DNA, 53 bp, Artificial Sequence; identical to SEQ ID NO: 1485
  Description of Artificial Sequence: Synthetic brazil nut; 5' sequence and inner sequence

SEQ ID NO: 9298 - DNA, 53 bp, Artificial Sequence; identical to SEQ ID NO: 1783
  Description of Artificial Sequence: Synthetic brazil nut; 5' sequence and inner sequence

SEQ ID NO: 9299 - DNA, 53 bp, Artificial Sequence; identical to SEQ ID NO: 1310
  Description of Artificial Sequence: Synthetic brazil nut; 5' sequence and inner sequence

SEQ ID NO: 9300 - DNA, 53 bp, Artificial Sequence; identical to SEQ ID NO: 1178
  Description of Artificial Sequence: Synthetic brazil nut; 5' sequence and inner sequence

SEQ ID NO: 9301 - DNA, 53 bp, Artificial Sequence; identical to SEQ ID NO: 1520
  Description of Artificial Sequence: Synthetic brazil nut; 5' sequence and inner sequence

SEQ ID NO: 9302 - DNA, 53 bp, Artificial Sequence; identical to SEQ ID NO: 5348
  Description of Artificial Sequence: Synthetic brazil nut; 5' sequence and inner sequence

SEQ ID NO: 9303 - DNA, 53 bp, Artificial Sequence; identical to SEQ ID NO: 1916
  Description of Artificial Sequence: Synthetic brazil nut; 5' sequence and inner sequence

SEQ ID NO: 9304 - DNA, 53 bp, Artificial Sequence; identical to SEQ ID NO: 1254
  Description of Artificial Sequence: Synthetic brazil nut; 5' sequence and inner sequence

SEQ ID NO: 9305 - DNA, 53 bp, Artificial Sequence; identical to SEQ ID NO: 1391
  Description of Artificial Sequence: Synthetic brazil nut; 5' sequence and inner sequence

SEQ ID NO: 9306 - DNA, 53 bp, Artificial Sequence; identical to SEQ ID NO: 1414
  Description of Artificial Sequence: Synthetic brazil nut; 5' sequence and inner sequence

SEQ ID NO: 9307 - DNA, 53 bp, Artificial Sequence; identical to SEQ ID NO: 1220
  Description of Artificial Sequence: Synthetic brazil nut; 5' sequence and inner sequence

SEQ ID NO: 9308 - DNA, 53 bp, Artificial Sequence; identical to SEQ ID NO: 1271
  Description of Artificial Sequence: Synthetic brazil nut; 5' sequence and inner sequence

SEQ ID NO: 9309 - DNA, 53 bp, Artificial Sequence; identical to SEQ ID NO: 5234
  Description of Artificial Sequence: Synthetic brazil nut; 5' sequence and inner sequence

SEQ ID NO: 9310 - DNA, 53 bp, Artificial Sequence; identical to SEQ ID NO: 5907
  Description of Artificial Sequence: Synthetic brazil nut; 5' sequence and inner sequence

SEQ ID NO: 9311 - DNA, 53 bp, Artificial Sequence; identical to SEQ ID NO: 1214
  Description of Artificial Sequence: Synthetic brazil nut; 5' sequence and inner sequence

SEQ ID NO: 9312 - DNA, 53 bp, Artificial Sequence; identical to SEQ ID NO: 1791
  Description of Artificial Sequence: Synthetic brazil nut; 5' sequence and inner sequence

SEQ ID NO: 9313 - DNA, 53 bp, Artificial Sequence; identical to SEQ ID NO: 5406
  Description of Artificial Sequence: Synthetic brazil nut; 5' sequence and inner sequence

SEQ ID NO: 9314 - DNA, 53 bp, Artificial Sequence; identical to SEQ ID NO: 1173
  Description of Artificial Sequence: Synthetic brazil nut; 5' sequence and inner sequence

SEQ ID NO: 9315 - DNA, 53 bp, Artificial Sequence; identical to SEQ ID NO: 1850
  Description of Artificial Sequence: Synthetic brazil nut; 5' sequence and inner sequence

SEQ ID NO: 9316 - DNA, 53 bp, Artificial Sequence; identical to SEQ ID NO: 1528
  Description of Artificial Sequence: Synthetic brazil nut; 5' sequence and inner sequence

SEQ ID NO: 9317 - DNA, 53 bp, Artificial Sequence; identical to SEQ ID NO: 1442
  Description of Artificial Sequence: Synthetic brazil nut; 5' sequence and inner sequence

SEQ ID NO: 9318 - DNA, 53 bp, Artificial Sequence; identical to SEQ ID NO: 1349
  Description of Artificial Sequence: Synthetic brazil nut; 5' sequence and inner sequence

SEQ ID NO: 9319 - DNA, 54 bp, Artificial Sequence; identical to SEQ ID NO: 5245
  Description of Artificial Sequence: Synthetic brazil nut; 5' sequence and inner sequence

SEQ ID NO: 9320 - DNA, 53 bp, Artificial Sequence; identical to SEQ ID NO: 5238
  Description of Artificial Sequence: Synthetic brazil nut; 5' sequence and inner sequence

SEQ ID NO: 9321 - DNA, 53 bp, Artificial Sequence; identical to SEQ ID NO: 1274
  Description of Artificial Sequence: Synthetic brazil nut; 5' sequence and inner sequence

SEQ ID NO: 9322 - DNA, 53 bp, Artificial Sequence; identical to SEQ ID NO: 1344
  Description of Artificial Sequence: Synthetic brazil nut; 5' sequence and inner sequence

SEQ ID NO: 9323 - DNA, 53 bp, Artificial Sequence; identical to SEQ ID NO: 1218
  Description of Artificial Sequence: Synthetic brazil nut; 5' sequence and inner sequence

SEQ ID NO: 9324 - DNA, 53 bp, Artificial Sequence; identical to SEQ ID NO: 1379
  Description of Artificial Sequence: Synthetic brazil nut; 5' sequence and inner sequence

SEQ ID NO: 9325 - DNA, 53 bp, Artificial Sequence; identical to SEQ ID NO: 5613
  Description of Artificial Sequence: Synthetic brazil nut; 5' sequence and inner sequence

SEQ ID NO: 9326 - DNA, 53 bp, Artificial Sequence; identical to SEQ ID NO: 1394
  Description of Artificial Sequence: Synthetic brazil nut; 5' sequence and inner sequence

SEQ ID NO: 9327 - DNA, 53 bp, Artificial Sequence; identical to SEQ ID NO: 5254
  Description of Artificial Sequence: Synthetic brazil nut; 5' sequence and inner sequence

SEQ ID NO: 9328 - DNA, 53 bp, Artificial Sequence; identical to SEQ ID NO: 1390
  Description of Artificial Sequence: Synthetic brazil nut; 5' sequence and inner sequence

SEQ ID NO: 9329 - DNA, 53 bp, Artificial Sequence; identical to SEQ ID NO: 1563
  Description of Artificial Sequence: Synthetic brazil nut; 5' sequence and inner sequence

SEQ ID NO: 9330 - DNA, 53 bp, Artificial Sequence; identical to SEQ ID NO: 1387
  Description of Artificial Sequence: Synthetic brazil nut; 5' sequence and inner sequence

SEQ ID NO: 9331 - DNA, 53 bp, Artificial Sequence; identical to SEQ ID NO: 1135
  Description of Artificial Sequence: Synthetic brazil nut; 5' sequence and inner sequence

SEQ ID NO: 9332 - DNA, 53 bp, Artificial Sequence; identical to SEQ ID NO: 5380
  Description of Artificial Sequence: Synthetic brazil nut; 5' sequence and inner sequence

SEQ ID NO: 9333 - DNA, 53 bp, Artificial Sequence; identical to SEQ ID NO: 1189
  Description of Artificial Sequence: Synthetic brazil nut; 5' sequence and inner sequence

SEQ ID NO: 9334 - DNA, 53 bp, Artificial Sequence; identical to SEQ ID NO: 1137
  Description of Artificial Sequence: Synthetic brazil nut; 5' sequence and inner sequence

SEQ ID NO: 9335 - DNA, 53 bp, Artificial Sequence; identical to SEQ ID NO: 1084
  Description of Artificial Sequence: Synthetic brazil nut; 5' sequence and inner sequence

SEQ ID NO: 9336 - DNA, 53 bp, Artificial Sequence; identical to SEQ ID NO: 1433
  Description of Artificial Sequence: Synthetic brazil nut; 5' sequence and inner sequence

SEQ ID NO: 9337 - DNA, 53 bp, Artificial Sequence; identical to SEQ ID NO: 1457
  Description of Artificial Sequence: Synthetic brazil nut; 5' sequence and inner sequence

SEQ ID NO: 9338 - DNA, 53 bp, Artificial Sequence; identical to SEQ ID NO: 5792
  Description of Artificial Sequence: Synthetic brazil nut; 5' sequence and inner sequence

SEQ ID NO: 9339 - DNA, 53 bp, Artificial Sequence; identical to SEQ ID NO: 1167
  Description of Artificial Sequence: Synthetic brazil nut; 5' sequence and inner sequence

SEQ ID NO: 9340 - DNA, 53 bp, Artificial Sequence; identical to SEQ ID NO: 1370
  Description of Artificial Sequence: Synthetic brazil nut; 5' sequence and inner sequence

SEQ ID NO: 9341 - DNA, 53 bp, Artificial Sequence; identical to SEQ ID NO: 1523
  Description of Artificial Sequence: Synthetic brazil nut; 5' sequence and inner sequence

SEQ ID NO: 9342 - DNA, 53 bp, Artificial Sequence; identical to SEQ ID NO: 1114
  Description of Artificial Sequence: Synthetic brazil nut; 5' sequence and inner sequence

SEQ ID NO: 9343 - DNA, 53 bp, Artificial Sequence; identical to SEQ ID NO: 5280
  Description of Artificial Sequence: Synthetic brazil nut; 5' sequence and inner sequence

SEQ ID NO: 9344 - DNA, 53 bp, Artificial Sequence; identical to SEQ ID NO: 1272
  Description of Artificial Sequence: Synthetic brazil nut; 5' sequence and inner sequence

SEQ ID NO: 9345 - DNA, 53 bp, Artificial Sequence; identical to SEQ ID NO: 1358
  Description of Artificial Sequence: Synthetic brazil nut; 5' sequence and inner sequence

SEQ ID NO: 9346 - DNA, 53 bp, Artificial Sequence; identical to SEQ ID NO: 1426
  Description of Artificial Sequence: Synthetic brazil nut; 5' sequence and inner sequence

SEQ ID NO: 9347 - DNA, 53 bp, Artificial Sequence; identical to SEQ ID NO: 1320
  Description of Artificial Sequence: Synthetic brazil nut; 5' sequence and inner sequence

SEQ ID NO: 9348 - DNA, 53 bp, Artificial Sequence; identical to SEQ ID NO: 1256
  Description of Artificial Sequence: Synthetic brazil nut; 5' sequence and inner sequence

SEQ ID NO: 9349 - DNA, 53 bp, Artificial Sequence; identical to SEQ ID NO: 1303
  Description of Artificial Sequence: Synthetic brazil nut; 5' sequence and inner sequence

SEQ ID NO: 9350 - DNA, 53 bp, Artificial Sequence; identical to SEQ ID NO: 1950
  Description of Artificial Sequence: Synthetic brazil nut; 5' sequence and inner sequence

SEQ ID NO: 9351 - DNA, 53 bp, Artificial Sequence; identical to SEQ ID NO: 1399
  Description of Artificial Sequence: Synthetic brazil nut; 5' sequence and inner sequence

SEQ ID NO: 9352 - DNA, 53 bp, Artificial Sequence; identical to SEQ ID NO: 1409
  Description of Artificial Sequence: Synthetic brazil nut; 5' sequence and inner sequence

SEQ ID NO: 9353 - DNA, 53 bp, Artificial Sequence; identical to SEQ ID NO: 5755
  Description of Artificial Sequence: Synthetic brazil nut; 5' sequence and inner sequence

SEQ ID NO: 9354 - DNA, 53 bp, Artificial Sequence; identical to SEQ ID NO: 1279
  Description of Artificial Sequence: Synthetic brazil nut; 5' sequence and inner sequence

SEQ ID NO: 9355 - DNA, 53 bp, Artificial Sequence; identical to SEQ ID NO: 1487
  Description of Artificial Sequence: Synthetic brazil nut; 5' sequence and inner sequence

SEQ ID NO: 9356 - DNA, 53 bp, Artificial Sequence; identical to SEQ ID NO: 1928
  Description of Artificial Sequence: Synthetic brazil nut; 5' sequence and inner sequence

SEQ ID NO: 9357 - DNA, 53 bp, Artificial Sequence; identical to SEQ ID NO: 1901
  Description of Artificial Sequence: Synthetic brazil nut; 5' sequence and inner sequence

SEQ ID NO: 9358 - DNA, 53 bp, Artificial Sequence; identical to SEQ ID NO: 1197
  Description of Artificial Sequence: Synthetic brazil nut; 5' sequence and inner sequence

SEQ ID NO: 9359 - DNA, 56 bp, Artificial Sequence; identical to SEQ ID NO: 1864
  Description of Artificial Sequence: Synthetic brazil nut; 5' sequence and inner sequence

SEQ ID NO: 9360 - DNA, 53 bp, Artificial Sequence; identical to SEQ ID NO: 1403
  Description of Artificial Sequence: Synthetic brazil nut; 5' sequence and inner sequence

SEQ ID NO: 9361 - DNA, 53 bp, Artificial Sequence; identical to SEQ ID NO: 5260
  Description of Artificial Sequence: Synthetic brazil nut; 5' sequence and inner sequence

SEQ ID NO: 9362 - DNA, 53 bp, Artificial Sequence; identical to SEQ ID NO: 1170
  Description of Artificial Sequence: Synthetic brazil nut; 5' sequence and inner sequence

SEQ ID NO: 9363 - DNA, 53 bp, Artificial Sequence; identical to SEQ ID NO: 1419
  Description of Artificial Sequence: Synthetic brazil nut; 5' sequence and inner sequence

SEQ ID NO: 9364 - DNA, 53 bp, Artificial Sequence; identical to SEQ ID NO: 1741
  Description of Artificial Sequence: Synthetic brazil nut; 5' sequence and inner sequence

SEQ ID NO: 9365 - DNA, 53 bp, Artificial Sequence; identical to SEQ ID NO: 1176
  Description of Artificial Sequence: Synthetic brazil nut; 5' sequence and inner sequence

SEQ ID NO: 9366 - DNA, 53 bp, Artificial Sequence; identical to SEQ ID NO: 1383
  Description of Artificial Sequence: Synthetic brazil nut; 5' sequence and inner sequence

SEQ ID NO: 9367 - DNA, 53 bp, Artificial Sequence; identical to SEQ ID NO: 1212
  Description of Artificial Sequence: Synthetic brazil nut; 5' sequence and inner sequence

SEQ ID NO: 9368 - DNA, 52 bp, Artificial Sequence; identical to SEQ ID NO: 1259
  Description of Artificial Sequence: Synthetic brazil nut; 5' sequence and inner sequence

SEQ ID NO: 9369 - DNA, 53 bp, Artificial Sequence; identical to SEQ ID NO: 5301
  Description of Artificial Sequence: Synthetic brazil nut; 5' sequence and inner sequence

SEQ ID NO: 9370 - DNA, 53 bp, Artificial Sequence; identical to SEQ ID NO: 1437
  Description of Artificial Sequence: Synthetic brazil nut; 5' sequence and inner sequence

SEQ ID NO: 9371 - DNA, 53 bp, Artificial Sequence; identical to SEQ ID NO: 1298
  Description of Artificial Sequence: Synthetic brazil nut; 5' sequence and inner sequence

SEQ ID NO: 9372 - DNA, 53 bp, Artificial Sequence; identical to SEQ ID NO: 1278
  Description of Artificial Sequence: Synthetic brazil nut; 5' sequence and inner sequence

SEQ ID NO: 9373 - DNA, 53 bp, Artificial Sequence; identical to SEQ ID NO: 1467
  Description of Artificial Sequence: Synthetic brazil nut; 5' sequence and inner sequence

SEQ ID NO: 9374 - DNA, 53 bp, Artificial Sequence; identical to SEQ ID NO: 1994
  Description of Artificial Sequence: Synthetic brazil nut; 5' sequence and inner sequence

SEQ ID NO: 9375 - DNA, 53 bp, Artificial Sequence; identical to SEQ ID NO: 1836
  Description of Artificial Sequence: Synthetic brazil nut; 5' sequence and inner sequence

SEQ ID NO: 9376 - DNA, 53 bp, Artificial Sequence; identical to SEQ ID NO: 1319
  Description of Artificial Sequence: Synthetic brazil nut; 5' sequence and inner sequence

SEQ ID NO: 9377 - DNA, 53 bp, Artificial Sequence; identical to SEQ ID NO: 5425
  Description of Artificial Sequence: Synthetic brazil nut; 5' sequence and inner sequence

SEQ ID NO: 9378 - DNA, 53 bp, Artificial Sequence; identical to SEQ ID NO: 1530
  Description of Artificial Sequence: Synthetic brazil nut; 5' sequence and inner sequence

SEQ ID NO: 9379 - DNA, 53 bp, Artificial Sequence; identical to SEQ ID NO: 1350
  Description of Artificial Sequence: Synthetic brazil nut; 5' sequence and inner sequence

SEQ ID NO: 9380 - DNA, 53 bp, Artificial Sequence; identical to SEQ ID NO: 1340
  Description of Artificial Sequence: Synthetic brazil nut; 5' sequence and inner sequence

SEQ ID NO: 9381 - DNA, 53 bp, Artificial Sequence; identical to SEQ ID NO: 1811
  Description of Artificial Sequence: Synthetic brazil nut; 5' sequence and inner sequence

SEQ ID NO: 9382 - DNA, 53 bp, Artificial Sequence; identical to SEQ ID NO: 1332
  Description of Artificial Sequence: Synthetic brazil nut; 5' sequence and inner sequence

SEQ ID NO: 9383 - DNA, 53 bp, Artificial Sequence; identical to SEQ ID NO: 1534
  Description of Artificial Sequence: Synthetic brazil nut; 5' sequence and inner sequence

SEQ ID NO: 9384 - DNA, 53 bp, Artificial Sequence; identical to SEQ ID NO: 1380
  Description of Artificial Sequence: Synthetic brazil nut; 5' sequence and inner sequence

SEQ ID NO: 9385 - DNA, 53 bp, Artificial Sequence; identical to SEQ ID NO: 1545
  Description of Artificial Sequence: Synthetic brazil nut; 5' sequence and inner sequence

SEQ ID NO: 9386 - DNA, 53 bp, Artificial Sequence; identical to SEQ ID NO: 1912
  Description of Artificial Sequence: Synthetic brazil nut; 5' sequence and inner sequence

SEQ ID NO: 9387 - DNA, 53 bp, Artificial Sequence; identical to SEQ ID NO: 1280
  Description of Artificial Sequence: Synthetic brazil nut; 5' sequence and inner sequence

SEQ ID NO: 9388 - DNA, 53 bp, Artificial Sequence; identical to SEQ ID NO: 1130
  Description of Artificial Sequence: Synthetic brazil nut; 5' sequence and inner sequence

SEQ ID NO: 9389 - DNA, 53 bp, Artificial Sequence; identical to SEQ ID NO: 1478
  Description of Artificial Sequence: Synthetic brazil nut; 5' sequence and inner sequence

SEQ ID NO: 9390 - DNA, 53 bp, Artificial Sequence; identical to SEQ ID NO: 1400
  Description of Artificial Sequence: Synthetic brazil nut; 5' sequence and inner sequence

SEQ ID NO: 9391 - DNA, 53 bp, Artificial Sequence; identical to SEQ ID NO: 1255
  Description of Artificial Sequence: Synthetic brazil nut; 5' sequence and inner sequence

SEQ ID NO: 9392 - DNA, 53 bp, Artificial Sequence; identical to SEQ ID NO: 1557
  Description of Artificial Sequence: Synthetic brazil nut; 5' sequence and inner sequence

SEQ ID NO: 9393 - DNA, 53 bp, Artificial Sequence; identical to SEQ ID NO: 1273
  Description of Artificial Sequence: Synthetic brazil nut; 5' sequence and inner sequence

SEQ ID NO: 9394 - DNA, 53 bp, Artificial Sequence; identical to SEQ ID NO: 1119
  Description of Artificial Sequence: Synthetic brazil nut; 5' sequence and inner sequence

SEQ ID NO: 9395 - DNA, 53 bp, Artificial Sequence; identical to SEQ ID NO: 5419
  Description of Artificial Sequence: Synthetic brazil nut; 5' sequence and inner sequence

SEQ ID NO: 9396 - DNA, 53 bp, Artificial Sequence; identical to SEQ ID NO: 1771
  Description of Artificial Sequence: Synthetic brazil nut; 5' sequence and inner sequence

SEQ ID NO: 9397 - DNA, 53 bp, Artificial Sequence; identical to SEQ ID NO: 5401
  Description of Artificial Sequence: Synthetic brazil nut; 5' sequence and inner sequence

SEQ ID NO: 9398 - DNA, 53 bp, Artificial Sequence; identical to SEQ ID NO: 1277
  Description of Artificial Sequence: Synthetic brazil nut; 5' sequence and inner sequence

SEQ ID NO: 9399 - DNA, 53 bp, Artificial Sequence; identical to SEQ ID NO: 5351
  Description of Artificial Sequence: Synthetic brazil nut; 5' sequence and inner sequence

SEQ ID NO: 9400 - DNA, 53 bp, Artificial Sequence; identical to SEQ ID NO: 1517
  Description of Artificial Sequence: Synthetic brazil nut; 5' sequence and inner sequence

SEQ ID NO: 9401 - DNA, 53 bp, Artificial Sequence
  Description of Artificial Sequence: Synthetic brazil nut; 5' sequence and inner sequence
tagggaagagaaggacatatgatggccaacgctggatgagggctgtatgtggc

SEQ ID NO: 9402 - DNA, 53 bp, Artificial Sequence; identical to SEQ ID NO: 1764
  Description of Artificial Sequence: Synthetic brazil nut; 5' sequence and inner sequence

SEQ ID NO: 9403 - DNA, 53 bp, Artificial Sequence; identical to SEQ ID NO: 1346
  Description of Artificial Sequence: Synthetic brazil nut; 5' sequence and inner sequence

SEQ ID NO: 9404 - DNA, 53 bp, Artificial Sequence; identical to SEQ ID NO: 1915
  Description of Artificial Sequence: Synthetic brazil nut; 5' sequence and inner sequence

SEQ ID NO: 9405 - DNA, 53 bp, Artificial Sequence; identical to SEQ ID NO: 1177
  Description of Artificial Sequence: Synthetic brazil nut; 5' sequence and inner sequence

SEQ ID NO: 9406 - DNA, 53 bp, Artificial Sequence; identical to SEQ ID NO: 1181
  Description of Artificial Sequence: Synthetic brazil nut; 5' sequence and inner sequence

SEQ ID NO: 9407 - DNA, 53 bp, Artificial Sequence; identical to SEQ ID NO: 1301
  Description of Artificial Sequence: Synthetic brazil nut; 5' sequence and inner sequence

SEQ ID NO: 9408 - DNA, 53 bp, Artificial Sequence; identical to SEQ ID NO: 5317
  Description of Artificial Sequence: Synthetic brazil nut; 5' sequence and inner sequence

SEQ ID NO: 9409 - DNA, 53 bp, Artificial Sequence; identical to SEQ ID NO: 1244
  Description of Artificial Sequence: Synthetic brazil nut; 5' sequence and inner sequence

SEQ ID NO: 9410 - DNA, 53 bp, Artificial Sequence; identical to SEQ ID NO: 1375
  Description of Artificial Sequence: Synthetic brazil nut; 5' sequence and inner sequence

SEQ ID NO: 9411 - DNA, 53 bp, Artificial Sequence; identical to SEQ ID NO: 1932
  Description of Artificial Sequence: Synthetic brazil nut; 5' sequence and inner sequence

SEQ ID NO: 9412 - DNA, 53 bp, Artificial Sequence; identical to SEQ ID NO: 1807
  Description of Artificial Sequence: Synthetic brazil nut; 5' sequence and inner sequence

SEQ ID NO: 9413 - DNA, 53 bp, Artificial Sequence; identical to SEQ ID NO: 5420
  Description of Artificial Sequence: Synthetic brazil nut; 5' sequence and inner sequence

SEQ ID NO: 9414 - DNA, 53 bp, Artificial Sequence; identical to SEQ ID NO: 1625
  Description of Artificial Sequence: Synthetic brazil nut; 5' sequence and inner sequence

SEQ ID NO: 9415 - DNA, 53 bp, Artificial Sequence; identical to SEQ ID NO: 5492
  Description of Artificial Sequence: Synthetic brazil nut; 5' sequence and inner sequence

SEQ ID NO: 9416 - DNA, 53 bp, Artificial Sequence; identical to SEQ ID NO: 5445
  Description of Artificial Sequence: Synthetic brazil nut; 5' sequence and inner sequence

SEQ ID NO: 9417 - DNA, 53 bp, Artificial Sequence; identical to SEQ ID NO: 1846
  Description of Artificial Sequence: Synthetic brazil nut; 5' sequence and inner sequence

SEQ ID NO: 9418 - DNA, 53 bp, Artificial Sequence; identical to SEQ ID NO: 1361
  Description of Artificial Sequence: Synthetic brazil nut; 5' sequence and inner sequence

SEQ ID NO: 9419 - DNA, 53 bp, Artificial Sequence; identical to SEQ ID NO: 1314
  Description of Artificial Sequence: Synthetic brazil nut; 5' sequence and inner sequence

SEQ ID NO: 9420 - DNA, 53 bp, Artificial Sequence; identical to SEQ ID NO: 1432
  Description of Artificial Sequence: Synthetic brazil nut; 5' sequence and inner sequence

SEQ ID NO: 9421 - DNA, 53 bp, Artificial Sequence; identical to SEQ ID NO: 1313
  Description of Artificial Sequence: Synthetic brazil nut; 5' sequence and inner sequence

SEQ ID NO: 9422 - DNA, 53 bp, Artificial Sequence; identical to SEQ ID NO: 1757
  Description of Artificial Sequence: Synthetic brazil nut; 5' sequence and inner sequence

SEQ ID NO: 9423 - DNA, 53 bp, Artificial Sequence; identical to SEQ ID NO: 5585
  Description of Artificial Sequence: Synthetic brazil nut; 5' sequence and inner sequence

SEQ ID NO: 9424 - DNA, 53 bp, Artificial Sequence; identical to SEQ ID NO: 1209
  Description of Artificial Sequence: Synthetic brazil nut; 5' sequence and inner sequence

SEQ ID NO: 9425 - DNA, 53 bp, Artificial Sequence; identical to SEQ ID NO: 1231
  Description of Artificial Sequence: Synthetic brazil nut; 5' sequence and inner sequence

SEQ ID NO: 9426 - DNA, 53 bp, Artificial Sequence; identical to SEQ ID NO: 1210
  Description of Artificial Sequence: Synthetic brazil nut; 5' sequence and inner sequence

SEQ ID NO: 9427 - DNA, 53 bp, Artificial Sequence; identical to SEQ ID NO: 1568
  Description of Artificial Sequence: Synthetic brazil nut; 5' sequence and inner sequence

SEQ ID NO: 9428 - DNA, 53 bp, Artificial Sequence; identical to SEQ ID NO: 1315
  Description of Artificial Sequence: Synthetic brazil nut; 5' sequence and inner sequence

SEQ ID NO: 9429 - DNA, 53 bp, Artificial Sequence; identical to SEQ ID NO: 1087
  Description of Artificial Sequence: Synthetic brazil nut; 5' sequence and inner sequence

SEQ ID NO: 9430 - DNA, 53 bp, Artificial Sequence; identical to SEQ ID NO: 1213
  Description of Artificial Sequence: Synthetic brazil nut; 5' sequence and inner sequence

SEQ ID NO: 9431 - DNA, 53 bp, Artificial Sequence; identical to SEQ ID NO: 5407
  Description of Artificial Sequence: Synthetic brazil nut; 5' sequence and inner sequence

SEQ ID NO: 9432 - DNA, 53 bp, Artificial Sequence; identical to SEQ ID NO: 5394
  Description of Artificial Sequence: Synthetic brazil nut; 5' sequence and inner sequence

SEQ ID NO: 9433 - DNA, 53 bp, Artificial Sequence; identical to SEQ ID NO: 1405
  Description of Artificial Sequence: Synthetic brazil nut; 5' sequence and inner sequence

SEQ ID NO: 9434 - DNA, 53 bp, Artificial Sequence; identical to SEQ ID NO: 1238
  Description of Artificial Sequence: Synthetic brazil nut; 5' sequence and inner sequence

SEQ ID NO: 9435 - DNA, 53 bp, Artificial Sequence; identical to SEQ ID NO: 1396
  Description of Artificial Sequence: Synthetic brazil nut; 5' sequence and inner sequence

SEQ ID NO: 9436 - DNA, 53 bp, Artificial Sequence; identical to SEQ ID NO: 1227
  Description of Artificial Sequence: Synthetic brazil nut; 5' sequence and inner sequence

SEQ ID NO: 9437 - DNA, 53 bp, Artificial Sequence; identical to SEQ ID NO: 1325
  Description of Artificial Sequence: Synthetic brazil nut; 5' sequence and inner sequence

SEQ ID NO: 9438 - DNA, 53 bp, Artificial Sequence; identical to SEQ ID NO: 5543
  Description of Artificial Sequence: Synthetic brazil nut; 5' sequence and inner sequence

SEQ ID NO: 9439 - DNA, 53 bp, Artificial Sequence; identical to SEQ ID NO: 1393
  Description of Artificial Sequence: Synthetic brazil nut; 5' sequence and inner sequence

SEQ ID NO: 9440 - DNA, 53 bp, Artificial Sequence; identical to SEQ ID NO: 1284
  Description of Artificial Sequence: Synthetic brazil nut; 5' sequence and inner sequence

SEQ ID NO: 9441 - DNA, 53 bp, Artificial Sequence; identical to SEQ ID NO: 1991
  Description of Artificial Sequence: Synthetic brazil nut; 5' sequence and inner sequence

SEQ ID NO: 9442 - DNA, 53 bp, Artificial Sequence; identical to SEQ ID NO: 1860
  Description of Artificial Sequence: Synthetic brazil nut; 5' sequence and inner sequence

SEQ ID NO: 9443 - DNA, 53 bp, Artificial Sequence; identical to SEQ ID NO: 1407
  Description of Artificial Sequence: Synthetic brazil nut; 5' sequence and inner sequence

SEQ ID NO: 9444 - DNA, 53 bp, Artificial Sequence; identical to SEQ ID NO: 1862
  Description of Artificial Sequence: Synthetic brazil nut; 5' sequence and inner sequence

SEQ ID NO: 9445 - DNA, 53 bp, Artificial Sequence; identical to SEQ ID NO: 1695
  Description of Artificial Sequence: Synthetic brazil nut; 5' sequence and inner sequence

SEQ ID NO: 9446 - DNA, 53 bp, Artificial Sequence; identical to SEQ ID NO: 1248
  Description of Artificial Sequence: Synthetic brazil nut; 5' sequence and inner sequence

SEQ ID NO: 9447 - DNA, 53 bp, Artificial Sequence; identical to SEQ ID NO: 1484
  Description of Artificial Sequence: Synthetic brazil nut; 5' sequence and inner sequence

SEQ ID NO: 9448 - DNA, 53 bp, Artificial Sequence; identical to SEQ ID NO: 1397
  Description of Artificial Sequence: Synthetic brazil nut; 5' sequence and inner sequence

SEQ ID NO: 9449 - DNA, 53 bp, Artificial Sequence; identical to SEQ ID NO: 1239
  Description of Artificial Sequence: Synthetic brazil nut; 5' sequence and inner sequence

SEQ ID NO: 9450 - DNA, 53 bp, Artificial Sequence; identical to SEQ ID NO: 1831
  Description of Artificial Sequence: Synthetic brazil nut; 5' sequence and inner sequence

SEQ ID NO: 9451 - DNA, 53 bp, Artificial Sequence; identical to SEQ ID NO: 1647
  Description of Artificial Sequence: Synthetic brazil nut; 5' sequence and inner sequence

SEQ ID NO: 9452 - DNA, 53 bp, Artificial Sequence; identical to SEQ ID NO: 1561
  Description of Artificial Sequence: Synthetic brazil nut; 5' sequence and inner sequence

SEQ ID NO: 9453 - DNA, 53 bp, Artificial Sequence; identical to SEQ ID NO: 5377
  Description of Artificial Sequence: Synthetic brazil nut; 5' sequence and inner sequence

SEQ ID NO: 9454 - DNA, 53 bp, Artificial Sequence; identical to SEQ ID NO: 1128
  Description of Artificial Sequence: Synthetic brazil nut; 5' sequence and inner sequence

SEQ ID NO: 9455 - DNA, 53 bp, Artificial Sequence; identical to SEQ ID NO: 1884
  Description of Artificial Sequence: Synthetic brazil nut; 5' sequence and inner sequence

SEQ ID NO: 9456 - DNA, 53 bp, Artificial Sequence; identical to SEQ ID NO: 1281
  Description of Artificial Sequence: Synthetic brazil nut; 5' sequence and inner sequence

SEQ ID NO: 9457 - DNA, 53 bp, Artificial Sequence; identical to SEQ ID NO: 5428
  Description of Artificial Sequence: Synthetic brazil nut; 5' sequence and inner sequence

SEQ ID NO: 9458 - DNA, 53 bp, Artificial Sequence
  Description of Artificial Sequence: Synthetic brazil nut; 5' sequence and inner sequence
tagggaagagaaggacatatgatacggcatggtgctgcgatccctgctggtca

SEQ ID NO: 9459 - DNA, 53 bp, Artificial Sequence; identical to SEQ ID NO: 1891
  Description of Artificial Sequence: Synthetic brazil nut; 5' sequence and inner sequence

SEQ ID NO: 9460 - DNA, 53 bp, Artificial Sequence; identical to SEQ ID NO: 5393
  Description of Artificial Sequence: Synthetic brazil nut; 5' sequence and inner sequence

SEQ ID NO: 9461 - DNA, 53 bp, Artificial Sequence; identical to SEQ ID NO: 1628
  Description of Artificial Sequence: Synthetic brazil nut; 5' sequence and inner sequence

SEQ ID NO: 9462 - DNA, 53 bp, Artificial Sequence; identical to SEQ ID NO: 1476
  Description of Artificial Sequence: Synthetic brazil nut; 5' sequence and inner sequence

SEQ ID NO: 9463 - DNA, 53 bp, Artificial Sequence; identical to SEQ ID NO: 1331
  Description of Artificial Sequence: Synthetic brazil nut; 5' sequence and inner sequence

SEQ ID NO: 9464 - DNA, 53 bp, Artificial Sequence; identical to SEQ ID NO: 1326
  Description of Artificial Sequence: Synthetic brazil nut; 5' sequence and inner sequence

SEQ ID NO: 9465 - DNA, 53 bp, Artificial Sequence; identical to SEQ ID NO: 5312
  Description of Artificial Sequence: Synthetic brazil nut; 5' sequence and inner sequence

SEQ ID NO: 9466 - DNA, 53 bp, Artificial Sequence; identical to SEQ ID NO: 1631
  Description of Artificial Sequence: Synthetic brazil nut; 5' sequence and inner sequence

SEQ ID NO: 9467 - DNA, 53 bp, Artificial Sequence; identical to SEQ ID NO: 1296
  Description of Artificial Sequence: Synthetic brazil nut; 5' sequence and inner sequence

SEQ ID NO: 9468 - DNA, 53 bp, Artificial Sequence; identical to SEQ ID NO: 1317
  Description of Artificial Sequence: Synthetic brazil nut; 5' sequence and inner sequence

SEQ ID NO: 9469 - DNA, 53 bp, Artificial Sequence; identical to SEQ ID NO: 1226
  Description of Artificial Sequence: Synthetic brazil nut; 5' sequence and inner sequence

SEQ ID NO: 9470 - DNA, 53 bp, Artificial Sequence; identical to SEQ ID NO: 1657
  Description of Artificial Sequence: Synthetic brazil nut; 5' sequence and inner sequence

SEQ ID NO: 9471 - DNA, 53 bp, Artificial Sequence; identical to SEQ ID NO: 1395
  Description of Artificial Sequence: Synthetic brazil nut; 5' sequence and inner sequence

SEQ ID NO: 9472 - DNA, 53 bp, Artificial Sequence; identical to SEQ ID NO: 1141
  Description of Artificial Sequence: Synthetic brazil nut; 5' sequence and inner sequence

SEQ ID NO: 9473 - DNA, 53 bp, Artificial Sequence; identical to SEQ ID NO: 1684
  Description of Artificial Sequence: Synthetic brazil nut; 5' sequence and inner sequence

SEQ ID NO: 9474 - DNA, 53 bp, Artificial Sequence; identical to SEQ ID NO: 1686
  Description of Artificial Sequence: Synthetic brazil nut; 5' sequence and inner sequence

SEQ ID NO: 9475 - DNA, 53 bp, Artificial Sequence; identical to SEQ ID NO: 1632
  Description of Artificial Sequence: Synthetic brazil nut; 5' sequence and inner sequence

SEQ ID NO: 9476 - DNA, 53 bp, Artificial Sequence; identical to SEQ ID NO: 5682
  Description of Artificial Sequence: Synthetic brazil nut; 5' sequence and inner sequence

SEQ ID NO: 9477 - DNA, 53 bp, Artificial Sequence; identical to SEQ ID NO: 5364
  Description of Artificial Sequence: Synthetic brazil nut; 5' sequence and inner sequence

SEQ ID NO: 9478 - DNA, 53 bp, Artificial Sequence; identical to SEQ ID NO: 1867
  Description of Artificial Sequence: Synthetic brazil nut; 5' sequence and inner sequence

SEQ ID NO: 9479 - DNA, 53 bp, Artificial Sequence; identical to SEQ ID NO: 1586
  Description of Artificial Sequence: Synthetic brazil nut; 5' sequence and inner sequence

SEQ ID NO: 9480 - DNA, 53 bp, Artificial Sequence; identical to SEQ ID NO: 1267
  Description of Artificial Sequence: Synthetic brazil nut; 5' sequence and inner sequence

SEQ ID NO: 9481 - DNA, 53 bp, Artificial Sequence; identical to SEQ ID NO: 1202
  Description of Artificial Sequence: Synthetic brazil nut; 5' sequence and inner sequence

SEQ ID NO: 9482 - DNA, 53 bp, Artificial Sequence; identical to SEQ ID NO: 5787
  Description of Artificial Sequence: Synthetic brazil nut; 5' sequence and inner sequence

SEQ ID NO: 9483 - DNA, 52 bp, Artificial Sequence; identical to SEQ ID NO: 1334
  Description of Artificial Sequence: Synthetic brazil nut; 5' sequence and inner sequence

SEQ ID NO: 9484 - DNA, 53 bp, Artificial Sequence; identical to SEQ ID NO: 1364
  Description of Artificial Sequence: Synthetic brazil nut; 5' sequence and inner sequence

SEQ ID NO: 9485 - DNA, 53 bp, Artificial Sequence; identical to SEQ ID NO: 1504
  Description of Artificial Sequence: Synthetic brazil nut; 5' sequence and inner sequence

SEQ ID NO: 9486 - DNA, 53 bp, Artificial Sequence; identical to SEQ ID NO: 1666
  Description of Artificial Sequence: Synthetic brazil nut; 5' sequence and inner sequence

SEQ ID NO: 9487 - DNA, 53 bp, Artificial Sequence; identical to SEQ ID NO: 1615
  Description of Artificial Sequence: Synthetic brazil nut; 5' sequence and inner sequence

SEQ ID NO: 9488 - DNA, 53 bp, Artificial Sequence; identical to SEQ ID NO: 5592
  Description of Artificial Sequence: Synthetic brazil nut; 5' sequence and inner sequence

SEQ ID NO: 9489 - DNA, 53 bp, Artificial Sequence; identical to SEQ ID NO: 1728
  Description of Artificial Sequence: Synthetic brazil nut; 5' sequence and inner sequence

SEQ ID NO: 9490 - DNA, 53 bp, Artificial Sequence; identical to SEQ ID NO: 1291
  Description of Artificial Sequence: Synthetic brazil nut; 5' sequence and inner sequence

SEQ ID NO: 9491 - DNA, 53 bp, Artificial Sequence; identical to SEQ ID NO: 5651
  Description of Artificial Sequence: Synthetic brazil nut; 5' sequence and inner sequence

SEQ ID NO: 9492 - DNA, 53 bp, Artificial Sequence; identical to SEQ ID NO: 5691
  Description of Artificial Sequence: Synthetic brazil nut; 5' sequence and inner sequence

SEQ ID NO: 9493 - DNA, 53 bp, Artificial Sequence; identical to SEQ ID NO: 5494
  Description of Artificial Sequence: Synthetic brazil nut; 5' sequence and inner sequence

SEQ ID NO: 9494 - DNA, 52 bp, Artificial Sequence; identical to SEQ ID NO: 1251
  Description of Artificial Sequence: Synthetic brazil nut; 5' sequence and inner sequence

SEQ ID NO: 9495 - DNA, 53 bp, Artificial Sequence; identical to SEQ ID NO: 1617
  Description of Artificial Sequence: Synthetic brazil nut; 5' sequence and inner sequence

SEQ ID NO: 9496 - DNA, 53 bp, Artificial Sequence; identical to SEQ ID NO: 1909
  Description of Artificial Sequence: Synthetic brazil nut; 5' sequence and inner sequence

SEQ ID NO: 9497 - DNA, 53 bp, Artificial Sequence; identical to SEQ ID NO: 5525
  Description of Artificial Sequence: Synthetic brazil nut; 5' sequence and inner sequence

SEQ ID NO: 9498 - DNA, 53 bp, Artificial Sequence; identical to SEQ ID NO: 1236
  Description of Artificial Sequence: Synthetic brazil nut; 5' sequence and inner sequence

SEQ ID NO: 9499 - DNA, 53 bp, Artificial Sequence; identical to SEQ ID NO: 1440
  Description of Artificial Sequence: Synthetic brazil nut; 5' sequence and inner sequence

SEQ ID NO: 9500 - DNA, 53 bp, Artificial Sequence; identical to SEQ ID NO: 1518
  Description of Artificial Sequence: Synthetic brazil nut; 5' sequence and inner sequence

SEQ ID NO: 9501 - DNA, 53 bp, Artificial Sequence; identical to SEQ ID NO: 5535
  Description of Artificial Sequence: Synthetic brazil nut; 5' sequence and inner sequence

SEQ ID NO: 9502 - DNA, 53 bp, Artificial Sequence; identical to SEQ ID NO: 5472
  Description of Artificial Sequence: Synthetic brazil nut; 5' sequence and inner sequence

SEQ ID NO: 9503 - DNA, 53 bp, Artificial Sequence; identical to SEQ ID NO: 1338
  Description of Artificial Sequence: Synthetic brazil nut; 5' sequence and inner sequence

SEQ ID NO: 9504 - DNA, 53 bp, Artificial Sequence; identical to SEQ ID NO: 1463
  Description of Artificial Sequence: Synthetic brazil nut; 5' sequence and inner sequence

SEQ ID NO: 9505 - DNA, 53 bp, Artificial Sequence; identical to SEQ ID NO: 1465
  Description of Artificial Sequence: Synthetic brazil nut; 5' sequence and inner sequence

SEQ ID NO: 9506 - DNA, 53 bp, Artificial Sequence; identical to SEQ ID NO: 1180
  Description of Artificial Sequence: Synthetic brazil nut; 5' sequence and inner sequence

SEQ ID NO: 9507 - DNA, 53 bp, Artificial Sequence; identical to SEQ ID NO: 5429
  Description of Artificial Sequence: Synthetic brazil nut; 5' sequence and inner sequence

SEQ ID NO: 9508 - DNA, 53 bp, Artificial Sequence; identical to SEQ ID NO: 5590
  Description of Artificial Sequence: Synthetic brazil nut; 5' sequence and inner sequence

SEQ ID NO: 9509 - DNA, 53 bp, Artificial Sequence; identical to SEQ ID NO: 1461
  Description of Artificial Sequence: Synthetic brazil nut; 5' sequence and inner sequence

SEQ ID NO: 9510 - DNA, 53 bp, Artificial Sequence; identical to SEQ ID NO: 1124
  Description of Artificial Sequence: Synthetic brazil nut; 5' sequence and inner sequence

SEQ ID NO: 9511 - DNA, 53 bp, Artificial Sequence; identical to SEQ ID NO: 1780
  Description of Artificial Sequence: Synthetic brazil nut; 5' sequence and inner sequence

SEQ ID NO: 9512 - DNA, 53 bp, Artificial Sequence; identical to SEQ ID NO: 5499
  Description of Artificial Sequence: Synthetic brazil nut; 5' sequence and inner sequence

SEQ ID NO: 9513 - DNA, 53 bp, Artificial Sequence; identical to SEQ ID NO: 1620
  Description of Artificial Sequence: Synthetic brazil nut; 5' sequence and inner sequence

SEQ ID NO: 9514 - DNA, 53 bp, Artificial Sequence; identical to SEQ ID NO: 5727
  Description of Artificial Sequence: Synthetic brazil nut; 5' sequence and inner sequence

SEQ ID NO: 9515 - DNA, 53 bp, Artificial Sequence; identical to SEQ ID NO: 1493
  Description of Artificial Sequence: Synthetic brazil nut; 5' sequence and inner sequence

SEQ ID NO: 9516 - DNA, 53 bp, Artificial Sequence; identical to SEQ ID NO: 1292
  Description of Artificial Sequence: Synthetic brazil nut; 5' sequence and inner sequence

SEQ ID NO: 9517 - DNA, 53 bp, Artificial Sequence; identical to SEQ ID NO: 1869
  Description of Artificial Sequence: Synthetic brazil nut; 5' sequence and inner sequence

SEQ ID NO: 9518 - DNA, 53 bp, Artificial Sequence; identical to SEQ ID NO: 1294
  Description of Artificial Sequence: Synthetic brazil nut; 5' sequence and inner sequence

SEQ ID NO: 9519 - DNA, 53 bp, Artificial Sequence; identical to SEQ ID NO: 5808
  Description of Artificial Sequence: Synthetic brazil nut; 5' sequence and inner sequence

SEQ ID NO: 9520 - DNA, 53 bp, Artificial Sequence; identical to SEQ ID NO: 1900
  Description of Artificial Sequence: Synthetic brazil nut; 5' sequence and inner sequence

SEQ ID NO: 9521 - DNA, 53 bp, Artificial Sequence; identical to SEQ ID NO: 1519
  Description of Artificial Sequence: Synthetic brazil nut; 5' sequence and inner sequence

SEQ ID NO: 9522 - DNA, 53 bp, Artificial Sequence; identical to SEQ ID NO: 1663
  Description of Artificial Sequence: Synthetic brazil nut; 5' sequence and inner sequence

SEQ ID NO: 9523 - DNA, 53 bp, Artificial Sequence; identical to SEQ ID NO: 1422
  Description of Artificial Sequence: Synthetic brazil nut; 5' sequence and inner sequence

SEQ ID NO: 9524 - DNA, 53 bp, Artificial Sequence; identical to SEQ ID NO: 5597
  Description of Artificial Sequence: Synthetic brazil nut; 5' sequence and inner sequence

SEQ ID NO: 9525 - DNA, 53 bp, Artificial Sequence; identical to SEQ ID NO: 1793
  Description of Artificial Sequence: Synthetic brazil nut; 5' sequence and inner sequence

SEQ ID NO: 9526 - DNA, 53 bp, Artificial Sequence; identical to SEQ ID NO: 1714
  Description of Artificial Sequence: Synthetic brazil nut; 5' sequence and inner sequence

SEQ ID NO: 9527 - DNA, 53 bp, Artificial Sequence; identical to SEQ ID NO: 1366
  Description of Artificial Sequence: Synthetic brazil nut; 5' sequence and inner sequence

SEQ ID NO: 9528 - DNA, 53 bp, Artificial Sequence; identical to SEQ ID NO: 5573
  Description of Artificial Sequence: Synthetic brazil nut; 5' sequence and inner sequence

SEQ ID NO: 9529 - DNA, 53 bp, Artificial Sequence; identical to SEQ ID NO: 1800
  Description of Artificial Sequence: Synthetic brazil nut; 5' sequence and inner sequence

SEQ ID NO: 9530 - DNA, 53 bp, Artificial Sequence; identical to SEQ ID NO: 1633
  Description of Artificial Sequence: Synthetic brazil nut; 5' sequence and inner sequence

SEQ ID NO: 9531 - DNA, 53 bp, Artificial Sequence; identical to SEQ ID NO: 1513
  Description of Artificial Sequence: Synthetic brazil nut; 5' sequence and inner sequence

SEQ ID NO: 9532 - DNA, 53 bp, Artificial Sequence; identical to SEQ ID NO: 1746
  Description of Artificial Sequence: Synthetic brazil nut; 5' sequence and inner sequence

SEQ ID NO: 9533 - DNA, 53 bp, Artificial Sequence; identical to SEQ ID NO: 1789
  Description of Artificial Sequence: Synthetic brazil nut; 5' sequence and inner sequence

SEQ ID NO: 9534 - DNA, 53 bp, Artificial Sequence; identical to SEQ ID NO: 1475
  Description of Artificial Sequence: Synthetic brazil nut; 5' sequence and inner sequence

SEQ ID NO: 9535 - DNA, 53 bp, Artificial Sequence; identical to SEQ ID NO: 1699
  Description of Artificial Sequence: Synthetic brazil nut; 5' sequence and inner sequence

SEQ ID NO: 9536 - DNA, 53 bp, Artificial Sequence; identical to SEQ ID NO: 1386
  Description of Artificial Sequence: Synthetic brazil nut; 5' sequence and inner sequence

SEQ ID NO: 9537 - DNA, 53 bp, Artificial Sequence; identical to SEQ ID NO: 1351
  Description of Artificial Sequence: Synthetic brazil nut; 5' sequence and inner sequence

SEQ ID NO: 9538 - DNA, 53 bp, Artificial Sequence; identical to SEQ ID NO: 1777
  Description of Artificial Sequence: Synthetic brazil nut; 5' sequence and inner sequence

SEQ ID NO: 9539 - DNA, 53 bp, Artificial Sequence; identical to SEQ ID NO: 1441
  Description of Artificial Sequence: Synthetic brazil nut; 5' sequence and inner sequence

SEQ ID NO: 9540 - DNA, 53 bp, Artificial Sequence; identical to SEQ ID NO: 1775
  Description of Artificial Sequence: Synthetic brazil nut; 5' sequence and inner sequence

SEQ ID NO: 9541 - DNA, 53 bp, Artificial Sequence; identical to SEQ ID NO: 1926
  Description of Artificial Sequence: Synthetic brazil nut; 5' sequence and inner sequence

SEQ ID NO: 9542 - DNA, 53 bp, Artificial Sequence; identical to SEQ ID NO: 1914
  Description of Artificial Sequence: Synthetic brazil nut; 5' sequence and inner sequence

SEQ ID NO: 9543 - DNA, 53 bp, Artificial Sequence; identical to SEQ ID NO: 5289
  Description of Artificial Sequence: Synthetic brazil nut; 5' sequence and inner sequence

SEQ ID NO: 9544 - DNA, 53 bp, Artificial Sequence; identical to SEQ ID NO: 1921
  Description of Artificial Sequence: Synthetic brazil nut; 5' sequence and inner sequence

SEQ ID NO: 9545 - DNA, 53 bp, Artificial Sequence; identical to SEQ ID NO: 1316
  Description of Artificial Sequence: Synthetic brazil nut; 5' sequence and inner sequence

SEQ ID NO: 9546 - DNA, 53 bp, Artificial Sequence
  Description of Artificial Sequence: Synthetic brazil nut; 5' sequence and inner sequence
tagggaagagaaggacatatgatcacactgtccgtcgcagcctacgtgcgtca

SEQ ID NO: 9547 - DNA, 53 bp, Artificial Sequence; identical to SEQ ID NO: 1404
  Description of Artificial Sequence: Synthetic brazil nut; 5' sequence and inner sequence

SEQ ID NO: 9548 - DNA, 53 bp, Artificial Sequence; identical to SEQ ID NO: 1984
  Description of Artificial Sequence: Synthetic brazil nut; 5' sequence and inner sequence

SEQ ID NO: 9549 - DNA, 53 bp, Artificial Sequence; identical to SEQ ID NO: 1951
  Description of Artificial Sequence: Synthetic brazil nut; 5' sequence and inner sequence

SEQ ID NO: 9550 - DNA, 53 bp, Artificial Sequence; identical to SEQ ID NO: 1808
  Description of Artificial Sequence: Synthetic brazil nut; 5' sequence and inner sequence

SEQ ID NO: 9551 - DNA, 53 bp, Artificial Sequence; identical to SEQ ID NO: 1477
  Description of Artificial Sequence: Synthetic brazil nut; 5' sequence and inner sequence

SEQ ID NO: 9552 - DNA, 53 bp, Artificial Sequence; identical to SEQ ID NO: 5870
  Description of Artificial Sequence: Synthetic brazil nut; 5' sequence and inner sequence

SEQ ID NO: 9553 - DNA, 53 bp, Artificial Sequence; identical to SEQ ID NO: 1637
  Description of Artificial Sequence: Synthetic brazil nut; 5' sequence and inner sequence

SEQ ID NO: 9554 - DNA, 53 bp, Artificial Sequence; identical to SEQ ID NO: 1816
  Description of Artificial Sequence: Synthetic brazil nut; 5' sequence and inner sequence

SEQ ID NO: 9555 - DNA, 53 bp, Artificial Sequence; identical to SEQ ID NO: 1420
  Description of Artificial Sequence: Synthetic brazil nut; 5' sequence and inner sequence

SEQ ID NO: 9556 - DNA, 53 bp, Artificial Sequence; identical to SEQ ID NO: 5739
  Description of Artificial Sequence: Synthetic brazil nut; 5' sequence and inner sequence

SEQ ID NO: 9557 - DNA, 53 bp, Artificial Sequence; identical to SEQ ID NO: 1324
  Description of Artificial Sequence: Synthetic brazil nut; 5' sequence and inner sequence

SEQ ID NO: 9558 - DNA, 50 bp, Artificial Sequence; identical to SEQ ID NO: 1885
  Description of Artificial Sequence: Synthetic brazil nut; 5' sequence and inner sequence

SEQ ID NO: 9559 - DNA, 53 bp, Artificial Sequence; identical to SEQ ID NO: 1583
  Description of Artificial Sequence: Synthetic brazil nut; 5' sequence and inner sequence

SEQ ID NO: 9560 - DNA, 53 bp, Artificial Sequence; identical to SEQ ID NO: 5521
  Description of Artificial Sequence: Synthetic brazil nut; 5' sequence and inner sequence

SEQ ID NO: 9561 - DNA, 53 bp, Artificial Sequence; identical to SEQ ID NO: 1374
  Description of Artificial Sequence: Synthetic brazil nut; 5' sequence and inner sequence

SEQ ID NO: 9562 - DNA, 53 bp, Artificial Sequence; identical to SEQ ID NO: 1801
  Description of Artificial Sequence: Synthetic brazil nut; 5' sequence and inner sequence

SEQ ID NO: 9563 - DNA, 53 bp, Artificial Sequence; identical to SEQ ID NO: 1596
  Description of Artificial Sequence: Synthetic brazil nut; 5' sequence and inner sequence

SEQ ID NO: 9564 - DNA, 53 bp, Artificial Sequence
  Description of Artificial Sequence: Synthetic brazil nut; 5' sequence and inner sequence
tagggaagagaaggacatatgatgcatgcagtggacgctcaaccgcgtggaca

SEQ ID NO: 9565 - DNA, 53 bp, Artificial Sequence; identical to SEQ ID NO: 1877
  Description of Artificial Sequence: Synthetic brazil nut; 5' sequence and inner sequence

SEQ ID NO: 9566 - DNA, 53 bp, Artificial Sequence; identical to SEQ ID NO: 1348
  Description of Artificial Sequence: Synthetic brazil nut; 5' sequence and inner sequence

SEQ ID NO: 9567 - DNA, 53 bp, Artificial Sequence; identical to SEQ ID NO: 1498
  Description of Artificial Sequence: Synthetic brazil nut; 5' sequence and inner sequence

SEQ ID NO: 9568 - DNA, 53 bp, Artificial Sequence; identical to SEQ ID NO: 1925
  Description of Artificial Sequence: Synthetic brazil nut; 5' sequence and inner sequence

SEQ ID NO: 9569 - DNA, 53 bp, Artificial Sequence; identical to SEQ ID NO: 1507
  Description of Artificial Sequence: Synthetic brazil nut; 5' sequence and inner sequence

SEQ ID NO: 9570 - DNA, 53 bp, Artificial Sequence; identical to SEQ ID NO: 1606
  Description of Artificial Sequence: Synthetic brazil nut; 5' sequence and inner sequence

SEQ ID NO: 9571 - DNA, 53 bp, Artificial Sequence; identical to SEQ ID NO: 1697
  Description of Artificial Sequence: Synthetic brazil nut; 5' sequence and inner sequence

SEQ ID NO: 9572 - DNA, 53 bp, Artificial Sequence; identical to SEQ ID NO: 5579
  Description of Artificial Sequence: Synthetic brazil nut; 5' sequence and inner sequence

SEQ ID NO: 9573 - DNA, 52 bp, Artificial Sequence; identical to SEQ ID NO: 5559
  Description of Artificial Sequence: Synthetic brazil nut; 5' sequence and inner sequence

SEQ ID NO: 9574 - DNA, 53 bp, Artificial Sequence; identical to SEQ ID NO: 5519
  Description of Artificial Sequence: Synthetic brazil nut; 5' sequence and inner sequence

SEQ ID NO: 9575 - DNA, 53 bp, Artificial Sequence; identical to SEQ ID NO: 1276
  Description of Artificial Sequence: Synthetic brazil nut; 5' sequence and inner sequence

SEQ ID NO: 9576 - DNA, 53 bp, Artificial Sequence; identical to SEQ ID NO: 1603
  Description of Artificial Sequence: Synthetic brazil nut; 5' sequence and inner sequence

SEQ ID NO: 9577 - DNA, 53 bp, Artificial Sequence; identical to SEQ ID NO: 1622
  Description of Artificial Sequence: Synthetic brazil nut; 5' sequence and inner sequence

SEQ ID NO: 9578 - DNA, 53 bp, Artificial Sequence; identical to SEQ ID NO: 1410
  Description of Artificial Sequence: Synthetic brazil nut; 5' sequence and inner sequence

SEQ ID NO: 9579 - DNA, 53 bp, Artificial Sequence
  Description of Artificial Sequence: Synthetic brazil nut; 5' sequence and inner sequence
tagggaagagaaggacatatgatgtcatgccatcccttcgagtgcgacaggta

SEQ ID NO: 9580 - DNA, 53 bp, Artificial Sequence; identical to SEQ ID NO: 1306
  Description of Artificial Sequence: Synthetic brazil nut; 5' sequence and inner sequence

SEQ ID NO: 9581 - DNA, 53 bp, Artificial Sequence; identical to SEQ ID NO: 5650
  Description of Artificial Sequence: Synthetic brazil nut; 5' sequence and inner sequence

SEQ ID NO: 9582 - DNA, 53 bp, Artificial Sequence; identical to SEQ ID NO: 1636
  Description of Artificial Sequence: Synthetic brazil nut; 5' sequence and inner sequence

SEQ ID NO: 9583 - DNA, 53 bp, Artificial Sequence; identical to SEQ ID NO: 1223
  Description of Artificial Sequence: Synthetic brazil nut; 5' sequence and inner sequence

SEQ ID NO: 9584 - DNA, 53 bp, Artificial Sequence; identical to SEQ ID NO: 1574
  Description of Artificial Sequence: Synthetic brazil nut; 5' sequence and inner sequence

SEQ ID NO: 9585 - DNA, 53 bp, Artificial Sequence; identical to SEQ ID NO: 5240
  Description of Artificial Sequence: Synthetic brazil nut; 5' sequence and inner sequence

SEQ ID NO: 9586 - DNA, 53 bp, Artificial Sequence
  Description of Artificial Sequence: Synthetic brazil nut; 5' sequence and inner sequence
tagggaagagaaggacatatgatcgtagcgcaggcaaaggtcgtgtcgtcagt

SEQ ID NO: 9587 - DNA, 53 bp, Artificial Sequence; identical to SEQ ID NO: 1881
  Description of Artificial Sequence: Synthetic brazil nut; 5' sequence and inner sequence

SEQ ID NO: 9588 - DNA, 53 bp, Artificial Sequence; identical to SEQ ID NO: 1776
  Description of Artificial Sequence: Synthetic brazil nut; 5' sequence and inner sequence

SEQ ID NO: 9589 - DNA, 53 bp, Artificial Sequence; identical to SEQ ID NO: 5571
  Description of Artificial Sequence: Synthetic brazil nut; 5' sequence and inner sequence

SEQ ID NO: 9590 - DNA, 53 bp, Artificial Sequence; identical to SEQ ID NO: 1576
  Description of Artificial Sequence: Synthetic brazil nut; 5' sequence and inner sequence

SEQ ID NO: 9591 - DNA, 53 bp, Artificial Sequence; identical to SEQ ID NO: 1930
  Description of Artificial Sequence: Synthetic brazil nut; 5' sequence and inner sequence

SEQ ID NO: 9592 - DNA, 53 bp, Artificial Sequence; identical to SEQ ID NO: 5603
  Description of Artificial Sequence: Synthetic brazil nut; 5' sequence and inner sequence

SEQ ID NO: 9593 - DNA, 53 bp, Artificial Sequence; identical to SEQ ID NO: 1660
  Description of Artificial Sequence: Synthetic brazil nut; 5' sequence and inner sequence

SEQ ID NO: 9594 - DNA, 53 bp, Artificial Sequence; identical to SEQ ID NO: 1805
  Description of Artificial Sequence: Synthetic brazil nut; 5' sequence and inner sequence

SEQ ID NO: 9595 - DNA, 53 bp, Artificial Sequence; identical to SEQ ID NO: 5498
  Description of Artificial Sequence: Synthetic brazil nut; 5' sequence and inner sequence

SEQ ID NO: 9596 - DNA, 53 bp, Artificial Sequence; identical to SEQ ID NO: 1835
  Description of Artificial Sequence: Synthetic brazil nut; 5' sequence and inner sequence

SEQ ID NO: 9597 - DNA, 53 bp, Artificial Sequence; identical to SEQ ID NO: 5692
  Description of Artificial Sequence: Synthetic brazil nut; 5' sequence and inner sequence

SEQ ID NO: 9598 - DNA, 53 bp, Artificial Sequence; identical to SEQ ID NO: 5610
  Description of Artificial Sequence: Synthetic brazil nut; 5' sequence and inner sequence

SEQ ID NO: 9599 - DNA, 53 bp, Artificial Sequence; identical to SEQ ID NO: 5638
  Description of Artificial Sequence: Synthetic brazil nut; 5' sequence and inner sequence

SEQ ID NO: 9600 - DNA, 53 bp, Artificial Sequence; identical to SEQ ID NO: 5748
  Description of Artificial Sequence: Synthetic brazil nut; 5' sequence and inner sequence

SEQ ID NO: 9601 - DNA, 53 bp, Artificial Sequence; identical to SEQ ID NO: 5605
  Description of Artificial Sequence: Synthetic brazil nut; 5' sequence and inner sequence

SEQ ID NO: 9602 - DNA, 53 bp, Artificial Sequence; identical to SEQ ID NO: 5799
  Description of Artificial Sequence: Synthetic brazil nut; 5' sequence and inner sequence

SEQ ID NO: 9603 - DNA, 53 bp, Artificial Sequence; identical to SEQ ID NO: 5491
  Description of Artificial Sequence: Synthetic brazil nut; 5' sequence and inner sequence

SEQ ID NO: 9604 - DNA, 53 bp, Artificial Sequence; identical to SEQ ID NO: 1669
  Description of Artificial Sequence: Synthetic brazil nut; 5' sequence and inner sequence

SEQ ID NO: 9605 - DNA, 53 bp, Artificial Sequence; identical to SEQ ID NO: 1591
  Description of Artificial Sequence: Synthetic brazil nut; 5' sequence and inner sequence

SEQ ID NO: 9606 - DNA, 53 bp, Artificial Sequence; identical to SEQ ID NO: 5459
  Description of Artificial Sequence: Synthetic brazil nut; 5' sequence and inner sequence

SEQ ID NO: 9607 - DNA, 53 bp, Artificial Sequence; identical to SEQ ID NO: 1297
  Description of Artificial Sequence: Synthetic brazil nut; 5' sequence and inner sequence

SEQ ID NO: 9608 - DNA, 53 bp, Artificial Sequence; identical to SEQ ID NO: 5997
  Description of Artificial Sequence: Synthetic brazil nut; 5' sequence and inner sequence

SEQ ID NO: 9609 - DNA, 53 bp, Artificial Sequence; identical to SEQ ID NO: 5598
  Description of Artificial Sequence: Synthetic brazil nut; 5' sequence and inner sequence

SEQ ID NO: 9610 - DNA, 53 bp, Artificial Sequence; identical to SEQ ID NO: 1289
  Description of Artificial Sequence: Synthetic brazil nut; 5' sequence and inner sequence

SEQ ID NO: 9611 - DNA, 53 bp, Artificial Sequence; identical to SEQ ID NO: 1260
  Description of Artificial Sequence: Synthetic brazil nut; 5' sequence and inner sequence

SEQ ID NO: 9612 - DNA, 53 bp, Artificial Sequence; identical to SEQ ID NO: 5552
  Description of Artificial Sequence: Synthetic brazil nut; 5' sequence and inner sequence

SEQ ID NO: 9613 - DNA, 53 bp, Artificial Sequence; identical to SEQ ID NO: 1242
  Description of Artificial Sequence: Synthetic brazil nut; 5' sequence and inner sequence

SEQ ID NO: 9614 - DNA, 53 bp, Artificial Sequence; identical to SEQ ID NO: 5642
  Description of Artificial Sequence: Synthetic brazil nut; 5' sequence and inner sequence

SEQ ID NO: 9615 - DNA, 53 bp, Artificial Sequence; identical to SEQ ID NO: 1560
  Description of Artificial Sequence: Synthetic brazil nut; 5' sequence and inner sequence

SEQ ID NO: 9616 - DNA, 53 bp, Artificial Sequence; identical to SEQ ID NO: 1356
  Description of Artificial Sequence: Synthetic brazil nut; 5' sequence and inner sequence

SEQ ID NO: 9617 - DNA, 53 bp, Artificial Sequence; identical to SEQ ID NO: 1680
  Description of Artificial Sequence: Synthetic brazil nut; 5' sequence and inner sequence

SEQ ID NO: 9618 - DNA, 53 bp, Artificial Sequence
  Description of Artificial Sequence: Synthetic brazil nut; 5' sequence and inner sequence
tagggaagagaaggacatatgatgtcatgccatcccttcgagcgtgacaggta

SEQ ID NO: 9619 - DNA, 53 bp, Artificial Sequence; identical to SEQ ID NO: 1727
  Description of Artificial Sequence: Synthetic brazil nut; 5' sequence and inner sequence

SEQ ID NO: 9620 - DNA, 53 bp, Artificial Sequence; identical to SEQ ID NO: 1206
  Description of Artificial Sequence: Synthetic brazil nut; 5' sequence and inner sequence

SEQ ID NO: 9621 - DNA, 53 bp, Artificial Sequence; identical to SEQ ID NO: 5653
  Description of Artificial Sequence: Synthetic brazil nut; 5' sequence and inner sequence

SEQ ID NO: 9622 - DNA, 53 bp, Artificial Sequence; identical to SEQ ID NO: 1919
  Description of Artificial Sequence: Synthetic brazil nut; 5' sequence and inner sequence

SEQ ID NO: 9623 - DNA, 53 bp, Artificial Sequence; identical to SEQ ID NO: 1956
  Description of Artificial Sequence: Synthetic brazil nut; 5' sequence and inner sequence

SEQ ID NO: 9624 - DNA, 53 bp, Artificial Sequence; identical to SEQ ID NO: 1610
  Description of Artificial Sequence: Synthetic brazil nut; 5' sequence and inner sequence

SEQ ID NO: 9625 - DNA, 53 bp, Artificial Sequence; identical to SEQ ID NO: 5775
  Description of Artificial Sequence: Synthetic brazil nut; 5' sequence and inner sequence

SEQ ID NO: 9626 - DNA, 54 bp, Artificial Sequence; identical to SEQ ID NO: 1503
  Description of Artificial Sequence: Synthetic brazil nut; 5' sequence and inner sequence

SEQ ID NO: 9627 - DNA, 53 bp, Artificial Sequence
  Description of Artificial Sequence: Synthetic brazil nut; 5' sequence and inner sequence
tagggaagagaaggacatatgatggacgcagcttgcctactggtggccacgta

SEQ ID NO: 9628 - DNA, 53 bp, Artificial Sequence; identical to SEQ ID NO: 5814
  Description of Artificial Sequence: Synthetic brazil nut; 5' sequence and inner sequence

SEQ ID NO: 9629 - DNA, 53 bp, Artificial Sequence; identical to SEQ ID NO: 1857
  Description of Artificial Sequence: Synthetic brazil nut; 5' sequence and inner sequence

SEQ ID NO: 9630 - DNA, 53 bp, Artificial Sequence; identical to SEQ ID NO: 5761
  Description of Artificial Sequence: Synthetic brazil nut; 5' sequence and inner sequence

SEQ ID NO: 9631 - DNA, 53 bp, Artificial Sequence; identical to SEQ ID NO: 1542
  Description of Artificial Sequence: Synthetic brazil nut; 5' sequence and inner sequence

SEQ ID NO: 9632 - DNA, 53 bp, Artificial Sequence; identical to SEQ ID NO: 1640
  Description of Artificial Sequence: Synthetic brazil nut; 5' sequence and inner sequence

SEQ ID NO: 9633 - DNA, 53 bp, Artificial Sequence
  Description of Artificial Sequence: Synthetic brazil nut; 5' sequence and inner sequence
tagggaagagaaggacatatgattgtgcgtccgatcctgccctctacgtggca

SEQ ID NO: 9634 - DNA, 53 bp, Artificial Sequence; identical to SEQ ID NO: 5580
  Description of Artificial Sequence: Synthetic brazil nut; 5' sequence and inner sequence

SEQ ID NO: 9635 - DNA, 53 bp, Artificial Sequence; identical to SEQ ID NO: 1225
  Description of Artificial Sequence: Synthetic brazil nut; 5' sequence and inner sequence

SEQ ID NO: 9636 - DNA, 54 bp, Artificial Sequence; identical to SEQ ID NO: 5619
  Description of Artificial Sequence: Synthetic brazil nut; 5' sequence and inner sequence

SEQ ID NO: 9637 - DNA, 53 bp, Artificial Sequence; identical to SEQ ID NO: 1452
  Description of Artificial Sequence: Synthetic brazil nut; 5' sequence and inner sequence

SEQ ID NO: 9638 - DNA, 53 bp, Artificial Sequence; identical to SEQ ID NO: 1874
  Description of Artificial Sequence: Synthetic brazil nut; 5' sequence and inner sequence

SEQ ID NO: 9639 - DNA, 53 bp, Artificial Sequence; identical to SEQ ID NO: 1608
  Description of Artificial Sequence: Synthetic brazil nut; 5' sequence and inner sequence

SEQ ID NO: 9640 - DNA, 53 bp, Artificial Sequence; identical to SEQ ID NO: 1754
  Description of Artificial Sequence: Synthetic brazil nut; 5' sequence and inner sequence

SEQ ID NO: 9641 - DNA, 53 bp, Artificial Sequence; identical to SEQ ID NO: 5721
  Description of Artificial Sequence: Synthetic brazil nut; 5' sequence and inner sequence

SEQ ID NO: 9642 - DNA, 53 bp, Artificial Sequence; identical to SEQ ID NO: 5513
  Description of Artificial Sequence: Synthetic brazil nut; 5' sequence and inner sequence

SEQ ID NO: 9643 - DNA, 53 bp, Artificial Sequence; identical to SEQ ID NO: 1286
  Description of Artificial Sequence: Synthetic brazil nut; 5' sequence and inner sequence

SEQ ID NO: 9644 - DNA, 53 bp, Artificial Sequence; identical to SEQ ID NO: 5890
  Description of Artificial Sequence: Synthetic brazil nut; 5' sequence and inner sequence

SEQ ID NO: 9645 - DNA, 53 bp, Artificial Sequence; identical to SEQ ID NO: 5722
  Description of Artificial Sequence: Synthetic brazil nut; 5' sequence and inner sequence

SEQ ID NO: 9646 - DNA, 53 bp, Artificial Sequence; identical to SEQ ID NO: 5356
  Description of Artificial Sequence: Synthetic brazil nut; 5' sequence and inner sequence

SEQ ID NO: 9647 - DNA, 53 bp, Artificial Sequence; identical to SEQ ID NO: 1275
  Description of Artificial Sequence: Synthetic brazil nut; 5' sequence and inner sequence

SEQ ID NO: 9648 - DNA, 53 bp, Artificial Sequence; identical to SEQ ID NO: 5451
  Description of Artificial Sequence: Synthetic brazil nut; 5' sequence and inner sequence

SEQ ID NO: 9649 - DNA, 51 bp, Artificial Sequence; identical to SEQ ID NO: 1423
  Description of Artificial Sequence: Synthetic brazil nut; 5' sequence and inner sequence

SEQ ID NO: 9650 - DNA, 53 bp, Artificial Sequence; identical to SEQ ID NO: 1328
  Description of Artificial Sequence: Synthetic brazil nut; 5' sequence and inner sequence

SEQ ID NO: 9651 - DNA, 53 bp, Artificial Sequence; identical to SEQ ID NO: 1717
  Description of Artificial Sequence: Synthetic brazil nut; 5' sequence and inner sequence

SEQ ID NO: 9652 - DNA, 53 bp, Artificial Sequence; identical to SEQ ID NO: 1434
  Description of Artificial Sequence: Synthetic brazil nut; 5' sequence and inner sequence

SEQ ID NO: 9653 - DNA, 53 bp, Artificial Sequence; identical to SEQ ID NO: 5644
  Description of Artificial Sequence: Synthetic brazil nut; 5' sequence and inner sequence

SEQ ID NO: 9654 - DNA, 53 bp, Artificial Sequence; identical to SEQ ID NO: 5710
  Description of Artificial Sequence: Synthetic brazil nut; 5' sequence and inner sequence

SEQ ID NO: 9655 - DNA, 53 bp, Artificial Sequence; identical to SEQ ID NO: 1363
  Description of Artificial Sequence: Synthetic brazil nut; 5' sequence and inner sequence

SEQ ID NO: 9656 - DNA, 53 bp, Artificial Sequence; identical to SEQ ID NO: 5627
  Description of Artificial Sequence: Synthetic brazil nut; 5' sequence and inner sequence

SEQ ID NO: 9657 - DNA, 53 bp, Artificial Sequence; identical to SEQ ID NO: 1219
  Description of Artificial Sequence: Synthetic brazil nut; 5' sequence and inner sequence

SEQ ID NO: 9658 - DNA, 53 bp, Artificial Sequence; identical to SEQ ID NO: 1486
  Description of Artificial Sequence: Synthetic brazil nut; 5' sequence and inner sequence

SEQ ID NO: 9659 - DNA, 53 bp, Artificial Sequence
  Description of Artificial Sequence: Synthetic brazil nut; 5' sequence and inner sequence
tagggaagagaaggacatatgatcgtgtgtacgaaacttgccgcgtggccatg

SEQ ID NO: 9660 - DNA, 53 bp, Artificial Sequence; identical to SEQ ID NO: 1968
  Description of Artificial Sequence: Synthetic brazil nut; 5' sequence and inner sequence

SEQ ID NO: 9661 - DNA, 53 bp, Artificial Sequence; identical to SEQ ID NO: 1510
  Description of Artificial Sequence: Synthetic brazil nut; 5' sequence and inner sequence

SEQ ID NO: 9662 - DNA, 53 bp, Artificial Sequence; identical to SEQ ID NO: 5873
  Description of Artificial Sequence: Synthetic brazil nut; 5' sequence and inner sequence

SEQ ID NO: 9663 - DNA, 53 bp, Artificial Sequence; identical to SEQ ID NO: 5717
  Description of Artificial Sequence: Synthetic brazil nut; 5' sequence and inner sequence

SEQ ID NO: 9664 - DNA, 53 bp, Artificial Sequence; identical to SEQ ID NO: 1720
  Description of Artificial Sequence: Synthetic brazil nut; 5' sequence and inner sequence

SEQ ID NO: 9665 - DNA, 53 bp, Artificial Sequence; identical to SEQ ID NO: 5565
  Description of Artificial Sequence: Synthetic brazil nut; 5' sequence and inner sequence

SEQ ID NO: 9666 - DNA, 53 bp, Artificial Sequence; identical to SEQ ID NO: 5489
  Description of Artificial Sequence: Synthetic brazil nut; 5' sequence and inner sequence

SEQ ID NO: 9667 - DNA, 53 bp, Artificial Sequence; identical to SEQ ID NO: 5679
  Description of Artificial Sequence: Synthetic brazil nut; 5' sequence and inner sequence

SEQ ID NO: 9668 - DNA, 53 bp, Artificial Sequence; identical to SEQ ID NO: 1758
  Description of Artificial Sequence: Synthetic brazil nut; 5' sequence and inner sequence

SEQ ID NO: 9669 - DNA, 53 bp, Artificial Sequence; identical to SEQ ID NO: 1722
  Description of Artificial Sequence: Synthetic brazil nut; 5' sequence and inner sequence

SEQ ID NO: 9670 - DNA, 53 bp, Artificial Sequence
  Description of Artificial Sequence: Synthetic brazil nut; 5' sequence and inner sequence
tagggaagagaaggacatatgatgtgcgacagaccctagcgagtgaacgtgta

SEQ ID NO: 9671 - DNA, 53 bp, Artificial Sequence; identical to SEQ ID NO: 1889
  Description of Artificial Sequence: Synthetic brazil nut; 5' sequence and inner sequence

SEQ ID NO: 9672 - DNA, 53 bp, Artificial Sequence; identical to SEQ ID NO: 5670
  Description of Artificial Sequence: Synthetic brazil nut; 5' sequence and inner sequence

SEQ ID NO: 9673 - DNA, 53 bp, Artificial Sequence; identical to SEQ ID NO: 1677
  Description of Artificial Sequence: Synthetic brazil nut; 5' sequence and inner sequence

SEQ ID NO: 9674 - DNA, 53 bp, Artificial Sequence; identical to SEQ ID NO: 5504
  Description of Artificial Sequence: Synthetic brazil nut; 5' sequence and inner sequence

SEQ ID NO: 9675 - DNA, 53 bp, Artificial Sequence; identical to SEQ ID NO: 5405
  Description of Artificial Sequence: Synthetic brazil nut; 5' sequence and inner sequence

SEQ ID NO: 9676 - DNA, 53 bp, Artificial Sequence
  Description of Artificial Sequence: Synthetic brazil nut; 5' sequence and inner sequence
tagggaagagaaggacatatgattgacctgcgtgttcaccgtggccatgcacg

SEQ ID NO: 9677 - DNA, 53 bp, Artificial Sequence; identical to SEQ ID NO: 1575
  Description of Artificial Sequence: Synthetic brazil nut; 5' sequence and inner sequence

SEQ ID NO: 9678 - DNA, 53 bp, Artificial Sequence
  Description of Artificial Sequence: Synthetic brazil nut; 5' sequence and inner sequence
tagggaagagaaggacatatgatggcacgtaacgcacgacgcaacggtgggta

SEQ ID NO: 9679 - DNA, 53 bp, Artificial Sequence; identical to SEQ ID NO: 5631
  Description of Artificial Sequence: Synthetic brazil nut; 5' sequence and inner sequence

SEQ ID NO: 9680 - DNA, 53 bp, Artificial Sequence; identical to SEQ ID NO: 1718
  Description of Artificial Sequence: Synthetic brazil nut; 5' sequence and inner sequence

SEQ ID NO: 9681 - DNA, 53 bp, Artificial Sequence; identical to SEQ ID NO: 5530
  Description of Artificial Sequence: Synthetic brazil nut; 5' sequence and inner sequence

SEQ ID NO: 9682 - DNA, 53 bp, Artificial Sequence
  Description of Artificial Sequence: Synthetic brazil nut; 5' sequence and inner sequence
tagggaagagaaggacatatgatgtcacgcgctcgtaccctaacgagtggaca

SEQ ID NO: 9683 - DNA, 53 bp, Artificial Sequence; identical to SEQ ID NO: 1464
  Description of Artificial Sequence: Synthetic brazil nut; 5' sequence and inner sequence

SEQ ID NO: 9684 - DNA, 53 bp, Artificial Sequence; identical to SEQ ID NO: 1664
  Description of Artificial Sequence: Synthetic brazil nut; 5' sequence and inner sequence

SEQ ID NO: 9685 - DNA, 53 bp, Artificial Sequence; identical to SEQ ID NO: 1837
  Description of Artificial Sequence: Synthetic brazil nut; 5' sequence and inner sequence

SEQ ID NO: 9686 - DNA, 53 bp, Artificial Sequence; identical to SEQ ID NO: 5611
  Description of Artificial Sequence: Synthetic brazil nut; 5' sequence and inner sequence

SEQ ID NO: 9687 - DNA, 53 bp, Artificial Sequence; identical to SEQ ID NO: 1300
  Description of Artificial Sequence: Synthetic brazil nut; 5' sequence and inner sequence

SEQ ID NO: 9688 - DNA, 53 bp, Artificial Sequence; identical to SEQ ID NO: 1979
  Description of Artificial Sequence: Synthetic brazil nut; 5' sequence and inner sequence

SEQ ID NO: 9689 - DNA, 53 bp, Artificial Sequence; identical to SEQ ID NO: 1398
  Description of Artificial Sequence: Synthetic brazil nut; 5' sequence and inner sequence

SEQ ID NO: 9690 - DNA, 53 bp, Artificial Sequence; identical to SEQ ID NO: 5503
  Description of Artificial Sequence: Synthetic brazil nut; 5' sequence and inner sequence

SEQ ID NO: 9691 - DNA, 53 bp, Artificial Sequence; identical to SEQ ID NO: 5707
  Description of Artificial Sequence: Synthetic brazil nut; 5' sequence and inner sequence

SEQ ID NO: 9692 - DNA, 53 bp, Artificial Sequence; identical to SEQ ID NO: 1635
  Description of Artificial Sequence: Synthetic brazil nut; 5' sequence and inner sequence

SEQ ID NO: 9693 - DNA, 53 bp, Artificial Sequence; identical to SEQ ID NO: 5938
  Description of Artificial Sequence: Synthetic brazil nut; 5' sequence and inner sequence

SEQ ID NO: 9694 - DNA, 53 bp, Artificial Sequence; identical to SEQ ID NO: 5939
  Description of Artificial Sequence: Synthetic brazil nut; 5' sequence and inner sequence

SEQ ID NO: 9695 - DNA, 53 bp, Artificial Sequence; identical to SEQ ID NO: 6001
  Description of Artificial Sequence: Synthetic brazil nut; 5' sequence and inner sequence

SEQ ID NO: 9696 - DNA, 53 bp, Artificial Sequence; identical to SEQ ID NO: 1333
  Description of Artificial Sequence: Synthetic brazil nut; 5' sequence and inner sequence

SEQ ID NO: 9697 - DNA, 53 bp, Artificial Sequence; identical to SEQ ID NO: 1840
  Description of Artificial Sequence: Synthetic brazil nut; 5' sequence and inner sequence

SEQ ID NO: 9698 - DNA, 53 bp, Artificial Sequence; identical to SEQ ID NO: 1322
  Description of Artificial Sequence: Synthetic brazil nut; 5' sequence and inner sequence

SEQ ID NO: 9699 - DNA, 53 bp, Artificial Sequence; identical to SEQ ID NO: 5999
  Description of Artificial Sequence: Synthetic brazil nut; 5' sequence and inner sequence

SEQ ID NO: 9700 - DNA, 53 bp, Artificial Sequence; identical to SEQ ID NO: 5943
  Description of Artificial Sequence: Synthetic brazil nut; 5' sequence and inner sequence

SEQ ID NO: 9701 - DNA, 53 bp, Artificial Sequence; identical to SEQ ID NO: 5898
  Description of Artificial Sequence: Synthetic brazil nut; 5' sequence and inner sequence

SEQ ID NO: 9702 - DNA, 53 bp, Artificial Sequence; identical to SEQ ID NO: 1580
  Description of Artificial Sequence: Synthetic brazil nut; 5' sequence and inner sequence

SEQ ID NO: 9703 - DNA, 53 bp, Artificial Sequence; identical to SEQ ID NO: 1691
  Description of Artificial Sequence: Synthetic brazil nut; 5' sequence and inner sequence

SEQ ID NO: 9704 - DNA, 53 bp, Artificial Sequence; identical to SEQ ID NO: 5735
  Description of Artificial Sequence: Synthetic brazil nut; 5' sequence and inner sequence

SEQ ID NO: 9705 - DNA, 53 bp, Artificial Sequence; identical to SEQ ID NO: 1502
  Description of Artificial Sequence: Synthetic brazil nut; 5' sequence and inner sequence

SEQ ID NO: 9706 - DNA, 53 bp, Artificial Sequence; identical to SEQ ID NO: 5933
  Description of Artificial Sequence: Synthetic brazil nut; 5' sequence and inner sequence

SEQ ID NO: 9707 - DNA, 53 bp, Artificial Sequence; identical to SEQ ID NO: 1917
  Description of Artificial Sequence: Synthetic brazil nut; 5' sequence and inner sequence

SEQ ID NO: 9708 - DNA, 53 bp, Artificial Sequence; identical to SEQ ID NO: 1601
  Description of Artificial Sequence: Synthetic brazil nut; 5' sequence and inner sequence

SEQ ID NO: 9709 - DNA, 53 bp, Artificial Sequence; identical to SEQ ID NO: 1788
  Description of Artificial Sequence: Synthetic brazil nut; 5' sequence and inner sequence

SEQ ID NO: 9710 - DNA, 53 bp, Artificial Sequence; identical to SEQ ID NO: 5807
  Description of Artificial Sequence: Synthetic brazil nut; 5' sequence and inner sequence

SEQ ID NO: 9711 - DNA, 53 bp, Artificial Sequence; identical to SEQ ID NO: 1566
  Description of Artificial Sequence: Synthetic brazil nut; 5' sequence and inner sequence

SEQ ID NO: 9712 - DNA, 53 bp, Artificial Sequence
  Description of Artificial Sequence: Synthetic brazil nut; 5' sequence and inner sequence
tagggaagagaaggacatatgatgcattggacgatcgtgccctacacgtggcc

SEQ ID NO: 9713 - DNA, 53 bp, Artificial Sequence; identical to SEQ ID NO: 1768
  Description of Artificial Sequence: Synthetic brazil nut; 5' sequence and inner sequence

SEQ ID NO: 9714 - DNA, 53 bp, Artificial Sequence; identical to SEQ ID NO: 5956
  Description of Artificial Sequence: Synthetic brazil nut; 5' sequence and inner sequence

SEQ ID NO: 9715 - DNA, 53 bp, Artificial Sequence; identical to SEQ ID NO: 1249
  Description of Artificial Sequence: Synthetic brazil nut; 5' sequence and inner sequence

SEQ ID NO: 9716 - DNA, 53 bp, Artificial Sequence; identical to SEQ ID NO: 5517
  Description of Artificial Sequence: Synthetic brazil nut; 5' sequence and inner sequence

SEQ ID NO: 9717 - DNA, 53 bp, Artificial Sequence; identical to SEQ ID NO: 1911
  Description of Artificial Sequence: Synthetic brazil nut; 5' sequence and inner sequence

SEQ ID NO: 9718 - DNA, 53 bp, Artificial Sequence; identical to SEQ ID NO: 5737
  Description of Artificial Sequence: Synthetic brazil nut; 5' sequence and inner sequence

SEQ ID NO: 9719 - DNA, 53 bp, Artificial Sequence; identical to SEQ ID NO: 5706
  Description of Artificial Sequence: Synthetic brazil nut; 5' sequence and inner sequence

SEQ ID NO: 9720 - DNA, 53 bp, Artificial Sequence; identical to SEQ ID NO: 1466
  Description of Artificial Sequence: Synthetic brazil nut; 5' sequence and inner sequence

SEQ ID NO: 9721 - DNA, 53 bp, Artificial Sequence; identical to SEQ ID NO: 1199
  Description of Artificial Sequence: Synthetic brazil nut; 5' sequence and inner sequence

SEQ ID NO: 9722 - DNA, 53 bp, Artificial Sequence
  Description of Artificial Sequence: Synthetic brazil nut; 5' sequence and inner sequence
tagggaagagaaggacatatgatcatgcccatgccacgcacactgagcggtca

SEQ ID NO: 9723 - DNA, 53 bp, Artificial Sequence; identical to SEQ ID NO: 1787
  Description of Artificial Sequence: Synthetic brazil nut; 5' sequence and inner sequence

SEQ ID NO: 9724 - DNA, 53 bp, Artificial Sequence; identical to SEQ ID NO: 5985
  Description of Artificial Sequence: Synthetic brazil nut; 5' sequence and inner sequence

SEQ ID NO: 9725 - DNA, 53 bp, Artificial Sequence; identical to SEQ ID NO: 5198
  Description of Artificial Sequence: Synthetic brazil nut; 5' sequence and inner sequence

SEQ ID NO: 9726 - DNA, 53 bp, Artificial Sequence; identical to SEQ ID NO: 1458
  Description of Artificial Sequence: Synthetic brazil nut; 5' sequence and inner sequence

SEQ ID NO: 9727 - DNA, 54 bp, Artificial Sequence; identical to SEQ ID NO: 1216
  Description of Artificial Sequence: Synthetic brazil nut; 5' sequence and inner sequence

SEQ ID NO: 9728 - DNA, 53 bp, Artificial Sequence; identical to SEQ ID NO: 5884
  Description of Artificial Sequence: Synthetic brazil nut; 5' sequence and inner sequence

SEQ ID NO: 9729 - DNA, 53 bp, Artificial Sequence; identical to SEQ ID NO: 1318
  Description of Artificial Sequence: Synthetic brazil nut; 5' sequence and inner sequence

SEQ ID NO: 9730 - DNA, 53 bp, Artificial Sequence; identical to SEQ ID NO: 5576
  Description of Artificial Sequence: Synthetic brazil nut; 5' sequence and inner sequence

SEQ ID NO: 9731 - DNA, 53 bp, Artificial Sequence; identical to SEQ ID NO: 1834
  Description of Artificial Sequence: Synthetic brazil nut; 5' sequence and inner sequence

SEQ ID NO: 9732 - DNA, 53 bp, Artificial Sequence; identical to SEQ ID NO: 1521
  Description of Artificial Sequence: Synthetic brazil nut; 5' sequence and inner sequence

SEQ ID NO: 9733 - DNA, 53 bp, Artificial Sequence; identical to SEQ ID NO: 5719
  Description of Artificial Sequence: Synthetic brazil nut; 5' sequence and inner sequence

SEQ ID NO: 9734 - DNA, 53 bp, Artificial Sequence; identical to SEQ ID NO: 5641
  Description of Artificial Sequence: Synthetic brazil nut; 5' sequence and inner sequence

SEQ ID NO: 9735 - DNA, 53 bp, Artificial Sequence; identical to SEQ ID NO: 1456
  Description of Artificial Sequence: Synthetic brazil nut; 5' sequence and inner sequence

SEQ ID NO: 9736 - DNA, 53 bp, Artificial Sequence; identical to SEQ ID NO: 1500
  Description of Artificial Sequence: Synthetic brazil nut; 5' sequence and inner sequence

SEQ ID NO: 9737 - DNA, 53 bp, Artificial Sequence; identical to SEQ ID NO: 1751
  Description of Artificial Sequence: Synthetic brazil nut; 5' sequence and inner sequence

SEQ ID NO: 9738 - DNA, 53 bp, Artificial Sequence; identical to SEQ ID NO: 1705
  Description of Artificial Sequence: Synthetic brazil nut; 5' sequence and inner sequence

SEQ ID NO: 9739 - DNA, 53 bp, Artificial Sequence; identical to SEQ ID NO: 5981
  Description of Artificial Sequence: Synthetic brazil nut; 5' sequence and inner sequence

SEQ ID NO: 9740 - DNA, 53 bp, Artificial Sequence; identical to SEQ ID NO: 1773
  Description of Artificial Sequence: Synthetic brazil nut; 5' sequence and inner sequence

SEQ ID NO: 9741 - DNA, 53 bp, Artificial Sequence; identical to SEQ ID NO: 5960
  Description of Artificial Sequence: Synthetic brazil nut; 5' sequence and inner sequence

SEQ ID NO: 9742 - DNA, 53 bp, Artificial Sequence; identical to SEQ ID NO: 1980
  Description of Artificial Sequence: Synthetic brazil nut; 5' sequence and inner sequence

SEQ ID NO: 9743 - DNA, 53 bp, Artificial Sequence; identical to SEQ ID NO: 1702
  Description of Artificial Sequence: Synthetic brazil nut; 5' sequence and inner sequence

SEQ ID NO: 9744 - DNA, 53 bp, Artificial Sequence; identical to SEQ ID NO: 5616
  Description of Artificial Sequence: Synthetic brazil nut; 5' sequence and inner sequence

SEQ ID NO: 9745 - DNA, 53 bp, Artificial Sequence; identical to SEQ ID NO: 5930
  Description of Artificial Sequence: Synthetic brazil nut; 5' sequence and inner sequence

SEQ ID NO: 9746 - DNA, 53 bp, Artificial Sequence; identical to SEQ ID NO: 5816
  Description of Artificial Sequence: Synthetic brazil nut; 5' sequence and inner sequence

SEQ ID NO: 9747 - DNA, 53 bp, Artificial Sequence; identical to SEQ ID NO: 5913
  Description of Artificial Sequence: Synthetic brazil nut; 5' sequence and inner sequence

SEQ ID NO: 9748 - DNA, 53 bp, Artificial Sequence
  Description of Artificial Sequence: Synthetic brazil nut; 5' sequence and inner sequence
tagggaagagaaggacatatgatgttacgcagcggacctggtgttcatgcaca

SEQ ID NO: 9749 - DNA, 53 bp, Artificial Sequence; identical to SEQ ID NO: 1943
  Description of Artificial Sequence: Synthetic brazil nut; 5' sequence and inner sequence

SEQ ID NO: 9750 - DNA, 53 bp, Artificial Sequence; identical to SEQ ID NO: 1813
  Description of Artificial Sequence: Synthetic brazil nut; 5' sequence and inner sequence

SEQ ID NO: 9751 - DNA, 53 bp, Artificial Sequence; identical to SEQ ID NO: 5526
  Description of Artificial Sequence: Synthetic brazil nut; 5' sequence and inner sequence

SEQ ID NO: 9752 - DNA, 53 bp, Artificial Sequence
  Description of Artificial Sequence: Synthetic brazil nut; 5' sequence and inner sequence
tagggaagagaaggacatatgatgtcgtgcggatcgctacacgtggccgtgga

SEQ ID NO: 9753 - DNA, 53 bp, Artificial Sequence; identical to SEQ ID NO: 5744
  Description of Artificial Sequence: Synthetic brazil nut; 5' sequence and inner sequence

SEQ ID NO: 9754 - DNA, 53 bp, Artificial Sequence; identical to SEQ ID NO: 5776
  Description of Artificial Sequence: Synthetic brazil nut; 5' sequence and inner sequence

SEQ ID NO: 9755 - DNA, 53 bp, Artificial Sequence; identical to SEQ ID NO: 5745
  Description of Artificial Sequence: Synthetic brazil nut; 5' sequence and inner sequence

SEQ ID NO: 9756 - DNA, 53 bp, Artificial Sequence
  Description of Artificial Sequence: Synthetic brazil nut; 5' sequence and inner sequence
tagggaagagaaggacatatgatcgacacgcaagtaggctacgtacacgtcac

SEQ ID NO: 9757 - DNA, 53 bp, Artificial Sequence; identical to SEQ ID NO: 1515
  Description of Artificial Sequence: Synthetic brazil nut; 5' sequence and inner sequence

SEQ ID NO: 9758 - DNA, 53 bp, Artificial Sequence
  Description of Artificial Sequence: Synthetic brazil nut; 5' sequence and inner sequence
tagggaagagaaggacatatgatcgcaccgcatgacggacgtgggactgcgct

SEQ ID NO: 9759 - DNA, 53 bp, Artificial Sequence; identical to SEQ ID NO: 1763
  Description of Artificial Sequence: Synthetic brazil nut; 5' sequence and inner sequence

SEQ ID NO: 9760 - DNA, 53 bp, Artificial Sequence; identical to SEQ ID NO: 5384
  Description of Artificial Sequence: Synthetic brazil nut; 5' sequence and inner sequence

SEQ ID NO: 9761 - DNA, 53 bp, Artificial Sequence; identical to SEQ ID NO: 1906
  Description of Artificial Sequence: Synthetic brazil nut; 5' sequence and inner sequence

SEQ ID NO: 9762 - DNA, 53 bp, Artificial Sequence; identical to SEQ ID NO: 1497
  Description of Artificial Sequence: Synthetic brazil nut; 5' sequence and inner sequence

SEQ ID NO: 9763 - DNA, 53 bp, Artificial Sequence
  Description of Artificial Sequence: Synthetic brazil nut; 5' sequence and inner sequence
tagggaagagaaggacatatgatcgatgcgaaccggaagtgcatgtcgccagc

SEQ ID NO: 9764 - DNA, 53 bp, Artificial Sequence; identical to SEQ ID NO: 1252
  Description of Artificial Sequence: Synthetic brazil nut; 5' sequence and inner sequence

SEQ ID NO: 9765 - DNA, 53 bp, Artificial Sequence; identical to SEQ ID NO: 1621
  Description of Artificial Sequence: Synthetic brazil nut; 5' sequence and inner sequence

SEQ ID NO: 9766 - DNA, 53 bp, Artificial Sequence; identical to SEQ ID NO: 1960
  Description of Artificial Sequence: Synthetic brazil nut; 5' sequence and inner sequence

SEQ ID NO: 9767 - DNA, 53 bp, Artificial Sequence
  Description of Artificial Sequence: Synthetic brazil nut; 5' sequence and inner sequence
tagggaagagaaggacatatgatggacgcagcttgcctactggcggtcacgta

SEQ ID NO: 9768 - DNA, 53 bp, Artificial Sequence; identical to SEQ ID NO: 1676
  Description of Artificial Sequence: Synthetic brazil nut; 5' sequence and inner sequence

SEQ ID NO: 9769 - DNA, 53 bp, Artificial Sequence
  Description of Artificial Sequence: Synthetic brazil nut; 5' sequence and inner sequence
tagggaagagaaggacatatgatggacgcagcttgcctactggtgttcacgta

SEQ ID NO: 9770 - DNA, 53 bp, Artificial Sequence
  Description of Artificial Sequence: Synthetic brazil nut; 5' sequence and inner sequence
tagggaagagaaggacatatgatggaccaaagcgaacgtggacgtacgacgca

SEQ ID NO: 9771 - DNA, 53 bp, Artificial Sequence; identical to SEQ ID NO: 5740
  Description of Artificial Sequence: Synthetic brazil nut; 5' sequence and inner sequence

SEQ ID NO: 9772 - DNA, 53 bp, Artificial Sequence; identical to SEQ ID NO: 5953
  Description of Artificial Sequence: Synthetic brazil nut; 5' sequence and inner sequence

SEQ ID NO: 9773 - DNA, 53 bp, Artificial Sequence; identical to SEQ ID NO: 5694
  Description of Artificial Sequence: Synthetic brazil nut; 5' sequence and inner sequence

SEQ ID NO: 9774 - DNA, 53 bp, Artificial Sequence; identical to SEQ ID NO: 1670
  Description of Artificial Sequence: Synthetic brazil nut; 5' sequence and inner sequence

SEQ ID NO: 9775 - DNA, 53 bp, Artificial Sequence; identical to SEQ ID NO: 5742
  Description of Artificial Sequence: Synthetic brazil nut; 5' sequence and inner sequence

SEQ ID NO: 9776 - DNA, 51 bp, Artificial Sequence; identical to SEQ ID NO: 5786
  Description of Artificial Sequence: Synthetic brazil nut; 5' sequence and inner sequence

SEQ ID NO: 9777 - DNA, 53 bp, Artificial Sequence; identical to SEQ ID NO: 5700
  Description of Artificial Sequence: Synthetic brazil nut; 5' sequence and inner sequence

SEQ ID NO: 9778 - DNA, 53 bp, Artificial Sequence; identical to SEQ ID NO: 5381
  Description of Artificial Sequence: Synthetic brazil nut; 5' sequence and inner sequence

SEQ ID NO: 9779 - DNA, 53 bp, Artificial Sequence; identical to SEQ ID NO: 5859
  Description of Artificial Sequence: Synthetic brazil nut; 5' sequence and inner sequence

SEQ ID NO: 9780 - DNA, 53 bp, Artificial Sequence; identical to SEQ ID NO: 1449
  Description of Artificial Sequence: Synthetic brazil nut; 5' sequence and inner sequence

SEQ ID NO: 9781 - DNA, 53 bp, Artificial Sequence; identical to SEQ ID NO: 2002
  Description of Artificial Sequence: Synthetic brazil nut; 5' sequence and inner sequence

SEQ ID NO: 9782 - DNA, 53 bp, Artificial Sequence
  Description of Artificial Sequence: Synthetic brazil nut; 5' sequence and inner sequence
tagggaagagaaggacatatgatgcacgactcgcactctatcatgaggccatg

SEQ ID NO: 9783 - DNA, 53 bp, Artificial Sequence; identical to SEQ ID NO: 1849
  Description of Artificial Sequence: Synthetic brazil nut; 5' sequence and inner sequence

SEQ ID NO: 9784 - DNA, 53 bp, Artificial Sequence; identical to SEQ ID NO: 1629
  Description of Artificial Sequence: Synthetic brazil nut; 5' sequence and inner sequence

SEQ ID NO: 9785 - DNA, 53 bp, Artificial Sequence; identical to SEQ ID NO: 1263
  Description of Artificial Sequence: Synthetic brazil nut; 5' sequence and inner sequence

SEQ ID NO: 9786 - DNA, 53 bp, Artificial Sequence; identical to SEQ ID NO: 5520
  Description of Artificial Sequence: Synthetic brazil nut; 5' sequence and inner sequence

SEQ ID NO: 9787 - DNA, 53 bp, Artificial Sequence
  Description of Artificial Sequence: Synthetic brazil nut; 5' sequence and inner sequence
tagggaagagaaggacatatgatgcaatgcgtgtcacgaacttgccgttgggc

SEQ ID NO: 9788 - DNA, 53 bp, Artificial Sequence; identical to SEQ ID NO: 1920
  Description of Artificial Sequence: Synthetic brazil nut; 5' sequence and inner sequence

SEQ ID NO: 9789 - DNA, 53 bp, Artificial Sequence; identical to SEQ ID NO: 5575
  Description of Artificial Sequence: Synthetic brazil nut; 5' sequence and inner sequence

SEQ ID NO: 9790 - DNA, 53 bp, Artificial Sequence; identical to SEQ ID NO: 1650
  Description of Artificial Sequence: Synthetic brazil nut; 5' sequence and inner sequence

SEQ ID NO: 9791 - DNA, 53 bp, Artificial Sequence; identical to SEQ ID NO: 1830
  Description of Artificial Sequence: Synthetic brazil nut; 5' sequence and inner sequence

SEQ ID NO: 9792 - DNA, 53 bp, Artificial Sequence
  Description of Artificial Sequence: Synthetic brazil nut; 5' sequence and inner sequence
tagggaagagaaggacatatgatggcacggtgcgtccctaactcatgtggaca

SEQ ID NO: 9793 - DNA, 53 bp, Artificial Sequence; identical to SEQ ID NO: 1505
  Description of Artificial Sequence: Synthetic brazil nut; 5' sequence and inner sequence

SEQ ID NO: 9794 - DNA, 53 bp, Artificial Sequence; identical to SEQ ID NO: 1701
  Description of Artificial Sequence: Synthetic brazil nut; 5' sequence and inner sequence

SEQ ID NO: 9795 - DNA, 53 bp, Artificial Sequence; identical to SEQ ID NO: 5940
  Description of Artificial Sequence: Synthetic brazil nut; 5' sequence and inner sequence

SEQ ID NO: 9796 - DNA, 53 bp, Artificial Sequence; identical to SEQ ID NO: 5743
  Description of Artificial Sequence: Synthetic brazil nut; 5' sequence and inner sequence

SEQ ID NO: 9797 - DNA, 53 bp, Artificial Sequence; identical to SEQ ID NO: 5856
  Description of Artificial Sequence: Synthetic brazil nut; 5' sequence and inner sequence

SEQ ID NO: 9798 - DNA, 53 bp, Artificial Sequence
  Description of Artificial Sequence: Synthetic brazil nut; 5' sequence and inner sequence
tagggaagagaaggacatatgatgcacgactcgcaccctatcatgaggctatg

SEQ ID NO: 9799 - DNA, 53 bp, Artificial Sequence; identical to SEQ ID NO: 5867
  Description of Artificial Sequence: Synthetic brazil nut; 5' sequence and inner sequence

SEQ ID NO: 9800 - DNA, 53 bp, Artificial Sequence; identical to SEQ ID NO: 1668
  Description of Artificial Sequence: Synthetic brazil nut; 5' sequence and inner sequence

SEQ ID NO: 9801 - DNA, 53 bp, Artificial Sequence
  Description of Artificial Sequence: Synthetic brazil nut; 5' sequence and inner sequence
tagggaagagaaggacatatgatcgtgcgatgaccaagtggcgatgctacacg

SEQ ID NO: 9802 - DNA, 53 bp, Artificial Sequence; identical to SEQ ID NO: 5889
  Description of Artificial Sequence: Synthetic brazil nut; 5' sequence and inner sequence

SEQ ID NO: 9803 - DNA, 53 bp, Artificial Sequence; identical to SEQ ID NO: 1772
  Description of Artificial Sequence: Synthetic brazil nut; 5' sequence and inner sequence

SEQ ID NO: 9804 - DNA, 53 bp, Artificial Sequence
  Description of Artificial Sequence: Synthetic brazil nut; 5' sequence and inner sequence
tagggaagagaaggacatatgatgtcatgcggaccgaactggatgtgtgcatg

SEQ ID NO: 9805 - DNA, 53 bp, Artificial Sequence; identical to SEQ ID NO: 1330
  Description of Artificial Sequence: Synthetic brazil nut; 5' sequence and inner sequence

SEQ ID NO: 9806 - DNA, 53 bp, Artificial Sequence; identical to SEQ ID NO: 5802
  Description of Artificial Sequence: Synthetic brazil nut; 5' sequence and inner sequence

SEQ ID NO: 9807 - DNA, 53 bp, Artificial Sequence
  Description of Artificial Sequence: Synthetic brazil nut; 5' sequence and inner sequence
tagggaagagaaggacatatgatggacgcatcgccccttcgagtggacaggca

SEQ ID NO: 9808 - DNA, 53 bp, Artificial Sequence; identical to SEQ ID NO: 1962
  Description of Artificial Sequence: Synthetic brazil nut; 5' sequence and inner sequence

SEQ ID NO: 9809 - DNA, 53 bp, Artificial Sequence; identical to SEQ ID NO: 1357
  Description of Artificial Sequence: Synthetic brazil nut; 5' sequence and inner sequence

SEQ ID NO: 9810 - DNA, 53 bp, Artificial Sequence
  Description of Artificial Sequence: Synthetic brazil nut; 5' sequence and inner sequence
tagggaagagaaggacatatgatgcacgactcgcaccctatcatgaggacatg

SEQ ID NO: 9811 - DNA, 53 bp, Artificial Sequence; identical to SEQ ID NO: 5874
  Description of Artificial Sequence: Synthetic brazil nut; 5' sequence and inner sequence

SEQ ID NO: 9812 - DNA, 53 bp, Artificial Sequence; identical to SEQ ID NO: 1679
  Description of Artificial Sequence: Synthetic brazil nut; 5' sequence and inner sequence

SEQ ID NO: 9813 - DNA, 53 bp, Artificial Sequence; identical to SEQ ID NO: 5935
  Description of Artificial Sequence: Synthetic brazil nut; 5' sequence and inner sequence

SEQ ID NO: 9814 - DNA, 53 bp, Artificial Sequence; identical to SEQ ID NO: 5886
  Description of Artificial Sequence: Synthetic brazil nut; 5' sequence and inner sequence

SEQ ID NO: 9815 - DNA, 53 bp, Artificial Sequence; identical to SEQ ID NO: 1417
  Description of Artificial Sequence: Synthetic brazil nut; 5' sequence and inner sequence

SEQ ID NO: 9816 - DNA, 53 bp, Artificial Sequence
  Description of Artificial Sequence: Synthetic brazil nut; 5' sequence and inner sequence
tagggaagagaaggacatatgatcgcgcaccgacaacgtgcaggcactacggc

SEQ ID NO: 9817 - DNA, 53 bp, Artificial Sequence; identical to SEQ ID NO: 1644
  Description of Artificial Sequence: Synthetic brazil nut; 5' sequence and inner sequence

SEQ ID NO: 9818 - DNA, 53 bp, Artificial Sequence; identical to SEQ ID NO: 5591
  Description of Artificial Sequence: Synthetic brazil nut; 5' sequence and inner sequence

SEQ ID NO: 9819 - DNA, 53 bp, Artificial Sequence; identical to SEQ ID NO: 5470
  Description of Artificial Sequence: Synthetic brazil nut; 5' sequence and inner sequence

SEQ ID NO: 9820 - DNA, 53 bp, Artificial Sequence; identical to SEQ ID NO: 1685
  Description of Artificial Sequence: Synthetic brazil nut; 5' sequence and inner sequence

SEQ ID NO: 9821 - DNA, 53 bp, Artificial Sequence; identical to SEQ ID NO: 5893
  Description of Artificial Sequence: Synthetic brazil nut; 5' sequence and inner sequence

SEQ ID NO: 9822 - DNA, 53 bp, Artificial Sequence; identical to SEQ ID NO: 5817
  Description of Artificial Sequence: Synthetic brazil nut; 5' sequence and inner sequence

SEQ ID NO: 9823 - DNA, 53 bp, Artificial Sequence; identical to SEQ ID NO: 5634
  Description of Artificial Sequence: Synthetic brazil nut; 5' sequence and inner sequence

SEQ ID NO: 9824 - DNA, 53 bp, Artificial Sequence
  Description of Artificial Sequence: Synthetic brazil nut; 5' sequence and inner sequence
tagggaagagaaggacatatgatcacgatccgacaaggcgtgacgtggccatg

SEQ ID NO: 9825 - DNA, 53 bp, Artificial Sequence
  Description of Artificial Sequence: Synthetic brazil nut; 5' sequence and inner sequence
tagggaagagaaggacatatgatgtggttcgcagcccgttcaagtcaggcatg

SEQ ID NO: 9826 - DNA, 53 bp, Artificial Sequence
  Description of Artificial Sequence: Synthetic brazil nut; 5' sequence and inner sequence
tagggaagagaaggacatatgatgcgatgcagcaccgtaacgaccagcgtgga

SEQ ID NO: 9827 - DNA, 53 bp, Artificial Sequence; identical to SEQ ID NO: 5837
  Description of Artificial Sequence: Synthetic brazil nut; 5' sequence and inner sequence

SEQ ID NO: 9828 - DNA, 53 bp, Artificial Sequence; identical to SEQ ID NO: 5988
  Description of Artificial Sequence: Synthetic brazil nut; 5' sequence and inner sequence

SEQ ID NO: 9829 - DNA, 53 bp, Artificial Sequence; identical to SEQ ID NO: 1592
  Description of Artificial Sequence: Synthetic brazil nut; 5' sequence and inner sequence

SEQ ID NO: 9830 - DNA, 53 bp, Artificial Sequence; identical to SEQ ID NO: 1942
  Description of Artificial Sequence: Synthetic brazil nut; 5' sequence and inner sequence

SEQ ID NO: 9831 - DNA, 53 bp, Artificial Sequence; identical to SEQ ID NO: 5688
  Description of Artificial Sequence: Synthetic brazil nut; 5' sequence and inner sequence

SEQ ID NO: 9832 - DNA, 53 bp, Artificial Sequence; identical to SEQ ID NO: 2001
  Description of Artificial Sequence: Synthetic brazil nut; 5' sequence and inner sequence

SEQ ID NO: 9833 - DNA, 53 bp, Artificial Sequence; identical to SEQ ID NO: 1662
  Description of Artificial Sequence: Synthetic brazil nut; 5' sequence and inner sequence

SEQ ID NO: 9834 - DNA, 53 bp, Artificial Sequence; identical to SEQ ID NO: 1913
  Description of Artificial Sequence: Synthetic brazil nut; 5' sequence and inner sequence

SEQ ID NO: 9835 - DNA, 53 bp, Artificial Sequence; identical to SEQ ID NO: 5620
  Description of Artificial Sequence: Synthetic brazil nut; 5' sequence and inner sequence

SEQ ID NO: 9836 - DNA, 53 bp, Artificial Sequence; identical to SEQ ID NO: 5621
  Description of Artificial Sequence: Synthetic brazil nut; 5' sequence and inner sequence

SEQ ID NO: 9837 - DNA, 53 bp, Artificial Sequence
  Description of Artificial Sequence: Synthetic brazil nut; 5' sequence and inner sequence
tagggaagagaaggacatatgatgtgcaacacgacctagcaagtgagctggca

SEQ ID NO: 9838 - DNA, 53 bp, Artificial Sequence; identical to SEQ ID NO: 1961
  Description of Artificial Sequence: Synthetic brazil nut; 5' sequence and inner sequence

SEQ ID NO: 9839 - DNA, 53 bp, Artificial Sequence; identical to SEQ ID NO: 1435
  Description of Artificial Sequence: Synthetic brazil nut; 5' sequence and inner sequence

SEQ ID NO: 9840 - DNA, 53 bp, Artificial Sequence; identical to SEQ ID NO: 1832
  Description of Artificial Sequence: Synthetic brazil nut; 5' sequence and inner sequence

SEQ ID NO: 9841 - DNA, 53 bp, Artificial Sequence; identical to SEQ ID NO: 5822
  Description of Artificial Sequence: Synthetic brazil nut; 5' sequence and inner sequence

SEQ ID NO: 9842 - DNA, 53 bp, Artificial Sequence; identical to SEQ ID NO: 1734
  Description of Artificial Sequence: Synthetic brazil nut; 5' sequence and inner sequence

SEQ ID NO: 9843 - DNA, 53 bp, Artificial Sequence; identical to SEQ ID NO: 5713
  Description of Artificial Sequence: Synthetic brazil nut; 5' sequence and inner sequence

SEQ ID NO: 9844 - DNA, 53 bp, Artificial Sequence
  Description of Artificial Sequence: Synthetic brazil nut; 5' sequence and inner sequence
tagggaagagaaggacatatgatggcacgcactcgattcgccttcacgtggtt

SEQ ID NO: 9845 - DNA, 53 bp, Artificial Sequence; identical to SEQ ID NO: 1626
  Description of Artificial Sequence: Synthetic brazil nut; 5' sequence and inner sequence

SEQ ID NO: 9846 - DNA, 53 bp, Artificial Sequence; identical to SEQ ID NO: 1474
  Description of Artificial Sequence: Synthetic brazil nut; 5' sequence and inner sequence

SEQ ID NO: 9847 - DNA, 53 bp, Artificial Sequence; identical to SEQ ID NO: 1482
  Description of Artificial Sequence: Synthetic brazil nut; 5' sequence and inner sequence

SEQ ID NO: 9848 - DNA, 53 bp, Artificial Sequence; identical to SEQ ID NO: 1547
  Description of Artificial Sequence: Synthetic brazil nut; 5' sequence and inner sequence

SEQ ID NO: 9849 - DNA, 53 bp, Artificial Sequence; identical to SEQ ID NO: 1424
  Description of Artificial Sequence: Synthetic brazil nut; 5' sequence and inner sequence

SEQ ID NO: 9850 - DNA, 53 bp, Artificial Sequence
  Description of Artificial Sequence: Synthetic brazil nut; 5' sequence and inner sequence
tagggaagagaaggacatatgatggacagcaatgaccgatcaggtggcgtgga

SEQ ID NO: 9851 - DNA, 53 bp, Artificial Sequence; identical to SEQ ID NO: 1101
  Description of Artificial Sequence: Synthetic brazil nut; 5' sequence and inner sequence

SEQ ID NO: 9852 - DNA, 53 bp, Artificial Sequence; identical to SEQ ID NO: 1472
  Description of Artificial Sequence: Synthetic brazil nut; 5' sequence and inner sequence

SEQ ID NO: 9853 - DNA, 53 bp, Artificial Sequence; identical to SEQ ID NO: 5690
  Description of Artificial Sequence: Synthetic brazil nut; 5' sequence and inner sequence

SEQ ID NO: 9854 - DNA, 53 bp, Artificial Sequence; identical to SEQ ID NO: 5555
  Description of Artificial Sequence: Synthetic brazil nut; 5' sequence and inner sequence

SEQ ID NO: 9855 - DNA, 53 bp, Artificial Sequence
  Description of Artificial Sequence: Synthetic brazil nut; 5' sequence and inner sequence
tagggaagagaaggacatatgatacatgccagtgggtacgtcgctgtgccaca

SEQ ID NO: 9856 - DNA, 53 bp, Artificial Sequence; identical to SEQ ID NO: 5835
  Description of Artificial Sequence: Synthetic brazil nut; 5' sequence and inner sequence

SEQ ID NO: 9857 - DNA, 53 bp, Artificial Sequence; identical to SEQ ID NO: 5949
  Description of Artificial Sequence: Synthetic brazil nut; 5' sequence and inner sequence

SEQ ID NO: 9858 - DNA, 53 bp, Artificial Sequence; identical to SEQ ID NO: 5774
  Description of Artificial Sequence: Synthetic brazil nut; 5' sequence and inner sequence

SEQ ID NO: 9859 - DNA, 53 bp, Artificial Sequence; identical to SEQ ID NO: 1948
  Description of Artificial Sequence: Synthetic brazil nut; 5' sequence and inner sequence

SEQ ID NO: 9860 - DNA, 53 bp, Artificial Sequence
  Description of Artificial Sequence: Synthetic brazil nut; 5' sequence and inner sequence
tagggaagagaaggacatatgatgacgcgtgctcccgtagacaacgtgtgtca

SEQ ID NO: 9861 - DNA, 53 bp, Artificial Sequence; identical to SEQ ID NO: 1479
  Description of Artificial Sequence: Synthetic brazil nut; 5' sequence and inner sequence

SEQ ID NO: 9862 - DNA, 53 bp, Artificial Sequence; identical to SEQ ID NO: 5987
  Description of Artificial Sequence: Synthetic brazil nut; 5' sequence and inner sequence

SEQ ID NO: 9863 - DNA, 53 bp, Artificial Sequence; identical to SEQ ID NO: 5845
  Description of Artificial Sequence: Synthetic brazil nut; 5' sequence and inner sequence

SEQ ID NO: 9864 - DNA, 52 bp, Artificial Sequence; identical to SEQ ID NO: 1873
  Description of Artificial Sequence: Synthetic brazil nut; 5' sequence and inner sequence

SEQ ID NO: 9865 - DNA, 53 bp, Artificial Sequence; identical to SEQ ID NO: 1646
  Description of Artificial Sequence: Synthetic brazil nut; 5' sequence and inner sequence

SEQ ID NO: 9866 - DNA, 53 bp, Artificial Sequence; identical to SEQ ID NO: 5894
  Description of Artificial Sequence: Synthetic brazil nut; 5' sequence and inner sequence

SEQ ID NO: 9867 - DNA, 53 bp, Artificial Sequence; identical to SEQ ID NO: 1302
  Description of Artificial Sequence: Synthetic brazil nut; 5' sequence and inner sequence

SEQ ID NO: 9868 - DNA, 53 bp, Artificial Sequence
  Description of Artificial Sequence: Synthetic brazil nut; 5' sequence and inner sequence
tagggaagagaaggacatatgatggcatgccatcccttcgagtgtgacaggta

SEQ ID NO: 9869 - DNA, 53 bp, Artificial Sequence
  Description of Artificial Sequence: Synthetic brazil nut; 5' sequence and inner sequence
tagggaagagaaggacatatgatgcgcatgaactgaccctacaatgtgcggca

SEQ ID NO: 9870 - DNA, 52 bp, Artificial Sequence; identical to SEQ ID NO: 1453
  Description of Artificial Sequence: Synthetic brazil nut; 5' sequence and inner sequence

SEQ ID NO: 9871 - DNA, 53 bp, Artificial Sequence
  Description of Artificial Sequence: Synthetic brazil nut; 5' sequence and inner sequence
tagggaagagaaggacatatgatggctgccgtgaccctagctggtgcgtcgtg

SEQ ID NO: 9872 - DNA, 53 bp, Artificial Sequence
  Description of Artificial Sequence: Synthetic brazil nut; 5' sequence and inner sequence
tagggaagagaaggacatatgatgccatgccatcccttcgagtgtgacaggta

SEQ ID NO: 9873 - DNA, 53 bp, Artificial Sequence; identical to SEQ ID NO: 1492
  Description of Artificial Sequence: Synthetic brazil nut; 5' sequence and inner sequence

SEQ ID NO: 9874 - DNA, 53 bp, Artificial Sequence; identical to SEQ ID NO: 1514
  Description of Artificial Sequence: Synthetic brazil nut; 5' sequence and inner sequence

SEQ ID NO: 9875 - DNA, 53 bp, Artificial Sequence; identical to SEQ ID NO: 5801
  Description of Artificial Sequence: Synthetic brazil nut; 5' sequence and inner sequence

SEQ ID NO: 9876 - DNA, 53 bp, Artificial Sequence
  Description of Artificial Sequence: Synthetic brazil nut; 5' sequence and inner sequence
tagggaagagaaggacatatgatgtcatgccatcccttcgagtgggacaggta

SEQ ID NO: 9877 - DNA, 53 bp, Artificial Sequence
  Description of Artificial Sequence: Synthetic brazil nut; 5' sequence and inner sequence
tagggaagagaaggacatatgatgtgttgcgatgagctgctggtggacacgta

SEQ ID NO: 9878 - DNA, 53 bp, Artificial Sequence; identical to SEQ ID NO: 1756
  Description of Artificial Sequence: Synthetic brazil nut; 5' sequence and inner sequence

SEQ ID NO: 9879 - DNA, 53 bp, Artificial Sequence
  Description of Artificial Sequence: Synthetic brazil nut; 5' sequence and inner sequence
tagggaagagaaggacatatgatcacatcaacgtccgccgcgatgacgtggtt

SEQ ID NO: 9880 - DNA, 53 bp, Artificial Sequence; identical to SEQ ID NO: 1698
  Description of Artificial Sequence: Synthetic brazil nut; 5' sequence and inner sequence

SEQ ID NO: 9881 - DNA, 53 bp, Artificial Sequence; identical to SEQ ID NO: 1742
  Description of Artificial Sequence: Synthetic brazil nut; 5' sequence and inner sequence

SEQ ID NO: 9882 - DNA, 53 bp, Artificial Sequence; identical to SEQ ID NO: 5728
  Description of Artificial Sequence: Synthetic brazil nut; 5' sequence and inner sequence

SEQ ID NO: 9883 - DNA, 53 bp, Artificial Sequence; identical to SEQ ID NO: 1802
  Description of Artificial Sequence: Synthetic brazil nut; 5' sequence and inner sequence

SEQ ID NO: 9884 - DNA, 53 bp, Artificial Sequence
  Description of Artificial Sequence: Synthetic brazil nut; 5' sequence and inner sequence
tagggaagagaaggacatatgatccgtagcgacatcaagcggtggcgtgcgcg

SEQ ID NO: 9885 - DNA, 53 bp, Artificial Sequence; identical to SEQ ID NO: 5931
  Description of Artificial Sequence: Synthetic brazil nut; 5' sequence and inner sequence

SEQ ID NO: 9886 - DNA, 53 bp, Artificial Sequence; identical to SEQ ID NO: 1597
  Description of Artificial Sequence: Synthetic brazil nut; 5' sequence and inner sequence

SEQ ID NO: 9887 - DNA, 53 bp, Artificial Sequence; identical to SEQ ID NO: 1863
  Description of Artificial Sequence: Synthetic brazil nut; 5' sequence and inner sequence

SEQ ID NO: 9888 - DNA, 53 bp, Artificial Sequence; identical to SEQ ID NO: 5339
  Description of Artificial Sequence: Synthetic brazil nut; 5' sequence and inner sequence

SEQ ID NO: 9889 - DNA, 53 bp, Artificial Sequence
  Description of Artificial Sequence: Synthetic brazil nut; 5' sequence and inner sequence
tagggaagagaaggacatatgatgtacacaacggacctacacgtggcgcatgt

SEQ ID NO: 9890 - DNA, 53 bp, Artificial Sequence; identical to SEQ ID NO: 5736
  Description of Artificial Sequence: Synthetic brazil nut; 5' sequence and inner sequence

SEQ ID NO: 9891 - DNA, 53 bp, Artificial Sequence
  Description of Artificial Sequence: Synthetic brazil nut; 5' sequence and inner sequence
tagggaagagaaggacatatgatcgcaccgagagcgatcgtggttcgcagtca

SEQ ID NO: 9892 - DNA, 53 bp, Artificial Sequence
  Description of Artificial Sequence: Synthetic brazil nut; 5' sequence and inner sequence
tagggaagagaaggacatatgatgcactgagcgtacgtatcagctggcacgta

SEQ ID NO: 9893 - DNA, 52 bp, Artificial Sequence; identical to SEQ ID NO: 5869
  Description of Artificial Sequence: Synthetic brazil nut; 5' sequence and inner sequence

SEQ ID NO: 9894 - DNA, 53 bp, Artificial Sequence; identical to SEQ ID NO: 1929
  Description of Artificial Sequence: Synthetic brazil nut; 5' sequence and inner sequence

SEQ ID NO: 9895 - DNA, 53 bp, Artificial Sequence; identical to SEQ ID NO: 1931
  Description of Artificial Sequence: Synthetic brazil nut; 5' sequence and inner sequence

SEQ ID NO: 9896 - DNA, 53 bp, Artificial Sequence; identical to SEQ ID NO: 1955
  Description of Artificial Sequence: Synthetic brazil nut; 5' sequence and inner sequence

SEQ ID NO: 9897 - DNA, 53 bp, Artificial Sequence
  Description of Artificial Sequence: Synthetic brazil nut; 5' sequence and inner sequence
tagggaagagaaggacatatgatcacgtgacgaacgtgagcctagcggtgatg

SEQ ID NO: 9898 - DNA, 53 bp, Artificial Sequence; identical to SEQ ID NO: 1729
  Description of Artificial Sequence: Synthetic brazil nut; 5' sequence and inner sequence

SEQ ID NO: 9899 - DNA, 53 bp, Artificial Sequence; identical to SEQ ID NO: 5715
  Description of Artificial Sequence: Synthetic brazil nut; 5' sequence and inner sequence

SEQ ID NO: 9900 - DNA, 53 bp, Artificial Sequence; identical to SEQ ID NO: 1678
  Description of Artificial Sequence: Synthetic brazil nut; 5' sequence and inner sequence

SEQ ID NO: 9901 - DNA, 53 bp, Artificial Sequence; identical to SEQ ID NO: 5958
  Description of Artificial Sequence: Synthetic brazil nut; 5' sequence and inner sequence

SEQ ID NO: 9902 - DNA, 53 bp, Artificial Sequence
  Description of Artificial Sequence: Synthetic brazil nut; 5' sequence and inner sequence
tagggaagagaaggacatatgattcacgcaagggcaggcatactcgtcgcaca

SEQ ID NO: 9903 - DNA, 53 bp, Artificial Sequence; identical to SEQ ID NO: 5785
  Description of Artificial Sequence: Synthetic brazil nut; 5' sequence and inner sequence

SEQ ID NO: 9904 - DNA, 53 bp, Artificial Sequence; identical to SEQ ID NO: 1415
  Description of Artificial Sequence: Synthetic brazil nut; 5' sequence and inner sequence

SEQ ID NO: 9905 - DNA, 53 bp, Artificial Sequence; identical to SEQ ID NO: 5924
  Description of Artificial Sequence: Synthetic brazil nut; 5' sequence and inner sequence

SEQ ID NO: 9906 - DNA, 53 bp, Artificial Sequence; identical to SEQ ID NO: 1713
  Description of Artificial Sequence: Synthetic brazil nut; 5' sequence and inner sequence

SEQ ID NO: 9907 - DNA, 53 bp, Artificial Sequence
  Description of Artificial Sequence: Synthetic brazil nut; 5' sequence and inner sequence
tagggaagagaaggacatatgatggccagagcgaccctacacgtgggcacgta

SEQ ID NO: 9908 - DNA, 53 bp, Artificial Sequence; identical to SEQ ID NO: 1782
  Description of Artificial Sequence: Synthetic brazil nut; 5' sequence and inner sequence

SEQ ID NO: 9909 - DNA, 53 bp, Artificial Sequence
  Description of Artificial Sequence: Synthetic brazil nut; 5' sequence and inner sequence
tagggaagagaaggacatatgatgcacgcagctgccctgtcgtggtcgaggtg

SEQ ID NO: 9910 - DNA, 53 bp, Artificial Sequence
  Description of Artificial Sequence: Synthetic brazil nut; 5' sequence and inner sequence
tagggaagagaaggacatatgatgtcattccgcctcctacacgtgggcacgta

SEQ ID NO: 9911 - DNA, 53 bp, Artificial Sequence; identical to SEQ ID NO: 1624
  Description of Artificial Sequence: Synthetic brazil nut; 5' sequence and inner sequence

SEQ ID NO: 9912 - DNA, 53 bp, Artificial Sequence; identical to SEQ ID NO: 5708
  Description of Artificial Sequence: Synthetic brazil nut; 5' sequence and inner sequence

SEQ ID NO: 9913 - DNA, 53 bp, Artificial Sequence; identical to SEQ ID NO: 5829
  Description of Artificial Sequence: Synthetic brazil nut; 5' sequence and inner sequence

SEQ ID NO: 9914 - DNA, 53 bp, Artificial Sequence; identical to SEQ ID NO: 1512
  Description of Artificial Sequence: Synthetic brazil nut; 5' sequence and inner sequence

SEQ ID NO: 9915 - DNA, 53 bp, Artificial Sequence; identical to SEQ ID NO: 5878
  Description of Artificial Sequence: Synthetic brazil nut; 5' sequence and inner sequence

SEQ ID NO: 9916 - DNA, 53 bp, Artificial Sequence; identical to SEQ ID NO: 1898
  Description of Artificial Sequence: Synthetic brazil nut; 5' sequence and inner sequence

SEQ ID NO: 9917 - DNA, 53 bp, Artificial Sequence; identical to SEQ ID NO: 5918
  Description of Artificial Sequence: Synthetic brazil nut; 5' sequence and inner sequence

SEQ ID NO: 9918 - DNA, 53 bp, Artificial Sequence; identical to SEQ ID NO: 1939
  Description of Artificial Sequence: Synthetic brazil nut; 5' sequence and inner sequence

SEQ ID NO: 9919 - DNA, 53 bp, Artificial Sequence; identical to SEQ ID NO: 5617
  Description of Artificial Sequence: Synthetic brazil nut; 5' sequence and inner sequence

SEQ ID NO: 9920 - DNA, 53 bp, Artificial Sequence; identical to SEQ ID NO: 1949
  Description of Artificial Sequence: Synthetic brazil nut; 5' sequence and inner sequence

SEQ ID NO: 9921 - DNA, 53 bp, Artificial Sequence; identical to SEQ ID NO: 5946
  Description of Artificial Sequence: Synthetic brazil nut; 5' sequence and inner sequence

SEQ ID NO: 9922 - DNA, 53 bp, Artificial Sequence
  Description of Artificial Sequence: Synthetic brazil nut; 5' sequence and inner sequence
tagggaagagaaggacatatgatcgatatggacgacctccctatcacgtgggc

SEQ ID NO: 9923 - DNA, 53 bp, Artificial Sequence; identical to SEQ ID NO: 1715
  Description of Artificial Sequence: Synthetic brazil nut; 5' sequence and inner sequence

SEQ ID NO: 9924 - DNA, 53 bp, Artificial Sequence; identical to SEQ ID NO: 1638
  Description of Artificial Sequence: Synthetic brazil nut; 5' sequence and inner sequence

SEQ ID NO: 9925 - DNA, 53 bp, Artificial Sequence
  Description of Artificial Sequence: Synthetic brazil nut; 5' sequence and inner sequence
tagggaagagaaggacatatgatcatgcataggcagccagcagtgacgatgcg

SEQ ID NO: 9926 - DNA, 53 bp, Artificial Sequence
  Description of Artificial Sequence: Synthetic brazil nut; 5' sequence and inner sequence
tagggaagagaaggacatatgatgcacggctcgcaccctatcatgaggccatg

SEQ ID NO: 9927 - DNA, 53 bp, Artificial Sequence
  Description of Artificial Sequence: Synthetic brazil nut; 5' sequence and inner sequence
tagggaagagaaggacatatgatggacgcatcggcccggtcaagttcggcatg

SEQ ID NO: 9928 - DNA, 53 bp, Artificial Sequence
  Description of Artificial Sequence: Synthetic brazil nut; 5' sequence and inner sequence
tagggaagagaaggacatatgatccgcacgtagcactatcagtggtgcatgca

SEQ ID NO: 9929 - DNA, 53 bp, Artificial Sequence; identical to SEQ ID NO: 5904
  Description of Artificial Sequence: Synthetic brazil nut; 5' sequence and inner sequence

SEQ ID NO: 9930 - DNA, 53 bp, Artificial Sequence; identical to SEQ ID NO: 5948
  Description of Artificial Sequence: Synthetic brazil nut; 5' sequence and inner sequence

SEQ ID NO: 9931 - DNA, 53 bp, Artificial Sequence; identical to SEQ ID NO: 1748
  Description of Artificial Sequence: Synthetic brazil nut; 5' sequence and inner sequence

SEQ ID NO: 9932 - DNA, 53 bp, Artificial Sequence; identical to SEQ ID NO: 1957
  Description of Artificial Sequence: Synthetic brazil nut; 5' sequence and inner sequence

SEQ ID NO: 9933 - DNA, 53 bp, Artificial Sequence; identical to SEQ ID NO: 5967
  Description of Artificial Sequence: Synthetic brazil nut; 5' sequence and inner sequence

SEQ ID NO: 9934 - DNA, 53 bp, Artificial Sequence; identical to SEQ ID NO: 1753
  Description of Artificial Sequence: Synthetic brazil nut; 5' sequence and inner sequence

SEQ ID NO: 9935 - DNA, 53 bp, Artificial Sequence
  Description of Artificial Sequence: Synthetic brazil nut; 5' sequence and inner sequence
tagggaagagaaggacatatgatgacacggcactgacctacacgtggcaggta

SEQ ID NO: 9936 - DNA, 53 bp, Artificial Sequence
  Description of Artificial Sequence: Synthetic brazil nut; 5' sequence and inner sequence
tagggaagagaaggacatatgatccgcacgtagccctatcagtggagcatgca

SEQ ID NO: 9937 - DNA, 53 bp, Artificial Sequence
  Description of Artificial Sequence: Synthetic brazil nut; 5' sequence and inner sequence
tagggaagagaaggacatatgatcgcgcagttggccgaacatcccgttgggca

SEQ ID NO: 9938 - DNA, 53 bp, Artificial Sequence
  Description of Artificial Sequence: Synthetic brazil nut; 5' sequence and inner sequence
tagggaagagaaggacatatgatgtcattccgcatcctacacgtggccacgta

SEQ ID NO: 9939 - DNA, 53 bp, Artificial Sequence
  Description of Artificial Sequence: Synthetic brazil nut; 5' sequence and inner sequence
tagggaagagaaggacatatgatgtacgtgcgatgtcccgatcaacgtgtgtc

SEQ ID NO: 9940 - DNA, 53 bp, Artificial Sequence; identical to SEQ ID NO: 1987
  Description of Artificial Sequence: Synthetic brazil nut; 5' sequence and inner sequence

SEQ ID NO: 9941 - DNA, 53 bp, Artificial Sequence; identical to SEQ ID NO: 5778
  Description of Artificial Sequence: Synthetic brazil nut; 5' sequence and inner sequence

SEQ ID NO: 9942 - DNA, 53 bp, Artificial Sequence
  Description of Artificial Sequence: Synthetic brazil nut; 5' sequence and inner sequence
tagggaagagaaggacatatgatgcatcgcagcgaggtccgattgccgtcatg

SEQ ID NO: 9943 - DNA, 53 bp, Artificial Sequence; identical to SEQ ID NO: 5992
  Description of Artificial Sequence: Synthetic brazil nut; 5' sequence and inner sequence

SEQ ID NO: 9944 - DNA, 53 bp, Artificial Sequence; identical to SEQ ID NO: 1559
  Description of Artificial Sequence: Synthetic brazil nut; 5' sequence and inner sequence

SEQ ID NO: 9945 - DNA, 53 bp, Artificial Sequence; identical to SEQ ID NO: 5731
  Description of Artificial Sequence: Synthetic brazil nut; 5' sequence and inner sequence

SEQ ID NO: 9946 - DNA, 53 bp, Artificial Sequence
  Description of Artificial Sequence: Synthetic brazil nut; 5' sequence and inner sequence
tagggaagagaaggacatatgatccatcgcgtcactctcatgtgtgtcacgta

SEQ ID NO: 9947 - DNA, 53 bp, Artificial Sequence; identical to SEQ ID NO: 5963
  Description of Artificial Sequence: Synthetic brazil nut; 5' sequence and inner sequence

SEQ ID NO: 9948 - DNA, 53 bp, Artificial Sequence; identical to SEQ ID NO: 1388
  Description of Artificial Sequence: Synthetic brazil nut; 5' sequence and inner sequence

SEQ ID NO: 9949 - DNA, 53 bp, Artificial Sequence
  Description of Artificial Sequence: Synthetic brazil nut; 5' sequence and inner sequence
tagggaagagaaggacatatgatgcatgactcgcaccctatcatgaggccatg

SEQ ID NO: 9950 - DNA, 53 bp, Artificial Sequence
  Description of Artificial Sequence: Synthetic brazil nut; 5' sequence and inner sequence
tagggaagagaaggacatatgatggccgcaatcctccctacacgtggcgtgta

SEQ ID NO: 9951 - DNA, 53 bp, Artificial Sequence; identical to SEQ ID NO: 1384
  Description of Artificial Sequence: Synthetic brazil nut; 5' sequence and inner sequence

SEQ ID NO: 9952 - DNA, 53 bp, Artificial Sequence; identical to SEQ ID NO: 1488
  Description of Artificial Sequence: Synthetic brazil nut; 5' sequence and inner sequence

SEQ ID NO: 9953 - DNA, 53 bp, Artificial Sequence
  Description of Artificial Sequence: Synthetic brazil nut; 5' sequence and inner sequence
tagggaagagaaggacatatgatgtcattccgcatactacacgtgggcacgta

SEQ ID NO: 9954 - DNA, 53 bp, Artificial Sequence; identical to SEQ ID NO: 1875
  Description of Artificial Sequence: Synthetic brazil nut; 5' sequence and inner sequence

SEQ ID NO: 9955 - DNA, 53 bp, Artificial Sequence; identical to SEQ ID NO: 5905
  Description of Artificial Sequence: Synthetic brazil nut; 5' sequence and inner sequence

SEQ ID NO: 9956 - DNA, 53 bp, Artificial Sequence; identical to SEQ ID NO: 5652
  Description of Artificial Sequence: Synthetic brazil nut; 5' sequence and inner sequence

SEQ ID NO: 9957 - DNA, 53 bp, Artificial Sequence; identical to SEQ ID NO: 1826
  Description of Artificial Sequence: Synthetic brazil nut; 5' sequence and inner sequence

SEQ ID NO: 9958 - DNA, 53 bp, Artificial Sequence; identical to SEQ ID NO: 1996
  Description of Artificial Sequence: Synthetic brazil nut; 5' sequence and inner sequence

SEQ ID NO: 9959 - DNA, 53 bp, Artificial Sequence; identical to SEQ ID NO: 5979
  Description of Artificial Sequence: Synthetic brazil nut; 5' sequence and inner sequence

SEQ ID NO: 9960 - DNA, 53 bp, Artificial Sequence
  Description of Artificial Sequence: Synthetic brazil nut; 5' sequence and inner sequence
tagggaagagaaggacatatgatccgacgcaaccgtacagcatgtcacgtggc

SEQ ID NO: 9961 - DNA, 53 bp, Artificial Sequence
  Description of Artificial Sequence: Synthetic brazil nut; 5' sequence and inner sequence
tagggaagagaaggacatatgatccggcacgaacggaacgggtcttgtgcatg

SEQ ID NO: 9962 - DNA, 53 bp, Artificial Sequence
  Description of Artificial Sequence: Synthetic brazil nut; 5' sequence and inner sequence
tagggaagagaaggacatatgattgcatgcacgcacctacacgtgggtatgga

SEQ ID NO: 9963 - DNA, 53 bp, Artificial Sequence
  Description of Artificial Sequence: Synthetic brazil nut; 5' sequence and inner sequence
tagggaagagaaggacatatgatggcatgacgagctgaacggtgcagtgtgct

SEQ ID NO: 9964 - DNA, 53 bp, Artificial Sequence
  Description of Artificial Sequence: Synthetic brazil nut; 5' sequence and inner sequence
tagggaagagaaggacatatgatggccgcagcttgcctactggtggtcacgta

SEQ ID NO: 9965 - DNA, 53 bp, Artificial Sequence; identical to SEQ ID NO: 5854
  Description of Artificial Sequence: Synthetic brazil nut; 5' sequence and inner sequence

SEQ ID NO: 9966 - DNA, 48 bp, Artificial Sequence; identical to SEQ ID NO: 1427
  Description of Artificial Sequence: Synthetic brazil nut; 5' sequence and inner sequence

SEQ ID NO: 9967 - DNA, 53 bp, Artificial Sequence; identical to SEQ ID NO: 5864
  Description of Artificial Sequence: Synthetic brazil nut; 5' sequence and inner sequence

SEQ ID NO: 9968 - DNA, 53 bp, Artificial Sequence
  Description of Artificial Sequence: Synthetic brazil nut; 5' sequence and inner sequence
tagggaagagaaggacatatgatcgcaccgtcgatacgtcatccacgctgaca

SEQ ID NO: 9969 - DNA, 53 bp, Artificial Sequence
  Description of Artificial Sequence: Synthetic brazil nut; 5' sequence and inner sequence
tagggaagagaaggacatatgatcatggcaaggcagcggtcgatccattcgcg

SEQ ID NO: 9970 - DNA, 53 bp, Artificial Sequence; identical to SEQ ID NO: 1703
  Description of Artificial Sequence: Synthetic brazil nut; 5' sequence and inner sequence

SEQ ID NO: 9971 - DNA, 53 bp, Artificial Sequence
  Description of Artificial Sequence: Synthetic brazil nut; 5' sequence and inner sequence
tagggaagagaaggacatatgatgtacgcacgcagaccgacgagtggcatgga

SEQ ID NO: 9972 - DNA, 53 bp, Artificial Sequence; identical to SEQ ID NO: 5667
  Description of Artificial Sequence: Synthetic brazil nut; 5' sequence and inner sequence

SEQ ID NO: 9973 - DNA, 53 bp, Artificial Sequence; identical to SEQ ID NO: 6002
  Description of Artificial Sequence: Synthetic brazil nut; 5' sequence and inner sequence

SEQ ID NO: 9974 - DNA, 53 bp, Artificial Sequence
  Description of Artificial Sequence: Synthetic brazil nut; 5' sequence and inner sequence
tagggaagagaaggacatatgatgcacggtcggaccaggacacgagatgggca

SEQ ID NO: 9975 - DNA, 53 bp, Artificial Sequence; identical to SEQ ID NO: 1345
  Description of Artificial Sequence: Synthetic brazil nut; 5' sequence and inner sequence

SEQ ID NO: 9976 - DNA, 53 bp, Artificial Sequence; identical to SEQ ID NO: 1162
  Description of Artificial Sequence: Synthetic brazil nut; 5' sequence and inner sequence

SEQ ID NO: 9977 - DNA, 52 bp, Artificial Sequence
  Description of Artificial Sequence: Synthetic brazil nut; 5' sequence and inner sequence
tagggaagagaaggacatatgatccacatggacgacgatggcttagcgtggt

SEQ ID NO: 9978 - DNA, 53 bp, Artificial Sequence
  Description of Artificial Sequence: Synthetic brazil nut; 5' sequence and inner sequence
tagggaagagaaggacatatgatccgtagcgacatcaagcggtggcgcgcgtg

SEQ ID NO: 9979 - DNA, 53 bp, Artificial Sequence; identical to SEQ ID NO: 1598
  Description of Artificial Sequence: Synthetic brazil nut; 5' sequence and inner sequence

SEQ ID NO: 9980 - DNA, 53 bp, Artificial Sequence; identical to SEQ ID NO: 1823
  Description of Artificial Sequence: Synthetic brazil nut; 5' sequence and inner sequence

SEQ ID NO: 9981 - DNA, 53 bp, Artificial Sequence; identical to SEQ ID NO: 5666
  Description of Artificial Sequence: Synthetic brazil nut; 5' sequence and inner sequence

SEQ ID NO: 9982 - DNA, 53 bp, Artificial Sequence; identical to SEQ ID NO: 5887
  Description of Artificial Sequence: Synthetic brazil nut; 5' sequence and inner sequence

SEQ ID NO: 9983 - DNA, 51 bp, Artificial Sequence
  Description of Artificial Sequence: Synthetic brazil nut; 5' sequence and inner sequence
tagggaagagaaggacatatgatgtgctgcgatgacctcacgtggacgggt

SEQ ID NO: 9984 - DNA, 53 bp, Artificial Sequence
  Description of Artificial Sequence: Synthetic brazil nut; 5' sequence and inner sequence
tagggaagagaaggacatatgatacgatacgcaccagggacattgacggcatg

SEQ ID NO: 9985 - DNA, 53 bp, Artificial Sequence
  Description of Artificial Sequence: Synthetic brazil nut; 5' sequence and inner sequence
tagggaagagaaggacatatgatccgcacgtacccctatcagtggtgcatgca

SEQ ID NO: 9986 - DNA, 52 bp, Artificial Sequence; identical to SEQ ID NO: 5763
  Description of Artificial Sequence: Synthetic brazil nut; 5' sequence and inner sequence

SEQ ID NO: 9987 - DNA, 53 bp, Artificial Sequence; identical to SEQ ID NO: 1842
  Description of Artificial Sequence: Synthetic brazil nut; 5' sequence and inner sequence

SEQ ID NO: 9988 - DNA, 53 bp, Artificial Sequence
  Description of Artificial Sequence: Synthetic brazil nut; 5' sequence and inner sequence
tagggaagagaaggacatatgatgtacgtcgcggaccctatcaagacggcatg

SEQ ID NO: 9989 - DNA, 53 bp, Artificial Sequence; identical to SEQ ID NO: 1683
  Description of Artificial Sequence: Synthetic brazil nut; 5' sequence and inner sequence

SEQ ID NO: 9990 - DNA, 53 bp, Artificial Sequence; identical to SEQ ID NO: 1866
  Description of Artificial Sequence: Synthetic brazil nut; 5' sequence and inner sequence

SEQ ID NO: 9991 - DNA, 53 bp, Artificial Sequence
  Description of Artificial Sequence: Synthetic brazil nut; 5' sequence and inner sequence
tagggaagagaaggacatatgatccgacgaagacctggtcgtggaaggcatga

SEQ ID NO: 9992 - DNA, 53 bp, Artificial Sequence; identical to SEQ ID NO: 5857
  Description of Artificial Sequence: Synthetic brazil nut; 5' sequence and inner sequence

SEQ ID NO: 9993 - DNA, 53 bp, Artificial Sequence
  Description of Artificial Sequence: Synthetic brazil nut; 5' sequence and inner sequence
tagggaagagaaggacatatgatccgcccgtagccctatcagtggtgcatgca

SEQ ID NO: 9994 - DNA, 53 bp, Artificial Sequence
  Description of Artificial Sequence: Synthetic brazil nut; 5' sequence and inner sequence
tagggaagagaaggacatatgatcgcacacgtcaggtcaaggtcatcgcgtgg

SEQ ID NO: 9995 - DNA, 53 bp, Artificial Sequence; identical to SEQ ID NO: 1535
  Description of Artificial Sequence: Synthetic brazil nut; 5' sequence and inner sequence

SEQ ID NO: 9996 - DNA, 52 bp, Artificial Sequence; identical to SEQ ID NO: 1879
  Description of Artificial Sequence: Synthetic brazil nut; 5' sequence and inner sequence

SEQ ID NO: 9997 - DNA, 53 bp, Artificial Sequence; identical to SEQ ID NO: 1681
  Description of Artificial Sequence: Synthetic brazil nut; 5' sequence and inner sequence

SEQ ID NO: 9998 - DNA, 53 bp, Artificial Sequence
  Description of Artificial Sequence: Synthetic brazil nut; 5' sequence and inner sequence
tagggaagagaaggacatatgatcgcaccgcgagtgatcgtggttcgcagtca

SEQ ID NO: 9999 - DNA, 53 bp, Artificial Sequence
  Description of Artificial Sequence: Synthetic brazil nut; 5' sequence and inner sequence
tagggaagagaaggacatatgatcgtaccgccttggtctacgtgacgccatgt

SEQ ID NO: 10000 - DNA, 52 bp, Artificial Sequence; identical to SEQ ID NO: 5968
  Description of Artificial Sequence: Synthetic brazil nut; 5' sequence and inner sequence

SEQ ID NO: 10001 - DNA, 53 bp, Artificial Sequence; identical to SEQ ID NO: 5882
  Description of Artificial Sequence: Synthetic brazil nut; 5' sequence and inner sequence

SEQ ID NO: 10002 - DNA, 53 bp, Artificial Sequence; identical to SEQ ID NO: 1265
  Description of Artificial Sequence: Synthetic brazil nut; 5' sequence and inner sequence

SEQ ID NO: 10003 - DNA, 53 bp, Artificial Sequence; identical to SEQ ID NO: 2004
  Description of Artificial Sequence: Synthetic brazil nut; inner sequence and 3' sequence

SEQ ID NO: 10004 - DNA, 53 bp, Artificial Sequence; identical to SEQ ID NO: 2003
  Description of Artificial Sequence: Synthetic brazil nut; inner sequence and 3' sequence

SEQ ID NO: 10005 - DNA, 53 bp, Artificial Sequence; identical to SEQ ID NO: 2008
  Description of Artificial Sequence: Synthetic brazil nut; inner sequence and 3' sequence

SEQ ID NO: 10006 - DNA, 53 bp, Artificial Sequence; identical to SEQ ID NO: 2006
  Description of Artificial Sequence: Synthetic brazil nut; inner sequence and 3' sequence

SEQ ID NO: 10007 - DNA, 53 bp, Artificial Sequence; identical to SEQ ID NO: 2005
  Description of Artificial Sequence: Synthetic brazil nut; inner sequence and 3' sequence

SEQ ID NO: 10008 - DNA, 53 bp, Artificial Sequence; identical to SEQ ID NO: 2010
  Description of Artificial Sequence: Synthetic brazil nut; inner sequence and 3' sequence

SEQ ID NO: 10009 - DNA, 53 bp, Artificial Sequence; identical to SEQ ID NO: 2007
  Description of Artificial Sequence: Synthetic brazil nut; inner sequence and 3' sequence

SEQ ID NO: 10010 - DNA, 53 bp, Artificial Sequence; identical to SEQ ID NO: 2009
  Description of Artificial Sequence: Synthetic brazil nut; inner sequence and 3' sequence

SEQ ID NO: 10011 - DNA, 53 bp, Artificial Sequence; identical to SEQ ID NO: 2012
  Description of Artificial Sequence: Synthetic brazil nut; inner sequence and 3' sequence

SEQ ID NO: 10012 - DNA, 53 bp, Artificial Sequence; identical to SEQ ID NO: 2011
  Description of Artificial Sequence: Synthetic brazil nut; inner sequence and 3' sequence

SEQ ID NO: 10013 - DNA, 53 bp, Artificial Sequence; identical to SEQ ID NO: 2023
  Description of Artificial Sequence: Synthetic brazil nut; inner sequence and 3' sequence

SEQ ID NO: 10014 - DNA, 53 bp, Artificial Sequence; identical to SEQ ID NO: 2018
  Description of Artificial Sequence: Synthetic brazil nut; inner sequence and 3' sequence

SEQ ID NO: 10015 - DNA, 53 bp, Artificial Sequence; identical to SEQ ID NO: 2014
  Description of Artificial Sequence: Synthetic brazil nut; inner sequence and 3' sequence

SEQ ID NO: 10016 - DNA, 53 bp, Artificial Sequence; identical to SEQ ID NO: 2013
  Description of Artificial Sequence: Synthetic brazil nut; inner sequence and 3' sequence

SEQ ID NO: 10017 - DNA, 53 bp, Artificial Sequence; identical to SEQ ID NO: 2017
  Description of Artificial Sequence: Synthetic brazil nut; inner sequence and 3' sequence

SEQ ID NO: 10018 - DNA, 53 bp, Artificial Sequence; identical to SEQ ID NO: 2037
  Description of Artificial Sequence: Synthetic brazil nut; inner sequence and 3' sequence

SEQ ID NO: 10019 - DNA, 53 bp, Artificial Sequence; identical to SEQ ID NO: 2020
  Description of Artificial Sequence: Synthetic brazil nut; inner sequence and 3' sequence

SEQ ID NO: 10020 - DNA, 53 bp, Artificial Sequence; identical to SEQ ID NO: 2022
  Description of Artificial Sequence: Synthetic brazil nut; inner sequence and 3' sequence

SEQ ID NO: 10021 - DNA, 53 bp, Artificial Sequence; identical to SEQ ID NO: 2049
  Description of Artificial Sequence: Synthetic brazil nut; inner sequence and 3' sequence

SEQ ID NO: 10022 - DNA, 53 bp, Artificial Sequence; identical to SEQ ID NO: 2030
  Description of Artificial Sequence: Synthetic brazil nut; inner sequence and 3' sequence

SEQ ID NO: 10023 - DNA, 53 bp, Artificial Sequence; identical to SEQ ID NO: 2028
  Description of Artificial Sequence: Synthetic brazil nut; inner sequence and 3' sequence

SEQ ID NO: 10024 - DNA, 53 bp, Artificial Sequence; identical to SEQ ID NO: 2016
  Description of Artificial Sequence: Synthetic brazil nut; inner sequence and 3' sequence

SEQ ID NO: 10025 - DNA, 53 bp, Artificial Sequence; identical to SEQ ID NO: 2046
  Description of Artificial Sequence: Synthetic brazil nut; inner sequence and 3' sequence

SEQ ID NO: 10026 - DNA, 53 bp, Artificial Sequence; identical to SEQ ID NO: 2034
  Description of Artificial Sequence: Synthetic brazil nut; inner sequence and 3' sequence

SEQ ID NO: 10027 - DNA, 53 bp, Artificial Sequence; identical to SEQ ID NO: 2041
  Description of Artificial Sequence: Synthetic brazil nut; inner sequence and 3' sequence

SEQ ID NO: 10028 - DNA, 53 bp, Artificial Sequence; identical to SEQ ID NO: 2060
  Description of Artificial Sequence: Synthetic brazil nut; inner sequence and 3' sequence

SEQ ID NO: 10029 - DNA, 53 bp, Artificial Sequence; identical to SEQ ID NO: 2045
  Description of Artificial Sequence: Synthetic brazil nut; inner sequence and 3' sequence

SEQ ID NO: 10030 - DNA, 53 bp, Artificial Sequence; identical to SEQ ID NO: 2021
  Description of Artificial Sequence: Synthetic brazil nut; inner sequence and 3' sequence

SEQ ID NO: 10031 - DNA, 53 bp, Artificial Sequence; identical to SEQ ID NO: 2015
  Description of Artificial Sequence: Synthetic brazil nut; inner sequence and 3' sequence

SEQ ID NO: 10032 - DNA, 53 bp, Artificial Sequence; identical to SEQ ID NO: 2033
  Description of Artificial Sequence: Synthetic brazil nut; inner sequence and 3' sequence

SEQ ID NO: 10033 - DNA, 53 bp, Artificial Sequence; identical to SEQ ID NO: 2032
  Description of Artificial Sequence: Synthetic brazil nut; inner sequence and 3' sequence

SEQ ID NO: 10034 - DNA, 53 bp, Artificial Sequence; identical to SEQ ID NO: 2064
  Description of Artificial Sequence: Synthetic brazil nut; inner sequence and 3' sequence

SEQ ID NO: 10035 - DNA, 53 bp, Artificial Sequence; identical to SEQ ID NO: 2055
  Description of Artificial Sequence: Synthetic brazil nut; inner sequence and 3' sequence

SEQ ID NO: 10036 - DNA, 53 bp, Artificial Sequence; identical to SEQ ID NO: 2024
  Description of Artificial Sequence: Synthetic brazil nut; inner sequence and 3' sequence

SEQ ID NO: 10037 - DNA, 53 bp, Artificial Sequence; identical to SEQ ID NO: 2040
  Description of Artificial Sequence: Synthetic brazil nut; inner sequence and 3' sequence

SEQ ID NO: 10038 - DNA, 53 bp, Artificial Sequence; identical to SEQ ID NO: 2044
  Description of Artificial Sequence: Synthetic brazil nut; inner sequence and 3' sequence

SEQ ID NO: 10039 - DNA, 52 bp, Artificial Sequence; identical to SEQ ID NO: 2070
  Description of Artificial Sequence: Synthetic brazil nut; inner sequence and 3' sequence

SEQ ID NO: 10040 - DNA, 53 bp, Artificial Sequence; identical to SEQ ID NO: 2052
  Description of Artificial Sequence: Synthetic brazil nut; inner sequence and 3' sequence

SEQ ID NO: 10041 - DNA, 53 bp, Artificial Sequence; identical to SEQ ID NO: 2131
  Description of Artificial Sequence: Synthetic brazil nut; inner sequence and 3' sequence

SEQ ID NO: 10042 - DNA, 53 bp, Artificial Sequence; identical to SEQ ID NO: 2029
  Description of Artificial Sequence: Synthetic brazil nut; inner sequence and 3' sequence

SEQ ID NO: 10043 - DNA, 53 bp, Artificial Sequence; identical to SEQ ID NO: 2061
  Description of Artificial Sequence: Synthetic brazil nut; inner sequence and 3' sequence

SEQ ID NO: 10044 - DNA, 53 bp, Artificial Sequence; identical to SEQ ID NO: 2035
  Description of Artificial Sequence: Synthetic brazil nut; inner sequence and 3' sequence

SEQ ID NO: 10045 - DNA, 53 bp, Artificial Sequence; identical to SEQ ID NO: 2038
  Description of Artificial Sequence: Synthetic brazil nut; inner sequence and 3' sequence

SEQ ID NO: 10046 - DNA, 53 bp, Artificial Sequence; identical to SEQ ID NO: 2088
  Description of Artificial Sequence: Synthetic brazil nut; inner sequence and 3' sequence

SEQ ID NO: 10047 - DNA, 53 bp, Artificial Sequence; identical to SEQ ID NO: 2063
  Description of Artificial Sequence: Synthetic brazil nut; inner sequence and 3' sequence

SEQ ID NO: 10048 - DNA, 53 bp, Artificial Sequence; identical to SEQ ID NO: 2019
  Description of Artificial Sequence: Synthetic brazil nut; inner sequence and 3' sequence

SEQ ID NO: 10049 - DNA, 53 bp, Artificial Sequence; identical to SEQ ID NO: 2074
  Description of Artificial Sequence: Synthetic brazil nut; inner sequence and 3' sequence

SEQ ID NO: 10050 - DNA, 53 bp, Artificial Sequence; identical to SEQ ID NO: 2129
  Description of Artificial Sequence: Synthetic brazil nut; inner sequence and 3' sequence

SEQ ID NO: 10051 - DNA, 53 bp, Artificial Sequence; identical to SEQ ID NO: 2054
  Description of Artificial Sequence: Synthetic brazil nut; inner sequence and 3' sequence

SEQ ID NO: 10052 - DNA, 53 bp, Artificial Sequence; identical to SEQ ID NO: 2031
  Description of Artificial Sequence: Synthetic brazil nut; inner sequence and 3' sequence

SEQ ID NO: 10053 - DNA, 53 bp, Artificial Sequence; identical to SEQ ID NO: 2082
  Description of Artificial Sequence: Synthetic brazil nut; inner sequence and 3' sequence

SEQ ID NO: 10054 - DNA, 53 bp, Artificial Sequence; identical to SEQ ID NO: 2039
  Description of Artificial Sequence: Synthetic brazil nut; inner sequence and 3' sequence

SEQ ID NO: 10055 - DNA, 53 bp, Artificial Sequence; identical to SEQ ID NO: 2051
  Description of Artificial Sequence: Synthetic brazil nut; inner sequence and 3' sequence

SEQ ID NO: 10056 - DNA, 53 bp, Artificial Sequence; identical to SEQ ID NO: 2066
  Description of Artificial Sequence: Synthetic brazil nut; inner sequence and 3' sequence

SEQ ID NO: 10057 - DNA, 53 bp, Artificial Sequence; identical to SEQ ID NO: 2048
  Description of Artificial Sequence: Synthetic brazil nut; inner sequence and 3' sequence

SEQ ID NO: 10058 - DNA, 53 bp, Artificial Sequence; identical to SEQ ID NO: 2077
  Description of Artificial Sequence: Synthetic brazil nut; inner sequence and 3' sequence

SEQ ID NO: 10059 - DNA, 53 bp, Artificial Sequence; identical to SEQ ID NO: 2081
  Description of Artificial Sequence: Synthetic brazil nut; inner sequence and 3' sequence

SEQ ID NO: 10060 - DNA, 53 bp, Artificial Sequence; identical to SEQ ID NO: 2117
  Description of Artificial Sequence: Synthetic brazil nut; inner sequence and 3' sequence

SEQ ID NO: 10061 - DNA, 53 bp, Artificial Sequence; identical to SEQ ID NO: 2050
  Description of Artificial Sequence: Synthetic brazil nut; inner sequence and 3' sequence

SEQ ID NO: 10062 - DNA, 53 bp, Artificial Sequence; identical to SEQ ID NO: 2183
  Description of Artificial Sequence: Synthetic brazil nut; inner sequence and 3' sequence

SEQ ID NO: 10063 - DNA, 53 bp, Artificial Sequence; identical to SEQ ID NO: 2058
  Description of Artificial Sequence: Synthetic brazil nut; inner sequence and 3' sequence

SEQ ID NO: 10064 - DNA, 53 bp, Artificial Sequence; identical to SEQ ID NO: 2112
  Description of Artificial Sequence: Synthetic brazil nut; inner sequence and 3' sequence

SEQ ID NO: 10065 - DNA, 52 bp, Artificial Sequence; identical to SEQ ID NO: 2193
  Description of Artificial Sequence: Synthetic brazil nut; inner sequence and 3' sequence

SEQ ID NO: 10066 - DNA, 53 bp, Artificial Sequence; identical to SEQ ID NO: 2080
  Description of Artificial Sequence: Synthetic brazil nut; inner sequence and 3' sequence

SEQ ID NO: 10067 - DNA, 53 bp, Artificial Sequence; identical to SEQ ID NO: 2185
  Description of Artificial Sequence: Synthetic brazil nut; inner sequence and 3' sequence

SEQ ID NO: 10068 - DNA, 53 bp, Artificial Sequence; identical to SEQ ID NO: 2430
  Description of Artificial Sequence: Synthetic brazil nut; inner sequence and 3' sequence

SEQ ID NO: 10069 - DNA, 53 bp, Artificial Sequence; identical to SEQ ID NO: 2076
  Description of Artificial Sequence: Synthetic brazil nut; inner sequence and 3' sequence

SEQ ID NO: 10070 - DNA, 53 bp, Artificial Sequence; identical to SEQ ID NO: 2097
  Description of Artificial Sequence: Synthetic brazil nut; inner sequence and 3' sequence

SEQ ID NO: 10071 - DNA, 53 bp, Artificial Sequence; identical to SEQ ID NO: 2133
  Description of Artificial Sequence: Synthetic brazil nut; inner sequence and 3' sequence

SEQ ID NO: 10072 - DNA, 53 bp, Artificial Sequence; identical to SEQ ID NO: 2057
  Description of Artificial Sequence: Synthetic brazil nut; inner sequence and 3' sequence

SEQ ID NO: 10073 - DNA, 53 bp, Artificial Sequence; identical to SEQ ID NO: 2120
  Description of Artificial Sequence: Synthetic brazil nut; inner sequence and 3' sequence

SEQ ID NO: 10074 - DNA, 53 bp, Artificial Sequence; identical to SEQ ID NO: 2043
  Description of Artificial Sequence: Synthetic brazil nut; inner sequence and 3' sequence

SEQ ID NO: 10075 - DNA, 53 bp, Artificial Sequence; identical to SEQ ID NO: 2025
  Description of Artificial Sequence: Synthetic brazil nut; inner sequence and 3' sequence

SEQ ID NO: 10076 - DNA, 53 bp, Artificial Sequence; identical to SEQ ID NO: 2126
  Description of Artificial Sequence: Synthetic brazil nut; inner sequence and 3' sequence

SEQ ID NO: 10077 - DNA, 53 bp, Artificial Sequence; identical to SEQ ID NO: 2053
  Description of Artificial Sequence: Synthetic brazil nut; inner sequence and 3' sequence

SEQ ID NO: 10078 - DNA, 53 bp, Artificial Sequence; identical to SEQ ID NO: 2059
  Description of Artificial Sequence: Synthetic brazil nut; inner sequence and 3' sequence

SEQ ID NO: 10079 - DNA, 53 bp, Artificial Sequence; identical to SEQ ID NO: 2067
  Description of Artificial Sequence: Synthetic brazil nut; inner sequence and 3' sequence

SEQ ID NO: 10080 - DNA, 53 bp, Artificial Sequence; identical to SEQ ID NO: 2211
  Description of Artificial Sequence: Synthetic brazil nut; inner sequence and 3' sequence

SEQ ID NO: 10081 - DNA, 53 bp, Artificial Sequence; identical to SEQ ID NO: 2093
  Description of Artificial Sequence: Synthetic brazil nut; inner sequence and 3' sequence

SEQ ID NO: 10082 - DNA, 53 bp, Artificial Sequence; identical to SEQ ID NO: 2036
  Description of Artificial Sequence: Synthetic brazil nut; inner sequence and 3' sequence

SEQ ID NO: 10083 - DNA, 53 bp, Artificial Sequence; identical to SEQ ID NO: 2136
  Description of Artificial Sequence: Synthetic brazil nut; inner sequence and 3' sequence

SEQ ID NO: 10084 - DNA, 53 bp, Artificial Sequence; identical to SEQ ID NO: 2068
  Description of Artificial Sequence: Synthetic brazil nut; inner sequence and 3' sequence

SEQ ID NO: 10085 - DNA, 53 bp, Artificial Sequence; identical to SEQ ID NO: 2065
  Description of Artificial Sequence: Synthetic brazil nut; inner sequence and 3' sequence

SEQ ID NO: 10086 - DNA, 53 bp, Artificial Sequence; identical to SEQ ID NO: 2311
  Description of Artificial Sequence: Synthetic brazil nut; inner sequence and 3' sequence

SEQ ID NO: 10087 - DNA, 53 bp, Artificial Sequence; identical to SEQ ID NO: 2042
  Description of Artificial Sequence: Synthetic brazil nut; inner sequence and 3' sequence

SEQ ID NO: 10088 - DNA, 53 bp, Artificial Sequence; identical to SEQ ID NO: 2096
  Description of Artificial Sequence: Synthetic brazil nut; inner sequence and 3' sequence

SEQ ID NO: 10089 - DNA, 53 bp, Artificial Sequence; identical to SEQ ID NO: 2047
  Description of Artificial Sequence: Synthetic brazil nut; inner sequence and 3' sequence

SEQ ID NO: 10090 - DNA, 53 bp, Artificial Sequence; identical to SEQ ID NO: 2092
  Description of Artificial Sequence: Synthetic brazil nut; inner sequence and 3' sequence

SEQ ID NO: 10091 - DNA, 53 bp, Artificial Sequence; identical to SEQ ID NO: 2207
  Description of Artificial Sequence: Synthetic brazil nut; inner sequence and 3' sequence

SEQ ID NO: 10092 - DNA, 53 bp, Artificial Sequence; identical to SEQ ID NO: 2026
  Description of Artificial Sequence: Synthetic brazil nut; inner sequence and 3' sequence

SEQ ID NO: 10093 - DNA, 53 bp, Artificial Sequence; identical to SEQ ID NO: 2154
  Description of Artificial Sequence: Synthetic brazil nut; inner sequence and 3' sequence

SEQ ID NO: 10094 - DNA, 53 bp, Artificial Sequence; identical to SEQ ID NO: 2091
  Description of Artificial Sequence: Synthetic brazil nut; inner sequence and 3' sequence

SEQ ID NO: 10095 - DNA, 53 bp, Artificial Sequence; identical to SEQ ID NO: 2151
  Description of Artificial Sequence: Synthetic brazil nut; inner sequence and 3' sequence

SEQ ID NO: 10096 - DNA, 53 bp, Artificial Sequence; identical to SEQ ID NO: 2103
  Description of Artificial Sequence: Synthetic brazil nut; inner sequence and 3' sequence

SEQ ID NO: 10097 - DNA, 53 bp, Artificial Sequence; identical to SEQ ID NO: 2079
  Description of Artificial Sequence: Synthetic brazil nut; inner sequence and 3' sequence

SEQ ID NO: 10098 - DNA, 53 bp, Artificial Sequence; identical to SEQ ID NO: 2122
  Description of Artificial Sequence: Synthetic brazil nut; inner sequence and 3' sequence

SEQ ID NO: 10099 - DNA, 53 bp, Artificial Sequence; identical to SEQ ID NO: 2078
  Description of Artificial Sequence: Synthetic brazil nut; inner sequence and 3' sequence

SEQ ID NO: 10100 - DNA, 53 bp, Artificial Sequence; identical to SEQ ID NO: 2118
  Description of Artificial Sequence: Synthetic brazil nut; inner sequence and 3' sequence

SEQ ID NO: 10101 - DNA, 53 bp, Artificial Sequence; identical to SEQ ID NO: 2567
  Description of Artificial Sequence: Synthetic brazil nut; inner sequence and 3' sequence

SEQ ID NO: 10102 - DNA, 53 bp, Artificial Sequence; identical to SEQ ID NO: 2257
  Description of Artificial Sequence: Synthetic brazil nut; inner sequence and 3' sequence

SEQ ID NO: 10103 - DNA, 53 bp, Artificial Sequence; identical to SEQ ID NO: 2168
  Description of Artificial Sequence: Synthetic brazil nut; inner sequence and 3' sequence

SEQ ID NO: 10104 - DNA, 53 bp, Artificial Sequence; identical to SEQ ID NO: 2142
  Description of Artificial Sequence: Synthetic brazil nut; inner sequence and 3' sequence

SEQ ID NO: 10105 - DNA, 53 bp, Artificial Sequence; identical to SEQ ID NO: 2287
  Description of Artificial Sequence: Synthetic brazil nut; inner sequence and 3' sequence

SEQ ID NO: 10106 - DNA, 53 bp, Artificial Sequence; identical to SEQ ID NO: 2247
  Description of Artificial Sequence: Synthetic brazil nut; inner sequence and 3' sequence

SEQ ID NO: 10107 - DNA, 53 bp, Artificial Sequence; identical to SEQ ID NO: 2144
  Description of Artificial Sequence: Synthetic brazil nut; inner sequence and 3' sequence

SEQ ID NO: 10108 - DNA, 53 bp, Artificial Sequence; identical to SEQ ID NO: 2083
  Description of Artificial Sequence: Synthetic brazil nut; inner sequence and 3' sequence

SEQ ID NO: 10109 - DNA, 53 bp, Artificial Sequence; identical to SEQ ID NO: 2073
  Description of Artificial Sequence: Synthetic brazil nut; inner sequence and 3' sequence

SEQ ID NO: 10110 - DNA, 53 bp, Artificial Sequence; identical to SEQ ID NO: 2100
  Description of Artificial Sequence: Synthetic brazil nut; inner sequence and 3' sequence

SEQ ID NO: 10111 - DNA, 53 bp, Artificial Sequence; identical to SEQ ID NO: 2355
  Description of Artificial Sequence: Synthetic brazil nut; inner sequence and 3' sequence

SEQ ID NO: 10112 - DNA, 53 bp, Artificial Sequence; identical to SEQ ID NO: 2229
  Description of Artificial Sequence: Synthetic brazil nut; inner sequence and 3' sequence

SEQ ID NO: 10113 - DNA, 53 bp, Artificial Sequence; identical to SEQ ID NO: 2237
  Description of Artificial Sequence: Synthetic brazil nut; inner sequence and 3' sequence

SEQ ID NO: 10114 - DNA, 53 bp, Artificial Sequence; identical to SEQ ID NO: 2233
  Description of Artificial Sequence: Synthetic brazil nut; inner sequence and 3' sequence

SEQ ID NO: 10115 - DNA, 53 bp, Artificial Sequence; identical to SEQ ID NO: 2099
  Description of Artificial Sequence: Synthetic brazil nut; inner sequence and 3' sequence

SEQ ID NO: 10116 - DNA, 53 bp, Artificial Sequence; identical to SEQ ID NO: 2094
  Description of Artificial Sequence: Synthetic brazil nut; inner sequence and 3' sequence

SEQ ID NO: 10117 - DNA, 53 bp, Artificial Sequence; identical to SEQ ID NO: 2027
  Description of Artificial Sequence: Synthetic brazil nut; inner sequence and 3' sequence

SEQ ID NO: 10118 - DNA, 53 bp, Artificial Sequence; identical to SEQ ID NO: 2179
  Description of Artificial Sequence: Synthetic brazil nut; inner sequence and 3' sequence

SEQ ID NO: 10119 - DNA, 53 bp, Artificial Sequence; identical to SEQ ID NO: 2147
  Description of Artificial Sequence: Synthetic brazil nut; inner sequence and 3' sequence

SEQ ID NO: 10120 - DNA, 53 bp, Artificial Sequence; identical to SEQ ID NO: 2056
  Description of Artificial Sequence: Synthetic brazil nut; inner sequence and 3' sequence

SEQ ID NO: 10121 - DNA, 53 bp, Artificial Sequence; identical to SEQ ID NO: 2285
  Description of Artificial Sequence: Synthetic brazil nut; inner sequence and 3' sequence

SEQ ID NO: 10122 - DNA, 53 bp, Artificial Sequence; identical to SEQ ID NO: 2115
  Description of Artificial Sequence: Synthetic brazil nut; inner sequence and 3' sequence

SEQ ID NO: 10123 - DNA, 53 bp, Artificial Sequence; identical to SEQ ID NO: 2188
  Description of Artificial Sequence: Synthetic brazil nut; inner sequence and 3' sequence

SEQ ID NO: 10124 - DNA, 53 bp, Artificial Sequence; identical to SEQ ID NO: 2203
  Description of Artificial Sequence: Synthetic brazil nut; inner sequence and 3' sequence

SEQ ID NO: 10125 - DNA, 53 bp, Artificial Sequence; identical to SEQ ID NO: 2288
  Description of Artificial Sequence: Synthetic brazil nut; inner sequence and 3' sequence

SEQ ID NO: 10126 - DNA, 53 bp, Artificial Sequence; identical to SEQ ID NO: 2155
  Description of Artificial Sequence: Synthetic brazil nut; inner sequence and 3' sequence

SEQ ID NO: 10127 - DNA, 53 bp, Artificial Sequence; identical to SEQ ID NO: 2468
  Description of Artificial Sequence: Synthetic brazil nut; inner sequence and 3' sequence

SEQ ID NO: 10128 - DNA, 53 bp, Artificial Sequence; identical to SEQ ID NO: 2354
  Description of Artificial Sequence: Synthetic brazil nut; inner sequence and 3' sequence

SEQ ID NO: 10129 - DNA, 51 bp, Artificial Sequence; identical to SEQ ID NO: 2148
  Description of Artificial Sequence: Synthetic brazil nut; inner sequence and 3' sequence

SEQ ID NO: 10130 - DNA, 53 bp, Artificial Sequence; identical to SEQ ID NO: 2264
  Description of Artificial Sequence: Synthetic brazil nut; inner sequence and 3' sequence

SEQ ID NO: 10131 - DNA, 53 bp, Artificial Sequence; identical to SEQ ID NO: 2107
  Description of Artificial Sequence: Synthetic brazil nut; inner sequence and 3' sequence

SEQ ID NO: 10132 - DNA, 53 bp, Artificial Sequence; identical to SEQ ID NO: 2282
  Description of Artificial Sequence: Synthetic brazil nut; inner sequence and 3' sequence

SEQ ID NO: 10133 - DNA, 53 bp, Artificial Sequence; identical to SEQ ID NO: 2360
  Description of Artificial Sequence: Synthetic brazil nut; inner sequence and 3' sequence

SEQ ID NO: 10134 - DNA, 53 bp, Artificial Sequence; identical to SEQ ID NO: 2470
  Description of Artificial Sequence: Synthetic brazil nut; inner sequence and 3' sequence

SEQ ID NO: 10135 - DNA, 53 bp, Artificial Sequence; identical to SEQ ID NO: 2145
  Description of Artificial Sequence: Synthetic brazil nut; inner sequence and 3' sequence

SEQ ID NO: 10136 - DNA, 53 bp, Artificial Sequence; identical to SEQ ID NO: 2161
  Description of Artificial Sequence: Synthetic brazil nut; inner sequence and 3' sequence

SEQ ID NO: 10137 - DNA, 53 bp, Artificial Sequence; identical to SEQ ID NO: 2095
  Description of Artificial Sequence: Synthetic brazil nut; inner sequence and 3' sequence

SEQ ID NO: 10138 - DNA, 53 bp, Artificial Sequence; identical to SEQ ID NO: 2071
  Description of Artificial Sequence: Synthetic brazil nut; inner sequence and 3' sequence

SEQ ID NO: 10139 - DNA, 53 bp, Artificial Sequence; identical to SEQ ID NO: 6205
  Description of Artificial Sequence: Synthetic brazil nut; inner sequence and 3' sequence

SEQ ID NO: 10140 - DNA, 53 bp, Artificial Sequence; identical to SEQ ID NO: 2245
  Description of Artificial Sequence: Synthetic brazil nut; inner sequence and 3' sequence

SEQ ID NO: 10141 - DNA, 53 bp, Artificial Sequence; identical to SEQ ID NO: 2208
  Description of Artificial Sequence: Synthetic brazil nut; inner sequence and 3' sequence

SEQ ID NO: 10142 - DNA, 53 bp, Artificial Sequence; identical to SEQ ID NO: 2230
  Description of Artificial Sequence: Synthetic brazil nut; inner sequence and 3' sequence

SEQ ID NO: 10143 - DNA, 53 bp, Artificial Sequence; identical to SEQ ID NO: 2164
  Description of Artificial Sequence: Synthetic brazil nut; inner sequence and 3' sequence

SEQ ID NO: 10144 - DNA, 53 bp, Artificial Sequence; identical to SEQ ID NO: 2146
  Description of Artificial Sequence: Synthetic brazil nut; inner sequence and 3' sequence

SEQ ID NO: 10145 - DNA, 53 bp, Artificial Sequence; identical to SEQ ID NO: 2125
  Description of Artificial Sequence: Synthetic brazil nut; inner sequence and 3' sequence

SEQ ID NO: 10146 - DNA, 53 bp, Artificial Sequence; identical to SEQ ID NO: 2174
  Description of Artificial Sequence: Synthetic brazil nut; inner sequence and 3' sequence

SEQ ID NO: 10147 - DNA, 53 bp, Artificial Sequence; identical to SEQ ID NO: 2196
  Description of Artificial Sequence: Synthetic brazil nut; inner sequence and 3' sequence

SEQ ID NO: 10148 - DNA, 53 bp, Artificial Sequence; identical to SEQ ID NO: 2293
  Description of Artificial Sequence: Synthetic brazil nut; inner sequence and 3' sequence

SEQ ID NO: 10149 - DNA, 53 bp, Artificial Sequence; identical to SEQ ID NO: 2105
  Description of Artificial Sequence: Synthetic brazil nut; inner sequence and 3' sequence

SEQ ID NO: 10150 - DNA, 53 bp, Artificial Sequence; identical to SEQ ID NO: 2436
  Description of Artificial Sequence: Synthetic brazil nut; inner sequence and 3' sequence

SEQ ID NO: 10151 - DNA, 53 bp, Artificial Sequence; identical to SEQ ID NO: 2240
  Description of Artificial Sequence: Synthetic brazil nut; inner sequence and 3' sequence

SEQ ID NO: 10152 - DNA, 53 bp, Artificial Sequence; identical to SEQ ID NO: 2127
  Description of Artificial Sequence: Synthetic brazil nut; inner sequence and 3' sequence

SEQ ID NO: 10153 - DNA, 53 bp, Artificial Sequence; identical to SEQ ID NO: 2113
  Description of Artificial Sequence: Synthetic brazil nut; inner sequence and 3' sequence

SEQ ID NO: 10154 - DNA, 53 bp, Artificial Sequence; identical to SEQ ID NO: 2283
  Description of Artificial Sequence: Synthetic brazil nut; inner sequence and 3' sequence

SEQ ID NO: 10155 - DNA, 53 bp, Artificial Sequence; identical to SEQ ID NO: 2111
  Description of Artificial Sequence: Synthetic brazil nut; inner sequence and 3' sequence

SEQ ID NO: 10156 - DNA, 53 bp, Artificial Sequence; identical to SEQ ID NO: 2552
  Description of Artificial Sequence: Synthetic brazil nut; inner sequence and 3' sequence

SEQ ID NO: 10157 - DNA, 53 bp, Artificial Sequence; identical to SEQ ID NO: 2153
  Description of Artificial Sequence: Synthetic brazil nut; inner sequence and 3' sequence

SEQ ID NO: 10158 - DNA, 53 bp, Artificial Sequence; identical to SEQ ID NO: 2692
  Description of Artificial Sequence: Synthetic brazil nut; inner sequence and 3' sequence

SEQ ID NO: 10159 - DNA, 53 bp, Artificial Sequence; identical to SEQ ID NO: 2140
  Description of Artificial Sequence: Synthetic brazil nut; inner sequence and 3' sequence

SEQ ID NO: 10160 - DNA, 53 bp, Artificial Sequence; identical to SEQ ID NO: 2253
  Description of Artificial Sequence: Synthetic brazil nut; inner sequence and 3' sequence

SEQ ID NO: 10161 - DNA, 53 bp, Artificial Sequence; identical to SEQ ID NO: 2108
  Description of Artificial Sequence: Synthetic brazil nut; inner sequence and 3' sequence

SEQ ID NO: 10162 - DNA, 53 bp, Artificial Sequence; identical to SEQ ID NO: 2371
  Description of Artificial Sequence: Synthetic brazil nut; inner sequence and 3' sequence

SEQ ID NO: 10163 - DNA, 53 bp, Artificial Sequence; identical to SEQ ID NO: 2385
  Description of Artificial Sequence: Synthetic brazil nut; inner sequence and 3' sequence

SEQ ID NO: 10164 - DNA, 53 bp, Artificial Sequence; identical to SEQ ID NO: 2163
  Description of Artificial Sequence: Synthetic brazil nut; inner sequence and 3' sequence

SEQ ID NO: 10165 - DNA, 53 bp, Artificial Sequence; identical to SEQ ID NO: 2086
  Description of Artificial Sequence: Synthetic brazil nut; inner sequence and 3' sequence

SEQ ID NO: 10166 - DNA, 53 bp, Artificial Sequence; identical to SEQ ID NO: 2270
  Description of Artificial Sequence: Synthetic brazil nut; inner sequence and 3' sequence

SEQ ID NO: 10167 - DNA, 53 bp, Artificial Sequence; identical to SEQ ID NO: 2290
  Description of Artificial Sequence: Synthetic brazil nut; inner sequence and 3' sequence

SEQ ID NO: 10168 - DNA, 53 bp, Artificial Sequence; identical to SEQ ID NO: 2184
  Description of Artificial Sequence: Synthetic brazil nut; inner sequence and 3' sequence

SEQ ID NO: 10169 - DNA, 53 bp, Artificial Sequence; identical to SEQ ID NO: 2171
  Description of Artificial Sequence: Synthetic brazil nut; inner sequence and 3' sequence

SEQ ID NO: 10170 - DNA, 53 bp, Artificial Sequence; identical to SEQ ID NO: 2269
  Description of Artificial Sequence: Synthetic brazil nut; inner sequence and 3' sequence

SEQ ID NO: 10171 - DNA, 53 bp, Artificial Sequence; identical to SEQ ID NO: 2673
  Description of Artificial Sequence: Synthetic brazil nut; inner sequence and 3' sequence

SEQ ID NO: 10172 - DNA, 53 bp, Artificial Sequence; identical to SEQ ID NO: 2110
  Description of Artificial Sequence: Synthetic brazil nut; inner sequence and 3' sequence

SEQ ID NO: 10173 - DNA, 53 bp, Artificial Sequence; identical to SEQ ID NO: 2362
  Description of Artificial Sequence: Synthetic brazil nut; inner sequence and 3' sequence

SEQ ID NO: 10174 - DNA, 53 bp, Artificial Sequence; identical to SEQ ID NO: 2106
  Description of Artificial Sequence: Synthetic brazil nut; inner sequence and 3' sequence

SEQ ID NO: 10175 - DNA, 53 bp, Artificial Sequence; identical to SEQ ID NO: 2198
  Description of Artificial Sequence: Synthetic brazil nut; inner sequence and 3' sequence

SEQ ID NO: 10176 - DNA, 53 bp, Artificial Sequence; identical to SEQ ID NO: 2069
  Description of Artificial Sequence: Synthetic brazil nut; inner sequence and 3' sequence

SEQ ID NO: 10177 - DNA, 53 bp, Artificial Sequence; identical to SEQ ID NO: 2321
  Description of Artificial Sequence: Synthetic brazil nut; inner sequence and 3' sequence

SEQ ID NO: 10178 - DNA, 53 bp, Artificial Sequence; identical to SEQ ID NO: 2205
  Description of Artificial Sequence: Synthetic brazil nut; inner sequence and 3' sequence

SEQ ID NO: 10179 - DNA, 53 bp, Artificial Sequence; identical to SEQ ID NO: 2541
  Description of Artificial Sequence: Synthetic brazil nut; inner sequence and 3' sequence

SEQ ID NO: 10180 - DNA, 53 bp, Artificial Sequence; identical to SEQ ID NO: 2089
  Description of Artificial Sequence: Synthetic brazil nut; inner sequence and 3' sequence

SEQ ID NO: 10181 - DNA, 53 bp, Artificial Sequence; identical to SEQ ID NO: 2157
  Description of Artificial Sequence: Synthetic brazil nut; inner sequence and 3' sequence

SEQ ID NO: 10182 - DNA, 53 bp, Artificial Sequence; identical to SEQ ID NO: 2312
  Description of Artificial Sequence: Synthetic brazil nut; inner sequence and 3' sequence

SEQ ID NO: 10183 - DNA, 54 bp, Artificial Sequence; identical to SEQ ID NO: 2150
  Description of Artificial Sequence: Synthetic brazil nut; inner sequence and 3' sequence

SEQ ID NO: 10184 - DNA, 53 bp, Artificial Sequence; identical to SEQ ID NO: 2200
  Description of Artificial Sequence: Synthetic brazil nut; inner sequence and 3' sequence

SEQ ID NO: 10185 - DNA, 53 bp, Artificial Sequence; identical to SEQ ID NO: 2377
  Description of Artificial Sequence: Synthetic brazil nut; inner sequence and 3' sequence

SEQ ID NO: 10186 - DNA, 53 bp, Artificial Sequence; identical to SEQ ID NO: 2522
  Description of Artificial Sequence: Synthetic brazil nut; inner sequence and 3' sequence

SEQ ID NO: 10187 - DNA, 53 bp, Artificial Sequence; identical to SEQ ID NO: 2347
  Description of Artificial Sequence: Synthetic brazil nut; inner sequence and 3' sequence

SEQ ID NO: 10188 - DNA, 53 bp, Artificial Sequence; identical to SEQ ID NO: 2201
  Description of Artificial Sequence: Synthetic brazil nut; inner sequence and 3' sequence

SEQ ID NO: 10189 - DNA, 53 bp, Artificial Sequence; identical to SEQ ID NO: 2062
  Description of Artificial Sequence: Synthetic brazil nut; inner sequence and 3' sequence

SEQ ID NO: 10190 - DNA, 53 bp, Artificial Sequence; identical to SEQ ID NO: 2438
  Description of Artificial Sequence: Synthetic brazil nut; inner sequence and 3' sequence

SEQ ID NO: 10191 - DNA, 53 bp, Artificial Sequence; identical to SEQ ID NO: 2308
  Description of Artificial Sequence: Synthetic brazil nut; inner sequence and 3' sequence

SEQ ID NO: 10192 - DNA, 53 bp, Artificial Sequence; identical to SEQ ID NO: 2175
  Description of Artificial Sequence: Synthetic brazil nut; inner sequence and 3' sequence

SEQ ID NO: 10193 - DNA, 53 bp, Artificial Sequence; identical to SEQ ID NO: 2186
  Description of Artificial Sequence: Synthetic brazil nut; inner sequence and 3' sequence

SEQ ID NO: 10194 - DNA, 53 bp, Artificial Sequence; identical to SEQ ID NO: 2158
  Description of Artificial Sequence: Synthetic brazil nut; inner sequence and 3' sequence

SEQ ID NO: 10195 - DNA, 53 bp, Artificial Sequence; identical to SEQ ID NO: 6229
  Description of Artificial Sequence: Synthetic brazil nut; inner sequence and 3' sequence

SEQ ID NO: 10196 - DNA, 53 bp, Artificial Sequence; identical to SEQ ID NO: 2134
  Description of Artificial Sequence: Synthetic brazil nut; inner sequence and 3' sequence

SEQ ID NO: 10197 - DNA, 53 bp, Artificial Sequence; identical to SEQ ID NO: 2159
  Description of Artificial Sequence: Synthetic brazil nut; inner sequence and 3' sequence

SEQ ID NO: 10198 - DNA, 53 bp, Artificial Sequence; identical to SEQ ID NO: 2132
  Description of Artificial Sequence: Synthetic brazil nut; inner sequence and 3' sequence

SEQ ID NO: 10199 - DNA, 53 bp, Artificial Sequence; identical to SEQ ID NO: 2353
  Description of Artificial Sequence: Synthetic brazil nut; inner sequence and 3' sequence

SEQ ID NO: 10200 - DNA, 53 bp, Artificial Sequence; identical to SEQ ID NO: 2165
  Description of Artificial Sequence: Synthetic brazil nut; inner sequence and 3' sequence

SEQ ID NO: 10201 - DNA, 53 bp, Artificial Sequence; identical to SEQ ID NO: 2448
  Description of Artificial Sequence: Synthetic brazil nut; inner sequence and 3' sequence

SEQ ID NO: 10202 - DNA, 54 bp, Artificial Sequence; identical to SEQ ID NO: 2221
  Description of Artificial Sequence: Synthetic brazil nut; inner sequence and 3' sequence

SEQ ID NO: 10203 - DNA, 53 bp, Artificial Sequence; identical to SEQ ID NO: 2109
  Description of Artificial Sequence: Synthetic brazil nut; inner sequence and 3' sequence

SEQ ID NO: 10204 - DNA, 54 bp, Artificial Sequence; identical to SEQ ID NO: 2258
  Description of Artificial Sequence: Synthetic brazil nut; inner sequence and 3' sequence

SEQ ID NO: 10205 - DNA, 53 bp, Artificial Sequence; identical to SEQ ID NO: 2654
  Description of Artificial Sequence: Synthetic brazil nut; inner sequence and 3' sequence

SEQ ID NO: 10206 - DNA, 53 bp, Artificial Sequence; identical to SEQ ID NO: 2299
  Description of Artificial Sequence: Synthetic brazil nut; inner sequence and 3' sequence

SEQ ID NO: 10207 - DNA, 53 bp, Artificial Sequence; identical to SEQ ID NO: 2149
  Description of Artificial Sequence: Synthetic brazil nut; inner sequence and 3' sequence

SEQ ID NO: 10208 - DNA, 53 bp, Artificial Sequence; identical to SEQ ID NO: 2138
  Description of Artificial Sequence: Synthetic brazil nut; inner sequence and 3' sequence

SEQ ID NO: 10209 - DNA, 53 bp, Artificial Sequence; identical to SEQ ID NO: 2329
  Description of Artificial Sequence: Synthetic brazil nut; inner sequence and 3' sequence

SEQ ID NO: 10210 - DNA, 53 bp, Artificial Sequence; identical to SEQ ID NO: 2266
  Description of Artificial Sequence: Synthetic brazil nut; inner sequence and 3' sequence

SEQ ID NO: 10211 - DNA, 53 bp, Artificial Sequence; identical to SEQ ID NO: 2172
  Description of Artificial Sequence: Synthetic brazil nut; inner sequence and 3' sequence

SEQ ID NO: 10212 - DNA, 53 bp, Artificial Sequence; identical to SEQ ID NO: 2234
  Description of Artificial Sequence: Synthetic brazil nut; inner sequence and 3' sequence

SEQ ID NO: 10213 - DNA, 53 bp, Artificial Sequence; identical to SEQ ID NO: 2123
  Description of Artificial Sequence: Synthetic brazil nut; inner sequence and 3' sequence

SEQ ID NO: 10214 - DNA, 53 bp, Artificial Sequence; identical to SEQ ID NO: 2075
  Description of Artificial Sequence: Synthetic brazil nut; inner sequence and 3' sequence

SEQ ID NO: 10215 - DNA, 53 bp, Artificial Sequence; identical to SEQ ID NO: 2215
  Description of Artificial Sequence: Synthetic brazil nut; inner sequence and 3' sequence

SEQ ID NO: 10216 - DNA, 53 bp, Artificial Sequence; identical to SEQ ID NO: 2406
  Description of Artificial Sequence: Synthetic brazil nut; inner sequence and 3' sequence

SEQ ID NO: 10217 - DNA, 53 bp, Artificial Sequence; identical to SEQ ID NO: 2139
  Description of Artificial Sequence: Synthetic brazil nut; inner sequence and 3' sequence

SEQ ID NO: 10218 - DNA, 53 bp, Artificial Sequence; identical to SEQ ID NO: 2104
  Description of Artificial Sequence: Synthetic brazil nut; inner sequence and 3' sequence

SEQ ID NO: 10219 - DNA, 53 bp, Artificial Sequence; identical to SEQ ID NO: 2121
  Description of Artificial Sequence: Synthetic brazil nut; inner sequence and 3' sequence

SEQ ID NO: 10220 - DNA, 53 bp, Artificial Sequence; identical to SEQ ID NO: 2579
  Description of Artificial Sequence: Synthetic brazil nut; inner sequence and 3' sequence

SEQ ID NO: 10221 - DNA, 53 bp, Artificial Sequence; identical to SEQ ID NO: 2102
  Description of Artificial Sequence: Synthetic brazil nut; inner sequence and 3' sequence

SEQ ID NO: 10222 - DNA, 53 bp, Artificial Sequence; identical to SEQ ID NO: 2268
  Description of Artificial Sequence: Synthetic brazil nut; inner sequence and 3' sequence

SEQ ID NO: 10223 - DNA, 53 bp, Artificial Sequence; identical to SEQ ID NO: 2429
  Description of Artificial Sequence: Synthetic brazil nut; inner sequence and 3' sequence

SEQ ID NO: 10224 - DNA, 53 bp, Artificial Sequence; identical to SEQ ID NO: 2389
  Description of Artificial Sequence: Synthetic brazil nut; inner sequence and 3' sequence

SEQ ID NO: 10225 - DNA, 53 bp, Artificial Sequence; identical to SEQ ID NO: 6449
  Description of Artificial Sequence: Synthetic brazil nut; inner sequence and 3' sequence

SEQ ID NO: 10226 - DNA, 53 bp, Artificial Sequence; identical to SEQ ID NO: 2454
  Description of Artificial Sequence: Synthetic brazil nut; inner sequence and 3' sequence

SEQ ID NO: 10227 - DNA, 53 bp, Artificial Sequence; identical to SEQ ID NO: 2232
  Description of Artificial Sequence: Synthetic brazil nut; inner sequence and 3' sequence

SEQ ID NO: 10228 - DNA, 53 bp, Artificial Sequence; identical to SEQ ID NO: 2191
  Description of Artificial Sequence: Synthetic brazil nut; inner sequence and 3' sequence

SEQ ID NO: 10229 - DNA, 53 bp, Artificial Sequence; identical to SEQ ID NO: 2527
  Description of Artificial Sequence: Synthetic brazil nut; inner sequence and 3' sequence

SEQ ID NO: 10230 - DNA, 53 bp, Artificial Sequence; identical to SEQ ID NO: 2630
  Description of Artificial Sequence: Synthetic brazil nut; inner sequence and 3' sequence

SEQ ID NO: 10231 - DNA, 53 bp, Artificial Sequence; identical to SEQ ID NO: 2156
  Description of Artificial Sequence: Synthetic brazil nut; inner sequence and 3' sequence

SEQ ID NO: 10232 - DNA, 53 bp, Artificial Sequence; identical to SEQ ID NO: 2645
  Description of Artificial Sequence: Synthetic brazil nut; inner sequence and 3' sequence

SEQ ID NO: 10233 - DNA, 53 bp, Artificial Sequence; identical to SEQ ID NO: 2369
  Description of Artificial Sequence: Synthetic brazil nut; inner sequence and 3' sequence

SEQ ID NO: 10234 - DNA, 53 bp, Artificial Sequence; identical to SEQ ID NO: 2194
  Description of Artificial Sequence: Synthetic brazil nut; inner sequence and 3' sequence

SEQ ID NO: 10235 - DNA, 54 bp, Artificial Sequence; identical to SEQ ID NO: 2250
  Description of Artificial Sequence: Synthetic brazil nut; inner sequence and 3' sequence

SEQ ID NO: 10236 - DNA, 53 bp, Artificial Sequence; identical to SEQ ID NO: 6376
  Description of Artificial Sequence: Synthetic brazil nut; inner sequence and 3' sequence

SEQ ID NO: 10237 - DNA, 53 bp, Artificial Sequence; identical to SEQ ID NO: 2439
  Description of Artificial Sequence: Synthetic brazil nut; inner sequence and 3' sequence

SEQ ID NO: 10238 - DNA, 53 bp, Artificial Sequence; identical to SEQ ID NO: 2570
  Description of Artificial Sequence: Synthetic brazil nut; inner sequence and 3' sequence

SEQ ID NO: 10239 - DNA, 53 bp, Artificial Sequence; identical to SEQ ID NO: 2352
  Description of Artificial Sequence: Synthetic brazil nut; inner sequence and 3' sequence

SEQ ID NO: 10240 - DNA, 53 bp, Artificial Sequence; identical to SEQ ID NO: 2243
  Description of Artificial Sequence: Synthetic brazil nut; inner sequence and 3' sequence

SEQ ID NO: 10241 - DNA, 53 bp, Artificial Sequence; identical to SEQ ID NO: 2367
  Description of Artificial Sequence: Synthetic brazil nut; inner sequence and 3' sequence

SEQ ID NO: 10242 - DNA, 53 bp, Artificial Sequence; identical to SEQ ID NO: 2341
  Description of Artificial Sequence: Synthetic brazil nut; inner sequence and 3' sequence

SEQ ID NO: 10243 - DNA, 53 bp, Artificial Sequence; identical to SEQ ID NO: 2262
  Description of Artificial Sequence: Synthetic brazil nut; inner sequence and 3' sequence

SEQ ID NO: 10244 - DNA, 53 bp, Artificial Sequence; identical to SEQ ID NO: 2085
  Description of Artificial Sequence: Synthetic brazil nut; inner sequence and 3' sequence

SEQ ID NO: 10245 - DNA, 53 bp, Artificial Sequence; identical to SEQ ID NO: 2359
  Description of Artificial Sequence: Synthetic brazil nut; inner sequence and 3' sequence

SEQ ID NO: 10246 - DNA, 53 bp, Artificial Sequence; identical to SEQ ID NO: 2190
  Description of Artificial Sequence: Synthetic brazil nut; inner sequence and 3' sequence

SEQ ID NO: 10247 - DNA, 53 bp, Artificial Sequence; identical to SEQ ID NO: 6230
  Description of Artificial Sequence: Synthetic brazil nut; inner sequence and 3' sequence

SEQ ID NO: 10248 - DNA, 53 bp, Artificial Sequence; identical to SEQ ID NO: 2116
  Description of Artificial Sequence: Synthetic brazil nut; inner sequence and 3' sequence

SEQ ID NO: 10249 - DNA, 53 bp, Artificial Sequence; identical to SEQ ID NO: 2532
  Description of Artificial Sequence: Synthetic brazil nut; inner sequence and 3' sequence

SEQ ID NO: 10250 - DNA, 53 bp, Artificial Sequence; identical to SEQ ID NO: 2336
  Description of Artificial Sequence: Synthetic brazil nut; inner sequence and 3' sequence

SEQ ID NO: 10251 - DNA, 53 bp, Artificial Sequence; identical to SEQ ID NO: 2401
  Description of Artificial Sequence: Synthetic brazil nut; inner sequence and 3' sequence

SEQ ID NO: 10252 - DNA, 53 bp, Artificial Sequence; identical to SEQ ID NO: 2553
  Description of Artificial Sequence: Synthetic brazil nut; inner sequence and 3' sequence

SEQ ID NO: 10253 - DNA, 53 bp, Artificial Sequence; identical to SEQ ID NO: 2696
  Description of Artificial Sequence: Synthetic brazil nut; inner sequence and 3' sequence

SEQ ID NO: 10254 - DNA, 53 bp, Artificial Sequence; identical to SEQ ID NO: 2222
  Description of Artificial Sequence: Synthetic brazil nut; inner sequence and 3' sequence

SEQ ID NO: 10255 - DNA, 53 bp, Artificial Sequence; identical to SEQ ID NO: 2634
  Description of Artificial Sequence: Synthetic brazil nut; inner sequence and 3' sequence

SEQ ID NO: 10256 - DNA, 53 bp, Artificial Sequence; identical to SEQ ID NO: 2496
  Description of Artificial Sequence: Synthetic brazil nut; inner sequence and 3' sequence

SEQ ID NO: 10257 - DNA, 53 bp, Artificial Sequence; identical to SEQ ID NO: 2195
  Description of Artificial Sequence: Synthetic brazil nut; inner sequence and 3' sequence

SEQ ID NO: 10258 - DNA, 53 bp, Artificial Sequence; identical to SEQ ID NO: 2160
  Description of Artificial Sequence: Synthetic brazil nut; inner sequence and 3' sequence

SEQ ID NO: 10259 - DNA, 53 bp, Artificial Sequence; identical to SEQ ID NO: 2204
  Description of Artificial Sequence: Synthetic brazil nut; inner sequence and 3' sequence

SEQ ID NO: 10260 - DNA, 53 bp, Artificial Sequence; identical to SEQ ID NO: 2309
  Description of Artificial Sequence: Synthetic brazil nut; inner sequence and 3' sequence

SEQ ID NO: 10261 - DNA, 53 bp, Artificial Sequence; identical to SEQ ID NO: 2585
  Description of Artificial Sequence: Synthetic brazil nut; inner sequence and 3' sequence

SEQ ID NO: 10262 - DNA, 53 bp, Artificial Sequence; identical to SEQ ID NO: 6336
  Description of Artificial Sequence: Synthetic brazil nut; inner sequence and 3' sequence

SEQ ID NO: 10263 - DNA, 53 bp, Artificial Sequence; identical to SEQ ID NO: 2072
  Description of Artificial Sequence: Synthetic brazil nut; inner sequence and 3' sequence

SEQ ID NO: 10264 - DNA, 53 bp, Artificial Sequence; identical to SEQ ID NO: 2187
  Description of Artificial Sequence: Synthetic brazil nut; inner sequence and 3' sequence

SEQ ID NO: 10265 - DNA, 53 bp, Artificial Sequence; identical to SEQ ID NO: 2228
  Description of Artificial Sequence: Synthetic brazil nut; inner sequence and 3' sequence

SEQ ID NO: 10266 - DNA, 53 bp, Artificial Sequence; identical to SEQ ID NO: 2953
  Description of Artificial Sequence: Synthetic brazil nut; inner sequence and 3' sequence

SEQ ID NO: 10267 - DNA, 53 bp, Artificial Sequence; identical to SEQ ID NO: 2373
  Description of Artificial Sequence: Synthetic brazil nut; inner sequence and 3' sequence

SEQ ID NO: 10268 - DNA, 53 bp, Artificial Sequence; identical to SEQ ID NO: 2217
  Description of Artificial Sequence: Synthetic brazil nut; inner sequence and 3' sequence

SEQ ID NO: 10269 - DNA, 53 bp, Artificial Sequence; identical to SEQ ID NO: 2376
  Description of Artificial Sequence: Synthetic brazil nut; inner sequence and 3' sequence

SEQ ID NO: 10270 - DNA, 53 bp, Artificial Sequence; identical to SEQ ID NO: 2224
  Description of Artificial Sequence: Synthetic brazil nut; inner sequence and 3' sequence

SEQ ID NO: 10271 - DNA, 53 bp, Artificial Sequence; identical to SEQ ID NO: 2524
  Description of Artificial Sequence: Synthetic brazil nut; inner sequence and 3' sequence

SEQ ID NO: 10272 - DNA, 53 bp, Artificial Sequence; identical to SEQ ID NO: 2166
  Description of Artificial Sequence: Synthetic brazil nut; inner sequence and 3' sequence

SEQ ID NO: 10273 - DNA, 53 bp, Artificial Sequence; identical to SEQ ID NO: 2392
  Description of Artificial Sequence: Synthetic brazil nut; inner sequence and 3' sequence

SEQ ID NO: 10274 - DNA, 53 bp, Artificial Sequence; identical to SEQ ID NO: 2098
  Description of Artificial Sequence: Synthetic brazil nut; inner sequence and 3' sequence

SEQ ID NO: 10275 - DNA, 53 bp, Artificial Sequence; identical to SEQ ID NO: 2671
  Description of Artificial Sequence: Synthetic brazil nut; inner sequence and 3' sequence

SEQ ID NO: 10276 - DNA, 53 bp, Artificial Sequence; identical to SEQ ID NO: 2152
  Description of Artificial Sequence: Synthetic brazil nut; inner sequence and 3' sequence

SEQ ID NO: 10277 - DNA, 53 bp, Artificial Sequence; identical to SEQ ID NO: 2506
  Description of Artificial Sequence: Synthetic brazil nut; inner sequence and 3' sequence

SEQ ID NO: 10278 - DNA, 53 bp, Artificial Sequence; identical to SEQ ID NO: 2192
  Description of Artificial Sequence: Synthetic brazil nut; inner sequence and 3' sequence

SEQ ID NO: 10279 - DNA, 53 bp, Artificial Sequence; identical to SEQ ID NO: 2556
  Description of Artificial Sequence: Synthetic brazil nut; inner sequence and 3' sequence

SEQ ID NO: 10280 - DNA, 53 bp, Artificial Sequence; identical to SEQ ID NO: 2305
  Description of Artificial Sequence: Synthetic brazil nut; inner sequence and 3' sequence

SEQ ID NO: 10281 - DNA, 53 bp, Artificial Sequence; identical to SEQ ID NO: 2090
  Description of Artificial Sequence: Synthetic brazil nut; inner sequence and 3' sequence

SEQ ID NO: 10282 - DNA, 53 bp, Artificial Sequence; identical to SEQ ID NO: 2540
  Description of Artificial Sequence: Synthetic brazil nut; inner sequence and 3' sequence

SEQ ID NO: 10283 - DNA, 53 bp, Artificial Sequence; identical to SEQ ID NO: 2323
  Description of Artificial Sequence: Synthetic brazil nut; inner sequence and 3' sequence

SEQ ID NO: 10284 - DNA, 53 bp, Artificial Sequence; identical to SEQ ID NO: 2365
  Description of Artificial Sequence: Synthetic brazil nut; inner sequence and 3' sequence

SEQ ID NO: 10285 - DNA, 53 bp, Artificial Sequence; identical to SEQ ID NO: 2572
  Description of Artificial Sequence: Synthetic brazil nut; inner sequence and 3' sequence

SEQ ID NO: 10286 - DNA, 53 bp, Artificial Sequence; identical to SEQ ID NO: 2529
  Description of Artificial Sequence: Synthetic brazil nut; inner sequence and 3' sequence

SEQ ID NO: 10287 - DNA, 53 bp, Artificial Sequence; identical to SEQ ID NO: 2481
  Description of Artificial Sequence: Synthetic brazil nut; inner sequence and 3' sequence

SEQ ID NO: 10288 - DNA, 51 bp, Artificial Sequence; identical to SEQ ID NO: 2241
  Description of Artificial Sequence: Synthetic brazil nut; inner sequence and 3' sequence

SEQ ID NO: 10289 - DNA, 53 bp, Artificial Sequence; identical to SEQ ID NO: 2511
  Description of Artificial Sequence: Synthetic brazil nut; inner sequence and 3' sequence

SEQ ID NO: 10290 - DNA, 53 bp, Artificial Sequence; identical to SEQ ID NO: 2343
  Description of Artificial Sequence: Synthetic brazil nut; inner sequence and 3' sequence

SEQ ID NO: 10291 - DNA, 53 bp, Artificial Sequence; identical to SEQ ID NO: 2613
  Description of Artificial Sequence: Synthetic brazil nut; inner sequence and 3' sequence

SEQ ID NO: 10292 - DNA, 53 bp, Artificial Sequence; identical to SEQ ID NO: 2246
  Description of Artificial Sequence: Synthetic brazil nut; inner sequence and 3' sequence

SEQ ID NO: 10293 - DNA, 53 bp, Artificial Sequence; identical to SEQ ID NO: 2611
  Description of Artificial Sequence: Synthetic brazil nut; inner sequence and 3' sequence

SEQ ID NO: 10294 - DNA, 53 bp, Artificial Sequence; identical to SEQ ID NO: 2182
  Description of Artificial Sequence: Synthetic brazil nut; inner sequence and 3' sequence

SEQ ID NO: 10295 - DNA, 53 bp, Artificial Sequence; identical to SEQ ID NO: 2413
  Description of Artificial Sequence: Synthetic brazil nut; inner sequence and 3' sequence

SEQ ID NO: 10296 - DNA, 53 bp, Artificial Sequence; identical to SEQ ID NO: 2450
  Description of Artificial Sequence: Synthetic brazil nut; inner sequence and 3' sequence

SEQ ID NO: 10297 - DNA, 53 bp, Artificial Sequence; identical to SEQ ID NO: 2485
  Description of Artificial Sequence: Synthetic brazil nut; inner sequence and 3' sequence

SEQ ID NO: 10298 - DNA, 53 bp, Artificial Sequence; identical to SEQ ID NO: 2783
  Description of Artificial Sequence: Synthetic brazil nut; inner sequence and 3' sequence

SEQ ID NO: 10299 - DNA, 53 bp, Artificial Sequence; identical to SEQ ID NO: 2310
  Description of Artificial Sequence: Synthetic brazil nut; inner sequence and 3' sequence

SEQ ID NO: 10300 - DNA, 53 bp, Artificial Sequence; identical to SEQ ID NO: 2178
  Description of Artificial Sequence: Synthetic brazil nut; inner sequence and 3' sequence

SEQ ID NO: 10301 - DNA, 53 bp, Artificial Sequence; identical to SEQ ID NO: 2520
  Description of Artificial Sequence: Synthetic brazil nut; inner sequence and 3' sequence

SEQ ID NO: 10302 - DNA, 53 bp, Artificial Sequence; identical to SEQ ID NO: 6348
  Description of Artificial Sequence: Synthetic brazil nut; inner sequence and 3' sequence

SEQ ID NO: 10303 - DNA, 53 bp, Artificial Sequence; identical to SEQ ID NO: 2916
  Description of Artificial Sequence: Synthetic brazil nut; inner sequence and 3' sequence

SEQ ID NO: 10304 - DNA, 53 bp, Artificial Sequence; identical to SEQ ID NO: 2254
  Description of Artificial Sequence: Synthetic brazil nut; inner sequence and 3' sequence

SEQ ID NO: 10305 - DNA, 53 bp, Artificial Sequence; identical to SEQ ID NO: 2391
  Description of Artificial Sequence: Synthetic brazil nut; inner sequence and 3' sequence

SEQ ID NO: 10306 - DNA, 53 bp, Artificial Sequence; identical to SEQ ID NO: 2414
  Description of Artificial Sequence: Synthetic brazil nut; inner sequence and 3' sequence

SEQ ID NO: 10307 - DNA, 53 bp, Artificial Sequence; identical to SEQ ID NO: 2220
  Description of Artificial Sequence: Synthetic brazil nut; inner sequence and 3' sequence

SEQ ID NO: 10308 - DNA, 53 bp, Artificial Sequence; identical to SEQ ID NO: 2271
  Description of Artificial Sequence: Synthetic brazil nut; inner sequence and 3' sequence

SEQ ID NO: 10309 - DNA, 53 bp, Artificial Sequence; identical to SEQ ID NO: 6234
  Description of Artificial Sequence: Synthetic brazil nut; inner sequence and 3' sequence

SEQ ID NO: 10310 - DNA, 53 bp, Artificial Sequence; identical to SEQ ID NO: 6907
  Description of Artificial Sequence: Synthetic brazil nut; inner sequence and 3' sequence

SEQ ID NO: 10311 - DNA, 53 bp, Artificial Sequence; identical to SEQ ID NO: 2214
  Description of Artificial Sequence: Synthetic brazil nut; inner sequence and 3' sequence

SEQ ID NO: 10312 - DNA, 53 bp, Artificial Sequence; identical to SEQ ID NO: 2791
  Description of Artificial Sequence: Synthetic brazil nut; inner sequence and 3' sequence

SEQ ID NO: 10313 - DNA, 53 bp, Artificial Sequence; identical to SEQ ID NO: 6406
  Description of Artificial Sequence: Synthetic brazil nut; inner sequence and 3' sequence

SEQ ID NO: 10314 - DNA, 53 bp, Artificial Sequence; identical to SEQ ID NO: 2173
  Description of Artificial Sequence: Synthetic brazil nut; inner sequence and 3' sequence

SEQ ID NO: 10315 - DNA, 53 bp, Artificial Sequence; identical to SEQ ID NO: 2850
  Description of Artificial Sequence: Synthetic brazil nut; inner sequence and 3' sequence

SEQ ID NO: 10316 - DNA, 53 bp, Artificial Sequence; identical to SEQ ID NO: 2528
  Description of Artificial Sequence: Synthetic brazil nut; inner sequence and 3' sequence

SEQ ID NO: 10317 - DNA, 53 bp, Artificial Sequence; identical to SEQ ID NO: 2442
  Description of Artificial Sequence: Synthetic brazil nut; inner sequence and 3' sequence

SEQ ID NO: 10318 - DNA, 53 bp, Artificial Sequence; identical to SEQ ID NO: 2349
  Description of Artificial Sequence: Synthetic brazil nut; inner sequence and 3' sequence

SEQ ID NO: 10319 - DNA, 54 bp, Artificial Sequence; identical to SEQ ID NO: 6245
  Description of Artificial Sequence: Synthetic brazil nut; inner sequence and 3' sequence

SEQ ID NO: 10320 - DNA, 53 bp, Artificial Sequence; identical to SEQ ID NO: 6238
  Description of Artificial Sequence: Synthetic brazil nut; inner sequence and 3' sequence

SEQ ID NO: 10321 - DNA, 53 bp, Artificial Sequence; identical to SEQ ID NO: 2274
  Description of Artificial Sequence: Synthetic brazil nut; inner sequence and 3' sequence

SEQ ID NO: 10322 - DNA, 53 bp, Artificial Sequence; identical to SEQ ID NO: 2344
  Description of Artificial Sequence: Synthetic brazil nut; inner sequence and 3' sequence

SEQ ID NO: 10323 - DNA, 53 bp, Artificial Sequence; identical to SEQ ID NO: 2218
  Description of Artificial Sequence: Synthetic brazil nut; inner sequence and 3' sequence

SEQ ID NO: 10324 - DNA, 53 bp, Artificial Sequence; identical to SEQ ID NO: 2379
  Description of Artificial Sequence: Synthetic brazil nut; inner sequence and 3' sequence

SEQ ID NO: 10325 - DNA, 53 bp, Artificial Sequence; identical to SEQ ID NO: 6613
  Description of Artificial Sequence: Synthetic brazil nut; inner sequence and 3' sequence

SEQ ID NO: 10326 - DNA, 53 bp, Artificial Sequence; identical to SEQ ID NO: 2394
  Description of Artificial Sequence: Synthetic brazil nut; inner sequence and 3' sequence

SEQ ID NO: 10327 - DNA, 53 bp, Artificial Sequence; identical to SEQ ID NO: 6254
  Description of Artificial Sequence: Synthetic brazil nut; inner sequence and 3' sequence

SEQ ID NO: 10328 - DNA, 53 bp, Artificial Sequence; identical to SEQ ID NO: 2390
  Description of Artificial Sequence: Synthetic brazil nut; inner sequence and 3' sequence

SEQ ID NO: 10329 - DNA, 53 bp, Artificial Sequence; identical to SEQ ID NO: 2563
  Description of Artificial Sequence: Synthetic brazil nut; inner sequence and 3' sequence

SEQ ID NO: 10330 - DNA, 53 bp, Artificial Sequence; identical to SEQ ID NO: 2387
  Description of Artificial Sequence: Synthetic brazil nut; inner sequence and 3' sequence

SEQ ID NO: 10331 - DNA, 53 bp, Artificial Sequence; identical to SEQ ID NO: 2135
  Description of Artificial Sequence: Synthetic brazil nut; inner sequence and 3' sequence

SEQ ID NO: 10332 - DNA, 53 bp, Artificial Sequence; identical to SEQ ID NO: 6380
  Description of Artificial Sequence: Synthetic brazil nut; inner sequence and 3' sequence

SEQ ID NO: 10333 - DNA, 53 bp, Artificial Sequence; identical to SEQ ID NO: 2189
  Description of Artificial Sequence: Synthetic brazil nut; inner sequence and 3' sequence

SEQ ID NO: 10334 - DNA, 53 bp, Artificial Sequence; identical to SEQ ID NO: 2137
  Description of Artificial Sequence: Synthetic brazil nut; inner sequence and 3' sequence

SEQ ID NO: 10335 - DNA, 53 bp, Artificial Sequence; identical to SEQ ID NO: 2084
  Description of Artificial Sequence: Synthetic brazil nut; inner sequence and 3' sequence

SEQ ID NO: 10336 - DNA, 53 bp, Artificial Sequence; identical to SEQ ID NO: 2433
  Description of Artificial Sequence: Synthetic brazil nut; inner sequence and 3' sequence

SEQ ID NO: 10337 - DNA, 53 bp, Artificial Sequence; identical to SEQ ID NO: 2457
  Description of Artificial Sequence: Synthetic brazil nut; inner sequence and 3' sequence

SEQ ID NO: 10338 - DNA, 53 bp, Artificial Sequence; identical to SEQ ID NO: 6792
  Description of Artificial Sequence: Synthetic brazil nut; inner sequence and 3' sequence

SEQ ID NO: 10339 - DNA, 53 bp, Artificial Sequence; identical to SEQ ID NO: 2167
  Description of Artificial Sequence: Synthetic brazil nut; inner sequence and 3' sequence

SEQ ID NO: 10340 - DNA, 53 bp, Artificial Sequence; identical to SEQ ID NO: 2370
  Description of Artificial Sequence: Synthetic brazil nut; inner sequence and 3' sequence

SEQ ID NO: 10341 - DNA, 53 bp, Artificial Sequence; identical to SEQ ID NO: 2523
  Description of Artificial Sequence: Synthetic brazil nut; inner sequence and 3' sequence

SEQ ID NO: 10342 - DNA, 53 bp, Artificial Sequence; identical to SEQ ID NO: 2114
  Description of Artificial Sequence: Synthetic brazil nut; inner sequence and 3' sequence

SEQ ID NO: 10343 - DNA, 53 bp, Artificial Sequence; identical to SEQ ID NO: 6280
  Description of Artificial Sequence: Synthetic brazil nut; inner sequence and 3' sequence

SEQ ID NO: 10344 - DNA, 53 bp, Artificial Sequence; identical to SEQ ID NO: 2272
  Description of Artificial Sequence: Synthetic brazil nut; inner sequence and 3' sequence

SEQ ID NO: 10345 - DNA, 53 bp, Artificial Sequence; identical to SEQ ID NO: 2358
  Description of Artificial Sequence: Synthetic brazil nut; inner sequence and 3' sequence

SEQ ID NO: 10346 - DNA, 53 bp, Artificial Sequence; identical to SEQ ID NO: 2426
  Description of Artificial Sequence: Synthetic brazil nut; inner sequence and 3' sequence

SEQ ID NO: 10347 - DNA, 53 bp, Artificial Sequence; identical to SEQ ID NO: 2320
  Description of Artificial Sequence: Synthetic brazil nut; inner sequence and 3' sequence

SEQ ID NO: 10348 - DNA, 53 bp, Artificial Sequence; identical to SEQ ID NO: 2256
  Description of Artificial Sequence: Synthetic brazil nut; inner sequence and 3' sequence

SEQ ID NO: 10349 - DNA, 53 bp, Artificial Sequence; identical to SEQ ID NO: 2303
  Description of Artificial Sequence: Synthetic brazil nut; inner sequence and 3' sequence

SEQ ID NO: 10350 - DNA, 53 bp, Artificial Sequence; identical to SEQ ID NO: 2950
  Description of Artificial Sequence: Synthetic brazil nut; inner sequence and 3' sequence

SEQ ID NO: 10351 - DNA, 53 bp, Artificial Sequence; identical to SEQ ID NO: 2399
  Description of Artificial Sequence: Synthetic brazil nut; inner sequence and 3' sequence

SEQ ID NO: 10352 - DNA, 53 bp, Artificial Sequence; identical to SEQ ID NO: 2409
  Description of Artificial Sequence: Synthetic brazil nut; inner sequence and 3' sequence

SEQ ID NO: 10353 - DNA, 53 bp, Artificial Sequence; identical to SEQ ID NO: 6755
  Description of Artificial Sequence: Synthetic brazil nut; inner sequence and 3' sequence

SEQ ID NO: 10354 - DNA, 53 bp, Artificial Sequence; identical to SEQ ID NO: 2279
  Description of Artificial Sequence: Synthetic brazil nut; inner sequence and 3' sequence

SEQ ID NO: 10355 - DNA, 53 bp, Artificial Sequence; identical to SEQ ID NO: 2487
  Description of Artificial Sequence: Synthetic brazil nut; inner sequence and 3' sequence

SEQ ID NO: 10356 - DNA, 53 bp, Artificial Sequence; identical to SEQ ID NO: 2928
  Description of Artificial Sequence: Synthetic brazil nut; inner sequence and 3' sequence

SEQ ID NO: 10357 - DNA, 53 bp, Artificial Sequence; identical to SEQ ID NO: 2901
  Description of Artificial Sequence: Synthetic brazil nut; inner sequence and 3' sequence

SEQ ID NO: 10358 - DNA, 53 bp, Artificial Sequence; identical to SEQ ID NO: 2197
  Description of Artificial Sequence: Synthetic brazil nut; inner sequence and 3' sequence

SEQ ID NO: 10359 - DNA, 56 bp, Artificial Sequence; identical to SEQ ID NO: 2864
  Description of Artificial Sequence: Synthetic brazil nut; inner sequence and 3' sequence

SEQ ID NO: 10360 - DNA, 53 bp, Artificial Sequence; identical to SEQ ID NO: 2403
  Description of Artificial Sequence: Synthetic brazil nut; inner sequence and 3' sequence

SEQ ID NO: 10361 - DNA, 53 bp, Artificial Sequence; identical to SEQ ID NO: 6260
  Description of Artificial Sequence: Synthetic brazil nut; inner sequence and 3' sequence

SEQ ID NO: 10362 - DNA, 53 bp, Artificial Sequence; identical to SEQ ID NO: 2170
  Description of Artificial Sequence: Synthetic brazil nut; inner sequence and 3' sequence

SEQ ID NO: 10363 - DNA, 53 bp, Artificial Sequence; identical to SEQ ID NO: 2419
  Description of Artificial Sequence: Synthetic brazil nut; inner sequence and 3' sequence

SEQ ID NO: 10364 - DNA, 53 bp, Artificial Sequence; identical to SEQ ID NO: 2741
  Description of Artificial Sequence: Synthetic brazil nut; inner sequence and 3' sequence

SEQ ID NO: 10365 - DNA, 53 bp, Artificial Sequence; identical to SEQ ID NO: 2176
  Description of Artificial Sequence: Synthetic brazil nut; inner sequence and 3' sequence

SEQ ID NO: 10366 - DNA, 53 bp, Artificial Sequence; identical to SEQ ID NO: 2383
  Description of Artificial Sequence: Synthetic brazil nut; inner sequence and 3' sequence

SEQ ID NO: 10367 - DNA, 53 bp, Artificial Sequence; identical to SEQ ID NO: 2212
  Description of Artificial Sequence: Synthetic brazil nut; inner sequence and 3' sequence

SEQ ID NO: 10368 - DNA, 52 bp, Artificial Sequence; identical to SEQ ID NO: 2259
  Description of Artificial Sequence: Synthetic brazil nut; inner sequence and 3' sequence

SEQ ID NO: 10369 - DNA, 53 bp, Artificial Sequence; identical to SEQ ID NO: 6301
  Description of Artificial Sequence: Synthetic brazil nut; inner sequence and 3' sequence

SEQ ID NO: 10370 - DNA, 53 bp, Artificial Sequence; identical to SEQ ID NO: 2437
  Description of Artificial Sequence: Synthetic brazil nut; inner sequence and 3' sequence

SEQ ID NO: 10371 - DNA, 53 bp, Artificial Sequence; identical to SEQ ID NO: 2298
  Description of Artificial Sequence: Synthetic brazil nut; inner sequence and 3' sequence

SEQ ID NO: 10372 - DNA, 53 bp, Artificial Sequence; identical to SEQ ID NO: 2278
  Description of Artificial Sequence: Synthetic brazil nut; inner sequence and 3' sequence

SEQ ID NO: 10373 - DNA, 53 bp, Artificial Sequence; identical to SEQ ID NO: 2467
  Description of Artificial Sequence: Synthetic brazil nut; inner sequence and 3' sequence

SEQ ID NO: 10374 - DNA, 53 bp, Artificial Sequence; identical to SEQ ID NO: 2994
  Description of Artificial Sequence: Synthetic brazil nut; inner sequence and 3' sequence

SEQ ID NO: 10375 - DNA, 53 bp, Artificial Sequence; identical to SEQ ID NO: 2836
  Description of Artificial Sequence: Synthetic brazil nut; inner sequence and 3' sequence

SEQ ID NO: 10376 - DNA, 53 bp, Artificial Sequence; identical to SEQ ID NO: 2319
  Description of Artificial Sequence: Synthetic brazil nut; inner sequence and 3' sequence

SEQ ID NO: 10377 - DNA, 53 bp, Artificial Sequence; identical to SEQ ID NO: 6425
  Description of Artificial Sequence: Synthetic brazil nut; inner sequence and 3' sequence

SEQ ID NO: 10378 - DNA, 53 bp, Artificial Sequence; identical to SEQ ID NO: 2530
  Description of Artificial Sequence: Synthetic brazil nut; inner sequence and 3' sequence

SEQ ID NO: 10379 - DNA, 53 bp, Artificial Sequence; identical to SEQ ID NO: 2350
  Description of Artificial Sequence: Synthetic brazil nut; inner sequence and 3' sequence

SEQ ID NO: 10380 - DNA, 53 bp, Artificial Sequence; identical to SEQ ID NO: 2340
  Description of Artificial Sequence: Synthetic brazil nut; inner sequence and 3' sequence

SEQ ID NO: 10381 - DNA, 53 bp, Artificial Sequence; identical to SEQ ID NO: 2811
  Description of Artificial Sequence: Synthetic brazil nut; inner sequence and 3' sequence

SEQ ID NO: 10382 - DNA, 53 bp, Artificial Sequence; identical to SEQ ID NO: 2332
  Description of Artificial Sequence: Synthetic brazil nut; inner sequence and 3' sequence

SEQ ID NO: 10383 - DNA, 53 bp, Artificial Sequence; identical to SEQ ID NO: 2534
  Description of Artificial Sequence: Synthetic brazil nut; inner sequence and 3' sequence

SEQ ID NO: 10384 - DNA, 53 bp, Artificial Sequence; identical to SEQ ID NO: 2380
  Description of Artificial Sequence: Synthetic brazil nut; inner sequence and 3' sequence

SEQ ID NO: 10385 - DNA, 53 bp, Artificial Sequence; identical to SEQ ID NO: 2545
  Description of Artificial Sequence: Synthetic brazil nut; inner sequence and 3' sequence

SEQ ID NO: 10386 - DNA, 53 bp, Artificial Sequence; identical to SEQ ID NO: 2912
  Description of Artificial Sequence: Synthetic brazil nut; inner sequence and 3' sequence

SEQ ID NO: 10387 - DNA, 53 bp, Artificial Sequence; identical to SEQ ID NO: 2280
  Description of Artificial Sequence: Synthetic brazil nut; inner sequence and 3' sequence

SEQ ID NO: 10388 - DNA, 53 bp, Artificial Sequence; identical to SEQ ID NO: 2130
  Description of Artificial Sequence: Synthetic brazil nut; inner sequence and 3' sequence

SEQ ID NO: 10389 - DNA, 53 bp, Artificial Sequence; identical to SEQ ID NO: 2478
  Description of Artificial Sequence: Synthetic brazil nut; inner sequence and 3' sequence

SEQ ID NO: 10390 - DNA, 53 bp, Artificial Sequence; identical to SEQ ID NO: 2400
  Description of Artificial Sequence: Synthetic brazil nut; inner sequence and 3' sequence

SEQ ID NO: 10391 - DNA, 53 bp, Artificial Sequence; identical to SEQ ID NO: 2255
  Description of Artificial Sequence: Synthetic brazil nut; inner sequence and 3' sequence

SEQ ID NO: 10392 - DNA, 53 bp, Artificial Sequence; identical to SEQ ID NO: 2557
  Description of Artificial Sequence: Synthetic brazil nut; inner sequence and 3' sequence

SEQ ID NO: 10393 - DNA, 53 bp, Artificial Sequence; identical to SEQ ID NO: 2273
  Description of Artificial Sequence: Synthetic brazil nut; inner sequence and 3' sequence

SEQ ID NO: 10394 - DNA, 53 bp, Artificial Sequence; identical to SEQ ID NO: 2119
  Description of Artificial Sequence: Synthetic brazil nut; inner sequence and 3' sequence

SEQ ID NO: 10395 - DNA, 53 bp, Artificial Sequence; identical to SEQ ID NO: 6419
  Description of Artificial Sequence: Synthetic brazil nut; inner sequence and 3' sequence

SEQ ID NO: 10396 - DNA, 53 bp, Artificial Sequence; identical to SEQ ID NO: 2771
  Description of Artificial Sequence: Synthetic brazil nut; inner sequence and 3' sequence

SEQ ID NO: 10397 - DNA, 53 bp, Artificial Sequence; identical to SEQ ID NO: 6401
  Description of Artificial Sequence: Synthetic brazil nut; inner sequence and 3' sequence

SEQ ID NO: 10398 - DNA, 53 bp, Artificial Sequence; identical to SEQ ID NO: 2277
  Description of Artificial Sequence: Synthetic brazil nut; inner sequence and 3' sequence

SEQ ID NO: 10399 - DNA, 53 bp, Artificial Sequence; identical to SEQ ID NO: 6351
  Description of Artificial Sequence: Synthetic brazil nut; inner sequence and 3' sequence

SEQ ID NO: 10400 - DNA, 53 bp, Artificial Sequence; identical to SEQ ID NO: 2517
  Description of Artificial Sequence: Synthetic brazil nut; inner sequence and 3' sequence

SEQ ID NO: 10401 - DNA, 53 bp, Artificial Sequence
  Description of Artificial Sequence: Synthetic brazil nut; inner sequence and 3' sequence
ggccaacgctggatgagggctgtatgtggcttgactagtacatgaccacttga

SEQ ID NO: 10402 - DNA, 53 bp, Artificial Sequence; identical to SEQ ID NO: 2764
  Description of Artificial Sequence: Synthetic brazil nut; inner sequence and 3' sequence

SEQ ID NO: 10403 - DNA, 53 bp, Artificial Sequence; identical to SEQ ID NO: 2346
  Description of Artificial Sequence: Synthetic brazil nut; inner sequence and 3' sequence

SEQ ID NO: 10404 - DNA, 53 bp, Artificial Sequence; identical to SEQ ID NO: 2915
  Description of Artificial Sequence: Synthetic brazil nut; inner sequence and 3' sequence

SEQ ID NO: 10405 - DNA, 53 bp, Artificial Sequence; identical to SEQ ID NO: 2177
  Description of Artificial Sequence: Synthetic brazil nut; inner sequence and 3' sequence

SEQ ID NO: 10406 - DNA, 53 bp, Artificial Sequence; identical to SEQ ID NO: 2181
  Description of Artificial Sequence: Synthetic brazil nut; inner sequence and 3' sequence

SEQ ID NO: 10407 - DNA, 53 bp, Artificial Sequence; identical to SEQ ID NO: 2301
  Description of Artificial Sequence: Synthetic brazil nut; inner sequence and 3' sequence

SEQ ID NO: 10408 - DNA, 53 bp, Artificial Sequence; identical to SEQ ID NO: 6317
  Description of Artificial Sequence: Synthetic brazil nut; inner sequence and 3' sequence

SEQ ID NO: 10409 - DNA, 53 bp, Artificial Sequence; identical to SEQ ID NO: 2244
  Description of Artificial Sequence: Synthetic brazil nut; inner sequence and 3' sequence

SEQ ID NO: 10410 - DNA, 53 bp, Artificial Sequence; identical to SEQ ID NO: 2375
  Description of Artificial Sequence: Synthetic brazil nut; inner sequence and 3' sequence

SEQ ID NO: 10411 - DNA, 53 bp, Artificial Sequence; identical to SEQ ID NO: 2932
  Description of Artificial Sequence: Synthetic brazil nut; inner sequence and 3' sequence

SEQ ID NO: 10412 - DNA, 53 bp, Artificial Sequence; identical to SEQ ID NO: 2807
  Description of Artificial Sequence: Synthetic brazil nut; inner sequence and 3' sequence

SEQ ID NO: 10413 - DNA, 53 bp, Artificial Sequence; identical to SEQ ID NO: 6420
  Description of Artificial Sequence: Synthetic brazil nut; inner sequence and 3' sequence

SEQ ID NO: 10414 - DNA, 53 bp, Artificial Sequence; identical to SEQ ID NO: 2625
  Description of Artificial Sequence: Synthetic brazil nut; inner sequence and 3' sequence

SEQ ID NO: 10415 - DNA, 53 bp, Artificial Sequence; identical to SEQ ID NO: 6492
  Description of Artificial Sequence: Synthetic brazil nut; inner sequence and 3' sequence

SEQ ID NO: 10416 - DNA, 53 bp, Artificial Sequence; identical to SEQ ID NO: 6445
  Description of Artificial Sequence: Synthetic brazil nut; inner sequence and 3' sequence

SEQ ID NO: 10417 - DNA, 53 bp, Artificial Sequence; identical to SEQ ID NO: 2846
  Description of Artificial Sequence: Synthetic brazil nut; inner sequence and 3' sequence

SEQ ID NO: 10418 - DNA, 53 bp, Artificial Sequence; identical to SEQ ID NO: 2361
  Description of Artificial Sequence: Synthetic brazil nut; inner sequence and 3' sequence

SEQ ID NO: 10419 - DNA, 53 bp, Artificial Sequence; identical to SEQ ID NO: 2314
  Description of Artificial Sequence: Synthetic brazil nut; inner sequence and 3' sequence

SEQ ID NO: 10420 - DNA, 53 bp, Artificial Sequence; identical to SEQ ID NO: 2432
  Description of Artificial Sequence: Synthetic brazil nut; inner sequence and 3' sequence

SEQ ID NO: 10421 - DNA, 53 bp, Artificial Sequence; identical to SEQ ID NO: 2313
  Description of Artificial Sequence: Synthetic brazil nut; inner sequence and 3' sequence

SEQ ID NO: 10422 - DNA, 53 bp, Artificial Sequence; identical to SEQ ID NO: 2757
  Description of Artificial Sequence: Synthetic brazil nut; inner sequence and 3' sequence

SEQ ID NO: 10423 - DNA, 53 bp, Artificial Sequence; identical to SEQ ID NO: 6585
  Description of Artificial Sequence: Synthetic brazil nut; inner sequence and 3' sequence

SEQ ID NO: 10424 - DNA, 53 bp, Artificial Sequence; identical to SEQ ID NO: 2209
  Description of Artificial Sequence: Synthetic brazil nut; inner sequence and 3' sequence

SEQ ID NO: 10425 - DNA, 53 bp, Artificial Sequence; identical to SEQ ID NO: 2231
  Description of Artificial Sequence: Synthetic brazil nut; inner sequence and 3' sequence

SEQ ID NO: 10426 - DNA, 53 bp, Artificial Sequence; identical to SEQ ID NO: 2210
  Description of Artificial Sequence: Synthetic brazil nut; inner sequence and 3' sequence

SEQ ID NO: 10427 - DNA, 53 bp, Artificial Sequence; identical to SEQ ID NO: 2568
  Description of Artificial Sequence: Synthetic brazil nut; inner sequence and 3' sequence

SEQ ID NO: 10428 - DNA, 53 bp, Artificial Sequence; identical to SEQ ID NO: 2315
  Description of Artificial Sequence: Synthetic brazil nut; inner sequence and 3' sequence

SEQ ID NO: 10429 - DNA, 53 bp, Artificial Sequence; identical to SEQ ID NO: 2087
  Description of Artificial Sequence: Synthetic brazil nut; inner sequence and 3' sequence

SEQ ID NO: 10430 - DNA, 53 bp, Artificial Sequence; identical to SEQ ID NO: 2213
  Description of Artificial Sequence: Synthetic brazil nut; inner sequence and 3' sequence

SEQ ID NO: 10431 - DNA, 53 bp, Artificial Sequence; identical to SEQ ID NO: 6407
  Description of Artificial Sequence: Synthetic brazil nut; inner sequence and 3' sequence

SEQ ID NO: 10432 - DNA, 53 bp, Artificial Sequence; identical to SEQ ID NO: 6394
  Description of Artificial Sequence: Synthetic brazil nut; inner sequence and 3' sequence

SEQ ID NO: 10433 - DNA, 53 bp, Artificial Sequence; identical to SEQ ID NO: 2405
  Description of Artificial Sequence: Synthetic brazil nut; inner sequence and 3' sequence

SEQ ID NO: 10434 - DNA, 53 bp, Artificial Sequence; identical to SEQ ID NO: 2238
  Description of Artificial Sequence: Synthetic brazil nut; inner sequence and 3' sequence

SEQ ID NO: 10435 - DNA, 53 bp, Artificial Sequence; identical to SEQ ID NO: 2396
  Description of Artificial Sequence: Synthetic brazil nut; inner sequence and 3' sequence

SEQ ID NO: 10436 - DNA, 53 bp, Artificial Sequence; identical to SEQ ID NO: 2227
  Description of Artificial Sequence: Synthetic brazil nut; inner sequence and 3' sequence

SEQ ID NO: 10437 - DNA, 53 bp, Artificial Sequence; identical to SEQ ID NO: 2325
  Description of Artificial Sequence: Synthetic brazil nut; inner sequence and 3' sequence

SEQ ID NO: 10438 - DNA, 53 bp, Artificial Sequence; identical to SEQ ID NO: 6543
  Description of Artificial Sequence: Synthetic brazil nut; inner sequence and 3' sequence

SEQ ID NO: 10439 - DNA, 53 bp, Artificial Sequence; identical to SEQ ID NO: 2393
  Description of Artificial Sequence: Synthetic brazil nut; inner sequence and 3' sequence

SEQ ID NO: 10440 - DNA, 53 bp, Artificial Sequence; identical to SEQ ID NO: 2284
  Description of Artificial Sequence: Synthetic brazil nut; inner sequence and 3' sequence

SEQ ID NO: 10441 - DNA, 53 bp, Artificial Sequence; identical to SEQ ID NO: 2991
  Description of Artificial Sequence: Synthetic brazil nut; inner sequence and 3' sequence

SEQ ID NO: 10442 - DNA, 53 bp, Artificial Sequence; identical to SEQ ID NO: 2860
  Description of Artificial Sequence: Synthetic brazil nut; inner sequence and 3' sequence

SEQ ID NO: 10443 - DNA, 53 bp, Artificial Sequence; identical to SEQ ID NO: 2407
  Description of Artificial Sequence: Synthetic brazil nut; inner sequence and 3' sequence

SEQ ID NO: 10444 - DNA, 53 bp, Artificial Sequence; identical to SEQ ID NO: 2862
  Description of Artificial Sequence: Synthetic brazil nut; inner sequence and 3' sequence

SEQ ID NO: 10445 - DNA, 53 bp, Artificial Sequence; identical to SEQ ID NO: 2695
  Description of Artificial Sequence: Synthetic brazil nut; inner sequence and 3' sequence

SEQ ID NO: 10446 - DNA, 53 bp, Artificial Sequence; identical to SEQ ID NO: 2248
  Description of Artificial Sequence: Synthetic brazil nut; inner sequence and 3' sequence

SEQ ID NO: 10447 - DNA, 53 bp, Artificial Sequence; identical to SEQ ID NO: 2484
  Description of Artificial Sequence: Synthetic brazil nut; inner sequence and 3' sequence

SEQ ID NO: 10448 - DNA, 53 bp, Artificial Sequence; identical to SEQ ID NO: 2397
  Description of Artificial Sequence: Synthetic brazil nut; inner sequence and 3' sequence

SEQ ID NO: 10449 - DNA, 53 bp, Artificial Sequence; identical to SEQ ID NO: 2239
  Description of Artificial Sequence: Synthetic brazil nut; inner sequence and 3' sequence

SEQ ID NO: 10450 - DNA, 53 bp, Artificial Sequence; identical to SEQ ID NO: 2831
  Description of Artificial Sequence: Synthetic brazil nut; inner sequence and 3' sequence

SEQ ID NO: 10451 - DNA, 53 bp, Artificial Sequence; identical to SEQ ID NO: 2647
  Description of Artificial Sequence: Synthetic brazil nut; inner sequence and 3' sequence

SEQ ID NO: 10452 - DNA, 53 bp, Artificial Sequence; identical to SEQ ID NO: 2561
  Description of Artificial Sequence: Synthetic brazil nut; inner sequence and 3' sequence

SEQ ID NO: 10453 - DNA, 53 bp, Artificial Sequence; identical to SEQ ID NO: 6377
  Description of Artificial Sequence: Synthetic brazil nut; inner sequence and 3' sequence

SEQ ID NO: 10454 - DNA, 53 bp, Artificial Sequence; identical to SEQ ID NO: 2128
  Description of Artificial Sequence: Synthetic brazil nut; inner sequence and 3' sequence

SEQ ID NO: 10455 - DNA, 53 bp, Artificial Sequence; identical to SEQ ID NO: 2884
  Description of Artificial Sequence: Synthetic brazil nut; inner sequence and 3' sequence

SEQ ID NO: 10456 - DNA, 53 bp, Artificial Sequence; identical to SEQ ID NO: 2281
  Description of Artificial Sequence: Synthetic brazil nut; inner sequence and 3' sequence

SEQ ID NO: 10457 - DNA, 53 bp, Artificial Sequence; identical to SEQ ID NO: 6428
  Description of Artificial Sequence: Synthetic brazil nut; inner sequence and 3' sequence

SEQ ID NO: 10458 - DNA, 53 bp, Artificial Sequence
  Description of Artificial Sequence: Synthetic brazil nut; inner sequence and 3' sequence
acggcatggtgctgcgatccctgctggtcattgactagtacatgaccacttga

SEQ ID NO: 10459 - DNA, 53 bp, Artificial Sequence; identical to SEQ ID NO: 2891
  Description of Artificial Sequence: Synthetic brazil nut; inner sequence and 3' sequence

SEQ ID NO: 10460 - DNA, 53 bp, Artificial Sequence; identical to SEQ ID NO: 6393
  Description of Artificial Sequence: Synthetic brazil nut; inner sequence and 3' sequence

SEQ ID NO: 10461 - DNA, 53 bp, Artificial Sequence; identical to SEQ ID NO: 2628
  Description of Artificial Sequence: Synthetic brazil nut; inner sequence and 3' sequence

SEQ ID NO: 10462 - DNA, 53 bp, Artificial Sequence; identical to SEQ ID NO: 2476
  Description of Artificial Sequence: Synthetic brazil nut; inner sequence and 3' sequence

SEQ ID NO: 10463 - DNA, 53 bp, Artificial Sequence; identical to SEQ ID NO: 2331
  Description of Artificial Sequence: Synthetic brazil nut; inner sequence and 3' sequence

SEQ ID NO: 10464 - DNA, 53 bp, Artificial Sequence; identical to SEQ ID NO: 2326
  Description of Artificial Sequence: Synthetic brazil nut; inner sequence and 3' sequence

SEQ ID NO: 10465 - DNA, 53 bp, Artificial Sequence; identical to SEQ ID NO: 6312
  Description of Artificial Sequence: Synthetic brazil nut; inner sequence and 3' sequence

SEQ ID NO: 10466 - DNA, 53 bp, Artificial Sequence; identical to SEQ ID NO: 2631
  Description of Artificial Sequence: Synthetic brazil nut; inner sequence and 3' sequence

SEQ ID NO: 10467 - DNA, 53 bp, Artificial Sequence; identical to SEQ ID NO: 2296
  Description of Artificial Sequence: Synthetic brazil nut; inner sequence and 3' sequence

SEQ ID NO: 10468 - DNA, 53 bp, Artificial Sequence; identical to SEQ ID NO: 2317
  Description of Artificial Sequence: Synthetic brazil nut; inner sequence and 3' sequence

SEQ ID NO: 10469 - DNA, 53 bp, Artificial Sequence; identical to SEQ ID NO: 2226
  Description of Artificial Sequence: Synthetic brazil nut; inner sequence and 3' sequence

SEQ ID NO: 10470 - DNA, 53 bp, Artificial Sequence; identical to SEQ ID NO: 2657
  Description of Artificial Sequence: Synthetic brazil nut; inner sequence and 3' sequence

SEQ ID NO: 10471 - DNA, 53 bp, Artificial Sequence; identical to SEQ ID NO: 2395
  Description of Artificial Sequence: Synthetic brazil nut; inner sequence and 3' sequence

SEQ ID NO: 10472 - DNA, 53 bp, Artificial Sequence; identical to SEQ ID NO: 2141
  Description of Artificial Sequence: Synthetic brazil nut; inner sequence and 3' sequence

SEQ ID NO: 10473 - DNA, 53 bp, Artificial Sequence; identical to SEQ ID NO: 2684
  Description of Artificial Sequence: Synthetic brazil nut; inner sequence and 3' sequence

SEQ ID NO: 10474 - DNA, 53 bp, Artificial Sequence; identical to SEQ ID NO: 2686
  Description of Artificial Sequence: Synthetic brazil nut; inner sequence and 3' sequence

SEQ ID NO: 10475 - DNA, 53 bp, Artificial Sequence; identical to SEQ ID NO: 2632
  Description of Artificial Sequence: Synthetic brazil nut; inner sequence and 3' sequence

SEQ ID NO: 10476 - DNA, 53 bp, Artificial Sequence; identical to SEQ ID NO: 6682
  Description of Artificial Sequence: Synthetic brazil nut; inner sequence and 3' sequence

SEQ ID NO: 10477 - DNA, 53 bp, Artificial Sequence; identical to SEQ ID NO: 6364
  Description of Artificial Sequence: Synthetic brazil nut; inner sequence and 3' sequence

SEQ ID NO: 10478 - DNA, 53 bp, Artificial Sequence; identical to SEQ ID NO: 2867
  Description of Artificial Sequence: Synthetic brazil nut; inner sequence and 3' sequence

SEQ ID NO: 10479 - DNA, 53 bp, Artificial Sequence; identical to SEQ ID NO: 2586
  Description of Artificial Sequence: Synthetic brazil nut; inner sequence and 3' sequence

SEQ ID NO: 10480 - DNA, 53 bp, Artificial Sequence; identical to SEQ ID NO: 2267
  Description of Artificial Sequence: Synthetic brazil nut; inner sequence and 3' sequence

SEQ ID NO: 10481 - DNA, 53 bp, Artificial Sequence; identical to SEQ ID NO: 2202
  Description of Artificial Sequence: Synthetic brazil nut; inner sequence and 3' sequence

SEQ ID NO: 10482 - DNA, 53 bp, Artificial Sequence; identical to SEQ ID NO: 6787
  Description of Artificial Sequence: Synthetic brazil nut; inner sequence and 3' sequence

SEQ ID NO: 10483 - DNA, 52 bp, Artificial Sequence; identical to SEQ ID NO: 2334
  Description of Artificial Sequence: Synthetic brazil nut; inner sequence and 3' sequence

SEQ ID NO: 10484 - DNA, 53 bp, Artificial Sequence; identical to SEQ ID NO: 2364
  Description of Artificial Sequence: Synthetic brazil nut; inner sequence and 3' sequence

SEQ ID NO: 10485 - DNA, 53 bp, Artificial Sequence; identical to SEQ ID NO: 2504
  Description of Artificial Sequence: Synthetic brazil nut; inner sequence and 3' sequence

SEQ ID NO: 10486 - DNA, 53 bp, Artificial Sequence; identical to SEQ ID NO: 2666
  Description of Artificial Sequence: Synthetic brazil nut; inner sequence and 3' sequence

SEQ ID NO: 10487 - DNA, 53 bp, Artificial Sequence; identical to SEQ ID NO: 2615
  Description of Artificial Sequence: Synthetic brazil nut; inner sequence and 3' sequence

SEQ ID NO: 10488 - DNA, 53 bp, Artificial Sequence; identical to SEQ ID NO: 6592
  Description of Artificial Sequence: Synthetic brazil nut; inner sequence and 3' sequence

SEQ ID NO: 10489 - DNA, 53 bp, Artificial Sequence; identical to SEQ ID NO: 2728
  Description of Artificial Sequence: Synthetic brazil nut; inner sequence and 3' sequence

SEQ ID NO: 10490 - DNA, 53 bp, Artificial Sequence; identical to SEQ ID NO: 2291
  Description of Artificial Sequence: Synthetic brazil nut; inner sequence and 3' sequence

SEQ ID NO: 10491 - DNA, 53 bp, Artificial Sequence; identical to SEQ ID NO: 6651
  Description of Artificial Sequence: Synthetic brazil nut; inner sequence and 3' sequence

SEQ ID NO: 10492 - DNA, 53 bp, Artificial Sequence; identical to SEQ ID NO: 6691
  Description of Artificial Sequence: Synthetic brazil nut; inner sequence and 3' sequence

SEQ ID NO: 10493 - DNA, 53 bp, Artificial Sequence; identical to SEQ ID NO: 6494
  Description of Artificial Sequence: Synthetic brazil nut; inner sequence and 3' sequence

SEQ ID NO: 10494 - DNA, 52 bp, Artificial Sequence; identical to SEQ ID NO: 2251
  Description of Artificial Sequence: Synthetic brazil nut; inner sequence and 3' sequence

SEQ ID NO: 10495 - DNA, 53 bp, Artificial Sequence; identical to SEQ ID NO: 2617
  Description of Artificial Sequence: Synthetic brazil nut; inner sequence and 3' sequence

SEQ ID NO: 10496 - DNA, 53 bp, Artificial Sequence; identical to SEQ ID NO: 2909
  Description of Artificial Sequence: Synthetic brazil nut; inner sequence and 3' sequence

SEQ ID NO: 10497 - DNA, 53 bp, Artificial Sequence; identical to SEQ ID NO: 6525
  Description of Artificial Sequence: Synthetic brazil nut; inner sequence and 3' sequence

SEQ ID NO: 10498 - DNA, 53 bp, Artificial Sequence; identical to SEQ ID NO: 2236
  Description of Artificial Sequence: Synthetic brazil nut; inner sequence and 3' sequence

SEQ ID NO: 10499 - DNA, 53 bp, Artificial Sequence; identical to SEQ ID NO: 2440
  Description of Artificial Sequence: Synthetic brazil nut; inner sequence and 3' sequence

SEQ ID NO: 10500 - DNA, 53 bp, Artificial Sequence; identical to SEQ ID NO: 2518
  Description of Artificial Sequence: Synthetic brazil nut; inner sequence and 3' sequence

SEQ ID NO: 10501 - DNA, 53 bp, Artificial Sequence; identical to SEQ ID NO: 6535
  Description of Artificial Sequence: Synthetic brazil nut; inner sequence and 3' sequence

SEQ ID NO: 10502 - DNA, 53 bp, Artificial Sequence; identical to SEQ ID NO: 6472
  Description of Artificial Sequence: Synthetic brazil nut; inner sequence and 3' sequence

SEQ ID NO: 10503 - DNA, 53 bp, Artificial Sequence; identical to SEQ ID NO: 2338
  Description of Artificial Sequence: Synthetic brazil nut; inner sequence and 3' sequence

SEQ ID NO: 10504 - DNA, 53 bp, Artificial Sequence; identical to SEQ ID NO: 2463
  Description of Artificial Sequence: Synthetic brazil nut; inner sequence and 3' sequence

SEQ ID NO: 10505 - DNA, 53 bp, Artificial Sequence; identical to SEQ ID NO: 2465
  Description of Artificial Sequence: Synthetic brazil nut; inner sequence and 3' sequence

SEQ ID NO: 10506 - DNA, 53 bp, Artificial Sequence; identical to SEQ ID NO: 2180
  Description of Artificial Sequence: Synthetic brazil nut; inner sequence and 3' sequence

SEQ ID NO: 10507 - DNA, 53 bp, Artificial Sequence; identical to SEQ ID NO: 6429
  Description of Artificial Sequence: Synthetic brazil nut; inner sequence and 3' sequence

SEQ ID NO: 10508 - DNA, 53 bp, Artificial Sequence; identical to SEQ ID NO: 6590
  Description of Artificial Sequence: Synthetic brazil nut; inner sequence and 3' sequence

SEQ ID NO: 10509 - DNA, 53 bp, Artificial Sequence; identical to SEQ ID NO: 2461
  Description of Artificial Sequence: Synthetic brazil nut; inner sequence and 3' sequence

SEQ ID NO: 10510 - DNA, 53 bp, Artificial Sequence; identical to SEQ ID NO: 2124
  Description of Artificial Sequence: Synthetic brazil nut; inner sequence and 3' sequence

SEQ ID NO: 10511 - DNA, 53 bp, Artificial Sequence; identical to SEQ ID NO: 2780
  Description of Artificial Sequence: Synthetic brazil nut; inner sequence and 3' sequence

SEQ ID NO: 10512 - DNA, 53 bp, Artificial Sequence; identical to SEQ ID NO: 6499
  Description of Artificial Sequence: Synthetic brazil nut; inner sequence and 3' sequence

SEQ ID NO: 10513 - DNA, 53 bp, Artificial Sequence; identical to SEQ ID NO: 2620
  Description of Artificial Sequence: Synthetic brazil nut; inner sequence and 3' sequence

SEQ ID NO: 10514 - DNA, 53 bp, Artificial Sequence; identical to SEQ ID NO: 6727
  Description of Artificial Sequence: Synthetic brazil nut; inner sequence and 3' sequence

SEQ ID NO: 10515 - DNA, 53 bp, Artificial Sequence; identical to SEQ ID NO: 2493
  Description of Artificial Sequence: Synthetic brazil nut; inner sequence and 3' sequence

SEQ ID NO: 10516 - DNA, 53 bp, Artificial Sequence; identical to SEQ ID NO: 2292
  Description of Artificial Sequence: Synthetic brazil nut; inner sequence and 3' sequence

SEQ ID NO: 10517 - DNA, 53 bp, Artificial Sequence; identical to SEQ ID NO: 2869
  Description of Artificial Sequence: Synthetic brazil nut; inner sequence and 3' sequence

SEQ ID NO: 10518 - DNA, 53 bp, Artificial Sequence; identical to SEQ ID NO: 2294
  Description of Artificial Sequence: Synthetic brazil nut; inner sequence and 3' sequence

SEQ ID NO: 10519 - DNA, 53 bp, Artificial Sequence; identical to SEQ ID NO: 6808
  Description of Artificial Sequence: Synthetic brazil nut; inner sequence and 3' sequence

SEQ ID NO: 10520 - DNA, 53 bp, Artificial Sequence; identical to SEQ ID NO: 2900
  Description of Artificial Sequence: Synthetic brazil nut; inner sequence and 3' sequence

SEQ ID NO: 10521 - DNA, 53 bp, Artificial Sequence; identical to SEQ ID NO: 2519
  Description of Artificial Sequence: Synthetic brazil nut; inner sequence and 3' sequence

SEQ ID NO: 10522 - DNA, 53 bp, Artificial Sequence; identical to SEQ ID NO: 2663
  Description of Artificial Sequence: Synthetic brazil nut; inner sequence and 3' sequence

SEQ ID NO: 10523 - DNA, 53 bp, Artificial Sequence; identical to SEQ ID NO: 2422
  Description of Artificial Sequence: Synthetic brazil nut; inner sequence and 3' sequence

SEQ ID NO: 10524 - DNA, 53 bp, Artificial Sequence; identical to SEQ ID NO: 6597
  Description of Artificial Sequence: Synthetic brazil nut; inner sequence and 3' sequence

SEQ ID NO: 10525 - DNA, 53 bp, Artificial Sequence; identical to SEQ ID NO: 2793
  Description of Artificial Sequence: Synthetic brazil nut; inner sequence and 3' sequence

SEQ ID NO: 10526 - DNA, 53 bp, Artificial Sequence; identical to SEQ ID NO: 2714
  Description of Artificial Sequence: Synthetic brazil nut; inner sequence and 3' sequence

SEQ ID NO: 10527 - DNA, 53 bp, Artificial Sequence; identical to SEQ ID NO: 2366
  Description of Artificial Sequence: Synthetic brazil nut; inner sequence and 3' sequence

SEQ ID NO: 10528 - DNA, 53 bp, Artificial Sequence; identical to SEQ ID NO: 6573
  Description of Artificial Sequence: Synthetic brazil nut; inner sequence and 3' sequence

SEQ ID NO: 10529 - DNA, 53 bp, Artificial Sequence; identical to SEQ ID NO: 2800
  Description of Artificial Sequence: Synthetic brazil nut; inner sequence and 3' sequence

SEQ ID NO: 10530 - DNA, 53 bp, Artificial Sequence; identical to SEQ ID NO: 2633
  Description of Artificial Sequence: Synthetic brazil nut; inner sequence and 3' sequence

SEQ ID NO: 10531 - DNA, 53 bp, Artificial Sequence; identical to SEQ ID NO: 2513
  Description of Artificial Sequence: Synthetic brazil nut; inner sequence and 3' sequence

SEQ ID NO: 10532 - DNA, 53 bp, Artificial Sequence; identical to SEQ ID NO: 2746
  Description of Artificial Sequence: Synthetic brazil nut; inner sequence and 3' sequence

SEQ ID NO: 10533 - DNA, 53 bp, Artificial Sequence; identical to SEQ ID NO: 2789
  Description of Artificial Sequence: Synthetic brazil nut; inner sequence and 3' sequence

SEQ ID NO: 10534 - DNA, 53 bp, Artificial Sequence; identical to SEQ ID NO: 2475
  Description of Artificial Sequence: Synthetic brazil nut; inner sequence and 3' sequence

SEQ ID NO: 10535 - DNA, 53 bp, Artificial Sequence; identical to SEQ ID NO: 2699
  Description of Artificial Sequence: Synthetic brazil nut; inner sequence and 3' sequence

SEQ ID NO: 10536 - DNA, 53 bp, Artificial Sequence; identical to SEQ ID NO: 2386
  Description of Artificial Sequence: Synthetic brazil nut; inner sequence and 3' sequence

SEQ ID NO: 10537 - DNA, 53 bp, Artificial Sequence; identical to SEQ ID NO: 2351
  Description of Artificial Sequence: Synthetic brazil nut; inner sequence and 3' sequence

SEQ ID NO: 10538 - DNA, 53 bp, Artificial Sequence; identical to SEQ ID NO: 2777
  Description of Artificial Sequence: Synthetic brazil nut; inner sequence and 3' sequence

SEQ ID NO: 10539 - DNA, 53 bp, Artificial Sequence; identical to SEQ ID NO: 2441
  Description of Artificial Sequence: Synthetic brazil nut; inner sequence and 3' sequence

SEQ ID NO: 10540 - DNA, 53 bp, Artificial Sequence; identical to SEQ ID NO: 2775
  Description of Artificial Sequence: Synthetic brazil nut; inner sequence and 3' sequence

SEQ ID NO: 10541 - DNA, 53 bp, Artificial Sequence; identical to SEQ ID NO: 2926
  Description of Artificial Sequence: Synthetic brazil nut; inner sequence and 3' sequence

SEQ ID NO: 10542 - DNA, 53 bp, Artificial Sequence; identical to SEQ ID NO: 2914
  Description of Artificial Sequence: Synthetic brazil nut; inner sequence and 3' sequence

SEQ ID NO: 10543 - DNA, 53 bp, Artificial Sequence; identical to SEQ ID NO: 6289
  Description of Artificial Sequence: Synthetic brazil nut; inner sequence and 3' sequence

SEQ ID NO: 10544 - DNA, 53 bp, Artificial Sequence; identical to SEQ ID NO: 2921
  Description of Artificial Sequence: Synthetic brazil nut; inner sequence and 3' sequence

SEQ ID NO: 10545 - DNA, 53 bp, Artificial Sequence; identical to SEQ ID NO: 2316
  Description of Artificial Sequence: Synthetic brazil nut; inner sequence and 3' sequence

SEQ ID NO: 10546 - DNA, 53 bp, Artificial Sequence
  Description of Artificial Sequence: Synthetic brazil nut; inner sequence and 3' sequence
cacactgtccgtcgcagcctacgtgcgtcattgactagtacatgaccacttga

SEQ ID NO: 10547 - DNA, 53 bp, Artificial Sequence; identical to SEQ ID NO: 2404
  Description of Artificial Sequence: Synthetic brazil nut; inner sequence and 3' sequence

SEQ ID NO: 10548 - DNA, 53 bp, Artificial Sequence; identical to SEQ ID NO: 2984
  Description of Artificial Sequence: Synthetic brazil nut; inner sequence and 3' sequence

SEQ ID NO: 10549 - DNA, 53 bp, Artificial Sequence; identical to SEQ ID NO: 2951
  Description of Artificial Sequence: Synthetic brazil nut; inner sequence and 3' sequence

SEQ ID NO: 10550 - DNA, 53 bp, Artificial Sequence; identical to SEQ ID NO: 2808
  Description of Artificial Sequence: Synthetic brazil nut; inner sequence and 3' sequence

SEQ ID NO: 10551 - DNA, 53 bp, Artificial Sequence; identical to SEQ ID NO: 2477
  Description of Artificial Sequence: Synthetic brazil nut; inner sequence and 3' sequence

SEQ ID NO: 10552 - DNA, 53 bp, Artificial Sequence; identical to SEQ ID NO: 6870
  Description of Artificial Sequence: Synthetic brazil nut; inner sequence and 3' sequence

SEQ ID NO: 10553 - DNA, 53 bp, Artificial Sequence; identical to SEQ ID NO: 2637
  Description of Artificial Sequence: Synthetic brazil nut; inner sequence and 3' sequence

SEQ ID NO: 10554 - DNA, 53 bp, Artificial Sequence; identical to SEQ ID NO: 2816
  Description of Artificial Sequence: Synthetic brazil nut; inner sequence and 3' sequence

SEQ ID NO: 10555 - DNA, 53 bp, Artificial Sequence; identical to SEQ ID NO: 2420
  Description of Artificial Sequence: Synthetic brazil nut; inner sequence and 3' sequence

SEQ ID NO: 10556 - DNA, 53 bp, Artificial Sequence; identical to SEQ ID NO: 6739
  Description of Artificial Sequence: Synthetic brazil nut; inner sequence and 3' sequence

SEQ ID NO: 10557 - DNA, 53 bp, Artificial Sequence; identical to SEQ ID NO: 2324
  Description of Artificial Sequence: Synthetic brazil nut; inner sequence and 3' sequence

SEQ ID NO: 10558 - DNA, 50 bp, Artificial Sequence; identical to SEQ ID NO: 2885
  Description of Artificial Sequence: Synthetic brazil nut; inner sequence and 3' sequence

SEQ ID NO: 10559 - DNA, 53 bp, Artificial Sequence; identical to SEQ ID NO: 2583
  Description of Artificial Sequence: Synthetic brazil nut; inner sequence and 3' sequence

SEQ ID NO: 10560 - DNA, 53 bp, Artificial Sequence; identical to SEQ ID NO: 6521
  Description of Artificial Sequence: Synthetic brazil nut; inner sequence and 3' sequence

SEQ ID NO: 10561 - DNA, 53 bp, Artificial Sequence; identical to SEQ ID NO: 2374
  Description of Artificial Sequence: Synthetic brazil nut; inner sequence and 3' sequence

SEQ ID NO: 10562 - DNA, 53 bp, Artificial Sequence; identical to SEQ ID NO: 2801
  Description of Artificial Sequence: Synthetic brazil nut; inner sequence and 3' sequence

SEQ ID NO: 10563 - DNA, 53 bp, Artificial Sequence; identical to SEQ ID NO: 2596
  Description of Artificial Sequence: Synthetic brazil nut; inner sequence and 3' sequence

SEQ ID NO: 10564 - DNA, 53 bp, Artificial Sequence
  Description of Artificial Sequence: Synthetic brazil nut; inner sequence and 3' sequence
gcatgcagtggacgctcaaccgcgtggacattgactagtacatgaccacttga

SEQ ID NO: 10565 - DNA, 53 bp, Artificial Sequence; identical to SEQ ID NO: 2877
  Description of Artificial Sequence: Synthetic brazil nut; inner sequence and 3' sequence

SEQ ID NO: 10566 - DNA, 53 bp, Artificial Sequence; identical to SEQ ID NO: 2348
  Description of Artificial Sequence: Synthetic brazil nut; inner sequence and 3' sequence

SEQ ID NO: 10567 - DNA, 53 bp, Artificial Sequence; identical to SEQ ID NO: 2498
  Description of Artificial Sequence: Synthetic brazil nut; inner sequence and 3' sequence

SEQ ID NO: 10568 - DNA, 53 bp, Artificial Sequence; identical to SEQ ID NO: 2925
  Description of Artificial Sequence: Synthetic brazil nut; inner sequence and 3' sequence

SEQ ID NO: 10569 - DNA, 53 bp, Artificial Sequence; identical to SEQ ID NO: 2507
  Description of Artificial Sequence: Synthetic brazil nut; inner sequence and 3' sequence

SEQ ID NO: 10570 - DNA, 53 bp, Artificial Sequence; identical to SEQ ID NO: 2606
  Description of Artificial Sequence: Synthetic brazil nut; inner sequence and 3' sequence

SEQ ID NO: 10571 - DNA, 53 bp, Artificial Sequence; identical to SEQ ID NO: 2697
  Description of Artificial Sequence: Synthetic brazil nut; inner sequence and 3' sequence

SEQ ID NO: 10572 - DNA, 53 bp, Artificial Sequence; identical to SEQ ID NO: 6579
  Description of Artificial Sequence: Synthetic brazil nut; inner sequence and 3' sequence

SEQ ID NO: 10573 - DNA, 52 bp, Artificial Sequence; identical to SEQ ID NO: 6559
  Description of Artificial Sequence: Synthetic brazil nut; inner sequence and 3' sequence

SEQ ID NO: 10574 - DNA, 53 bp, Artificial Sequence; identical to SEQ ID NO: 6519
  Description of Artificial Sequence: Synthetic brazil nut; inner sequence and 3' sequence

SEQ ID NO: 10575 - DNA, 53 bp, Artificial Sequence; identical to SEQ ID NO: 2276
  Description of Artificial Sequence: Synthetic brazil nut; inner sequence and 3' sequence

SEQ ID NO: 10576 - DNA, 53 bp, Artificial Sequence; identical to SEQ ID NO: 2603
  Description of Artificial Sequence: Synthetic brazil nut; inner sequence and 3' sequence

SEQ ID NO: 10577 - DNA, 53 bp, Artificial Sequence; identical to SEQ ID NO: 2622
  Description of Artificial Sequence: Synthetic brazil nut; inner sequence and 3' sequence

SEQ ID NO: 10578 - DNA, 53 bp, Artificial Sequence; identical to SEQ ID NO: 2410
  Description of Artificial Sequence: Synthetic brazil nut; inner sequence and 3' sequence

SEQ ID NO: 10579 - DNA, 53 bp, Artificial Sequence
  Description of Artificial Sequence: Synthetic brazil nut; inner sequence and 3' sequence
gtcatgccatcccttcgagtgcgacaggtattgactagtacatgaccacttga

SEQ ID NO: 10580 - DNA, 53 bp, Artificial Sequence; identical to SEQ ID NO: 2306
  Description of Artificial Sequence: Synthetic brazil nut; inner sequence and 3' sequence

SEQ ID NO: 10581 - DNA, 53 bp, Artificial Sequence; identical to SEQ ID NO: 6650
  Description of Artificial Sequence: Synthetic brazil nut; inner sequence and 3' sequence

SEQ ID NO: 10582 - DNA, 53 bp, Artificial Sequence; identical to SEQ ID NO: 2636
  Description of Artificial Sequence: Synthetic brazil nut; inner sequence and 3' sequence

SEQ ID NO: 10583 - DNA, 53 bp, Artificial Sequence; identical to SEQ ID NO: 2223
  Description of Artificial Sequence: Synthetic brazil nut; inner sequence and 3' sequence

SEQ ID NO: 10584 - DNA, 53 bp, Artificial Sequence; identical to SEQ ID NO: 2574
  Description of Artificial Sequence: Synthetic brazil nut; inner sequence and 3' sequence

SEQ ID NO: 10585 - DNA, 53 bp, Artificial Sequence; identical to SEQ ID NO: 6240
  Description of Artificial Sequence: Synthetic brazil nut; inner sequence and 3' sequence

SEQ ID NO: 10586 - DNA, 53 bp, Artificial Sequence
  Description of Artificial Sequence: Synthetic brazil nut; inner sequence and 3' sequence
cgtagcgcaggcaaaggtcgtgtcgtcagtttgactagtacatgaccacttga

SEQ ID NO: 10587 - DNA, 53 bp, Artificial Sequence; identical to SEQ ID NO: 2881
  Description of Artificial Sequence: Synthetic brazil nut; inner sequence and 3' sequence

SEQ ID NO: 10588 - DNA, 53 bp, Artificial Sequence; identical to SEQ ID NO: 2776
  Description of Artificial Sequence: Synthetic brazil nut; inner sequence and 3' sequence

SEQ ID NO: 10589 - DNA, 53 bp, Artificial Sequence; identical to SEQ ID NO: 6571
  Description of Artificial Sequence: Synthetic brazil nut; inner sequence and 3' sequence

SEQ ID NO: 10590 - DNA, 53 bp, Artificial Sequence; identical to SEQ ID NO: 2576
  Description of Artificial Sequence: Synthetic brazil nut; inner sequence and 3' sequence

SEQ ID NO: 10591 - DNA, 53 bp, Artificial Sequence; identical to SEQ ID NO: 2930
  Description of Artificial Sequence: Synthetic brazil nut; inner sequence and 3' sequence

SEQ ID NO: 10592 - DNA, 53 bp, Artificial Sequence; identical to SEQ ID NO: 6603
  Description of Artificial Sequence: Synthetic brazil nut; inner sequence and 3' sequence

SEQ ID NO: 10593 - DNA, 53 bp, Artificial Sequence; identical to SEQ ID NO: 2660
  Description of Artificial Sequence: Synthetic brazil nut; inner sequence and 3' sequence

SEQ ID NO: 10594 - DNA, 53 bp, Artificial Sequence; identical to SEQ ID NO: 2805
  Description of Artificial Sequence: Synthetic brazil nut; inner sequence and 3' sequence

SEQ ID NO: 10595 - DNA, 53 bp, Artificial Sequence; identical to SEQ ID NO: 6498
  Description of Artificial Sequence: Synthetic brazil nut; inner sequence and 3' sequence

SEQ ID NO: 10596 - DNA, 53 bp, Artificial Sequence; identical to SEQ ID NO: 2835
  Description of Artificial Sequence: Synthetic brazil nut; inner sequence and 3' sequence

SEQ ID NO: 10597 - DNA, 53 bp, Artificial Sequence; identical to SEQ ID NO: 6692
  Description of Artificial Sequence: Synthetic brazil nut; inner sequence and 3' sequence

SEQ ID NO: 10598 - DNA, 53 bp, Artificial Sequence; identical to SEQ ID NO: 6610
  Description of Artificial Sequence: Synthetic brazil nut; inner sequence and 3' sequence

SEQ ID NO: 10599 - DNA, 53 bp, Artificial Sequence; identical to SEQ ID NO: 6638
  Description of Artificial Sequence: Synthetic brazil nut; inner sequence and 3' sequence

SEQ ID NO: 10600 - DNA, 53 bp, Artificial Sequence; identical to SEQ ID NO: 6748
  Description of Artificial Sequence: Synthetic brazil nut; inner sequence and 3' sequence

SEQ ID NO: 10601 - DNA, 53 bp, Artificial Sequence; identical to SEQ ID NO: 6605
  Description of Artificial Sequence: Synthetic brazil nut; inner sequence and 3' sequence

SEQ ID NO: 10602 - DNA, 53 bp, Artificial Sequence; identical to SEQ ID NO: 6799
  Description of Artificial Sequence: Synthetic brazil nut; inner sequence and 3' sequence

SEQ ID NO: 10603 - DNA, 53 bp, Artificial Sequence; identical to SEQ ID NO: 6491
  Description of Artificial Sequence: Synthetic brazil nut; inner sequence and 3' sequence

SEQ ID NO: 10604 - DNA, 53 bp, Artificial Sequence; identical to SEQ ID NO: 2669
  Description of Artificial Sequence: Synthetic brazil nut; inner sequence and 3' sequence

SEQ ID NO: 10605 - DNA, 53 bp, Artificial Sequence; identical to SEQ ID NO: 2591
  Description of Artificial Sequence: Synthetic brazil nut; inner sequence and 3' sequence

SEQ ID NO: 10606 - DNA, 53 bp, Artificial Sequence; identical to SEQ ID NO: 6459
  Description of Artificial Sequence: Synthetic brazil nut; inner sequence and 3' sequence

SEQ ID NO: 10607 - DNA, 53 bp, Artificial Sequence; identical to SEQ ID NO: 2297
  Description of Artificial Sequence: Synthetic brazil nut; inner sequence and 3' sequence

SEQ ID NO: 10608 - DNA, 53 bp, Artificial Sequence; identical to SEQ ID NO: 6997
  Description of Artificial Sequence: Synthetic brazil nut; inner sequence and 3' sequence

SEQ ID NO: 10609 - DNA, 53 bp, Artificial Sequence; identical to SEQ ID NO: 6598
  Description of Artificial Sequence: Synthetic brazil nut; inner sequence and 3' sequence

SEQ ID NO: 10610 - DNA, 53 bp, Artificial Sequence; identical to SEQ ID NO: 2289
  Description of Artificial Sequence: Synthetic brazil nut; inner sequence and 3' sequence

SEQ ID NO: 10611 - DNA, 53 bp, Artificial Sequence; identical to SEQ ID NO: 2260
  Description of Artificial Sequence: Synthetic brazil nut; inner sequence and 3' sequence

SEQ ID NO: 10612 - DNA, 53 bp, Artificial Sequence; identical to SEQ ID NO: 6552
  Description of Artificial Sequence: Synthetic brazil nut; inner sequence and 3' sequence

SEQ ID NO: 10613 - DNA, 53 bp, Artificial Sequence; identical to SEQ ID NO: 2242
  Description of Artificial Sequence: Synthetic brazil nut; inner sequence and 3' sequence

SEQ ID NO: 10614 - DNA, 53 bp, Artificial Sequence; identical to SEQ ID NO: 6642
  Description of Artificial Sequence: Synthetic brazil nut; inner sequence and 3' sequence

SEQ ID NO: 10615 - DNA, 53 bp, Artificial Sequence; identical to SEQ ID NO: 2560
  Description of Artificial Sequence: Synthetic brazil nut; inner sequence and 3' sequence

SEQ ID NO: 10616 - DNA, 53 bp, Artificial Sequence; identical to SEQ ID NO: 2356
  Description of Artificial Sequence: Synthetic brazil nut; inner sequence and 3' sequence

SEQ ID NO: 10617 - DNA, 53 bp, Artificial Sequence; identical to SEQ ID NO: 2680
  Description of Artificial Sequence: Synthetic brazil nut; inner sequence and 3' sequence

SEQ ID NO: 10618 - DNA, 53 bp, Artificial Sequence
  Description of Artificial Sequence: Synthetic brazil nut; inner sequence and 3' sequence
gtcatgccatcccttcgagcgtgacaggtattgactagtacatgaccacttga

SEQ ID NO: 10619 - DNA, 53 bp, Artificial Sequence; identical to SEQ ID NO: 2727
  Description of Artificial Sequence: Synthetic brazil nut; inner sequence and 3' sequence

SEQ ID NO: 10620 - DNA, 53 bp, Artificial Sequence; identical to SEQ ID NO: 2206
  Description of Artificial Sequence: Synthetic brazil nut; inner sequence and 3' sequence

SEQ ID NO: 10621 - DNA, 53 bp, Artificial Sequence; identical to SEQ ID NO: 6653
  Description of Artificial Sequence: Synthetic brazil nut; inner sequence and 3' sequence

SEQ ID NO: 10622 - DNA, 53 bp, Artificial Sequence; identical to SEQ ID NO: 2919
  Description of Artificial Sequence: Synthetic brazil nut; inner sequence and 3' sequence

SEQ ID NO: 10623 - DNA, 53 bp, Artificial Sequence; identical to SEQ ID NO: 2956
  Description of Artificial Sequence: Synthetic brazil nut; inner sequence and 3' sequence

SEQ ID NO: 10624 - DNA, 53 bp, Artificial Sequence; identical to SEQ ID NO: 2610
  Description of Artificial Sequence: Synthetic brazil nut; inner sequence and 3' sequence

SEQ ID NO: 10625 - DNA, 53 bp, Artificial Sequence; identical to SEQ ID NO: 6775
  Description of Artificial Sequence: Synthetic brazil nut; inner sequence and 3' sequence

SEQ ID NO: 10626 - DNA, 54 bp, Artificial Sequence; identical to SEQ ID NO: 2503
  Description of Artificial Sequence: Synthetic brazil nut; inner sequence and 3' sequence

SEQ ID NO: 10627 - DNA, 53 bp, Artificial Sequence
  Description of Artificial Sequence: Synthetic brazil nut; inner sequence and 3' sequence
ggacgcagcttgcctactggtggccacgtattgactagtacatgaccacttga

SEQ ID NO: 10628 - DNA, 53 bp, Artificial Sequence; identical to SEQ ID NO: 6814
  Description of Artificial Sequence: Synthetic brazil nut; inner sequence and 3' sequence

SEQ ID NO: 10629 - DNA, 53 bp, Artificial Sequence; identical to SEQ ID NO: 2857
  Description of Artificial Sequence: Synthetic brazil nut; inner sequence and 3' sequence

SEQ ID NO: 10630 - DNA, 53 bp, Artificial Sequence; identical to SEQ ID NO: 6761
  Description of Artificial Sequence: Synthetic brazil nut; inner sequence and 3' sequence

SEQ ID NO: 10631 - DNA, 53 bp, Artificial Sequence; identical to SEQ ID NO: 2542
  Description of Artificial Sequence: Synthetic brazil nut; inner sequence and 3' sequence

SEQ ID NO: 10632 - DNA, 53 bp, Artificial Sequence; identical to SEQ ID NO: 2640
  Description of Artificial Sequence: Synthetic brazil nut; inner sequence and 3' sequence

SEQ ID NO: 10633 - DNA, 53 bp, Artificial Sequence
  Description of Artificial Sequence: Synthetic brazil nut; inner sequence and 3' sequence
tgtgcgtccgatcctgccctctacgtggcattgactagtacatgaccacttga

SEQ ID NO: 10634 - DNA, 53 bp, Artificial Sequence; identical to SEQ ID NO: 6580
  Description of Artificial Sequence: Synthetic brazil nut; inner sequence and 3' sequence

SEQ ID NO: 10635 - DNA, 53 bp, Artificial Sequence; identical to SEQ ID NO: 2225
  Description of Artificial Sequence: Synthetic brazil nut; inner sequence and 3' sequence

SEQ ID NO: 10636 - DNA, 54 bp, Artificial Sequence; identical to SEQ ID NO: 6619
  Description of Artificial Sequence: Synthetic brazil nut; inner sequence and 3' sequence

SEQ ID NO: 10637 - DNA, 53 bp, Artificial Sequence; identical to SEQ ID NO: 2452
  Description of Artificial Sequence: Synthetic brazil nut; inner sequence and 3' sequence

SEQ ID NO: 10638 - DNA, 53 bp, Artificial Sequence; identical to SEQ ID NO: 2874
  Description of Artificial Sequence: Synthetic brazil nut; inner sequence and 3' sequence

SEQ ID NO: 10639 - DNA, 53 bp, Artificial Sequence; identical to SEQ ID NO: 2608
  Description of Artificial Sequence: Synthetic brazil nut; inner sequence and 3' sequence

SEQ ID NO: 10640 - DNA, 53 bp, Artificial Sequence; identical to SEQ ID NO: 2754
  Description of Artificial Sequence: Synthetic brazil nut; inner sequence and 3' sequence

SEQ ID NO: 10641 - DNA, 53 bp, Artificial Sequence; identical to SEQ ID NO: 6721
  Description of Artificial Sequence: Synthetic brazil nut; inner sequence and 3' sequence

SEQ ID NO: 10642 - DNA, 53 bp, Artificial Sequence; identical to SEQ ID NO: 6513
  Description of Artificial Sequence: Synthetic brazil nut; inner sequence and 3' sequence

SEQ ID NO: 10643 - DNA, 53 bp, Artificial Sequence; identical to SEQ ID NO: 2286
  Description of Artificial Sequence: Synthetic brazil nut; inner sequence and 3' sequence

SEQ ID NO: 10644 - DNA, 53 bp, Artificial Sequence; identical to SEQ ID NO: 6890
  Description of Artificial Sequence: Synthetic brazil nut; inner sequence and 3' sequence

SEQ ID NO: 10645 - DNA, 53 bp, Artificial Sequence; identical to SEQ ID NO: 6722
  Description of Artificial Sequence: Synthetic brazil nut; inner sequence and 3' sequence

SEQ ID NO: 10646 - DNA, 53 bp, Artificial Sequence; identical to SEQ ID NO: 6356
  Description of Artificial Sequence: Synthetic brazil nut; inner sequence and 3' sequence

SEQ ID NO: 10647 - DNA, 53 bp, Artificial Sequence; identical to SEQ ID NO: 2275
  Description of Artificial Sequence: Synthetic brazil nut; inner sequence and 3' sequence

SEQ ID NO: 10648 - DNA, 53 bp, Artificial Sequence; identical to SEQ ID NO: 6451
  Description of Artificial Sequence: Synthetic brazil nut; inner sequence and 3' sequence

SEQ ID NO: 10649 - DNA, 51 bp, Artificial Sequence; identical to SEQ ID NO: 2423
  Description of Artificial Sequence: Synthetic brazil nut; inner sequence and 3' sequence

SEQ ID NO: 10650 - DNA, 53 bp, Artificial Sequence; identical to SEQ ID NO: 2328
  Description of Artificial Sequence: Synthetic brazil nut; inner sequence and 3' sequence

SEQ ID NO: 10651 - DNA, 53 bp, Artificial Sequence; identical to SEQ ID NO: 2717
  Description of Artificial Sequence: Synthetic brazil nut; inner sequence and 3' sequence

SEQ ID NO: 10652 - DNA, 53 bp, Artificial Sequence; identical to SEQ ID NO: 2434
  Description of Artificial Sequence: Synthetic brazil nut; inner sequence and 3' sequence

SEQ ID NO: 10653 - DNA, 53 bp, Artificial Sequence; identical to SEQ ID NO: 6644
  Description of Artificial Sequence: Synthetic brazil nut; inner sequence and 3' sequence

SEQ ID NO: 10654 - DNA, 53 bp, Artificial Sequence; identical to SEQ ID NO: 6710
  Description of Artificial Sequence: Synthetic brazil nut; inner sequence and 3' sequence

SEQ ID NO: 10655 - DNA, 53 bp, Artificial Sequence; identical to SEQ ID NO: 2363
  Description of Artificial Sequence: Synthetic brazil nut; inner sequence and 3' sequence

SEQ ID NO: 10656 - DNA, 53 bp, Artificial Sequence; identical to SEQ ID NO: 6627
  Description of Artificial Sequence: Synthetic brazil nut; inner sequence and 3' sequence

SEQ ID NO: 10657 - DNA, 53 bp, Artificial Sequence; identical to SEQ ID NO: 2219
  Description of Artificial Sequence: Synthetic brazil nut; inner sequence and 3' sequence

SEQ ID NO: 10658 - DNA, 53 bp, Artificial Sequence; identical to SEQ ID NO: 2486
  Description of Artificial Sequence: Synthetic brazil nut; inner sequence and 3' sequence

SEQ ID NO: 10659 - DNA, 53 bp, Artificial Sequence
  Description of Artificial Sequence: Synthetic brazil nut; inner sequence and 3' sequence
cgtgtgtacgaaacttgccgcgtggccatgttgactagtacatgaccacttga

SEQ ID NO: 10660 - DNA, 53 bp, Artificial Sequence; identical to SEQ ID NO: 2968
  Description of Artificial Sequence: Synthetic brazil nut; inner sequence and 3' sequence

SEQ ID NO: 10661 - DNA, 53 bp, Artificial Sequence; identical to SEQ ID NO: 2510
  Description of Artificial Sequence: Synthetic brazil nut; inner sequence and 3' sequence

SEQ ID NO: 10662 - DNA, 53 bp, Artificial Sequence; identical to SEQ ID NO: 6873
  Description of Artificial Sequence: Synthetic brazil nut; inner sequence and 3' sequence

SEQ ID NO: 10663 - DNA, 53 bp, Artificial Sequence; identical to SEQ ID NO: 6717
  Description of Artificial Sequence: Synthetic brazil nut; inner sequence and 3' sequence

SEQ ID NO: 10664 - DNA, 53 bp, Artificial Sequence; identical to SEQ ID NO: 2720
  Description of Artificial Sequence: Synthetic brazil nut; inner sequence and 3' sequence

SEQ ID NO: 10665 - DNA, 53 bp, Artificial Sequence; identical to SEQ ID NO: 6565
  Description of Artificial Sequence: Synthetic brazil nut; inner sequence and 3' sequence

SEQ ID NO: 10666 - DNA, 53 bp, Artificial Sequence; identical to SEQ ID NO: 6489
  Description of Artificial Sequence: Synthetic brazil nut; inner sequence and 3' sequence

SEQ ID NO: 10667 - DNA, 53 bp, Artificial Sequence; identical to SEQ ID NO: 6679
  Description of Artificial Sequence: Synthetic brazil nut; inner sequence and 3' sequence

SEQ ID NO: 10668 - DNA, 53 bp, Artificial Sequence; identical to SEQ ID NO: 2758
  Description of Artificial Sequence: Synthetic brazil nut; inner sequence and 3' sequence

SEQ ID NO: 10669 - DNA, 53 bp, Artificial Sequence; identical to SEQ ID NO: 2722
  Description of Artificial Sequence: Synthetic brazil nut; inner sequence and 3' sequence

SEQ ID NO: 10670 - DNA, 53 bp, Artificial Sequence
  Description of Artificial Sequence: Synthetic brazil nut; inner sequence and 3' sequence
gtgcgacagaccctagcgagtgaacgtgtattgactagtacatgaccacttga

SEQ ID NO: 10671 - DNA, 53 bp, Artificial Sequence; identical to SEQ ID NO: 2889
  Description of Artificial Sequence: Synthetic brazil nut; inner sequence and 3' sequence

SEQ ID NO: 10672 - DNA, 53 bp, Artificial Sequence; identical to SEQ ID NO: 6670
  Description of Artificial Sequence: Synthetic brazil nut; inner sequence and 3' sequence

SEQ ID NO: 10673 - DNA, 53 bp, Artificial Sequence; identical to SEQ ID NO: 2677
  Description of Artificial Sequence: Synthetic brazil nut; inner sequence and 3' sequence

SEQ ID NO: 10674 - DNA, 53 bp, Artificial Sequence; identical to SEQ ID NO: 6504
  Description of Artificial Sequence: Synthetic brazil nut; inner sequence and 3' sequence

SEQ ID NO: 10675 - DNA, 53 bp, Artificial Sequence; identical to SEQ ID NO: 6405
  Description of Artificial Sequence: Synthetic brazil nut; inner sequence and 3' sequence

SEQ ID NO: 10676 - DNA, 53 bp, Artificial Sequence
  Description of Artificial Sequence: Synthetic brazil nut; inner sequence and 3' sequence
tgacctgcgtgttcaccgtggccatgcacgttgactagtacatgaccacttga

SEQ ID NO: 10677 - DNA, 53 bp, Artificial Sequence; identical to SEQ ID NO: 2575
  Description of Artificial Sequence: Synthetic brazil nut; inner sequence and 3' sequence

SEQ ID NO: 10678 - DNA, 53 bp, Artificial Sequence
  Description of Artificial Sequence: Synthetic brazil nut; inner sequence and 3' sequence
ggcacgtaacgcacgacgcaacggtgggtattgactagtacatgaccacttga

SEQ ID NO: 10679 - DNA, 53 bp, Artificial Sequence; identical to SEQ ID NO: 6631
  Description of Artificial Sequence: Synthetic brazil nut; inner sequence and 3' sequence

SEQ ID NO: 10680 - DNA, 53 bp, Artificial Sequence; identical to SEQ ID NO: 2718
  Description of Artificial Sequence: Synthetic brazil nut; inner sequence and 3' sequence

SEQ ID NO: 10681 - DNA, 53 bp, Artificial Sequence; identical to SEQ ID NO: 6530
  Description of Artificial Sequence: Synthetic brazil nut; inner sequence and 3' sequence

SEQ ID NO: 10682 - DNA, 53 bp, Artificial Sequence
  Description of Artificial Sequence: Synthetic brazil nut; inner sequence and 3' sequence
gtcacgcgctcgtaccctaacgagtggacattgactagtacatgaccacttga

SEQ ID NO: 10683 - DNA, 53 bp, Artificial Sequence; identical to SEQ ID NO: 2464
  Description of Artificial Sequence: Synthetic brazil nut; inner sequence and 3' sequence

SEQ ID NO: 10684 - DNA, 53 bp, Artificial Sequence; identical to SEQ ID NO: 2664
  Description of Artificial Sequence: Synthetic brazil nut; inner sequence and 3' sequence

SEQ ID NO: 10685 - DNA, 53 bp, Artificial Sequence; identical to SEQ ID NO: 2837
  Description of Artificial Sequence: Synthetic brazil nut; inner sequence and 3' sequence

SEQ ID NO: 10686 - DNA, 53 bp, Artificial Sequence; identical to SEQ ID NO: 6611
  Description of Artificial Sequence: Synthetic brazil nut; inner sequence and 3' sequence

SEQ ID NO: 10687 - DNA, 53 bp, Artificial Sequence; identical to SEQ ID NO: 2300
  Description of Artificial Sequence: Synthetic brazil nut; inner sequence and 3' sequence

SEQ ID NO: 10688 - DNA, 53 bp, Artificial Sequence; identical to SEQ ID NO: 2979
  Description of Artificial Sequence: Synthetic brazil nut; inner sequence and 3' sequence

SEQ ID NO: 10689 - DNA, 53 bp, Artificial Sequence; identical to SEQ ID NO: 2398
  Description of Artificial Sequence: Synthetic brazil nut; inner sequence and 3' sequence

SEQ ID NO: 10690 - DNA, 53 bp, Artificial Sequence; identical to SEQ ID NO: 6503
  Description of Artificial Sequence: Synthetic brazil nut; inner sequence and 3' sequence

SEQ ID NO: 10691 - DNA, 53 bp, Artificial Sequence; identical to SEQ ID NO: 6707
  Description of Artificial Sequence: Synthetic brazil nut; inner sequence and 3' sequence

SEQ ID NO: 10692 - DNA, 53 bp, Artificial Sequence; identical to SEQ ID NO: 2635
  Description of Artificial Sequence: Synthetic brazil nut; inner sequence and 3' sequence

SEQ ID NO: 10693 - DNA, 53 bp, Artificial Sequence; identical to SEQ ID NO: 6938
  Description of Artificial Sequence: Synthetic brazil nut; inner sequence and 3' sequence

SEQ ID NO: 10694 - DNA, 53 bp, Artificial Sequence; identical to SEQ ID NO: 6939
  Description of Artificial Sequence: Synthetic brazil nut; inner sequence and 3' sequence

SEQ ID NO: 10695 - DNA, 53 bp, Artificial Sequence; identical to SEQ ID NO: 7001
  Description of Artificial Sequence: Synthetic brazil nut; inner sequence and 3' sequence

SEQ ID NO: 10696 - DNA, 53 bp, Artificial Sequence; identical to SEQ ID NO: 2333
  Description of Artificial Sequence: Synthetic brazil nut; inner sequence and 3' sequence

SEQ ID NO: 10697 - DNA, 53 bp, Artificial Sequence; identical to SEQ ID NO: 2840
  Description of Artificial Sequence: Synthetic brazil nut; inner sequence and 3' sequence

SEQ ID NO: 10698 - DNA, 53 bp, Artificial Sequence; identical to SEQ ID NO: 2322
  Description of Artificial Sequence: Synthetic brazil nut; inner sequence and 3' sequence

SEQ ID NO: 10699 - DNA, 53 bp, Artificial Sequence; identical to SEQ ID NO: 6999
  Description of Artificial Sequence: Synthetic brazil nut; inner sequence and 3' sequence

SEQ ID NO: 10700 - DNA, 53 bp, Artificial Sequence; identical to SEQ ID NO: 6943
  Description of Artificial Sequence: Synthetic brazil nut; inner sequence and 3' sequence

SEQ ID NO: 10701 - DNA, 53 bp, Artificial Sequence; identical to SEQ ID NO: 6898
  Description of Artificial Sequence: Synthetic brazil nut; inner sequence and 3' sequence

SEQ ID NO: 10702 - DNA, 53 bp, Artificial Sequence; identical to SEQ ID NO: 2580
  Description of Artificial Sequence: Synthetic brazil nut; inner sequence and 3' sequence

SEQ ID NO: 10703 - DNA, 53 bp, Artificial Sequence; identical to SEQ ID NO: 2691
  Description of Artificial Sequence: Synthetic brazil nut; inner sequence and 3' sequence

SEQ ID NO: 10704 - DNA, 53 bp, Artificial Sequence; identical to SEQ ID NO: 6735
  Description of Artificial Sequence: Synthetic brazil nut; inner sequence and 3' sequence

SEQ ID NO: 10705 - DNA, 53 bp, Artificial Sequence; identical to SEQ ID NO: 2502
  Description of Artificial Sequence: Synthetic brazil nut; inner sequence and 3' sequence

SEQ ID NO: 10706 - DNA, 53 bp, Artificial Sequence; identical to SEQ ID NO: 6933
  Description of Artificial Sequence: Synthetic brazil nut; inner sequence and 3' sequence

SEQ ID NO: 10707 - DNA, 53 bp, Artificial Sequence; identical to SEQ ID NO: 2917
  Description of Artificial Sequence: Synthetic brazil nut; inner sequence and 3' sequence

SEQ ID NO: 10708 - DNA, 53 bp, Artificial Sequence; identical to SEQ ID NO: 2601
  Description of Artificial Sequence: Synthetic brazil nut; inner sequence and 3' sequence

SEQ ID NO: 10709 - DNA, 53 bp, Artificial Sequence; identical to SEQ ID NO: 2788
  Description of Artificial Sequence: Synthetic brazil nut; inner sequence and 3' sequence

SEQ ID NO: 10710 - DNA, 53 bp, Artificial Sequence; identical to SEQ ID NO: 6807
  Description of Artificial Sequence: Synthetic brazil nut; inner sequence and 3' sequence

SEQ ID NO: 10711 - DNA, 53 bp, Artificial Sequence; identical to SEQ ID NO: 2566
  Description of Artificial Sequence: Synthetic brazil nut; inner sequence and 3' sequence

SEQ ID NO: 10712 - DNA, 53 bp, Artificial Sequence
  Description of Artificial Sequence: Synthetic brazil nut; inner sequence and 3' sequence
gcattggacgatcgtgccctacacgtggccttgactagtacatgaccacttga

SEQ ID NO: 10713 - DNA, 53 bp, Artificial Sequence; identical to SEQ ID NO: 2768
  Description of Artificial Sequence: Synthetic brazil nut; inner sequence and 3' sequence

SEQ ID NO: 10714 - DNA, 53 bp, Artificial Sequence; identical to SEQ ID NO: 6956
  Description of Artificial Sequence: Synthetic brazil nut; inner sequence and 3' sequence

SEQ ID NO: 10715 - DNA, 53 bp, Artificial Sequence; identical to SEQ ID NO: 2249
  Description of Artificial Sequence: Synthetic brazil nut; inner sequence and 3' sequence

SEQ ID NO: 10716 - DNA, 53 bp, Artificial Sequence; identical to SEQ ID NO: 6517
  Description of Artificial Sequence: Synthetic brazil nut; inner sequence and 3' sequence

SEQ ID NO: 10717 - DNA, 53 bp, Artificial Sequence; identical to SEQ ID NO: 2911
  Description of Artificial Sequence: Synthetic brazil nut; inner sequence and 3' sequence

SEQ ID NO: 10718 - DNA, 53 bp, Artificial Sequence; identical to SEQ ID NO: 6737
  Description of Artificial Sequence: Synthetic brazil nut; inner sequence and 3' sequence

SEQ ID NO: 10719 - DNA, 53 bp, Artificial Sequence; identical to SEQ ID NO: 6706
  Description of Artificial Sequence: Synthetic brazil nut; inner sequence and 3' sequence

SEQ ID NO: 10720 - DNA, 53 bp, Artificial Sequence; identical to SEQ ID NO: 2466
  Description of Artificial Sequence: Synthetic brazil nut; inner sequence and 3' sequence

SEQ ID NO: 10721 - DNA, 53 bp, Artificial Sequence; identical to SEQ ID NO: 2199
  Description of Artificial Sequence: Synthetic brazil nut; inner sequence and 3' sequence

SEQ ID NO: 10722 - DNA, 53 bp, Artificial Sequence
  Description of Artificial Sequence: Synthetic brazil nut; inner sequence and 3' sequence
catgcccatgccacgcacactgagcggtcattgactagtacatgaccacttga

SEQ ID NO: 10723 - DNA, 53 bp, Artificial Sequence; identical to SEQ ID NO: 2787
  Description of Artificial Sequence: Synthetic brazil nut; inner sequence and 3' sequence

SEQ ID NO: 10724 - DNA, 53 bp, Artificial Sequence; identical to SEQ ID NO: 6985
  Description of Artificial Sequence: Synthetic brazil nut; inner sequence and 3' sequence

SEQ ID NO: 10725 - DNA, 53 bp, Artificial Sequence; identical to SEQ ID NO: 6198
  Description of Artificial Sequence: Synthetic brazil nut; inner sequence and 3' sequence

SEQ ID NO: 10726 - DNA, 53 bp, Artificial Sequence; identical to SEQ ID NO: 2458
  Description of Artificial Sequence: Synthetic brazil nut; inner sequence and 3' sequence

SEQ ID NO: 10727 - DNA, 54 bp, Artificial Sequence; identical to SEQ ID NO: 2216
  Description of Artificial Sequence: Synthetic brazil nut; inner sequence and 3' sequence

SEQ ID NO: 10728 - DNA, 53 bp, Artificial Sequence; identical to SEQ ID NO: 6884
  Description of Artificial Sequence: Synthetic brazil nut; inner sequence and 3' sequence

SEQ ID NO: 10729 - DNA, 53 bp, Artificial Sequence; identical to SEQ ID NO: 2318
  Description of Artificial Sequence: Synthetic brazil nut; inner sequence and 3' sequence

SEQ ID NO: 10730 - DNA, 53 bp, Artificial Sequence; identical to SEQ ID NO: 6576
  Description of Artificial Sequence: Synthetic brazil nut; inner sequence and 3' sequence

SEQ ID NO: 10731 - DNA, 53 bp, Artificial Sequence; identical to SEQ ID NO: 2834
  Description of Artificial Sequence: Synthetic brazil nut; inner sequence and 3' sequence

SEQ ID NO: 10732 - DNA, 53 bp, Artificial Sequence; identical to SEQ ID NO: 2521
  Description of Artificial Sequence: Synthetic brazil nut; inner sequence and 3' sequence

SEQ ID NO: 10733 - DNA, 53 bp, Artificial Sequence; identical to SEQ ID NO: 6719
  Description of Artificial Sequence: Synthetic brazil nut; inner sequence and 3' sequence

SEQ ID NO: 10734 - DNA, 53 bp, Artificial Sequence; identical to SEQ ID NO: 6641
  Description of Artificial Sequence: Synthetic brazil nut; inner sequence and 3' sequence

SEQ ID NO: 10735 - DNA, 53 bp, Artificial Sequence; identical to SEQ ID NO: 2456
  Description of Artificial Sequence: Synthetic brazil nut; inner sequence and 3' sequence

SEQ ID NO: 10736 - DNA, 53 bp, Artificial Sequence; identical to SEQ ID NO: 2500
  Description of Artificial Sequence: Synthetic brazil nut; inner sequence and 3' sequence

SEQ ID NO: 10737 - DNA, 53 bp, Artificial Sequence; identical to SEQ ID NO: 2751
  Description of Artificial Sequence: Synthetic brazil nut; inner sequence and 3' sequence

SEQ ID NO: 10738 - DNA, 53 bp, Artificial Sequence; identical to SEQ ID NO: 2705
  Description of Artificial Sequence: Synthetic brazil nut; inner sequence and 3' sequence

SEQ ID NO: 10739 - DNA, 53 bp, Artificial Sequence; identical to SEQ ID NO: 6981
  Description of Artificial Sequence: Synthetic brazil nut; inner sequence and 3' sequence

SEQ ID NO: 10740 - DNA, 53 bp, Artificial Sequence; identical to SEQ ID NO: 2773
  Description of Artificial Sequence: Synthetic brazil nut; inner sequence and 3' sequence

SEQ ID NO: 10741 - DNA, 53 bp, Artificial Sequence; identical to SEQ ID NO: 6960
  Description of Artificial Sequence: Synthetic brazil nut; inner sequence and 3' sequence

SEQ ID NO: 10742 - DNA, 53 bp, Artificial Sequence; identical to SEQ ID NO: 2980
  Description of Artificial Sequence: Synthetic brazil nut; inner sequence and 3' sequence

SEQ ID NO: 10743 - DNA, 53 bp, Artificial Sequence; identical to SEQ ID NO: 2702
  Description of Artificial Sequence: Synthetic brazil nut; inner sequence and 3' sequence

SEQ ID NO: 10744 - DNA, 53 bp, Artificial Sequence; identical to SEQ ID NO: 6616
  Description of Artificial Sequence: Synthetic brazil nut; inner sequence and 3' sequence

SEQ ID NO: 10745 - DNA, 53 bp, Artificial Sequence; identical to SEQ ID NO: 6930
  Description of Artificial Sequence: Synthetic brazil nut; inner sequence and 3' sequence

SEQ ID NO: 10746 - DNA, 53 bp, Artificial Sequence; identical to SEQ ID NO: 6816
  Description of Artificial Sequence: Synthetic brazil nut; inner sequence and 3' sequence

SEQ ID NO: 10747 - DNA, 53 bp, Artificial Sequence; identical to SEQ ID NO: 6913
  Description of Artificial Sequence: Synthetic brazil nut; inner sequence and 3' sequence

SEQ ID NO: 10748 - DNA, 53 bp, Artificial Sequence
  Description of Artificial Sequence: Synthetic brazil nut; inner sequence and 3' sequence
gttacgcagcggacctggtgttcatgcacattgactagtacatgaccacttga

SEQ ID NO: 10749 - DNA, 53 bp, Artificial Sequence; identical to SEQ ID NO: 2943
  Description of Artificial Sequence: Synthetic brazil nut; inner sequence and 3' sequence

SEQ ID NO: 10750 - DNA, 53 bp, Artificial Sequence; identical to SEQ ID NO: 2813
  Description of Artificial Sequence: Synthetic brazil nut; inner sequence and 3' sequence

SEQ ID NO: 10751 - DNA, 53 bp, Artificial Sequence; identical to SEQ ID NO: 6526
  Description of Artificial Sequence: Synthetic brazil nut; inner sequence and 3' sequence

SEQ ID NO: 10752 - DNA, 53 bp, Artificial Sequence
  Description of Artificial Sequence: Synthetic brazil nut; inner sequence and 3' sequence
gtcgtgcggatcgctacacgtggccgtggattgactagtacatgaccacttga

SEQ ID NO: 10753 - DNA, 53 bp, Artificial Sequence; identical to SEQ ID NO: 6744
  Description of Artificial Sequence: Synthetic brazil nut; inner sequence and 3' sequence

SEQ ID NO: 10754 - DNA, 53 bp, Artificial Sequence; identical to SEQ ID NO: 6776
  Description of Artificial Sequence: Synthetic brazil nut; inner sequence and 3' sequence

SEQ ID NO: 10755 - DNA, 53 bp, Artificial Sequence; identical to SEQ ID NO: 6745
  Description of Artificial Sequence: Synthetic brazil nut; inner sequence and 3' sequence

SEQ ID NO: 10756 - DNA, 53 bp, Artificial Sequence
  Description of Artificial Sequence: Synthetic brazil nut; inner sequence and 3' sequence
cgacacgcaagtaggctacgtacacgtcacttgactagtacatgaccacttga

SEQ ID NO: 10757 - DNA, 53 bp, Artificial Sequence; identical to SEQ ID NO: 2515
  Description of Artificial Sequence: Synthetic brazil nut; inner sequence and 3' sequence

SEQ ID NO: 10758 - DNA, 53 bp, Artificial Sequence
  Description of Artificial Sequence: Synthetic brazil nut; inner sequence and 3' sequence
cgcaccgcatgacggacgtgggactgcgctttgactagtacatgaccacttga

SEQ ID NO: 10759 - DNA, 53 bp, Artificial Sequence; identical to SEQ ID NO: 2763
  Description of Artificial Sequence: Synthetic brazil nut; inner sequence and 3' sequence

SEQ ID NO: 10760 - DNA, 53 bp, Artificial Sequence; identical to SEQ ID NO: 6384
  Description of Artificial Sequence: Synthetic brazil nut; inner sequence and 3' sequence

SEQ ID NO: 10761 - DNA, 53 bp, Artificial Sequence; identical to SEQ ID NO: 2906
  Description of Artificial Sequence: Synthetic brazil nut; inner sequence and 3' sequence

SEQ ID NO: 10762 - DNA, 53 bp, Artificial Sequence; identical to SEQ ID NO: 2497
  Description of Artificial Sequence: Synthetic brazil nut; inner sequence and 3' sequence

SEQ ID NO: 10763 - DNA, 53 bp, Artificial Sequence
  Description of Artificial Sequence: Synthetic brazil nut; inner sequence and 3' sequence
cgatgcgaaccggaagtgcatgtcgccagcttgactagtacatgaccacttga

SEQ ID NO: 10764 - DNA, 53 bp, Artificial Sequence; identical to SEQ ID NO: 2252
  Description of Artificial Sequence: Synthetic brazil nut; inner sequence and 3' sequence

SEQ ID NO: 10765 - DNA, 53 bp, Artificial Sequence; identical to SEQ ID NO: 2621
  Description of Artificial Sequence: Synthetic brazil nut; inner sequence and 3' sequence

SEQ ID NO: 10766 - DNA, 53 bp, Artificial Sequence; identical to SEQ ID NO: 2960
  Description of Artificial Sequence: Synthetic brazil nut; inner sequence and 3' sequence

SEQ ID NO: 10767 - DNA, 53 bp, Artificial Sequence
  Description of Artificial Sequence: Synthetic brazil nut; inner sequence and 3' sequence
ggacgcagcttgcctactggcggtcacgtattgactagtacatgaccacttga

SEQ ID NO: 10768 - DNA, 53 bp, Artificial Sequence; identical to SEQ ID NO: 2676
  Description of Artificial Sequence: Synthetic brazil nut; inner sequence and 3' sequence

SEQ ID NO: 10769 - DNA, 53 bp, Artificial Sequence
  Description of Artificial Sequence: Synthetic brazil nut; inner sequence and 3' sequence
ggacgcagcttgcctactggtgttcacgtattgactagtacatgaccacttga

SEQ ID NO: 10770 - DNA, 53 bp, Artificial Sequence
  Description of Artificial Sequence: Synthetic brazil nut; inner sequence and 3' sequence
ggaccaaagcgaacgtggacgtacgacgcattgactagtacatgaccacttga

SEQ ID NO: 10771 - DNA, 53 bp, Artificial Sequence; identical to SEQ ID NO: 6740
  Description of Artificial Sequence: Synthetic brazil nut; inner sequence and 3' sequence

SEQ ID NO: 10772 - DNA, 53 bp, Artificial Sequence; identical to SEQ ID NO: 6953
  Description of Artificial Sequence: Synthetic brazil nut; inner sequence and 3' sequence

SEQ ID NO: 10773 - DNA, 53 bp, Artificial Sequence; identical to SEQ ID NO: 6694
  Description of Artificial Sequence: Synthetic brazil nut; inner sequence and 3' sequence

SEQ ID NO: 10774 - DNA, 53 bp, Artificial Sequence; identical to SEQ ID NO: 2670
  Description of Artificial Sequence: Synthetic brazil nut; inner sequence and 3' sequence

SEQ ID NO: 10775 - DNA, 53 bp, Artificial Sequence; identical to SEQ ID NO: 6742
  Description of Artificial Sequence: Synthetic brazil nut; inner sequence and 3' sequence

SEQ ID NO: 10776 - DNA, 51 bp, Artificial Sequence; identical to SEQ ID NO: 6786
  Description of Artificial Sequence: Synthetic brazil nut; inner sequence and 3' sequence

SEQ ID NO: 10777 - DNA, 53 bp, Artificial Sequence; identical to SEQ ID NO: 6700
  Description of Artificial Sequence: Synthetic brazil nut; inner sequence and 3' sequence

SEQ ID NO: 10778 - DNA, 53 bp, Artificial Sequence; identical to SEQ ID NO: 6381
  Description of Artificial Sequence: Synthetic brazil nut; inner sequence and 3' sequence

SEQ ID NO: 10779 - DNA, 53 bp, Artificial Sequence; identical to SEQ ID NO: 6859
  Description of Artificial Sequence: Synthetic brazil nut; inner sequence and 3' sequence

SEQ ID NO: 10780 - DNA, 53 bp, Artificial Sequence; identical to SEQ ID NO: 2449
  Description of Artificial Sequence: Synthetic brazil nut; inner sequence and 3' sequence

SEQ ID NO: 10781 - DNA, 53 bp, Artificial Sequence; identical to SEQ ID NO: 3002
  Description of Artificial Sequence: Synthetic brazil nut; inner sequence and 3' sequence

SEQ ID NO: 10782 - DNA, 53 bp, Artificial Sequence
  Description of Artificial Sequence: Synthetic brazil nut; inner sequence and 3' sequence
gcacgactcgcactctatcatgaggccatgttgactagtacatgaccacttga

SEQ ID NO: 10783 - DNA, 53 bp, Artificial Sequence; identical to SEQ ID NO: 2849
  Description of Artificial Sequence: Synthetic brazil nut; inner sequence and 3' sequence

SEQ ID NO: 10784 - DNA, 53 bp, Artificial Sequence; identical to SEQ ID NO: 2629
  Description of Artificial Sequence: Synthetic brazil nut; inner sequence and 3' sequence

SEQ ID NO: 10785 - DNA, 53 bp, Artificial Sequence; identical to SEQ ID NO: 2263
  Description of Artificial Sequence: Synthetic brazil nut; inner sequence and 3' sequence

SEQ ID NO: 10786 - DNA, 53 bp, Artificial Sequence; identical to SEQ ID NO: 6520
  Description of Artificial Sequence: Synthetic brazil nut; inner sequence and 3' sequence

SEQ ID NO: 10787 - DNA, 53 bp, Artificial Sequence
  Description of Artificial Sequence: Synthetic brazil nut; inner sequence and 3' sequence
gcaatgcgtgtcacgaacttgccgttgggcttgactagtacatgaccacttga

SEQ ID NO: 10788 - DNA, 53 bp, Artificial Sequence; identical to SEQ ID NO: 2920
  Description of Artificial Sequence: Synthetic brazil nut; inner sequence and 3' sequence

SEQ ID NO: 10789 - DNA, 53 bp, Artificial Sequence; identical to SEQ ID NO: 6575
  Description of Artificial Sequence: Synthetic brazil nut; inner sequence and 3' sequence

SEQ ID NO: 10790 - DNA, 53 bp, Artificial Sequence; identical to SEQ ID NO: 2650
  Description of Artificial Sequence: Synthetic brazil nut; inner sequence and 3' sequence

SEQ ID NO: 10791 - DNA, 53 bp, Artificial Sequence; identical to SEQ ID NO: 2830
  Description of Artificial Sequence: Synthetic brazil nut; inner sequence and 3' sequence

SEQ ID NO: 10792 - DNA, 53 bp, Artificial Sequence
  Description of Artificial Sequence: Synthetic brazil nut; inner sequence and 3' sequence
ggcacggtgcgtccctaactcatgtggacattgactagtacatgaccacttga

SEQ ID NO: 10793 - DNA, 53 bp, Artificial Sequence; identical to SEQ ID NO: 2505
  Description of Artificial Sequence: Synthetic brazil nut; inner sequence and 3' sequence

SEQ ID NO: 10794 - DNA, 53 bp, Artificial Sequence; identical to SEQ ID NO: 2701
  Description of Artificial Sequence: Synthetic brazil nut; inner sequence and 3' sequence

SEQ ID NO: 10795 - DNA, 53 bp, Artificial Sequence; identical to SEQ ID NO: 6940
  Description of Artificial Sequence: Synthetic brazil nut; inner sequence and 3' sequence

SEQ ID NO: 10796 - DNA, 53 bp, Artificial Sequence; identical to SEQ ID NO: 6743
  Description of Artificial Sequence: Synthetic brazil nut; inner sequence and 3' sequence

SEQ ID NO: 10797 - DNA, 53 bp, Artificial Sequence; identical to SEQ ID NO: 6856
  Description of Artificial Sequence: Synthetic brazil nut; inner sequence and 3' sequence

SEQ ID NO: 10798 - DNA, 53 bp, Artificial Sequence
  Description of Artificial Sequence: Synthetic brazil nut; inner sequence and 3' sequence
gcacgactcgcaccctatcatgaggctatgttgactagtacatgaccacttga

SEQ ID NO: 10799 - DNA, 53 bp, Artificial Sequence; identical to SEQ ID NO: 6867
  Description of Artificial Sequence: Synthetic brazil nut; inner sequence and 3' sequence

SEQ ID NO: 10800 - DNA, 53 bp, Artificial Sequence; identical to SEQ ID NO: 2668
  Description of Artificial Sequence: Synthetic brazil nut; inner sequence and 3' sequence

SEQ ID NO: 10801 - DNA, 53 bp, Artificial Sequence
  Description of Artificial Sequence: Synthetic brazil nut; inner sequence and 3' sequence
cgtgcgatgaccaagtggcgatgctacacgttgactagtacatgaccacttga

SEQ ID NO: 10802 - DNA, 53 bp, Artificial Sequence; identical to SEQ ID NO: 6889
  Description of Artificial Sequence: Synthetic brazil nut; inner sequence and 3' sequence

SEQ ID NO: 10803 - DNA, 53 bp, Artificial Sequence; identical to SEQ ID NO: 2772
  Description of Artificial Sequence: Synthetic brazil nut; inner sequence and 3' sequence

SEQ ID NO: 10804 - DNA, 53 bp, Artificial Sequence
  Description of Artificial Sequence: Synthetic brazil nut; inner sequence and 3' sequence
gtcatgcggaccgaactggatgtgtgcatgttgactagtacatgaccacttga

SEQ ID NO: 10805 - DNA, 53 bp, Artificial Sequence; identical to SEQ ID NO: 2330
  Description of Artificial Sequence: Synthetic brazil nut; inner sequence and 3' sequence

SEQ ID NO: 10806 - DNA, 53 bp, Artificial Sequence; identical to SEQ ID NO: 6802
  Description of Artificial Sequence: Synthetic brazil nut; inner sequence and 3' sequence

SEQ ID NO: 10807 - DNA, 53 bp, Artificial Sequence
  Description of Artificial Sequence: Synthetic brazil nut; inner sequence and 3' sequence
ggacgcatcgccccttcgagtggacaggcattgactagtacatgaccacttga

SEQ ID NO: 10808 - DNA, 53 bp, Artificial Sequence; identical to SEQ ID NO: 2962
  Description of Artificial Sequence: Synthetic brazil nut; inner sequence and 3' sequence

SEQ ID NO: 10809 - DNA, 53 bp, Artificial Sequence; identical to SEQ ID NO: 2357
  Description of Artificial Sequence: Synthetic brazil nut; inner sequence and 3' sequence

SEQ ID NO: 10810 - DNA, 53 bp, Artificial Sequence
  Description of Artificial Sequence: Synthetic brazil nut; inner sequence and 3' sequence
gcacgactcgcaccctatcatgaggacatgttgactagtacatgaccacttga

SEQ ID NO: 10811 - DNA, 53 bp, Artificial Sequence; identical to SEQ ID NO: 6874
  Description of Artificial Sequence: Synthetic brazil nut; inner sequence and 3' sequence

SEQ ID NO: 10812 - DNA, 53 bp, Artificial Sequence; identical to SEQ ID NO: 2679
  Description of Artificial Sequence: Synthetic brazil nut; inner sequence and 3' sequence

SEQ ID NO: 10813 - DNA, 53 bp, Artificial Sequence; identical to SEQ ID NO: 6935
  Description of Artificial Sequence: Synthetic brazil nut; inner sequence and 3' sequence

SEQ ID NO: 10814 - DNA, 53 bp, Artificial Sequence; identical to SEQ ID NO: 6886
  Description of Artificial Sequence: Synthetic brazil nut; inner sequence and 3' sequence

SEQ ID NO: 10815 - DNA, 53 bp, Artificial Sequence; identical to SEQ ID NO: 2417
  Description of Artificial Sequence: Synthetic brazil nut; inner sequence and 3' sequence

SEQ ID NO: 10816 - DNA, 53 bp, Artificial Sequence
  Description of Artificial Sequence: Synthetic brazil nut; inner sequence and 3' sequence
cgcgcaccgacaacgtgcaggcactacggcttgactagtacatgaccacttga

SEQ ID NO: 10817 - DNA, 53 bp, Artificial Sequence; identical to SEQ ID NO: 2644
  Description of Artificial Sequence: Synthetic brazil nut; inner sequence and 3' sequence

SEQ ID NO: 10818 - DNA, 53 bp, Artificial Sequence; identical to SEQ ID NO: 6591
  Description of Artificial Sequence: Synthetic brazil nut; inner sequence and 3' sequence

SEQ ID NO: 10819 - DNA, 53 bp, Artificial Sequence; identical to SEQ ID NO: 6470
  Description of Artificial Sequence: Synthetic brazil nut; inner sequence and 3' sequence

SEQ ID NO: 10820 - DNA, 53 bp, Artificial Sequence; identical to SEQ ID NO: 2685
  Description of Artificial Sequence: Synthetic brazil nut; inner sequence and 3' sequence

SEQ ID NO: 10821 - DNA, 53 bp, Artificial Sequence; identical to SEQ ID NO: 6893
  Description of Artificial Sequence: Synthetic brazil nut; inner sequence and 3' sequence

SEQ ID NO: 10822 - DNA, 53 bp, Artificial Sequence; identical to SEQ ID NO: 6817
  Description of Artificial Sequence: Synthetic brazil nut; inner sequence and 3' sequence

SEQ ID NO: 10823 - DNA, 53 bp, Artificial Sequence; identical to SEQ ID NO: 6634
  Description of Artificial Sequence: Synthetic brazil nut; inner sequence and 3' sequence

SEQ ID NO: 10824 - DNA, 53 bp, Artificial Sequence
  Description of Artificial Sequence: Synthetic brazil nut; inner sequence and 3' sequence
cacgatccgacaaggcgtgacgtggccatgttgactagtacatgaccacttga

SEQ ID NO: 10825 - DNA, 53 bp, Artificial Sequence
  Description of Artificial Sequence: Synthetic brazil nut; inner sequence and 3' sequence
gtggttcgcagcccgttcaagtcaggcatgttgactagtacatgaccacttga

SEQ ID NO: 10826 - DNA, 53 bp, Artificial Sequence
  Description of Artificial Sequence: Synthetic brazil nut; inner sequence and 3' sequence
gcgatgcagcaccgtaacgaccagcgtggattgactagtacatgaccacttga

SEQ ID NO: 10827 - DNA, 53 bp, Artificial Sequence; identical to SEQ ID NO: 6837
  Description of Artificial Sequence: Synthetic brazil nut; inner sequence and 3' sequence

SEQ ID NO: 10828 - DNA, 53 bp, Artificial Sequence; identical to SEQ ID NO: 6988
  Description of Artificial Sequence: Synthetic brazil nut; inner sequence and 3' sequence

SEQ ID NO: 10829 - DNA, 53 bp, Artificial Sequence; identical to SEQ ID NO: 2592
  Description of Artificial Sequence: Synthetic brazil nut; inner sequence and 3' sequence

SEQ ID NO: 10830 - DNA, 53 bp, Artificial Sequence; identical to SEQ ID NO: 2942
  Description of Artificial Sequence: Synthetic brazil nut; inner sequence and 3' sequence

SEQ ID NO: 10831 - DNA, 53 bp, Artificial Sequence; identical to SEQ ID NO: 6688
  Description of Artificial Sequence: Synthetic brazil nut; inner sequence and 3' sequence

SEQ ID NO: 10832 - DNA, 53 bp, Artificial Sequence; identical to SEQ ID NO: 3001
  Description of Artificial Sequence: Synthetic brazil nut; inner sequence and 3' sequence

SEQ ID NO: 10833 - DNA, 53 bp, Artificial Sequence; identical to SEQ ID NO: 2662
  Description of Artificial Sequence: Synthetic brazil nut; inner sequence and 3' sequence

SEQ ID NO: 10834 - DNA, 53 bp, Artificial Sequence; identical to SEQ ID NO: 2913
  Description of Artificial Sequence: Synthetic brazil nut; inner sequence and 3' sequence

SEQ ID NO: 10835 - DNA, 53 bp, Artificial Sequence; identical to SEQ ID NO: 6620
  Description of Artificial Sequence: Synthetic brazil nut; inner sequence and 3' sequence

SEQ ID NO: 10836 - DNA, 53 bp, Artificial Sequence; identical to SEQ ID NO: 6621
  Description of Artificial Sequence: Synthetic brazil nut; inner sequence and 3' sequence

SEQ ID NO: 10837 - DNA, 53 bp, Artificial Sequence
  Description of Artificial Sequence: Synthetic brazil nut; inner sequence and 3' sequence
gtgcaacacgacctagcaagtgagctggcattgactagtacatgaccacttga

SEQ ID NO: 10838 - DNA, 53 bp, Artificial Sequence; identical to SEQ ID NO: 2961
  Description of Artificial Sequence: Synthetic brazil nut; inner sequence and 3' sequence

SEQ ID NO: 10839 - DNA, 53 bp, Artificial Sequence; identical to SEQ ID NO: 2435
  Description of Artificial Sequence: Synthetic brazil nut; inner sequence and 3' sequence

SEQ ID NO: 10840 - DNA, 53 bp, Artificial Sequence; identical to SEQ ID NO: 2832
  Description of Artificial Sequence: Synthetic brazil nut; inner sequence and 3' sequence

SEQ ID NO: 10841 - DNA, 53 bp, Artificial Sequence; identical to SEQ ID NO: 6822
  Description of Artificial Sequence: Synthetic brazil nut; inner sequence and 3' sequence

SEQ ID NO: 10842 - DNA, 53 bp, Artificial Sequence; identical to SEQ ID NO: 2734
  Description of Artificial Sequence: Synthetic brazil nut; inner sequence and 3' sequence

SEQ ID NO: 10843 - DNA, 53 bp, Artificial Sequence; identical to SEQ ID NO: 6713
  Description of Artificial Sequence: Synthetic brazil nut; inner sequence and 3' sequence

SEQ ID NO: 10844 - DNA, 53 bp, Artificial Sequence
  Description of Artificial Sequence: Synthetic brazil nut; inner sequence and 3' sequence
ggcacgcactcgattcgccttcacgtggttttgactagtacatgaccacttga

SEQ ID NO: 10845 - DNA, 53 bp, Artificial Sequence; identical to SEQ ID NO: 2626
  Description of Artificial Sequence: Synthetic brazil nut; inner sequence and 3' sequence

SEQ ID NO: 10846 - DNA, 53 bp, Artificial Sequence; identical to SEQ ID NO: 2474
  Description of Artificial Sequence: Synthetic brazil nut; inner sequence and 3' sequence

SEQ ID NO: 10847 - DNA, 53 bp, Artificial Sequence; identical to SEQ ID NO: 2482
  Description of Artificial Sequence: Synthetic brazil nut; inner sequence and 3' sequence

SEQ ID NO: 10848 - DNA, 53 bp, Artificial Sequence; identical to SEQ ID NO: 2547
  Description of Artificial Sequence: Synthetic brazil nut; inner sequence and 3' sequence

SEQ ID NO: 10849 - DNA, 53 bp, Artificial Sequence; identical to SEQ ID NO: 2424
  Description of Artificial Sequence: Synthetic brazil nut; inner sequence and 3' sequence

SEQ ID NO: 10850 - DNA, 53 bp, Artificial Sequence
  Description of Artificial Sequence: Synthetic brazil nut; inner sequence and 3' sequence
ggacagcaatgaccgatcaggtggcgtggattgactagtacatgaccacttga

SEQ ID NO: 10851 - DNA, 53 bp, Artificial Sequence; identical to SEQ ID NO: 2101
  Description of Artificial Sequence: Synthetic brazil nut; inner sequence and 3' sequence

SEQ ID NO: 10852 - DNA, 53 bp, Artificial Sequence; identical to SEQ ID NO: 2472
  Description of Artificial Sequence: Synthetic brazil nut; inner sequence and 3' sequence

SEQ ID NO: 10853 - DNA, 53 bp, Artificial Sequence; identical to SEQ ID NO: 6690
  Description of Artificial Sequence: Synthetic brazil nut; inner sequence and 3' sequence

SEQ ID NO: 10854 - DNA, 53 bp, Artificial Sequence; identical to SEQ ID NO: 6555
  Description of Artificial Sequence: Synthetic brazil nut; inner sequence and 3' sequence

SEQ ID NO: 10855 - DNA, 53 bp, Artificial Sequence
  Description of Artificial Sequence: Synthetic brazil nut; inner sequence and 3' sequence
acatgccagtgggtacgtcgctgtgccacattgactagtacatgaccacttga

SEQ ID NO: 10856 - DNA, 53 bp, Artificial Sequence; identical to SEQ ID NO: 6835
  Description of Artificial Sequence: Synthetic brazil nut; inner sequence and 3' sequence

SEQ ID NO: 10857 - DNA, 53 bp, Artificial Sequence; identical to SEQ ID NO: 6949
  Description of Artificial Sequence: Synthetic brazil nut; inner sequence and 3' sequence

SEQ ID NO: 10858 - DNA, 53 bp, Artificial Sequence; identical to SEQ ID NO: 6774
  Description of Artificial Sequence: Synthetic brazil nut; inner sequence and 3' sequence

SEQ ID NO: 10859 - DNA, 53 bp, Artificial Sequence; identical to SEQ ID NO: 2948
  Description of Artificial Sequence: Synthetic brazil nut; inner sequence and 3' sequence

SEQ ID NO: 10860 - DNA, 53 bp, Artificial Sequence
  Description of Artificial Sequence: Synthetic brazil nut; inner sequence and 3' sequence
gacgcgtgctcccgtagacaacgtgtgtcattgactagtacatgaccacttga

SEQ ID NO: 10861 - DNA, 53 bp, Artificial Sequence; identical to SEQ ID NO: 2479
  Description of Artificial Sequence: Synthetic brazil nut; inner sequence and 3' sequence

SEQ ID NO: 10862 - DNA, 53 bp, Artificial Sequence; identical to SEQ ID NO: 6987
  Description of Artificial Sequence: Synthetic brazil nut; inner sequence and 3' sequence

SEQ ID NO: 10863 - DNA, 53 bp, Artificial Sequence; identical to SEQ ID NO: 6845
  Description of Artificial Sequence: Synthetic brazil nut; inner sequence and 3' sequence

SEQ ID NO: 10864 - DNA, 52 bp, Artificial Sequence; identical to SEQ ID NO: 2873
  Description of Artificial Sequence: Synthetic brazil nut; inner sequence and 3' sequence

SEQ ID NO: 10865 - DNA, 53 bp, Artificial Sequence; identical to SEQ ID NO: 2646
  Description of Artificial Sequence: Synthetic brazil nut; inner sequence and 3' sequence

SEQ ID NO: 10866 - DNA, 53 bp, Artificial Sequence; identical to SEQ ID NO: 6894
  Description of Artificial Sequence: Synthetic brazil nut; inner sequence and 3' sequence

SEQ ID NO: 10867 - DNA, 53 bp, Artificial Sequence; identical to SEQ ID NO: 2302
  Description of Artificial Sequence: Synthetic brazil nut; inner sequence and 3' sequence

SEQ ID NO: 10868 - DNA, 53 bp, Artificial Sequence
  Description of Artificial Sequence: Synthetic brazil nut; inner sequence and 3' sequence
ggcatgccatcccttcgagtgtgacaggtattgactagtacatgaccacttga

SEQ ID NO: 10869 - DNA, 53 bp, Artificial Sequence
  Description of Artificial Sequence: Synthetic brazil nut; inner sequence and 3' sequence
gcgcatgaactgaccctacaatgtgcggcattgactagtacatgaccacttga

SEQ ID NO: 10870 - DNA, 52 bp, Artificial Sequence; identical to SEQ ID NO: 2453
  Description of Artificial Sequence: Synthetic brazil nut; inner sequence and 3' sequence

SEQ ID NO: 10871 - DNA, 53 bp, Artificial Sequence
  Description of Artificial Sequence: Synthetic brazil nut; inner sequence and 3' sequence
ggctgccgtgaccctagctggtgcgtcgtgttgactagtacatgaccacttga

SEQ ID NO: 10872 - DNA, 53 bp, Artificial Sequence
  Description of Artificial Sequence: Synthetic brazil nut; inner sequence and 3' sequence
gccatgccatcccttcgagtgtgacaggtattgactagtacatgaccacttga

SEQ ID NO: 10873 - DNA, 53 bp, Artificial Sequence; identical to SEQ ID NO: 2492
  Description of Artificial Sequence: Synthetic brazil nut; inner sequence and 3' sequence

SEQ ID NO: 10874 - DNA, 53 bp, Artificial Sequence; identical to SEQ ID NO: 2514
  Description of Artificial Sequence: Synthetic brazil nut; inner sequence and 3' sequence

SEQ ID NO: 10875 - DNA, 53 bp, Artificial Sequence; identical to SEQ ID NO: 6801
  Description of Artificial Sequence: Synthetic brazil nut; inner sequence and 3' sequence

SEQ ID NO: 10876 - DNA, 53 bp, Artificial Sequence
  Description of Artificial Sequence: Synthetic brazil nut; inner sequence and 3' sequence
gtcatgccatcccttcgagtgggacaggtattgactagtacatgaccacttga

SEQ ID NO: 10877 - DNA, 53 bp, Artificial Sequence
  Description of Artificial Sequence: Synthetic brazil nut; inner sequence and 3' sequence
gtgttgcgatgagctgctggtggacacgtattgactagtacatgaccacttga

SEQ ID NO: 10878 - DNA, 53 bp, Artificial Sequence; identical to SEQ ID NO: 2756
  Description of Artificial Sequence: Synthetic brazil nut; inner sequence and 3' sequence

SEQ ID NO: 10879 - DNA, 53 bp, Artificial Sequence
  Description of Artificial Sequence: Synthetic brazil nut; inner sequence and 3' sequence
cacatcaacgtccgccgcgatgacgtggttttgactagtacatgaccacttga

SEQ ID NO: 10880 - DNA, 53 bp, Artificial Sequence; identical to SEQ ID NO: 2698
  Description of Artificial Sequence: Synthetic brazil nut; inner sequence and 3' sequence

SEQ ID NO: 10881 - DNA, 53 bp, Artificial Sequence; identical to SEQ ID NO: 2742
  Description of Artificial Sequence: Synthetic brazil nut; inner sequence and 3' sequence

SEQ ID NO: 10882 - DNA, 53 bp, Artificial Sequence; identical to SEQ ID NO: 6728
  Description of Artificial Sequence: Synthetic brazil nut; inner sequence and 3' sequence

SEQ ID NO: 10883 - DNA, 53 bp, Artificial Sequence; identical to SEQ ID NO: 2802
  Description of Artificial Sequence: Synthetic brazil nut; inner sequence and 3' sequence

SEQ ID NO: 10884 - DNA, 53 bp, Artificial Sequence
  Description of Artificial Sequence: Synthetic brazil nut; inner sequence and 3' sequence
ccgtagcgacatcaagcggtggcgtgcgcgttgactagtacatgaccacttga

SEQ ID NO: 10885 - DNA, 53 bp, Artificial Sequence; identical to SEQ ID NO: 6931
  Description of Artificial Sequence: Synthetic brazil nut; inner sequence and 3' sequence

SEQ ID NO: 10886 - DNA, 53 bp, Artificial Sequence; identical to SEQ ID NO: 2597
  Description of Artificial Sequence: Synthetic brazil nut; inner sequence and 3' sequence

SEQ ID NO: 10887 - DNA, 53 bp, Artificial Sequence; identical to SEQ ID NO: 2863
  Description of Artificial Sequence: Synthetic brazil nut; inner sequence and 3' sequence

SEQ ID NO: 10888 - DNA, 53 bp, Artificial Sequence; identical to SEQ ID NO: 6339
  Description of Artificial Sequence: Synthetic brazil nut; inner sequence and 3' sequence

SEQ ID NO: 10889 - DNA, 53 bp, Artificial Sequence
  Description of Artificial Sequence: Synthetic brazil nut; inner sequence and 3' sequence
gtacacaacggacctacacgtggcgcatgtttgactagtacatgaccacttga

SEQ ID NO: 10890 - DNA, 53 bp, Artificial Sequence; identical to SEQ ID NO: 6736
  Description of Artificial Sequence: Synthetic brazil nut; inner sequence and 3' sequence

SEQ ID NO: 10891 - DNA, 53 bp, Artificial Sequence
  Description of Artificial Sequence: Synthetic brazil nut; inner sequence and 3' sequence
cgcaccgagagcgatcgtggttcgcagtcattgactagtacatgaccacttga

SEQ ID NO: 10892 - DNA, 53 bp, Artificial Sequence
  Description of Artificial Sequence: Synthetic brazil nut; inner sequence and 3' sequence
gcactgagcgtacgtatcagctggcacgtattgactagtacatgaccacttga

SEQ ID NO: 10893 - DNA, 52 bp, Artificial Sequence; identical to SEQ ID NO: 6869
  Description of Artificial Sequence: Synthetic brazil nut; inner sequence and 3' sequence

SEQ ID NO: 10894 - DNA, 53 bp, Artificial Sequence; identical to SEQ ID NO: 2929
  Description of Artificial Sequence: Synthetic brazil nut; inner sequence and 3' sequence

SEQ ID NO: 10895 - DNA, 53 bp, Artificial Sequence; identical to SEQ ID NO: 2931
  Description of Artificial Sequence: Synthetic brazil nut; inner sequence and 3' sequence

SEQ ID NO: 10896 - DNA, 53 bp, Artificial Sequence; identical to SEQ ID NO: 2955
  Description of Artificial Sequence: Synthetic brazil nut; inner sequence and 3' sequence

SEQ ID NO: 10897 - DNA, 53 bp, Artificial Sequence
  Description of Artificial Sequence: Synthetic brazil nut; inner sequence and 3' sequence
cacgtgacgaacgtgagcctagcggtgatgttgactagtacatgaccacttga

SEQ ID NO: 10898 - DNA, 53 bp, Artificial Sequence; identical to SEQ ID NO: 2729
  Description of Artificial Sequence: Synthetic brazil nut; inner sequence and 3' sequence

SEQ ID NO: 10899 - DNA, 53 bp, Artificial Sequence; identical to SEQ ID NO: 6715
  Description of Artificial Sequence: Synthetic brazil nut; inner sequence and 3' sequence

SEQ ID NO: 10900 - DNA, 53 bp, Artificial Sequence; identical to SEQ ID NO: 2678
  Description of Artificial Sequence: Synthetic brazil nut; inner sequence and 3' sequence

SEQ ID NO: 10901 - DNA, 53 bp, Artificial Sequence; identical to SEQ ID NO: 6958
  Description of Artificial Sequence: Synthetic brazil nut; inner sequence and 3' sequence

SEQ ID NO: 10902 - DNA, 53 bp, Artificial Sequence
  Description of Artificial Sequence: Synthetic brazil nut; inner sequence and 3' sequence
tcacgcaagggcaggcatactcgtcgcacattgactagtacatgaccacttga

SEQ ID NO: 10903 - DNA, 53 bp, Artificial Sequence; identical to SEQ ID NO: 6785
  Description of Artificial Sequence: Synthetic brazil nut; inner sequence and 3' sequence

SEQ ID NO: 10904 - DNA, 53 bp, Artificial Sequence; identical to SEQ ID NO: 2415
  Description of Artificial Sequence: Synthetic brazil nut; inner sequence and 3' sequence

SEQ ID NO: 10905 - DNA, 53 bp, Artificial Sequence; identical to SEQ ID NO: 6924
  Description of Artificial Sequence: Synthetic brazil nut; inner sequence and 3' sequence

SEQ ID NO: 10906 - DNA, 53 bp, Artificial Sequence; identical to SEQ ID NO: 2713
  Description of Artificial Sequence: Synthetic brazil nut; inner sequence and 3' sequence

SEQ ID NO: 10907 - DNA, 53 bp, Artificial Sequence
  Description of Artificial Sequence: Synthetic brazil nut; inner sequence and 3' sequence
ggccagagcgaccctacacgtgggcacgtattgactagtacatgaccacttga

SEQ ID NO: 10908 - DNA, 53 bp, Artificial Sequence; identical to SEQ ID NO: 2782
  Description of Artificial Sequence: Synthetic brazil nut; inner sequence and 3' sequence

SEQ ID NO: 10909 - DNA, 53 bp, Artificial Sequence
  Description of Artificial Sequence: Synthetic brazil nut; inner sequence and 3' sequence
gcacgcagctgccctgtcgtggtcgaggtgttgactagtacatgaccacttga

SEQ ID NO: 10910 - DNA, 53 bp, Artificial Sequence
  Description of Artificial Sequence: Synthetic brazil nut; inner sequence and 3' sequence
gtcattccgcctcctacacgtgggcacgtattgactagtacatgaccacttga

SEQ ID NO: 10911 - DNA, 53 bp, Artificial Sequence; identical to SEQ ID NO: 2624
  Description of Artificial Sequence: Synthetic brazil nut; inner sequence and 3' sequence

SEQ ID NO: 10912 - DNA, 53 bp, Artificial Sequence; identical to SEQ ID NO: 6708
  Description of Artificial Sequence: Synthetic brazil nut; inner sequence and 3' sequence

SEQ ID NO: 10913 - DNA, 53 bp, Artificial Sequence; identical to SEQ ID NO: 6829
  Description of Artificial Sequence: Synthetic brazil nut; inner sequence and 3' sequence

SEQ ID NO: 10914 - DNA, 53 bp, Artificial Sequence; identical to SEQ ID NO: 2512
  Description of Artificial Sequence: Synthetic brazil nut; inner sequence and 3' sequence

SEQ ID NO: 10915 - DNA, 53 bp, Artificial Sequence; identical to SEQ ID NO: 6878
  Description of Artificial Sequence: Synthetic brazil nut; inner sequence and 3' sequence

SEQ ID NO: 10916 - DNA, 53 bp, Artificial Sequence; identical to SEQ ID NO: 2898
  Description of Artificial Sequence: Synthetic brazil nut; inner sequence and 3' sequence

SEQ ID NO: 10917 - DNA, 53 bp, Artificial Sequence; identical to SEQ ID NO: 6918
  Description of Artificial Sequence: Synthetic brazil nut; inner sequence and 3' sequence

SEQ ID NO: 10918 - DNA, 53 bp, Artificial Sequence; identical to SEQ ID NO: 2939
  Description of Artificial Sequence: Synthetic brazil nut; inner sequence and 3' sequence

SEQ ID NO: 10919 - DNA, 53 bp, Artificial Sequence; identical to SEQ ID NO: 6617
  Description of Artificial Sequence: Synthetic brazil nut; inner sequence and 3' sequence

SEQ ID NO: 10920 - DNA, 53 bp, Artificial Sequence; identical to SEQ ID NO: 2949
  Description of Artificial Sequence: Synthetic brazil nut; inner sequence and 3' sequence

SEQ ID NO: 10921 - DNA, 53 bp, Artificial Sequence; identical to SEQ ID NO: 6946
  Description of Artificial Sequence: Synthetic brazil nut; inner sequence and 3' sequence

SEQ ID NO: 10922 - DNA, 53 bp, Artificial Sequence
  Description of Artificial Sequence: Synthetic brazil nut; inner sequence and 3' sequence
cgatatggacgacctccctatcacgtgggcttgactagtacatgaccacttga

SEQ ID NO: 10923 - DNA, 53 bp, Artificial Sequence; identical to SEQ ID NO: 2715
  Description of Artificial Sequence: Synthetic brazil nut; inner sequence and 3' sequence

SEQ ID NO: 10924 - DNA, 53 bp, Artificial Sequence; identical to SEQ ID NO: 2638
  Description of Artificial Sequence: Synthetic brazil nut; inner sequence and 3' sequence

SEQ ID NO: 10925 - DNA, 53 bp, Artificial Sequence
  Description of Artificial Sequence: Synthetic brazil nut; inner sequence and 3' sequence
catgcataggcagccagcagtgacgatgcgttgactagtacatgaccacttga

SEQ ID NO: 10926 - DNA, 53 bp, Artificial Sequence
  Description of Artificial Sequence: Synthetic brazil nut; inner sequence and 3' sequence
gcacggctcgcaccctatcatgaggccatgttgactagtacatgaccacttga

SEQ ID NO: 10927 - DNA, 53 bp, Artificial Sequence
  Description of Artificial Sequence: Synthetic brazil nut; inner sequence and 3' sequence
ggacgcatcggcccggtcaagttcggcatgttgactagtacatgaccacttga

SEQ ID NO: 10928 - DNA, 53 bp, Artificial Sequence
  Description of Artificial Sequence: Synthetic brazil nut; inner sequence and 3' sequence
ccgcacgtagcactatcagtggtgcatgcattgactagtacatgaccacttga

SEQ ID NO: 10929 - DNA, 53 bp, Artificial Sequence; identical to SEQ ID NO: 6904
  Description of Artificial Sequence: Synthetic brazil nut; inner sequence and 3' sequence

SEQ ID NO: 10930 - DNA, 53 bp, Artificial Sequence; identical to SEQ ID NO: 6948
  Description of Artificial Sequence: Synthetic brazil nut; inner sequence and 3' sequence

SEQ ID NO: 10931 - DNA, 53 bp, Artificial Sequence; identical to SEQ ID NO: 2748
  Description of Artificial Sequence: Synthetic brazil nut; inner sequence and 3' sequence

SEQ ID NO: 10932 - DNA, 53 bp, Artificial Sequence; identical to SEQ ID NO: 2957
  Description of Artificial Sequence: Synthetic brazil nut; inner sequence and 3' sequence

SEQ ID NO: 10933 - DNA, 53 bp, Artificial Sequence; identical to SEQ ID NO: 6967
  Description of Artificial Sequence: Synthetic brazil nut; inner sequence and 3' sequence

SEQ ID NO: 10934 - DNA, 53 bp, Artificial Sequence; identical to SEQ ID NO: 2753
  Description of Artificial Sequence: Synthetic brazil nut; inner sequence and 3' sequence

SEQ ID NO: 10935 - DNA, 53 bp, Artificial Sequence
  Description of Artificial Sequence: Synthetic brazil nut; inner sequence and 3' sequence
gacacggcactgacctacacgtggcaggtattgactagtacatgaccacttga

SEQ ID NO: 10936 - DNA, 53 bp, Artificial Sequence
  Description of Artificial Sequence: Synthetic brazil nut; inner sequence and 3' sequence
ccgcacgtagccctatcagtggagcatgcattgactagtacatgaccacttga

SEQ ID NO: 10937 - DNA, 53 bp, Artificial Sequence
  Description of Artificial Sequence: Synthetic brazil nut; inner sequence and 3' sequence
cgcgcagttggccgaacatcccgttgggcattgactagtacatgaccacttga

SEQ ID NO: 10938 - DNA, 53 bp, Artificial Sequence
  Description of Artificial Sequence: Synthetic brazil nut; inner sequence and 3' sequence
gtcattccgcatcctacacgtggccacgtattgactagtacatgaccacttga

SEQ ID NO: 10939 - DNA, 53 bp, Artificial Sequence
  Description of Artificial Sequence: Synthetic brazil nut; inner sequence and 3' sequence
gtacgtgcgatgtcccgatcaacgtgtgtcttgactagtacatgaccacttga

SEQ ID NO: 10940 - DNA, 53 bp, Artificial Sequence; identical to SEQ ID NO: 2987
  Description of Artificial Sequence: Synthetic brazil nut; inner sequence and 3' sequence

SEQ ID NO: 10941 - DNA, 53 bp, Artificial Sequence; identical to SEQ ID NO: 6778
  Description of Artificial Sequence: Synthetic brazil nut; inner sequence and 3' sequence

SEQ ID NO: 10942 - DNA, 53 bp, Artificial Sequence
  Description of Artificial Sequence: Synthetic brazil nut; inner sequence and 3' sequence
gcatcgcagcgaggtccgattgccgtcatgttgactagtacatgaccacttga

SEQ ID NO: 10943 - DNA, 53 bp, Artificial Sequence; identical to SEQ ID NO: 6992
  Description of Artificial Sequence: Synthetic brazil nut; inner sequence and 3' sequence

SEQ ID NO: 10944 - DNA, 53 bp, Artificial Sequence; identical to SEQ ID NO: 2559
  Description of Artificial Sequence: Synthetic brazil nut; inner sequence and 3' sequence

SEQ ID NO: 10945 - DNA, 53 bp, Artificial Sequence; identical to SEQ ID NO: 6731
  Description of Artificial Sequence: Synthetic brazil nut; inner sequence and 3' sequence

SEQ ID NO: 10946 - DNA, 53 bp, Artificial Sequence
  Description of Artificial Sequence: Synthetic brazil nut; inner sequence and 3' sequence
ccatcgcgtcactctcatgtgtgtcacgtattgactagtacatgaccacttga

SEQ ID NO: 10947 - DNA, 53 bp, Artificial Sequence; identical to SEQ ID NO: 6963
  Description of Artificial Sequence: Synthetic brazil nut; inner sequence and 3' sequence

SEQ ID NO: 10948 - DNA, 53 bp, Artificial Sequence; identical to SEQ ID NO: 2388
  Description of Artificial Sequence: Synthetic brazil nut; inner sequence and 3' sequence

SEQ ID NO: 10949 - DNA, 53 bp, Artificial Sequence
  Description of Artificial Sequence: Synthetic brazil nut; inner sequence and 3' sequence
gcatgactcgcaccctatcatgaggccatgttgactagtacatgaccacttga

SEQ ID NO: 10950 - DNA, 53 bp, Artificial Sequence
  Description of Artificial Sequence: Synthetic brazil nut; inner sequence and 3' sequence
ggccgcaatcctccctacacgtggcgtgtattgactagtacatgaccacttga

SEQ ID NO: 10951 - DNA, 53 bp, Artificial Sequence; identical to SEQ ID NO: 2384
  Description of Artificial Sequence: Synthetic brazil nut; inner sequence and 3' sequence

SEQ ID NO: 10952 - DNA, 53 bp, Artificial Sequence; identical to SEQ ID NO: 2488
  Description of Artificial Sequence: Synthetic brazil nut; inner sequence and 3' sequence

SEQ ID NO: 10953 - DNA, 53 bp, Artificial Sequence
  Description of Artificial Sequence: Synthetic brazil nut; inner sequence and 3' sequence
gtcattccgcatactacacgtgggcacgtattgactagtacatgaccacttga

SEQ ID NO: 10954 - DNA, 53 bp, Artificial Sequence; identical to SEQ ID NO: 2875
  Description of Artificial Sequence: Synthetic brazil nut; inner sequence and 3' sequence

SEQ ID NO: 10955 - DNA, 53 bp, Artificial Sequence; identical to SEQ ID NO: 6905
  Description of Artificial Sequence: Synthetic brazil nut; inner sequence and 3' sequence

SEQ ID NO: 10956 - DNA, 53 bp, Artificial Sequence; identical to SEQ ID NO: 6652
  Description of Artificial Sequence: Synthetic brazil nut; inner sequence and 3' sequence

SEQ ID NO: 10957 - DNA, 53 bp, Artificial Sequence; identical to SEQ ID NO: 2826
  Description of Artificial Sequence: Synthetic brazil nut; inner sequence and 3' sequence

SEQ ID NO: 10958 - DNA, 53 bp, Artificial Sequence; identical to SEQ ID NO: 2996
  Description of Artificial Sequence: Synthetic brazil nut; inner sequence and 3' sequence

SEQ ID NO: 10959 - DNA, 53 bp, Artificial Sequence; identical to SEQ ID NO: 6979
  Description of Artificial Sequence: Synthetic brazil nut; inner sequence and 3' sequence

SEQ ID NO: 10960 - DNA, 53 bp, Artificial Sequence
  Description of Artificial Sequence: Synthetic brazil nut; inner sequence and 3' sequence
ccgacgcaaccgtacagcatgtcacgtggcttgactagtacatgaccacttga

SEQ ID NO: 10961 - DNA, 53 bp, Artificial Sequence
  Description of Artificial Sequence: Synthetic brazil nut; inner sequence and 3' sequence
ccggcacgaacggaacgggtcttgtgcatgttgactagtacatgaccacttga

SEQ ID NO: 10962 - DNA, 53 bp, Artificial Sequence
  Description of Artificial Sequence: Synthetic brazil nut; inner sequence and 3' sequence
tgcatgcacgcacctacacgtgggtatggattgactagtacatgaccacttga

SEQ ID NO: 10963 - DNA, 53 bp, Artificial Sequence
  Description of Artificial Sequence: Synthetic brazil nut; inner sequence and 3' sequence
ggcatgacgagctgaacggtgcagtgtgctttgactagtacatgaccacttga

SEQ ID NO: 10964 - DNA, 53 bp, Artificial Sequence
  Description of Artificial Sequence: Synthetic brazil nut; inner sequence and 3' sequence
ggccgcagcttgcctactggtggtcacgtattgactagtacatgaccacttga

SEQ ID NO: 10965 - DNA, 53 bp, Artificial Sequence; identical to SEQ ID NO: 6854
  Description of Artificial Sequence: Synthetic brazil nut; inner sequence and 3' sequence

SEQ ID NO: 10966 - DNA, 48 bp, Artificial Sequence; identical to SEQ ID NO: 2427
  Description of Artificial Sequence: Synthetic brazil nut; inner sequence and 3' sequence

SEQ ID NO: 10967 - DNA, 53 bp, Artificial Sequence; identical to SEQ ID NO: 6864
  Description of Artificial Sequence: Synthetic brazil nut; inner sequence and 3' sequence

SEQ ID NO: 10968 - DNA, 53 bp, Artificial Sequence
  Description of Artificial Sequence: Synthetic brazil nut; inner sequence and 3' sequence
cgcaccgtcgatacgtcatccacgctgacattgactagtacatgaccacttga

SEQ ID NO: 10969 - DNA, 53 bp, Artificial Sequence
  Description of Artificial Sequence: Synthetic brazil nut; inner sequence and 3' sequence
catggcaaggcagcggtcgatccattcgcgttgactagtacatgaccacttga

SEQ ID NO: 10970 - DNA, 53 bp, Artificial Sequence; identical to SEQ ID NO: 2703
  Description of Artificial Sequence: Synthetic brazil nut; inner sequence and 3' sequence

SEQ ID NO: 10971 - DNA, 53 bp, Artificial Sequence
  Description of Artificial Sequence: Synthetic brazil nut; inner sequence and 3' sequence
gtacgcacgcagaccgacgagtggcatggattgactagtacatgaccacttga

SEQ ID NO: 10972 - DNA, 53 bp, Artificial Sequence; identical to SEQ ID NO: 6667
  Description of Artificial Sequence: Synthetic brazil nut; inner sequence and 3' sequence

SEQ ID NO: 10973 - DNA, 53 bp, Artificial Sequence; identical to SEQ ID NO: 7002
  Description of Artificial Sequence: Synthetic brazil nut; inner sequence and 3' sequence

SEQ ID NO: 10974 - DNA, 53 bp, Artificial Sequence
  Description of Artificial Sequence: Synthetic brazil nut; inner sequence and 3' sequence
gcacggtcggaccaggacacgagatgggcattgactagtacatgaccacttga

SEQ ID NO: 10975 - DNA, 53 bp, Artificial Sequence; identical to SEQ ID NO: 2345
  Description of Artificial Sequence: Synthetic brazil nut; inner sequence and 3' sequence

SEQ ID NO: 10976 - DNA, 53 bp, Artificial Sequence; identical to SEQ ID NO: 2162
  Description of Artificial Sequence: Synthetic brazil nut; inner sequence and 3' sequence

SEQ ID NO: 10977 - DNA, 52 bp, Artificial Sequence
  Description of Artificial Sequence: Synthetic brazil nut; inner sequence and 3' sequence
ccacatggacgacgatggcttagcgtggtttgactagtacatgaccacttga

SEQ ID NO: 10978 - DNA, 53 bp, Artificial Sequence
  Description of Artificial Sequence: Synthetic brazil nut; inner sequence and 3' sequence
ccgtagcgacatcaagcggtggcgcgcgtgttgactagtacatgaccacttga

SEQ ID NO: 10979 - DNA, 53 bp, Artificial Sequence; identical to SEQ ID NO: 2598
  Description of Artificial Sequence: Synthetic brazil nut; inner sequence and 3' sequence

SEQ ID NO: 10980 - DNA, 53 bp, Artificial Sequence; identical to SEQ ID NO: 2823
  Description of Artificial Sequence: Synthetic brazil nut; inner sequence and 3' sequence

SEQ ID NO: 10981 - DNA, 53 bp, Artificial Sequence; identical to SEQ ID NO: 6666
  Description of Artificial Sequence: Synthetic brazil nut; inner sequence and 3' sequence

SEQ ID NO: 10982 - DNA, 53 bp, Artificial Sequence; identical to SEQ ID NO: 6887
  Description of Artificial Sequence: Synthetic brazil nut; inner sequence and 3' sequence

SEQ ID NO: 10983 - DNA, 51 bp, Artificial Sequence
  Description of Artificial Sequence: Synthetic brazil nut; inner sequence and 3' sequence
gtgctgcgatgacctcacgtggacgggtttgactagtacatgaccacttga

SEQ ID NO: 10984 - DNA, 53 bp, Artificial Sequence
  Description of Artificial Sequence: Synthetic brazil nut; inner sequence and 3' sequence
acgatacgcaccagggacattgacggcatgttgactagtacatgaccacttga

SEQ ID NO: 10985 - DNA, 53 bp, Artificial Sequence
  Description of Artificial Sequence: Synthetic brazil nut; inner sequence and 3' sequence
ccgcacgtacccctatcagtggtgcatgcattgactagtacatgaccacttga

SEQ ID NO: 10986 - DNA, 52 bp, Artificial Sequence; identical to SEQ ID NO: 6763
  Description of Artificial Sequence: Synthetic brazil nut; inner sequence and 3' sequence

SEQ ID NO: 10987 - DNA, 53 bp, Artificial Sequence; identical to SEQ ID NO: 2842
  Description of Artificial Sequence: Synthetic brazil nut; inner sequence and 3' sequence

SEQ ID NO: 10988 - DNA, 53 bp, Artificial Sequence
  Description of Artificial Sequence: Synthetic brazil nut; inner sequence and 3' sequence
gtacgtcgcggaccctatcaagacggcatgttgactagtacatgaccacttga

SEQ ID NO: 10989 - DNA, 53 bp, Artificial Sequence; identical to SEQ ID NO: 2683
  Description of Artificial Sequence: Synthetic brazil nut; inner sequence and 3' sequence

SEQ ID NO: 10990 - DNA, 53 bp, Artificial Sequence; identical to SEQ ID NO: 2866
  Description of Artificial Sequence: Synthetic brazil nut; inner sequence and 3' sequence

SEQ ID NO: 10991 - DNA, 53 bp, Artificial Sequence
  Description of Artificial Sequence: Synthetic brazil nut; inner sequence and 3' sequence
ccgacgaagacctggtcgtggaaggcatgattgactagtacatgaccacttga

SEQ ID NO: 10992 - DNA, 53 bp, Artificial Sequence; identical to SEQ ID NO: 6857
  Description of Artificial Sequence: Synthetic brazil nut; inner sequence and 3' sequence

SEQ ID NO: 10993 - DNA, 53 bp, Artificial Sequence
  Description of Artificial Sequence: Synthetic brazil nut; inner sequence and 3' sequence
ccgcccgtagccctatcagtggtgcatgcattgactagtacatgaccacttga

SEQ ID NO: 10994 - DNA, 53 bp, Artificial Sequence
  Description of Artificial Sequence: Synthetic brazil nut; inner sequence and 3' sequence
cgcacacgtcaggtcaaggtcatcgcgtggttgactagtacatgaccacttga

SEQ ID NO: 10995 - DNA, 53 bp, Artificial Sequence; identical to SEQ ID NO: 2535
  Description of Artificial Sequence: Synthetic brazil nut; inner sequence and 3' sequence

SEQ ID NO: 10996 - DNA, 52 bp, Artificial Sequence; identical to SEQ ID NO: 2879
  Description of Artificial Sequence: Synthetic brazil nut; inner sequence and 3' sequence

SEQ ID NO: 10997 - DNA, 53 bp, Artificial Sequence; identical to SEQ ID NO: 2681
  Description of Artificial Sequence: Synthetic brazil nut; inner sequence and 3' sequence

SEQ ID NO: 10998 - DNA, 53 bp, Artificial Sequence
  Description of Artificial Sequence: Synthetic brazil nut; inner sequence and 3' sequence
cgcaccgcgagtgatcgtggttcgcagtcattgactagtacatgaccacttga

SEQ ID NO: 10999 - DNA, 53 bp, Artificial Sequence
  Description of Artificial Sequence: Synthetic brazil nut; inner sequence and 3' sequence
cgtaccgccttggtctacgtgacgccatgtttgactagtacatgaccacttga

SEQ ID NO: 11000 - DNA, 52 bp, Artificial Sequence; identical to SEQ ID NO: 6968
  Description of Artificial Sequence: Synthetic brazil nut; inner sequence and 3' sequence

SEQ ID NO: 11001 - DNA, 53 bp, Artificial Sequence; identical to SEQ ID NO: 6882
  Description of Artificial Sequence: Synthetic brazil nut; inner sequence and 3' sequence

SEQ ID NO: 11002 - DNA, 53 bp, Artificial Sequence; identical to SEQ ID NO: 2265
  Description of Artificial Sequence: Synthetic brazil nut; inner sequence and 3' sequence

SEQ ID NO: 11003 - DNA, 76 bp, Artificial Sequence; identical to SEQ ID NO: 3004
  Description of Artificial Sequence: Synthetic brazil nut; 5' sequence +inner sequence + 3' sequence

SEQ ID NO: 11004 - DNA, 76 bp, Artificial Sequence; identical to SEQ ID NO: 3003
  Description of Artificial Sequence: Synthetic brazil nut; 5' sequence +inner sequence + 3' sequence

SEQ ID NO: 11005 - DNA, 76 bp, Artificial Sequence; identical to SEQ ID NO: 3008
  Description of Artificial Sequence: Synthetic brazil nut; 5' sequence +inner sequence + 3' sequence

SEQ ID NO: 11006 - DNA, 76 bp, Artificial Sequence; identical to SEQ ID NO: 3006
  Description of Artificial Sequence: Synthetic brazil nut; 5' sequence +inner sequence + 3' sequence

SEQ ID NO: 11007 - DNA, 76 bp, Artificial Sequence; identical to SEQ ID NO: 3005
  Description of Artificial Sequence: Synthetic brazil nut; 5' sequence +inner sequence + 3' sequence

SEQ ID NO: 11008 - DNA, 76 bp, Artificial Sequence; identical to SEQ ID NO: 3010
  Description of Artificial Sequence: Synthetic brazil nut; 5' sequence +inner sequence + 3' sequence

SEQ ID NO: 11009 - DNA, 76 bp, Artificial Sequence; identical to SEQ ID NO: 3007
  Description of Artificial Sequence: Synthetic brazil nut; 5' sequence +inner sequence + 3' sequence

SEQ ID NO: 11010 - DNA, 76 bp, Artificial Sequence; identical to SEQ ID NO: 3009
  Description of Artificial Sequence: Synthetic brazil nut; 5' sequence +inner sequence + 3' sequence

SEQ ID NO: 11011 - DNA, 76 bp, Artificial Sequence; identical to SEQ ID NO: 3012
  Description of Artificial Sequence: Synthetic brazil nut; 5' sequence +inner sequence + 3' sequence

SEQ ID NO: 11012 - DNA, 76 bp, Artificial Sequence; identical to SEQ ID NO: 3011
  Description of Artificial Sequence: Synthetic brazil nut; 5' sequence +inner sequence + 3' sequence

SEQ ID NO: 11013 - DNA, 76 bp, Artificial Sequence; identical to SEQ ID NO: 3023
  Description of Artificial Sequence: Synthetic brazil nut; 5' sequence +inner sequence + 3' sequence

SEQ ID NO: 11014 - DNA, 76 bp, Artificial Sequence; identical to SEQ ID NO: 3018
  Description of Artificial Sequence: Synthetic brazil nut; 5' sequence +inner sequence + 3' sequence

SEQ ID NO: 11015 - DNA, 76 bp, Artificial Sequence; identical to SEQ ID NO: 3014
  Description of Artificial Sequence: Synthetic brazil nut; 5' sequence +inner sequence + 3' sequence

SEQ ID NO: 11016 - DNA, 76 bp, Artificial Sequence; identical to SEQ ID NO: 3013
  Description of Artificial Sequence: Synthetic brazil nut; 5' sequence +inner sequence + 3' sequence

SEQ ID NO: 11017 - DNA, 76 bp, Artificial Sequence; identical to SEQ ID NO: 3017
  Description of Artificial Sequence: Synthetic brazil nut; 5' sequence +inner sequence + 3' sequence

SEQ ID NO: 11018 - DNA, 76 bp, Artificial Sequence; identical to SEQ ID NO: 3037
  Description of Artificial Sequence: Synthetic brazil nut; 5' sequence +inner sequence + 3' sequence

SEQ ID NO: 11019 - DNA, 76 bp, Artificial Sequence; identical to SEQ ID NO: 3020
  Description of Artificial Sequence: Synthetic brazil nut; 5' sequence +inner sequence + 3' sequence

SEQ ID NO: 11020 - DNA, 76 bp, Artificial Sequence; identical to SEQ ID NO: 3022
  Description of Artificial Sequence: Synthetic brazil nut; 5' sequence +inner sequence + 3' sequence

SEQ ID NO: 11021 - DNA, 76 bp, Artificial Sequence; identical to SEQ ID NO: 3049
  Description of Artificial Sequence: Synthetic brazil nut; 5' sequence +inner sequence + 3' sequence

SEQ ID NO: 11022 - DNA, 76 bp, Artificial Sequence; identical to SEQ ID NO: 3030
  Description of Artificial Sequence: Synthetic brazil nut; 5' sequence +inner sequence + 3' sequence

SEQ ID NO: 11023 - DNA, 76 bp, Artificial Sequence; identical to SEQ ID NO: 3028
  Description of Artificial Sequence: Synthetic brazil nut; 5' sequence +inner sequence + 3' sequence

SEQ ID NO: 11024 - DNA, 76 bp, Artificial Sequence; identical to SEQ ID NO: 3016
  Description of Artificial Sequence: Synthetic brazil nut; 5' sequence +inner sequence + 3' sequence

SEQ ID NO: 11025 - DNA, 76 bp, Artificial Sequence; identical to SEQ ID NO: 3046
  Description of Artificial Sequence: Synthetic brazil nut; 5' sequence +inner sequence + 3' sequence

SEQ ID NO: 11026 - DNA, 76 bp, Artificial Sequence; identical to SEQ ID NO: 3034
  Description of Artificial Sequence: Synthetic brazil nut; 5' sequence +inner sequence + 3' sequence

SEQ ID NO: 11027 - DNA, 76 bp, Artificial Sequence; identical to SEQ ID NO: 3041
  Description of Artificial Sequence: Synthetic brazil nut; 5' sequence +inner sequence + 3' sequence

SEQ ID NO: 11028 - DNA, 76 bp, Artificial Sequence; identical to SEQ ID NO: 3060
  Description of Artificial Sequence: Synthetic brazil nut; 5' sequence +inner sequence + 3' sequence

SEQ ID NO: 11029 - DNA, 76 bp, Artificial Sequence; identical to SEQ ID NO: 3045
  Description of Artificial Sequence: Synthetic brazil nut; 5' sequence +inner sequence + 3' sequence

SEQ ID NO: 11030 - DNA, 76 bp, Artificial Sequence; identical to SEQ ID NO: 3021
  Description of Artificial Sequence: Synthetic brazil nut; 5' sequence +inner sequence + 3' sequence

SEQ ID NO: 11031 - DNA, 76 bp, Artificial Sequence; identical to SEQ ID NO: 3015
  Description of Artificial Sequence: Synthetic brazil nut; 5' sequence +inner sequence + 3' sequence

SEQ ID NO: 11032 - DNA, 76 bp, Artificial Sequence; identical to SEQ ID NO: 3033
  Description of Artificial Sequence: Synthetic brazil nut; 5' sequence +inner sequence + 3' sequence

SEQ ID NO: 11033 - DNA, 76 bp, Artificial Sequence; identical to SEQ ID NO: 3032
  Description of Artificial Sequence: Synthetic brazil nut; 5' sequence +inner sequence + 3' sequence

SEQ ID NO: 11034 - DNA, 76 bp, Artificial Sequence; identical to SEQ ID NO: 3064
  Description of Artificial Sequence: Synthetic brazil nut; 5' sequence +inner sequence + 3' sequence

SEQ ID NO: 11035 - DNA, 76 bp, Artificial Sequence; identical to SEQ ID NO: 3055
  Description of Artificial Sequence: Synthetic brazil nut; 5' sequence +inner sequence + 3' sequence

SEQ ID NO: 11036 - DNA, 76 bp, Artificial Sequence; identical to SEQ ID NO: 3024
  Description of Artificial Sequence: Synthetic brazil nut; 5' sequence +inner sequence + 3' sequence

SEQ ID NO: 11037 - DNA, 76 bp, Artificial Sequence; identical to SEQ ID NO: 3040
  Description of Artificial Sequence: Synthetic brazil nut; 5' sequence +inner sequence + 3' sequence

SEQ ID NO: 11038 - DNA, 76 bp, Artificial Sequence; identical to SEQ ID NO: 3044
  Description of Artificial Sequence: Synthetic brazil nut; 5' sequence +inner sequence + 3' sequence

SEQ ID NO: 11039 - DNA, 75 bp, Artificial Sequence; identical to SEQ ID NO: 3070
  Description of Artificial Sequence: Synthetic brazil nut; 5' sequence +inner sequence + 3' sequence

SEQ ID NO: 11040 - DNA, 76 bp, Artificial Sequence; identical to SEQ ID NO: 3052
  Description of Artificial Sequence: Synthetic brazil nut; 5' sequence +inner sequence + 3' sequence

SEQ ID NO: 11041 - DNA, 76 bp, Artificial Sequence; identical to SEQ ID NO: 3131
  Description of Artificial Sequence: Synthetic brazil nut; 5' sequence +inner sequence + 3' sequence

SEQ ID NO: 11042 - DNA, 76 bp, Artificial Sequence; identical to SEQ ID NO: 3029
  Description of Artificial Sequence: Synthetic brazil nut; 5' sequence +inner sequence + 3' sequence

SEQ ID NO: 11043 - DNA, 76 bp, Artificial Sequence; identical to SEQ ID NO: 3061
  Description of Artificial Sequence: Synthetic brazil nut; 5' sequence +inner sequence + 3' sequence

SEQ ID NO: 11044 - DNA, 76 bp, Artificial Sequence; identical to SEQ ID NO: 3035
  Description of Artificial Sequence: Synthetic brazil nut; 5' sequence +inner sequence + 3' sequence

SEQ ID NO: 11045 - DNA, 76 bp, Artificial Sequence; identical to SEQ ID NO: 3038
  Description of Artificial Sequence: Synthetic brazil nut; 5' sequence +inner sequence + 3' sequence

SEQ ID NO: 11046 - DNA, 76 bp, Artificial Sequence; identical to SEQ ID NO: 3088
  Description of Artificial Sequence: Synthetic brazil nut; 5' sequence +inner sequence + 3' sequence

SEQ ID NO: 11047 - DNA, 76 bp, Artificial Sequence; identical to SEQ ID NO: 3063
  Description of Artificial Sequence: Synthetic brazil nut; 5' sequence +inner sequence + 3' sequence

SEQ ID NO: 11048 - DNA, 76 bp, Artificial Sequence; identical to SEQ ID NO: 3019
  Description of Artificial Sequence: Synthetic brazil nut; 5' sequence +inner sequence + 3' sequence

SEQ ID NO: 11049 - DNA, 76 bp, Artificial Sequence; identical to SEQ ID NO: 3074
  Description of Artificial Sequence: Synthetic brazil nut; 5' sequence +inner sequence + 3' sequence

SEQ ID NO: 11050 - DNA, 76 bp, Artificial Sequence; identical to SEQ ID NO: 3129
  Description of Artificial Sequence: Synthetic brazil nut; 5' sequence +inner sequence + 3' sequence

SEQ ID NO: 11051 - DNA, 76 bp, Artificial Sequence; identical to SEQ ID NO: 3054
  Description of Artificial Sequence: Synthetic brazil nut; 5' sequence +inner sequence + 3' sequence

SEQ ID NO: 11052 - DNA, 76 bp, Artificial Sequence; identical to SEQ ID NO: 3031
  Description of Artificial Sequence: Synthetic brazil nut; 5' sequence +inner sequence + 3' sequence

SEQ ID NO: 11053 - DNA, 76 bp, Artificial Sequence; identical to SEQ ID NO: 3082
  Description of Artificial Sequence: Synthetic brazil nut; 5' sequence +inner sequence + 3' sequence

SEQ ID NO: 11054 - DNA, 76 bp, Artificial Sequence; identical to SEQ ID NO: 3039
  Description of Artificial Sequence: Synthetic brazil nut; 5' sequence +inner sequence + 3' sequence

SEQ ID NO: 11055 - DNA, 76 bp, Artificial Sequence; identical to SEQ ID NO: 3051
  Description of Artificial Sequence: Synthetic brazil nut; 5' sequence +inner sequence + 3' sequence

SEQ ID NO: 11056 - DNA, 76 bp, Artificial Sequence; identical to SEQ ID NO: 3066
  Description of Artificial Sequence: Synthetic brazil nut; 5' sequence +inner sequence + 3' sequence

SEQ ID NO: 11057 - DNA, 76 bp, Artificial Sequence; identical to SEQ ID NO: 3048
  Description of Artificial Sequence: Synthetic brazil nut; 5' sequence +inner sequence + 3' sequence

SEQ ID NO: 11058 - DNA, 76 bp, Artificial Sequence; identical to SEQ ID NO: 3077
  Description of Artificial Sequence: Synthetic brazil nut; 5' sequence +inner sequence + 3' sequence

SEQ ID NO: 11059 - DNA, 76 bp, Artificial Sequence; identical to SEQ ID NO: 3081
  Description of Artificial Sequence: Synthetic brazil nut; 5' sequence +inner sequence + 3' sequence

SEQ ID NO: 11060 - DNA, 76 bp, Artificial Sequence; identical to SEQ ID NO: 3117
  Description of Artificial Sequence: Synthetic brazil nut; 5' sequence +inner sequence + 3' sequence

SEQ ID NO: 11061 - DNA, 76 bp, Artificial Sequence; identical to SEQ ID NO: 3050
  Description of Artificial Sequence: Synthetic brazil nut; 5' sequence +inner sequence + 3' sequence

SEQ ID NO: 11062 - DNA, 76 bp, Artificial Sequence; identical to SEQ ID NO: 3183
  Description of Artificial Sequence: Synthetic brazil nut; 5' sequence +inner sequence + 3' sequence

SEQ ID NO: 11063 - DNA, 76 bp, Artificial Sequence; identical to SEQ ID NO: 3058
  Description of Artificial Sequence: Synthetic brazil nut; 5' sequence +inner sequence + 3' sequence

SEQ ID NO: 11064 - DNA, 76 bp, Artificial Sequence; identical to SEQ ID NO: 3112
  Description of Artificial Sequence: Synthetic brazil nut; 5' sequence +inner sequence + 3' sequence

SEQ ID NO: 11065 - DNA, 75 bp, Artificial Sequence; identical to SEQ ID NO: 3193
  Description of Artificial Sequence: Synthetic brazil nut; 5' sequence +inner sequence + 3' sequence

SEQ ID NO: 11066 - DNA, 76 bp, Artificial Sequence; identical to SEQ ID NO: 3080
  Description of Artificial Sequence: Synthetic brazil nut; 5' sequence +inner sequence + 3' sequence

SEQ ID NO: 11067 - DNA, 76 bp, Artificial Sequence; identical to SEQ ID NO: 3185
  Description of Artificial Sequence: Synthetic brazil nut; 5' sequence +inner sequence + 3' sequence

SEQ ID NO: 11068 - DNA, 76 bp, Artificial Sequence; identical to SEQ ID NO: 3430
  Description of Artificial Sequence: Synthetic brazil nut; 5' sequence +inner sequence + 3' sequence

SEQ ID NO: 11069 - DNA, 76 bp, Artificial Sequence; identical to SEQ ID NO: 3076
  Description of Artificial Sequence: Synthetic brazil nut; 5' sequence +inner sequence + 3' sequence

SEQ ID NO: 11070 - DNA, 76 bp, Artificial Sequence; identical to SEQ ID NO: 3097
  Description of Artificial Sequence: Synthetic brazil nut; 5' sequence +inner sequence + 3' sequence

SEQ ID NO: 11071 - DNA, 76 bp, Artificial Sequence; identical to SEQ ID NO: 3133
  Description of Artificial Sequence: Synthetic brazil nut; 5' sequence +inner sequence + 3' sequence

SEQ ID NO: 11072 - DNA, 76 bp, Artificial Sequence; identical to SEQ ID NO: 3057
  Description of Artificial Sequence: Synthetic brazil nut; 5' sequence +inner sequence + 3' sequence

SEQ ID NO: 11073 - DNA, 76 bp, Artificial Sequence; identical to SEQ ID NO: 3120
  Description of Artificial Sequence: Synthetic brazil nut; 5' sequence +inner sequence + 3' sequence

SEQ ID NO: 11074 - DNA, 76 bp, Artificial Sequence; identical to SEQ ID NO: 3043
  Description of Artificial Sequence: Synthetic brazil nut; 5' sequence +inner sequence + 3' sequence

SEQ ID NO: 11075 - DNA, 76 bp, Artificial Sequence; identical to SEQ ID NO: 3025
  Description of Artificial Sequence: Synthetic brazil nut; 5' sequence +inner sequence + 3' sequence

SEQ ID NO: 11076 - DNA, 76 bp, Artificial Sequence; identical to SEQ ID NO: 3126
  Description of Artificial Sequence: Synthetic brazil nut; 5' sequence +inner sequence + 3' sequence

SEQ ID NO: 11077 - DNA, 76 bp, Artificial Sequence; identical to SEQ ID NO: 3053
  Description of Artificial Sequence: Synthetic brazil nut; 5' sequence +inner sequence + 3' sequence

SEQ ID NO: 11078 - DNA, 76 bp, Artificial Sequence; identical to SEQ ID NO: 3059
  Description of Artificial Sequence: Synthetic brazil nut; 5' sequence +inner sequence + 3' sequence

SEQ ID NO: 11079 - DNA, 76 bp, Artificial Sequence; identical to SEQ ID NO: 3067
  Description of Artificial Sequence: Synthetic brazil nut; 5' sequence +inner sequence + 3' sequence

SEQ ID NO: 11080 - DNA, 76 bp, Artificial Sequence; identical to SEQ ID NO: 3211
  Description of Artificial Sequence: Synthetic brazil nut; 5' sequence +inner sequence + 3' sequence

SEQ ID NO: 11081 - DNA, 76 bp, Artificial Sequence; identical to SEQ ID NO: 3093
  Description of Artificial Sequence: Synthetic brazil nut; 5' sequence +inner sequence + 3' sequence

SEQ ID NO: 11082 - DNA, 76 bp, Artificial Sequence; identical to SEQ ID NO: 3036
  Description of Artificial Sequence: Synthetic brazil nut; 5' sequence +inner sequence + 3' sequence

SEQ ID NO: 11083 - DNA, 76 bp, Artificial Sequence; identical to SEQ ID NO: 3136
  Description of Artificial Sequence: Synthetic brazil nut; 5' sequence +inner sequence + 3' sequence

SEQ ID NO: 11084 - DNA, 76 bp, Artificial Sequence; identical to SEQ ID NO: 3068
  Description of Artificial Sequence: Synthetic brazil nut; 5' sequence +inner sequence + 3' sequence

SEQ ID NO: 11085 - DNA, 76 bp, Artificial Sequence; identical to SEQ ID NO: 3065
  Description of Artificial Sequence: Synthetic brazil nut; 5' sequence +inner sequence + 3' sequence

SEQ ID NO: 11086 - DNA, 76 bp, Artificial Sequence; identical to SEQ ID NO: 3311
  Description of Artificial Sequence: Synthetic brazil nut; 5' sequence +inner sequence + 3' sequence

SEQ ID NO: 11087 - DNA, 76 bp, Artificial Sequence; identical to SEQ ID NO: 3042
  Description of Artificial Sequence: Synthetic brazil nut; 5' sequence +inner sequence + 3' sequence

SEQ ID NO: 11088 - DNA, 76 bp, Artificial Sequence; identical to SEQ ID NO: 3096
  Description of Artificial Sequence: Synthetic brazil nut; 5' sequence +inner sequence + 3' sequence

SEQ ID NO: 11089 - DNA, 76 bp, Artificial Sequence; identical to SEQ ID NO: 3047
  Description of Artificial Sequence: Synthetic brazil nut; 5' sequence +inner sequence + 3' sequence

SEQ ID NO: 11090 - DNA, 76 bp, Artificial Sequence; identical to SEQ ID NO: 3092
  Description of Artificial Sequence: Synthetic brazil nut; 5' sequence +inner sequence + 3' sequence

SEQ ID NO: 11091 - DNA, 76 bp, Artificial Sequence; identical to SEQ ID NO: 3207
  Description of Artificial Sequence: Synthetic brazil nut; 5' sequence +inner sequence + 3' sequence

SEQ ID NO: 11092 - DNA, 76 bp, Artificial Sequence; identical to SEQ ID NO: 3026
  Description of Artificial Sequence: Synthetic brazil nut; 5' sequence +inner sequence + 3' sequence

SEQ ID NO: 11093 - DNA, 76 bp, Artificial Sequence; identical to SEQ ID NO: 3154
  Description of Artificial Sequence: Synthetic brazil nut; 5' sequence +inner sequence + 3' sequence

SEQ ID NO: 11094 - DNA, 76 bp, Artificial Sequence; identical to SEQ ID NO: 3091
  Description of Artificial Sequence: Synthetic brazil nut; 5' sequence +inner sequence + 3' sequence

SEQ ID NO: 11095 - DNA, 76 bp, Artificial Sequence; identical to SEQ ID NO: 3151
  Description of Artificial Sequence: Synthetic brazil nut; 5' sequence +inner sequence + 3' sequence

SEQ ID NO: 11096 - DNA, 76 bp, Artificial Sequence; identical to SEQ ID NO: 3103
  Description of Artificial Sequence: Synthetic brazil nut; 5' sequence +inner sequence + 3' sequence

SEQ ID NO: 11097 - DNA, 76 bp, Artificial Sequence; identical to SEQ ID NO: 3079
  Description of Artificial Sequence: Synthetic brazil nut; 5' sequence +inner sequence + 3' sequence

SEQ ID NO: 11098 - DNA, 76 bp, Artificial Sequence; identical to SEQ ID NO: 3122
  Description of Artificial Sequence: Synthetic brazil nut; 5' sequence +inner sequence + 3' sequence

SEQ ID NO: 11099 - DNA, 76 bp, Artificial Sequence; identical to SEQ ID NO: 3078
  Description of Artificial Sequence: Synthetic brazil nut; 5' sequence +inner sequence + 3' sequence

SEQ ID NO: 11100 - DNA, 76 bp, Artificial Sequence; identical to SEQ ID NO: 3118
  Description of Artificial Sequence: Synthetic brazil nut; 5' sequence +inner sequence + 3' sequence

SEQ ID NO: 11101 - DNA, 76 bp, Artificial Sequence; identical to SEQ ID NO: 3567
  Description of Artificial Sequence: Synthetic brazil nut; 5' sequence +inner sequence + 3' sequence

SEQ ID NO: 11102 - DNA, 76 bp, Artificial Sequence; identical to SEQ ID NO: 3257
  Description of Artificial Sequence: Synthetic brazil nut; 5' sequence +inner sequence + 3' sequence

SEQ ID NO: 11103 - DNA, 76 bp, Artificial Sequence; identical to SEQ ID NO: 3168
  Description of Artificial Sequence: Synthetic brazil nut; 5' sequence +inner sequence + 3' sequence

SEQ ID NO: 11104 - DNA, 76 bp, Artificial Sequence; identical to SEQ ID NO: 3142
  Description of Artificial Sequence: Synthetic brazil nut; 5' sequence +inner sequence + 3' sequence

SEQ ID NO: 11105 - DNA, 76 bp, Artificial Sequence; identical to SEQ ID NO: 3287
  Description of Artificial Sequence: Synthetic brazil nut; 5' sequence +inner sequence + 3' sequence

SEQ ID NO: 11106 - DNA, 76 bp, Artificial Sequence; identical to SEQ ID NO: 3247
  Description of Artificial Sequence: Synthetic brazil nut; 5' sequence +inner sequence + 3' sequence

SEQ ID NO: 11107 - DNA, 76 bp, Artificial Sequence; identical to SEQ ID NO: 3144
  Description of Artificial Sequence: Synthetic brazil nut; 5' sequence +inner sequence + 3' sequence

SEQ ID NO: 11108 - DNA, 76 bp, Artificial Sequence; identical to SEQ ID NO: 3083
  Description of Artificial Sequence: Synthetic brazil nut; 5' sequence +inner sequence + 3' sequence

SEQ ID NO: 11109 - DNA, 76 bp, Artificial Sequence; identical to SEQ ID NO: 3073
  Description of Artificial Sequence: Synthetic brazil nut; 5' sequence +inner sequence + 3' sequence

SEQ ID NO: 11110 - DNA, 76 bp, Artificial Sequence; identical to SEQ ID NO: 3100
  Description of Artificial Sequence: Synthetic brazil nut; 5' sequence +inner sequence + 3' sequence

SEQ ID NO: 11111 - DNA, 76 bp, Artificial Sequence; identical to SEQ ID NO: 3355
  Description of Artificial Sequence: Synthetic brazil nut; 5' sequence +inner sequence + 3' sequence

SEQ ID NO: 11112 - DNA, 76 bp, Artificial Sequence; identical to SEQ ID NO: 3229
  Description of Artificial Sequence: Synthetic brazil nut; 5' sequence +inner sequence + 3' sequence

SEQ ID NO: 11113 - DNA, 76 bp, Artificial Sequence; identical to SEQ ID NO: 3237
  Description of Artificial Sequence: Synthetic brazil nut; 5' sequence +inner sequence + 3' sequence

SEQ ID NO: 11114 - DNA, 76 bp, Artificial Sequence; identical to SEQ ID NO: 3233
  Description of Artificial Sequence: Synthetic brazil nut; 5' sequence +inner sequence + 3' sequence

SEQ ID NO: 11115 - DNA, 76 bp, Artificial Sequence; identical to SEQ ID NO: 3099
  Description of Artificial Sequence: Synthetic brazil nut; 5' sequence +inner sequence + 3' sequence

SEQ ID NO: 11116 - DNA, 76 bp, Artificial Sequence; identical to SEQ ID NO: 3094
  Description of Artificial Sequence: Synthetic brazil nut; 5' sequence +inner sequence + 3' sequence

SEQ ID NO: 11117 - DNA, 76 bp, Artificial Sequence; identical to SEQ ID NO: 3027
  Description of Artificial Sequence: Synthetic brazil nut; 5' sequence +inner sequence + 3' sequence

SEQ ID NO: 11118 - DNA, 76 bp, Artificial Sequence; identical to SEQ ID NO: 3179
  Description of Artificial Sequence: Synthetic brazil nut; 5' sequence +inner sequence + 3' sequence

SEQ ID NO: 11119 - DNA, 76 bp, Artificial Sequence; identical to SEQ ID NO: 3147
  Description of Artificial Sequence: Synthetic brazil nut; 5' sequence +inner sequence + 3' sequence

SEQ ID NO: 11120 - DNA, 76 bp, Artificial Sequence; identical to SEQ ID NO: 3056
  Description of Artificial Sequence: Synthetic brazil nut; 5' sequence +inner sequence + 3' sequence

SEQ ID NO: 11121 - DNA, 76 bp, Artificial Sequence; identical to SEQ ID NO: 3285
  Description of Artificial Sequence: Synthetic brazil nut; 5' sequence +inner sequence + 3' sequence

SEQ ID NO: 11122 - DNA, 76 bp, Artificial Sequence; identical to SEQ ID NO: 3115
  Description of Artificial Sequence: Synthetic brazil nut; 5' sequence +inner sequence + 3' sequence

SEQ ID NO: 11123 - DNA, 76 bp, Artificial Sequence; identical to SEQ ID NO: 3188
  Description of Artificial Sequence: Synthetic brazil nut; 5' sequence +inner sequence + 3' sequence

SEQ ID NO: 11124 - DNA, 76 bp, Artificial Sequence; identical to SEQ ID NO: 3203
  Description of Artificial Sequence: Synthetic brazil nut; 5' sequence +inner sequence + 3' sequence

SEQ ID NO: 11125 - DNA, 76 bp, Artificial Sequence; identical to SEQ ID NO: 3288
  Description of Artificial Sequence: Synthetic brazil nut; 5' sequence +inner sequence + 3' sequence

SEQ ID NO: 11126 - DNA, 76 bp, Artificial Sequence; identical to SEQ ID NO: 3155
  Description of Artificial Sequence: Synthetic brazil nut; 5' sequence +inner sequence + 3' sequence

SEQ ID NO: 11127 - DNA, 76 bp, Artificial Sequence; identical to SEQ ID NO: 3468
  Description of Artificial Sequence: Synthetic brazil nut; 5' sequence +inner sequence + 3' sequence

SEQ ID NO: 11128 - DNA, 76 bp, Artificial Sequence; identical to SEQ ID NO: 3354
  Description of Artificial Sequence: Synthetic brazil nut; 5' sequence +inner sequence + 3' sequence

SEQ ID NO: 11129 - DNA, 74 bp, Artificial Sequence; identical to SEQ ID NO: 3148
  Description of Artificial Sequence: Synthetic brazil nut; 5' sequence +inner sequence + 3' sequence

SEQ ID NO: 11130 - DNA, 76 bp, Artificial Sequence; identical to SEQ ID NO: 3264
  Description of Artificial Sequence: Synthetic brazil nut; 5' sequence +inner sequence + 3' sequence

SEQ ID NO: 11131 - DNA, 76 bp, Artificial Sequence; identical to SEQ ID NO: 3107
  Description of Artificial Sequence: Synthetic brazil nut; 5' sequence +inner sequence + 3' sequence

SEQ ID NO: 11132 - DNA, 76 bp, Artificial Sequence; identical to SEQ ID NO: 3282
  Description of Artificial Sequence: Synthetic brazil nut; 5' sequence +inner sequence + 3' sequence

SEQ ID NO: 11133 - DNA, 76 bp, Artificial Sequence; identical to SEQ ID NO: 3360
  Description of Artificial Sequence: Synthetic brazil nut; 5' sequence +inner sequence + 3' sequence

SEQ ID NO: 11134 - DNA, 76 bp, Artificial Sequence; identical to SEQ ID NO: 3470
  Description of Artificial Sequence: Synthetic brazil nut; 5' sequence +inner sequence + 3' sequence

SEQ ID NO: 11135 - DNA, 76 bp, Artificial Sequence; identical to SEQ ID NO: 3145
  Description of Artificial Sequence: Synthetic brazil nut; 5' sequence +inner sequence + 3' sequence

SEQ ID NO: 11136 - DNA, 76 bp, Artificial Sequence; identical to SEQ ID NO: 3161
  Description of Artificial Sequence: Synthetic brazil nut; 5' sequence +inner sequence + 3' sequence

SEQ ID NO: 11137 - DNA, 76 bp, Artificial Sequence; identical to SEQ ID NO: 3095
  Description of Artificial Sequence: Synthetic brazil nut; 5' sequence +inner sequence + 3' sequence

SEQ ID NO: 11138 - DNA, 76 bp, Artificial Sequence; identical to SEQ ID NO: 3071
  Description of Artificial Sequence: Synthetic brazil nut; 5' sequence +inner sequence + 3' sequence

SEQ ID NO: 11139 - DNA, 76 bp, Artificial Sequence; identical to SEQ ID NO: 7205
  Description of Artificial Sequence: Synthetic brazil nut; 5' sequence +inner sequence + 3' sequence

SEQ ID NO: 11140 - DNA, 76 bp, Artificial Sequence; identical to SEQ ID NO: 3245
  Description of Artificial Sequence: Synthetic brazil nut; 5' sequence +inner sequence + 3' sequence

SEQ ID NO: 11141 - DNA, 76 bp, Artificial Sequence; identical to SEQ ID NO: 3208
  Description of Artificial Sequence: Synthetic brazil nut; 5' sequence +inner sequence + 3' sequence

SEQ ID NO: 11142 - DNA, 76 bp, Artificial Sequence; identical to SEQ ID NO: 3230
  Description of Artificial Sequence: Synthetic brazil nut; 5' sequence +inner sequence + 3' sequence

SEQ ID NO: 11143 - DNA, 76 bp, Artificial Sequence; identical to SEQ ID NO: 3164
  Description of Artificial Sequence: Synthetic brazil nut; 5' sequence +inner sequence + 3' sequence

SEQ ID NO: 11144 - DNA, 76 bp, Artificial Sequence; identical to SEQ ID NO: 3146
  Description of Artificial Sequence: Synthetic brazil nut; 5' sequence +inner sequence + 3' sequence

SEQ ID NO: 11145 - DNA, 76 bp, Artificial Sequence; identical to SEQ ID NO: 3125
  Description of Artificial Sequence: Synthetic brazil nut; 5' sequence +inner sequence + 3' sequence

SEQ ID NO: 11146 - DNA, 76 bp, Artificial Sequence; identical to SEQ ID NO: 3174
  Description of Artificial Sequence: Synthetic brazil nut; 5' sequence +inner sequence + 3' sequence

SEQ ID NO: 11147 - DNA, 76 bp, Artificial Sequence; identical to SEQ ID NO: 3196
  Description of Artificial Sequence: Synthetic brazil nut; 5' sequence +inner sequence + 3' sequence

SEQ ID NO: 11148 - DNA, 76 bp, Artificial Sequence; identical to SEQ ID NO: 3293
  Description of Artificial Sequence: Synthetic brazil nut; 5' sequence +inner sequence + 3' sequence

SEQ ID NO: 11149 - DNA, 76 bp, Artificial Sequence; identical to SEQ ID NO: 3105
  Description of Artificial Sequence: Synthetic brazil nut; 5' sequence +inner sequence + 3' sequence

SEQ ID NO: 11150 - DNA, 76 bp, Artificial Sequence; identical to SEQ ID NO: 3436
  Description of Artificial Sequence: Synthetic brazil nut; 5' sequence +inner sequence + 3' sequence

SEQ ID NO: 11151 - DNA, 76 bp, Artificial Sequence; identical to SEQ ID NO: 3240
  Description of Artificial Sequence: Synthetic brazil nut; 5' sequence +inner sequence + 3' sequence

SEQ ID NO: 11152 - DNA, 76 bp, Artificial Sequence; identical to SEQ ID NO: 3127
  Description of Artificial Sequence: Synthetic brazil nut; 5' sequence +inner sequence + 3' sequence

SEQ ID NO: 11153 - DNA, 76 bp, Artificial Sequence; identical to SEQ ID NO: 3113
  Description of Artificial Sequence: Synthetic brazil nut; 5' sequence +inner sequence + 3' sequence

SEQ ID NO: 11154 - DNA, 76 bp, Artificial Sequence; identical to SEQ ID NO: 3283
  Description of Artificial Sequence: Synthetic brazil nut; 5' sequence +inner sequence + 3' sequence

SEQ ID NO: 11155 - DNA, 76 bp, Artificial Sequence; identical to SEQ ID NO: 3111
  Description of Artificial Sequence: Synthetic brazil nut; 5' sequence +inner sequence + 3' sequence

SEQ ID NO: 11156 - DNA, 76 bp, Artificial Sequence; identical to SEQ ID NO: 3552
  Description of Artificial Sequence: Synthetic brazil nut; 5' sequence +inner sequence + 3' sequence

SEQ ID NO: 11157 - DNA, 76 bp, Artificial Sequence; identical to SEQ ID NO: 3153
  Description of Artificial Sequence: Synthetic brazil nut; 5' sequence +inner sequence + 3' sequence

SEQ ID NO: 11158 - DNA, 76 bp, Artificial Sequence; identical to SEQ ID NO: 3692
  Description of Artificial Sequence: Synthetic brazil nut; 5' sequence +inner sequence + 3' sequence

SEQ ID NO: 11159 - DNA, 76 bp, Artificial Sequence; identical to SEQ ID NO: 3140
  Description of Artificial Sequence: Synthetic brazil nut; 5' sequence +inner sequence + 3' sequence

SEQ ID NO: 11160 - DNA, 76 bp, Artificial Sequence; identical to SEQ ID NO: 3253
  Description of Artificial Sequence: Synthetic brazil nut; 5' sequence +inner sequence + 3' sequence

SEQ ID NO: 11161 - DNA, 76 bp, Artificial Sequence; identical to SEQ ID NO: 3108
  Description of Artificial Sequence: Synthetic brazil nut; 5' sequence +inner sequence + 3' sequence

SEQ ID NO: 11162 - DNA, 76 bp, Artificial Sequence; identical to SEQ ID NO: 3371
  Description of Artificial Sequence: Synthetic brazil nut; 5' sequence +inner sequence + 3' sequence

SEQ ID NO: 11163 - DNA, 76 bp, Artificial Sequence; identical to SEQ ID NO: 3385
  Description of Artificial Sequence: Synthetic brazil nut; 5' sequence +inner sequence + 3' sequence

SEQ ID NO: 11164 - DNA, 76 bp, Artificial Sequence; identical to SEQ ID NO: 3163
  Description of Artificial Sequence: Synthetic brazil nut; 5' sequence +inner sequence + 3' sequence

SEQ ID NO: 11165 - DNA, 76 bp, Artificial Sequence; identical to SEQ ID NO: 3086
  Description of Artificial Sequence: Synthetic brazil nut; 5' sequence +inner sequence + 3' sequence

SEQ ID NO: 11166 - DNA, 76 bp, Artificial Sequence; identical to SEQ ID NO: 3270
  Description of Artificial Sequence: Synthetic brazil nut; 5' sequence +inner sequence + 3' sequence

SEQ ID NO: 11167 - DNA, 76 bp, Artificial Sequence; identical to SEQ ID NO: 3290
  Description of Artificial Sequence: Synthetic brazil nut; 5' sequence +inner sequence + 3' sequence

SEQ ID NO: 11168 - DNA, 76 bp, Artificial Sequence; identical to SEQ ID NO: 3184
  Description of Artificial Sequence: Synthetic brazil nut; 5' sequence +inner sequence + 3' sequence

SEQ ID NO: 11169 - DNA, 76 bp, Artificial Sequence; identical to SEQ ID NO: 3171
  Description of Artificial Sequence: Synthetic brazil nut; 5' sequence +inner sequence + 3' sequence

SEQ ID NO: 11170 - DNA, 76 bp, Artificial Sequence; identical to SEQ ID NO: 3269
  Description of Artificial Sequence: Synthetic brazil nut; 5' sequence +inner sequence + 3' sequence

SEQ ID NO: 11171 - DNA, 76 bp, Artificial Sequence; identical to SEQ ID NO: 3673
  Description of Artificial Sequence: Synthetic brazil nut; 5' sequence +inner sequence + 3' sequence

SEQ ID NO: 11172 - DNA, 76 bp, Artificial Sequence; identical to SEQ ID NO: 3110
  Description of Artificial Sequence: Synthetic brazil nut; 5' sequence +inner sequence + 3' sequence

SEQ ID NO: 11173 - DNA, 76 bp, Artificial Sequence; identical to SEQ ID NO: 3362
  Description of Artificial Sequence: Synthetic brazil nut; 5' sequence +inner sequence + 3' sequence

SEQ ID NO: 11174 - DNA, 76 bp, Artificial Sequence; identical to SEQ ID NO: 3106
  Description of Artificial Sequence: Synthetic brazil nut; 5' sequence +inner sequence + 3' sequence

SEQ ID NO: 11175 - DNA, 76 bp, Artificial Sequence; identical to SEQ ID NO: 3198
  Description of Artificial Sequence: Synthetic brazil nut; 5' sequence +inner sequence + 3' sequence

SEQ ID NO: 11176 - DNA, 76 bp, Artificial Sequence; identical to SEQ ID NO: 3069
  Description of Artificial Sequence: Synthetic brazil nut; 5' sequence +inner sequence + 3' sequence

SEQ ID NO: 11177 - DNA, 76 bp, Artificial Sequence; identical to SEQ ID NO: 3321
  Description of Artificial Sequence: Synthetic brazil nut; 5' sequence +inner sequence + 3' sequence

SEQ ID NO: 11178 - DNA, 76 bp, Artificial Sequence; identical to SEQ ID NO: 3205
  Description of Artificial Sequence: Synthetic brazil nut; 5' sequence +inner sequence + 3' sequence

SEQ ID NO: 11179 - DNA, 76 bp, Artificial Sequence; identical to SEQ ID NO: 3541
  Description of Artificial Sequence: Synthetic brazil nut; 5' sequence +inner sequence + 3' sequence

SEQ ID NO: 11180 - DNA, 76 bp, Artificial Sequence; identical to SEQ ID NO: 3089
  Description of Artificial Sequence: Synthetic brazil nut; 5' sequence +inner sequence + 3' sequence

SEQ ID NO: 11181 - DNA, 76 bp, Artificial Sequence; identical to SEQ ID NO: 3157
  Description of Artificial Sequence: Synthetic brazil nut; 5' sequence +inner sequence + 3' sequence

SEQ ID NO: 11182 - DNA, 76 bp, Artificial Sequence; identical to SEQ ID NO: 3312
  Description of Artificial Sequence: Synthetic brazil nut; 5' sequence +inner sequence + 3' sequence

SEQ ID NO: 11183 - DNA, 77 bp, Artificial Sequence; identical to SEQ ID NO: 3150
  Description of Artificial Sequence: Synthetic brazil nut; 5' sequence +inner sequence + 3' sequence

SEQ ID NO: 11184 - DNA, 76 bp, Artificial Sequence; identical to SEQ ID NO: 3200
  Description of Artificial Sequence: Synthetic brazil nut; 5' sequence +inner sequence + 3' sequence

SEQ ID NO: 11185 - DNA, 76 bp, Artificial Sequence; identical to SEQ ID NO: 3377
  Description of Artificial Sequence: Synthetic brazil nut; 5' sequence +inner sequence + 3' sequence

SEQ ID NO: 11186 - DNA, 76 bp, Artificial Sequence; identical to SEQ ID NO: 3522
  Description of Artificial Sequence: Synthetic brazil nut; 5' sequence +inner sequence + 3' sequence

SEQ ID NO: 11187 - DNA, 76 bp, Artificial Sequence; identical to SEQ ID NO: 3347
  Description of Artificial Sequence: Synthetic brazil nut; 5' sequence +inner sequence + 3' sequence

SEQ ID NO: 11188 - DNA, 76 bp, Artificial Sequence; identical to SEQ ID NO: 3201
  Description of Artificial Sequence: Synthetic brazil nut; 5' sequence +inner sequence + 3' sequence

SEQ ID NO: 11189 - DNA, 76 bp, Artificial Sequence; identical to SEQ ID NO: 3062
  Description of Artificial Sequence: Synthetic brazil nut; 5' sequence +inner sequence + 3' sequence

SEQ ID NO: 11190 - DNA, 76 bp, Artificial Sequence; identical to SEQ ID NO: 3438
  Description of Artificial Sequence: Synthetic brazil nut; 5' sequence +inner sequence + 3' sequence

SEQ ID NO: 11191 - DNA, 76 bp, Artificial Sequence; identical to SEQ ID NO: 3308
  Description of Artificial Sequence: Synthetic brazil nut; 5' sequence +inner sequence + 3' sequence

SEQ ID NO: 11192 - DNA, 76 bp, Artificial Sequence; identical to SEQ ID NO: 3175
  Description of Artificial Sequence: Synthetic brazil nut; 5' sequence +inner sequence + 3' sequence

SEQ ID NO: 11193 - DNA, 76 bp, Artificial Sequence; identical to SEQ ID NO: 3186
  Description of Artificial Sequence: Synthetic brazil nut; 5' sequence +inner sequence + 3' sequence

SEQ ID NO: 11194 - DNA, 76 bp, Artificial Sequence; identical to SEQ ID NO: 3158
  Description of Artificial Sequence: Synthetic brazil nut; 5' sequence +inner sequence + 3' sequence

SEQ ID NO: 11195 - DNA, 76 bp, Artificial Sequence; identical to SEQ ID NO: 7229
  Description of Artificial Sequence: Synthetic brazil nut; 5' sequence +inner sequence + 3' sequence

SEQ ID NO: 11196 - DNA, 76 bp, Artificial Sequence; identical to SEQ ID NO: 3134
  Description of Artificial Sequence: Synthetic brazil nut; 5' sequence +inner sequence + 3' sequence

SEQ ID NO: 11197 - DNA, 76 bp, Artificial Sequence; identical to SEQ ID NO: 3159
  Description of Artificial Sequence: Synthetic brazil nut; 5' sequence +inner sequence + 3' sequence

SEQ ID NO: 11198 - DNA, 76 bp, Artificial Sequence; identical to SEQ ID NO: 3132
  Description of Artificial Sequence: Synthetic brazil nut; 5' sequence +inner sequence + 3' sequence

SEQ ID NO: 11199 - DNA, 76 bp, Artificial Sequence; identical to SEQ ID NO: 3353
  Description of Artificial Sequence: Synthetic brazil nut; 5' sequence +inner sequence + 3' sequence

SEQ ID NO: 11200 - DNA, 76 bp, Artificial Sequence; identical to SEQ ID NO: 3165
  Description of Artificial Sequence: Synthetic brazil nut; 5' sequence +inner sequence + 3' sequence

SEQ ID NO: 11201 - DNA, 76 bp, Artificial Sequence; identical to SEQ ID NO: 3448
  Description of Artificial Sequence: Synthetic brazil nut; 5' sequence +inner sequence + 3' sequence

SEQ ID NO: 11202 - DNA, 77 bp, Artificial Sequence; identical to SEQ ID NO: 3221
  Description of Artificial Sequence: Synthetic brazil nut; 5' sequence +inner sequence + 3' sequence

SEQ ID NO: 11203 - DNA, 76 bp, Artificial Sequence; identical to SEQ ID NO: 3109
  Description of Artificial Sequence: Synthetic brazil nut; 5' sequence +inner sequence + 3' sequence

SEQ ID NO: 11204 - DNA, 77 bp, Artificial Sequence; identical to SEQ ID NO: 3258
  Description of Artificial Sequence: Synthetic brazil nut; 5' sequence +inner sequence + 3' sequence

SEQ ID NO: 11205 - DNA, 76 bp, Artificial Sequence; identical to SEQ ID NO: 3654
  Description of Artificial Sequence: Synthetic brazil nut; 5' sequence +inner sequence + 3' sequence

SEQ ID NO: 11206 - DNA, 76 bp, Artificial Sequence; identical to SEQ ID NO: 3299
  Description of Artificial Sequence: Synthetic brazil nut; 5' sequence +inner sequence + 3' sequence

SEQ ID NO: 11207 - DNA, 76 bp, Artificial Sequence; identical to SEQ ID NO: 3149
  Description of Artificial Sequence: Synthetic brazil nut; 5' sequence +inner sequence + 3' sequence

SEQ ID NO: 11208 - DNA, 76 bp, Artificial Sequence; identical to SEQ ID NO: 3138
  Description of Artificial Sequence: Synthetic brazil nut; 5' sequence +inner sequence + 3' sequence

SEQ ID NO: 11209 - DNA, 76 bp, Artificial Sequence; identical to SEQ ID NO: 3329
  Description of Artificial Sequence: Synthetic brazil nut; 5' sequence +inner sequence + 3' sequence

SEQ ID NO: 11210 - DNA, 76 bp, Artificial Sequence; identical to SEQ ID NO: 3266
  Description of Artificial Sequence: Synthetic brazil nut; 5' sequence +inner sequence + 3' sequence

SEQ ID NO: 11211 - DNA, 76 bp, Artificial Sequence; identical to SEQ ID NO: 3172
  Description of Artificial Sequence: Synthetic brazil nut; 5' sequence +inner sequence + 3' sequence

SEQ ID NO: 11212 - DNA, 76 bp, Artificial Sequence; identical to SEQ ID NO: 3234
  Description of Artificial Sequence: Synthetic brazil nut; 5' sequence +inner sequence + 3' sequence

SEQ ID NO: 11213 - DNA, 76 bp, Artificial Sequence; identical to SEQ ID NO: 3123
  Description of Artificial Sequence: Synthetic brazil nut; 5' sequence +inner sequence + 3' sequence

SEQ ID NO: 11214 - DNA, 76 bp, Artificial Sequence; identical to SEQ ID NO: 3075
  Description of Artificial Sequence: Synthetic brazil nut; 5' sequence +inner sequence + 3' sequence

SEQ ID NO: 11215 - DNA, 76 bp, Artificial Sequence; identical to SEQ ID NO: 3215
  Description of Artificial Sequence: Synthetic brazil nut; 5' sequence +inner sequence + 3' sequence

SEQ ID NO: 11216 - DNA, 76 bp, Artificial Sequence; identical to SEQ ID NO: 3406
  Description of Artificial Sequence: Synthetic brazil nut; 5' sequence +inner sequence + 3' sequence

SEQ ID NO: 11217 - DNA, 76 bp, Artificial Sequence; identical to SEQ ID NO: 3139
  Description of Artificial Sequence: Synthetic brazil nut; 5' sequence +inner sequence + 3' sequence

SEQ ID NO: 11218 - DNA, 76 bp, Artificial Sequence; identical to SEQ ID NO: 3104
  Description of Artificial Sequence: Synthetic brazil nut; 5' sequence +inner sequence + 3' sequence

SEQ ID NO: 11219 - DNA, 76 bp, Artificial Sequence; identical to SEQ ID NO: 3121
  Description of Artificial Sequence: Synthetic brazil nut; 5' sequence +inner sequence + 3' sequence

SEQ ID NO: 11220 - DNA, 76 bp, Artificial Sequence; identical to SEQ ID NO: 3579
  Description of Artificial Sequence: Synthetic brazil nut; 5' sequence +inner sequence + 3' sequence

SEQ ID NO: 11221 - DNA, 76 bp, Artificial Sequence; identical to SEQ ID NO: 3102
  Description of Artificial Sequence: Synthetic brazil nut; 5' sequence +inner sequence + 3' sequence

SEQ ID NO: 11222 - DNA, 76 bp, Artificial Sequence; identical to SEQ ID NO: 3268
  Description of Artificial Sequence: Synthetic brazil nut; 5' sequence +inner sequence + 3' sequence

SEQ ID NO: 11223 - DNA, 76 bp, Artificial Sequence; identical to SEQ ID NO: 3429
  Description of Artificial Sequence: Synthetic brazil nut; 5' sequence +inner sequence + 3' sequence

SEQ ID NO: 11224 - DNA, 76 bp, Artificial Sequence; identical to SEQ ID NO: 3389
  Description of Artificial Sequence: Synthetic brazil nut; 5' sequence +inner sequence + 3' sequence

SEQ ID NO: 11225 - DNA, 76 bp, Artificial Sequence; identical to SEQ ID NO: 7449
  Description of Artificial Sequence: Synthetic brazil nut; 5' sequence +inner sequence + 3' sequence

SEQ ID NO: 11226 - DNA, 76 bp, Artificial Sequence; identical to SEQ ID NO: 3454
  Description of Artificial Sequence: Synthetic brazil nut; 5' sequence +inner sequence + 3' sequence

SEQ ID NO: 11227 - DNA, 76 bp, Artificial Sequence; identical to SEQ ID NO: 3232
  Description of Artificial Sequence: Synthetic brazil nut; 5' sequence +inner sequence + 3' sequence

SEQ ID NO: 11228 - DNA, 76 bp, Artificial Sequence; identical to SEQ ID NO: 3191
  Description of Artificial Sequence: Synthetic brazil nut; 5' sequence +inner sequence + 3' sequence

SEQ ID NO: 11229 - DNA, 76 bp, Artificial Sequence; identical to SEQ ID NO: 3527
  Description of Artificial Sequence: Synthetic brazil nut; 5' sequence +inner sequence + 3' sequence

SEQ ID NO: 11230 - DNA, 76 bp, Artificial Sequence; identical to SEQ ID NO: 3630
  Description of Artificial Sequence: Synthetic brazil nut; 5' sequence +inner sequence + 3' sequence

SEQ ID NO: 11231 - DNA, 76 bp, Artificial Sequence; identical to SEQ ID NO: 3156
  Description of Artificial Sequence: Synthetic brazil nut; 5' sequence +inner sequence + 3' sequence

SEQ ID NO: 11232 - DNA, 76 bp, Artificial Sequence; identical to SEQ ID NO: 3645
  Description of Artificial Sequence: Synthetic brazil nut; 5' sequence +inner sequence + 3' sequence

SEQ ID NO: 11233 - DNA, 76 bp, Artificial Sequence; identical to SEQ ID NO: 3369
  Description of Artificial Sequence: Synthetic brazil nut; 5' sequence +inner sequence + 3' sequence

SEQ ID NO: 11234 - DNA, 76 bp, Artificial Sequence; identical to SEQ ID NO: 3194
  Description of Artificial Sequence: Synthetic brazil nut; 5' sequence +inner sequence + 3' sequence

SEQ ID NO: 11235 - DNA, 77 bp, Artificial Sequence; identical to SEQ ID NO: 3250
  Description of Artificial Sequence: Synthetic brazil nut; 5' sequence +inner sequence + 3' sequence

SEQ ID NO: 11236 - DNA, 76 bp, Artificial Sequence; identical to SEQ ID NO: 7376
  Description of Artificial Sequence: Synthetic brazil nut; 5' sequence +inner sequence + 3' sequence

SEQ ID NO: 11237 - DNA, 76 bp, Artificial Sequence; identical to SEQ ID NO: 3439
  Description of Artificial Sequence: Synthetic brazil nut; 5' sequence +inner sequence + 3' sequence

SEQ ID NO: 11238 - DNA, 76 bp, Artificial Sequence; identical to SEQ ID NO: 3570
  Description of Artificial Sequence: Synthetic brazil nut; 5' sequence +inner sequence + 3' sequence

SEQ ID NO: 11239 - DNA, 76 bp, Artificial Sequence; identical to SEQ ID NO: 3352
  Description of Artificial Sequence: Synthetic brazil nut; 5' sequence +inner sequence + 3' sequence

SEQ ID NO: 11240 - DNA, 76 bp, Artificial Sequence; identical to SEQ ID NO: 3243
  Description of Artificial Sequence: Synthetic brazil nut; 5' sequence +inner sequence + 3' sequence

SEQ ID NO: 11241 - DNA, 76 bp, Artificial Sequence; identical to SEQ ID NO: 3367
  Description of Artificial Sequence: Synthetic brazil nut; 5' sequence +inner sequence + 3' sequence

SEQ ID NO: 11242 - DNA, 76 bp, Artificial Sequence; identical to SEQ ID NO: 3341
  Description of Artificial Sequence: Synthetic brazil nut; 5' sequence +inner sequence + 3' sequence

SEQ ID NO: 11243 - DNA, 76 bp, Artificial Sequence; identical to SEQ ID NO: 3262
  Description of Artificial Sequence: Synthetic brazil nut; 5' sequence +inner sequence + 3' sequence

SEQ ID NO: 11244 - DNA, 76 bp, Artificial Sequence; identical to SEQ ID NO: 3085
  Description of Artificial Sequence: Synthetic brazil nut; 5' sequence +inner sequence + 3' sequence

SEQ ID NO: 11245 - DNA, 76 bp, Artificial Sequence; identical to SEQ ID NO: 3359
  Description of Artificial Sequence: Synthetic brazil nut; 5' sequence +inner sequence + 3' sequence

SEQ ID NO: 11246 - DNA, 76 bp, Artificial Sequence; identical to SEQ ID NO: 3190
  Description of Artificial Sequence: Synthetic brazil nut; 5' sequence +inner sequence + 3' sequence

SEQ ID NO: 11247 - DNA, 76 bp, Artificial Sequence; identical to SEQ ID NO: 7230
  Description of Artificial Sequence: Synthetic brazil nut; 5' sequence +inner sequence + 3' sequence

SEQ ID NO: 11248 - DNA, 76 bp, Artificial Sequence; identical to SEQ ID NO: 3116
  Description of Artificial Sequence: Synthetic brazil nut; 5' sequence +inner sequence + 3' sequence

SEQ ID NO: 11249 - DNA, 76 bp, Artificial Sequence; identical to SEQ ID NO: 3532
  Description of Artificial Sequence: Synthetic brazil nut; 5' sequence +inner sequence + 3' sequence

SEQ ID NO: 11250 - DNA, 76 bp, Artificial Sequence; identical to SEQ ID NO: 3336
  Description of Artificial Sequence: Synthetic brazil nut; 5' sequence +inner sequence + 3' sequence

SEQ ID NO: 11251 - DNA, 76 bp, Artificial Sequence; identical to SEQ ID NO: 3401
  Description of Artificial Sequence: Synthetic brazil nut; 5' sequence +inner sequence + 3' sequence

SEQ ID NO: 11252 - DNA, 76 bp, Artificial Sequence; identical to SEQ ID NO: 3553
  Description of Artificial Sequence: Synthetic brazil nut; 5' sequence +inner sequence + 3' sequence

SEQ ID NO: 11253 - DNA, 76 bp, Artificial Sequence; identical to SEQ ID NO: 3696
  Description of Artificial Sequence: Synthetic brazil nut; 5' sequence +inner sequence + 3' sequence

SEQ ID NO: 11254 - DNA, 76 bp, Artificial Sequence; identical to SEQ ID NO: 3222
  Description of Artificial Sequence: Synthetic brazil nut; 5' sequence +inner sequence + 3' sequence

SEQ ID NO: 11255 - DNA, 76 bp, Artificial Sequence; identical to SEQ ID NO: 3634
  Description of Artificial Sequence: Synthetic brazil nut; 5' sequence +inner sequence + 3' sequence

SEQ ID NO: 11256 - DNA, 76 bp, Artificial Sequence; identical to SEQ ID NO: 3496
  Description of Artificial Sequence: Synthetic brazil nut; 5' sequence +inner sequence + 3' sequence

SEQ ID NO: 11257 - DNA, 76 bp, Artificial Sequence; identical to SEQ ID NO: 3195
  Description of Artificial Sequence: Synthetic brazil nut; 5' sequence +inner sequence + 3' sequence

SEQ ID NO: 11258 - DNA, 76 bp, Artificial Sequence; identical to SEQ ID NO: 3160
  Description of Artificial Sequence: Synthetic brazil nut; 5' sequence +inner sequence + 3' sequence

SEQ ID NO: 11259 - DNA, 76 bp, Artificial Sequence; identical to SEQ ID NO: 3204
  Description of Artificial Sequence: Synthetic brazil nut; 5' sequence +inner sequence + 3' sequence

SEQ ID NO: 11260 - DNA, 76 bp, Artificial Sequence; identical to SEQ ID NO: 3309
  Description of Artificial Sequence: Synthetic brazil nut; 5' sequence +inner sequence + 3' sequence

SEQ ID NO: 11261 - DNA, 76 bp, Artificial Sequence; identical to SEQ ID NO: 3585
  Description of Artificial Sequence: Synthetic brazil nut; 5' sequence +inner sequence + 3' sequence

SEQ ID NO: 11262 - DNA, 76 bp, Artificial Sequence; identical to SEQ ID NO: 7336
  Description of Artificial Sequence: Synthetic brazil nut; 5' sequence +inner sequence + 3' sequence

SEQ ID NO: 11263 - DNA, 76 bp, Artificial Sequence; identical to SEQ ID NO: 3072
  Description of Artificial Sequence: Synthetic brazil nut; 5' sequence +inner sequence + 3' sequence

SEQ ID NO: 11264 - DNA, 76 bp, Artificial Sequence; identical to SEQ ID NO: 3187
  Description of Artificial Sequence: Synthetic brazil nut; 5' sequence +inner sequence + 3' sequence

SEQ ID NO: 11265 - DNA, 76 bp, Artificial Sequence; identical to SEQ ID NO: 3228
  Description of Artificial Sequence: Synthetic brazil nut; 5' sequence +inner sequence + 3' sequence

SEQ ID NO: 11266 - DNA, 76 bp, Artificial Sequence; identical to SEQ ID NO: 3953
  Description of Artificial Sequence: Synthetic brazil nut; 5' sequence +inner sequence + 3' sequence

SEQ ID NO: 11267 - DNA, 76 bp, Artificial Sequence; identical to SEQ ID NO: 3373
  Description of Artificial Sequence: Synthetic brazil nut; 5' sequence +inner sequence + 3' sequence

SEQ ID NO: 11268 - DNA, 76 bp, Artificial Sequence; identical to SEQ ID NO: 3217
  Description of Artificial Sequence: Synthetic brazil nut; 5' sequence +inner sequence + 3' sequence

SEQ ID NO: 11269 - DNA, 76 bp, Artificial Sequence; identical to SEQ ID NO: 3376
  Description of Artificial Sequence: Synthetic brazil nut; 5' sequence +inner sequence + 3' sequence

SEQ ID NO: 11270 - DNA, 76 bp, Artificial Sequence; identical to SEQ ID NO: 3224
  Description of Artificial Sequence: Synthetic brazil nut; 5' sequence +inner sequence + 3' sequence

SEQ ID NO: 11271 - DNA, 76 bp, Artificial Sequence; identical to SEQ ID NO: 3524
  Description of Artificial Sequence: Synthetic brazil nut; 5' sequence +inner sequence + 3' sequence

SEQ ID NO: 11272 - DNA, 76 bp, Artificial Sequence; identical to SEQ ID NO: 3166
  Description of Artificial Sequence: Synthetic brazil nut; 5' sequence +inner sequence + 3' sequence

SEQ ID NO: 11273 - DNA, 76 bp, Artificial Sequence; identical to SEQ ID NO: 3392
  Description of Artificial Sequence: Synthetic brazil nut; 5' sequence +inner sequence + 3' sequence

SEQ ID NO: 11274 - DNA, 76 bp, Artificial Sequence; identical to SEQ ID NO: 3098
  Description of Artificial Sequence: Synthetic brazil nut; 5' sequence +inner sequence + 3' sequence

SEQ ID NO: 11275 - DNA, 76 bp, Artificial Sequence; identical to SEQ ID NO: 3671
  Description of Artificial Sequence: Synthetic brazil nut; 5' sequence +inner sequence + 3' sequence

SEQ ID NO: 11276 - DNA, 76 bp, Artificial Sequence; identical to SEQ ID NO: 3152
  Description of Artificial Sequence: Synthetic brazil nut; 5' sequence +inner sequence + 3' sequence

SEQ ID NO: 11277 - DNA, 76 bp, Artificial Sequence; identical to SEQ ID NO: 3506
  Description of Artificial Sequence: Synthetic brazil nut; 5' sequence +inner sequence + 3' sequence

SEQ ID NO: 11278 - DNA, 76 bp, Artificial Sequence; identical to SEQ ID NO: 3192
  Description of Artificial Sequence: Synthetic brazil nut; 5' sequence +inner sequence + 3' sequence

SEQ ID NO: 11279 - DNA, 76 bp, Artificial Sequence; identical to SEQ ID NO: 3556
  Description of Artificial Sequence: Synthetic brazil nut; 5' sequence +inner sequence + 3' sequence

SEQ ID NO: 11280 - DNA, 76 bp, Artificial Sequence; identical to SEQ ID NO: 3305
  Description of Artificial Sequence: Synthetic brazil nut; 5' sequence +inner sequence + 3' sequence

SEQ ID NO: 11281 - DNA, 76 bp, Artificial Sequence; identical to SEQ ID NO: 3090
  Description of Artificial Sequence: Synthetic brazil nut; 5' sequence +inner sequence + 3' sequence

SEQ ID NO: 11282 - DNA, 76 bp, Artificial Sequence; identical to SEQ ID NO: 3540
  Description of Artificial Sequence: Synthetic brazil nut; 5' sequence +inner sequence + 3' sequence

SEQ ID NO: 11283 - DNA, 76 bp, Artificial Sequence; identical to SEQ ID NO: 3323
  Description of Artificial Sequence: Synthetic brazil nut; 5' sequence +inner sequence + 3' sequence

SEQ ID NO: 11284 - DNA, 76 bp, Artificial Sequence; identical to SEQ ID NO: 3365
  Description of Artificial Sequence: Synthetic brazil nut; 5' sequence +inner sequence + 3' sequence

SEQ ID NO: 11285 - DNA, 76 bp, Artificial Sequence; identical to SEQ ID NO: 3572
  Description of Artificial Sequence: Synthetic brazil nut; 5' sequence +inner sequence + 3' sequence

SEQ ID NO: 11286 - DNA, 76 bp, Artificial Sequence; identical to SEQ ID NO: 3529
  Description of Artificial Sequence: Synthetic brazil nut; 5' sequence +inner sequence + 3' sequence

SEQ ID NO: 11287 - DNA, 76 bp, Artificial Sequence; identical to SEQ ID NO: 3481
  Description of Artificial Sequence: Synthetic brazil nut; 5' sequence +inner sequence + 3' sequence

SEQ ID NO: 11288 - DNA, 74 bp, Artificial Sequence; identical to SEQ ID NO: 3241
  Description of Artificial Sequence: Synthetic brazil nut; 5' sequence +inner sequence + 3' sequence

SEQ ID NO: 11289 - DNA, 76 bp, Artificial Sequence; identical to SEQ ID NO: 3511
  Description of Artificial Sequence: Synthetic brazil nut; 5' sequence +inner sequence + 3' sequence

SEQ ID NO: 11290 - DNA, 76 bp, Artificial Sequence; identical to SEQ ID NO: 3343
  Description of Artificial Sequence: Synthetic brazil nut; 5' sequence +inner sequence + 3' sequence

SEQ ID NO: 11291 - DNA, 76 bp, Artificial Sequence; identical to SEQ ID NO: 3613
  Description of Artificial Sequence: Synthetic brazil nut; 5' sequence +inner sequence + 3' sequence

SEQ ID NO: 11292 - DNA, 76 bp, Artificial Sequence; identical to SEQ ID NO: 3246
  Description of Artificial Sequence: Synthetic brazil nut; 5' sequence +inner sequence + 3' sequence

SEQ ID NO: 11293 - DNA, 76 bp, Artificial Sequence; identical to SEQ ID NO: 3611
  Description of Artificial Sequence: Synthetic brazil nut; 5' sequence +inner sequence + 3' sequence

SEQ ID NO: 11294 - DNA, 76 bp, Artificial Sequence; identical to SEQ ID NO: 3182
  Description of Artificial Sequence: Synthetic brazil nut; 5' sequence +inner sequence + 3' sequence

SEQ ID NO: 11295 - DNA, 76 bp, Artificial Sequence; identical to SEQ ID NO: 3413
  Description of Artificial Sequence: Synthetic brazil nut; 5' sequence +inner sequence + 3' sequence

SEQ ID NO: 11296 - DNA, 76 bp, Artificial Sequence; identical to SEQ ID NO: 3450
  Description of Artificial Sequence: Synthetic brazil nut; 5' sequence +inner sequence + 3' sequence

SEQ ID NO: 11297 - DNA, 76 bp, Artificial Sequence; identical to SEQ ID NO: 3485
  Description of Artificial Sequence: Synthetic brazil nut; 5' sequence +inner sequence + 3' sequence

SEQ ID NO: 11298 - DNA, 76 bp, Artificial Sequence; identical to SEQ ID NO: 3783
  Description of Artificial Sequence: Synthetic brazil nut; 5' sequence +inner sequence + 3' sequence

SEQ ID NO: 11299 - DNA, 76 bp, Artificial Sequence; identical to SEQ ID NO: 3310
  Description of Artificial Sequence: Synthetic brazil nut; 5' sequence +inner sequence + 3' sequence

SEQ ID NO: 11300 - DNA, 76 bp, Artificial Sequence; identical to SEQ ID NO: 3178
  Description of Artificial Sequence: Synthetic brazil nut; 5' sequence +inner sequence + 3' sequence

SEQ ID NO: 11301 - DNA, 76 bp, Artificial Sequence; identical to SEQ ID NO: 3520
  Description of Artificial Sequence: Synthetic brazil nut; 5' sequence +inner sequence + 3' sequence

SEQ ID NO: 11302 - DNA, 76 bp, Artificial Sequence; identical to SEQ ID NO: 7348
  Description of Artificial Sequence: Synthetic brazil nut; 5' sequence +inner sequence + 3' sequence

SEQ ID NO: 11303 - DNA, 76 bp, Artificial Sequence; identical to SEQ ID NO: 3916
  Description of Artificial Sequence: Synthetic brazil nut; 5' sequence +inner sequence + 3' sequence

SEQ ID NO: 11304 - DNA, 76 bp, Artificial Sequence; identical to SEQ ID NO: 3254
  Description of Artificial Sequence: Synthetic brazil nut; 5' sequence +inner sequence + 3' sequence

SEQ ID NO: 11305 - DNA, 76 bp, Artificial Sequence; identical to SEQ ID NO: 3391
  Description of Artificial Sequence: Synthetic brazil nut; 5' sequence +inner sequence + 3' sequence

SEQ ID NO: 11306 - DNA, 76 bp, Artificial Sequence; identical to SEQ ID NO: 3414
  Description of Artificial Sequence: Synthetic brazil nut; 5' sequence +inner sequence + 3' sequence

SEQ ID NO: 11307 - DNA, 76 bp, Artificial Sequence; identical to SEQ ID NO: 3220
  Description of Artificial Sequence: Synthetic brazil nut; 5' sequence +inner sequence + 3' sequence

SEQ ID NO: 11308 - DNA, 76 bp, Artificial Sequence; identical to SEQ ID NO: 3271
  Description of Artificial Sequence: Synthetic brazil nut; 5' sequence +inner sequence + 3' sequence

SEQ ID NO: 11309 - DNA, 76 bp, Artificial Sequence; identical to SEQ ID NO: 7234
  Description of Artificial Sequence: Synthetic brazil nut; 5' sequence +inner sequence + 3' sequence

SEQ ID NO: 11310 - DNA, 76 bp, Artificial Sequence; identical to SEQ ID NO: 7907
  Description of Artificial Sequence: Synthetic brazil nut; 5' sequence +inner sequence + 3' sequence

SEQ ID NO: 11311 - DNA, 76 bp, Artificial Sequence; identical to SEQ ID NO: 3214
  Description of Artificial Sequence: Synthetic brazil nut; 5' sequence +inner sequence + 3' sequence

SEQ ID NO: 11312 - DNA, 76 bp, Artificial Sequence; identical to SEQ ID NO: 3791
  Description of Artificial Sequence: Synthetic brazil nut; 5' sequence +inner sequence + 3' sequence

SEQ ID NO: 11313 - DNA, 76 bp, Artificial Sequence; identical to SEQ ID NO: 7406
  Description of Artificial Sequence: Synthetic brazil nut; 5' sequence +inner sequence + 3' sequence

SEQ ID NO: 11314 - DNA, 76 bp, Artificial Sequence; identical to SEQ ID NO: 3173
  Description of Artificial Sequence: Synthetic brazil nut; 5' sequence +inner sequence + 3' sequence

SEQ ID NO: 11315 - DNA, 76 bp, Artificial Sequence; identical to SEQ ID NO: 3850
  Description of Artificial Sequence: Synthetic brazil nut; 5' sequence +inner sequence + 3' sequence

SEQ ID NO: 11316 - DNA, 76 bp, Artificial Sequence; identical to SEQ ID NO: 3528
  Description of Artificial Sequence: Synthetic brazil nut; 5' sequence +inner sequence + 3' sequence

SEQ ID NO: 11317 - DNA, 76 bp, Artificial Sequence; identical to SEQ ID NO: 3442
  Description of Artificial Sequence: Synthetic brazil nut; 5' sequence +inner sequence + 3' sequence

SEQ ID NO: 11318 - DNA, 76 bp, Artificial Sequence; identical to SEQ ID NO: 3349
  Description of Artificial Sequence: Synthetic brazil nut; 5' sequence +inner sequence + 3' sequence

SEQ ID NO: 11319 - DNA, 77 bp, Artificial Sequence; identical to SEQ ID NO: 7245
  Description of Artificial Sequence: Synthetic brazil nut; 5' sequence +inner sequence + 3' sequence

SEQ ID NO: 11320 - DNA, 76 bp, Artificial Sequence; identical to SEQ ID NO: 7238
  Description of Artificial Sequence: Synthetic brazil nut; 5' sequence +inner sequence + 3' sequence

SEQ ID NO: 11321 - DNA, 76 bp, Artificial Sequence; identical to SEQ ID NO: 3274
  Description of Artificial Sequence: Synthetic brazil nut; 5' sequence +inner sequence + 3' sequence

SEQ ID NO: 11322 - DNA, 76 bp, Artificial Sequence; identical to SEQ ID NO: 3344
  Description of Artificial Sequence: Synthetic brazil nut; 5' sequence +inner sequence + 3' sequence

SEQ ID NO: 11323 - DNA, 76 bp, Artificial Sequence; identical to SEQ ID NO: 3218
  Description of Artificial Sequence: Synthetic brazil nut; 5' sequence +inner sequence + 3' sequence

SEQ ID NO: 11324 - DNA, 76 bp, Artificial Sequence; identical to SEQ ID NO: 3379
  Description of Artificial Sequence: Synthetic brazil nut; 5' sequence +inner sequence + 3' sequence

SEQ ID NO: 11325 - DNA, 76 bp, Artificial Sequence; identical to SEQ ID NO: 7613
  Description of Artificial Sequence: Synthetic brazil nut; 5' sequence +inner sequence + 3' sequence

SEQ ID NO: 11326 - DNA, 76 bp, Artificial Sequence; identical to SEQ ID NO: 3394
  Description of Artificial Sequence: Synthetic brazil nut; 5' sequence +inner sequence + 3' sequence

SEQ ID NO: 11327 - DNA, 76 bp, Artificial Sequence; identical to SEQ ID NO: 7254
  Description of Artificial Sequence: Synthetic brazil nut; 5' sequence +inner sequence + 3' sequence

SEQ ID NO: 11328 - DNA, 76 bp, Artificial Sequence; identical to SEQ ID NO: 3390
  Description of Artificial Sequence: Synthetic brazil nut; 5' sequence +inner sequence + 3' sequence

SEQ ID NO: 11329 - DNA, 76 bp, Artificial Sequence; identical to SEQ ID NO: 3563
  Description of Artificial Sequence: Synthetic brazil nut; 5' sequence +inner sequence + 3' sequence

SEQ ID NO: 11330 - DNA, 76 bp, Artificial Sequence; identical to SEQ ID NO: 3387
  Description of Artificial Sequence: Synthetic brazil nut; 5' sequence +inner sequence + 3' sequence

SEQ ID NO: 11331 - DNA, 76 bp, Artificial Sequence; identical to SEQ ID NO: 3135
  Description of Artificial Sequence: Synthetic brazil nut; 5' sequence +inner sequence + 3' sequence

SEQ ID NO: 11332 - DNA, 76 bp, Artificial Sequence; identical to SEQ ID NO: 7380
  Description of Artificial Sequence: Synthetic brazil nut; 5' sequence +inner sequence + 3' sequence

SEQ ID NO: 11333 - DNA, 76 bp, Artificial Sequence; identical to SEQ ID NO: 3189
  Description of Artificial Sequence: Synthetic brazil nut; 5' sequence +inner sequence + 3' sequence

SEQ ID NO: 11334 - DNA, 76 bp, Artificial Sequence; identical to SEQ ID NO: 3137
  Description of Artificial Sequence: Synthetic brazil nut; 5' sequence +inner sequence + 3' sequence

SEQ ID NO: 11335 - DNA, 76 bp, Artificial Sequence; identical to SEQ ID NO: 3084
  Description of Artificial Sequence: Synthetic brazil nut; 5' sequence +inner sequence + 3' sequence

SEQ ID NO: 11336 - DNA, 76 bp, Artificial Sequence; identical to SEQ ID NO: 3433
  Description of Artificial Sequence: Synthetic brazil nut; 5' sequence +inner sequence + 3' sequence

SEQ ID NO: 11337 - DNA, 76 bp, Artificial Sequence; identical to SEQ ID NO: 3457
  Description of Artificial Sequence: Synthetic brazil nut; 5' sequence +inner sequence + 3' sequence

SEQ ID NO: 11338 - DNA, 76 bp, Artificial Sequence; identical to SEQ ID NO: 7792
  Description of Artificial Sequence: Synthetic brazil nut; 5' sequence +inner sequence + 3' sequence

SEQ ID NO: 11339 - DNA, 76 bp, Artificial Sequence; identical to SEQ ID NO: 3167
  Description of Artificial Sequence: Synthetic brazil nut; 5' sequence +inner sequence + 3' sequence

SEQ ID NO: 11340 - DNA, 76 bp, Artificial Sequence; identical to SEQ ID NO: 3370
  Description of Artificial Sequence: Synthetic brazil nut; 5' sequence +inner sequence + 3' sequence

SEQ ID NO: 11341 - DNA, 76 bp, Artificial Sequence; identical to SEQ ID NO: 3523
  Description of Artificial Sequence: Synthetic brazil nut; 5' sequence +inner sequence + 3' sequence

SEQ ID NO: 11342 - DNA, 76 bp, Artificial Sequence; identical to SEQ ID NO: 3114
  Description of Artificial Sequence: Synthetic brazil nut; 5' sequence +inner sequence + 3' sequence

SEQ ID NO: 11343 - DNA, 76 bp, Artificial Sequence; identical to SEQ ID NO: 7280
  Description of Artificial Sequence: Synthetic brazil nut; 5' sequence +inner sequence + 3' sequence

SEQ ID NO: 11344 - DNA, 76 bp, Artificial Sequence; identical to SEQ ID NO: 3272
  Description of Artificial Sequence: Synthetic brazil nut; 5' sequence +inner sequence + 3' sequence

SEQ ID NO: 11345 - DNA, 76 bp, Artificial Sequence; identical to SEQ ID NO: 3358
  Description of Artificial Sequence: Synthetic brazil nut; 5' sequence +inner sequence + 3' sequence

SEQ ID NO: 11346 - DNA, 76 bp, Artificial Sequence; identical to SEQ ID NO: 3426
  Description of Artificial Sequence: Synthetic brazil nut; 5' sequence +inner sequence + 3' sequence

SEQ ID NO: 11347 - DNA, 76 bp, Artificial Sequence; identical to SEQ ID NO: 3320
  Description of Artificial Sequence: Synthetic brazil nut; 5' sequence +inner sequence + 3' sequence

SEQ ID NO: 11348 - DNA, 76 bp, Artificial Sequence; identical to SEQ ID NO: 3256
  Description of Artificial Sequence: Synthetic brazil nut; 5' sequence +inner sequence + 3' sequence

SEQ ID NO: 11349 - DNA, 76 bp, Artificial Sequence; identical to SEQ ID NO: 3303
  Description of Artificial Sequence: Synthetic brazil nut; 5' sequence +inner sequence + 3' sequence

SEQ ID NO: 11350 - DNA, 76 bp, Artificial Sequence; identical to SEQ ID NO: 3950
  Description of Artificial Sequence: Synthetic brazil nut; 5' sequence +inner sequence + 3' sequence

SEQ ID NO: 11351 - DNA, 76 bp, Artificial Sequence; identical to SEQ ID NO: 3399
  Description of Artificial Sequence: Synthetic brazil nut; 5' sequence +inner sequence + 3' sequence

SEQ ID NO: 11352 - DNA, 76 bp, Artificial Sequence; identical to SEQ ID NO: 3409
  Description of Artificial Sequence: Synthetic brazil nut; 5' sequence +inner sequence + 3' sequence

SEQ ID NO: 11353 - DNA, 76 bp, Artificial Sequence; identical to SEQ ID NO: 7755
  Description of Artificial Sequence: Synthetic brazil nut; 5' sequence +inner sequence + 3' sequence

SEQ ID NO: 11354 - DNA, 76 bp, Artificial Sequence; identical to SEQ ID NO: 3279
  Description of Artificial Sequence: Synthetic brazil nut; 5' sequence +inner sequence + 3' sequence

SEQ ID NO: 11355 - DNA, 76 bp, Artificial Sequence; identical to SEQ ID NO: 3487
  Description of Artificial Sequence: Synthetic brazil nut; 5' sequence +inner sequence + 3' sequence

SEQ ID NO: 11356 - DNA, 76 bp, Artificial Sequence; identical to SEQ ID NO: 3928
  Description of Artificial Sequence: Synthetic brazil nut; 5' sequence +inner sequence + 3' sequence

SEQ ID NO: 11357 - DNA, 76 bp, Artificial Sequence; identical to SEQ ID NO: 3901
  Description of Artificial Sequence: Synthetic brazil nut; 5' sequence +inner sequence + 3' sequence

SEQ ID NO: 11358 - DNA, 76 bp, Artificial Sequence; identical to SEQ ID NO: 3197
  Description of Artificial Sequence: Synthetic brazil nut; 5' sequence +inner sequence + 3' sequence

SEQ ID NO: 11359 - DNA, 79 bp, Artificial Sequence; identical to SEQ ID NO: 3864
  Description of Artificial Sequence: Synthetic brazil nut; 5' sequence +inner sequence + 3' sequence

SEQ ID NO: 11360 - DNA, 76 bp, Artificial Sequence; identical to SEQ ID NO: 3403
  Description of Artificial Sequence: Synthetic brazil nut; 5' sequence +inner sequence + 3' sequence

SEQ ID NO: 11361 - DNA, 76 bp, Artificial Sequence; identical to SEQ ID NO: 7260
  Description of Artificial Sequence: Synthetic brazil nut; 5' sequence +inner sequence + 3' sequence

SEQ ID NO: 11362 - DNA, 76 bp, Artificial Sequence; identical to SEQ ID NO: 3170
  Description of Artificial Sequence: Synthetic brazil nut; 5' sequence +inner sequence + 3' sequence

SEQ ID NO: 11363 - DNA, 76 bp, Artificial Sequence; identical to SEQ ID NO: 3419
  Description of Artificial Sequence: Synthetic brazil nut; 5' sequence +inner sequence + 3' sequence

SEQ ID NO: 11364 - DNA, 76 bp, Artificial Sequence; identical to SEQ ID NO: 3741
  Description of Artificial Sequence: Synthetic brazil nut; 5' sequence +inner sequence + 3' sequence

SEQ ID NO: 11365 - DNA, 76 bp, Artificial Sequence; identical to SEQ ID NO: 3176
  Description of Artificial Sequence: Synthetic brazil nut; 5' sequence +inner sequence + 3' sequence

SEQ ID NO: 11366 - DNA, 76 bp, Artificial Sequence; identical to SEQ ID NO: 3383
  Description of Artificial Sequence: Synthetic brazil nut; 5' sequence +inner sequence + 3' sequence

SEQ ID NO: 11367 - DNA, 76 bp, Artificial Sequence; identical to SEQ ID NO: 3212
  Description of Artificial Sequence: Synthetic brazil nut; 5' sequence +inner sequence + 3' sequence

SEQ ID NO: 11368 - DNA, 75 bp, Artificial Sequence; identical to SEQ ID NO: 3259
  Description of Artificial Sequence: Synthetic brazil nut; 5' sequence +inner sequence + 3' sequence

SEQ ID NO: 11369 - DNA, 76 bp, Artificial Sequence; identical to SEQ ID NO: 7301
  Description of Artificial Sequence: Synthetic brazil nut; 5' sequence +inner sequence + 3' sequence

SEQ ID NO: 11370 - DNA, 76 bp, Artificial Sequence; identical to SEQ ID NO: 3437
  Description of Artificial Sequence: Synthetic brazil nut; 5' sequence +inner sequence + 3' sequence

SEQ ID NO: 11371 - DNA, 76 bp, Artificial Sequence; identical to SEQ ID NO: 3298
  Description of Artificial Sequence: Synthetic brazil nut; 5' sequence +inner sequence + 3' sequence

SEQ ID NO: 11372 - DNA, 76 bp, Artificial Sequence; identical to SEQ ID NO: 3278
  Description of Artificial Sequence: Synthetic brazil nut; 5' sequence +inner sequence + 3' sequence

SEQ ID NO: 11373 - DNA, 76 bp, Artificial Sequence; identical to SEQ ID NO: 3467
  Description of Artificial Sequence: Synthetic brazil nut; 5' sequence +inner sequence + 3' sequence

SEQ ID NO: 11374 - DNA, 76 bp, Artificial Sequence; identical to SEQ ID NO: 3994
  Description of Artificial Sequence: Synthetic brazil nut; 5' sequence +inner sequence + 3' sequence

SEQ ID NO: 11375 - DNA, 76 bp, Artificial Sequence; identical to SEQ ID NO: 3836
  Description of Artificial Sequence: Synthetic brazil nut; 5' sequence +inner sequence + 3' sequence

SEQ ID NO: 11376 - DNA, 76 bp, Artificial Sequence; identical to SEQ ID NO: 3319
  Description of Artificial Sequence: Synthetic brazil nut; 5' sequence +inner sequence + 3' sequence

SEQ ID NO: 11377 - DNA, 76 bp, Artificial Sequence; identical to SEQ ID NO: 7425
  Description of Artificial Sequence: Synthetic brazil nut; 5' sequence +inner sequence + 3' sequence

SEQ ID NO: 11378 - DNA, 76 bp, Artificial Sequence; identical to SEQ ID NO: 3530
  Description of Artificial Sequence: Synthetic brazil nut; 5' sequence +inner sequence + 3' sequence

SEQ ID NO: 11379 - DNA, 76 bp, Artificial Sequence; identical to SEQ ID NO: 3350
  Description of Artificial Sequence: Synthetic brazil nut; 5' sequence +inner sequence + 3' sequence

SEQ ID NO: 11380 - DNA, 76 bp, Artificial Sequence; identical to SEQ ID NO: 3340
  Description of Artificial Sequence: Synthetic brazil nut; 5' sequence +inner sequence + 3' sequence

SEQ ID NO: 11381 - DNA, 76 bp, Artificial Sequence; identical to SEQ ID NO: 3811
  Description of Artificial Sequence: Synthetic brazil nut; 5' sequence +inner sequence + 3' sequence

SEQ ID NO: 11382 - DNA, 76 bp, Artificial Sequence; identical to SEQ ID NO: 3332
  Description of Artificial Sequence: Synthetic brazil nut; 5' sequence +inner sequence + 3' sequence

SEQ ID NO: 11383 - DNA, 76 bp, Artificial Sequence; identical to SEQ ID NO: 3534
  Description of Artificial Sequence: Synthetic brazil nut; 5' sequence +inner sequence + 3' sequence

SEQ ID NO: 11384 - DNA, 76 bp, Artificial Sequence; identical to SEQ ID NO: 3380
  Description of Artificial Sequence: Synthetic brazil nut; 5' sequence +inner sequence + 3' sequence

SEQ ID NO: 11385 - DNA, 76 bp, Artificial Sequence; identical to SEQ ID NO: 3545
  Description of Artificial Sequence: Synthetic brazil nut; 5' sequence +inner sequence + 3' sequence

SEQ ID NO: 11386 - DNA, 76 bp, Artificial Sequence; identical to SEQ ID NO: 3912
  Description of Artificial Sequence: Synthetic brazil nut; 5' sequence +inner sequence + 3' sequence

SEQ ID NO: 11387 - DNA, 76 bp, Artificial Sequence; identical to SEQ ID NO: 3280
  Description of Artificial Sequence: Synthetic brazil nut; 5' sequence +inner sequence + 3' sequence

SEQ ID NO: 11388 - DNA, 76 bp, Artificial Sequence; identical to SEQ ID NO: 3130
  Description of Artificial Sequence: Synthetic brazil nut; 5' sequence +inner sequence + 3' sequence

SEQ ID NO: 11389 - DNA, 76 bp, Artificial Sequence; identical to SEQ ID NO: 3478
  Description of Artificial Sequence: Synthetic brazil nut; 5' sequence +inner sequence + 3' sequence

SEQ ID NO: 11390 - DNA, 76 bp, Artificial Sequence; identical to SEQ ID NO: 3400
  Description of Artificial Sequence: Synthetic brazil nut; 5' sequence +inner sequence + 3' sequence

SEQ ID NO: 11391 - DNA, 76 bp, Artificial Sequence; identical to SEQ ID NO: 3255
  Description of Artificial Sequence: Synthetic brazil nut; 5' sequence +inner sequence + 3' sequence

SEQ ID NO: 11392 - DNA, 76 bp, Artificial Sequence; identical to SEQ ID NO: 3557
  Description of Artificial Sequence: Synthetic brazil nut; 5' sequence +inner sequence + 3' sequence

SEQ ID NO: 11393 - DNA, 76 bp, Artificial Sequence; identical to SEQ ID NO: 3273
  Description of Artificial Sequence: Synthetic brazil nut; 5' sequence +inner sequence + 3' sequence

SEQ ID NO: 11394 - DNA, 76 bp, Artificial Sequence; identical to SEQ ID NO: 3119
  Description of Artificial Sequence: Synthetic brazil nut; 5' sequence +inner sequence + 3' sequence

SEQ ID NO: 11395 - DNA, 76 bp, Artificial Sequence; identical to SEQ ID NO: 7419
  Description of Artificial Sequence: Synthetic brazil nut; 5' sequence +inner sequence + 3' sequence

SEQ ID NO: 11396 - DNA, 76 bp, Artificial Sequence; identical to SEQ ID NO: 3771
  Description of Artificial Sequence: Synthetic brazil nut; 5' sequence +inner sequence + 3' sequence

SEQ ID NO: 11397 - DNA, 76 bp, Artificial Sequence; identical to SEQ ID NO: 7401
  Description of Artificial Sequence: Synthetic brazil nut; 5' sequence +inner sequence + 3' sequence

SEQ ID NO: 11398 - DNA, 76 bp, Artificial Sequence; identical to SEQ ID NO: 3277
  Description of Artificial Sequence: Synthetic brazil nut; 5' sequence +inner sequence + 3' sequence

SEQ ID NO: 11399 - DNA, 76 bp, Artificial Sequence; identical to SEQ ID NO: 7351
  Description of Artificial Sequence: Synthetic brazil nut; 5' sequence +inner sequence + 3' sequence

SEQ ID NO: 11400 - DNA, 76 bp, Artificial Sequence; identical to SEQ ID NO: 3517
  Description of Artificial Sequence: Synthetic brazil nut; 5' sequence +inner sequence + 3' sequence

SEQ ID NO: 11401 - DNA, 76 bp, Artificial Sequence
  Description of Artificial Sequence: Synthetic brazil nut; 5' sequence +inner sequence + 3' sequence
tagggaagagaaggacatatgatggccaacgctggatgagggctgtatgtggcttgactagtacatgaccacttga

SEQ ID NO: 11402 - DNA, 76 bp, Artificial Sequence; identical to SEQ ID NO: 3764
  Description of Artificial Sequence: Synthetic brazil nut; 5' sequence +inner sequence + 3' sequence

SEQ ID NO: 11403 - DNA, 76 bp, Artificial Sequence; identical to SEQ ID NO: 3346
  Description of Artificial Sequence: Synthetic brazil nut; 5' sequence +inner sequence + 3' sequence

SEQ ID NO: 11404 - DNA, 76 bp, Artificial Sequence; identical to SEQ ID NO: 3915
  Description of Artificial Sequence: Synthetic brazil nut; 5' sequence +inner sequence + 3' sequence

SEQ ID NO: 11405 - DNA, 76 bp, Artificial Sequence; identical to SEQ ID NO: 3177
  Description of Artificial Sequence: Synthetic brazil nut; 5' sequence +inner sequence + 3' sequence

SEQ ID NO: 11406 - DNA, 76 bp, Artificial Sequence; identical to SEQ ID NO: 3181
  Description of Artificial Sequence: Synthetic brazil nut; 5' sequence +inner sequence + 3' sequence

SEQ ID NO: 11407 - DNA, 76 bp, Artificial Sequence; identical to SEQ ID NO: 3301
  Description of Artificial Sequence: Synthetic brazil nut; 5' sequence +inner sequence + 3' sequence

SEQ ID NO: 11408 - DNA, 76 bp, Artificial Sequence; identical to SEQ ID NO: 7317
  Description of Artificial Sequence: Synthetic brazil nut; 5' sequence +inner sequence + 3' sequence

SEQ ID NO: 11409 - DNA, 76 bp, Artificial Sequence; identical to SEQ ID NO: 3244
  Description of Artificial Sequence: Synthetic brazil nut; 5' sequence +inner sequence + 3' sequence

SEQ ID NO: 11410 - DNA, 76 bp, Artificial Sequence; identical to SEQ ID NO: 3375
  Description of Artificial Sequence: Synthetic brazil nut; 5' sequence +inner sequence + 3' sequence

SEQ ID NO: 11411 - DNA, 76 bp, Artificial Sequence; identical to SEQ ID NO: 3932
  Description of Artificial Sequence: Synthetic brazil nut; 5' sequence +inner sequence + 3' sequence

SEQ ID NO: 11412 - DNA, 76 bp, Artificial Sequence; identical to SEQ ID NO: 3807
  Description of Artificial Sequence: Synthetic brazil nut; 5' sequence +inner sequence + 3' sequence

SEQ ID NO: 11413 - DNA, 76 bp, Artificial Sequence; identical to SEQ ID NO: 7420
  Description of Artificial Sequence: Synthetic brazil nut; 5' sequence +inner sequence + 3' sequence

SEQ ID NO: 11414 - DNA, 76 bp, Artificial Sequence; identical to SEQ ID NO: 3625
  Description of Artificial Sequence: Synthetic brazil nut; 5' sequence +inner sequence + 3' sequence

SEQ ID NO: 11415 - DNA, 76 bp, Artificial Sequence; identical to SEQ ID NO: 7492
  Description of Artificial Sequence: Synthetic brazil nut; 5' sequence +inner sequence + 3' sequence

SEQ ID NO: 11416 - DNA, 76 bp, Artificial Sequence; identical to SEQ ID NO: 7445
  Description of Artificial Sequence: Synthetic brazil nut; 5' sequence +inner sequence + 3' sequence

SEQ ID NO: 11417 - DNA, 76 bp, Artificial Sequence; identical to SEQ ID NO: 3846
  Description of Artificial Sequence: Synthetic brazil nut; 5' sequence +inner sequence + 3' sequence

SEQ ID NO: 11418 - DNA, 76 bp, Artificial Sequence; identical to SEQ ID NO: 3361
  Description of Artificial Sequence: Synthetic brazil nut; 5' sequence +inner sequence + 3' sequence

SEQ ID NO: 11419 - DNA, 76 bp, Artificial Sequence; identical to SEQ ID NO: 3314
  Description of Artificial Sequence: Synthetic brazil nut; 5' sequence +inner sequence + 3' sequence

SEQ ID NO: 11420 - DNA, 76 bp, Artificial Sequence; identical to SEQ ID NO: 3432
  Description of Artificial Sequence: Synthetic brazil nut; 5' sequence +inner sequence + 3' sequence

SEQ ID NO: 11421 - DNA, 76 bp, Artificial Sequence; identical to SEQ ID NO: 3313
  Description of Artificial Sequence: Synthetic brazil nut; 5' sequence +inner sequence + 3' sequence

SEQ ID NO: 11422 - DNA, 76 bp, Artificial Sequence; identical to SEQ ID NO: 3757
  Description of Artificial Sequence: Synthetic brazil nut; 5' sequence +inner sequence + 3' sequence

SEQ ID NO: 11423 - DNA, 76 bp, Artificial Sequence; identical to SEQ ID NO: 7585
  Description of Artificial Sequence: Synthetic brazil nut; 5' sequence +inner sequence + 3' sequence

SEQ ID NO: 11424 - DNA, 76 bp, Artificial Sequence; identical to SEQ ID NO: 3209
  Description of Artificial Sequence: Synthetic brazil nut; 5' sequence +inner sequence + 3' sequence

SEQ ID NO: 11425 - DNA, 76 bp, Artificial Sequence; identical to SEQ ID NO: 3231
  Description of Artificial Sequence: Synthetic brazil nut; 5' sequence +inner sequence + 3' sequence

SEQ ID NO: 11426 - DNA, 76 bp, Artificial Sequence; identical to SEQ ID NO: 3210
  Description of Artificial Sequence: Synthetic brazil nut; 5' sequence +inner sequence + 3' sequence

SEQ ID NO: 11427 - DNA, 76 bp, Artificial Sequence; identical to SEQ ID NO: 3568
  Description of Artificial Sequence: Synthetic brazil nut; 5' sequence +inner sequence + 3' sequence

SEQ ID NO: 11428 - DNA, 76 bp, Artificial Sequence; identical to SEQ ID NO: 3315
  Description of Artificial Sequence: Synthetic brazil nut; 5' sequence +inner sequence + 3' sequence

SEQ ID NO: 11429 - DNA, 76 bp, Artificial Sequence; identical to SEQ ID NO: 3087
  Description of Artificial Sequence: Synthetic brazil nut; 5' sequence +inner sequence + 3' sequence

SEQ ID NO: 11430 - DNA, 76 bp, Artificial Sequence; identical to SEQ ID NO: 3213
  Description of Artificial Sequence: Synthetic brazil nut; 5' sequence +inner sequence + 3' sequence

SEQ ID NO: 11431 - DNA, 76 bp, Artificial Sequence; identical to SEQ ID NO: 7407
  Description of Artificial Sequence: Synthetic brazil nut; 5' sequence +inner sequence + 3' sequence

SEQ ID NO: 11432 - DNA, 76 bp, Artificial Sequence; identical to SEQ ID NO: 7394
  Description of Artificial Sequence: Synthetic brazil nut; 5' sequence +inner sequence + 3' sequence

SEQ ID NO: 11433 - DNA, 76 bp, Artificial Sequence; identical to SEQ ID NO: 3405
  Description of Artificial Sequence: Synthetic brazil nut; 5' sequence +inner sequence + 3' sequence

SEQ ID NO: 11434 - DNA, 76 bp, Artificial Sequence; identical to SEQ ID NO: 3238
  Description of Artificial Sequence: Synthetic brazil nut; 5' sequence +inner sequence + 3' sequence

SEQ ID NO: 11435 - DNA, 76 bp, Artificial Sequence; identical to SEQ ID NO: 3396
  Description of Artificial Sequence: Synthetic brazil nut; 5' sequence +inner sequence + 3' sequence

SEQ ID NO: 11436 - DNA, 76 bp, Artificial Sequence; identical to SEQ ID NO: 3227
  Description of Artificial Sequence: Synthetic brazil nut; 5' sequence +inner sequence + 3' sequence

SEQ ID NO: 11437 - DNA, 76 bp, Artificial Sequence; identical to SEQ ID NO: 3325
  Description of Artificial Sequence: Synthetic brazil nut; 5' sequence +inner sequence + 3' sequence

SEQ ID NO: 11438 - DNA, 76 bp, Artificial Sequence; identical to SEQ ID NO: 7543
  Description of Artificial Sequence: Synthetic brazil nut; 5' sequence +inner sequence + 3' sequence

SEQ ID NO: 11439 - DNA, 76 bp, Artificial Sequence; identical to SEQ ID NO: 3393
  Description of Artificial Sequence: Synthetic brazil nut; 5' sequence +inner sequence + 3' sequence

SEQ ID NO: 11440 - DNA, 76 bp, Artificial Sequence; identical to SEQ ID NO: 3284
  Description of Artificial Sequence: Synthetic brazil nut; 5' sequence +inner sequence + 3' sequence

SEQ ID NO: 11441 - DNA, 76 bp, Artificial Sequence; identical to SEQ ID NO: 3991
  Description of Artificial Sequence: Synthetic brazil nut; 5' sequence +inner sequence + 3' sequence

SEQ ID NO: 11442 - DNA, 76 bp, Artificial Sequence; identical to SEQ ID NO: 3860
  Description of Artificial Sequence: Synthetic brazil nut; 5' sequence +inner sequence + 3' sequence

SEQ ID NO: 11443 - DNA, 76 bp, Artificial Sequence; identical to SEQ ID NO: 3407
  Description of Artificial Sequence: Synthetic brazil nut; 5' sequence +inner sequence + 3' sequence

SEQ ID NO: 11444 - DNA, 76 bp, Artificial Sequence; identical to SEQ ID NO: 3862
  Description of Artificial Sequence: Synthetic brazil nut; 5' sequence +inner sequence + 3' sequence

SEQ ID NO: 11445 - DNA, 76 bp, Artificial Sequence; identical to SEQ ID NO: 3695
  Description of Artificial Sequence: Synthetic brazil nut; 5' sequence +inner sequence + 3' sequence

SEQ ID NO: 11446 - DNA, 76 bp, Artificial Sequence; identical to SEQ ID NO: 3248
  Description of Artificial Sequence: Synthetic brazil nut; 5' sequence +inner sequence + 3' sequence

SEQ ID NO: 11447 - DNA, 76 bp, Artificial Sequence; identical to SEQ ID NO: 3484
  Description of Artificial Sequence: Synthetic brazil nut; 5' sequence +inner sequence + 3' sequence

SEQ ID NO: 11448 - DNA, 76 bp, Artificial Sequence; identical to SEQ ID NO: 3397
  Description of Artificial Sequence: Synthetic brazil nut; 5' sequence +inner sequence + 3' sequence

SEQ ID NO: 11449 - DNA, 76 bp, Artificial Sequence; identical to SEQ ID NO: 3239
  Description of Artificial Sequence: Synthetic brazil nut; 5' sequence +inner sequence + 3' sequence

SEQ ID NO: 11450 - DNA, 76 bp, Artificial Sequence; identical to SEQ ID NO: 3831
  Description of Artificial Sequence: Synthetic brazil nut; 5' sequence +inner sequence + 3' sequence

SEQ ID NO: 11451 - DNA, 76 bp, Artificial Sequence; identical to SEQ ID NO: 3647
  Description of Artificial Sequence: Synthetic brazil nut; 5' sequence +inner sequence + 3' sequence

SEQ ID NO: 11452 - DNA, 76 bp, Artificial Sequence; identical to SEQ ID NO: 3561
  Description of Artificial Sequence: Synthetic brazil nut; 5' sequence +inner sequence + 3' sequence

SEQ ID NO: 11453 - DNA, 76 bp, Artificial Sequence; identical to SEQ ID NO: 7377
  Description of Artificial Sequence: Synthetic brazil nut; 5' sequence +inner sequence + 3' sequence

SEQ ID NO: 11454 - DNA, 76 bp, Artificial Sequence; identical to SEQ ID NO: 3128
  Description of Artificial Sequence: Synthetic brazil nut; 5' sequence +inner sequence + 3' sequence

SEQ ID NO: 11455 - DNA, 76 bp, Artificial Sequence; identical to SEQ ID NO: 3884
  Description of Artificial Sequence: Synthetic brazil nut; 5' sequence +inner sequence + 3' sequence

SEQ ID NO: 11456 - DNA, 76 bp, Artificial Sequence; identical to SEQ ID NO: 3281
  Description of Artificial Sequence: Synthetic brazil nut; 5' sequence +inner sequence + 3' sequence

SEQ ID NO: 11457 - DNA, 76 bp, Artificial Sequence; identical to SEQ ID NO: 7428
  Description of Artificial Sequence: Synthetic brazil nut; 5' sequence +inner sequence + 3' sequence

SEQ ID NO: 11458 - DNA, 76 bp, Artificial Sequence
  Description of Artificial Sequence: Synthetic brazil nut; 5' sequence +inner sequence + 3' sequence
tagggaagagaaggacatatgatacggcatggtgctgcgatccctgctggtcattgactagtacatgaccacttga

SEQ ID NO: 11459 - DNA, 76 bp, Artificial Sequence; identical to SEQ ID NO: 3891
  Description of Artificial Sequence: Synthetic brazil nut; 5' sequence +inner sequence + 3' sequence

SEQ ID NO: 11460 - DNA, 76 bp, Artificial Sequence; identical to SEQ ID NO: 7393
  Description of Artificial Sequence: Synthetic brazil nut; 5' sequence +inner sequence + 3' sequence

SEQ ID NO: 11461 - DNA, 76 bp, Artificial Sequence; identical to SEQ ID NO: 3628
  Description of Artificial Sequence: Synthetic brazil nut; 5' sequence +inner sequence + 3' sequence

SEQ ID NO: 11462 - DNA, 76 bp, Artificial Sequence; identical to SEQ ID NO: 3476
  Description of Artificial Sequence: Synthetic brazil nut; 5' sequence +inner sequence + 3' sequence

SEQ ID NO: 11463 - DNA, 76 bp, Artificial Sequence; identical to SEQ ID NO: 3331
  Description of Artificial Sequence: Synthetic brazil nut; 5' sequence +inner sequence + 3' sequence

SEQ ID NO: 11464 - DNA, 76 bp, Artificial Sequence; identical to SEQ ID NO: 3326
  Description of Artificial Sequence: Synthetic brazil nut; 5' sequence +inner sequence + 3' sequence

SEQ ID NO: 11465 - DNA, 76 bp, Artificial Sequence; identical to SEQ ID NO: 7312
  Description of Artificial Sequence: Synthetic brazil nut; 5' sequence +inner sequence + 3' sequence

SEQ ID NO: 11466 - DNA, 76 bp, Artificial Sequence; identical to SEQ ID NO: 3631
  Description of Artificial Sequence: Synthetic brazil nut; 5' sequence +inner sequence + 3' sequence

SEQ ID NO: 11467 - DNA, 76 bp, Artificial Sequence; identical to SEQ ID NO: 3296
  Description of Artificial Sequence: Synthetic brazil nut; 5' sequence +inner sequence + 3' sequence

SEQ ID NO: 11468 - DNA, 76 bp, Artificial Sequence; identical to SEQ ID NO: 3317
  Description of Artificial Sequence: Synthetic brazil nut; 5' sequence +inner sequence + 3' sequence

SEQ ID NO: 11469 - DNA, 76 bp, Artificial Sequence; identical to SEQ ID NO: 3226
  Description of Artificial Sequence: Synthetic brazil nut; 5' sequence +inner sequence + 3' sequence

SEQ ID NO: 11470 - DNA, 76 bp, Artificial Sequence; identical to SEQ ID NO: 3657
  Description of Artificial Sequence: Synthetic brazil nut; 5' sequence +inner sequence + 3' sequence

SEQ ID NO: 11471 - DNA, 76 bp, Artificial Sequence; identical to SEQ ID NO: 3395
  Description of Artificial Sequence: Synthetic brazil nut; 5' sequence +inner sequence + 3' sequence

SEQ ID NO: 11472 - DNA, 76 bp, Artificial Sequence; identical to SEQ ID NO: 3141
  Description of Artificial Sequence: Synthetic brazil nut; 5' sequence +inner sequence + 3' sequence

SEQ ID NO: 11473 - DNA, 76 bp, Artificial Sequence; identical to SEQ ID NO: 3684
  Description of Artificial Sequence: Synthetic brazil nut; 5' sequence +inner sequence + 3' sequence

SEQ ID NO: 11474 - DNA, 76 bp, Artificial Sequence; identical to SEQ ID NO: 3686
  Description of Artificial Sequence: Synthetic brazil nut; 5' sequence +inner sequence + 3' sequence

SEQ ID NO: 11475 - DNA, 76 bp, Artificial Sequence; identical to SEQ ID NO: 3632
  Description of Artificial Sequence: Synthetic brazil nut; 5' sequence +inner sequence + 3' sequence

SEQ ID NO: 11476 - DNA, 76 bp, Artificial Sequence; identical to SEQ ID NO: 7682
  Description of Artificial Sequence: Synthetic brazil nut; 5' sequence +inner sequence + 3' sequence

SEQ ID NO: 11477 - DNA, 76 bp, Artificial Sequence; identical to SEQ ID NO: 7364
  Description of Artificial Sequence: Synthetic brazil nut; 5' sequence +inner sequence + 3' sequence

SEQ ID NO: 11478 - DNA, 76 bp, Artificial Sequence; identical to SEQ ID NO: 3867
  Description of Artificial Sequence: Synthetic brazil nut; 5' sequence +inner sequence + 3' sequence

SEQ ID NO: 11479 - DNA, 76 bp, Artificial Sequence; identical to SEQ ID NO: 3586
  Description of Artificial Sequence: Synthetic brazil nut; 5' sequence +inner sequence + 3' sequence

SEQ ID NO: 11480 - DNA, 76 bp, Artificial Sequence; identical to SEQ ID NO: 3267
  Description of Artificial Sequence: Synthetic brazil nut; 5' sequence +inner sequence + 3' sequence

SEQ ID NO: 11481 - DNA, 76 bp, Artificial Sequence; identical to SEQ ID NO: 3202
  Description of Artificial Sequence: Synthetic brazil nut; 5' sequence +inner sequence + 3' sequence

SEQ ID NO: 11482 - DNA, 76 bp, Artificial Sequence; identical to SEQ ID NO: 7787
  Description of Artificial Sequence: Synthetic brazil nut; 5' sequence +inner sequence + 3' sequence

SEQ ID NO: 11483 - DNA, 75 bp, Artificial Sequence; identical to SEQ ID NO: 3334
  Description of Artificial Sequence: Synthetic brazil nut; 5' sequence +inner sequence + 3' sequence

SEQ ID NO: 11484 - DNA, 76 bp, Artificial Sequence; identical to SEQ ID NO: 3364
  Description of Artificial Sequence: Synthetic brazil nut; 5' sequence +inner sequence + 3' sequence

SEQ ID NO: 11485 - DNA, 76 bp, Artificial Sequence; identical to SEQ ID NO: 3504
  Description of Artificial Sequence: Synthetic brazil nut; 5' sequence +inner sequence + 3' sequence

SEQ ID NO: 11486 - DNA, 76 bp, Artificial Sequence; identical to SEQ ID NO: 3666
  Description of Artificial Sequence: Synthetic brazil nut; 5' sequence +inner sequence + 3' sequence

SEQ ID NO: 11487 - DNA, 76 bp, Artificial Sequence; identical to SEQ ID NO: 3615
  Description of Artificial Sequence: Synthetic brazil nut; 5' sequence +inner sequence + 3' sequence

SEQ ID NO: 11488 - DNA, 76 bp, Artificial Sequence; identical to SEQ ID NO: 7592
  Description of Artificial Sequence: Synthetic brazil nut; 5' sequence +inner sequence + 3' sequence

SEQ ID NO: 11489 - DNA, 76 bp, Artificial Sequence; identical to SEQ ID NO: 3728
  Description of Artificial Sequence: Synthetic brazil nut; 5' sequence +inner sequence + 3' sequence

SEQ ID NO: 11490 - DNA, 76 bp, Artificial Sequence; identical to SEQ ID NO: 3291
  Description of Artificial Sequence: Synthetic brazil nut; 5' sequence +inner sequence + 3' sequence

SEQ ID NO: 11491 - DNA, 76 bp, Artificial Sequence; identical to SEQ ID NO: 7651
  Description of Artificial Sequence: Synthetic brazil nut; 5' sequence +inner sequence + 3' sequence

SEQ ID NO: 11492 - DNA, 76 bp, Artificial Sequence; identical to SEQ ID NO: 7691
  Description of Artificial Sequence: Synthetic brazil nut; 5' sequence +inner sequence + 3' sequence

SEQ ID NO: 11493 - DNA, 76 bp, Artificial Sequence; identical to SEQ ID NO: 7494
  Description of Artificial Sequence: Synthetic brazil nut; 5' sequence +inner sequence + 3' sequence

SEQ ID NO: 11494 - DNA, 75 bp, Artificial Sequence; identical to SEQ ID NO: 3251
  Description of Artificial Sequence: Synthetic brazil nut; 5' sequence +inner sequence + 3' sequence

SEQ ID NO: 11495 - DNA, 76 bp, Artificial Sequence; identical to SEQ ID NO: 3617
  Description of Artificial Sequence: Synthetic brazil nut; 5' sequence +inner sequence + 3' sequence

SEQ ID NO: 11496 - DNA, 76 bp, Artificial Sequence; identical to SEQ ID NO: 3909
  Description of Artificial Sequence: Synthetic brazil nut; 5' sequence +inner sequence + 3' sequence

SEQ ID NO: 11497 - DNA, 76 bp, Artificial Sequence; identical to SEQ ID NO: 7525
  Description of Artificial Sequence: Synthetic brazil nut; 5' sequence +inner sequence + 3' sequence

SEQ ID NO: 11498 - DNA, 76 bp, Artificial Sequence; identical to SEQ ID NO: 3236
  Description of Artificial Sequence: Synthetic brazil nut; 5' sequence +inner sequence + 3' sequence

SEQ ID NO: 11499 - DNA, 76 bp, Artificial Sequence; identical to SEQ ID NO: 3440
  Description of Artificial Sequence: Synthetic brazil nut; 5' sequence +inner sequence + 3' sequence

SEQ ID NO: 11500 - DNA, 76 bp, Artificial Sequence; identical to SEQ ID NO: 3518
  Description of Artificial Sequence: Synthetic brazil nut; 5' sequence +inner sequence + 3' sequence

SEQ ID NO: 11501 - DNA, 76 bp, Artificial Sequence; identical to SEQ ID NO: 7535
  Description of Artificial Sequence: Synthetic brazil nut; 5' sequence +inner sequence + 3' sequence

SEQ ID NO: 11502 - DNA, 76 bp, Artificial Sequence; identical to SEQ ID NO: 7472
  Description of Artificial Sequence: Synthetic brazil nut; 5' sequence +inner sequence + 3' sequence

SEQ ID NO: 11503 - DNA, 76 bp, Artificial Sequence; identical to SEQ ID NO: 3338
  Description of Artificial Sequence: Synthetic brazil nut; 5' sequence +inner sequence + 3' sequence

SEQ ID NO: 11504 - DNA, 76 bp, Artificial Sequence; identical to SEQ ID NO: 3463
  Description of Artificial Sequence: Synthetic brazil nut; 5' sequence +inner sequence + 3' sequence

SEQ ID NO: 11505 - DNA, 76 bp, Artificial Sequence; identical to SEQ ID NO: 3465
  Description of Artificial Sequence: Synthetic brazil nut; 5' sequence +inner sequence + 3' sequence

SEQ ID NO: 11506 - DNA, 76 bp, Artificial Sequence; identical to SEQ ID NO: 3180
  Description of Artificial Sequence: Synthetic brazil nut; 5' sequence +inner sequence + 3' sequence

SEQ ID NO: 11507 - DNA, 76 bp, Artificial Sequence; identical to SEQ ID NO: 7429
  Description of Artificial Sequence: Synthetic brazil nut; 5' sequence +inner sequence + 3' sequence

SEQ ID NO: 11508 - DNA, 76 bp, Artificial Sequence; identical to SEQ ID NO: 7590
  Description of Artificial Sequence: Synthetic brazil nut; 5' sequence +inner sequence + 3' sequence

SEQ ID NO: 11509 - DNA, 76 bp, Artificial Sequence; identical to SEQ ID NO: 3461
  Description of Artificial Sequence: Synthetic brazil nut; 5' sequence +inner sequence + 3' sequence

SEQ ID NO: 11510 - DNA, 76 bp, Artificial Sequence; identical to SEQ ID NO: 3124
  Description of Artificial Sequence: Synthetic brazil nut; 5' sequence +inner sequence + 3' sequence

SEQ ID NO: 11511 - DNA, 76 bp, Artificial Sequence; identical to SEQ ID NO: 3780
  Description of Artificial Sequence: Synthetic brazil nut; 5' sequence +inner sequence + 3' sequence

SEQ ID NO: 11512 - DNA, 76 bp, Artificial Sequence; identical to SEQ ID NO: 7499
  Description of Artificial Sequence: Synthetic brazil nut; 5' sequence +inner sequence + 3' sequence

SEQ ID NO: 11513 - DNA, 76 bp, Artificial Sequence; identical to SEQ ID NO: 3620
  Description of Artificial Sequence: Synthetic brazil nut; 5' sequence +inner sequence + 3' sequence

SEQ ID NO: 11514 - DNA, 76 bp, Artificial Sequence; identical to SEQ ID NO: 7727
  Description of Artificial Sequence: Synthetic brazil nut; 5' sequence +inner sequence + 3' sequence

SEQ ID NO: 11515 - DNA, 76 bp, Artificial Sequence; identical to SEQ ID NO: 3493
  Description of Artificial Sequence: Synthetic brazil nut; 5' sequence +inner sequence + 3' sequence

SEQ ID NO: 11516 - DNA, 76 bp, Artificial Sequence; identical to SEQ ID NO: 3292
  Description of Artificial Sequence: Synthetic brazil nut; 5' sequence +inner sequence + 3' sequence

SEQ ID NO: 11517 - DNA, 76 bp, Artificial Sequence; identical to SEQ ID NO: 3869
  Description of Artificial Sequence: Synthetic brazil nut; 5' sequence +inner sequence + 3' sequence

SEQ ID NO: 11518 - DNA, 76 bp, Artificial Sequence; identical to SEQ ID NO: 3294
  Description of Artificial Sequence: Synthetic brazil nut; 5' sequence +inner sequence + 3' sequence

SEQ ID NO: 11519 - DNA, 76 bp, Artificial Sequence; identical to SEQ ID NO: 7808
  Description of Artificial Sequence: Synthetic brazil nut; 5' sequence +inner sequence + 3' sequence

SEQ ID NO: 11520 - DNA, 76 bp, Artificial Sequence; identical to SEQ ID NO: 3900
  Description of Artificial Sequence: Synthetic brazil nut; 5' sequence +inner sequence + 3' sequence

SEQ ID NO: 11521 - DNA, 76 bp, Artificial Sequence; identical to SEQ ID NO: 3519
  Description of Artificial Sequence: Synthetic brazil nut; 5' sequence +inner sequence + 3' sequence

SEQ ID NO: 11522 - DNA, 76 bp, Artificial Sequence; identical to SEQ ID NO: 3663
  Description of Artificial Sequence: Synthetic brazil nut; 5' sequence +inner sequence + 3' sequence

SEQ ID NO: 11523 - DNA, 76 bp, Artificial Sequence; identical to SEQ ID NO: 3422
  Description of Artificial Sequence: Synthetic brazil nut; 5' sequence +inner sequence + 3' sequence

SEQ ID NO: 11524 - DNA, 76 bp, Artificial Sequence; identical to SEQ ID NO: 7597
  Description of Artificial Sequence: Synthetic brazil nut; 5' sequence +inner sequence + 3' sequence

SEQ ID NO: 11525 - DNA, 76 bp, Artificial Sequence; identical to SEQ ID NO: 3793
  Description of Artificial Sequence: Synthetic brazil nut; 5' sequence +inner sequence + 3' sequence

SEQ ID NO: 11526 - DNA, 76 bp, Artificial Sequence; identical to SEQ ID NO: 3714
  Description of Artificial Sequence: Synthetic brazil nut; 5' sequence +inner sequence + 3' sequence

SEQ ID NO: 11527 - DNA, 76 bp, Artificial Sequence; identical to SEQ ID NO: 3366
  Description of Artificial Sequence: Synthetic brazil nut; 5' sequence +inner sequence + 3' sequence

SEQ ID NO: 11528 - DNA, 76 bp, Artificial Sequence; identical to SEQ ID NO: 7573
  Description of Artificial Sequence: Synthetic brazil nut; 5' sequence +inner sequence + 3' sequence

SEQ ID NO: 11529 - DNA, 76 bp, Artificial Sequence; identical to SEQ ID NO: 3800
  Description of Artificial Sequence: Synthetic brazil nut; 5' sequence +inner sequence + 3' sequence

SEQ ID NO: 11530 - DNA, 76 bp, Artificial Sequence; identical to SEQ ID NO: 3633
  Description of Artificial Sequence: Synthetic brazil nut; 5' sequence +inner sequence + 3' sequence

SEQ ID NO: 11531 - DNA, 76 bp, Artificial Sequence; identical to SEQ ID NO: 3513
  Description of Artificial Sequence: Synthetic brazil nut; 5' sequence +inner sequence + 3' sequence

SEQ ID NO: 11532 - DNA, 76 bp, Artificial Sequence; identical to SEQ ID NO: 3746
  Description of Artificial Sequence: Synthetic brazil nut; 5' sequence +inner sequence + 3' sequence

SEQ ID NO: 11533 - DNA, 76 bp, Artificial Sequence; identical to SEQ ID NO: 3789
  Description of Artificial Sequence: Synthetic brazil nut; 5' sequence +inner sequence + 3' sequence

SEQ ID NO: 11534 - DNA, 76 bp, Artificial Sequence; identical to SEQ ID NO: 3475
  Description of Artificial Sequence: Synthetic brazil nut; 5' sequence +inner sequence + 3' sequence

SEQ ID NO: 11535 - DNA, 76 bp, Artificial Sequence; identical to SEQ ID NO: 3699
  Description of Artificial Sequence: Synthetic brazil nut; 5' sequence +inner sequence + 3' sequence

SEQ ID NO: 11536 - DNA, 76 bp, Artificial Sequence; identical to SEQ ID NO: 3386
  Description of Artificial Sequence: Synthetic brazil nut; 5' sequence +inner sequence + 3' sequence

SEQ ID NO: 11537 - DNA, 76 bp, Artificial Sequence; identical to SEQ ID NO: 3351
  Description of Artificial Sequence: Synthetic brazil nut; 5' sequence +inner sequence + 3' sequence

SEQ ID NO: 11538 - DNA, 76 bp, Artificial Sequence; identical to SEQ ID NO: 3777
  Description of Artificial Sequence: Synthetic brazil nut; 5' sequence +inner sequence + 3' sequence

SEQ ID NO: 11539 - DNA, 76 bp, Artificial Sequence; identical to SEQ ID NO: 3441
  Description of Artificial Sequence: Synthetic brazil nut; 5' sequence +inner sequence + 3' sequence

SEQ ID NO: 11540 - DNA, 76 bp, Artificial Sequence; identical to SEQ ID NO: 3775
  Description of Artificial Sequence: Synthetic brazil nut; 5' sequence +inner sequence + 3' sequence

SEQ ID NO: 11541 - DNA, 76 bp, Artificial Sequence; identical to SEQ ID NO: 3926
  Description of Artificial Sequence: Synthetic brazil nut; 5' sequence +inner sequence + 3' sequence

SEQ ID NO: 11542 - DNA, 76 bp, Artificial Sequence; identical to SEQ ID NO: 3914
  Description of Artificial Sequence: Synthetic brazil nut; 5' sequence +inner sequence + 3' sequence

SEQ ID NO: 11543 - DNA, 76 bp, Artificial Sequence; identical to SEQ ID NO: 7289
  Description of Artificial Sequence: Synthetic brazil nut; 5' sequence +inner sequence + 3' sequence

SEQ ID NO: 11544 - DNA, 76 bp, Artificial Sequence; identical to SEQ ID NO: 3921
  Description of Artificial Sequence: Synthetic brazil nut; 5' sequence +inner sequence + 3' sequence

SEQ ID NO: 11545 - DNA, 76 bp, Artificial Sequence; identical to SEQ ID NO: 3316
  Description of Artificial Sequence: Synthetic brazil nut; 5' sequence +inner sequence + 3' sequence

SEQ ID NO: 11546 - DNA, 76 bp, Artificial Sequence
  Description of Artificial Sequence: Synthetic brazil nut; 5' sequence +inner sequence + 3' sequence
tagggaagagaaggacatatgatcacactgtccgtcgcagcctacgtgcgtcattgactagtacatgaccacttga

SEQ ID NO: 11547 - DNA, 76 bp, Artificial Sequence; identical to SEQ ID NO: 3404
  Description of Artificial Sequence: Synthetic brazil nut; 5' sequence +inner sequence + 3' sequence

SEQ ID NO: 11548 - DNA, 76 bp, Artificial Sequence; identical to SEQ ID NO: 3984
  Description of Artificial Sequence: Synthetic brazil nut; 5' sequence +inner sequence + 3' sequence

SEQ ID NO: 11549 - DNA, 76 bp, Artificial Sequence; identical to SEQ ID NO: 3951
  Description of Artificial Sequence: Synthetic brazil nut; 5' sequence +inner sequence + 3' sequence

SEQ ID NO: 11550 - DNA, 76 bp, Artificial Sequence; identical to SEQ ID NO: 3808
  Description of Artificial Sequence: Synthetic brazil nut; 5' sequence +inner sequence + 3' sequence

SEQ ID NO: 11551 - DNA, 76 bp, Artificial Sequence; identical to SEQ ID NO: 3477
  Description of Artificial Sequence: Synthetic brazil nut; 5' sequence +inner sequence + 3' sequence

SEQ ID NO: 11552 - DNA, 76 bp, Artificial Sequence; identical to SEQ ID NO: 7870
  Description of Artificial Sequence: Synthetic brazil nut; 5' sequence +inner sequence + 3' sequence

SEQ ID NO: 11553 - DNA, 76 bp, Artificial Sequence; identical to SEQ ID NO: 3637
  Description of Artificial Sequence: Synthetic brazil nut; 5' sequence +inner sequence + 3' sequence

SEQ ID NO: 11554 - DNA, 76 bp, Artificial Sequence; identical to SEQ ID NO: 3816
  Description of Artificial Sequence: Synthetic brazil nut; 5' sequence +inner sequence + 3' sequence

SEQ ID NO: 11555 - DNA, 76 bp, Artificial Sequence; identical to SEQ ID NO: 3420
  Description of Artificial Sequence: Synthetic brazil nut; 5' sequence +inner sequence + 3' sequence

SEQ ID NO: 11556 - DNA, 76 bp, Artificial Sequence; identical to SEQ ID NO: 7739
  Description of Artificial Sequence: Synthetic brazil nut; 5' sequence +inner sequence + 3' sequence

SEQ ID NO: 11557 - DNA, 76 bp, Artificial Sequence; identical to SEQ ID NO: 3324
  Description of Artificial Sequence: Synthetic brazil nut; 5' sequence +inner sequence + 3' sequence

SEQ ID NO: 11558 - DNA, 73 bp, Artificial Sequence; identical to SEQ ID NO: 3885
  Description of Artificial Sequence: Synthetic brazil nut; 5' sequence +inner sequence + 3' sequence

SEQ ID NO: 11559 - DNA, 76 bp, Artificial Sequence; identical to SEQ ID NO: 3583
  Description of Artificial Sequence: Synthetic brazil nut; 5' sequence +inner sequence + 3' sequence

SEQ ID NO: 11560 - DNA, 76 bp, Artificial Sequence; identical to SEQ ID NO: 7521
  Description of Artificial Sequence: Synthetic brazil nut; 5' sequence +inner sequence + 3' sequence

SEQ ID NO: 11561 - DNA, 76 bp, Artificial Sequence; identical to SEQ ID NO: 3374
  Description of Artificial Sequence: Synthetic brazil nut; 5' sequence +inner sequence + 3' sequence

SEQ ID NO: 11562 - DNA, 76 bp, Artificial Sequence; identical to SEQ ID NO: 3801
  Description of Artificial Sequence: Synthetic brazil nut; 5' sequence +inner sequence + 3' sequence

SEQ ID NO: 11563 - DNA, 76 bp, Artificial Sequence; identical to SEQ ID NO: 3596
  Description of Artificial Sequence: Synthetic brazil nut; 5' sequence +inner sequence + 3' sequence

SEQ ID NO: 11564 - DNA, 76 bp, Artificial Sequence
  Description of Artificial Sequence: Synthetic brazil nut; 5' sequence +inner sequence + 3' sequence
tagggaagagaaggacatatgatgcatgcagtggacgctcaaccgcgtggacattgactagtacatgaccacttga

SEQ ID NO: 11565 - DNA, 76 bp, Artificial Sequence; identical to SEQ ID NO: 3877
  Description of Artificial Sequence: Synthetic brazil nut; 5' sequence +inner sequence + 3' sequence

SEQ ID NO: 11566 - DNA, 76 bp, Artificial Sequence; identical to SEQ ID NO: 3348
  Description of Artificial Sequence: Synthetic brazil nut; 5' sequence +inner sequence + 3' sequence

SEQ ID NO: 11567 - DNA, 76 bp, Artificial Sequence; identical to SEQ ID NO: 3498
  Description of Artificial Sequence: Synthetic brazil nut; 5' sequence +inner sequence + 3' sequence

SEQ ID NO: 11568 - DNA, 76 bp, Artificial Sequence; identical to SEQ ID NO: 3925
  Description of Artificial Sequence: Synthetic brazil nut; 5' sequence +inner sequence + 3' sequence

SEQ ID NO: 11569 - DNA, 76 bp, Artificial Sequence; identical to SEQ ID NO: 3507
  Description of Artificial Sequence: Synthetic brazil nut; 5' sequence +inner sequence + 3' sequence

SEQ ID NO: 11570 - DNA, 76 bp, Artificial Sequence; identical to SEQ ID NO: 3606
  Description of Artificial Sequence: Synthetic brazil nut; 5' sequence +inner sequence + 3' sequence

SEQ ID NO: 11571 - DNA, 76 bp, Artificial Sequence; identical to SEQ ID NO: 3697
  Description of Artificial Sequence: Synthetic brazil nut; 5' sequence +inner sequence + 3' sequence

SEQ ID NO: 11572 - DNA, 76 bp, Artificial Sequence; identical to SEQ ID NO: 7579
  Description of Artificial Sequence: Synthetic brazil nut; 5' sequence +inner sequence + 3' sequence

SEQ ID NO: 11573 - DNA, 75 bp, Artificial Sequence; identical to SEQ ID NO: 7559
  Description of Artificial Sequence: Synthetic brazil nut; 5' sequence +inner sequence + 3' sequence

SEQ ID NO: 11574 - DNA, 76 bp, Artificial Sequence; identical to SEQ ID NO: 7519
  Description of Artificial Sequence: Synthetic brazil nut; 5' sequence +inner sequence + 3' sequence

SEQ ID NO: 11575 - DNA, 76 bp, Artificial Sequence; identical to SEQ ID NO: 3276
  Description of Artificial Sequence: Synthetic brazil nut; 5' sequence +inner sequence + 3' sequence

SEQ ID NO: 11576 - DNA, 76 bp, Artificial Sequence; identical to SEQ ID NO: 3603
  Description of Artificial Sequence: Synthetic brazil nut; 5' sequence +inner sequence + 3' sequence

SEQ ID NO: 11577 - DNA, 76 bp, Artificial Sequence; identical to SEQ ID NO: 3622
  Description of Artificial Sequence: Synthetic brazil nut; 5' sequence +inner sequence + 3' sequence

SEQ ID NO: 11578 - DNA, 76 bp, Artificial Sequence; identical to SEQ ID NO: 3410
  Description of Artificial Sequence: Synthetic brazil nut; 5' sequence +inner sequence + 3' sequence

SEQ ID NO: 11579 - DNA, 76 bp, Artificial Sequence
  Description of Artificial Sequence: Synthetic brazil nut; 5' sequence +inner sequence + 3' sequence
tagggaagagaaggacatatgatgtcatgccatcccttcgagtgcgacaggtattgactagtacatgaccacttga

SEQ ID NO: 11580 - DNA, 76 bp, Artificial Sequence; identical to SEQ ID NO: 3306
  Description of Artificial Sequence: Synthetic brazil nut; 5' sequence +inner sequence + 3' sequence

SEQ ID NO: 11581 - DNA, 76 bp, Artificial Sequence; identical to SEQ ID NO: 7650
  Description of Artificial Sequence: Synthetic brazil nut; 5' sequence +inner sequence + 3' sequence

SEQ ID NO: 11582 - DNA, 76 bp, Artificial Sequence; identical to SEQ ID NO: 3636
  Description of Artificial Sequence: Synthetic brazil nut; 5' sequence +inner sequence + 3' sequence

SEQ ID NO: 11583 - DNA, 76 bp, Artificial Sequence; identical to SEQ ID NO: 3223
  Description of Artificial Sequence: Synthetic brazil nut; 5' sequence +inner sequence + 3' sequence

SEQ ID NO: 11584 - DNA, 76 bp, Artificial Sequence; identical to SEQ ID NO: 3574
  Description of Artificial Sequence: Synthetic brazil nut; 5' sequence +inner sequence + 3' sequence

SEQ ID NO: 11585 - DNA, 76 bp, Artificial Sequence; identical to SEQ ID NO: 7240
  Description of Artificial Sequence: Synthetic brazil nut; 5' sequence +inner sequence + 3' sequence

SEQ ID NO: 11586 - DNA, 76 bp, Artificial Sequence
  Description of Artificial Sequence: Synthetic brazil nut; 5' sequence +inner sequence + 3' sequence
tagggaagagaaggacatatgatcgtagcgcaggcaaaggtcgtgtcgtcagtttgactagtacatgaccacttga

SEQ ID NO: 11587 - DNA, 76 bp, Artificial Sequence; identical to SEQ ID NO: 3881
  Description of Artificial Sequence: Synthetic brazil nut; 5' sequence +inner sequence + 3' sequence

SEQ ID NO: 11588 - DNA, 76 bp, Artificial Sequence; identical to SEQ ID NO: 3776
  Description of Artificial Sequence: Synthetic brazil nut; 5' sequence +inner sequence + 3' sequence

SEQ ID NO: 11589 - DNA, 76 bp, Artificial Sequence; identical to SEQ ID NO: 7571
  Description of Artificial Sequence: Synthetic brazil nut; 5' sequence +inner sequence + 3' sequence

SEQ ID NO: 11590 - DNA, 76 bp, Artificial Sequence; identical to SEQ ID NO: 3576
  Description of Artificial Sequence: Synthetic brazil nut; 5' sequence +inner sequence + 3' sequence

SEQ ID NO: 11591 - DNA, 76 bp, Artificial Sequence; identical to SEQ ID NO: 3930
  Description of Artificial Sequence: Synthetic brazil nut; 5' sequence +inner sequence + 3' sequence

SEQ ID NO: 11592 - DNA, 76 bp, Artificial Sequence; identical to SEQ ID NO: 7603
  Description of Artificial Sequence: Synthetic brazil nut; 5' sequence +inner sequence + 3' sequence

SEQ ID NO: 11593 - DNA, 76 bp, Artificial Sequence; identical to SEQ ID NO: 3660
  Description of Artificial Sequence: Synthetic brazil nut; 5' sequence +inner sequence + 3' sequence

SEQ ID NO: 11594 - DNA, 76 bp, Artificial Sequence; identical to SEQ ID NO: 3805
  Description of Artificial Sequence: Synthetic brazil nut; 5' sequence +inner sequence + 3' sequence

SEQ ID NO: 11595 - DNA, 76 bp, Artificial Sequence; identical to SEQ ID NO: 7498
  Description of Artificial Sequence: Synthetic brazil nut; 5' sequence +inner sequence + 3' sequence

SEQ ID NO: 11596 - DNA, 76 bp, Artificial Sequence; identical to SEQ ID NO: 3835
  Description of Artificial Sequence: Synthetic brazil nut; 5' sequence +inner sequence + 3' sequence

SEQ ID NO: 11597 - DNA, 76 bp, Artificial Sequence; identical to SEQ ID NO: 7692
  Description of Artificial Sequence: Synthetic brazil nut; 5' sequence +inner sequence + 3' sequence

SEQ ID NO: 11598 - DNA, 76 bp, Artificial Sequence; identical to SEQ ID NO: 7610
  Description of Artificial Sequence: Synthetic brazil nut; 5' sequence +inner sequence + 3' sequence

SEQ ID NO: 11599 - DNA, 76 bp, Artificial Sequence; identical to SEQ ID NO: 7638
  Description of Artificial Sequence: Synthetic brazil nut; 5' sequence +inner sequence + 3' sequence

SEQ ID NO: 11600 - DNA, 76 bp, Artificial Sequence; identical to SEQ ID NO: 7748
  Description of Artificial Sequence: Synthetic brazil nut; 5' sequence +inner sequence + 3' sequence

SEQ ID NO: 11601 - DNA, 76 bp, Artificial Sequence; identical to SEQ ID NO: 7605
  Description of Artificial Sequence: Synthetic brazil nut; 5' sequence +inner sequence + 3' sequence

SEQ ID NO: 11602 - DNA, 76 bp, Artificial Sequence; identical to SEQ ID NO: 7799
  Description of Artificial Sequence: Synthetic brazil nut; 5' sequence +inner sequence + 3' sequence

SEQ ID NO: 11603 - DNA, 76 bp, Artificial Sequence; identical to SEQ ID NO: 7491
  Description of Artificial Sequence: Synthetic brazil nut; 5' sequence +inner sequence + 3' sequence

SEQ ID NO: 11604 - DNA, 76 bp, Artificial Sequence; identical to SEQ ID NO: 3669
  Description of Artificial Sequence: Synthetic brazil nut; 5' sequence +inner sequence + 3' sequence

SEQ ID NO: 11605 - DNA, 76 bp, Artificial Sequence; identical to SEQ ID NO: 3591
  Description of Artificial Sequence: Synthetic brazil nut; 5' sequence +inner sequence + 3' sequence

SEQ ID NO: 11606 - DNA, 76 bp, Artificial Sequence; identical to SEQ ID NO: 7459
  Description of Artificial Sequence: Synthetic brazil nut; 5' sequence +inner sequence + 3' sequence

SEQ ID NO: 11607 - DNA, 76 bp, Artificial Sequence; identical to SEQ ID NO: 3297
  Description of Artificial Sequence: Synthetic brazil nut; 5' sequence +inner sequence + 3' sequence

SEQ ID NO: 11608 - DNA, 76 bp, Artificial Sequence; identical to SEQ ID NO: 7997
  Description of Artificial Sequence: Synthetic brazil nut; 5' sequence +inner sequence + 3' sequence

SEQ ID NO: 11609 - DNA, 76 bp, Artificial Sequence; identical to SEQ ID NO: 7598
  Description of Artificial Sequence: Synthetic brazil nut; 5' sequence +inner sequence + 3' sequence

SEQ ID NO: 11610 - DNA, 76 bp, Artificial Sequence; identical to SEQ ID NO: 3289
  Description of Artificial Sequence: Synthetic brazil nut; 5' sequence +inner sequence + 3' sequence

SEQ ID NO: 11611 - DNA, 76 bp, Artificial Sequence; identical to SEQ ID NO: 3260
  Description of Artificial Sequence: Synthetic brazil nut; 5' sequence +inner sequence + 3' sequence

SEQ ID NO: 11612 - DNA, 76 bp, Artificial Sequence; identical to SEQ ID NO: 7552
  Description of Artificial Sequence: Synthetic brazil nut; 5' sequence +inner sequence + 3' sequence

SEQ ID NO: 11613 - DNA, 76 bp, Artificial Sequence; identical to SEQ ID NO: 3242
  Description of Artificial Sequence: Synthetic brazil nut; 5' sequence +inner sequence + 3' sequence

SEQ ID NO: 11614 - DNA, 76 bp, Artificial Sequence; identical to SEQ ID NO: 7642
  Description of Artificial Sequence: Synthetic brazil nut; 5' sequence +inner sequence + 3' sequence

SEQ ID NO: 11615 - DNA, 76 bp, Artificial Sequence; identical to SEQ ID NO: 3560
  Description of Artificial Sequence: Synthetic brazil nut; 5' sequence +inner sequence + 3' sequence

SEQ ID NO: 11616 - DNA, 76 bp, Artificial Sequence; identical to SEQ ID NO: 3356
  Description of Artificial Sequence: Synthetic brazil nut; 5' sequence +inner sequence + 3' sequence

SEQ ID NO: 11617 - DNA, 76 bp, Artificial Sequence; identical to SEQ ID NO: 3680
  Description of Artificial Sequence: Synthetic brazil nut; 5' sequence +inner sequence + 3' sequence

SEQ ID NO: 11618 - DNA, 76 bp, Artificial Sequence
  Description of Artificial Sequence: Synthetic brazil nut; 5' sequence +inner sequence + 3' sequence
tagggaagagaaggacatatgatgtcatgccatcccttcgagcgtgacaggtattgactagtacatgaccacttga

SEQ ID NO: 11619 - DNA, 76 bp, Artificial Sequence; identical to SEQ ID NO: 3727
  Description of Artificial Sequence: Synthetic brazil nut; 5' sequence +inner sequence + 3' sequence

SEQ ID NO: 11620 - DNA, 76 bp, Artificial Sequence; identical to SEQ ID NO: 3206
  Description of Artificial Sequence: Synthetic brazil nut; 5' sequence +inner sequence + 3' sequence

SEQ ID NO: 11621 - DNA, 76 bp, Artificial Sequence; identical to SEQ ID NO: 7653
  Description of Artificial Sequence: Synthetic brazil nut; 5' sequence +inner sequence + 3' sequence

SEQ ID NO: 11622 - DNA, 76 bp, Artificial Sequence; identical to SEQ ID NO: 3919
  Description of Artificial Sequence: Synthetic brazil nut; 5' sequence +inner sequence + 3' sequence

SEQ ID NO: 11623 - DNA, 76 bp, Artificial Sequence; identical to SEQ ID NO: 3956
  Description of Artificial Sequence: Synthetic brazil nut; 5' sequence +inner sequence + 3' sequence

SEQ ID NO: 11624 - DNA, 76 bp, Artificial Sequence; identical to SEQ ID NO: 3610
  Description of Artificial Sequence: Synthetic brazil nut; 5' sequence +inner sequence + 3' sequence

SEQ ID NO: 11625 - DNA, 76 bp, Artificial Sequence; identical to SEQ ID NO: 7775
  Description of Artificial Sequence: Synthetic brazil nut; 5' sequence +inner sequence + 3' sequence

SEQ ID NO: 11626 - DNA, 77 bp, Artificial Sequence; identical to SEQ ID NO: 3503
  Description of Artificial Sequence: Synthetic brazil nut; 5' sequence +inner sequence + 3' sequence

SEQ ID NO: 11627 - DNA, 76 bp, Artificial Sequence
  Description of Artificial Sequence: Synthetic brazil nut; 5' sequence +inner sequence + 3' sequence
tagggaagagaaggacatatgatggacgcagcttgcctactggtggccacgtattgactagtacatgaccacttga

SEQ ID NO: 11628 - DNA, 76 bp, Artificial Sequence; identical to SEQ ID NO: 7814
  Description of Artificial Sequence: Synthetic brazil nut; 5' sequence +inner sequence + 3' sequence

SEQ ID NO: 11629 - DNA, 76 bp, Artificial Sequence; identical to SEQ ID NO: 3857
  Description of Artificial Sequence: Synthetic brazil nut; 5' sequence +inner sequence + 3' sequence

SEQ ID NO: 11630 - DNA, 76 bp, Artificial Sequence; identical to SEQ ID NO: 7761
  Description of Artificial Sequence: Synthetic brazil nut; 5' sequence +inner sequence + 3' sequence

SEQ ID NO: 11631 - DNA, 76 bp, Artificial Sequence; identical to SEQ ID NO: 3542
  Description of Artificial Sequence: Synthetic brazil nut; 5' sequence +inner sequence + 3' sequence

SEQ ID NO: 11632 - DNA, 76 bp, Artificial Sequence; identical to SEQ ID NO: 3640
  Description of Artificial Sequence: Synthetic brazil nut; 5' sequence +inner sequence + 3' sequence

SEQ ID NO: 11633 - DNA, 76 bp, Artificial Sequence
  Description of Artificial Sequence: Synthetic brazil nut; 5' sequence +inner sequence + 3' sequence
tagggaagagaaggacatatgattgtgcgtccgatcctgccctctacgtggcattgactagtacatgaccacttga

SEQ ID NO: 11634 - DNA, 76 bp, Artificial Sequence; identical to SEQ ID NO: 7580
  Description of Artificial Sequence: Synthetic brazil nut; 5' sequence +inner sequence + 3' sequence

SEQ ID NO: 11635 - DNA, 76 bp, Artificial Sequence; identical to SEQ ID NO: 3225
  Description of Artificial Sequence: Synthetic brazil nut; 5' sequence +inner sequence + 3' sequence

SEQ ID NO: 11636 - DNA, 77 bp, Artificial Sequence; identical to SEQ ID NO: 7619
  Description of Artificial Sequence: Synthetic brazil nut; 5' sequence +inner sequence + 3' sequence

SEQ ID NO: 11637 - DNA, 76 bp, Artificial Sequence; identical to SEQ ID NO: 3452
  Description of Artificial Sequence: Synthetic brazil nut; 5' sequence +inner sequence + 3' sequence

SEQ ID NO: 11638 - DNA, 76 bp, Artificial Sequence; identical to SEQ ID NO: 3874
  Description of Artificial Sequence: Synthetic brazil nut; 5' sequence +inner sequence + 3' sequence

SEQ ID NO: 11639 - DNA, 76 bp, Artificial Sequence; identical to SEQ ID NO: 3608
  Description of Artificial Sequence: Synthetic brazil nut; 5' sequence +inner sequence + 3' sequence

SEQ ID NO: 11640 - DNA, 76 bp, Artificial Sequence; identical to SEQ ID NO: 3754
  Description of Artificial Sequence: Synthetic brazil nut; 5' sequence +inner sequence + 3' sequence

SEQ ID NO: 11641 - DNA, 76 bp, Artificial Sequence; identical to SEQ ID NO: 7721
  Description of Artificial Sequence: Synthetic brazil nut; 5' sequence +inner sequence + 3' sequence

SEQ ID NO: 11642 - DNA, 76 bp, Artificial Sequence; identical to SEQ ID NO: 7513
  Description of Artificial Sequence: Synthetic brazil nut; 5' sequence +inner sequence + 3' sequence

SEQ ID NO: 11643 - DNA, 76 bp, Artificial Sequence; identical to SEQ ID NO: 3286
  Description of Artificial Sequence: Synthetic brazil nut; 5' sequence +inner sequence + 3' sequence

SEQ ID NO: 11644 - DNA, 76 bp, Artificial Sequence; identical to SEQ ID NO: 7890
  Description of Artificial Sequence: Synthetic brazil nut; 5' sequence +inner sequence + 3' sequence

SEQ ID NO: 11645 - DNA, 76 bp, Artificial Sequence; identical to SEQ ID NO: 7722
  Description of Artificial Sequence: Synthetic brazil nut; 5' sequence +inner sequence + 3' sequence

SEQ ID NO: 11646 - DNA, 76 bp, Artificial Sequence; identical to SEQ ID NO: 7356
  Description of Artificial Sequence: Synthetic brazil nut; 5' sequence +inner sequence + 3' sequence

SEQ ID NO: 11647 - DNA, 76 bp, Artificial Sequence; identical to SEQ ID NO: 3275
  Description of Artificial Sequence: Synthetic brazil nut; 5' sequence +inner sequence + 3' sequence

SEQ ID NO: 11648 - DNA, 76 bp, Artificial Sequence; identical to SEQ ID NO: 7451
  Description of Artificial Sequence: Synthetic brazil nut; 5' sequence +inner sequence + 3' sequence

SEQ ID NO: 11649 - DNA, 74 bp, Artificial Sequence; identical to SEQ ID NO: 3423
  Description of Artificial Sequence: Synthetic brazil nut; 5' sequence +inner sequence + 3' sequence

SEQ ID NO: 11650 - DNA, 76 bp, Artificial Sequence; identical to SEQ ID NO: 3328
  Description of Artificial Sequence: Synthetic brazil nut; 5' sequence +inner sequence + 3' sequence

SEQ ID NO: 11651 - DNA, 76 bp, Artificial Sequence; identical to SEQ ID NO: 3717
  Description of Artificial Sequence: Synthetic brazil nut; 5' sequence +inner sequence + 3' sequence

SEQ ID NO: 11652 - DNA, 76 bp, Artificial Sequence; identical to SEQ ID NO: 3434
  Description of Artificial Sequence: Synthetic brazil nut; 5' sequence +inner sequence + 3' sequence

SEQ ID NO: 11653 - DNA, 76 bp, Artificial Sequence; identical to SEQ ID NO: 7644
  Description of Artificial Sequence: Synthetic brazil nut; 5' sequence +inner sequence + 3' sequence

SEQ ID NO: 11654 - DNA, 76 bp, Artificial Sequence; identical to SEQ ID NO: 7710
  Description of Artificial Sequence: Synthetic brazil nut; 5' sequence +inner sequence + 3' sequence

SEQ ID NO: 11655 - DNA, 76 bp, Artificial Sequence; identical to SEQ ID NO: 3363
  Description of Artificial Sequence: Synthetic brazil nut; 5' sequence +inner sequence + 3' sequence

SEQ ID NO: 11656 - DNA, 76 bp, Artificial Sequence; identical to SEQ ID NO: 7627
  Description of Artificial Sequence: Synthetic brazil nut; 5' sequence +inner sequence + 3' sequence

SEQ ID NO: 11657 - DNA, 76 bp, Artificial Sequence; identical to SEQ ID NO: 3219
  Description of Artificial Sequence: Synthetic brazil nut; 5' sequence +inner sequence + 3' sequence

SEQ ID NO: 11658 - DNA, 76 bp, Artificial Sequence; identical to SEQ ID NO: 3486
  Description of Artificial Sequence: Synthetic brazil nut; 5' sequence +inner sequence + 3' sequence

SEQ ID NO: 11659 - DNA, 76 bp, Artificial Sequence
  Description of Artificial Sequence: Synthetic brazil nut; 5' sequence +inner sequence + 3' sequence
tagggaagagaaggacatatgatcgtgtgtacgaaacttgccgcgtggccatgttgactagtacatgaccacttga

SEQ ID NO: 11660 - DNA, 76 bp, Artificial Sequence; identical to SEQ ID NO: 3968
  Description of Artificial Sequence: Synthetic brazil nut; 5' sequence +inner sequence + 3' sequence

SEQ ID NO: 11661 - DNA, 76 bp, Artificial Sequence; identical to SEQ ID NO: 3510
  Description of Artificial Sequence: Synthetic brazil nut; 5' sequence +inner sequence + 3' sequence

SEQ ID NO: 11662 - DNA, 76 bp, Artificial Sequence; identical to SEQ ID NO: 7873
  Description of Artificial Sequence: Synthetic brazil nut; 5' sequence +inner sequence + 3' sequence

SEQ ID NO: 11663 - DNA, 76 bp, Artificial Sequence; identical to SEQ ID NO: 7717
  Description of Artificial Sequence: Synthetic brazil nut; 5' sequence +inner sequence + 3' sequence

SEQ ID NO: 11664 - DNA, 76 bp, Artificial Sequence; identical to SEQ ID NO: 3720
  Description of Artificial Sequence: Synthetic brazil nut; 5' sequence +inner sequence + 3' sequence

SEQ ID NO: 11665 - DNA, 76 bp, Artificial Sequence; identical to SEQ ID NO: 7565
  Description of Artificial Sequence: Synthetic brazil nut; 5' sequence +inner sequence + 3' sequence

SEQ ID NO: 11666 - DNA, 76 bp, Artificial Sequence; identical to SEQ ID NO: 7489
  Description of Artificial Sequence: Synthetic brazil nut; 5' sequence +inner sequence + 3' sequence

SEQ ID NO: 11667 - DNA, 76 bp, Artificial Sequence; identical to SEQ ID NO: 7679
  Description of Artificial Sequence: Synthetic brazil nut; 5' sequence +inner sequence + 3' sequence

SEQ ID NO: 11668 - DNA, 76 bp, Artificial Sequence; identical to SEQ ID NO: 3758
  Description of Artificial Sequence: Synthetic brazil nut; 5' sequence +inner sequence + 3' sequence

SEQ ID NO: 11669 - DNA, 76 bp, Artificial Sequence; identical to SEQ ID NO: 3722
  Description of Artificial Sequence: Synthetic brazil nut; 5' sequence +inner sequence + 3' sequence

SEQ ID NO: 11670 - DNA, 76 bp, Artificial Sequence
  Description of Artificial Sequence: Synthetic brazil nut; 5' sequence +inner sequence + 3' sequence
tagggaagagaaggacatatgatgtgcgacagaccctagcgagtgaacgtgtattgactagtacatgaccacttga

SEQ ID NO: 11671 - DNA, 76 bp, Artificial Sequence; identical to SEQ ID NO: 3889
  Description of Artificial Sequence: Synthetic brazil nut; 5' sequence +inner sequence + 3' sequence

SEQ ID NO: 11672 - DNA, 76 bp, Artificial Sequence; identical to SEQ ID NO: 7670
  Description of Artificial Sequence: Synthetic brazil nut; 5' sequence +inner sequence + 3' sequence

SEQ ID NO: 11673 - DNA, 76 bp, Artificial Sequence; identical to SEQ ID NO: 3677
  Description of Artificial Sequence: Synthetic brazil nut; 5' sequence +inner sequence + 3' sequence

SEQ ID NO: 11674 - DNA, 76 bp, Artificial Sequence; identical to SEQ ID NO: 7504
  Description of Artificial Sequence: Synthetic brazil nut; 5' sequence +inner sequence + 3' sequence

SEQ ID NO: 11675 - DNA, 76 bp, Artificial Sequence; identical to SEQ ID NO: 7405
  Description of Artificial Sequence: Synthetic brazil nut; 5' sequence +inner sequence + 3' sequence

SEQ ID NO: 11676 - DNA, 76 bp, Artificial Sequence
  Description of Artificial Sequence: Synthetic brazil nut; 5' sequence +inner sequence + 3' sequence
tagggaagagaaggacatatgattgacctgcgtgttcaccgtggccatgcacgttgactagtacatgaccacttga

SEQ ID NO: 11677 - DNA, 76 bp, Artificial Sequence; identical to SEQ ID NO: 3575
  Description of Artificial Sequence: Synthetic brazil nut; 5' sequence +inner sequence + 3' sequence

SEQ ID NO: 11678 - DNA, 76 bp, Artificial Sequence
  Description of Artificial Sequence: Synthetic brazil nut; 5' sequence +inner sequence + 3' sequence
tagggaagagaaggacatatgatggcacgtaacgcacgacgcaacggtgggtattgactagtacatgaccacttga

SEQ ID NO: 11679 - DNA, 76 bp, Artificial Sequence; identical to SEQ ID NO: 7631
  Description of Artificial Sequence: Synthetic brazil nut; 5' sequence +inner sequence + 3' sequence

SEQ ID NO: 11680 - DNA, 76 bp, Artificial Sequence; identical to SEQ ID NO: 3718
  Description of Artificial Sequence: Synthetic brazil nut; 5' sequence +inner sequence + 3' sequence

SEQ ID NO: 11681 - DNA, 76 bp, Artificial Sequence; identical to SEQ ID NO: 7530
  Description of Artificial Sequence: Synthetic brazil nut; 5' sequence +inner sequence + 3' sequence

SEQ ID NO: 11682 - DNA, 76 bp, Artificial Sequence
  Description of Artificial Sequence: Synthetic brazil nut; 5' sequence +inner sequence + 3' sequence
tagggaagagaaggacatatgatgtcacgcgctcgtaccctaacgagtggacattgactagtacatgaccacttga

SEQ ID NO: 11683 - DNA, 76 bp, Artificial Sequence; identical to SEQ ID NO: 3464
  Description of Artificial Sequence: Synthetic brazil nut; 5' sequence +inner sequence + 3' sequence

SEQ ID NO: 11684 - DNA, 76 bp, Artificial Sequence; identical to SEQ ID NO: 3664
  Description of Artificial Sequence: Synthetic brazil nut; 5' sequence +inner sequence + 3' sequence

SEQ ID NO: 11685 - DNA, 76 bp, Artificial Sequence; identical to SEQ ID NO: 3837
  Description of Artificial Sequence: Synthetic brazil nut; 5' sequence +inner sequence + 3' sequence

SEQ ID NO: 11686 - DNA, 76 bp, Artificial Sequence; identical to SEQ ID NO: 7611
  Description of Artificial Sequence: Synthetic brazil nut; 5' sequence +inner sequence + 3' sequence

SEQ ID NO: 11687 - DNA, 76 bp, Artificial Sequence; identical to SEQ ID NO: 3300
  Description of Artificial Sequence: Synthetic brazil nut; 5' sequence +inner sequence + 3' sequence

SEQ ID NO: 11688 - DNA, 76 bp, Artificial Sequence; identical to SEQ ID NO: 3979
  Description of Artificial Sequence: Synthetic brazil nut; 5' sequence +inner sequence + 3' sequence

SEQ ID NO: 11689 - DNA, 76 bp, Artificial Sequence; identical to SEQ ID NO: 3398
  Description of Artificial Sequence: Synthetic brazil nut; 5' sequence +inner sequence + 3' sequence

SEQ ID NO: 11690 - DNA, 76 bp, Artificial Sequence; identical to SEQ ID NO: 7503
  Description of Artificial Sequence: Synthetic brazil nut; 5' sequence +inner sequence + 3' sequence

SEQ ID NO: 11691 - DNA, 76 bp, Artificial Sequence; identical to SEQ ID NO: 7707
  Description of Artificial Sequence: Synthetic brazil nut; 5' sequence +inner sequence + 3' sequence

SEQ ID NO: 11692 - DNA, 76 bp, Artificial Sequence; identical to SEQ ID NO: 3635
  Description of Artificial Sequence: Synthetic brazil nut; 5' sequence +inner sequence + 3' sequence

SEQ ID NO: 11693 - DNA, 76 bp, Artificial Sequence; identical to SEQ ID NO: 7938
  Description of Artificial Sequence: Synthetic brazil nut; 5' sequence +inner sequence + 3' sequence

SEQ ID NO: 11694 - DNA, 76 bp, Artificial Sequence; identical to SEQ ID NO: 7939
  Description of Artificial Sequence: Synthetic brazil nut; 5' sequence +inner sequence + 3' sequence

SEQ ID NO: 11695 - DNA, 76 bp, Artificial Sequence; identical to SEQ ID NO: 8001
  Description of Artificial Sequence: Synthetic brazil nut; 5' sequence +inner sequence + 3' sequence

SEQ ID NO: 11696 - DNA, 76 bp, Artificial Sequence; identical to SEQ ID NO: 3333
  Description of Artificial Sequence: Synthetic brazil nut; 5' sequence +inner sequence + 3' sequence

SEQ ID NO: 11697 - DNA, 76 bp, Artificial Sequence; identical to SEQ ID NO: 3840
  Description of Artificial Sequence: Synthetic brazil nut; 5' sequence +inner sequence + 3' sequence

SEQ ID NO: 11698 - DNA, 76 bp, Artificial Sequence; identical to SEQ ID NO: 3322
  Description of Artificial Sequence: Synthetic brazil nut; 5' sequence +inner sequence + 3' sequence

SEQ ID NO: 11699 - DNA, 76 bp, Artificial Sequence; identical to SEQ ID NO: 7999
  Description of Artificial Sequence: Synthetic brazil nut; 5' sequence +inner sequence + 3' sequence

SEQ ID NO: 11700 - DNA, 76 bp, Artificial Sequence; identical to SEQ ID NO: 7943
  Description of Artificial Sequence: Synthetic brazil nut; 5' sequence +inner sequence + 3' sequence

SEQ ID NO: 11701 - DNA, 76 bp, Artificial Sequence; identical to SEQ ID NO: 7898
  Description of Artificial Sequence: Synthetic brazil nut; 5' sequence +inner sequence + 3' sequence

SEQ ID NO: 11702 - DNA, 76 bp, Artificial Sequence; identical to SEQ ID NO: 3580
  Description of Artificial Sequence: Synthetic brazil nut; 5' sequence +inner sequence + 3' sequence

SEQ ID NO: 11703 - DNA, 76 bp, Artificial Sequence; identical to SEQ ID NO: 3691
  Description of Artificial Sequence: Synthetic brazil nut; 5' sequence +inner sequence + 3' sequence

SEQ ID NO: 11704 - DNA, 76 bp, Artificial Sequence; identical to SEQ ID NO: 7735
  Description of Artificial Sequence: Synthetic brazil nut; 5' sequence +inner sequence + 3' sequence

SEQ ID NO: 11705 - DNA, 76 bp, Artificial Sequence; identical to SEQ ID NO: 3502
  Description of Artificial Sequence: Synthetic brazil nut; 5' sequence +inner sequence + 3' sequence

SEQ ID NO: 11706 - DNA, 76 bp, Artificial Sequence; identical to SEQ ID NO: 7933
  Description of Artificial Sequence: Synthetic brazil nut; 5' sequence +inner sequence + 3' sequence

SEQ ID NO: 11707 - DNA, 76 bp, Artificial Sequence; identical to SEQ ID NO: 3917
  Description of Artificial Sequence: Synthetic brazil nut; 5' sequence +inner sequence + 3' sequence

SEQ ID NO: 11708 - DNA, 76 bp, Artificial Sequence; identical to SEQ ID NO: 3601
  Description of Artificial Sequence: Synthetic brazil nut; 5' sequence +inner sequence + 3' sequence

SEQ ID NO: 11709 - DNA, 76 bp, Artificial Sequence; identical to SEQ ID NO: 3788
  Description of Artificial Sequence: Synthetic brazil nut; 5' sequence +inner sequence + 3' sequence

SEQ ID NO: 11710 - DNA, 76 bp, Artificial Sequence; identical to SEQ ID NO: 7807
  Description of Artificial Sequence: Synthetic brazil nut; 5' sequence +inner sequence + 3' sequence

SEQ ID NO: 11711 - DNA, 76 bp, Artificial Sequence; identical to SEQ ID NO: 3566
  Description of Artificial Sequence: Synthetic brazil nut; 5' sequence +inner sequence + 3' sequence

SEQ ID NO: 11712 - DNA, 76 bp, Artificial Sequence
  Description of Artificial Sequence: Synthetic brazil nut; 5' sequence +inner sequence + 3' sequence
tagggaagagaaggacatatgatgcattggacgatcgtgccctacacgtggccttgactagtacatgaccacttga

SEQ ID NO: 11713 - DNA, 76 bp, Artificial Sequence; identical to SEQ ID NO: 3768
  Description of Artificial Sequence: Synthetic brazil nut; 5' sequence +inner sequence + 3' sequence

SEQ ID NO: 11714 - DNA, 76 bp, Artificial Sequence; identical to SEQ ID NO: 7956
  Description of Artificial Sequence: Synthetic brazil nut; 5' sequence +inner sequence + 3' sequence

SEQ ID NO: 11715 - DNA, 76 bp, Artificial Sequence; identical to SEQ ID NO: 3249
  Description of Artificial Sequence: Synthetic brazil nut; 5' sequence +inner sequence + 3' sequence

SEQ ID NO: 11716 - DNA, 76 bp, Artificial Sequence; identical to SEQ ID NO: 7517
  Description of Artificial Sequence: Synthetic brazil nut; 5' sequence +inner sequence + 3' sequence

SEQ ID NO: 11717 - DNA, 76 bp, Artificial Sequence; identical to SEQ ID NO: 3911
  Description of Artificial Sequence: Synthetic brazil nut; 5' sequence +inner sequence + 3' sequence

SEQ ID NO: 11718 - DNA, 76 bp, Artificial Sequence; identical to SEQ ID NO: 7737
  Description of Artificial Sequence: Synthetic brazil nut; 5' sequence +inner sequence + 3' sequence

SEQ ID NO: 11719 - DNA, 76 bp, Artificial Sequence; identical to SEQ ID NO: 7706
  Description of Artificial Sequence: Synthetic brazil nut; 5' sequence +inner sequence + 3' sequence

SEQ ID NO: 11720 - DNA, 76 bp, Artificial Sequence; identical to SEQ ID NO: 3466
  Description of Artificial Sequence: Synthetic brazil nut; 5' sequence +inner sequence + 3' sequence

SEQ ID NO: 11721 - DNA, 76 bp, Artificial Sequence; identical to SEQ ID NO: 3199
  Description of Artificial Sequence: Synthetic brazil nut; 5' sequence +inner sequence + 3' sequence

SEQ ID NO: 11722 - DNA, 76 bp, Artificial Sequence
  Description of Artificial Sequence: Synthetic brazil nut; 5' sequence +inner sequence + 3' sequence
tagggaagagaaggacatatgatcatgcccatgccacgcacactgagcggtcattgactagtacatgaccacttga

SEQ ID NO: 11723 - DNA, 76 bp, Artificial Sequence; identical to SEQ ID NO: 3787
  Description of Artificial Sequence: Synthetic brazil nut; 5' sequence +inner sequence + 3' sequence

SEQ ID NO: 11724 - DNA, 76 bp, Artificial Sequence; identical to SEQ ID NO: 7985
  Description of Artificial Sequence: Synthetic brazil nut; 5' sequence +inner sequence + 3' sequence

SEQ ID NO: 11725 - DNA, 76 bp, Artificial Sequence; identical to SEQ ID NO: 7198
  Description of Artificial Sequence: Synthetic brazil nut; 5' sequence +inner sequence + 3' sequence

SEQ ID NO: 11726 - DNA, 76 bp, Artificial Sequence; identical to SEQ ID NO: 3458
  Description of Artificial Sequence: Synthetic brazil nut; 5' sequence +inner sequence + 3' sequence

SEQ ID NO: 11727 - DNA, 77 bp, Artificial Sequence; identical to SEQ ID NO: 3216
  Description of Artificial Sequence: Synthetic brazil nut; 5' sequence +inner sequence + 3' sequence

SEQ ID NO: 11728 - DNA, 76 bp, Artificial Sequence; identical to SEQ ID NO: 7884
  Description of Artificial Sequence: Synthetic brazil nut; 5' sequence +inner sequence + 3' sequence

SEQ ID NO: 11729 - DNA, 76 bp, Artificial Sequence; identical to SEQ ID NO: 3318
  Description of Artificial Sequence: Synthetic brazil nut; 5' sequence +inner sequence + 3' sequence

SEQ ID NO: 11730 - DNA, 76 bp, Artificial Sequence; identical to SEQ ID NO: 7576
  Description of Artificial Sequence: Synthetic brazil nut; 5' sequence +inner sequence + 3' sequence

SEQ ID NO: 11731 - DNA, 76 bp, Artificial Sequence; identical to SEQ ID NO: 3834
  Description of Artificial Sequence: Synthetic brazil nut; 5' sequence +inner sequence + 3' sequence

SEQ ID NO: 11732 - DNA, 76 bp, Artificial Sequence; identical to SEQ ID NO: 3521
  Description of Artificial Sequence: Synthetic brazil nut; 5' sequence +inner sequence + 3' sequence

SEQ ID NO: 11733 - DNA, 76 bp, Artificial Sequence; identical to SEQ ID NO: 7719
  Description of Artificial Sequence: Synthetic brazil nut; 5' sequence +inner sequence + 3' sequence

SEQ ID NO: 11734 - DNA, 76 bp, Artificial Sequence; identical to SEQ ID NO: 7641
  Description of Artificial Sequence: Synthetic brazil nut; 5' sequence +inner sequence + 3' sequence

SEQ ID NO: 11735 - DNA, 76 bp, Artificial Sequence; identical to SEQ ID NO: 3456
  Description of Artificial Sequence: Synthetic brazil nut; 5' sequence +inner sequence + 3' sequence

SEQ ID NO: 11736 - DNA, 76 bp, Artificial Sequence; identical to SEQ ID NO: 3500
  Description of Artificial Sequence: Synthetic brazil nut; 5' sequence +inner sequence + 3' sequence

SEQ ID NO: 11737 - DNA, 76 bp, Artificial Sequence; identical to SEQ ID NO: 3751
  Description of Artificial Sequence: Synthetic brazil nut; 5' sequence +inner sequence + 3' sequence

SEQ ID NO: 11738 - DNA, 76 bp, Artificial Sequence; identical to SEQ ID NO: 3705
  Description of Artificial Sequence: Synthetic brazil nut; 5' sequence +inner sequence + 3' sequence

SEQ ID NO: 11739 - DNA, 76 bp, Artificial Sequence; identical to SEQ ID NO: 7981
  Description of Artificial Sequence: Synthetic brazil nut; 5' sequence +inner sequence + 3' sequence

SEQ ID NO: 11740 - DNA, 76 bp, Artificial Sequence; identical to SEQ ID NO: 3773
  Description of Artificial Sequence: Synthetic brazil nut; 5' sequence +inner sequence + 3' sequence

SEQ ID NO: 11741 - DNA, 76 bp, Artificial Sequence; identical to SEQ ID NO: 7960
  Description of Artificial Sequence: Synthetic brazil nut; 5' sequence +inner sequence + 3' sequence

SEQ ID NO: 11742 - DNA, 76 bp, Artificial Sequence; identical to SEQ ID NO: 3980
  Description of Artificial Sequence: Synthetic brazil nut; 5' sequence +inner sequence + 3' sequence

SEQ ID NO: 11743 - DNA, 76 bp, Artificial Sequence; identical to SEQ ID NO: 3702
  Description of Artificial Sequence: Synthetic brazil nut; 5' sequence +inner sequence + 3' sequence

SEQ ID NO: 11744 - DNA, 76 bp, Artificial Sequence; identical to SEQ ID NO: 7616
  Description of Artificial Sequence: Synthetic brazil nut; 5' sequence +inner sequence + 3' sequence

SEQ ID NO: 11745 - DNA, 76 bp, Artificial Sequence; identical to SEQ ID NO: 7930
  Description of Artificial Sequence: Synthetic brazil nut; 5' sequence +inner sequence + 3' sequence

SEQ ID NO: 11746 - DNA, 76 bp, Artificial Sequence; identical to SEQ ID NO: 7816
  Description of Artificial Sequence: Synthetic brazil nut; 5' sequence +inner sequence + 3' sequence

SEQ ID NO: 11747 - DNA, 76 bp, Artificial Sequence; identical to SEQ ID NO: 7913
  Description of Artificial Sequence: Synthetic brazil nut; 5' sequence +inner sequence + 3' sequence

SEQ ID NO: 11748 - DNA, 76 bp, Artificial Sequence
  Description of Artificial Sequence: Synthetic brazil nut; 5' sequence +inner sequence + 3' sequence
tagggaagagaaggacatatgatgttacgcagcggacctggtgttcatgcacattgactagtacatgaccacttga

SEQ ID NO: 11749 - DNA, 76 bp, Artificial Sequence; identical to SEQ ID NO: 3943
  Description of Artificial Sequence: Synthetic brazil nut; 5' sequence +inner sequence + 3' sequence

SEQ ID NO: 11750 - DNA, 76 bp, Artificial Sequence; identical to SEQ ID NO: 3813
  Description of Artificial Sequence: Synthetic brazil nut; 5' sequence +inner sequence + 3' sequence

SEQ ID NO: 11751 - DNA, 76 bp, Artificial Sequence; identical to SEQ ID NO: 7526
  Description of Artificial Sequence: Synthetic brazil nut; 5' sequence +inner sequence + 3' sequence

SEQ ID NO: 11752 - DNA, 76 bp, Artificial Sequence
  Description of Artificial Sequence: Synthetic brazil nut; 5' sequence +inner sequence + 3' sequence
tagggaagagaaggacatatgatgtcgtgcggatcgctacacgtggccgtggattgactagtacatgaccacttga

SEQ ID NO: 11753 - DNA, 76 bp, Artificial Sequence; identical to SEQ ID NO: 7744
  Description of Artificial Sequence: Synthetic brazil nut; 5' sequence +inner sequence + 3' sequence

SEQ ID NO: 11754 - DNA, 76 bp, Artificial Sequence; identical to SEQ ID NO: 7776
  Description of Artificial Sequence: Synthetic brazil nut; 5' sequence +inner sequence + 3' sequence

SEQ ID NO: 11755 - DNA, 76 bp, Artificial Sequence; identical to SEQ ID NO: 7745
  Description of Artificial Sequence: Synthetic brazil nut; 5' sequence +inner sequence + 3' sequence

SEQ ID NO: 11756 - DNA, 76 bp, Artificial Sequence
  Description of Artificial Sequence: Synthetic brazil nut; 5' sequence +inner sequence + 3' sequence
tagggaagagaaggacatatgatcgacacgcaagtaggctacgtacacgtcacttgactagtacatgaccacttga

SEQ ID NO: 11757 - DNA, 76 bp, Artificial Sequence; identical to SEQ ID NO: 3515
  Description of Artificial Sequence: Synthetic brazil nut; 5' sequence +inner sequence + 3' sequence

SEQ ID NO: 11758 - DNA, 76 bp, Artificial Sequence
  Description of Artificial Sequence: Synthetic brazil nut; 5' sequence +inner sequence + 3' sequence
tagggaagagaaggacatatgatcgcaccgcatgacggacgtgggactgcgctttgactagtacatgaccacttga

SEQ ID NO: 11759 - DNA, 76 bp, Artificial Sequence; identical to SEQ ID NO: 3763
  Description of Artificial Sequence: Synthetic brazil nut; 5' sequence +inner sequence + 3' sequence

SEQ ID NO: 11760 - DNA, 76 bp, Artificial Sequence; identical to SEQ ID NO: 7384
  Description of Artificial Sequence: Synthetic brazil nut; 5' sequence +inner sequence + 3' sequence

SEQ ID NO: 11761 - DNA, 76 bp, Artificial Sequence; identical to SEQ ID NO: 3906
  Description of Artificial Sequence: Synthetic brazil nut; 5' sequence +inner sequence + 3' sequence

SEQ ID NO: 11762 - DNA, 76 bp, Artificial Sequence; identical to SEQ ID NO: 3497
  Description of Artificial Sequence: Synthetic brazil nut; 5' sequence +inner sequence + 3' sequence

SEQ ID NO: 11763 - DNA, 76 bp, Artificial Sequence
  Description of Artificial Sequence: Synthetic brazil nut; 5' sequence +inner sequence + 3' sequence
tagggaagagaaggacatatgatcgatgcgaaccggaagtgcatgtcgccagcttgactagtacatgaccacttga

SEQ ID NO: 11764 - DNA, 76 bp, Artificial Sequence; identical to SEQ ID NO: 3252
  Description of Artificial Sequence: Synthetic brazil nut; 5' sequence +inner sequence + 3' sequence

SEQ ID NO: 11765 - DNA, 76 bp, Artificial Sequence; identical to SEQ ID NO: 3621
  Description of Artificial Sequence: Synthetic brazil nut; 5' sequence +inner sequence + 3' sequence

SEQ ID NO: 11766 - DNA, 76 bp, Artificial Sequence; identical to SEQ ID NO: 3960
  Description of Artificial Sequence: Synthetic brazil nut; 5' sequence +inner sequence + 3' sequence

SEQ ID NO: 11767 - DNA, 76 bp, Artificial Sequence
  Description of Artificial Sequence: Synthetic brazil nut; 5' sequence +inner sequence + 3' sequence
tagggaagagaaggacatatgatggacgcagcttgcctactggcggtcacgtattgactagtacatgaccacttga

SEQ ID NO: 11768 - DNA, 76 bp, Artificial Sequence; identical to SEQ ID NO: 3676
  Description of Artificial Sequence: Synthetic brazil nut; 5' sequence +inner sequence + 3' sequence

SEQ ID NO: 11769 - DNA, 76 bp, Artificial Sequence
  Description of Artificial Sequence: Synthetic brazil nut; 5' sequence +inner sequence + 3' sequence
tagggaagagaaggacatatgatggacgcagcttgcctactggtgttcacgtattgactagtacatgaccacttga

SEQ ID NO: 11770 - DNA, 76 bp, Artificial Sequence
  Description of Artificial Sequence: Synthetic brazil nut; 5' sequence +inner sequence + 3' sequence
tagggaagagaaggacatatgatggaccaaagcgaacgtggacgtacgacgcattgactagtacatgaccacttga

SEQ ID NO: 11771 - DNA, 76 bp, Artificial Sequence; identical to SEQ ID NO: 7740
  Description of Artificial Sequence: Synthetic brazil nut; 5' sequence +inner sequence + 3' sequence

SEQ ID NO: 11772 - DNA, 76 bp, Artificial Sequence; identical to SEQ ID NO: 7953
  Description of Artificial Sequence: Synthetic brazil nut; 5' sequence +inner sequence + 3' sequence

SEQ ID NO: 11773 - DNA, 76 bp, Artificial Sequence; identical to SEQ ID NO: 7694
  Description of Artificial Sequence: Synthetic brazil nut; 5' sequence +inner sequence + 3' sequence

SEQ ID NO: 11774 - DNA, 76 bp, Artificial Sequence; identical to SEQ ID NO: 3670
  Description of Artificial Sequence: Synthetic brazil nut; 5' sequence +inner sequence + 3' sequence

SEQ ID NO: 11775 - DNA, 76 bp, Artificial Sequence; identical to SEQ ID NO: 7742
  Description of Artificial Sequence: Synthetic brazil nut; 5' sequence +inner sequence + 3' sequence

SEQ ID NO: 11776 - DNA, 74 bp, Artificial Sequence; identical to SEQ ID NO: 7786
  Description of Artificial Sequence: Synthetic brazil nut; 5' sequence +inner sequence + 3' sequence

SEQ ID NO: 11777 - DNA, 76 bp, Artificial Sequence; identical to SEQ ID NO: 7700
  Description of Artificial Sequence: Synthetic brazil nut; 5' sequence +inner sequence + 3' sequence

SEQ ID NO: 11778 - DNA, 76 bp, Artificial Sequence; identical to SEQ ID NO: 7381
  Description of Artificial Sequence: Synthetic brazil nut; 5' sequence +inner sequence + 3' sequence

SEQ ID NO: 11779 - DNA, 76 bp, Artificial Sequence; identical to SEQ ID NO: 7859
  Description of Artificial Sequence: Synthetic brazil nut; 5' sequence +inner sequence + 3' sequence

SEQ ID NO: 11780 - DNA, 76 bp, Artificial Sequence; identical to SEQ ID NO: 3449
  Description of Artificial Sequence: Synthetic brazil nut; 5' sequence +inner sequence + 3' sequence

SEQ ID NO: 11781 - DNA, 76 bp, Artificial Sequence; identical to SEQ ID NO: 4002
  Description of Artificial Sequence: Synthetic brazil nut; 5' sequence +inner sequence + 3' sequence

SEQ ID NO: 11782 - DNA, 76 bp, Artificial Sequence
  Description of Artificial Sequence: Synthetic brazil nut; 5' sequence +inner sequence + 3' sequence
tagggaagagaaggacatatgatgcacgactcgcactctatcatgaggccatgttgactagtacatgaccacttga

SEQ ID NO: 11783 - DNA, 76 bp, Artificial Sequence; identical to SEQ ID NO: 3849
  Description of Artificial Sequence: Synthetic brazil nut; 5' sequence +inner sequence + 3' sequence

SEQ ID NO: 11784 - DNA, 76 bp, Artificial Sequence; identical to SEQ ID NO: 3629
  Description of Artificial Sequence: Synthetic brazil nut; 5' sequence +inner sequence + 3' sequence

SEQ ID NO: 11785 - DNA, 76 bp, Artificial Sequence; identical to SEQ ID NO: 3263
  Description of Artificial Sequence: Synthetic brazil nut; 5' sequence +inner sequence + 3' sequence

SEQ ID NO: 11786 - DNA, 76 bp, Artificial Sequence; identical to SEQ ID NO: 7520
  Description of Artificial Sequence: Synthetic brazil nut; 5' sequence +inner sequence + 3' sequence

SEQ ID NO: 11787 - DNA, 76 bp, Artificial Sequence
  Description of Artificial Sequence: Synthetic brazil nut; 5' sequence +inner sequence + 3' sequence
tagggaagagaaggacatatgatgcaatgcgtgtcacgaacttgccgttgggcttgactagtacatgaccacttga

SEQ ID NO: 11788 - DNA, 76 bp, Artificial Sequence; identical to SEQ ID NO: 3920
  Description of Artificial Sequence: Synthetic brazil nut; 5' sequence +inner sequence + 3' sequence

SEQ ID NO: 11789 - DNA, 76 bp, Artificial Sequence; identical to SEQ ID NO: 7575
  Description of Artificial Sequence: Synthetic brazil nut; 5' sequence +inner sequence + 3' sequence

SEQ ID NO: 11790 - DNA, 76 bp, Artificial Sequence; identical to SEQ ID NO: 3650
  Description of Artificial Sequence: Synthetic brazil nut; 5' sequence +inner sequence + 3' sequence

SEQ ID NO: 11791 - DNA, 76 bp, Artificial Sequence; identical to SEQ ID NO: 3830
  Description of Artificial Sequence: Synthetic brazil nut; 5' sequence +inner sequence + 3' sequence

SEQ ID NO: 11792 - DNA, 76 bp, Artificial Sequence
  Description of Artificial Sequence: Synthetic brazil nut; 5' sequence +inner sequence + 3' sequence
tagggaagagaaggacatatgatggcacggtgcgtccctaactcatgtggacattgactagtacatgaccacttga

SEQ ID NO: 11793 - DNA, 76 bp, Artificial Sequence; identical to SEQ ID NO: 3505
  Description of Artificial Sequence: Synthetic brazil nut; 5' sequence +inner sequence + 3' sequence

SEQ ID NO: 11794 - DNA, 76 bp, Artificial Sequence; identical to SEQ ID NO: 3701
  Description of Artificial Sequence: Synthetic brazil nut; 5' sequence +inner sequence + 3' sequence

SEQ ID NO: 11795 - DNA, 76 bp, Artificial Sequence; identical to SEQ ID NO: 7940
  Description of Artificial Sequence: Synthetic brazil nut; 5' sequence +inner sequence + 3' sequence

SEQ ID NO: 11796 - DNA, 76 bp, Artificial Sequence; identical to SEQ ID NO: 7743
  Description of Artificial Sequence: Synthetic brazil nut; 5' sequence +inner sequence + 3' sequence

SEQ ID NO: 11797 - DNA, 76 bp, Artificial Sequence; identical to SEQ ID NO: 7856
  Description of Artificial Sequence: Synthetic brazil nut; 5' sequence +inner sequence + 3' sequence

SEQ ID NO: 11798 - DNA, 76 bp, Artificial Sequence
  Description of Artificial Sequence: Synthetic brazil nut; 5' sequence +inner sequence + 3' sequence
tagggaagagaaggacatatgatgcacgactcgcaccctatcatgaggctatgttgactagtacatgaccacttga

SEQ ID NO: 11799 - DNA, 76 bp, Artificial Sequence; identical to SEQ ID NO: 7867
  Description of Artificial Sequence: Synthetic brazil nut; 5' sequence +inner sequence + 3' sequence

SEQ ID NO: 11800 - DNA, 76 bp, Artificial Sequence; identical to SEQ ID NO: 3668
  Description of Artificial Sequence: Synthetic brazil nut; 5' sequence +inner sequence + 3' sequence

SEQ ID NO: 11801 - DNA, 76 bp, Artificial Sequence
  Description of Artificial Sequence: Synthetic brazil nut; 5' sequence +inner sequence + 3' sequence
tagggaagagaaggacatatgatcgtgcgatgaccaagtggcgatgctacacgttgactagtacatgaccacttga

SEQ ID NO: 11802 - DNA, 76 bp, Artificial Sequence; identical to SEQ ID NO: 7889
  Description of Artificial Sequence: Synthetic brazil nut; 5' sequence +inner sequence + 3' sequence

SEQ ID NO: 11803 - DNA, 76 bp, Artificial Sequence; identical to SEQ ID NO: 3772
  Description of Artificial Sequence: Synthetic brazil nut; 5' sequence +inner sequence + 3' sequence

SEQ ID NO: 11804 - DNA, 76 bp, Artificial Sequence
  Description of Artificial Sequence: Synthetic brazil nut; 5' sequence +inner sequence + 3' sequence
tagggaagagaaggacatatgatgtcatgcggaccgaactggatgtgtgcatgttgactagtacatgaccacttga

SEQ ID NO: 11805 - DNA, 76 bp, Artificial Sequence; identical to SEQ ID NO: 3330
  Description of Artificial Sequence: Synthetic brazil nut; 5' sequence +inner sequence + 3' sequence

SEQ ID NO: 11806 - DNA, 76 bp, Artificial Sequence; identical to SEQ ID NO: 7802
  Description of Artificial Sequence: Synthetic brazil nut; 5' sequence +inner sequence + 3' sequence

SEQ ID NO: 11807 - DNA, 76 bp, Artificial Sequence
  Description of Artificial Sequence: Synthetic brazil nut; 5' sequence +inner sequence + 3' sequence
tagggaagagaaggacatatgatggacgcatcgccccttcgagtggacaggcattgactagtacatgaccacttga

SEQ ID NO: 11808 - DNA, 76 bp, Artificial Sequence; identical to SEQ ID NO: 3962
  Description of Artificial Sequence: Synthetic brazil nut; 5' sequence +inner sequence + 3' sequence

SEQ ID NO: 11809 - DNA, 76 bp, Artificial Sequence; identical to SEQ ID NO: 3357
  Description of Artificial Sequence: Synthetic brazil nut; 5' sequence +inner sequence + 3' sequence

SEQ ID NO: 11810 - DNA, 76 bp, Artificial Sequence
  Description of Artificial Sequence: Synthetic brazil nut; 5' sequence +inner sequence + 3' sequence
tagggaagagaaggacatatgatgcacgactcgcaccctatcatgaggacatgttgactagtacatgaccacttga

SEQ ID NO: 11811 - DNA, 76 bp, Artificial Sequence; identical to SEQ ID NO: 7874
  Description of Artificial Sequence: Synthetic brazil nut; 5' sequence +inner sequence + 3' sequence

SEQ ID NO: 11812 - DNA, 76 bp, Artificial Sequence; identical to SEQ ID NO: 3679
  Description of Artificial Sequence: Synthetic brazil nut; 5' sequence +inner sequence + 3' sequence

SEQ ID NO: 11813 - DNA, 76 bp, Artificial Sequence; identical to SEQ ID NO: 7935
  Description of Artificial Sequence: Synthetic brazil nut; 5' sequence +inner sequence + 3' sequence

SEQ ID NO: 11814 - DNA, 76 bp, Artificial Sequence; identical to SEQ ID NO: 7886
  Description of Artificial Sequence: Synthetic brazil nut; 5' sequence +inner sequence + 3' sequence

SEQ ID NO: 11815 - DNA, 76 bp, Artificial Sequence; identical to SEQ ID NO: 3417
  Description of Artificial Sequence: Synthetic brazil nut; 5' sequence +inner sequence + 3' sequence

SEQ ID NO: 11816 - DNA, 76 bp, Artificial Sequence
  Description of Artificial Sequence: Synthetic brazil nut; 5' sequence +inner sequence + 3' sequence
tagggaagagaaggacatatgatcgcgcaccgacaacgtgcaggcactacggcttgactagtacatgaccacttga

SEQ ID NO: 11817 - DNA, 76 bp, Artificial Sequence; identical to SEQ ID NO: 3644
  Description of Artificial Sequence: Synthetic brazil nut; 5' sequence +inner sequence + 3' sequence

SEQ ID NO: 11818 - DNA, 76 bp, Artificial Sequence; identical to SEQ ID NO: 7591
  Description of Artificial Sequence: Synthetic brazil nut; 5' sequence +inner sequence + 3' sequence

SEQ ID NO: 11819 - DNA, 76 bp, Artificial Sequence; identical to SEQ ID NO: 7470
  Description of Artificial Sequence: Synthetic brazil nut; 5' sequence +inner sequence + 3' sequence

SEQ ID NO: 11820 - DNA, 76 bp, Artificial Sequence; identical to SEQ ID NO: 3685
  Description of Artificial Sequence: Synthetic brazil nut; 5' sequence +inner sequence + 3' sequence

SEQ ID NO: 11821 - DNA, 76 bp, Artificial Sequence; identical to SEQ ID NO: 7893
  Description of Artificial Sequence: Synthetic brazil nut; 5' sequence +inner sequence + 3' sequence

SEQ ID NO: 11822 - DNA, 76 bp, Artificial Sequence; identical to SEQ ID NO: 7817
  Description of Artificial Sequence: Synthetic brazil nut; 5' sequence +inner sequence + 3' sequence

SEQ ID NO: 11823 - DNA, 76 bp, Artificial Sequence; identical to SEQ ID NO: 7634
  Description of Artificial Sequence: Synthetic brazil nut; 5' sequence +inner sequence + 3' sequence

SEQ ID NO: 11824 - DNA, 76 bp, Artificial Sequence
  Description of Artificial Sequence: Synthetic brazil nut; 5' sequence +inner sequence + 3' sequence
tagggaagagaaggacatatgatcacgatccgacaaggcgtgacgtggccatgttgactagtacatgaccacttga

SEQ ID NO: 11825 - DNA, 76 bp, Artificial Sequence
  Description of Artificial Sequence: Synthetic brazil nut; 5' sequence +inner sequence + 3' sequence
tagggaagagaaggacatatgatgtggttcgcagcccgttcaagtcaggcatgttgactagtacatgaccacttga

SEQ ID NO: 11826 - DNA, 76 bp, Artificial Sequence
  Description of Artificial Sequence: Synthetic brazil nut; 5' sequence +inner sequence + 3' sequence
tagggaagagaaggacatatgatgcgatgcagcaccgtaacgaccagcgtggattgactagtacatgaccacttga

SEQ ID NO: 11827 - DNA, 76 bp, Artificial Sequence; identical to SEQ ID NO: 7837
  Description of Artificial Sequence: Synthetic brazil nut; 5' sequence +inner sequence + 3' sequence

SEQ ID NO: 11828 - DNA, 76 bp, Artificial Sequence; identical to SEQ ID NO: 7988
  Description of Artificial Sequence: Synthetic brazil nut; 5' sequence +inner sequence + 3' sequence

SEQ ID NO: 11829 - DNA, 76 bp, Artificial Sequence; identical to SEQ ID NO: 3592
  Description of Artificial Sequence: Synthetic brazil nut; 5' sequence +inner sequence + 3' sequence

SEQ ID NO: 11830 - DNA, 76 bp, Artificial Sequence; identical to SEQ ID NO: 3942
  Description of Artificial Sequence: Synthetic brazil nut; 5' sequence +inner sequence + 3' sequence

SEQ ID NO: 11831 - DNA, 76 bp, Artificial Sequence; identical to SEQ ID NO: 7688
  Description of Artificial Sequence: Synthetic brazil nut; 5' sequence +inner sequence + 3' sequence

SEQ ID NO: 11832 - DNA, 76 bp, Artificial Sequence; identical to SEQ ID NO: 4001
  Description of Artificial Sequence: Synthetic brazil nut; 5' sequence +inner sequence + 3' sequence

SEQ ID NO: 11833 - DNA, 76 bp, Artificial Sequence; identical to SEQ ID NO: 3662
  Description of Artificial Sequence: Synthetic brazil nut; 5' sequence +inner sequence + 3' sequence

SEQ ID NO: 11834 - DNA, 76 bp, Artificial Sequence; identical to SEQ ID NO: 3913
  Description of Artificial Sequence: Synthetic brazil nut; 5' sequence +inner sequence + 3' sequence

SEQ ID NO: 11835 - DNA, 76 bp, Artificial Sequence; identical to SEQ ID NO: 7620
  Description of Artificial Sequence: Synthetic brazil nut; 5' sequence +inner sequence + 3' sequence

SEQ ID NO: 11836 - DNA, 76 bp, Artificial Sequence; identical to SEQ ID NO: 7621
  Description of Artificial Sequence: Synthetic brazil nut; 5' sequence +inner sequence + 3' sequence

SEQ ID NO: 11837 - DNA, 76 bp, Artificial Sequence
  Description of Artificial Sequence: Synthetic brazil nut; 5' sequence +inner sequence + 3' sequence
tagggaagagaaggacatatgatgtgcaacacgacctagcaagtgagctggcattgactagtacatgaccacttga

SEQ ID NO: 11838 - DNA, 76 bp, Artificial Sequence; identical to SEQ ID NO: 3961
  Description of Artificial Sequence: Synthetic brazil nut; 5' sequence +inner sequence + 3' sequence

SEQ ID NO: 11839 - DNA, 76 bp, Artificial Sequence; identical to SEQ ID NO: 3435
  Description of Artificial Sequence: Synthetic brazil nut; 5' sequence +inner sequence + 3' sequence

SEQ ID NO: 11840 - DNA, 76 bp, Artificial Sequence; identical to SEQ ID NO: 3832
  Description of Artificial Sequence: Synthetic brazil nut; 5' sequence +inner sequence + 3' sequence

SEQ ID NO: 11841 - DNA, 76 bp, Artificial Sequence; identical to SEQ ID NO: 7822
  Description of Artificial Sequence: Synthetic brazil nut; 5' sequence +inner sequence + 3' sequence

SEQ ID NO: 11842 - DNA, 76 bp, Artificial Sequence; identical to SEQ ID NO: 3734
  Description of Artificial Sequence: Synthetic brazil nut; 5' sequence +inner sequence + 3' sequence

SEQ ID NO: 11843 - DNA, 76 bp, Artificial Sequence; identical to SEQ ID NO: 7713
  Description of Artificial Sequence: Synthetic brazil nut; 5' sequence +inner sequence + 3' sequence

SEQ ID NO: 11844 - DNA, 76 bp, Artificial Sequence
  Description of Artificial Sequence: Synthetic brazil nut; 5' sequence +inner sequence + 3' sequence
tagggaagagaaggacatatgatggcacgcactcgattcgccttcacgtggttttgactagtacatgaccacttga

SEQ ID NO: 11845 - DNA, 76 bp, Artificial Sequence; identical to SEQ ID NO: 3626
  Description of Artificial Sequence: Synthetic brazil nut; 5' sequence +inner sequence + 3' sequence

SEQ ID NO: 11846 - DNA, 76 bp, Artificial Sequence; identical to SEQ ID NO: 3474
  Description of Artificial Sequence: Synthetic brazil nut; 5' sequence +inner sequence + 3' sequence

SEQ ID NO: 11847 - DNA, 76 bp, Artificial Sequence; identical to SEQ ID NO: 3482
  Description of Artificial Sequence: Synthetic brazil nut; 5' sequence +inner sequence + 3' sequence

SEQ ID NO: 11848 - DNA, 76 bp, Artificial Sequence; identical to SEQ ID NO: 3547
  Description of Artificial Sequence: Synthetic brazil nut; 5' sequence +inner sequence + 3' sequence

SEQ ID NO: 11849 - DNA, 76 bp, Artificial Sequence; identical to SEQ ID NO: 3424
  Description of Artificial Sequence: Synthetic brazil nut; 5' sequence +inner sequence + 3' sequence

SEQ ID NO: 11850 - DNA, 76 bp, Artificial Sequence
  Description of Artificial Sequence: Synthetic brazil nut; 5' sequence +inner sequence + 3' sequence
tagggaagagaaggacatatgatggacagcaatgaccgatcaggtggcgtggattgactagtacatgaccacttga

SEQ ID NO: 11851 - DNA, 76 bp, Artificial Sequence; identical to SEQ ID NO: 3101
  Description of Artificial Sequence: Synthetic brazil nut; 5' sequence +inner sequence + 3' sequence

SEQ ID NO: 11852 - DNA, 76 bp, Artificial Sequence; identical to SEQ ID NO: 3472
  Description of Artificial Sequence: Synthetic brazil nut; 5' sequence +inner sequence + 3' sequence

SEQ ID NO: 11853 - DNA, 76 bp, Artificial Sequence; identical to SEQ ID NO: 7690
  Description of Artificial Sequence: Synthetic brazil nut; 5' sequence +inner sequence + 3' sequence

SEQ ID NO: 11854 - DNA, 76 bp, Artificial Sequence; identical to SEQ ID NO: 7555
  Description of Artificial Sequence: Synthetic brazil nut; 5' sequence +inner sequence + 3' sequence

SEQ ID NO: 11855 - DNA, 76 bp, Artificial Sequence
  Description of Artificial Sequence: Synthetic brazil nut; 5' sequence +inner sequence + 3' sequence
tagggaagagaaggacatatgatacatgccagtgggtacgtcgctgtgccacattgactagtacatgaccacttga

SEQ ID NO: 11856 - DNA, 76 bp, Artificial Sequence; identical to SEQ ID NO: 7835
  Description of Artificial Sequence: Synthetic brazil nut; 5' sequence +inner sequence + 3' sequence

SEQ ID NO: 11857 - DNA, 76 bp, Artificial Sequence; identical to SEQ ID NO: 7949
  Description of Artificial Sequence: Synthetic brazil nut; 5' sequence +inner sequence + 3' sequence

SEQ ID NO: 11858 - DNA, 76 bp, Artificial Sequence; identical to SEQ ID NO: 7774
  Description of Artificial Sequence: Synthetic brazil nut; 5' sequence +inner sequence + 3' sequence

SEQ ID NO: 11859 - DNA, 76 bp, Artificial Sequence; identical to SEQ ID NO: 3948
  Description of Artificial Sequence: Synthetic brazil nut; 5' sequence +inner sequence + 3' sequence

SEQ ID NO: 11860 - DNA, 76 bp, Artificial Sequence
  Description of Artificial Sequence: Synthetic brazil nut; 5' sequence +inner sequence + 3' sequence
tagggaagagaaggacatatgatgacgcgtgctcccgtagacaacgtgtgtcattgactagtacatgaccacttga

SEQ ID NO: 11861 - DNA, 76 bp, Artificial Sequence; identical to SEQ ID NO: 3479
  Description of Artificial Sequence: Synthetic brazil nut; 5' sequence +inner sequence + 3' sequence

SEQ ID NO: 11862 - DNA, 76 bp, Artificial Sequence; identical to SEQ ID NO: 7987
  Description of Artificial Sequence: Synthetic brazil nut; 5' sequence +inner sequence + 3' sequence

SEQ ID NO: 11863 - DNA, 76 bp, Artificial Sequence; identical to SEQ ID NO: 7845
  Description of Artificial Sequence: Synthetic brazil nut; 5' sequence +inner sequence + 3' sequence

SEQ ID NO: 11864 - DNA, 75 bp, Artificial Sequence; identical to SEQ ID NO: 3873
  Description of Artificial Sequence: Synthetic brazil nut; 5' sequence +inner sequence + 3' sequence

SEQ ID NO: 11865 - DNA, 76 bp, Artificial Sequence; identical to SEQ ID NO: 3646
  Description of Artificial Sequence: Synthetic brazil nut; 5' sequence +inner sequence + 3' sequence

SEQ ID NO: 11866 - DNA, 76 bp, Artificial Sequence; identical to SEQ ID NO: 7894
  Description of Artificial Sequence: Synthetic brazil nut; 5' sequence +inner sequence + 3' sequence

SEQ ID NO: 11867 - DNA, 76 bp, Artificial Sequence; identical to SEQ ID NO: 3302
  Description of Artificial Sequence: Synthetic brazil nut; 5' sequence +inner sequence + 3' sequence

SEQ ID NO: 11868 - DNA, 76 bp, Artificial Sequence
  Description of Artificial Sequence: Synthetic brazil nut; 5' sequence +inner sequence + 3' sequence
tagggaagagaaggacatatgatggcatgccatcccttcgagtgtgacaggtattgactagtacatgaccacttga

SEQ ID NO: 11869 - DNA, 76 bp, Artificial Sequence
  Description of Artificial Sequence: Synthetic brazil nut; 5' sequence +inner sequence + 3' sequence
tagggaagagaaggacatatgatgcgcatgaactgaccctacaatgtgcggcattgactagtacatgaccacttga

SEQ ID NO: 11870 - DNA, 75 bp, Artificial Sequence; identical to SEQ ID NO: 3453
  Description of Artificial Sequence: Synthetic brazil nut; 5' sequence +inner sequence + 3' sequence

SEQ ID NO: 11871 - DNA, 76 bp, Artificial Sequence
  Description of Artificial Sequence: Synthetic brazil nut; 5' sequence +inner sequence + 3' sequence
tagggaagagaaggacatatgatggctgccgtgaccctagctggtgcgtcgtgttgactagtacatgaccacttga

SEQ ID NO: 11872 - DNA, 76 bp, Artificial Sequence
  Description of Artificial Sequence: Synthetic brazil nut; 5' sequence +inner sequence + 3' sequence
tagggaagagaaggacatatgatgccatgccatcccttcgagtgtgacaggtattgactagtacatgaccacttga

SEQ ID NO: 11873 - DNA, 76 bp, Artificial Sequence; identical to SEQ ID NO: 3492
  Description of Artificial Sequence: Synthetic brazil nut; 5' sequence +inner sequence + 3' sequence

SEQ ID NO: 11874 - DNA, 76 bp, Artificial Sequence; identical to SEQ ID NO: 3514
  Description of Artificial Sequence: Synthetic brazil nut; 5' sequence +inner sequence + 3' sequence

SEQ ID NO: 11875 - DNA, 76 bp, Artificial Sequence; identical to SEQ ID NO: 7801
  Description of Artificial Sequence: Synthetic brazil nut; 5' sequence +inner sequence + 3' sequence

SEQ ID NO: 11876 - DNA, 76 bp, Artificial Sequence
  Description of Artificial Sequence: Synthetic brazil nut; 5' sequence +inner sequence + 3' sequence
tagggaagagaaggacatatgatgtcatgccatcccttcgagtgggacaggtattgactagtacatgaccacttga

SEQ ID NO: 11877 - DNA, 76 bp, Artificial Sequence
  Description of Artificial Sequence: Synthetic brazil nut; 5' sequence +inner sequence + 3' sequence
tagggaagagaaggacatatgatgtgttgcgatgagctgctggtggacacgtattgactagtacatgaccacttga

SEQ ID NO: 11878 - DNA, 76 bp, Artificial Sequence; identical to SEQ ID NO: 3756
  Description of Artificial Sequence: Synthetic brazil nut; 5' sequence +inner sequence + 3' sequence

SEQ ID NO: 11879 - DNA, 76 bp, Artificial Sequence
  Description of Artificial Sequence: Synthetic brazil nut; 5' sequence +inner sequence + 3' sequence
tagggaagagaaggacatatgatcacatcaacgtccgccgcgatgacgtggttttgactagtacatgaccacttga

SEQ ID NO: 11880 - DNA, 76 bp, Artificial Sequence; identical to SEQ ID NO: 3698
  Description of Artificial Sequence: Synthetic brazil nut; 5' sequence +inner sequence + 3' sequence

SEQ ID NO: 11881 - DNA, 76 bp, Artificial Sequence; identical to SEQ ID NO: 3742
  Description of Artificial Sequence: Synthetic brazil nut; 5' sequence +inner sequence + 3' sequence

SEQ ID NO: 11882 - DNA, 76 bp, Artificial Sequence; identical to SEQ ID NO: 7728
  Description of Artificial Sequence: Synthetic brazil nut; 5' sequence +inner sequence + 3' sequence

SEQ ID NO: 11883 - DNA, 76 bp, Artificial Sequence; identical to SEQ ID NO: 3802
  Description of Artificial Sequence: Synthetic brazil nut; 5' sequence +inner sequence + 3' sequence

SEQ ID NO: 11884 - DNA, 76 bp, Artificial Sequence
  Description of Artificial Sequence: Synthetic brazil nut; 5' sequence +inner sequence + 3' sequence
tagggaagagaaggacatatgatccgtagcgacatcaagcggtggcgtgcgcgttgactagtacatgaccacttga

SEQ ID NO: 11885 - DNA, 76 bp, Artificial Sequence; identical to SEQ ID NO: 7931
  Description of Artificial Sequence: Synthetic brazil nut; 5' sequence +inner sequence + 3' sequence

SEQ ID NO: 11886 - DNA, 76 bp, Artificial Sequence; identical to SEQ ID NO: 3597
  Description of Artificial Sequence: Synthetic brazil nut; 5' sequence +inner sequence + 3' sequence

SEQ ID NO: 11887 - DNA, 76 bp, Artificial Sequence; identical to SEQ ID NO: 3863
  Description of Artificial Sequence: Synthetic brazil nut; 5' sequence +inner sequence + 3' sequence

SEQ ID NO: 11888 - DNA, 76 bp, Artificial Sequence; identical to SEQ ID NO: 7339
  Description of Artificial Sequence: Synthetic brazil nut; 5' sequence +inner sequence + 3' sequence

SEQ ID NO: 11889 - DNA, 76 bp, Artificial Sequence
  Description of Artificial Sequence: Synthetic brazil nut; 5' sequence +inner sequence + 3' sequence
tagggaagagaaggacatatgatgtacacaacggacctacacgtggcgcatgtttgactagtacatgaccacttga

SEQ ID NO: 11890 - DNA, 76 bp, Artificial Sequence; identical to SEQ ID NO: 7736
  Description of Artificial Sequence: Synthetic brazil nut; 5' sequence +inner sequence + 3' sequence

SEQ ID NO: 11891 - DNA, 76 bp, Artificial Sequence
  Description of Artificial Sequence: Synthetic brazil nut; 5' sequence +inner sequence + 3' sequence
tagggaagagaaggacatatgatcgcaccgagagcgatcgtggttcgcagtcattgactagtacatgaccacttga

SEQ ID NO: 11892 - DNA, 76 bp, Artificial Sequence
  Description of Artificial Sequence: Synthetic brazil nut; 5' sequence +inner sequence + 3' sequence
tagggaagagaaggacatatgatgcactgagcgtacgtatcagctggcacgtattgactagtacatgaccacttga

SEQ ID NO: 11893 - DNA, 75 bp, Artificial Sequence; identical to SEQ ID NO: 7869
  Description of Artificial Sequence: Synthetic brazil nut; 5' sequence +inner sequence + 3' sequence

SEQ ID NO: 11894 - DNA, 76 bp, Artificial Sequence; identical to SEQ ID NO: 3929
  Description of Artificial Sequence: Synthetic brazil nut; 5' sequence +inner sequence + 3' sequence

SEQ ID NO: 11895 - DNA, 76 bp, Artificial Sequence; identical to SEQ ID NO: 3931
  Description of Artificial Sequence: Synthetic brazil nut; 5' sequence +inner sequence + 3' sequence

SEQ ID NO: 11896 - DNA, 76 bp, Artificial Sequence; identical to SEQ ID NO: 3955
  Description of Artificial Sequence: Synthetic brazil nut; 5' sequence +inner sequence + 3' sequence

SEQ ID NO: 11897 - DNA, 76 bp, Artificial Sequence
  Description of Artificial Sequence: Synthetic brazil nut; 5' sequence +inner sequence + 3' sequence
tagggaagagaaggacatatgatcacgtgacgaacgtgagcctagcggtgatgttgactagtacatgaccacttga

SEQ ID NO: 11898 - DNA, 76 bp, Artificial Sequence; identical to SEQ ID NO: 3729
  Description of Artificial Sequence: Synthetic brazil nut; 5' sequence +inner sequence + 3' sequence

SEQ ID NO: 11899 - DNA, 76 bp, Artificial Sequence; identical to SEQ ID NO: 7715
  Description of Artificial Sequence: Synthetic brazil nut; 5' sequence +inner sequence + 3' sequence

SEQ ID NO: 11900 - DNA, 76 bp, Artificial Sequence; identical to SEQ ID NO: 3678
  Description of Artificial Sequence: Synthetic brazil nut; 5' sequence +inner sequence + 3' sequence

SEQ ID NO: 11901 - DNA, 76 bp, Artificial Sequence; identical to SEQ ID NO: 7958
  Description of Artificial Sequence: Synthetic brazil nut; 5' sequence +inner sequence + 3' sequence

SEQ ID NO: 11902 - DNA, 76 bp, Artificial Sequence
  Description of Artificial Sequence: Synthetic brazil nut; 5' sequence +inner sequence + 3' sequence
tagggaagagaaggacatatgattcacgcaagggcaggcatactcgtcgcacattgactagtacatgaccacttga

SEQ ID NO: 11903 - DNA, 76 bp, Artificial Sequence; identical to SEQ ID NO: 7785
  Description of Artificial Sequence: Synthetic brazil nut; 5' sequence +inner sequence + 3' sequence

SEQ ID NO: 11904 - DNA, 76 bp, Artificial Sequence; identical to SEQ ID NO: 3415
  Description of Artificial Sequence: Synthetic brazil nut; 5' sequence +inner sequence + 3' sequence

SEQ ID NO: 11905 - DNA, 76 bp, Artificial Sequence; identical to SEQ ID NO: 7924
  Description of Artificial Sequence: Synthetic brazil nut; 5' sequence +inner sequence + 3' sequence

SEQ ID NO: 11906 - DNA, 76 bp, Artificial Sequence; identical to SEQ ID NO: 3713
  Description of Artificial Sequence: Synthetic brazil nut; 5' sequence +inner sequence + 3' sequence

SEQ ID NO: 11907 - DNA, 76 bp, Artificial Sequence
  Description of Artificial Sequence: Synthetic brazil nut; 5' sequence +inner sequence + 3' sequence
tagggaagagaaggacatatgatggccagagcgaccctacacgtgggcacgtattgactagtacatgaccacttga

SEQ ID NO: 11908 - DNA, 76 bp, Artificial Sequence; identical to SEQ ID NO: 3782
  Description of Artificial Sequence: Synthetic brazil nut; 5' sequence +inner sequence + 3' sequence

SEQ ID NO: 11909 - DNA, 76 bp, Artificial Sequence
  Description of Artificial Sequence: Synthetic brazil nut; 5' sequence +inner sequence + 3' sequence
tagggaagagaaggacatatgatgcacgcagctgccctgtcgtggtcgaggtgttgactagtacatgaccacttga

SEQ ID NO: 11910 - DNA, 76 bp, Artificial Sequence
  Description of Artificial Sequence: Synthetic brazil nut; 5' sequence +inner sequence + 3' sequence
tagggaagagaaggacatatgatgtcattccgcctcctacacgtgggcacgtattgactagtacatgaccacttga

SEQ ID NO: 11911 - DNA, 76 bp, Artificial Sequence; identical to SEQ ID NO: 3624
  Description of Artificial Sequence: Synthetic brazil nut; 5' sequence +inner sequence + 3' sequence

SEQ ID NO: 11912 - DNA, 76 bp, Artificial Sequence; identical to SEQ ID NO: 7708
  Description of Artificial Sequence: Synthetic brazil nut; 5' sequence +inner sequence + 3' sequence

SEQ ID NO: 11913 - DNA, 76 bp, Artificial Sequence; identical to SEQ ID NO: 7829
  Description of Artificial Sequence: Synthetic brazil nut; 5' sequence +inner sequence + 3' sequence

SEQ ID NO: 11914 - DNA, 76 bp, Artificial Sequence; identical to SEQ ID NO: 3512
  Description of Artificial Sequence: Synthetic brazil nut; 5' sequence +inner sequence + 3' sequence

SEQ ID NO: 11915 - DNA, 76 bp, Artificial Sequence; identical to SEQ ID NO: 7878
  Description of Artificial Sequence: Synthetic brazil nut; 5' sequence +inner sequence + 3' sequence

SEQ ID NO: 11916 - DNA, 76 bp, Artificial Sequence; identical to SEQ ID NO: 3898
  Description of Artificial Sequence: Synthetic brazil nut; 5' sequence +inner sequence + 3' sequence

SEQ ID NO: 11917 - DNA, 76 bp, Artificial Sequence; identical to SEQ ID NO: 7918
  Description of Artificial Sequence: Synthetic brazil nut; 5' sequence +inner sequence + 3' sequence

SEQ ID NO: 11918 - DNA, 76 bp, Artificial Sequence; identical to SEQ ID NO: 3939
  Description of Artificial Sequence: Synthetic brazil nut; 5' sequence +inner sequence + 3' sequence

SEQ ID NO: 11919 - DNA, 76 bp, Artificial Sequence; identical to SEQ ID NO: 7617
  Description of Artificial Sequence: Synthetic brazil nut; 5' sequence +inner sequence + 3' sequence

SEQ ID NO: 11920 - DNA, 76 bp, Artificial Sequence; identical to SEQ ID NO: 3949
  Description of Artificial Sequence: Synthetic brazil nut; 5' sequence +inner sequence + 3' sequence

SEQ ID NO: 11921 - DNA, 76 bp, Artificial Sequence; identical to SEQ ID NO: 7946
  Description of Artificial Sequence: Synthetic brazil nut; 5' sequence +inner sequence + 3' sequence

SEQ ID NO: 11922 - DNA, 76 bp, Artificial Sequence
  Description of Artificial Sequence: Synthetic brazil nut; 5' sequence +inner sequence + 3' sequence
tagggaagagaaggacatatgatcgatatggacgacctccctatcacgtgggcttgactagtacatgaccacttga

SEQ ID NO: 11923 - DNA, 76 bp, Artificial Sequence; identical to SEQ ID NO: 3715
  Description of Artificial Sequence: Synthetic brazil nut; 5' sequence +inner sequence + 3' sequence

SEQ ID NO: 11924 - DNA, 76 bp, Artificial Sequence; identical to SEQ ID NO: 3638
  Description of Artificial Sequence: Synthetic brazil nut; 5' sequence +inner sequence + 3' sequence

SEQ ID NO: 11925 - DNA, 76 bp, Artificial Sequence
  Description of Artificial Sequence: Synthetic brazil nut; 5' sequence +inner sequence + 3' sequence
tagggaagagaaggacatatgatcatgcataggcagccagcagtgacgatgcgttgactagtacatgaccacttga

SEQ ID NO: 11926 - DNA, 76 bp, Artificial Sequence
  Description of Artificial Sequence: Synthetic brazil nut; 5' sequence +inner sequence + 3' sequence
tagggaagagaaggacatatgatgcacggctcgcaccctatcatgaggccatgttgactagtacatgaccacttga

SEQ ID NO: 11927 - DNA, 76 bp, Artificial Sequence
  Description of Artificial Sequence: Synthetic brazil nut; 5' sequence +inner sequence + 3' sequence
tagggaagagaaggacatatgatggacgcatcggcccggtcaagttcggcatgttgactagtacatgaccacttga

SEQ ID NO: 11928 - DNA, 76 bp, Artificial Sequence
  Description of Artificial Sequence: Synthetic brazil nut; 5' sequence +inner sequence + 3' sequence
tagggaagagaaggacatatgatccgcacgtagcactatcagtggtgcatgcattgactagtacatgaccacttga

SEQ ID NO: 11929 - DNA, 76 bp, Artificial Sequence; identical to SEQ ID NO: 7904
  Description of Artificial Sequence: Synthetic brazil nut; 5' sequence +inner sequence + 3' sequence

SEQ ID NO: 11930 - DNA, 76 bp, Artificial Sequence; identical to SEQ ID NO: 7948
  Description of Artificial Sequence: Synthetic brazil nut; 5' sequence +inner sequence + 3' sequence

SEQ ID NO: 11931 - DNA, 76 bp, Artificial Sequence; identical to SEQ ID NO: 3748
  Description of Artificial Sequence: Synthetic brazil nut; 5' sequence +inner sequence + 3' sequence

SEQ ID NO: 11932 - DNA, 76 bp, Artificial Sequence; identical to SEQ ID NO: 3957
  Description of Artificial Sequence: Synthetic brazil nut; 5' sequence +inner sequence + 3' sequence

SEQ ID NO: 11933 - DNA, 76 bp, Artificial Sequence; identical to SEQ ID NO: 7967
  Description of Artificial Sequence: Synthetic brazil nut; 5' sequence +inner sequence + 3' sequence

SEQ ID NO: 11934 - DNA, 76 bp, Artificial Sequence; identical to SEQ ID NO: 3753
  Description of Artificial Sequence: Synthetic brazil nut; 5' sequence +inner sequence + 3' sequence

SEQ ID NO: 11935 - DNA, 76 bp, Artificial Sequence
  Description of Artificial Sequence: Synthetic brazil nut; 5' sequence +inner sequence + 3' sequence
tagggaagagaaggacatatgatgacacggcactgacctacacgtggcaggtattgactagtacatgaccacttga

SEQ ID NO: 11936 - DNA, 76 bp, Artificial Sequence
  Description of Artificial Sequence: Synthetic brazil nut; 5' sequence +inner sequence + 3' sequence
tagggaagagaaggacatatgatccgcacgtagccctatcagtggagcatgcattgactagtacatgaccacttga

SEQ ID NO: 11937 - DNA, 76 bp, Artificial Sequence
  Description of Artificial Sequence: Synthetic brazil nut; 5' sequence +inner sequence + 3' sequence
tagggaagagaaggacatatgatcgcgcagttggccgaacatcccgttgggcattgactagtacatgaccacttga

SEQ ID NO: 11938 - DNA, 76 bp, Artificial Sequence
  Description of Artificial Sequence: Synthetic brazil nut; 5' sequence +inner sequence + 3' sequence
tagggaagagaaggacatatgatgtcattccgcatcctacacgtggccacgtattgactagtacatgaccacttga

SEQ ID NO: 11939 - DNA, 76 bp, Artificial Sequence
  Description of Artificial Sequence: Synthetic brazil nut; 5' sequence +inner sequence + 3' sequence
tagggaagagaaggacatatgatgtacgtgcgatgtcccgatcaacgtgtgtcttgactagtacatgaccacttga

SEQ ID NO: 11940 - DNA, 76 bp, Artificial Sequence; identical to SEQ ID NO: 3987
  Description of Artificial Sequence: Synthetic brazil nut; 5' sequence +inner sequence + 3' sequence

SEQ ID NO: 11941 - DNA, 76 bp, Artificial Sequence; identical to SEQ ID NO: 7778
  Description of Artificial Sequence: Synthetic brazil nut; 5' sequence +inner sequence + 3' sequence

SEQ ID NO: 11942 - DNA, 76 bp, Artificial Sequence
  Description of Artificial Sequence: Synthetic brazil nut; 5' sequence +inner sequence + 3' sequence
tagggaagagaaggacatatgatgcatcgcagcgaggtccgattgccgtcatgttgactagtacatgaccacttga

SEQ ID NO: 11943 - DNA, 76 bp, Artificial Sequence; identical to SEQ ID NO: 7992
  Description of Artificial Sequence: Synthetic brazil nut; 5' sequence +inner sequence + 3' sequence

SEQ ID NO: 11944 - DNA, 76 bp, Artificial Sequence; identical to SEQ ID NO: 3559
  Description of Artificial Sequence: Synthetic brazil nut; 5' sequence +inner sequence + 3' sequence

SEQ ID NO: 11945 - DNA, 76 bp, Artificial Sequence; identical to SEQ ID NO: 7731
  Description of Artificial Sequence: Synthetic brazil nut; 5' sequence +inner sequence + 3' sequence

SEQ ID NO: 11946 - DNA, 76 bp, Artificial Sequence
  Description of Artificial Sequence: Synthetic brazil nut; 5' sequence +inner sequence + 3' sequence
tagggaagagaaggacatatgatccatcgcgtcactctcatgtgtgtcacgtattgactagtacatgaccacttga

SEQ ID NO: 11947 - DNA, 76 bp, Artificial Sequence; identical to SEQ ID NO: 7963
  Description of Artificial Sequence: Synthetic brazil nut; 5' sequence +inner sequence + 3' sequence

SEQ ID NO: 11948 - DNA, 76 bp, Artificial Sequence; identical to SEQ ID NO: 3388
  Description of Artificial Sequence: Synthetic brazil nut; 5' sequence +inner sequence + 3' sequence

SEQ ID NO: 11949 - DNA, 76 bp, Artificial Sequence
  Description of Artificial Sequence: Synthetic brazil nut; 5' sequence +inner sequence + 3' sequence
tagggaagagaaggacatatgatgcatgactcgcaccctatcatgaggccatgttgactagtacatgaccacttga

SEQ ID NO: 11950 - DNA, 76 bp, Artificial Sequence
  Description of Artificial Sequence: Synthetic brazil nut; 5' sequence +inner sequence + 3' sequence
tagggaagagaaggacatatgatggccgcaatcctccctacacgtggcgtgtattgactagtacatgaccacttga

SEQ ID NO: 11951 - DNA, 76 bp, Artificial Sequence; identical to SEQ ID NO: 3384
  Description of Artificial Sequence: Synthetic brazil nut; 5' sequence +inner sequence + 3' sequence

SEQ ID NO: 11952 - DNA, 76 bp, Artificial Sequence; identical to SEQ ID NO: 3488
  Description of Artificial Sequence: Synthetic brazil nut; 5' sequence +inner sequence + 3' sequence

SEQ ID NO: 11953 - DNA, 76 bp, Artificial Sequence
  Description of Artificial Sequence: Synthetic brazil nut; 5' sequence +inner sequence + 3' sequence
tagggaagagaaggacatatgatgtcattccgcatactacacgtgggcacgtattgactagtacatgaccacttga

SEQ ID NO: 11954 - DNA, 76 bp, Artificial Sequence; identical to SEQ ID NO: 3875
  Description of Artificial Sequence: Synthetic brazil nut; 5' sequence +inner sequence + 3' sequence

SEQ ID NO: 11955 - DNA, 76 bp, Artificial Sequence; identical to SEQ ID NO: 7905
  Description of Artificial Sequence: Synthetic brazil nut; 5' sequence +inner sequence + 3' sequence

SEQ ID NO: 11956 - DNA, 76 bp, Artificial Sequence; identical to SEQ ID NO: 7652
  Description of Artificial Sequence: Synthetic brazil nut; 5' sequence +inner sequence + 3' sequence

SEQ ID NO: 11957 - DNA, 76 bp, Artificial Sequence; identical to SEQ ID NO: 3826
  Description of Artificial Sequence: Synthetic brazil nut; 5' sequence +inner sequence + 3' sequence

SEQ ID NO: 11958 - DNA, 76 bp, Artificial Sequence; identical to SEQ ID NO: 3996
  Description of Artificial Sequence: Synthetic brazil nut; 5' sequence +inner sequence + 3' sequence

SEQ ID NO: 11959 - DNA, 76 bp, Artificial Sequence; identical to SEQ ID NO: 7979
  Description of Artificial Sequence: Synthetic brazil nut; 5' sequence +inner sequence + 3' sequence

SEQ ID NO: 11960 - DNA, 76 bp, Artificial Sequence
  Description of Artificial Sequence: Synthetic brazil nut; 5' sequence +inner sequence + 3' sequence
tagggaagagaaggacatatgatccgacgcaaccgtacagcatgtcacgtggcttgactagtacatgaccacttga

SEQ ID NO: 11961 - DNA, 76 bp, Artificial Sequence
  Description of Artificial Sequence: Synthetic brazil nut; 5' sequence +inner sequence + 3' sequence
tagggaagagaaggacatatgatccggcacgaacggaacgggtcttgtgcatgttgactagtacatgaccacttga

SEQ ID NO: 11962 - DNA, 76 bp, Artificial Sequence
  Description of Artificial Sequence: Synthetic brazil nut; 5' sequence +inner sequence + 3' sequence
tagggaagagaaggacatatgattgcatgcacgcacctacacgtgggtatggattgactagtacatgaccacttga

SEQ ID NO: 11963 - DNA, 76 bp, Artificial Sequence
  Description of Artificial Sequence: Synthetic brazil nut; 5' sequence +inner sequence + 3' sequence
tagggaagagaaggacatatgatggcatgacgagctgaacggtgcagtgtgctttgactagtacatgaccacttga

SEQ ID NO: 11964 - DNA, 76 bp, Artificial Sequence
  Description of Artificial Sequence: Synthetic brazil nut; 5' sequence +inner sequence + 3' sequence
tagggaagagaaggacatatgatggccgcagcttgcctactggtggtcacgtattgactagtacatgaccacttga

SEQ ID NO: 11965 - DNA, 76 bp, Artificial Sequence; identical to SEQ ID NO: 7854
  Description of Artificial Sequence: Synthetic brazil nut; 5' sequence +inner sequence + 3' sequence

SEQ ID NO: 11966 - DNA, 71 bp, Artificial Sequence; identical to SEQ ID NO: 3427
  Description of Artificial Sequence: Synthetic brazil nut; 5' sequence +inner sequence + 3' sequence

SEQ ID NO: 11967 - DNA, 76 bp, Artificial Sequence; identical to SEQ ID NO: 7864
  Description of Artificial Sequence: Synthetic brazil nut; 5' sequence +inner sequence + 3' sequence

SEQ ID NO: 11968 - DNA, 76 bp, Artificial Sequence
  Description of Artificial Sequence: Synthetic brazil nut; 5' sequence +inner sequence + 3' sequence
tagggaagagaaggacatatgatcgcaccgtcgatacgtcatccacgctgacattgactagtacatgaccacttga

SEQ ID NO: 11969 - DNA, 76 bp, Artificial Sequence
  Description of Artificial Sequence: Synthetic brazil nut; 5' sequence +inner sequence + 3' sequence
tagggaagagaaggacatatgatcatggcaaggcagcggtcgatccattcgcgttgactagtacatgaccacttga

SEQ ID NO: 11970 - DNA, 76 bp, Artificial Sequence; identical to SEQ ID NO: 3703
  Description of Artificial Sequence: Synthetic brazil nut; 5' sequence +inner sequence + 3' sequence

SEQ ID NO: 11971 - DNA, 76 bp, Artificial Sequence
  Description of Artificial Sequence: Synthetic brazil nut; 5' sequence +inner sequence + 3' sequence
tagggaagagaaggacatatgatgtacgcacgcagaccgacgagtggcatggattgactagtacatgaccacttga

SEQ ID NO: 11972 - DNA, 76 bp, Artificial Sequence; identical to SEQ ID NO: 7667
  Description of Artificial Sequence: Synthetic brazil nut; 5' sequence +inner sequence + 3' sequence

SEQ ID NO: 11973 - DNA, 76 bp, Artificial Sequence; identical to SEQ ID NO: 8002
  Description of Artificial Sequence: Synthetic brazil nut; 5' sequence +inner sequence + 3' sequence

SEQ ID NO: 11974 - DNA, 76 bp, Artificial Sequence
  Description of Artificial Sequence: Synthetic brazil nut; 5' sequence +inner sequence + 3' sequence
tagggaagagaaggacatatgatgcacggtcggaccaggacacgagatgggcattgactagtacatgaccacttga

SEQ ID NO: 11975 - DNA, 76 bp, Artificial Sequence; identical to SEQ ID NO: 3345
  Description of Artificial Sequence: Synthetic brazil nut; 5' sequence +inner sequence + 3' sequence

SEQ ID NO: 11976 - DNA, 76 bp, Artificial Sequence; identical to SEQ ID NO: 3162
  Description of Artificial Sequence: Synthetic brazil nut; 5' sequence +inner sequence + 3' sequence

SEQ ID NO: 11977 - DNA, 75 bp, Artificial Sequence
  Description of Artificial Sequence: Synthetic brazil nut; 5' sequence +inner sequence + 3' sequence
tagggaagagaaggacatatgatccacatggacgacgatggcttagcgtggtttgactagtacatgaccacttga

SEQ ID NO: 11978 - DNA, 76 bp, Artificial Sequence
  Description of Artificial Sequence: Synthetic brazil nut; 5' sequence +inner sequence + 3' sequence
tagggaagagaaggacatatgatccgtagcgacatcaagcggtggcgcgcgtgttgactagtacatgaccacttga

SEQ ID NO: 11979 - DNA, 76 bp, Artificial Sequence; identical to SEQ ID NO: 3598
  Description of Artificial Sequence: Synthetic brazil nut; 5' sequence +inner sequence + 3' sequence

SEQ ID NO: 11980 - DNA, 76 bp, Artificial Sequence; identical to SEQ ID NO: 3823
  Description of Artificial Sequence: Synthetic brazil nut; 5' sequence +inner sequence + 3' sequence

SEQ ID NO: 11981 - DNA, 76 bp, Artificial Sequence; identical to SEQ ID NO: 7666
  Description of Artificial Sequence: Synthetic brazil nut; 5' sequence +inner sequence + 3' sequence

SEQ ID NO: 11982 - DNA, 76 bp, Artificial Sequence; identical to SEQ ID NO: 7887
  Description of Artificial Sequence: Synthetic brazil nut; 5' sequence +inner sequence + 3' sequence

SEQ ID NO: 11983 - DNA, 74 bp, Artificial Sequence
  Description of Artificial Sequence: Synthetic brazil nut; 5' sequence +inner sequence + 3' sequence
tagggaagagaaggacatatgatgtgctgcgatgacctcacgtggacgggtttgactagtacatgaccacttga

SEQ ID NO: 11984 - DNA, 76 bp, Artificial Sequence
  Description of Artificial Sequence: Synthetic brazil nut; 5' sequence +inner sequence + 3' sequence
tagggaagagaaggacatatgatacgatacgcaccagggacattgacggcatgttgactagtacatgaccacttga

SEQ ID NO: 11985 - DNA, 76 bp, Artificial Sequence
  Description of Artificial Sequence: Synthetic brazil nut; 5' sequence +inner sequence + 3' sequence
tagggaagagaaggacatatgatccgcacgtacccctatcagtggtgcatgcattgactagtacatgaccacttga

SEQ ID NO: 11986 - DNA, 75 bp, Artificial Sequence; identical to SEQ ID NO: 7763
  Description of Artificial Sequence: Synthetic brazil nut; 5' sequence +inner sequence + 3' sequence

SEQ ID NO: 11987 - DNA, 76 bp, Artificial Sequence; identical to SEQ ID NO: 3842
  Description of Artificial Sequence: Synthetic brazil nut; 5' sequence +inner sequence + 3' sequence

SEQ ID NO: 11988 - DNA, 76 bp, Artificial Sequence
  Description of Artificial Sequence: Synthetic brazil nut; 5' sequence +inner sequence + 3' sequence
tagggaagagaaggacatatgatgtacgtcgcggaccctatcaagacggcatgttgactagtacatgaccacttga

SEQ ID NO: 11989 - DNA, 76 bp, Artificial Sequence; identical to SEQ ID NO: 3683
  Description of Artificial Sequence: Synthetic brazil nut; 5' sequence +inner sequence + 3' sequence

SEQ ID NO: 11990 - DNA, 76 bp, Artificial Sequence; identical to SEQ ID NO: 3866
  Description of Artificial Sequence: Synthetic brazil nut; 5' sequence +inner sequence + 3' sequence

SEQ ID NO: 11991 - DNA, 76 bp, Artificial Sequence
  Description of Artificial Sequence: Synthetic brazil nut; 5' sequence +inner sequence + 3' sequence
tagggaagagaaggacatatgatccgacgaagacctggtcgtggaaggcatgattgactagtacatgaccacttga

SEQ ID NO: 11992 - DNA, 76 bp, Artificial Sequence; identical to SEQ ID NO: 7857
  Description of Artificial Sequence: Synthetic brazil nut; 5' sequence +inner sequence + 3' sequence

SEQ ID NO: 11993 - DNA, 76 bp, Artificial Sequence
  Description of Artificial Sequence: Synthetic brazil nut; 5' sequence +inner sequence + 3' sequence
tagggaagagaaggacatatgatccgcccgtagccctatcagtggtgcatgcattgactagtacatgaccacttga

SEQ ID NO: 11994 - DNA, 76 bp, Artificial Sequence
  Description of Artificial Sequence: Synthetic brazil nut; 5' sequence +inner sequence + 3' sequence
tagggaagagaaggacatatgatcgcacacgtcaggtcaaggtcatcgcgtggttgactagtacatgaccacttga

SEQ ID NO: 11995 - DNA, 76 bp, Artificial Sequence; identical to SEQ ID NO: 3535
  Description of Artificial Sequence: Synthetic brazil nut; 5' sequence +inner sequence + 3' sequence

SEQ ID NO: 11996 - DNA, 75 bp, Artificial Sequence; identical to SEQ ID NO: 3879
  Description of Artificial Sequence: Synthetic brazil nut; 5' sequence +inner sequence + 3' sequence

SEQ ID NO: 11997 - DNA, 76 bp, Artificial Sequence; identical to SEQ ID NO: 3681
  Description of Artificial Sequence: Synthetic brazil nut; 5' sequence +inner sequence + 3' sequence

SEQ ID NO: 11998 - DNA, 76 bp, Artificial Sequence
  Description of Artificial Sequence: Synthetic brazil nut; 5' sequence +inner sequence + 3' sequence
tagggaagagaaggacatatgatcgcaccgcgagtgatcgtggttcgcagtcattgactagtacatgaccacttga

SEQ ID NO: 11999 - DNA, 76 bp, Artificial Sequence
  Description of Artificial Sequence: Synthetic brazil nut; 5' sequence +inner sequence + 3' sequence
tagggaagagaaggacatatgatcgtaccgccttggtctacgtgacgccatgtttgactagtacatgaccacttga

SEQ ID NO: 12000 - DNA, 75 bp, Artificial Sequence; identical to SEQ ID NO: 7968
  Description of Artificial Sequence: Synthetic brazil nut; 5' sequence +inner sequence + 3' sequence

SEQ ID NO: 12001 - DNA, 76 bp, Artificial Sequence; identical to SEQ ID NO: 7882
  Description of Artificial Sequence: Synthetic brazil nut; 5' sequence +inner sequence + 3' sequence

SEQ ID NO: 12002 - DNA, 76 bp, Artificial Sequence; identical to SEQ ID NO: 3265
  Description of Artificial Sequence: Synthetic brazil nut; 5' sequence +inner sequence + 3' sequence

SEQ ID NO: 12003 - DNA, 30 bp, Artificial Sequence; identical to SEQ ID NO: 4
  Description of Artificial Sequence: Synthetic cashew; inner sequence

SEQ ID NO: 12004 - DNA, 30 bp, Artificial Sequence; identical to SEQ ID NO: 3
  Description of Artificial Sequence: Synthetic cashew; inner sequence

SEQ ID NO: 12005 - DNA, 30 bp, Artificial Sequence; identical to SEQ ID NO: 8
  Description of Artificial Sequence: Synthetic cashew; inner sequence

SEQ ID NO: 12006 - DNA, 30 bp, Artificial Sequence; identical to SEQ ID NO: 6
  Description of Artificial Sequence: Synthetic cashew; inner sequence

SEQ ID NO: 12007 - DNA, 30 bp, Artificial Sequence; identical to SEQ ID NO: 7
  Description of Artificial Sequence: Synthetic cashew; inner sequence

SEQ ID NO: 12008 - DNA, 30 bp, Artificial Sequence; identical to SEQ ID NO: 5
  Description of Artificial Sequence: Synthetic cashew; inner sequence

SEQ ID NO: 12009 - DNA, 30 bp, Artificial Sequence; identical to SEQ ID NO: 9
  Description of Artificial Sequence: Synthetic cashew; inner sequence

SEQ ID NO: 12010 - DNA, 30 bp, Artificial Sequence; identical to SEQ ID NO: 12
  Description of Artificial Sequence: Synthetic cashew; inner sequence

SEQ ID NO: 12011 - DNA, 30 bp, Artificial Sequence; identical to SEQ ID NO: 60
  Description of Artificial Sequence: Synthetic cashew; inner sequence

SEQ ID NO: 12012 - DNA, 30 bp, Artificial Sequence; identical to SEQ ID NO: 10
  Description of Artificial Sequence: Synthetic cashew; inner sequence

SEQ ID NO: 12013 - DNA, 30 bp, Artificial Sequence; identical to SEQ ID NO: 16
  Description of Artificial Sequence: Synthetic cashew; inner sequence

SEQ ID NO: 12014 - DNA, 30 bp, Artificial Sequence; identical to SEQ ID NO: 23
  Description of Artificial Sequence: Synthetic cashew; inner sequence

SEQ ID NO: 12015 - DNA, 30 bp, Artificial Sequence; identical to SEQ ID NO: 11
  Description of Artificial Sequence: Synthetic cashew; inner sequence

SEQ ID NO: 12016 - DNA, 30 bp, Artificial Sequence; identical to SEQ ID NO: 14
  Description of Artificial Sequence: Synthetic cashew; inner sequence

SEQ ID NO: 12017 - DNA, 30 bp, Artificial Sequence; identical to SEQ ID NO: 18
  Description of Artificial Sequence: Synthetic cashew; inner sequence

SEQ ID NO: 12018 - DNA, 29 bp, Artificial Sequence
  Description of Artificial Sequence: Synthetic cashew; inner sequence
gcacgtcgaaacacgtagccatgcacggt

SEQ ID NO: 12019 - DNA, 30 bp, Artificial Sequence; identical to SEQ ID NO: 37
  Description of Artificial Sequence: Synthetic cashew; inner sequence

SEQ ID NO: 12020 - DNA, 30 bp, Artificial Sequence; identical to SEQ ID NO: 13
  Description of Artificial Sequence: Synthetic cashew; inner sequence

SEQ ID NO: 12021 - DNA, 30 bp, Artificial Sequence; identical to SEQ ID NO: 17
  Description of Artificial Sequence: Synthetic cashew; inner sequence

SEQ ID NO: 12022 - DNA, 30 bp, Artificial Sequence; identical to SEQ ID NO: 28
  Description of Artificial Sequence: Synthetic cashew; inner sequence

SEQ ID NO: 12023 - DNA, 30 bp, Artificial Sequence; identical to SEQ ID NO: 22
  Description of Artificial Sequence: Synthetic cashew; inner sequence

SEQ ID NO: 12024 - DNA, 30 bp, Artificial Sequence; identical to SEQ ID NO: 20
  Description of Artificial Sequence: Synthetic cashew; inner sequence

SEQ ID NO: 12025 - DNA, 30 bp, Artificial Sequence; identical to SEQ ID NO: 30
  Description of Artificial Sequence: Synthetic cashew; inner sequence

SEQ ID NO: 12026 - DNA, 30 bp, Artificial Sequence; identical to SEQ ID NO: 45
  Description of Artificial Sequence: Synthetic cashew; inner sequence

SEQ ID NO: 12027 - DNA, 30 bp, Artificial Sequence; identical to SEQ ID NO: 34
  Description of Artificial Sequence: Synthetic cashew; inner sequence

SEQ ID NO: 12028 - DNA, 30 bp, Artificial Sequence; identical to SEQ ID NO: 15
  Description of Artificial Sequence: Synthetic cashew; inner sequence

SEQ ID NO: 12029 - DNA, 30 bp, Artificial Sequence; identical to SEQ ID NO: 46
  Description of Artificial Sequence: Synthetic cashew; inner sequence

SEQ ID NO: 12030 - DNA, 30 bp, Artificial Sequence; identical to SEQ ID NO: 49
  Description of Artificial Sequence: Synthetic cashew; inner sequence

SEQ ID NO: 12031 - DNA, 30 bp, Artificial Sequence; identical to SEQ ID NO: 21
  Description of Artificial Sequence: Synthetic cashew; inner sequence

SEQ ID NO: 12032 - DNA, 30 bp, Artificial Sequence; identical to SEQ ID NO: 33
  Description of Artificial Sequence: Synthetic cashew; inner sequence

SEQ ID NO: 12033 - DNA, 30 bp, Artificial Sequence; identical to SEQ ID NO: 32
  Description of Artificial Sequence: Synthetic cashew; inner sequence

SEQ ID NO: 12034 - DNA, 30 bp, Artificial Sequence; identical to SEQ ID NO: 55
  Description of Artificial Sequence: Synthetic cashew; inner sequence

SEQ ID NO: 12035 - DNA, 30 bp, Artificial Sequence; identical to SEQ ID NO: 29
  Description of Artificial Sequence: Synthetic cashew; inner sequence

SEQ ID NO: 12036 - DNA, 30 bp, Artificial Sequence; identical to SEQ ID NO: 41
  Description of Artificial Sequence: Synthetic cashew; inner sequence

SEQ ID NO: 12037 - DNA, 30 bp, Artificial Sequence; identical to SEQ ID NO: 24
  Description of Artificial Sequence: Synthetic cashew; inner sequence

SEQ ID NO: 12038 - DNA, 29 bp, Artificial Sequence
  Description of Artificial Sequence: Synthetic cashew; inner sequence
gcacgccgatgccctcatgtggccgtgga

SEQ ID NO: 12039 - DNA, 30 bp, Artificial Sequence; identical to SEQ ID NO: 38
  Description of Artificial Sequence: Synthetic cashew; inner sequence

SEQ ID NO: 12040 - DNA, 30 bp, Artificial Sequence; identical to SEQ ID NO: 40
  Description of Artificial Sequence: Synthetic cashew; inner sequence

SEQ ID NO: 12041 - DNA, 30 bp, Artificial Sequence; identical to SEQ ID NO: 131
  Description of Artificial Sequence: Synthetic cashew; inner sequence

SEQ ID NO: 12042 - DNA, 30 bp, Artificial Sequence; identical to SEQ ID NO: 77
  Description of Artificial Sequence: Synthetic cashew; inner sequence

SEQ ID NO: 12043 - DNA, 30 bp, Artificial Sequence; identical to SEQ ID NO: 44
  Description of Artificial Sequence: Synthetic cashew; inner sequence

SEQ ID NO: 12044 - DNA, 30 bp, Artificial Sequence; identical to SEQ ID NO: 19
  Description of Artificial Sequence: Synthetic cashew; inner sequence

SEQ ID NO: 12045 - DNA, 30 bp, Artificial Sequence; identical to SEQ ID NO: 39
  Description of Artificial Sequence: Synthetic cashew; inner sequence

SEQ ID NO: 12046 - DNA, 30 bp, Artificial Sequence; identical to SEQ ID NO: 88
  Description of Artificial Sequence: Synthetic cashew; inner sequence

SEQ ID NO: 12047 - DNA, 30 bp, Artificial Sequence; identical to SEQ ID NO: 54
  Description of Artificial Sequence: Synthetic cashew; inner sequence

SEQ ID NO: 12048 - DNA, 30 bp, Artificial Sequence; identical to SEQ ID NO: 48
  Description of Artificial Sequence: Synthetic cashew; inner sequence

SEQ ID NO: 12049 - DNA, 30 bp, Artificial Sequence; identical to SEQ ID NO: 82
  Description of Artificial Sequence: Synthetic cashew; inner sequence

SEQ ID NO: 12050 - DNA, 30 bp, Artificial Sequence; identical to SEQ ID NO: 74
  Description of Artificial Sequence: Synthetic cashew; inner sequence

SEQ ID NO: 12051 - DNA, 30 bp, Artificial Sequence; identical to SEQ ID NO: 35
  Description of Artificial Sequence: Synthetic cashew; inner sequence

SEQ ID NO: 12052 - DNA, 30 bp, Artificial Sequence; identical to SEQ ID NO: 64
  Description of Artificial Sequence: Synthetic cashew; inner sequence

SEQ ID NO: 12053 - DNA, 30 bp, Artificial Sequence; identical to SEQ ID NO: 50
  Description of Artificial Sequence: Synthetic cashew; inner sequence

SEQ ID NO: 12054 - DNA, 30 bp, Artificial Sequence; identical to SEQ ID NO: 66
  Description of Artificial Sequence: Synthetic cashew; inner sequence

SEQ ID NO: 12055 - DNA, 30 bp, Artificial Sequence; identical to SEQ ID NO: 61
  Description of Artificial Sequence: Synthetic cashew; inner sequence

SEQ ID NO: 12056 - DNA, 30 bp, Artificial Sequence; identical to SEQ ID NO: 31
  Description of Artificial Sequence: Synthetic cashew; inner sequence

SEQ ID NO: 12057 - DNA, 30 bp, Artificial Sequence; identical to SEQ ID NO: 52
  Description of Artificial Sequence: Synthetic cashew; inner sequence

SEQ ID NO: 12058 - DNA, 30 bp, Artificial Sequence; identical to SEQ ID NO: 117
  Description of Artificial Sequence: Synthetic cashew; inner sequence

SEQ ID NO: 12059 - DNA, 30 bp, Artificial Sequence; identical to SEQ ID NO: 43
  Description of Artificial Sequence: Synthetic cashew; inner sequence

SEQ ID NO: 12060 - DNA, 30 bp, Artificial Sequence; identical to SEQ ID NO: 53
  Description of Artificial Sequence: Synthetic cashew; inner sequence

SEQ ID NO: 12061 - DNA, 30 bp, Artificial Sequence; identical to SEQ ID NO: 51
  Description of Artificial Sequence: Synthetic cashew; inner sequence

SEQ ID NO: 12062 - DNA, 30 bp, Artificial Sequence; identical to SEQ ID NO: 76
  Description of Artificial Sequence: Synthetic cashew; inner sequence

SEQ ID NO: 12063 - DNA, 30 bp, Artificial Sequence; identical to SEQ ID NO: 63
  Description of Artificial Sequence: Synthetic cashew; inner sequence

SEQ ID NO: 12064 - DNA, 30 bp, Artificial Sequence; identical to SEQ ID NO: 133
  Description of Artificial Sequence: Synthetic cashew; inner sequence

SEQ ID NO: 12065 - DNA, 30 bp, Artificial Sequence; identical to SEQ ID NO: 58
  Description of Artificial Sequence: Synthetic cashew; inner sequence

SEQ ID NO: 12066 - DNA, 30 bp, Artificial Sequence; identical to SEQ ID NO: 112
  Description of Artificial Sequence: Synthetic cashew; inner sequence

SEQ ID NO: 12067 - DNA, 30 bp, Artificial Sequence; identical to SEQ ID NO: 42
  Description of Artificial Sequence: Synthetic cashew; inner sequence

SEQ ID NO: 12068 - DNA, 30 bp, Artificial Sequence; identical to SEQ ID NO: 129
  Description of Artificial Sequence: Synthetic cashew; inner sequence

SEQ ID NO: 12069 - DNA, 30 bp, Artificial Sequence; identical to SEQ ID NO: 81
  Description of Artificial Sequence: Synthetic cashew; inner sequence

SEQ ID NO: 12070 - DNA, 30 bp, Artificial Sequence; identical to SEQ ID NO: 80
  Description of Artificial Sequence: Synthetic cashew; inner sequence

SEQ ID NO: 12071 - DNA, 30 bp, Artificial Sequence; identical to SEQ ID NO: 183
  Description of Artificial Sequence: Synthetic cashew; inner sequence

SEQ ID NO: 12072 - DNA, 30 bp, Artificial Sequence; identical to SEQ ID NO: 26
  Description of Artificial Sequence: Synthetic cashew; inner sequence

SEQ ID NO: 12073 - DNA, 30 bp, Artificial Sequence; identical to SEQ ID NO: 120
  Description of Artificial Sequence: Synthetic cashew; inner sequence

SEQ ID NO: 12074 - DNA, 30 bp, Artificial Sequence; identical to SEQ ID NO: 93
  Description of Artificial Sequence: Synthetic cashew; inner sequence

SEQ ID NO: 12075 - DNA, 30 bp, Artificial Sequence; identical to SEQ ID NO: 36
  Description of Artificial Sequence: Synthetic cashew; inner sequence

SEQ ID NO: 12076 - DNA, 30 bp, Artificial Sequence; identical to SEQ ID NO: 57
  Description of Artificial Sequence: Synthetic cashew; inner sequence

SEQ ID NO: 12077 - DNA, 30 bp, Artificial Sequence; identical to SEQ ID NO: 65
  Description of Artificial Sequence: Synthetic cashew; inner sequence

SEQ ID NO: 12078 - DNA, 30 bp, Artificial Sequence; identical to SEQ ID NO: 59
  Description of Artificial Sequence: Synthetic cashew; inner sequence

SEQ ID NO: 12079 - DNA, 30 bp, Artificial Sequence; identical to SEQ ID NO: 126
  Description of Artificial Sequence: Synthetic cashew; inner sequence

SEQ ID NO: 12080 - DNA, 30 bp, Artificial Sequence; identical to SEQ ID NO: 25
  Description of Artificial Sequence: Synthetic cashew; inner sequence

SEQ ID NO: 12081 - DNA, 30 bp, Artificial Sequence; identical to SEQ ID NO: 47
  Description of Artificial Sequence: Synthetic cashew; inner sequence

SEQ ID NO: 12082 - DNA, 30 bp, Artificial Sequence; identical to SEQ ID NO: 97
  Description of Artificial Sequence: Synthetic cashew; inner sequence

SEQ ID NO: 12083 - DNA, 30 bp, Artificial Sequence; identical to SEQ ID NO: 211
  Description of Artificial Sequence: Synthetic cashew; inner sequence

SEQ ID NO: 12084 - DNA, 30 bp, Artificial Sequence; identical to SEQ ID NO: 136
  Description of Artificial Sequence: Synthetic cashew; inner sequence

SEQ ID NO: 12085 - DNA, 30 bp, Artificial Sequence; identical to SEQ ID NO: 92
  Description of Artificial Sequence: Synthetic cashew; inner sequence

SEQ ID NO: 12086 - DNA, 30 bp, Artificial Sequence; identical to SEQ ID NO: 311
  Description of Artificial Sequence: Synthetic cashew; inner sequence

SEQ ID NO: 12087 - DNA, 30 bp, Artificial Sequence; identical to SEQ ID NO: 122
  Description of Artificial Sequence: Synthetic cashew; inner sequence

SEQ ID NO: 12088 - DNA, 30 bp, Artificial Sequence; identical to SEQ ID NO: 144
  Description of Artificial Sequence: Synthetic cashew; inner sequence

SEQ ID NO: 12089 - DNA, 30 bp, Artificial Sequence; identical to SEQ ID NO: 257
  Description of Artificial Sequence: Synthetic cashew; inner sequence

SEQ ID NO: 12090 - DNA, 30 bp, Artificial Sequence; identical to SEQ ID NO: 154
  Description of Artificial Sequence: Synthetic cashew; inner sequence

SEQ ID NO: 12091 - DNA, 30 bp, Artificial Sequence; identical to SEQ ID NO: 185
  Description of Artificial Sequence: Synthetic cashew; inner sequence

SEQ ID NO: 12092 - DNA, 30 bp, Artificial Sequence; identical to SEQ ID NO: 27
  Description of Artificial Sequence: Synthetic cashew; inner sequence

SEQ ID NO: 12093 - DNA, 30 bp, Artificial Sequence; identical to SEQ ID NO: 207
  Description of Artificial Sequence: Synthetic cashew; inner sequence

SEQ ID NO: 12094 - DNA, 30 bp, Artificial Sequence; identical to SEQ ID NO: 142
  Description of Artificial Sequence: Synthetic cashew; inner sequence

SEQ ID NO: 12095 - DNA, 30 bp, Artificial Sequence; identical to SEQ ID NO: 287
  Description of Artificial Sequence: Synthetic cashew; inner sequence

SEQ ID NO: 12096 - DNA, 30 bp, Artificial Sequence; identical to SEQ ID NO: 67
  Description of Artificial Sequence: Synthetic cashew; inner sequence

SEQ ID NO: 12097 - DNA, 30 bp, Artificial Sequence; identical to SEQ ID NO: 100
  Description of Artificial Sequence: Synthetic cashew; inner sequence

SEQ ID NO: 12098 - DNA, 30 bp, Artificial Sequence; identical to SEQ ID NO: 96
  Description of Artificial Sequence: Synthetic cashew; inner sequence

SEQ ID NO: 12099 - DNA, 30 bp, Artificial Sequence; identical to SEQ ID NO: 94
  Description of Artificial Sequence: Synthetic cashew; inner sequence

SEQ ID NO: 12100 - DNA, 30 bp, Artificial Sequence; identical to SEQ ID NO: 78
  Description of Artificial Sequence: Synthetic cashew; inner sequence

SEQ ID NO: 12101 - DNA, 30 bp, Artificial Sequence; identical to SEQ ID NO: 99
  Description of Artificial Sequence: Synthetic cashew; inner sequence

SEQ ID NO: 12102 - DNA, 30 bp, Artificial Sequence; identical to SEQ ID NO: 151
  Description of Artificial Sequence: Synthetic cashew; inner sequence

SEQ ID NO: 12103 - DNA, 30 bp, Artificial Sequence; identical to SEQ ID NO: 91
  Description of Artificial Sequence: Synthetic cashew; inner sequence

SEQ ID NO: 12104 - DNA, 30 bp, Artificial Sequence; identical to SEQ ID NO: 83
  Description of Artificial Sequence: Synthetic cashew; inner sequence

SEQ ID NO: 12105 - DNA, 30 bp, Artificial Sequence; identical to SEQ ID NO: 68
  Description of Artificial Sequence: Synthetic cashew; inner sequence

SEQ ID NO: 12106 - DNA, 30 bp, Artificial Sequence; identical to SEQ ID NO: 430
  Description of Artificial Sequence: Synthetic cashew; inner sequence

SEQ ID NO: 12107 - DNA, 30 bp, Artificial Sequence; identical to SEQ ID NO: 196
  Description of Artificial Sequence: Synthetic cashew; inner sequence

SEQ ID NO: 12108 - DNA, 30 bp, Artificial Sequence; identical to SEQ ID NO: 56
  Description of Artificial Sequence: Synthetic cashew; inner sequence

SEQ ID NO: 12109 - DNA, 30 bp, Artificial Sequence; identical to SEQ ID NO: 567
  Description of Artificial Sequence: Synthetic cashew; inner sequence

SEQ ID NO: 12110 - DNA, 30 bp, Artificial Sequence; identical to SEQ ID NO: 208
  Description of Artificial Sequence: Synthetic cashew; inner sequence

SEQ ID NO: 12111 - DNA, 30 bp, Artificial Sequence; identical to SEQ ID NO: 468
  Description of Artificial Sequence: Synthetic cashew; inner sequence

SEQ ID NO: 12112 - DNA, 30 bp, Artificial Sequence; identical to SEQ ID NO: 264
  Description of Artificial Sequence: Synthetic cashew; inner sequence

SEQ ID NO: 12113 - DNA, 30 bp, Artificial Sequence; identical to SEQ ID NO: 127
  Description of Artificial Sequence: Synthetic cashew; inner sequence

SEQ ID NO: 12114 - DNA, 30 bp, Artificial Sequence; identical to SEQ ID NO: 118
  Description of Artificial Sequence: Synthetic cashew; inner sequence

SEQ ID NO: 12115 - DNA, 30 bp, Artificial Sequence; identical to SEQ ID NO: 692
  Description of Artificial Sequence: Synthetic cashew; inner sequence

SEQ ID NO: 12116 - DNA, 30 bp, Artificial Sequence; identical to SEQ ID NO: 147
  Description of Artificial Sequence: Synthetic cashew; inner sequence

SEQ ID NO: 12117 - DNA, 30 bp, Artificial Sequence; identical to SEQ ID NO: 79
  Description of Artificial Sequence: Synthetic cashew; inner sequence

SEQ ID NO: 12118 - DNA, 30 bp, Artificial Sequence; identical to SEQ ID NO: 233
  Description of Artificial Sequence: Synthetic cashew; inner sequence

SEQ ID NO: 12119 - DNA, 30 bp, Artificial Sequence; identical to SEQ ID NO: 95
  Description of Artificial Sequence: Synthetic cashew; inner sequence

SEQ ID NO: 12120 - DNA, 30 bp, Artificial Sequence; identical to SEQ ID NO: 288
  Description of Artificial Sequence: Synthetic cashew; inner sequence

SEQ ID NO: 12121 - DNA, 30 bp, Artificial Sequence; identical to SEQ ID NO: 237
  Description of Artificial Sequence: Synthetic cashew; inner sequence

SEQ ID NO: 12122 - DNA, 30 bp, Artificial Sequence; identical to SEQ ID NO: 179
  Description of Artificial Sequence: Synthetic cashew; inner sequence

SEQ ID NO: 12123 - DNA, 30 bp, Artificial Sequence; identical to SEQ ID NO: 146
  Description of Artificial Sequence: Synthetic cashew; inner sequence

SEQ ID NO: 12124 - DNA, 30 bp, Artificial Sequence; identical to SEQ ID NO: 230
  Description of Artificial Sequence: Synthetic cashew; inner sequence

SEQ ID NO: 12125 - DNA, 30 bp, Artificial Sequence; identical to SEQ ID NO: 203
  Description of Artificial Sequence: Synthetic cashew; inner sequence

SEQ ID NO: 12126 - DNA, 30 bp, Artificial Sequence; identical to SEQ ID NO: 247
  Description of Artificial Sequence: Synthetic cashew; inner sequence

SEQ ID NO: 12127 - DNA, 30 bp, Artificial Sequence; identical to SEQ ID NO: 194
  Description of Artificial Sequence: Synthetic cashew; inner sequence

SEQ ID NO: 12128 - DNA, 30 bp, Artificial Sequence; identical to SEQ ID NO: 164
  Description of Artificial Sequence: Synthetic cashew; inner sequence

SEQ ID NO: 12129 - DNA, 30 bp, Artificial Sequence; identical to SEQ ID NO: 270
  Description of Artificial Sequence: Synthetic cashew; inner sequence

SEQ ID NO: 12130 - DNA, 30 bp, Artificial Sequence; identical to SEQ ID NO: 103
  Description of Artificial Sequence: Synthetic cashew; inner sequence

SEQ ID NO: 12131 - DNA, 30 bp, Artificial Sequence; identical to SEQ ID NO: 470
  Description of Artificial Sequence: Synthetic cashew; inner sequence

SEQ ID NO: 12132 - DNA, 30 bp, Artificial Sequence; identical to SEQ ID NO: 360
  Description of Artificial Sequence: Synthetic cashew; inner sequence

SEQ ID NO: 12133 - DNA, 30 bp, Artificial Sequence; identical to SEQ ID NO: 245
  Description of Artificial Sequence: Synthetic cashew; inner sequence

SEQ ID NO: 12134 - DNA, 30 bp, Artificial Sequence; identical to SEQ ID NO: 161
  Description of Artificial Sequence: Synthetic cashew; inner sequence

SEQ ID NO: 12135 - DNA, 30 bp, Artificial Sequence; identical to SEQ ID NO: 285
  Description of Artificial Sequence: Synthetic cashew; inner sequence

SEQ ID NO: 12136 - DNA, 30 bp, Artificial Sequence; identical to SEQ ID NO: 171
  Description of Artificial Sequence: Synthetic cashew; inner sequence

SEQ ID NO: 12137 - DNA, 30 bp, Artificial Sequence; identical to SEQ ID NO: 168
  Description of Artificial Sequence: Synthetic cashew; inner sequence

SEQ ID NO: 12138 - DNA, 30 bp, Artificial Sequence; identical to SEQ ID NO: 312
  Description of Artificial Sequence: Synthetic cashew; inner sequence

SEQ ID NO: 12139 - DNA, 30 bp, Artificial Sequence; identical to SEQ ID NO: 111
  Description of Artificial Sequence: Synthetic cashew; inner sequence

SEQ ID NO: 12140 - DNA, 30 bp, Artificial Sequence; identical to SEQ ID NO: 145
  Description of Artificial Sequence: Synthetic cashew; inner sequence

SEQ ID NO: 12141 - DNA, 31 bp, Artificial Sequence; identical to SEQ ID NO: 150
  Description of Artificial Sequence: Synthetic cashew; inner sequence

SEQ ID NO: 12142 - DNA, 28 bp, Artificial Sequence
  Description of Artificial Sequence: Synthetic cashew; inner sequence
ggacgcagctgacctagcatgtgtgtca

SEQ ID NO: 12143 - DNA, 30 bp, Artificial Sequence; identical to SEQ ID NO: 240
  Description of Artificial Sequence: Synthetic cashew; inner sequence

SEQ ID NO: 12144 - DNA, 30 bp, Artificial Sequence; identical to SEQ ID NO: 107
  Description of Artificial Sequence: Synthetic cashew; inner sequence

SEQ ID NO: 12145 - DNA, 30 bp, Artificial Sequence; identical to SEQ ID NO: 125
  Description of Artificial Sequence: Synthetic cashew; inner sequence

SEQ ID NO: 12146 - DNA, 30 bp, Artificial Sequence; identical to SEQ ID NO: 215
  Description of Artificial Sequence: Synthetic cashew; inner sequence

SEQ ID NO: 12147 - DNA, 30 bp, Artificial Sequence; identical to SEQ ID NO: 115
  Description of Artificial Sequence: Synthetic cashew; inner sequence

SEQ ID NO: 12148 - DNA, 30 bp, Artificial Sequence; identical to SEQ ID NO: 253
  Description of Artificial Sequence: Synthetic cashew; inner sequence

SEQ ID NO: 12149 - DNA, 30 bp, Artificial Sequence; identical to SEQ ID NO: 113
  Description of Artificial Sequence: Synthetic cashew; inner sequence

SEQ ID NO: 12150 - DNA, 30 bp, Artificial Sequence; identical to SEQ ID NO: 163
  Description of Artificial Sequence: Synthetic cashew; inner sequence

SEQ ID NO: 12151 - DNA, 30 bp, Artificial Sequence; identical to SEQ ID NO: 155
  Description of Artificial Sequence: Synthetic cashew; inner sequence

SEQ ID NO: 12152 - DNA, 30 bp, Artificial Sequence; identical to SEQ ID NO: 188
  Description of Artificial Sequence: Synthetic cashew; inner sequence

SEQ ID NO: 12153 - DNA, 30 bp, Artificial Sequence; identical to SEQ ID NO: 108
  Description of Artificial Sequence: Synthetic cashew; inner sequence

SEQ ID NO: 12154 - DNA, 30 bp, Artificial Sequence; identical to SEQ ID NO: 282
  Description of Artificial Sequence: Synthetic cashew; inner sequence

SEQ ID NO: 12155 - DNA, 30 bp, Artificial Sequence; identical to SEQ ID NO: 354
  Description of Artificial Sequence: Synthetic cashew; inner sequence

SEQ ID NO: 12156 - DNA, 30 bp, Artificial Sequence; identical to SEQ ID NO: 71
  Description of Artificial Sequence: Synthetic cashew; inner sequence

SEQ ID NO: 12157 - DNA, 30 bp, Artificial Sequence; identical to SEQ ID NO: 293
  Description of Artificial Sequence: Synthetic cashew; inner sequence

SEQ ID NO: 12158 - DNA, 30 bp, Artificial Sequence; identical to SEQ ID NO: 355
  Description of Artificial Sequence: Synthetic cashew; inner sequence

SEQ ID NO: 12159 - DNA, 30 bp, Artificial Sequence; identical to SEQ ID NO: 166
  Description of Artificial Sequence: Synthetic cashew; inner sequence

SEQ ID NO: 12160 - DNA, 30 bp, Artificial Sequence; identical to SEQ ID NO: 73
  Description of Artificial Sequence: Synthetic cashew; inner sequence

SEQ ID NO: 12161 - DNA, 30 bp, Artificial Sequence; identical to SEQ ID NO: 200
  Description of Artificial Sequence: Synthetic cashew; inner sequence

SEQ ID NO: 12162 - DNA, 30 bp, Artificial Sequence; identical to SEQ ID NO: 106
  Description of Artificial Sequence: Synthetic cashew; inner sequence

SEQ ID NO: 12163 - DNA, 30 bp, Artificial Sequence; identical to SEQ ID NO: 186
  Description of Artificial Sequence: Synthetic cashew; inner sequence

SEQ ID NO: 12164 - DNA, 30 bp, Artificial Sequence; identical to SEQ ID NO: 187
  Description of Artificial Sequence: Synthetic cashew; inner sequence

SEQ ID NO: 12165 - DNA, 30 bp, Artificial Sequence; identical to SEQ ID NO: 62
  Description of Artificial Sequence: Synthetic cashew; inner sequence

SEQ ID NO: 12166 - DNA, 30 bp, Artificial Sequence; identical to SEQ ID NO: 75
  Description of Artificial Sequence: Synthetic cashew; inner sequence

SEQ ID NO: 12167 - DNA, 30 bp, Artificial Sequence; identical to SEQ ID NO: 157
  Description of Artificial Sequence: Synthetic cashew; inner sequence

SEQ ID NO: 12168 - DNA, 30 bp, Artificial Sequence; identical to SEQ ID NO: 232
  Description of Artificial Sequence: Synthetic cashew; inner sequence

SEQ ID NO: 12169 - DNA, 30 bp, Artificial Sequence; identical to SEQ ID NO: 109
  Description of Artificial Sequence: Synthetic cashew; inner sequence

SEQ ID NO: 12170 - DNA, 30 bp, Artificial Sequence; identical to SEQ ID NO: 229
  Description of Artificial Sequence: Synthetic cashew; inner sequence

SEQ ID NO: 12171 - DNA, 30 bp, Artificial Sequence; identical to SEQ ID NO: 552
  Description of Artificial Sequence: Synthetic cashew; inner sequence

SEQ ID NO: 12172 - DNA, 30 bp, Artificial Sequence; identical to SEQ ID NO: 174
  Description of Artificial Sequence: Synthetic cashew; inner sequence

SEQ ID NO: 12173 - DNA, 30 bp, Artificial Sequence; identical to SEQ ID NO: 105
  Description of Artificial Sequence: Synthetic cashew; inner sequence

SEQ ID NO: 12174 - DNA, 30 bp, Artificial Sequence; identical to SEQ ID NO: 175
  Description of Artificial Sequence: Synthetic cashew; inner sequence

SEQ ID NO: 12175 - DNA, 30 bp, Artificial Sequence; identical to SEQ ID NO: 438
  Description of Artificial Sequence: Synthetic cashew; inner sequence

SEQ ID NO: 12176 - DNA, 30 bp, Artificial Sequence; identical to SEQ ID NO: 205
  Description of Artificial Sequence: Synthetic cashew; inner sequence

SEQ ID NO: 12177 - DNA, 30 bp, Artificial Sequence; identical to SEQ ID NO: 308
  Description of Artificial Sequence: Synthetic cashew; inner sequence

SEQ ID NO: 12178 - DNA, 30 bp, Artificial Sequence; identical to SEQ ID NO: 377
  Description of Artificial Sequence: Synthetic cashew; inner sequence

SEQ ID NO: 12179 - DNA, 30 bp, Artificial Sequence; identical to SEQ ID NO: 362
  Description of Artificial Sequence: Synthetic cashew; inner sequence

SEQ ID NO: 12180 - DNA, 30 bp, Artificial Sequence; identical to SEQ ID NO: 86
  Description of Artificial Sequence: Synthetic cashew; inner sequence

SEQ ID NO: 12181 - DNA, 30 bp, Artificial Sequence; identical to SEQ ID NO: 165
  Description of Artificial Sequence: Synthetic cashew; inner sequence

SEQ ID NO: 12182 - DNA, 30 bp, Artificial Sequence; identical to SEQ ID NO: 138
  Description of Artificial Sequence: Synthetic cashew; inner sequence

SEQ ID NO: 12183 - DNA, 30 bp, Artificial Sequence; identical to SEQ ID NO: 222
  Description of Artificial Sequence: Synthetic cashew; inner sequence

SEQ ID NO: 12184 - DNA, 30 bp, Artificial Sequence; identical to SEQ ID NO: 184
  Description of Artificial Sequence: Synthetic cashew; inner sequence

SEQ ID NO: 12185 - DNA, 30 bp, Artificial Sequence; identical to SEQ ID NO: 84
  Description of Artificial Sequence: Synthetic cashew; inner sequence

SEQ ID NO: 12186 - DNA, 31 bp, Artificial Sequence; identical to SEQ ID NO: 258
  Description of Artificial Sequence: Synthetic cashew; inner sequence

SEQ ID NO: 12187 - DNA, 31 bp, Artificial Sequence; identical to SEQ ID NO: 221
  Description of Artificial Sequence: Synthetic cashew; inner sequence

SEQ ID NO: 12188 - DNA, 30 bp, Artificial Sequence; identical to SEQ ID NO: 89
  Description of Artificial Sequence: Synthetic cashew; inner sequence

SEQ ID NO: 12189 - DNA, 30 bp, Artificial Sequence; identical to SEQ ID NO: 4336
  Description of Artificial Sequence: Synthetic cashew; inner sequence

SEQ ID NO: 12190 - DNA, 30 bp, Artificial Sequence; identical to SEQ ID NO: 290
  Description of Artificial Sequence: Synthetic cashew; inner sequence

SEQ ID NO: 12191 - DNA, 30 bp, Artificial Sequence; identical to SEQ ID NO: 645
  Description of Artificial Sequence: Synthetic cashew; inner sequence

SEQ ID NO: 12192 - DNA, 30 bp, Artificial Sequence; identical to SEQ ID NO: 385
  Description of Artificial Sequence: Synthetic cashew; inner sequence

SEQ ID NO: 12193 - DNA, 30 bp, Artificial Sequence; identical to SEQ ID NO: 90
  Description of Artificial Sequence: Synthetic cashew; inner sequence

SEQ ID NO: 12194 - DNA, 30 bp, Artificial Sequence; identical to SEQ ID NO: 4205
  Description of Artificial Sequence: Synthetic cashew; inner sequence

SEQ ID NO: 12195 - DNA, 30 bp, Artificial Sequence; identical to SEQ ID NO: 134
  Description of Artificial Sequence: Synthetic cashew; inner sequence

SEQ ID NO: 12196 - DNA, 30 bp, Artificial Sequence; identical to SEQ ID NO: 448
  Description of Artificial Sequence: Synthetic cashew; inner sequence

SEQ ID NO: 12197 - DNA, 30 bp, Artificial Sequence; identical to SEQ ID NO: 376
  Description of Artificial Sequence: Synthetic cashew; inner sequence

SEQ ID NO: 12198 - DNA, 30 bp, Artificial Sequence; identical to SEQ ID NO: 159
  Description of Artificial Sequence: Synthetic cashew; inner sequence

SEQ ID NO: 12199 - DNA, 30 bp, Artificial Sequence; identical to SEQ ID NO: 191
  Description of Artificial Sequence: Synthetic cashew; inner sequence

SEQ ID NO: 12200 - DNA, 30 bp, Artificial Sequence; identical to SEQ ID NO: 198
  Description of Artificial Sequence: Synthetic cashew; inner sequence

SEQ ID NO: 12201 - DNA, 30 bp, Artificial Sequence; identical to SEQ ID NO: 139
  Description of Artificial Sequence: Synthetic cashew; inner sequence

SEQ ID NO: 12202 - DNA, 30 bp, Artificial Sequence; identical to SEQ ID NO: 262
  Description of Artificial Sequence: Synthetic cashew; inner sequence

SEQ ID NO: 12203 - DNA, 30 bp, Artificial Sequence; identical to SEQ ID NO: 329
  Description of Artificial Sequence: Synthetic cashew; inner sequence

SEQ ID NO: 12204 - DNA, 30 bp, Artificial Sequence; identical to SEQ ID NO: 541
  Description of Artificial Sequence: Synthetic cashew; inner sequence

SEQ ID NO: 12205 - DNA, 30 bp, Artificial Sequence; identical to SEQ ID NO: 110
  Description of Artificial Sequence: Synthetic cashew; inner sequence

SEQ ID NO: 12206 - DNA, 30 bp, Artificial Sequence; identical to SEQ ID NO: 121
  Description of Artificial Sequence: Synthetic cashew; inner sequence

SEQ ID NO: 12207 - DNA, 30 bp, Artificial Sequence; identical to SEQ ID NO: 201
  Description of Artificial Sequence: Synthetic cashew; inner sequence

SEQ ID NO: 12208 - DNA, 30 bp, Artificial Sequence; identical to SEQ ID NO: 283
  Description of Artificial Sequence: Synthetic cashew; inner sequence

SEQ ID NO: 12209 - DNA, 30 bp, Artificial Sequence; identical to SEQ ID NO: 85
  Description of Artificial Sequence: Synthetic cashew; inner sequence

SEQ ID NO: 12210 - DNA, 30 bp, Artificial Sequence; identical to SEQ ID NO: 269
  Description of Artificial Sequence: Synthetic cashew; inner sequence

SEQ ID NO: 12211 - DNA, 30 bp, Artificial Sequence; identical to SEQ ID NO: 373
  Description of Artificial Sequence: Synthetic cashew; inner sequence

SEQ ID NO: 12212 - DNA, 30 bp, Artificial Sequence; identical to SEQ ID NO: 406
  Description of Artificial Sequence: Synthetic cashew; inner sequence

SEQ ID NO: 12213 - DNA, 30 bp, Artificial Sequence; identical to SEQ ID NO: 630
  Description of Artificial Sequence: Synthetic cashew; inner sequence

SEQ ID NO: 12214 - DNA, 30 bp, Artificial Sequence; identical to SEQ ID NO: 371
  Description of Artificial Sequence: Synthetic cashew; inner sequence

SEQ ID NO: 12215 - DNA, 30 bp, Artificial Sequence; identical to SEQ ID NO: 69
  Description of Artificial Sequence: Synthetic cashew; inner sequence

SEQ ID NO: 12216 - DNA, 30 bp, Artificial Sequence; identical to SEQ ID NO: 299
  Description of Artificial Sequence: Synthetic cashew; inner sequence

SEQ ID NO: 12217 - DNA, 30 bp, Artificial Sequence; identical to SEQ ID NO: 4229
  Description of Artificial Sequence: Synthetic cashew; inner sequence

SEQ ID NO: 12218 - DNA, 30 bp, Artificial Sequence; identical to SEQ ID NO: 673
  Description of Artificial Sequence: Synthetic cashew; inner sequence

SEQ ID NO: 12219 - DNA, 30 bp, Artificial Sequence; identical to SEQ ID NO: 369
  Description of Artificial Sequence: Synthetic cashew; inner sequence

SEQ ID NO: 12220 - DNA, 30 bp, Artificial Sequence; identical to SEQ ID NO: 8401
  Description of Artificial Sequence: Synthetic cashew; inner sequence

SEQ ID NO: 12221 - DNA, 30 bp, Artificial Sequence; identical to SEQ ID NO: 522
  Description of Artificial Sequence: Synthetic cashew; inner sequence

SEQ ID NO: 12222 - DNA, 30 bp, Artificial Sequence; identical to SEQ ID NO: 140
  Description of Artificial Sequence: Synthetic cashew; inner sequence

SEQ ID NO: 12223 - DNA, 30 bp, Artificial Sequence; identical to SEQ ID NO: 156
  Description of Artificial Sequence: Synthetic cashew; inner sequence

SEQ ID NO: 12224 - DNA, 30 bp, Artificial Sequence; identical to SEQ ID NO: 153
  Description of Artificial Sequence: Synthetic cashew; inner sequence

SEQ ID NO: 12225 - DNA, 30 bp, Artificial Sequence; identical to SEQ ID NO: 189
  Description of Artificial Sequence: Synthetic cashew; inner sequence

SEQ ID NO: 12226 - DNA, 30 bp, Artificial Sequence; identical to SEQ ID NO: 389
  Description of Artificial Sequence: Synthetic cashew; inner sequence

SEQ ID NO: 12227 - DNA, 30 bp, Artificial Sequence; identical to SEQ ID NO: 102
  Description of Artificial Sequence: Synthetic cashew; inner sequence

SEQ ID NO: 12228 - DNA, 30 bp, Artificial Sequence; identical to SEQ ID NO: 123
  Description of Artificial Sequence: Synthetic cashew; inner sequence

SEQ ID NO: 12229 - DNA, 30 bp, Artificial Sequence; identical to SEQ ID NO: 532
  Description of Artificial Sequence: Synthetic cashew; inner sequence

SEQ ID NO: 12230 - DNA, 30 bp, Artificial Sequence; identical to SEQ ID NO: 234
  Description of Artificial Sequence: Synthetic cashew; inner sequence

SEQ ID NO: 12231 - DNA, 30 bp, Artificial Sequence; identical to SEQ ID NO: 266
  Description of Artificial Sequence: Synthetic cashew; inner sequence

SEQ ID NO: 12232 - DNA, 30 bp, Artificial Sequence; identical to SEQ ID NO: 347
  Description of Artificial Sequence: Synthetic cashew; inner sequence

SEQ ID NO: 12233 - DNA, 30 bp, Artificial Sequence; identical to SEQ ID NO: 454
  Description of Artificial Sequence: Synthetic cashew; inner sequence

SEQ ID NO: 12234 - DNA, 30 bp, Artificial Sequence; identical to SEQ ID NO: 553
  Description of Artificial Sequence: Synthetic cashew; inner sequence

SEQ ID NO: 12235 - DNA, 30 bp, Artificial Sequence; identical to SEQ ID NO: 243
  Description of Artificial Sequence: Synthetic cashew; inner sequence

SEQ ID NO: 12236 - DNA, 30 bp, Artificial Sequence; identical to SEQ ID NO: 132
  Description of Artificial Sequence: Synthetic cashew; inner sequence

SEQ ID NO: 12237 - DNA, 30 bp, Artificial Sequence; identical to SEQ ID NO: 401
  Description of Artificial Sequence: Synthetic cashew; inner sequence

SEQ ID NO: 12238 - DNA, 30 bp, Artificial Sequence; identical to SEQ ID NO: 152
  Description of Artificial Sequence: Synthetic cashew; inner sequence

SEQ ID NO: 12239 - DNA, 30 bp, Artificial Sequence; identical to SEQ ID NO: 321
  Description of Artificial Sequence: Synthetic cashew; inner sequence

SEQ ID NO: 12240 - DNA, 30 bp, Artificial Sequence; identical to SEQ ID NO: 413
  Description of Artificial Sequence: Synthetic cashew; inner sequence

SEQ ID NO: 12241 - DNA, 30 bp, Artificial Sequence; identical to SEQ ID NO: 182
  Description of Artificial Sequence: Synthetic cashew; inner sequence

SEQ ID NO: 12242 - DNA, 31 bp, Artificial Sequence; identical to SEQ ID NO: 250
  Description of Artificial Sequence: Synthetic cashew; inner sequence

SEQ ID NO: 12243 - DNA, 30 bp, Artificial Sequence; identical to SEQ ID NO: 585
  Description of Artificial Sequence: Synthetic cashew; inner sequence

SEQ ID NO: 12244 - DNA, 30 bp, Artificial Sequence; identical to SEQ ID NO: 325
  Description of Artificial Sequence: Synthetic cashew; inner sequence

SEQ ID NO: 12245 - DNA, 30 bp, Artificial Sequence; identical to SEQ ID NO: 343
  Description of Artificial Sequence: Synthetic cashew; inner sequence

SEQ ID NO: 12246 - DNA, 30 bp, Artificial Sequence; identical to SEQ ID NO: 341
  Description of Artificial Sequence: Synthetic cashew; inner sequence

SEQ ID NO: 12247 - DNA, 30 bp, Artificial Sequence; identical to SEQ ID NO: 654
  Description of Artificial Sequence: Synthetic cashew; inner sequence

SEQ ID NO: 12248 - DNA, 30 bp, Artificial Sequence; identical to SEQ ID NO: 158
  Description of Artificial Sequence: Synthetic cashew; inner sequence

SEQ ID NO: 12249 - DNA, 30 bp, Artificial Sequence; identical to SEQ ID NO: 429
  Description of Artificial Sequence: Synthetic cashew; inner sequence

SEQ ID NO: 12250 - DNA, 30 bp, Artificial Sequence; identical to SEQ ID NO: 353
  Description of Artificial Sequence: Synthetic cashew; inner sequence

SEQ ID NO: 12251 - DNA, 30 bp, Artificial Sequence; identical to SEQ ID NO: 195
  Description of Artificial Sequence: Synthetic cashew; inner sequence

SEQ ID NO: 12252 - DNA, 30 bp, Artificial Sequence; identical to SEQ ID NO: 298
  Description of Artificial Sequence: Synthetic cashew; inner sequence

SEQ ID NO: 12253 - DNA, 30 bp, Artificial Sequence; identical to SEQ ID NO: 336
  Description of Artificial Sequence: Synthetic cashew; inner sequence

SEQ ID NO: 12254 - DNA, 30 bp, Artificial Sequence; identical to SEQ ID NO: 178
  Description of Artificial Sequence: Synthetic cashew; inner sequence

SEQ ID NO: 12255 - DNA, 30 bp, Artificial Sequence; identical to SEQ ID NO: 180
  Description of Artificial Sequence: Synthetic cashew; inner sequence

SEQ ID NO: 12256 - DNA, 30 bp, Artificial Sequence; identical to SEQ ID NO: 634
  Description of Artificial Sequence: Synthetic cashew; inner sequence

SEQ ID NO: 12257 - DNA, 30 bp, Artificial Sequence; identical to SEQ ID NO: 436
  Description of Artificial Sequence: Synthetic cashew; inner sequence

SEQ ID NO: 12258 - DNA, 30 bp, Artificial Sequence; identical to SEQ ID NO: 116
  Description of Artificial Sequence: Synthetic cashew; inner sequence

SEQ ID NO: 12259 - DNA, 30 bp, Artificial Sequence; identical to SEQ ID NO: 365
  Description of Artificial Sequence: Synthetic cashew; inner sequence

SEQ ID NO: 12260 - DNA, 30 bp, Artificial Sequence; identical to SEQ ID NO: 4449
  Description of Artificial Sequence: Synthetic cashew; inner sequence

SEQ ID NO: 12261 - DNA, 30 bp, Artificial Sequence; identical to SEQ ID NO: 284
  Description of Artificial Sequence: Synthetic cashew; inner sequence

SEQ ID NO: 12262 - DNA, 30 bp, Artificial Sequence; identical to SEQ ID NO: 319
  Description of Artificial Sequence: Synthetic cashew; inner sequence

SEQ ID NO: 12263 - DNA, 30 bp, Artificial Sequence; identical to SEQ ID NO: 202
  Description of Artificial Sequence: Synthetic cashew; inner sequence

SEQ ID NO: 12264 - DNA, 30 bp, Artificial Sequence; identical to SEQ ID NO: 135
  Description of Artificial Sequence: Synthetic cashew; inner sequence

SEQ ID NO: 12265 - DNA, 30 bp, Artificial Sequence; identical to SEQ ID NO: 579
  Description of Artificial Sequence: Synthetic cashew; inner sequence

SEQ ID NO: 12266 - DNA, 30 bp, Artificial Sequence; identical to SEQ ID NO: 527
  Description of Artificial Sequence: Synthetic cashew; inner sequence

SEQ ID NO: 12267 - DNA, 30 bp, Artificial Sequence; identical to SEQ ID NO: 301
  Description of Artificial Sequence: Synthetic cashew; inner sequence

SEQ ID NO: 12268 - DNA, 30 bp, Artificial Sequence; identical to SEQ ID NO: 791
  Description of Artificial Sequence: Synthetic cashew; inner sequence

SEQ ID NO: 12269 - DNA, 30 bp, Artificial Sequence; identical to SEQ ID NO: 524
  Description of Artificial Sequence: Synthetic cashew; inner sequence

SEQ ID NO: 12270 - DNA, 30 bp, Artificial Sequence; identical to SEQ ID NO: 197
  Description of Artificial Sequence: Synthetic cashew; inner sequence

SEQ ID NO: 12271 - DNA, 30 bp, Artificial Sequence; identical to SEQ ID NO: 190
  Description of Artificial Sequence: Synthetic cashew; inner sequence

SEQ ID NO: 12272 - DNA, 30 bp, Artificial Sequence; identical to SEQ ID NO: 172
  Description of Artificial Sequence: Synthetic cashew; inner sequence

SEQ ID NO: 12273 - DNA, 30 bp, Artificial Sequence; identical to SEQ ID NO: 228
  Description of Artificial Sequence: Synthetic cashew; inner sequence

SEQ ID NO: 12274 - DNA, 30 bp, Artificial Sequence; identical to SEQ ID NO: 383
  Description of Artificial Sequence: Synthetic cashew; inner sequence

SEQ ID NO: 12275 - DNA, 30 bp, Artificial Sequence; identical to SEQ ID NO: 540
  Description of Artificial Sequence: Synthetic cashew; inner sequence

SEQ ID NO: 12276 - DNA, 30 bp, Artificial Sequence; identical to SEQ ID NO: 72
  Description of Artificial Sequence: Synthetic cashew; inner sequence

SEQ ID NO: 12277 - DNA, 30 bp, Artificial Sequence; identical to SEQ ID NO: 511
  Description of Artificial Sequence: Synthetic cashew; inner sequence

SEQ ID NO: 12278 - DNA, 30 bp, Artificial Sequence; identical to SEQ ID NO: 572
  Description of Artificial Sequence: Synthetic cashew; inner sequence

SEQ ID NO: 12279 - DNA, 30 bp, Artificial Sequence; identical to SEQ ID NO: 119
  Description of Artificial Sequence: Synthetic cashew; inner sequence

SEQ ID NO: 12280 - DNA, 30 bp, Artificial Sequence; identical to SEQ ID NO: 204
  Description of Artificial Sequence: Synthetic cashew; inner sequence

SEQ ID NO: 12281 - DNA, 30 bp, Artificial Sequence; identical to SEQ ID NO: 439
  Description of Artificial Sequence: Synthetic cashew; inner sequence

SEQ ID NO: 12282 - DNA, 30 bp, Artificial Sequence; identical to SEQ ID NO: 254
  Description of Artificial Sequence: Synthetic cashew; inner sequence

SEQ ID NO: 12283 - DNA, 30 bp, Artificial Sequence; identical to SEQ ID NO: 305
  Description of Artificial Sequence: Synthetic cashew; inner sequence

SEQ ID NO: 12284 - DNA, 30 bp, Artificial Sequence; identical to SEQ ID NO: 496
  Description of Artificial Sequence: Synthetic cashew; inner sequence

SEQ ID NO: 12285 - DNA, 30 bp, Artificial Sequence; identical to SEQ ID NO: 4234
  Description of Artificial Sequence: Synthetic cashew; inner sequence

SEQ ID NO: 12286 - DNA, 30 bp, Artificial Sequence; identical to SEQ ID NO: 320
  Description of Artificial Sequence: Synthetic cashew; inner sequence

SEQ ID NO: 12287 - DNA, 30 bp, Artificial Sequence; identical to SEQ ID NO: 98
  Description of Artificial Sequence: Synthetic cashew; inner sequence

SEQ ID NO: 12288 - DNA, 30 bp, Artificial Sequence; identical to SEQ ID NO: 671
  Description of Artificial Sequence: Synthetic cashew; inner sequence

SEQ ID NO: 12289 - DNA, 30 bp, Artificial Sequence; identical to SEQ ID NO: 352
  Description of Artificial Sequence: Synthetic cashew; inner sequence

SEQ ID NO: 12290 - DNA, 30 bp, Artificial Sequence; identical to SEQ ID NO: 314
  Description of Artificial Sequence: Synthetic cashew; inner sequence

SEQ ID NO: 12291 - DNA, 30 bp, Artificial Sequence; identical to SEQ ID NO: 529
  Description of Artificial Sequence: Synthetic cashew; inner sequence

SEQ ID NO: 12292 - DNA, 30 bp, Artificial Sequence; identical to SEQ ID NO: 323
  Description of Artificial Sequence: Synthetic cashew; inner sequence

SEQ ID NO: 12293 - DNA, 30 bp, Artificial Sequence; identical to SEQ ID NO: 916
  Description of Artificial Sequence: Synthetic cashew; inner sequence

SEQ ID NO: 12294 - DNA, 31 bp, Artificial Sequence; identical to SEQ ID NO: 4245
  Description of Artificial Sequence: Synthetic cashew; inner sequence

SEQ ID NO: 12295 - DNA, 30 bp, Artificial Sequence; identical to SEQ ID NO: 303
  Description of Artificial Sequence: Synthetic cashew; inner sequence

SEQ ID NO: 12296 - DNA, 30 bp, Artificial Sequence; identical to SEQ ID NO: 528
  Description of Artificial Sequence: Synthetic cashew; inner sequence

SEQ ID NO: 12297 - DNA, 30 bp, Artificial Sequence; identical to SEQ ID NO: 213
  Description of Artificial Sequence: Synthetic cashew; inner sequence

SEQ ID NO: 12298 - DNA, 30 bp, Artificial Sequence; identical to SEQ ID NO: 206
  Description of Artificial Sequence: Synthetic cashew; inner sequence

SEQ ID NO: 12299 - DNA, 30 bp, Artificial Sequence; identical to SEQ ID NO: 611
  Description of Artificial Sequence: Synthetic cashew; inner sequence

SEQ ID NO: 12300 - DNA, 30 bp, Artificial Sequence; identical to SEQ ID NO: 173
  Description of Artificial Sequence: Synthetic cashew; inner sequence

SEQ ID NO: 12301 - DNA, 30 bp, Artificial Sequence; identical to SEQ ID NO: 238
  Description of Artificial Sequence: Synthetic cashew; inner sequence

SEQ ID NO: 12302 - DNA, 30 bp, Artificial Sequence; identical to SEQ ID NO: 783
  Description of Artificial Sequence: Synthetic cashew; inner sequence

SEQ ID NO: 12303 - DNA, 30 bp, Artificial Sequence; identical to SEQ ID NO: 741
  Description of Artificial Sequence: Synthetic cashew; inner sequence

SEQ ID NO: 12304 - DNA, 30 bp, Artificial Sequence; identical to SEQ ID NO: 344
  Description of Artificial Sequence: Synthetic cashew; inner sequence

SEQ ID NO: 12305 - DNA, 30 bp, Artificial Sequence; identical to SEQ ID NO: 268
  Description of Artificial Sequence: Synthetic cashew; inner sequence

SEQ ID NO: 12306 - DNA, 30 bp, Artificial Sequence; identical to SEQ ID NO: 87
  Description of Artificial Sequence: Synthetic cashew; inner sequence

SEQ ID NO: 12307 - DNA, 30 bp, Artificial Sequence; identical to SEQ ID NO: 192
  Description of Artificial Sequence: Synthetic cashew; inner sequence

SEQ ID NO: 12308 - DNA, 30 bp, Artificial Sequence; identical to SEQ ID NO: 310
  Description of Artificial Sequence: Synthetic cashew; inner sequence

SEQ ID NO: 12309 - DNA, 30 bp, Artificial Sequence; identical to SEQ ID NO: 4254
  Description of Artificial Sequence: Synthetic cashew; inner sequence

SEQ ID NO: 12310 - DNA, 30 bp, Artificial Sequence; identical to SEQ ID NO: 884
  Description of Artificial Sequence: Synthetic cashew; inner sequence

SEQ ID NO: 12311 - DNA, 30 bp, Artificial Sequence; identical to SEQ ID NO: 348
  Description of Artificial Sequence: Synthetic cashew; inner sequence

SEQ ID NO: 12312 - DNA, 30 bp, Artificial Sequence; identical to SEQ ID NO: 4691
  Description of Artificial Sequence: Synthetic cashew; inner sequence

SEQ ID NO: 12313 - DNA, 30 bp, Artificial Sequence; identical to SEQ ID NO: 309
  Description of Artificial Sequence: Synthetic cashew; inner sequence

SEQ ID NO: 12314 - DNA, 30 bp, Artificial Sequence; identical to SEQ ID NO: 570
  Description of Artificial Sequence: Synthetic cashew; inner sequence

SEQ ID NO: 12315 - DNA, 30 bp, Artificial Sequence; identical to SEQ ID NO: 177
  Description of Artificial Sequence: Synthetic cashew; inner sequence

SEQ ID NO: 12316 - DNA, 30 bp, Artificial Sequence; identical to SEQ ID NO: 556
  Description of Artificial Sequence: Synthetic cashew; inner sequence

SEQ ID NO: 12317 - DNA, 30 bp, Artificial Sequence; identical to SEQ ID NO: 246
  Description of Artificial Sequence: Synthetic cashew; inner sequence

SEQ ID NO: 12318 - DNA, 30 bp, Artificial Sequence; identical to SEQ ID NO: 367
  Description of Artificial Sequence: Synthetic cashew; inner sequence

SEQ ID NO: 12319 - DNA, 30 bp, Artificial Sequence; identical to SEQ ID NO: 130
  Description of Artificial Sequence: Synthetic cashew; inner sequence

SEQ ID NO: 12320 - DNA, 30 bp, Artificial Sequence; identical to SEQ ID NO: 349
  Description of Artificial Sequence: Synthetic cashew; inner sequence

SEQ ID NO: 12321 - DNA, 30 bp, Artificial Sequence; identical to SEQ ID NO: 4376
  Description of Artificial Sequence: Synthetic cashew; inner sequence

SEQ ID NO: 12322 - DNA, 30 bp, Artificial Sequence; identical to SEQ ID NO: 696
  Description of Artificial Sequence: Synthetic cashew; inner sequence

SEQ ID NO: 12323 - DNA, 30 bp, Artificial Sequence; identical to SEQ ID NO: 271
  Description of Artificial Sequence: Synthetic cashew; inner sequence

SEQ ID NO: 12324 - DNA, 30 bp, Artificial Sequence; identical to SEQ ID NO: 394
  Description of Artificial Sequence: Synthetic cashew; inner sequence

SEQ ID NO: 12325 - DNA, 30 bp, Artificial Sequence; identical to SEQ ID NO: 104
  Description of Artificial Sequence: Synthetic cashew; inner sequence

SEQ ID NO: 12326 - DNA, 30 bp, Artificial Sequence; identical to SEQ ID NO: 149
  Description of Artificial Sequence: Synthetic cashew; inner sequence

SEQ ID NO: 12327 - DNA, 30 bp, Artificial Sequence; identical to SEQ ID NO: 487
  Description of Artificial Sequence: Synthetic cashew; inner sequence

SEQ ID NO: 12328 - DNA, 30 bp, Artificial Sequence; identical to SEQ ID NO: 359
  Description of Artificial Sequence: Synthetic cashew; inner sequence

SEQ ID NO: 12329 - DNA, 30 bp, Artificial Sequence; identical to SEQ ID NO: 370
  Description of Artificial Sequence: Synthetic cashew; inner sequence

SEQ ID NO: 12330 - DNA, 30 bp, Artificial Sequence; identical to SEQ ID NO: 4364
  Description of Artificial Sequence: Synthetic cashew; inner sequence

SEQ ID NO: 12331 - DNA, 30 bp, Artificial Sequence; identical to SEQ ID NO: 836
  Description of Artificial Sequence: Synthetic cashew; inner sequence

SEQ ID NO: 12332 - DNA, 30 bp, Artificial Sequence; identical to SEQ ID NO: 676
  Description of Artificial Sequence: Synthetic cashew; inner sequence

SEQ ID NO: 12333 - DNA, 30 bp, Artificial Sequence; identical to SEQ ID NO: 414
  Description of Artificial Sequence: Synthetic cashew; inner sequence

SEQ ID NO: 12334 - DNA, 30 bp, Artificial Sequence; identical to SEQ ID NO: 764
  Description of Artificial Sequence: Synthetic cashew; inner sequence

SEQ ID NO: 12335 - DNA, 30 bp, Artificial Sequence; identical to SEQ ID NO: 340
  Description of Artificial Sequence: Synthetic cashew; inner sequence

SEQ ID NO: 12336 - DNA, 30 bp, Artificial Sequence; identical to SEQ ID NO: 286
  Description of Artificial Sequence: Synthetic cashew; inner sequence

SEQ ID NO: 12337 - DNA, 30 bp, Artificial Sequence; identical to SEQ ID NO: 409
  Description of Artificial Sequence: Synthetic cashew; inner sequence

SEQ ID NO: 12338 - DNA, 30 bp, Artificial Sequence; identical to SEQ ID NO: 217
  Description of Artificial Sequence: Synthetic cashew; inner sequence

SEQ ID NO: 12339 - DNA, 30 bp, Artificial Sequence; identical to SEQ ID NO: 485
  Description of Artificial Sequence: Synthetic cashew; inner sequence

SEQ ID NO: 12340 - DNA, 30 bp, Artificial Sequence; identical to SEQ ID NO: 4420
  Description of Artificial Sequence: Synthetic cashew; inner sequence

SEQ ID NO: 12341 - DNA, 30 bp, Artificial Sequence; identical to SEQ ID NO: 640
  Description of Artificial Sequence: Synthetic cashew; inner sequence

SEQ ID NO: 12342 - DNA, 30 bp, Artificial Sequence; identical to SEQ ID NO: 4348
  Description of Artificial Sequence: Synthetic cashew; inner sequence

SEQ ID NO: 12343 - DNA, 30 bp, Artificial Sequence; identical to SEQ ID NO: 530
  Description of Artificial Sequence: Synthetic cashew; inner sequence

SEQ ID NO: 12344 - DNA, 30 bp, Artificial Sequence; identical to SEQ ID NO: 390
  Description of Artificial Sequence: Synthetic cashew; inner sequence

SEQ ID NO: 12345 - DNA, 30 bp, Artificial Sequence; identical to SEQ ID NO: 214
  Description of Artificial Sequence: Synthetic cashew; inner sequence

SEQ ID NO: 12346 - DNA, 30 bp, Artificial Sequence; identical to SEQ ID NO: 255
  Description of Artificial Sequence: Synthetic cashew; inner sequence

SEQ ID NO: 12347 - DNA, 30 bp, Artificial Sequence; identical to SEQ ID NO: 170
  Description of Artificial Sequence: Synthetic cashew; inner sequence

SEQ ID NO: 12348 - DNA, 30 bp, Artificial Sequence; identical to SEQ ID NO: 387
  Description of Artificial Sequence: Synthetic cashew; inner sequence

SEQ ID NO: 12349 - DNA, 30 bp, Artificial Sequence; identical to SEQ ID NO: 128
  Description of Artificial Sequence: Synthetic cashew; inner sequence

SEQ ID NO: 12350 - DNA, 30 bp, Artificial Sequence; identical to SEQ ID NO: 400
  Description of Artificial Sequence: Synthetic cashew; inner sequence

SEQ ID NO: 12351 - DNA, 30 bp, Artificial Sequence; identical to SEQ ID NO: 346
  Description of Artificial Sequence: Synthetic cashew; inner sequence

SEQ ID NO: 12352 - DNA, 30 bp, Artificial Sequence; identical to SEQ ID NO: 775
  Description of Artificial Sequence: Synthetic cashew; inner sequence

SEQ ID NO: 12353 - DNA, 30 bp, Artificial Sequence; identical to SEQ ID NO: 361
  Description of Artificial Sequence: Synthetic cashew; inner sequence

SEQ ID NO: 12354 - DNA, 30 bp, Artificial Sequence; identical to SEQ ID NO: 568
  Description of Artificial Sequence: Synthetic cashew; inner sequence

SEQ ID NO: 12355 - DNA, 30 bp, Artificial Sequence; identical to SEQ ID NO: 613
  Description of Artificial Sequence: Synthetic cashew; inner sequence

SEQ ID NO: 12356 - DNA, 30 bp, Artificial Sequence; identical to SEQ ID NO: 4651
  Description of Artificial Sequence: Synthetic cashew; inner sequence

SEQ ID NO: 12357 - DNA, 30 bp, Artificial Sequence; identical to SEQ ID NO: 4814
  Description of Artificial Sequence: Synthetic cashew; inner sequence

SEQ ID NO: 12358 - DNA, 30 bp, Artificial Sequence; identical to SEQ ID NO: 218
  Description of Artificial Sequence: Synthetic cashew; inner sequence

SEQ ID NO: 12359 - DNA, 30 bp, Artificial Sequence; identical to SEQ ID NO: 366
  Description of Artificial Sequence: Synthetic cashew; inner sequence

SEQ ID NO: 12360 - DNA, 30 bp, Artificial Sequence; identical to SEQ ID NO: 419
  Description of Artificial Sequence: Synthetic cashew; inner sequence

SEQ ID NO: 12361 - DNA, 30 bp, Artificial Sequence; identical to SEQ ID NO: 137
  Description of Artificial Sequence: Synthetic cashew; inner sequence

SEQ ID NO: 12362 - DNA, 30 bp, Artificial Sequence; identical to SEQ ID NO: 273
  Description of Artificial Sequence: Synthetic cashew; inner sequence

SEQ ID NO: 12363 - DNA, 30 bp, Artificial Sequence; identical to SEQ ID NO: 392
  Description of Artificial Sequence: Synthetic cashew; inner sequence

SEQ ID NO: 12364 - DNA, 30 bp, Artificial Sequence; identical to SEQ ID NO: 294
  Description of Artificial Sequence: Synthetic cashew; inner sequence

SEQ ID NO: 12365 - DNA, 28 bp, Artificial Sequence
  Description of Artificial Sequence: Synthetic cashew; inner sequence
ggacgcaacgtaccgtatcgtggccatg

SEQ ID NO: 12366 - DNA, 30 bp, Artificial Sequence; identical to SEQ ID NO: 901
  Description of Artificial Sequence: Synthetic cashew; inner sequence

SEQ ID NO: 12367 - DNA, 30 bp, Artificial Sequence; identical to SEQ ID NO: 4419
  Description of Artificial Sequence: Synthetic cashew; inner sequence

SEQ ID NO: 12368 - DNA, 30 bp, Artificial Sequence; identical to SEQ ID NO: 695
  Description of Artificial Sequence: Synthetic cashew; inner sequence

SEQ ID NO: 12369 - DNA, 30 bp, Artificial Sequence; identical to SEQ ID NO: 968
  Description of Artificial Sequence: Synthetic cashew; inner sequence

SEQ ID NO: 12370 - DNA, 30 bp, Artificial Sequence; identical to SEQ ID NO: 457
  Description of Artificial Sequence: Synthetic cashew; inner sequence

SEQ ID NO: 12371 - DNA, 30 bp, Artificial Sequence; identical to SEQ ID NO: 506
  Description of Artificial Sequence: Synthetic cashew; inner sequence

SEQ ID NO: 12372 - DNA, 30 bp, Artificial Sequence; identical to SEQ ID NO: 478
  Description of Artificial Sequence: Synthetic cashew; inner sequence

SEQ ID NO: 12373 - DNA, 30 bp, Artificial Sequence; identical to SEQ ID NO: 224
  Description of Artificial Sequence: Synthetic cashew; inner sequence

SEQ ID NO: 12374 - DNA, 30 bp, Artificial Sequence; identical to SEQ ID NO: 563
  Description of Artificial Sequence: Synthetic cashew; inner sequence

SEQ ID NO: 12375 - DNA, 30 bp, Artificial Sequence; identical to SEQ ID NO: 160
  Description of Artificial Sequence: Synthetic cashew; inner sequence

SEQ ID NO: 12376 - DNA, 30 bp, Artificial Sequence; identical to SEQ ID NO: 4406
  Description of Artificial Sequence: Synthetic cashew; inner sequence

SEQ ID NO: 12377 - DNA, 30 bp, Artificial Sequence; identical to SEQ ID NO: 4394
  Description of Artificial Sequence: Synthetic cashew; inner sequence

SEQ ID NO: 12378 - DNA, 30 bp, Artificial Sequence; identical to SEQ ID NO: 519
  Description of Artificial Sequence: Synthetic cashew; inner sequence

SEQ ID NO: 12379 - DNA, 30 bp, Artificial Sequence; identical to SEQ ID NO: 8891
  Description of Artificial Sequence: Synthetic cashew; inner sequence

SEQ ID NO: 12380 - DNA, 30 bp, Artificial Sequence; identical to SEQ ID NO: 379
  Description of Artificial Sequence: Synthetic cashew; inner sequence

SEQ ID NO: 12381 - DNA, 30 bp, Artificial Sequence; identical to SEQ ID NO: 4301
  Description of Artificial Sequence: Synthetic cashew; inner sequence

SEQ ID NO: 12382 - DNA, 30 bp, Artificial Sequence; identical to SEQ ID NO: 523
  Description of Artificial Sequence: Synthetic cashew; inner sequence

SEQ ID NO: 12383 - DNA, 30 bp, Artificial Sequence; identical to SEQ ID NO: 364
  Description of Artificial Sequence: Synthetic cashew; inner sequence

SEQ ID NO: 12384 - DNA, 30 bp, Artificial Sequence; identical to SEQ ID NO: 350
  Description of Artificial Sequence: Synthetic cashew; inner sequence

SEQ ID NO: 12385 - DNA, 30 bp, Artificial Sequence; identical to SEQ ID NO: 4592
  Description of Artificial Sequence: Synthetic cashew; inner sequence

SEQ ID NO: 12386 - DNA, 30 bp, Artificial Sequence; identical to SEQ ID NO: 517
  Description of Artificial Sequence: Synthetic cashew; inner sequence

SEQ ID NO: 12387 - DNA, 30 bp, Artificial Sequence; identical to SEQ ID NO: 176
  Description of Artificial Sequence: Synthetic cashew; inner sequence

SEQ ID NO: 12388 - DNA, 30 bp, Artificial Sequence; identical to SEQ ID NO: 8618
  Description of Artificial Sequence: Synthetic cashew; inner sequence

SEQ ID NO: 12389 - DNA, 30 bp, Artificial Sequence; identical to SEQ ID NO: 484
  Description of Artificial Sequence: Synthetic cashew; inner sequence

SEQ ID NO: 12390 - DNA, 30 bp, Artificial Sequence; identical to SEQ ID NO: 433
  Description of Artificial Sequence: Synthetic cashew; inner sequence

SEQ ID NO: 12391 - DNA, 30 bp, Artificial Sequence; identical to SEQ ID NO: 450
  Description of Artificial Sequence: Synthetic cashew; inner sequence

SEQ ID NO: 12392 - DNA, 30 bp, Artificial Sequence; identical to SEQ ID NO: 8546
  Description of Artificial Sequence: Synthetic cashew; inner sequence

SEQ ID NO: 12393 - DNA, 30 bp, Artificial Sequence; identical to SEQ ID NO: 272
  Description of Artificial Sequence: Synthetic cashew; inner sequence

SEQ ID NO: 12394 - DNA, 30 bp, Artificial Sequence; identical to SEQ ID NO: 124
  Description of Artificial Sequence: Synthetic cashew; inner sequence

SEQ ID NO: 12395 - DNA, 30 bp, Artificial Sequence; identical to SEQ ID NO: 167
  Description of Artificial Sequence: Synthetic cashew; inner sequence

SEQ ID NO: 12396 - DNA, 30 bp, Artificial Sequence; identical to SEQ ID NO: 391
  Description of Artificial Sequence: Synthetic cashew; inner sequence

SEQ ID NO: 12397 - DNA, 30 bp, Artificial Sequence; identical to SEQ ID NO: 928
  Description of Artificial Sequence: Synthetic cashew; inner sequence

SEQ ID NO: 12398 - DNA, 30 bp, Artificial Sequence; identical to SEQ ID NO: 313
  Description of Artificial Sequence: Synthetic cashew; inner sequence

SEQ ID NO: 12399 - DNA, 30 bp, Artificial Sequence; identical to SEQ ID NO: 279
  Description of Artificial Sequence: Synthetic cashew; inner sequence

SEQ ID NO: 12400 - DNA, 30 bp, Artificial Sequence; identical to SEQ ID NO: 296
  Description of Artificial Sequence: Synthetic cashew; inner sequence

SEQ ID NO: 12401 - DNA, 30 bp, Artificial Sequence; identical to SEQ ID NO: 869
  Description of Artificial Sequence: Synthetic cashew; inner sequence

SEQ ID NO: 12402 - DNA, 30 bp, Artificial Sequence; identical to SEQ ID NO: 953
  Description of Artificial Sequence: Synthetic cashew; inner sequence

SEQ ID NO: 12403 - DNA, 30 bp, Artificial Sequence; identical to SEQ ID NO: 220
  Description of Artificial Sequence: Synthetic cashew; inner sequence

SEQ ID NO: 12404 - DNA, 30 bp, Artificial Sequence; identical to SEQ ID NO: 727
  Description of Artificial Sequence: Synthetic cashew; inner sequence

SEQ ID NO: 12405 - DNA, 30 bp, Artificial Sequence; identical to SEQ ID NO: 520
  Description of Artificial Sequence: Synthetic cashew; inner sequence

SEQ ID NO: 12406 - DNA, 30 bp, Artificial Sequence; identical to SEQ ID NO: 441
  Description of Artificial Sequence: Synthetic cashew; inner sequence

SEQ ID NO: 12407 - DNA, 30 bp, Artificial Sequence; identical to SEQ ID NO: 925
  Description of Artificial Sequence: Synthetic cashew; inner sequence

SEQ ID NO: 12408 - DNA, 30 bp, Artificial Sequence; identical to SEQ ID NO: 426
  Description of Artificial Sequence: Synthetic cashew; inner sequence

SEQ ID NO: 12409 - DNA, 30 bp, Artificial Sequence; identical to SEQ ID NO: 4535
  Description of Artificial Sequence: Synthetic cashew; inner sequence

SEQ ID NO: 12410 - DNA, 30 bp, Artificial Sequence; identical to SEQ ID NO: 994
  Description of Artificial Sequence: Synthetic cashew; inner sequence

SEQ ID NO: 12411 - DNA, 30 bp, Artificial Sequence; identical to SEQ ID NO: 4380
  Description of Artificial Sequence: Synthetic cashew; inner sequence

SEQ ID NO: 12412 - DNA, 30 bp, Artificial Sequence; identical to SEQ ID NO: 4907
  Description of Artificial Sequence: Synthetic cashew; inner sequence

SEQ ID NO: 12413 - DNA, 30 bp, Artificial Sequence; identical to SEQ ID NO: 209
  Description of Artificial Sequence: Synthetic cashew; inner sequence

SEQ ID NO: 12414 - DNA, 30 bp, Artificial Sequence; identical to SEQ ID NO: 625
  Description of Artificial Sequence: Synthetic cashew; inner sequence

SEQ ID NO: 12415 - DNA, 30 bp, Artificial Sequence; identical to SEQ ID NO: 248
  Description of Artificial Sequence: Synthetic cashew; inner sequence

SEQ ID NO: 12416 - DNA, 30 bp, Artificial Sequence; identical to SEQ ID NO: 481
  Description of Artificial Sequence: Synthetic cashew; inner sequence

SEQ ID NO: 12417 - DNA, 30 bp, Artificial Sequence; identical to SEQ ID NO: 850
  Description of Artificial Sequence: Synthetic cashew; inner sequence

SEQ ID NO: 12418 - DNA, 30 bp, Artificial Sequence; identical to SEQ ID NO: 793
  Description of Artificial Sequence: Synthetic cashew; inner sequence

SEQ ID NO: 12419 - DNA, 30 bp, Artificial Sequence; identical to SEQ ID NO: 358
  Description of Artificial Sequence: Synthetic cashew; inner sequence

SEQ ID NO: 12420 - DNA, 30 bp, Artificial Sequence; identical to SEQ ID NO: 244
  Description of Artificial Sequence: Synthetic cashew; inner sequence

SEQ ID NO: 12421 - DNA, 30 bp, Artificial Sequence; identical to SEQ ID NO: 274
  Description of Artificial Sequence: Synthetic cashew; inner sequence

SEQ ID NO: 12422 - DNA, 29 bp, Artificial Sequence
  Description of Artificial Sequence: Synthetic cashew; inner sequence
ggccgatcgaccctatcaagtgcagcatg

SEQ ID NO: 12423 - DNA, 30 bp, Artificial Sequence; identical to SEQ ID NO: 628
  Description of Artificial Sequence: Synthetic cashew; inner sequence

SEQ ID NO: 12424 - DNA, 30 bp, Artificial Sequence; identical to SEQ ID NO: 504
  Description of Artificial Sequence: Synthetic cashew; inner sequence

SEQ ID NO: 12425 - DNA, 30 bp, Artificial Sequence; identical to SEQ ID NO: 300
  Description of Artificial Sequence: Synthetic cashew; inner sequence

SEQ ID NO: 12426 - DNA, 30 bp, Artificial Sequence; identical to SEQ ID NO: 615
  Description of Artificial Sequence: Synthetic cashew; inner sequence

SEQ ID NO: 12427 - DNA, 30 bp, Artificial Sequence; identical to SEQ ID NO: 714
  Description of Artificial Sequence: Synthetic cashew; inner sequence

SEQ ID NO: 12428 - DNA, 30 bp, Artificial Sequence
  Description of Artificial Sequence: Synthetic cashew; inner sequence
cgcgacgagtaggcatgtcttctgtgcgca

SEQ ID NO: 12429 - DNA, 30 bp, Artificial Sequence; identical to SEQ ID NO: 4525
  Description of Artificial Sequence: Synthetic cashew; inner sequence

SEQ ID NO: 12430 - DNA, 30 bp, Artificial Sequence; identical to SEQ ID NO: 278
  Description of Artificial Sequence: Synthetic cashew; inner sequence

SEQ ID NO: 12431 - DNA, 30 bp, Artificial Sequence; identical to SEQ ID NO: 4401
  Description of Artificial Sequence: Synthetic cashew; inner sequence

SEQ ID NO: 12432 - DNA, 30 bp, Artificial Sequence; identical to SEQ ID NO: 239
  Description of Artificial Sequence: Synthetic cashew; inner sequence

SEQ ID NO: 12433 - DNA, 30 bp, Artificial Sequence; identical to SEQ ID NO: 410
  Description of Artificial Sequence: Synthetic cashew; inner sequence

SEQ ID NO: 12434 - DNA, 30 bp, Artificial Sequence; identical to SEQ ID NO: 4260
  Description of Artificial Sequence: Synthetic cashew; inner sequence

SEQ ID NO: 12435 - DNA, 30 bp, Artificial Sequence; identical to SEQ ID NO: 846
  Description of Artificial Sequence: Synthetic cashew; inner sequence

SEQ ID NO: 12436 - DNA, 30 bp, Artificial Sequence; identical to SEQ ID NO: 276
  Description of Artificial Sequence: Synthetic cashew; inner sequence

SEQ ID NO: 12437 - DNA, 30 bp, Artificial Sequence; identical to SEQ ID NO: 281
  Description of Artificial Sequence: Synthetic cashew; inner sequence

SEQ ID NO: 12438 - DNA, 30 bp, Artificial Sequence; identical to SEQ ID NO: 631
  Description of Artificial Sequence: Synthetic cashew; inner sequence

SEQ ID NO: 12439 - DNA, 30 bp, Artificial Sequence; identical to SEQ ID NO: 950
  Description of Artificial Sequence: Synthetic cashew; inner sequence

SEQ ID NO: 12440 - DNA, 30 bp, Artificial Sequence; identical to SEQ ID NO: 395
  Description of Artificial Sequence: Synthetic cashew; inner sequence

SEQ ID NO: 12441 - DNA, 30 bp, Artificial Sequence; identical to SEQ ID NO: 891
  Description of Artificial Sequence: Synthetic cashew; inner sequence

SEQ ID NO: 12442 - DNA, 30 bp, Artificial Sequence; identical to SEQ ID NO: 280
  Description of Artificial Sequence: Synthetic cashew; inner sequence

SEQ ID NO: 12443 - DNA, 30 bp, Artificial Sequence; identical to SEQ ID NO: 374
  Description of Artificial Sequence: Synthetic cashew; inner sequence

SEQ ID NO: 12444 - DNA, 30 bp, Artificial Sequence; identical to SEQ ID NO: 4280
  Description of Artificial Sequence: Synthetic cashew; inner sequence

SEQ ID NO: 12445 - DNA, 30 bp, Artificial Sequence; identical to SEQ ID NO: 4792
  Description of Artificial Sequence: Synthetic cashew; inner sequence

SEQ ID NO: 12446 - DNA, 30 bp, Artificial Sequence; identical to SEQ ID NO: 657
  Description of Artificial Sequence: Synthetic cashew; inner sequence

SEQ ID NO: 12447 - DNA, 29 bp, Artificial Sequence
  Description of Artificial Sequence: Synthetic cashew; inner sequence
cgaccagcgcaagtaagtggcgtgatgca

SEQ ID NO: 12448 - DNA, 30 bp, Artificial Sequence; identical to SEQ ID NO: 807
  Description of Artificial Sequence: Synthetic cashew; inner sequence

SEQ ID NO: 12449 - DNA, 30 bp, Artificial Sequence; identical to SEQ ID NO: 4238
  Description of Artificial Sequence: Synthetic cashew; inner sequence

SEQ ID NO: 12450 - DNA, 30 bp, Artificial Sequence; identical to SEQ ID NO: 801
  Description of Artificial Sequence: Synthetic cashew; inner sequence

SEQ ID NO: 12451 - DNA, 30 bp, Artificial Sequence; identical to SEQ ID NO: 212
  Description of Artificial Sequence: Synthetic cashew; inner sequence

SEQ ID NO: 12452 - DNA, 30 bp, Artificial Sequence; identical to SEQ ID NO: 1002
  Description of Artificial Sequence: Synthetic cashew; inner sequence

SEQ ID NO: 12453 - DNA, 30 bp, Artificial Sequence; identical to SEQ ID NO: 4585
  Description of Artificial Sequence: Synthetic cashew; inner sequence

SEQ ID NO: 12454 - DNA, 30 bp, Artificial Sequence; identical to SEQ ID NO: 4351
  Description of Artificial Sequence: Synthetic cashew; inner sequence

SEQ ID NO: 12455 - DNA, 30 bp, Artificial Sequence; identical to SEQ ID NO: 811
  Description of Artificial Sequence: Synthetic cashew; inner sequence

SEQ ID NO: 12456 - DNA, 30 bp, Artificial Sequence; identical to SEQ ID NO: 403
  Description of Artificial Sequence: Synthetic cashew; inner sequence

SEQ ID NO: 12457 - DNA, 30 bp, Artificial Sequence; identical to SEQ ID NO: 4613
  Description of Artificial Sequence: Synthetic cashew; inner sequence

SEQ ID NO: 12458 - DNA, 30 bp, Artificial Sequence; identical to SEQ ID NO: 617
  Description of Artificial Sequence: Synthetic cashew; inner sequence

SEQ ID NO: 12459 - DNA, 30 bp, Artificial Sequence; identical to SEQ ID NO: 620
  Description of Artificial Sequence: Synthetic cashew; inner sequence

SEQ ID NO: 12460 - DNA, 30 bp, Artificial Sequence; identical to SEQ ID NO: 260
  Description of Artificial Sequence: Synthetic cashew; inner sequence

SEQ ID NO: 12461 - DNA, 30 bp, Artificial Sequence; identical to SEQ ID NO: 4755
  Description of Artificial Sequence: Synthetic cashew; inner sequence

SEQ ID NO: 12462 - DNA, 30 bp, Artificial Sequence; identical to SEQ ID NO: 632
  Description of Artificial Sequence: Synthetic cashew; inner sequence

SEQ ID NO: 12463 - DNA, 30 bp, Artificial Sequence; identical to SEQ ID NO: 771
  Description of Artificial Sequence: Synthetic cashew; inner sequence

SEQ ID NO: 12464 - DNA, 30 bp, Artificial Sequence; identical to SEQ ID NO: 603
  Description of Artificial Sequence: Synthetic cashew; inner sequence

SEQ ID NO: 12465 - DNA, 30 bp, Artificial Sequence; identical to SEQ ID NO: 515
  Description of Artificial Sequence: Synthetic cashew; inner sequence

SEQ ID NO: 12466 - DNA, 30 bp, Artificial Sequence; identical to SEQ ID NO: 912
  Description of Artificial Sequence: Synthetic cashew; inner sequence

SEQ ID NO: 12467 - DNA, 30 bp, Artificial Sequence; identical to SEQ ID NO: 249
  Description of Artificial Sequence: Synthetic cashew; inner sequence

SEQ ID NO: 12468 - DNA, 30 bp, Artificial Sequence; identical to SEQ ID NO: 4870
  Description of Artificial Sequence: Synthetic cashew; inner sequence

SEQ ID NO: 12469 - DNA, 30 bp, Artificial Sequence; identical to SEQ ID NO: 4384
  Description of Artificial Sequence: Synthetic cashew; inner sequence

SEQ ID NO: 12470 - DNA, 30 bp, Artificial Sequence; identical to SEQ ID NO: 915
  Description of Artificial Sequence: Synthetic cashew; inner sequence

SEQ ID NO: 12471 - DNA, 30 bp, Artificial Sequence; identical to SEQ ID NO: 534
  Description of Artificial Sequence: Synthetic cashew; inner sequence

SEQ ID NO: 12472 - DNA, 30 bp, Artificial Sequence; identical to SEQ ID NO: 437
  Description of Artificial Sequence: Synthetic cashew; inner sequence

SEQ ID NO: 12473 - DNA, 30 bp, Artificial Sequence; identical to SEQ ID NO: 900
  Description of Artificial Sequence: Synthetic cashew; inner sequence

SEQ ID NO: 12474 - DNA, 30 bp, Artificial Sequence; identical to SEQ ID NO: 4692
  Description of Artificial Sequence: Synthetic cashew; inner sequence

SEQ ID NO: 12475 - DNA, 30 bp, Artificial Sequence; identical to SEQ ID NO: 4775
  Description of Artificial Sequence: Synthetic cashew; inner sequence

SEQ ID NO: 12476 - DNA, 30 bp, Artificial Sequence; identical to SEQ ID NO: 4543
  Description of Artificial Sequence: Synthetic cashew; inner sequence

SEQ ID NO: 12477 - DNA, 30 bp, Artificial Sequence; identical to SEQ ID NO: 210
  Description of Artificial Sequence: Synthetic cashew; inner sequence

SEQ ID NO: 12478 - DNA, 30 bp, Artificial Sequence; identical to SEQ ID NO: 800
  Description of Artificial Sequence: Synthetic cashew; inner sequence

SEQ ID NO: 12479 - DNA, 30 bp, Artificial Sequence; identical to SEQ ID NO: 4230
  Description of Artificial Sequence: Synthetic cashew; inner sequence

SEQ ID NO: 12480 - DNA, 30 bp, Artificial Sequence; identical to SEQ ID NO: 256
  Description of Artificial Sequence: Synthetic cashew; inner sequence

SEQ ID NO: 12481 - DNA, 30 bp, Artificial Sequence; identical to SEQ ID NO: 345
  Description of Artificial Sequence: Synthetic cashew; inner sequence

SEQ ID NO: 12482 - DNA, 30 bp, Artificial Sequence; identical to SEQ ID NO: 8564
  Description of Artificial Sequence: Synthetic cashew; inner sequence

SEQ ID NO: 12483 - DNA, 30 bp, Artificial Sequence; identical to SEQ ID NO: 4312
  Description of Artificial Sequence: Synthetic cashew; inner sequence

SEQ ID NO: 12484 - DNA, 30 bp, Artificial Sequence; identical to SEQ ID NO: 991
  Description of Artificial Sequence: Synthetic cashew; inner sequence

SEQ ID NO: 12485 - DNA, 29 bp, Artificial Sequence
  Description of Artificial Sequence: Synthetic cashew; inner sequence
gtcatgccatcccttcgagtggacaggta

SEQ ID NO: 12486 - DNA, 30 bp, Artificial Sequence; identical to SEQ ID NO: 545
  Description of Artificial Sequence: Synthetic cashew; inner sequence

SEQ ID NO: 12487 - DNA, 30 bp, Artificial Sequence; identical to SEQ ID NO: 701
  Description of Artificial Sequence: Synthetic cashew; inner sequence

SEQ ID NO: 12488 - DNA, 30 bp, Artificial Sequence; identical to SEQ ID NO: 461
  Description of Artificial Sequence: Synthetic cashew; inner sequence

SEQ ID NO: 12489 - DNA, 30 bp, Artificial Sequence; identical to SEQ ID NO: 867
  Description of Artificial Sequence: Synthetic cashew; inner sequence

SEQ ID NO: 12490 - DNA, 30 bp, Artificial Sequence; identical to SEQ ID NO: 622
  Description of Artificial Sequence: Synthetic cashew; inner sequence

SEQ ID NO: 12491 - DNA, 30 bp, Artificial Sequence; identical to SEQ ID NO: 333
  Description of Artificial Sequence: Synthetic cashew; inner sequence

SEQ ID NO: 12492 - DNA, 30 bp, Artificial Sequence; identical to SEQ ID NO: 386
  Description of Artificial Sequence: Synthetic cashew; inner sequence

SEQ ID NO: 12493 - DNA, 30 bp, Artificial Sequence; identical to SEQ ID NO: 984
  Description of Artificial Sequence: Synthetic cashew; inner sequence

SEQ ID NO: 12494 - DNA, 30 bp, Artificial Sequence; identical to SEQ ID NO: 777
  Description of Artificial Sequence: Synthetic cashew; inner sequence

SEQ ID NO: 12495 - DNA, 30 bp, Artificial Sequence; identical to SEQ ID NO: 275
  Description of Artificial Sequence: Synthetic cashew; inner sequence

SEQ ID NO: 12496 - DNA, 30 bp, Artificial Sequence; identical to SEQ ID NO: 226
  Description of Artificial Sequence: Synthetic cashew; inner sequence

SEQ ID NO: 12497 - DNA, 30 bp, Artificial Sequence; identical to SEQ ID NO: 647
  Description of Artificial Sequence: Synthetic cashew; inner sequence

SEQ ID NO: 12498 - DNA, 30 bp, Artificial Sequence; identical to SEQ ID NO: 635
  Description of Artificial Sequence: Synthetic cashew; inner sequence

SEQ ID NO: 12499 - DNA, 30 bp, Artificial Sequence; identical to SEQ ID NO: 375
  Description of Artificial Sequence: Synthetic cashew; inner sequence

SEQ ID NO: 12500 - DNA, 30 bp, Artificial Sequence; identical to SEQ ID NO: 8670
  Description of Artificial Sequence: Synthetic cashew; inner sequence

SEQ ID NO: 12501 - DNA, 30 bp, Artificial Sequence; identical to SEQ ID NO: 4499
  Description of Artificial Sequence: Synthetic cashew; inner sequence

SEQ ID NO: 12502 - DNA, 30 bp, Artificial Sequence; identical to SEQ ID NO: 475
  Description of Artificial Sequence: Synthetic cashew; inner sequence

SEQ ID NO: 12503 - DNA, 30 bp, Artificial Sequence; identical to SEQ ID NO: 4605
  Description of Artificial Sequence: Synthetic cashew; inner sequence

SEQ ID NO: 12504 - DNA, 30 bp, Artificial Sequence; identical to SEQ ID NO: 633
  Description of Artificial Sequence: Synthetic cashew; inner sequence

SEQ ID NO: 12505 - DNA, 30 bp, Artificial Sequence; identical to SEQ ID NO: 789
  Description of Artificial Sequence: Synthetic cashew; inner sequence

SEQ ID NO: 12506 - DNA, 30 bp, Artificial Sequence; identical to SEQ ID NO: 780
  Description of Artificial Sequence: Synthetic cashew; inner sequence

SEQ ID NO: 12507 - DNA, 30 bp, Artificial Sequence; identical to SEQ ID NO: 396
  Description of Artificial Sequence: Synthetic cashew; inner sequence

SEQ ID NO: 12508 - DNA, 30 bp, Artificial Sequence; identical to SEQ ID NO: 728
  Description of Artificial Sequence: Synthetic cashew; inner sequence

SEQ ID NO: 12509 - DNA, 30 bp, Artificial Sequence; identical to SEQ ID NO: 4393
  Description of Artificial Sequence: Synthetic cashew; inner sequence

SEQ ID NO: 12510 - DNA, 30 bp, Artificial Sequence; identical to SEQ ID NO: 8458
  Description of Artificial Sequence: Synthetic cashew; inner sequence

SEQ ID NO: 12511 - DNA, 30 bp, Artificial Sequence; identical to SEQ ID NO: 181
  Description of Artificial Sequence: Synthetic cashew; inner sequence

SEQ ID NO: 12512 - DNA, 30 bp, Artificial Sequence; identical to SEQ ID NO: 114
  Description of Artificial Sequence: Synthetic cashew; inner sequence

SEQ ID NO: 12513 - DNA, 33 bp, Artificial Sequence; identical to SEQ ID NO: 864
  Description of Artificial Sequence: Synthetic cashew; inner sequence

SEQ ID NO: 12514 - DNA, 30 bp, Artificial Sequence; identical to SEQ ID NO: 8763
  Description of Artificial Sequence: Synthetic cashew; inner sequence

SEQ ID NO: 12515 - DNA, 30 bp, Artificial Sequence; identical to SEQ ID NO: 4492
  Description of Artificial Sequence: Synthetic cashew; inner sequence

SEQ ID NO: 12516 - DNA, 30 bp, Artificial Sequence; identical to SEQ ID NO: 356
  Description of Artificial Sequence: Synthetic cashew; inner sequence

SEQ ID NO: 12517 - DNA, 30 bp, Artificial Sequence; identical to SEQ ID NO: 4999
  Description of Artificial Sequence: Synthetic cashew; inner sequence

SEQ ID NO: 12518 - DNA, 30 bp, Artificial Sequence; identical to SEQ ID NO: 951
  Description of Artificial Sequence: Synthetic cashew; inner sequence

SEQ ID NO: 12519 - DNA, 30 bp, Artificial Sequence; identical to SEQ ID NO: 4428
  Description of Artificial Sequence: Synthetic cashew; inner sequence

SEQ ID NO: 12520 - DNA, 30 bp, Artificial Sequence; identical to SEQ ID NO: 4653
  Description of Artificial Sequence: Synthetic cashew; inner sequence

SEQ ID NO: 12521 - DNA, 30 bp, Artificial Sequence
  Description of Artificial Sequence: Synthetic cashew; inner sequence
ccgcacgtagccctatcaggggtgcatgca

SEQ ID NO: 12522 - DNA, 30 bp, Artificial Sequence; identical to SEQ ID NO: 8844
  Description of Artificial Sequence: Synthetic cashew; inner sequence

SEQ ID NO: 12523 - DNA, 30 bp, Artificial Sequence; identical to SEQ ID NO: 328
  Description of Artificial Sequence: Synthetic cashew; inner sequence

SEQ ID NO: 12524 - DNA, 30 bp, Artificial Sequence; identical to SEQ ID NO: 4459
  Description of Artificial Sequence: Synthetic cashew; inner sequence

SEQ ID NO: 12525 - DNA, 30 bp, Artificial Sequence; identical to SEQ ID NO: 4445
  Description of Artificial Sequence: Synthetic cashew; inner sequence

SEQ ID NO: 12526 - DNA, 30 bp, Artificial Sequence; identical to SEQ ID NO: 101
  Description of Artificial Sequence: Synthetic cashew; inner sequence

SEQ ID NO: 12527 - DNA, 30 bp, Artificial Sequence; identical to SEQ ID NO: 510
  Description of Artificial Sequence: Synthetic cashew; inner sequence

SEQ ID NO: 12528 - DNA, 30 bp, Artificial Sequence; identical to SEQ ID NO: 422
  Description of Artificial Sequence: Synthetic cashew; inner sequence

SEQ ID NO: 12529 - DNA, 30 bp, Artificial Sequence; identical to SEQ ID NO: 405
  Description of Artificial Sequence: Synthetic cashew; inner sequence

SEQ ID NO: 12530 - DNA, 30 bp, Artificial Sequence; identical to SEQ ID NO: 326
  Description of Artificial Sequence: Synthetic cashew; inner sequence

SEQ ID NO: 12531 - DNA, 30 bp, Artificial Sequence; identical to SEQ ID NO: 4682
  Description of Artificial Sequence: Synthetic cashew; inner sequence

SEQ ID NO: 12532 - DNA, 30 bp, Artificial Sequence; identical to SEQ ID NO: 637
  Description of Artificial Sequence: Synthetic cashew; inner sequence

SEQ ID NO: 12533 - DNA, 30 bp, Artificial Sequence; identical to SEQ ID NO: 686
  Description of Artificial Sequence: Synthetic cashew; inner sequence

SEQ ID NO: 12534 - DNA, 30 bp, Artificial Sequence; identical to SEQ ID NO: 560
  Description of Artificial Sequence: Synthetic cashew; inner sequence

SEQ ID NO: 12535 - DNA, 30 bp, Artificial Sequence; identical to SEQ ID NO: 746
  Description of Artificial Sequence: Synthetic cashew; inner sequence

SEQ ID NO: 12536 - DNA, 30 bp, Artificial Sequence; identical to SEQ ID NO: 277
  Description of Artificial Sequence: Synthetic cashew; inner sequence

SEQ ID NO: 12537 - DNA, 30 bp, Artificial Sequence; identical to SEQ ID NO: 324
  Description of Artificial Sequence: Synthetic cashew; inner sequence

SEQ ID NO: 12538 - DNA, 31 bp, Artificial Sequence; identical to SEQ ID NO: 216
  Description of Artificial Sequence: Synthetic cashew; inner sequence

SEQ ID NO: 12539 - DNA, 30 bp, Artificial Sequence; identical to SEQ ID NO: 4722
  Description of Artificial Sequence: Synthetic cashew; inner sequence

SEQ ID NO: 12540 - DNA, 30 bp, Artificial Sequence; identical to SEQ ID NO: 4377
  Description of Artificial Sequence: Synthetic cashew; inner sequence

SEQ ID NO: 12541 - DNA, 30 bp, Artificial Sequence; identical to SEQ ID NO: 474
  Description of Artificial Sequence: Synthetic cashew; inner sequence

SEQ ID NO: 12542 - DNA, 30 bp, Artificial Sequence; identical to SEQ ID NO: 227
  Description of Artificial Sequence: Synthetic cashew; inner sequence

SEQ ID NO: 12543 - DNA, 30 bp, Artificial Sequence; identical to SEQ ID NO: 8579
  Description of Artificial Sequence: Synthetic cashew; inner sequence

SEQ ID NO: 12544 - DNA, 30 bp, Artificial Sequence; identical to SEQ ID NO: 691
  Description of Artificial Sequence: Synthetic cashew; inner sequence

SEQ ID NO: 12545 - DNA, 30 bp, Artificial Sequence; identical to SEQ ID NO: 4317
  Description of Artificial Sequence: Synthetic cashew; inner sequence

SEQ ID NO: 12546 - DNA, 30 bp, Artificial Sequence; identical to SEQ ID NO: 513
  Description of Artificial Sequence: Synthetic cashew; inner sequence

SEQ ID NO: 12547 - DNA, 30 bp, Artificial Sequence; identical to SEQ ID NO: 684
  Description of Artificial Sequence: Synthetic cashew; inner sequence

SEQ ID NO: 12548 - DNA, 30 bp, Artificial Sequence; identical to SEQ ID NO: 4580
  Description of Artificial Sequence: Synthetic cashew; inner sequence

SEQ ID NO: 12549 - DNA, 30 bp, Artificial Sequence; identical to SEQ ID NO: 666
  Description of Artificial Sequence: Synthetic cashew; inner sequence

SEQ ID NO: 12550 - DNA, 30 bp, Artificial Sequence; identical to SEQ ID NO: 4429
  Description of Artificial Sequence: Synthetic cashew; inner sequence

SEQ ID NO: 12551 - DNA, 30 bp, Artificial Sequence; identical to SEQ ID NO: 597
  Description of Artificial Sequence: Synthetic cashew; inner sequence

SEQ ID NO: 12552 - DNA, 30 bp, Artificial Sequence; identical to SEQ ID NO: 415
  Description of Artificial Sequence: Synthetic cashew; inner sequence

SEQ ID NO: 12553 - DNA, 30 bp, Artificial Sequence; identical to SEQ ID NO: 322
  Description of Artificial Sequence: Synthetic cashew; inner sequence

SEQ ID NO: 12554 - DNA, 30 bp, Artificial Sequence; identical to SEQ ID NO: 4555
  Description of Artificial Sequence: Synthetic cashew; inner sequence

SEQ ID NO: 12555 - DNA, 30 bp, Artificial Sequence; identical to SEQ ID NO: 331
  Description of Artificial Sequence: Synthetic cashew; inner sequence

SEQ ID NO: 12556 - DNA, 30 bp, Artificial Sequence; identical to SEQ ID NO: 399
  Description of Artificial Sequence: Synthetic cashew; inner sequence

SEQ ID NO: 12557 - DNA, 30 bp, Artificial Sequence; identical to SEQ ID NO: 949
  Description of Artificial Sequence: Synthetic cashew; inner sequence

SEQ ID NO: 12558 - DNA, 30 bp, Artificial Sequence; identical to SEQ ID NO: 566
  Description of Artificial Sequence: Synthetic cashew; inner sequence

SEQ ID NO: 12559 - DNA, 30 bp, Artificial Sequence; identical to SEQ ID NO: 467
  Description of Artificial Sequence: Synthetic cashew; inner sequence

SEQ ID NO: 12560 - DNA, 30 bp, Artificial Sequence; identical to SEQ ID NO: 393
  Description of Artificial Sequence: Synthetic cashew; inner sequence

SEQ ID NO: 12561 - DNA, 30 bp, Artificial Sequence; identical to SEQ ID NO: 476
  Description of Artificial Sequence: Synthetic cashew; inner sequence

SEQ ID NO: 12562 - DNA, 30 bp, Artificial Sequence; identical to SEQ ID NO: 557
  Description of Artificial Sequence: Synthetic cashew; inner sequence

SEQ ID NO: 12563 - DNA, 30 bp, Artificial Sequence; identical to SEQ ID NO: 141
  Description of Artificial Sequence: Synthetic cashew; inner sequence

SEQ ID NO: 12564 - DNA, 30 bp, Artificial Sequence; identical to SEQ ID NO: 860
  Description of Artificial Sequence: Synthetic cashew; inner sequence

SEQ ID NO: 12565 - DNA, 30 bp, Artificial Sequence; identical to SEQ ID NO: 4644
  Description of Artificial Sequence: Synthetic cashew; inner sequence

SEQ ID NO: 12566 - DNA, 27 bp, Artificial Sequence
  Description of Artificial Sequence: Synthetic cashew; inner sequence
ggccaagctgacctagcatgtgtgtca

SEQ ID NO: 12567 - DNA, 30 bp, Artificial Sequence; identical to SEQ ID NO: 4740
  Description of Artificial Sequence: Synthetic cashew; inner sequence

SEQ ID NO: 12568 - DNA, 30 bp, Artificial Sequence; identical to SEQ ID NO: 911
  Description of Artificial Sequence: Synthetic cashew; inner sequence

SEQ ID NO: 12569 - DNA, 30 bp, Artificial Sequence; identical to SEQ ID NO: 932
  Description of Artificial Sequence: Synthetic cashew; inner sequence

SEQ ID NO: 12570 - DNA, 30 bp, Artificial Sequence; identical to SEQ ID NO: 4748
  Description of Artificial Sequence: Synthetic cashew; inner sequence

SEQ ID NO: 12571 - DNA, 30 bp, Artificial Sequence; identical to SEQ ID NO: 440
  Description of Artificial Sequence: Synthetic cashew; inner sequence

SEQ ID NO: 12572 - DNA, 30 bp, Artificial Sequence; identical to SEQ ID NO: 757
  Description of Artificial Sequence: Synthetic cashew; inner sequence

SEQ ID NO: 12573 - DNA, 30 bp, Artificial Sequence; identical to SEQ ID NO: 4808
  Description of Artificial Sequence: Synthetic cashew; inner sequence

SEQ ID NO: 12574 - DNA, 30 bp, Artificial Sequence; identical to SEQ ID NO: 219
  Description of Artificial Sequence: Synthetic cashew; inner sequence

SEQ ID NO: 12575 - DNA, 30 bp, Artificial Sequence; identical to SEQ ID NO: 4530
  Description of Artificial Sequence: Synthetic cashew; inner sequence

SEQ ID NO: 12576 - DNA, 30 bp, Artificial Sequence; identical to SEQ ID NO: 464
  Description of Artificial Sequence: Synthetic cashew; inner sequence

SEQ ID NO: 12577 - DNA, 31 bp, Artificial Sequence; identical to SEQ ID NO: 4619
  Description of Artificial Sequence: Synthetic cashew; inner sequence

SEQ ID NO: 12578 - DNA, 30 bp, Artificial Sequence; identical to SEQ ID NO: 8876
  Description of Artificial Sequence: Synthetic cashew; inner sequence

SEQ ID NO: 12579 - DNA, 30 bp, Artificial Sequence; identical to SEQ ID NO: 697
  Description of Artificial Sequence: Synthetic cashew; inner sequence

SEQ ID NO: 12580 - DNA, 30 bp, Artificial Sequence; identical to SEQ ID NO: 4451
  Description of Artificial Sequence: Synthetic cashew; inner sequence

SEQ ID NO: 12581 - DNA, 30 bp, Artificial Sequence
  Description of Artificial Sequence: Synthetic cashew; inner sequence
tcatcgcatgacgtctcatcgctgtggaca

SEQ ID NO: 12582 - DNA, 30 bp, Artificial Sequence; identical to SEQ ID NO: 4407
  Description of Artificial Sequence: Synthetic cashew; inner sequence

SEQ ID NO: 12583 - DNA, 30 bp, Artificial Sequence; identical to SEQ ID NO: 289
  Description of Artificial Sequence: Synthetic cashew; inner sequence

SEQ ID NO: 12584 - DNA, 30 bp, Artificial Sequence; identical to SEQ ID NO: 420
  Description of Artificial Sequence: Synthetic cashew; inner sequence

SEQ ID NO: 12585 - DNA, 30 bp, Artificial Sequence; identical to SEQ ID NO: 4650
  Description of Artificial Sequence: Synthetic cashew; inner sequence

SEQ ID NO: 12586 - DNA, 30 bp, Artificial Sequence; identical to SEQ ID NO: 636
  Description of Artificial Sequence: Synthetic cashew; inner sequence

SEQ ID NO: 12587 - DNA, 30 bp, Artificial Sequence; identical to SEQ ID NO: 493
  Description of Artificial Sequence: Synthetic cashew; inner sequence

SEQ ID NO: 12588 - DNA, 30 bp, Artificial Sequence; identical to SEQ ID NO: 4491
  Description of Artificial Sequence: Synthetic cashew; inner sequence

SEQ ID NO: 12589 - DNA, 30 bp, Artificial Sequence; identical to SEQ ID NO: 8682
  Description of Artificial Sequence: Synthetic cashew; inner sequence

SEQ ID NO: 12590 - DNA, 30 bp, Artificial Sequence; identical to SEQ ID NO: 8752
  Description of Artificial Sequence: Synthetic cashew; inner sequence

SEQ ID NO: 12591 - DNA, 30 bp, Artificial Sequence; identical to SEQ ID NO: 4727
  Description of Artificial Sequence: Synthetic cashew; inner sequence

SEQ ID NO: 12592 - DNA, 30 bp, Artificial Sequence
  Description of Artificial Sequence: Synthetic cashew; inner sequence
cgcgacgagtaggcatgtcttctgcgtgca

SEQ ID NO: 12593 - DNA, 28 bp, Artificial Sequence
  Description of Artificial Sequence: Synthetic cashew; inner sequence
cgcaccgtcgatacgtcatgcacgcacc

SEQ ID NO: 12594 - DNA, 30 bp, Artificial Sequence; identical to SEQ ID NO: 397
  Description of Artificial Sequence: Synthetic cashew; inner sequence

SEQ ID NO: 12595 - DNA, 30 bp, Artificial Sequence; identical to SEQ ID NO: 610
  Description of Artificial Sequence: Synthetic cashew; inner sequence

SEQ ID NO: 12596 - DNA, 30 bp, Artificial Sequence; identical to SEQ ID NO: 4425
  Description of Artificial Sequence: Synthetic cashew; inner sequence

SEQ ID NO: 12597 - DNA, 30 bp, Artificial Sequence; identical to SEQ ID NO: 575
  Description of Artificial Sequence: Synthetic cashew; inner sequence

SEQ ID NO: 12598 - DNA, 30 bp, Artificial Sequence; identical to SEQ ID NO: 8936
  Description of Artificial Sequence: Synthetic cashew; inner sequence

SEQ ID NO: 12599 - DNA, 30 bp, Artificial Sequence; identical to SEQ ID NO: 8782
  Description of Artificial Sequence: Synthetic cashew; inner sequence

SEQ ID NO: 12600 - DNA, 30 bp, Artificial Sequence; identical to SEQ ID NO: 4513
  Description of Artificial Sequence: Synthetic cashew; inner sequence

SEQ ID NO: 12601 - DNA, 30 bp, Artificial Sequence; identical to SEQ ID NO: 231
  Description of Artificial Sequence: Synthetic cashew; inner sequence

SEQ ID NO: 12602 - DNA, 30 bp, Artificial Sequence; identical to SEQ ID NO: 551
  Description of Artificial Sequence: Synthetic cashew; inner sequence

SEQ ID NO: 12603 - DNA, 30 bp, Artificial Sequence; identical to SEQ ID NO: 662
  Description of Artificial Sequence: Synthetic cashew; inner sequence

SEQ ID NO: 12604 - DNA, 30 bp, Artificial Sequence; identical to SEQ ID NO: 808
  Description of Artificial Sequence: Synthetic cashew; inner sequence

SEQ ID NO: 12605 - DNA, 30 bp, Artificial Sequence; identical to SEQ ID NO: 357
  Description of Artificial Sequence: Synthetic cashew; inner sequence

SEQ ID NO: 12606 - DNA, 30 bp, Artificial Sequence; identical to SEQ ID NO: 5001
  Description of Artificial Sequence: Synthetic cashew; inner sequence

SEQ ID NO: 12607 - DNA, 30 bp, Artificial Sequence; identical to SEQ ID NO: 225
  Description of Artificial Sequence: Synthetic cashew; inner sequence

SEQ ID NO: 12608 - DNA, 30 bp, Artificial Sequence; identical to SEQ ID NO: 698
  Description of Artificial Sequence: Synthetic cashew; inner sequence

SEQ ID NO: 12609 - DNA, 30 bp, Artificial Sequence; identical to SEQ ID NO: 921
  Description of Artificial Sequence: Synthetic cashew; inner sequence

SEQ ID NO: 12610 - DNA, 30 bp, Artificial Sequence; identical to SEQ ID NO: 338
  Description of Artificial Sequence: Synthetic cashew; inner sequence

SEQ ID NO: 12611 - DNA, 30 bp, Artificial Sequence; identical to SEQ ID NO: 881
  Description of Artificial Sequence: Synthetic cashew; inner sequence

SEQ ID NO: 12612 - DNA, 30 bp, Artificial Sequence
  Description of Artificial Sequence: Synthetic cashew; inner sequence
cgcgacgcgtaggcatgtcttctgtgtgca

SEQ ID NO: 12613 - DNA, 30 bp, Artificial Sequence; identical to SEQ ID NO: 306
  Description of Artificial Sequence: Synthetic cashew; inner sequence

SEQ ID NO: 12614 - DNA, 30 bp, Artificial Sequence; identical to SEQ ID NO: 574
  Description of Artificial Sequence: Synthetic cashew; inner sequence

SEQ ID NO: 12615 - DNA, 30 bp, Artificial Sequence; identical to SEQ ID NO: 363
  Description of Artificial Sequence: Synthetic cashew; inner sequence

SEQ ID NO: 12616 - DNA, 30 bp, Artificial Sequence; identical to SEQ ID NO: 4240
  Description of Artificial Sequence: Synthetic cashew; inner sequence

SEQ ID NO: 12617 - DNA, 30 bp, Artificial Sequence; identical to SEQ ID NO: 143
  Description of Artificial Sequence: Synthetic cashew; inner sequence

SEQ ID NO: 12618 - DNA, 30 bp, Artificial Sequence
  Description of Artificial Sequence: Synthetic cashew; inner sequence
cgcgacgagtatgcatgtcttctgtgtgca

SEQ ID NO: 12619 - DNA, 30 bp, Artificial Sequence; identical to SEQ ID NO: 8950
  Description of Artificial Sequence: Synthetic cashew; inner sequence

SEQ ID NO: 12620 - DNA, 30 bp, Artificial Sequence; identical to SEQ ID NO: 8877
  Description of Artificial Sequence: Synthetic cashew; inner sequence

SEQ ID NO: 12621 - DNA, 30 bp, Artificial Sequence; identical to SEQ ID NO: 4573
  Description of Artificial Sequence: Synthetic cashew; inner sequence

SEQ ID NO: 12622 - DNA, 30 bp, Artificial Sequence; identical to SEQ ID NO: 236
  Description of Artificial Sequence: Synthetic cashew; inner sequence

SEQ ID NO: 12623 - DNA, 30 bp, Artificial Sequence; identical to SEQ ID NO: 4935
  Description of Artificial Sequence: Synthetic cashew; inner sequence

SEQ ID NO: 12624 - DNA, 30 bp, Artificial Sequence; identical to SEQ ID NO: 535
  Description of Artificial Sequence: Synthetic cashew; inner sequence

SEQ ID NO: 12625 - DNA, 30 bp, Artificial Sequence; identical to SEQ ID NO: 862
  Description of Artificial Sequence: Synthetic cashew; inner sequence

SEQ ID NO: 12626 - DNA, 29 bp, Artificial Sequence
  Description of Artificial Sequence: Synthetic cashew; inner sequence
gcacgtcgaaacacgtagccatgcacggc

SEQ ID NO: 12627 - DNA, 30 bp, Artificial Sequence; identical to SEQ ID NO: 424
  Description of Artificial Sequence: Synthetic cashew; inner sequence

SEQ ID NO: 12628 - DNA, 30 bp, Artificial Sequence; identical to SEQ ID NO: 831
  Description of Artificial Sequence: Synthetic cashew; inner sequence

SEQ ID NO: 12629 - DNA, 30 bp, Artificial Sequence; identical to SEQ ID NO: 398
  Description of Artificial Sequence: Synthetic cashew; inner sequence

SEQ ID NO: 12630 - DNA, 30 bp, Artificial Sequence; identical to SEQ ID NO: 4889
  Description of Artificial Sequence: Synthetic cashew; inner sequence

SEQ ID NO: 12631 - DNA, 30 bp, Artificial Sequence; identical to SEQ ID NO: 4472
  Description of Artificial Sequence: Synthetic cashew; inner sequence

SEQ ID NO: 12632 - DNA, 30 bp, Artificial Sequence; identical to SEQ ID NO: 8825
  Description of Artificial Sequence: Synthetic cashew; inner sequence

SEQ ID NO: 12633 - DNA, 30 bp, Artificial Sequence; identical to SEQ ID NO: 452
  Description of Artificial Sequence: Synthetic cashew; inner sequence

SEQ ID NO: 12634 - DNA, 30 bp, Artificial Sequence; identical to SEQ ID NO: 486
  Description of Artificial Sequence: Synthetic cashew; inner sequence

SEQ ID NO: 12635 - DNA, 30 bp, Artificial Sequence; identical to SEQ ID NO: 4913
  Description of Artificial Sequence: Synthetic cashew; inner sequence

SEQ ID NO: 12636 - DNA, 30 bp, Artificial Sequence; identical to SEQ ID NO: 4611
  Description of Artificial Sequence: Synthetic cashew; inner sequence

SEQ ID NO: 12637 - DNA, 30 bp, Artificial Sequence; identical to SEQ ID NO: 4356
  Description of Artificial Sequence: Synthetic cashew; inner sequence

SEQ ID NO: 12638 - DNA, 30 bp, Artificial Sequence; identical to SEQ ID NO: 626
  Description of Artificial Sequence: Synthetic cashew; inner sequence

SEQ ID NO: 12639 - DNA, 30 bp, Artificial Sequence; identical to SEQ ID NO: 380
  Description of Artificial Sequence: Synthetic cashew; inner sequence

SEQ ID NO: 12640 - DNA, 30 bp, Artificial Sequence; identical to SEQ ID NO: 8767
  Description of Artificial Sequence: Synthetic cashew; inner sequence

SEQ ID NO: 12641 - DNA, 30 bp, Artificial Sequence; identical to SEQ ID NO: 4940
  Description of Artificial Sequence: Synthetic cashew; inner sequence

SEQ ID NO: 12642 - DNA, 30 bp, Artificial Sequence; identical to SEQ ID NO: 596
  Description of Artificial Sequence: Synthetic cashew; inner sequence

SEQ ID NO: 12643 - DNA, 30 bp, Artificial Sequence; identical to SEQ ID NO: 518
  Description of Artificial Sequence: Synthetic cashew; inner sequence

SEQ ID NO: 12644 - DNA, 31 bp, Artificial Sequence; identical to SEQ ID NO: 503
  Description of Artificial Sequence: Synthetic cashew; inner sequence

SEQ ID NO: 12645 - DNA, 30 bp, Artificial Sequence; identical to SEQ ID NO: 4845
  Description of Artificial Sequence: Synthetic cashew; inner sequence

SEQ ID NO: 12646 - DNA, 30 bp, Artificial Sequence; identical to SEQ ID NO: 919
  Description of Artificial Sequence: Synthetic cashew; inner sequence

SEQ ID NO: 12647 - DNA, 30 bp, Artificial Sequence; identical to SEQ ID NO: 920
  Description of Artificial Sequence: Synthetic cashew; inner sequence

SEQ ID NO: 12648 - DNA, 30 bp, Artificial Sequence; identical to SEQ ID NO: 4616
  Description of Artificial Sequence: Synthetic cashew; inner sequence

SEQ ID NO: 12649 - DNA, 30 bp, Artificial Sequence; identical to SEQ ID NO: 465
  Description of Artificial Sequence: Synthetic cashew; inner sequence

SEQ ID NO: 12650 - DNA, 30 bp, Artificial Sequence; identical to SEQ ID NO: 317
  Description of Artificial Sequence: Synthetic cashew; inner sequence

SEQ ID NO: 12651 - DNA, 30 bp, Artificial Sequence; identical to SEQ ID NO: 4717
  Description of Artificial Sequence: Synthetic cashew; inner sequence

SEQ ID NO: 12652 - DNA, 30 bp, Artificial Sequence; identical to SEQ ID NO: 621
  Description of Artificial Sequence: Synthetic cashew; inner sequence

SEQ ID NO: 12653 - DNA, 30 bp, Artificial Sequence; identical to SEQ ID NO: 297
  Description of Artificial Sequence: Synthetic cashew; inner sequence

SEQ ID NO: 12654 - DNA, 30 bp, Artificial Sequence; identical to SEQ ID NO: 4690
  Description of Artificial Sequence: Synthetic cashew; inner sequence

SEQ ID NO: 12655 - DNA, 30 bp, Artificial Sequence; identical to SEQ ID NO: 773
  Description of Artificial Sequence: Synthetic cashew; inner sequence

SEQ ID NO: 12656 - DNA, 30 bp, Artificial Sequence; identical to SEQ ID NO: 4799
  Description of Artificial Sequence: Synthetic cashew; inner sequence

SEQ ID NO: 12657 - DNA, 30 bp, Artificial Sequence; identical to SEQ ID NO: 956
  Description of Artificial Sequence: Synthetic cashew; inner sequence

SEQ ID NO: 12658 - DNA, 30 bp, Artificial Sequence; identical to SEQ ID NO: 8939
  Description of Artificial Sequence: Synthetic cashew; inner sequence

SEQ ID NO: 12659 - DNA, 30 bp, Artificial Sequence
  Description of Artificial Sequence: Synthetic cashew; inner sequence
gtcatgccatcccttcgagggtgacaggta

SEQ ID NO: 12660 - DNA, 29 bp, Artificial Sequence
  Description of Artificial Sequence: Synthetic cashew; inner sequence
ggccgaacggaccgacaagtgcgcatgga

SEQ ID NO: 12661 - DNA, 30 bp, Artificial Sequence; identical to SEQ ID NO: 4565
  Description of Artificial Sequence: Synthetic cashew; inner sequence

SEQ ID NO: 12662 - DNA, 30 bp, Artificial Sequence; identical to SEQ ID NO: 576
  Description of Artificial Sequence: Synthetic cashew; inner sequence

SEQ ID NO: 12663 - DNA, 30 bp, Artificial Sequence; identical to SEQ ID NO: 404
  Description of Artificial Sequence: Synthetic cashew; inner sequence

SEQ ID NO: 12664 - DNA, 30 bp, Artificial Sequence; identical to SEQ ID NO: 292
  Description of Artificial Sequence: Synthetic cashew; inner sequence

SEQ ID NO: 12665 - DNA, 30 bp, Artificial Sequence; identical to SEQ ID NO: 703
  Description of Artificial Sequence: Synthetic cashew; inner sequence

SEQ ID NO: 12666 - DNA, 30 bp, Artificial Sequence; identical to SEQ ID NO: 638
  Description of Artificial Sequence: Synthetic cashew; inner sequence

SEQ ID NO: 12667 - DNA, 30 bp, Artificial Sequence; identical to SEQ ID NO: 8627
  Description of Artificial Sequence: Synthetic cashew; inner sequence

SEQ ID NO: 12668 - DNA, 30 bp, Artificial Sequence; identical to SEQ ID NO: 663
  Description of Artificial Sequence: Synthetic cashew; inner sequence

SEQ ID NO: 12669 - DNA, 30 bp, Artificial Sequence; identical to SEQ ID NO: 917
  Description of Artificial Sequence: Synthetic cashew; inner sequence

SEQ ID NO: 12670 - DNA, 30 bp, Artificial Sequence
  Description of Artificial Sequence: Synthetic cashew; inner sequence
cgcgacgagtaggcatgtcttctgtttgca

SEQ ID NO: 12671 - DNA, 30 bp, Artificial Sequence; identical to SEQ ID NO: 805
  Description of Artificial Sequence: Synthetic cashew; inner sequence

SEQ ID NO: 12672 - DNA, 30 bp, Artificial Sequence; identical to SEQ ID NO: 199
  Description of Artificial Sequence: Synthetic cashew; inner sequence

SEQ ID NO: 12673 - DNA, 30 bp, Artificial Sequence
  Description of Artificial Sequence: Synthetic cashew; inner sequence
ggcctgcacatccctcccttccgtgcgtca

SEQ ID NO: 12674 - DNA, 30 bp, Artificial Sequence; identical to SEQ ID NO: 223
  Description of Artificial Sequence: Synthetic cashew; inner sequence

SEQ ID NO: 12675 - DNA, 30 bp, Artificial Sequence; identical to SEQ ID NO: 378
  Description of Artificial Sequence: Synthetic cashew; inner sequence

SEQ ID NO: 12676 - DNA, 30 bp, Artificial Sequence; identical to SEQ ID NO: 943
  Description of Artificial Sequence: Synthetic cashew; inner sequence

SEQ ID NO: 12677 - DNA, 30 bp, Artificial Sequence; identical to SEQ ID NO: 4688
  Description of Artificial Sequence: Synthetic cashew; inner sequence

SEQ ID NO: 12678 - DNA, 30 bp, Artificial Sequence; identical to SEQ ID NO: 332
  Description of Artificial Sequence: Synthetic cashew; inner sequence

SEQ ID NO: 12679 - DNA, 30 bp, Artificial Sequence; identical to SEQ ID NO: 4598
  Description of Artificial Sequence: Synthetic cashew; inner sequence

SEQ ID NO: 12680 - DNA, 30 bp, Artificial Sequence; identical to SEQ ID NO: 4893
  Description of Artificial Sequence: Synthetic cashew; inner sequence

SEQ ID NO: 12681 - DNA, 30 bp, Artificial Sequence; identical to SEQ ID NO: 4817
  Description of Artificial Sequence: Synthetic cashew; inner sequence

SEQ ID NO: 12682 - DNA, 30 bp, Artificial Sequence; identical to SEQ ID NO: 699
  Description of Artificial Sequence: Synthetic cashew; inner sequence

SEQ ID NO: 12683 - DNA, 30 bp, Artificial Sequence; identical to SEQ ID NO: 680
  Description of Artificial Sequence: Synthetic cashew; inner sequence

SEQ ID NO: 12684 - DNA, 30 bp, Artificial Sequence; identical to SEQ ID NO: 162
  Description of Artificial Sequence: Synthetic cashew; inner sequence

SEQ ID NO: 12685 - DNA, 30 bp, Artificial Sequence; identical to SEQ ID NO: 4620
  Description of Artificial Sequence: Synthetic cashew; inner sequence

SEQ ID NO: 12686 - DNA, 30 bp, Artificial Sequence; identical to SEQ ID NO: 586
  Description of Artificial Sequence: Synthetic cashew; inner sequence

SEQ ID NO: 12687 - DNA, 30 bp, Artificial Sequence; identical to SEQ ID NO: 776
  Description of Artificial Sequence: Synthetic cashew; inner sequence

SEQ ID NO: 12688 - DNA, 30 bp, Artificial Sequence; identical to SEQ ID NO: 330
  Description of Artificial Sequence: Synthetic cashew; inner sequence

SEQ ID NO: 12689 - DNA, 30 bp, Artificial Sequence; identical to SEQ ID NO: 318
  Description of Artificial Sequence: Synthetic cashew; inner sequence

SEQ ID NO: 12690 - DNA, 30 bp, Artificial Sequence; identical to SEQ ID NO: 948
  Description of Artificial Sequence: Synthetic cashew; inner sequence

SEQ ID NO: 12691 - DNA, 29 bp, Artificial Sequence
  Description of Artificial Sequence: Synthetic cashew; inner sequence
gcacgtcgcaacacgtagccatgcacggt

SEQ ID NO: 12692 - DNA, 30 bp, Artificial Sequence; identical to SEQ ID NO: 624
  Description of Artificial Sequence: Synthetic cashew; inner sequence

SEQ ID NO: 12693 - DNA, 30 bp, Artificial Sequence; identical to SEQ ID NO: 8938
  Description of Artificial Sequence: Synthetic cashew; inner sequence

SEQ ID NO: 12694 - DNA, 30 bp, Artificial Sequence; identical to SEQ ID NO: 722
  Description of Artificial Sequence: Synthetic cashew; inner sequence

SEQ ID NO: 12695 - DNA, 30 bp, Artificial Sequence; identical to SEQ ID NO: 660
  Description of Artificial Sequence: Synthetic cashew; inner sequence

SEQ ID NO: 12696 - DNA, 30 bp, Artificial Sequence; identical to SEQ ID NO: 327
  Description of Artificial Sequence: Synthetic cashew; inner sequence

SEQ ID NO: 12697 - DNA, 30 bp, Artificial Sequence; identical to SEQ ID NO: 914
  Description of Artificial Sequence: Synthetic cashew; inner sequence

SEQ ID NO: 12698 - DNA, 30 bp, Artificial Sequence; identical to SEQ ID NO: 4955
  Description of Artificial Sequence: Synthetic cashew; inner sequence

SEQ ID NO: 12699 - DNA, 30 bp, Artificial Sequence; identical to SEQ ID NO: 979
  Description of Artificial Sequence: Synthetic cashew; inner sequence

SEQ ID NO: 12700 - DNA, 30 bp, Artificial Sequence
  Description of Artificial Sequence: Synthetic cashew; inner sequence
gcacgactcgccccctatcatgaggccatg

SEQ ID NO: 12701 - DNA, 30 bp, Artificial Sequence; identical to SEQ ID NO: 830
  Description of Artificial Sequence: Synthetic cashew; inner sequence

SEQ ID NO: 12702 - DNA, 30 bp, Artificial Sequence; identical to SEQ ID NO: 834
  Description of Artificial Sequence: Synthetic cashew; inner sequence

SEQ ID NO: 12703 - DNA, 30 bp, Artificial Sequence; identical to SEQ ID NO: 8850
  Description of Artificial Sequence: Synthetic cashew; inner sequence

SEQ ID NO: 12704 - DNA, 30 bp, Artificial Sequence; identical to SEQ ID NO: 8909
  Description of Artificial Sequence: Synthetic cashew; inner sequence

SEQ ID NO: 12705 - DNA, 30 bp, Artificial Sequence; identical to SEQ ID NO: 857
  Description of Artificial Sequence: Synthetic cashew; inner sequence

SEQ ID NO: 12706 - DNA, 30 bp, Artificial Sequence; identical to SEQ ID NO: 668
  Description of Artificial Sequence: Synthetic cashew; inner sequence

SEQ ID NO: 12707 - DNA, 30 bp, Artificial Sequence; identical to SEQ ID NO: 4960
  Description of Artificial Sequence: Synthetic cashew; inner sequence

SEQ ID NO: 12708 - DNA, 30 bp, Artificial Sequence; identical to SEQ ID NO: 4494
  Description of Artificial Sequence: Synthetic cashew; inner sequence

SEQ ID NO: 12709 - DNA, 29 bp, Artificial Sequence
  Description of Artificial Sequence: Synthetic cashew; inner sequence
gcacgccgaaacacgtagccatgcacggt

SEQ ID NO: 12710 - DNA, 30 bp, Artificial Sequence; identical to SEQ ID NO: 729
  Description of Artificial Sequence: Synthetic cashew; inner sequence

SEQ ID NO: 12711 - DNA, 30 bp, Artificial Sequence; identical to SEQ ID NO: 4662
  Description of Artificial Sequence: Synthetic cashew; inner sequence

SEQ ID NO: 12712 - DNA, 30 bp, Artificial Sequence
  Description of Artificial Sequence: Synthetic cashew; inner sequence
acatgtgggccgatgtgcactgagtggtgt

SEQ ID NO: 12713 - DNA, 30 bp, Artificial Sequence; identical to SEQ ID NO: 351
  Description of Artificial Sequence: Synthetic cashew; inner sequence

SEQ ID NO: 12714 - DNA, 30 bp, Artificial Sequence; identical to SEQ ID NO: 4552
  Description of Artificial Sequence: Synthetic cashew; inner sequence

SEQ ID NO: 12715 - DNA, 30 bp, Artificial Sequence; identical to SEQ ID NO: 432
  Description of Artificial Sequence: Synthetic cashew; inner sequence

SEQ ID NO: 12716 - DNA, 30 bp, Artificial Sequence; identical to SEQ ID NO: 733
  Description of Artificial Sequence: Synthetic cashew; inner sequence

SEQ ID NO: 12717 - DNA, 30 bp, Artificial Sequence; identical to SEQ ID NO: 505
  Description of Artificial Sequence: Synthetic cashew; inner sequence

SEQ ID NO: 12718 - DNA, 30 bp, Artificial Sequence; identical to SEQ ID NO: 4728
  Description of Artificial Sequence: Synthetic cashew; inner sequence

SEQ ID NO: 12719 - DNA, 30 bp, Artificial Sequence; identical to SEQ ID NO: 265
  Description of Artificial Sequence: Synthetic cashew; inner sequence

SEQ ID NO: 12720 - DNA, 30 bp, Artificial Sequence; identical to SEQ ID NO: 548
  Description of Artificial Sequence: Synthetic cashew; inner sequence

SEQ ID NO: 12721 - DNA, 30 bp, Artificial Sequence; identical to SEQ ID NO: 832
  Description of Artificial Sequence: Synthetic cashew; inner sequence

SEQ ID NO: 12722 - DNA, 30 bp, Artificial Sequence; identical to SEQ ID NO: 4498
  Description of Artificial Sequence: Synthetic cashew; inner sequence

SEQ ID NO: 12723 - DNA, 30 bp, Artificial Sequence; identical to SEQ ID NO: 768
  Description of Artificial Sequence: Synthetic cashew; inner sequence

SEQ ID NO: 12724 - DNA, 30 bp, Artificial Sequence; identical to SEQ ID NO: 874
  Description of Artificial Sequence: Synthetic cashew; inner sequence

SEQ ID NO: 12725 - DNA, 30 bp, Artificial Sequence; identical to SEQ ID NO: 4859
  Description of Artificial Sequence: Synthetic cashew; inner sequence

SEQ ID NO: 12726 - DNA, 30 bp, Artificial Sequence; identical to SEQ ID NO: 4436
  Description of Artificial Sequence: Synthetic cashew; inner sequence

SEQ ID NO: 12727 - DNA, 30 bp, Artificial Sequence; identical to SEQ ID NO: 500
  Description of Artificial Sequence: Synthetic cashew; inner sequence

SEQ ID NO: 12728 - DNA, 30 bp, Artificial Sequence; identical to SEQ ID NO: 889
  Description of Artificial Sequence: Synthetic cashew; inner sequence

SEQ ID NO: 12729 - DNA, 30 bp, Artificial Sequence; identical to SEQ ID NO: 592
  Description of Artificial Sequence: Synthetic cashew; inner sequence

SEQ ID NO: 12730 - DNA, 29 bp, Artificial Sequence
  Description of Artificial Sequence: Synthetic cashew; inner sequence
gcacgtcgaaacacgcagccatgcacggt

SEQ ID NO: 12731 - DNA, 30 bp, Artificial Sequence; identical to SEQ ID NO: 4985
  Description of Artificial Sequence: Synthetic cashew; inner sequence

SEQ ID NO: 12732 - DNA, 30 bp, Artificial Sequence; identical to SEQ ID NO: 4802
  Description of Artificial Sequence: Synthetic cashew; inner sequence

SEQ ID NO: 12733 - DNA, 30 bp, Artificial Sequence; identical to SEQ ID NO: 8807
  Description of Artificial Sequence: Synthetic cashew; inner sequence

SEQ ID NO: 12734 - DNA, 30 bp, Artificial Sequence; identical to SEQ ID NO: 909
  Description of Artificial Sequence: Synthetic cashew; inner sequence

SEQ ID NO: 12735 - DNA, 30 bp, Artificial Sequence; identical to SEQ ID NO: 8712
  Description of Artificial Sequence: Synthetic cashew; inner sequence

SEQ ID NO: 12736 - DNA, 30 bp, Artificial Sequence; identical to SEQ ID NO: 4700
  Description of Artificial Sequence: Synthetic cashew; inner sequence

SEQ ID NO: 12737 - DNA, 30 bp, Artificial Sequence; identical to SEQ ID NO: 8633
  Description of Artificial Sequence: Synthetic cashew; inner sequence

SEQ ID NO: 12738 - DNA, 30 bp, Artificial Sequence; identical to SEQ ID NO: 4829
  Description of Artificial Sequence: Synthetic cashew; inner sequence

SEQ ID NO: 12739 - DNA, 30 bp, Artificial Sequence; identical to SEQ ID NO: 8902
  Description of Artificial Sequence: Synthetic cashew; inner sequence

SEQ ID NO: 12740 - DNA, 30 bp, Artificial Sequence; identical to SEQ ID NO: 8748
  Description of Artificial Sequence: Synthetic cashew; inner sequence

SEQ ID NO: 12741 - DNA, 30 bp, Artificial Sequence; identical to SEQ ID NO: 4603
  Description of Artificial Sequence: Synthetic cashew; inner sequence

SEQ ID NO: 12742 - DNA, 30 bp, Artificial Sequence; identical to SEQ ID NO: 930
  Description of Artificial Sequence: Synthetic cashew; inner sequence

SEQ ID NO: 12743 - DNA, 30 bp, Artificial Sequence
  Description of Artificial Sequence: Synthetic cashew; inner sequence
gtcattccgcatcatacacgtgggcacgta

SEQ ID NO: 12744 - DNA, 30 bp, Artificial Sequence
  Description of Artificial Sequence: Synthetic cashew; inner sequence
gaccgcaacgaccaaagtgccatgtggtgc

SEQ ID NO: 12745 - DNA, 30 bp, Artificial Sequence; identical to SEQ ID NO: 466
  Description of Artificial Sequence: Synthetic cashew; inner sequence

SEQ ID NO: 12746 - DNA, 30 bp, Artificial Sequence; identical to SEQ ID NO: 606
  Description of Artificial Sequence: Synthetic cashew; inner sequence

SEQ ID NO: 12747 - DNA, 30 bp, Artificial Sequence; identical to SEQ ID NO: 813
  Description of Artificial Sequence: Synthetic cashew; inner sequence

SEQ ID NO: 12748 - DNA, 30 bp, Artificial Sequence; identical to SEQ ID NO: 384
  Description of Artificial Sequence: Synthetic cashew; inner sequence

SEQ ID NO: 12749 - DNA, 30 bp, Artificial Sequence; identical to SEQ ID NO: 4289
  Description of Artificial Sequence: Synthetic cashew; inner sequence

SEQ ID NO: 12750 - DNA, 30 bp, Artificial Sequence; identical to SEQ ID NO: 4787
  Description of Artificial Sequence: Synthetic cashew; inner sequence

SEQ ID NO: 12751 - DNA, 30 bp, Artificial Sequence; identical to SEQ ID NO: 302
  Description of Artificial Sequence: Synthetic cashew; inner sequence

SEQ ID NO: 12752 - DNA, 30 bp, Artificial Sequence; identical to SEQ ID NO: 463
  Description of Artificial Sequence: Synthetic cashew; inner sequence

SEQ ID NO: 12753 - DNA, 30 bp, Artificial Sequence; identical to SEQ ID NO: 4579
  Description of Artificial Sequence: Synthetic cashew; inner sequence

SEQ ID NO: 12754 - DNA, 30 bp, Artificial Sequence; identical to SEQ ID NO: 502
  Description of Artificial Sequence: Synthetic cashew; inner sequence

SEQ ID NO: 12755 - DNA, 29 bp, Artificial Sequence
  Description of Artificial Sequence: Synthetic cashew; inner sequence
gcacgtcgaaacacgtagccatgcccggt

SEQ ID NO: 12756 - DNA, 30 bp, Artificial Sequence; identical to SEQ ID NO: 4856
  Description of Artificial Sequence: Synthetic cashew; inner sequence

SEQ ID NO: 12757 - DNA, 30 bp, Artificial Sequence; identical to SEQ ID NO: 4590
  Description of Artificial Sequence: Synthetic cashew; inner sequence

SEQ ID NO: 12758 - DNA, 30 bp, Artificial Sequence; identical to SEQ ID NO: 4521
  Description of Artificial Sequence: Synthetic cashew; inner sequence

SEQ ID NO: 12759 - DNA, 29 bp, Artificial Sequence
  Description of Artificial Sequence: Synthetic cashew; inner sequence
gtcatgccatcccttcgagtgtgcaggta

SEQ ID NO: 12760 - DNA, 30 bp, Artificial Sequence; identical to SEQ ID NO: 8910
  Description of Artificial Sequence: Synthetic cashew; inner sequence

SEQ ID NO: 12761 - DNA, 30 bp, Artificial Sequence; identical to SEQ ID NO: 477
  Description of Artificial Sequence: Synthetic cashew; inner sequence

SEQ ID NO: 12762 - DNA, 30 bp, Artificial Sequence; identical to SEQ ID NO: 772
  Description of Artificial Sequence: Synthetic cashew; inner sequence

SEQ ID NO: 12763 - DNA, 30 bp, Artificial Sequence; identical to SEQ ID NO: 458
  Description of Artificial Sequence: Synthetic cashew; inner sequence

SEQ ID NO: 12764 - DNA, 30 bp, Artificial Sequence; identical to SEQ ID NO: 816
  Description of Artificial Sequence: Synthetic cashew; inner sequence

SEQ ID NO: 12765 - DNA, 30 bp, Artificial Sequence; identical to SEQ ID NO: 713
  Description of Artificial Sequence: Synthetic cashew; inner sequence

SEQ ID NO: 12766 - DNA, 30 bp, Artificial Sequence; identical to SEQ ID NO: 4884
  Description of Artificial Sequence: Synthetic cashew; inner sequence

SEQ ID NO: 12767 - DNA, 30 bp, Artificial Sequence
  Description of Artificial Sequence: Synthetic cashew; inner sequence
gtcatgcacgaccactatcatggcggcatg

SEQ ID NO: 12768 - DNA, 30 bp, Artificial Sequence; identical to SEQ ID NO: 702
  Description of Artificial Sequence: Synthetic cashew; inner sequence

SEQ ID NO: 12769 - DNA, 30 bp, Artificial Sequence; identical to SEQ ID NO: 583
  Description of Artificial Sequence: Synthetic cashew; inner sequence

SEQ ID NO: 12770 - DNA, 30 bp, Artificial Sequence; identical to SEQ ID NO: 685
  Description of Artificial Sequence: Synthetic cashew; inner sequence

SEQ ID NO: 12771 - DNA, 30 bp, Artificial Sequence; identical to SEQ ID NO: 4610
  Description of Artificial Sequence: Synthetic cashew; inner sequence

SEQ ID NO: 12772 - DNA, 30 bp, Artificial Sequence; identical to SEQ ID NO: 4981
  Description of Artificial Sequence: Synthetic cashew; inner sequence

SEQ ID NO: 12773 - DNA, 30 bp, Artificial Sequence
  Description of Artificial Sequence: Synthetic cashew; inner sequence
ccgcacgtagccctatcagaggtgcatgca

SEQ ID NO: 12774 - DNA, 30 bp, Artificial Sequence; identical to SEQ ID NO: 787
  Description of Artificial Sequence: Synthetic cashew; inner sequence

SEQ ID NO: 12775 - DNA, 30 bp, Artificial Sequence
  Description of Artificial Sequence: Synthetic cashew; inner sequence
gtacgcatcgtcccgtcatgtggctccgta

SEQ ID NO: 12776 - DNA, 30 bp, Artificial Sequence; identical to SEQ ID NO: 826
  Description of Artificial Sequence: Synthetic cashew; inner sequence

SEQ ID NO: 12777 - DNA, 30 bp, Artificial Sequence; identical to SEQ ID NO: 4339
  Description of Artificial Sequence: Synthetic cashew; inner sequence

SEQ ID NO: 12778 - DNA, 30 bp, Artificial Sequence; identical to SEQ ID NO: 417
  Description of Artificial Sequence: Synthetic cashew; inner sequence

SEQ ID NO: 12779 - DNA, 30 bp, Artificial Sequence; identical to SEQ ID NO: 753
  Description of Artificial Sequence: Synthetic cashew; inner sequence

SEQ ID NO: 12780 - DNA, 30 bp, Artificial Sequence; identical to SEQ ID NO: 4503
  Description of Artificial Sequence: Synthetic cashew; inner sequence

SEQ ID NO: 12781 - DNA, 30 bp, Artificial Sequence; identical to SEQ ID NO: 8889
  Description of Artificial Sequence: Synthetic cashew; inner sequence

SEQ ID NO: 12782 - DNA, 30 bp, Artificial Sequence; identical to SEQ ID NO: 488
  Description of Artificial Sequence: Synthetic cashew; inner sequence

SEQ ID NO: 12783 - DNA, 30 bp, Artificial Sequence; identical to SEQ ID NO: 4721
  Description of Artificial Sequence: Synthetic cashew; inner sequence

SEQ ID NO: 12784 - DNA, 30 bp, Artificial Sequence; identical to SEQ ID NO: 8860
  Description of Artificial Sequence: Synthetic cashew; inner sequence

SEQ ID NO: 12785 - DNA, 30 bp, Artificial Sequence; identical to SEQ ID NO: 8871
  Description of Artificial Sequence: Synthetic cashew; inner sequence

SEQ ID NO: 12786 - DNA, 30 bp, Artificial Sequence; identical to SEQ ID NO: 672
  Description of Artificial Sequence: Synthetic cashew; inner sequence

SEQ ID NO: 12787 - DNA, 30 bp, Artificial Sequence; identical to SEQ ID NO: 591
  Description of Artificial Sequence: Synthetic cashew; inner sequence

SEQ ID NO: 12788 - DNA, 30 bp, Artificial Sequence; identical to SEQ ID NO: 4997
  Description of Artificial Sequence: Synthetic cashew; inner sequence

SEQ ID NO: 12789 - DNA, 30 bp, Artificial Sequence; identical to SEQ ID NO: 8935
  Description of Artificial Sequence: Synthetic cashew; inner sequence

SEQ ID NO: 12790 - DNA, 30 bp, Artificial Sequence; identical to SEQ ID NO: 492
  Description of Artificial Sequence: Synthetic cashew; inner sequence

SEQ ID NO: 12791 - DNA, 30 bp, Artificial Sequence
  Description of Artificial Sequence: Synthetic cashew; inner sequence
catgtggcgtgcgttccgttcaagttgaca

SEQ ID NO: 12792 - DNA, 30 bp, Artificial Sequence; identical to SEQ ID NO: 507
  Description of Artificial Sequence: Synthetic cashew; inner sequence

SEQ ID NO: 12793 - DNA, 30 bp, Artificial Sequence; identical to SEQ ID NO: 4801
  Description of Artificial Sequence: Synthetic cashew; inner sequence

SEQ ID NO: 12794 - DNA, 30 bp, Artificial Sequence; identical to SEQ ID NO: 929
  Description of Artificial Sequence: Synthetic cashew; inner sequence

SEQ ID NO: 12795 - DNA, 30 bp, Artificial Sequence
  Description of Artificial Sequence: Synthetic cashew; inner sequence
gtgtcatgggtacgtcgctgggtgtggaca

SEQ ID NO: 12796 - DNA, 30 bp, Artificial Sequence; identical to SEQ ID NO: 4198
  Description of Artificial Sequence: Synthetic cashew; inner sequence

SEQ ID NO: 12797 - DNA, 30 bp, Artificial Sequence; identical to SEQ ID NO: 435
  Description of Artificial Sequence: Synthetic cashew; inner sequence

SEQ ID NO: 12798 - DNA, 30 bp, Artificial Sequence; identical to SEQ ID NO: 718
  Description of Artificial Sequence: Synthetic cashew; inner sequence

SEQ ID NO: 12799 - DNA, 30 bp, Artificial Sequence
  Description of Artificial Sequence: Synthetic cashew; inner sequence
gggccgacacgaaccctatcaacgtggaca

SEQ ID NO: 12800 - DNA, 31 bp, Artificial Sequence; identical to SEQ ID NO: 489
  Description of Artificial Sequence: Synthetic cashew; inner sequence

SEQ ID NO: 12801 - DNA, 30 bp, Artificial Sequence; identical to SEQ ID NO: 4713
  Description of Artificial Sequence: Synthetic cashew; inner sequence

SEQ ID NO: 12802 - DNA, 30 bp, Artificial Sequence; identical to SEQ ID NO: 442
  Description of Artificial Sequence: Synthetic cashew; inner sequence

SEQ ID NO: 12803 - DNA, 30 bp, Artificial Sequence
  Description of Artificial Sequence: Synthetic cashew; inner sequence
ggcatgcgatggatgggggctggggcagtc

SEQ ID NO: 12804 - DNA, 30 bp, Artificial Sequence; identical to SEQ ID NO: 926
  Description of Artificial Sequence: Synthetic cashew; inner sequence

SEQ ID NO: 12805 - DNA, 30 bp, Artificial Sequence; identical to SEQ ID NO: 761
  Description of Artificial Sequence: Synthetic cashew; inner sequence

SEQ ID NO: 12806 - DNA, 30 bp, Artificial Sequence; identical to SEQ ID NO: 315
  Description of Artificial Sequence: Synthetic cashew; inner sequence

SEQ ID NO: 12807 - DNA, 30 bp, Artificial Sequence; identical to SEQ ID NO: 4642
  Description of Artificial Sequence: Synthetic cashew; inner sequence

SEQ ID NO: 12808 - DNA, 30 bp, Artificial Sequence; identical to SEQ ID NO: 4711
  Description of Artificial Sequence: Synthetic cashew; inner sequence

SEQ ID NO: 12809 - DNA, 30 bp, Artificial Sequence; identical to SEQ ID NO: 4873
  Description of Artificial Sequence: Synthetic cashew; inner sequence

SEQ ID NO: 12810 - DNA, 30 bp, Artificial Sequence; identical to SEQ ID NO: 8769
  Description of Artificial Sequence: Synthetic cashew; inner sequence

SEQ ID NO: 12811 - DNA, 30 bp, Artificial Sequence; identical to SEQ ID NO: 261
  Description of Artificial Sequence: Synthetic cashew; inner sequence

SEQ ID NO: 12812 - DNA, 30 bp, Artificial Sequence; identical to SEQ ID NO: 4526
  Description of Artificial Sequence: Synthetic cashew; inner sequence

SEQ ID NO: 12813 - DNA, 30 bp, Artificial Sequence; identical to SEQ ID NO: 679
  Description of Artificial Sequence: Synthetic cashew; inner sequence

SEQ ID NO: 12814 - DNA, 29 bp, Artificial Sequence
  Description of Artificial Sequence: Synthetic cashew; inner sequence
ggcctgcgatggatgtggacgtacgtggc

SEQ ID NO: 12815 - DNA, 30 bp, Artificial Sequence; identical to SEQ ID NO: 4739
  Description of Artificial Sequence: Synthetic cashew; inner sequence

SEQ ID NO: 12816 - DNA, 30 bp, Artificial Sequence; identical to SEQ ID NO: 607
  Description of Artificial Sequence: Synthetic cashew; inner sequence

SEQ ID NO: 12817 - DNA, 30 bp, Artificial Sequence
  Description of Artificial Sequence: Synthetic cashew; inner sequence
cgcgacgagtaggcatgtcttctgtgttca

SEQ ID NO: 12818 - DNA, 30 bp, Artificial Sequence; identical to SEQ ID NO: 4905
  Description of Artificial Sequence: Synthetic cashew; inner sequence

SEQ ID NO: 12819 - DNA, 30 bp, Artificial Sequence; identical to SEQ ID NO: 960
  Description of Artificial Sequence: Synthetic cashew; inner sequence

SEQ ID NO: 12820 - DNA, 31 bp, Artificial Sequence; identical to SEQ ID NO: 652
  Description of Artificial Sequence: Synthetic cashew; inner sequence

SEQ ID NO: 12821 - DNA, 30 bp, Artificial Sequence
  Description of Artificial Sequence: Synthetic cashew; inner sequence
gtcattccgcatcctacacgggggcacgta

SEQ ID NO: 12822 - DNA, 30 bp, Artificial Sequence; identical to SEQ ID NO: 4756
  Description of Artificial Sequence: Synthetic cashew; inner sequence

SEQ ID NO: 12823 - DNA, 30 bp, Artificial Sequence; identical to SEQ ID NO: 291
  Description of Artificial Sequence: Synthetic cashew; inner sequence

SEQ ID NO: 12824 - DNA, 30 bp, Artificial Sequence; identical to SEQ ID NO: 781
  Description of Artificial Sequence: Synthetic cashew; inner sequence

SEQ ID NO: 12825 - DNA, 30 bp, Artificial Sequence; identical to SEQ ID NO: 8953
  Description of Artificial Sequence: Synthetic cashew; inner sequence

SEQ ID NO: 12826 - DNA, 30 bp, Artificial Sequence; identical to SEQ ID NO: 4707
  Description of Artificial Sequence: Synthetic cashew; inner sequence

SEQ ID NO: 12827 - DNA, 30 bp, Artificial Sequence
  Description of Artificial Sequence: Synthetic cashew; inner sequence
cagcacgtagccctatcagtggtgcatgca

SEQ ID NO: 12828 - DNA, 30 bp, Artificial Sequence; identical to SEQ ID NO: 4641
  Description of Artificial Sequence: Synthetic cashew; inner sequence

SEQ ID NO: 12829 - DNA, 30 bp, Artificial Sequence; identical to SEQ ID NO: 763
  Description of Artificial Sequence: Synthetic cashew; inner sequence

SEQ ID NO: 12830 - DNA, 30 bp, Artificial Sequence; identical to SEQ ID NO: 715
  Description of Artificial Sequence: Synthetic cashew; inner sequence

SEQ ID NO: 12831 - DNA, 30 bp, Artificial Sequence; identical to SEQ ID NO: 456
  Description of Artificial Sequence: Synthetic cashew; inner sequence

SEQ ID NO: 12832 - DNA, 30 bp, Artificial Sequence; identical to SEQ ID NO: 726
  Description of Artificial Sequence: Synthetic cashew; inner sequence

SEQ ID NO: 12833 - DNA, 30 bp, Artificial Sequence; identical to SEQ ID NO: 582
  Description of Artificial Sequence: Synthetic cashew; inner sequence

SEQ ID NO: 12834 - DNA, 30 bp, Artificial Sequence; identical to SEQ ID NO: 629
  Description of Artificial Sequence: Synthetic cashew; inner sequence

SEQ ID NO: 12835 - DNA, 30 bp, Artificial Sequence
  Description of Artificial Sequence: Synthetic cashew; inner sequence
cgcgccgagtaggcatgtcttctgtgtgca

SEQ ID NO: 12836 - DNA, 30 bp, Artificial Sequence
  Description of Artificial Sequence: Synthetic cashew; inner sequence
cgcgacgagtcggcatgtcttctgtgtgca

SEQ ID NO: 12837 - DNA, 30 bp, Artificial Sequence; identical to SEQ ID NO: 892
  Description of Artificial Sequence: Synthetic cashew; inner sequence

SEQ ID NO: 12838 - DNA, 30 bp, Artificial Sequence; identical to SEQ ID NO: 4627
  Description of Artificial Sequence: Synthetic cashew; inner sequence

SEQ ID NO: 12839 - DNA, 30 bp, Artificial Sequence; identical to SEQ ID NO: 952
  Description of Artificial Sequence: Synthetic cashew; inner sequence

SEQ ID NO: 12840 - DNA, 30 bp, Artificial Sequence; identical to SEQ ID NO: 4785
  Description of Artificial Sequence: Synthetic cashew; inner sequence

SEQ ID NO: 12841 - DNA, 30 bp, Artificial Sequence; identical to SEQ ID NO: 252
  Description of Artificial Sequence: Synthetic cashew; inner sequence

SEQ ID NO: 12842 - DNA, 30 bp, Artificial Sequence; identical to SEQ ID NO: 8659
  Description of Artificial Sequence: Synthetic cashew; inner sequence

SEQ ID NO: 12843 - DNA, 30 bp, Artificial Sequence; identical to SEQ ID NO: 4470
  Description of Artificial Sequence: Synthetic cashew; inner sequence

SEQ ID NO: 12844 - DNA, 30 bp, Artificial Sequence; identical to SEQ ID NO: 4485
  Description of Artificial Sequence: Synthetic cashew; inner sequence

SEQ ID NO: 12845 - DNA, 30 bp, Artificial Sequence; identical to SEQ ID NO: 4816
  Description of Artificial Sequence: Synthetic cashew; inner sequence

SEQ ID NO: 12846 - DNA, 30 bp, Artificial Sequence; identical to SEQ ID NO: 8879
  Description of Artificial Sequence: Synthetic cashew; inner sequence

SEQ ID NO: 12847 - DNA, 30 bp, Artificial Sequence; identical to SEQ ID NO: 4925
  Description of Artificial Sequence: Synthetic cashew; inner sequence

SEQ ID NO: 12848 - DNA, 30 bp, Artificial Sequence; identical to SEQ ID NO: 242
  Description of Artificial Sequence: Synthetic cashew; inner sequence

SEQ ID NO: 12849 - DNA, 30 bp, Artificial Sequence; identical to SEQ ID NO: 600
  Description of Artificial Sequence: Synthetic cashew; inner sequence

SEQ ID NO: 12850 - DNA, 30 bp, Artificial Sequence; identical to SEQ ID NO: 4949
  Description of Artificial Sequence: Synthetic cashew; inner sequence

SEQ ID NO: 12851 - DNA, 30 bp, Artificial Sequence; identical to SEQ ID NO: 4939
  Description of Artificial Sequence: Synthetic cashew; inner sequence

SEQ ID NO: 12852 - DNA, 30 bp, Artificial Sequence; identical to SEQ ID NO: 8837
  Description of Artificial Sequence: Synthetic cashew; inner sequence

SEQ ID NO: 12853 - DNA, 30 bp, Artificial Sequence
  Description of Artificial Sequence: Synthetic cashew; inner sequence
gtcctgccatcccttcgagtgtgacaggta

SEQ ID NO: 12854 - DNA, 30 bp, Artificial Sequence; identical to SEQ ID NO: 937
  Description of Artificial Sequence: Synthetic cashew; inner sequence

SEQ ID NO: 12855 - DNA, 30 bp, Artificial Sequence; identical to SEQ ID NO: 169
  Description of Artificial Sequence: Synthetic cashew; inner sequence

SEQ ID NO: 12856 - DNA, 30 bp, Artificial Sequence; identical to SEQ ID NO: 4969
  Description of Artificial Sequence: Synthetic cashew; inner sequence

SEQ ID NO: 12857 - DNA, 30 bp, Artificial Sequence; identical to SEQ ID NO: 559
  Description of Artificial Sequence: Synthetic cashew; inner sequence

SEQ ID NO: 12858 - DNA, 30 bp, Artificial Sequence; identical to SEQ ID NO: 4638
  Description of Artificial Sequence: Synthetic cashew; inner sequence

SEQ ID NO: 12859 - DNA, 30 bp, Artificial Sequence; identical to SEQ ID NO: 4857
  Description of Artificial Sequence: Synthetic cashew; inner sequence

SEQ ID NO: 12860 - DNA, 30 bp, Artificial Sequence; identical to SEQ ID NO: 4708
  Description of Artificial Sequence: Synthetic cashew; inner sequence

SEQ ID NO: 12861 - DNA, 30 bp, Artificial Sequence; identical to SEQ ID NO: 339
  Description of Artificial Sequence: Synthetic cashew; inner sequence

SEQ ID NO: 12862 - DNA, 30 bp, Artificial Sequence; identical to SEQ ID NO: 835
  Description of Artificial Sequence: Synthetic cashew; inner sequence

SEQ ID NO: 12863 - DNA, 30 bp, Artificial Sequence; identical to SEQ ID NO: 521
  Description of Artificial Sequence: Synthetic cashew; inner sequence

SEQ ID NO: 12864 - DNA, 30 bp, Artificial Sequence
  Description of Artificial Sequence: Synthetic cashew; inner sequence
cgaccacgcgggagatggacatgtcgcatg

SEQ ID NO: 12865 - DNA, 30 bp, Artificial Sequence; identical to SEQ ID NO: 8787
  Description of Artificial Sequence: Synthetic cashew; inner sequence

SEQ ID NO: 12866 - DNA, 30 bp, Artificial Sequence
  Description of Artificial Sequence: Synthetic cashew; inner sequence
ctgcacgtagccctatcagtggtgcatgca

SEQ ID NO: 12867 - DNA, 30 bp, Artificial Sequence; identical to SEQ ID NO: 498
  Description of Artificial Sequence: Synthetic cashew; inner sequence

SEQ ID NO: 12868 - DNA, 30 bp, Artificial Sequence; identical to SEQ ID NO: 977
  Description of Artificial Sequence: Synthetic cashew; inner sequence

SEQ ID NO: 12869 - DNA, 30 bp, Artificial Sequence
  Description of Artificial Sequence: Synthetic cashew; inner sequence
cgcaccgtcgatacgtcatggacgctgaca

SEQ ID NO: 12870 - DNA, 30 bp, Artificial Sequence; identical to SEQ ID NO: 8676
  Description of Artificial Sequence: Synthetic cashew; inner sequence

SEQ ID NO: 12871 - DNA, 30 bp, Artificial Sequence; identical to SEQ ID NO: 650
  Description of Artificial Sequence: Synthetic cashew; inner sequence

SEQ ID NO: 12872 - DNA, 30 bp, Artificial Sequence
  Description of Artificial Sequence: Synthetic cashew; inner sequence
ccgaacaaccgaacgtggacgtggctgtcc

SEQ ID NO: 12873 - DNA, 30 bp, Artificial Sequence; identical to SEQ ID NO: 316
  Description of Artificial Sequence: Synthetic cashew; inner sequence

SEQ ID NO: 12874 - DNA, 30 bp, Artificial Sequence; identical to SEQ ID NO: 4837
  Description of Artificial Sequence: Synthetic cashew; inner sequence

SEQ ID NO: 12875 - DNA, 30 bp, Artificial Sequence; identical to SEQ ID NO: 4742
  Description of Artificial Sequence: Synthetic cashew; inner sequence

SEQ ID NO: 12876 - DNA, 30 bp, Artificial Sequence; identical to SEQ ID NO: 719
  Description of Artificial Sequence: Synthetic cashew; inner sequence

SEQ ID NO: 12877 - DNA, 30 bp, Artificial Sequence; identical to SEQ ID NO: 720
  Description of Artificial Sequence: Synthetic cashew; inner sequence

SEQ ID NO: 12878 - DNA, 30 bp, Artificial Sequence
  Description of Artificial Sequence: Synthetic cashew; inner sequence
cgctacgagtaggcatgtcttctgtgtgca

SEQ ID NO: 12879 - DNA, 30 bp, Artificial Sequence; identical to SEQ ID NO: 4864
  Description of Artificial Sequence: Synthetic cashew; inner sequence

SEQ ID NO: 12880 - DNA, 30 bp, Artificial Sequence; identical to SEQ ID NO: 664
  Description of Artificial Sequence: Synthetic cashew; inner sequence

SEQ ID NO: 12881 - DNA, 30 bp, Artificial Sequence; identical to SEQ ID NO: 758
  Description of Artificial Sequence: Synthetic cashew; inner sequence

SEQ ID NO: 12882 - DNA, 31 bp, Artificial Sequence; identical to SEQ ID NO: 4858
  Description of Artificial Sequence: Synthetic cashew; inner sequence

SEQ ID NO: 12883 - DNA, 30 bp, Artificial Sequence; identical to SEQ ID NO: 740
  Description of Artificial Sequence: Synthetic cashew; inner sequence

SEQ ID NO: 12884 - DNA, 30 bp, Artificial Sequence; identical to SEQ ID NO: 669
  Description of Artificial Sequence: Synthetic cashew; inner sequence

SEQ ID NO: 12885 - DNA, 28 bp, Artificial Sequence
  Description of Artificial Sequence: Synthetic cashew; inner sequence
gtgcgaccgaccctatcatgaggccatg

SEQ ID NO: 12886 - DNA, 30 bp, Artificial Sequence; identical to SEQ ID NO: 482
  Description of Artificial Sequence: Synthetic cashew; inner sequence

SEQ ID NO: 12887 - DNA, 30 bp, Artificial Sequence; identical to SEQ ID NO: 8922
  Description of Artificial Sequence: Synthetic cashew; inner sequence

SEQ ID NO: 12888 - DNA, 30 bp, Artificial Sequence; identical to SEQ ID NO: 8907
  Description of Artificial Sequence: Synthetic cashew; inner sequence

SEQ ID NO: 12889 - DNA, 30 bp, Artificial Sequence
  Description of Artificial Sequence: Synthetic cashew; inner sequence
ccgatgcgacacggaggcggtcttgcactg

SEQ ID NO: 12890 - DNA, 30 bp, Artificial Sequence; identical to SEQ ID NO: 748
  Description of Artificial Sequence: Synthetic cashew; inner sequence

SEQ ID NO: 12891 - DNA, 30 bp, Artificial Sequence; identical to SEQ ID NO: 957
  Description of Artificial Sequence: Synthetic cashew; inner sequence

SEQ ID NO: 12892 - DNA, 30 bp, Artificial Sequence
  Description of Artificial Sequence: Synthetic cashew; inner sequence
ccgcacgtagccctatcagtggttcatgca

SEQ ID NO: 12893 - DNA, 29 bp, Artificial Sequence
  Description of Artificial Sequence: Synthetic cashew; inner sequence
cgtacgacacgacagacatgcacgacgca

SEQ ID NO: 12894 - DNA, 30 bp, Artificial Sequence; identical to SEQ ID NO: 717
  Description of Artificial Sequence: Synthetic cashew; inner sequence

SEQ ID NO: 12895 - DNA, 30 bp, Artificial Sequence
  Description of Artificial Sequence: Synthetic cashew; inner sequence
cgcgacgcaagtgcatggacctcggcatgc

SEQ ID NO: 12896 - DNA, 25 bp, Artificial Sequence
  Description of Artificial Sequence: Synthetic cashew; inner sequence
ggcctgcgatggatgtgtgcgtgta

SEQ ID NO: 12897 - DNA, 30 bp, Artificial Sequence; identical to SEQ ID NO: 490
  Description of Artificial Sequence: Synthetic cashew; inner sequence

SEQ ID NO: 12898 - DNA, 30 bp, Artificial Sequence; identical to SEQ ID NO: 8855
  Description of Artificial Sequence: Synthetic cashew; inner sequence

SEQ ID NO: 12899 - DNA, 30 bp, Artificial Sequence; identical to SEQ ID NO: 670
  Description of Artificial Sequence: Synthetic cashew; inner sequence

SEQ ID NO: 12900 - DNA, 30 bp, Artificial Sequence; identical to SEQ ID NO: 788
  Description of Artificial Sequence: Synthetic cashew; inner sequence

SEQ ID NO: 12901 - DNA, 30 bp, Artificial Sequence
  Description of Artificial Sequence: Synthetic cashew; inner sequence
cgcgacgagcaggcatgtcttctgtgtgca

SEQ ID NO: 12902 - DNA, 30 bp, Artificial Sequence; identical to SEQ ID NO: 931
  Description of Artificial Sequence: Synthetic cashew; inner sequence

SEQ ID NO: 12903 - DNA, 30 bp, Artificial Sequence; identical to SEQ ID NO: 4571
  Description of Artificial Sequence: Synthetic cashew; inner sequence

SEQ ID NO: 12904 - DNA, 30 bp, Artificial Sequence; identical to SEQ ID NO: 4872
  Description of Artificial Sequence: Synthetic cashew; inner sequence

SEQ ID NO: 12905 - DNA, 30 bp, Artificial Sequence; identical to SEQ ID NO: 4976
  Description of Artificial Sequence: Synthetic cashew; inner sequence

SEQ ID NO: 12906 - DNA, 30 bp, Artificial Sequence; identical to SEQ ID NO: 996
  Description of Artificial Sequence: Synthetic cashew; inner sequence

SEQ ID NO: 12907 - DNA, 30 bp, Artificial Sequence; identical to SEQ ID NO: 705
  Description of Artificial Sequence: Synthetic cashew; inner sequence

SEQ ID NO: 12908 - DNA, 30 bp, Artificial Sequence; identical to SEQ ID NO: 434
  Description of Artificial Sequence: Synthetic cashew; inner sequence

SEQ ID NO: 12909 - DNA, 30 bp, Artificial Sequence; identical to SEQ ID NO: 8792
  Description of Artificial Sequence: Synthetic cashew; inner sequence

SEQ ID NO: 12910 - DNA, 30 bp, Artificial Sequence; identical to SEQ ID NO: 4874
  Description of Artificial Sequence: Synthetic cashew; inner sequence

SEQ ID NO: 12911 - DNA, 30 bp, Artificial Sequence; identical to SEQ ID NO: 782
  Description of Artificial Sequence: Synthetic cashew; inner sequence

SEQ ID NO: 12912 - DNA, 30 bp, Artificial Sequence
  Description of Artificial Sequence: Synthetic cashew; inner sequence
agcgtgcggcacggtccacttcgctgcatg

SEQ ID NO: 12913 - DNA, 30 bp, Artificial Sequence; identical to SEQ ID NO: 4634
  Description of Artificial Sequence: Synthetic cashew; inner sequence

SEQ ID NO: 12914 - DNA, 30 bp, Artificial Sequence
  Description of Artificial Sequence: Synthetic cashew; inner sequence
gcgtcatgggtacgtcgctgggtgtggaca

SEQ ID NO: 12915 - DNA, 30 bp, Artificial Sequence; identical to SEQ ID NO: 8826
  Description of Artificial Sequence: Synthetic cashew; inner sequence

SEQ ID NO: 12916 - DNA, 30 bp, Artificial Sequence; identical to SEQ ID NO: 4710
  Description of Artificial Sequence: Synthetic cashew; inner sequence

SEQ ID NO: 12917 - DNA, 30 bp, Artificial Sequence; identical to SEQ ID NO: 580
  Description of Artificial Sequence: Synthetic cashew; inner sequence

SEQ ID NO: 12918 - DNA, 29 bp, Artificial Sequence
  Description of Artificial Sequence: Synthetic cashew; inner sequence
cgtgctacgaggacctggaccggtgcgtc

SEQ ID NO: 12919 - DNA, 30 bp, Artificial Sequence; identical to SEQ ID NO: 444
  Description of Artificial Sequence: Synthetic cashew; inner sequence

SEQ ID NO: 12920 - DNA, 30 bp, Artificial Sequence; identical to SEQ ID NO: 8988
  Description of Artificial Sequence: Synthetic cashew; inner sequence

SEQ ID NO: 12921 - DNA, 30 bp, Artificial Sequence; identical to SEQ ID NO: 4930
  Description of Artificial Sequence: Synthetic cashew; inner sequence

SEQ ID NO: 12922 - DNA, 30 bp, Artificial Sequence
  Description of Artificial Sequence: Synthetic cashew; inner sequence
gtcatgcacgaacactatcatgacggcatg

SEQ ID NO: 12923 - DNA, 30 bp, Artificial Sequence; identical to SEQ ID NO: 962
  Description of Artificial Sequence: Synthetic cashew; inner sequence

SEQ ID NO: 12924 - DNA, 29 bp, Artificial Sequence
  Description of Artificial Sequence: Synthetic cashew; inner sequence
ggacgccgatgccctcatgtggccgtgga

SEQ ID NO: 12925 - DNA, 30 bp, Artificial Sequence; identical to SEQ ID NO: 4933
  Description of Artificial Sequence: Synthetic cashew; inner sequence

SEQ ID NO: 12926 - DNA, 30 bp, Artificial Sequence; identical to SEQ ID NO: 4807
  Description of Artificial Sequence: Synthetic cashew; inner sequence

SEQ ID NO: 12927 - DNA, 30 bp, Artificial Sequence; identical to SEQ ID NO: 842
  Description of Artificial Sequence: Synthetic cashew; inner sequence

SEQ ID NO: 12928 - DNA, 30 bp, Artificial Sequence; identical to SEQ ID NO: 4880
  Description of Artificial Sequence: Synthetic cashew; inner sequence

SEQ ID NO: 12929 - DNA, 30 bp, Artificial Sequence; identical to SEQ ID NO: 526
  Description of Artificial Sequence: Synthetic cashew; inner sequence

SEQ ID NO: 12930 - DNA, 30 bp, Artificial Sequence; identical to SEQ ID NO: 823
  Description of Artificial Sequence: Synthetic cashew; inner sequence

SEQ ID NO: 12931 - DNA, 30 bp, Artificial Sequence
  Description of Artificial Sequence: Synthetic cashew; inner sequence
gtgctgcactgccctacacgtgggaatgga

SEQ ID NO: 12932 - DNA, 30 bp, Artificial Sequence
  Description of Artificial Sequence: Synthetic cashew; inner sequence
cgcaccgagagtgatcgttgttcgcagtca

SEQ ID NO: 12933 - DNA, 30 bp, Artificial Sequence
  Description of Artificial Sequence: Synthetic cashew; inner sequence
ggcatgcgatggatgtgggccagtacgcgc

SEQ ID NO: 12934 - DNA, 30 bp, Artificial Sequence; identical to SEQ ID NO: 778
  Description of Artificial Sequence: Synthetic cashew; inner sequence

SEQ ID NO: 12935 - DNA, 30 bp, Artificial Sequence; identical to SEQ ID NO: 555
  Description of Artificial Sequence: Synthetic cashew; inner sequence

SEQ ID NO: 12936 - DNA, 30 bp, Artificial Sequence
  Description of Artificial Sequence: Synthetic cashew; inner sequence
gcacgactcgcaccttatcatgaggccatg

SEQ ID NO: 12937 - DNA, 30 bp, Artificial Sequence; identical to SEQ ID NO: 408
  Description of Artificial Sequence: Synthetic cashew; inner sequence

SEQ ID NO: 12938 - DNA, 30 bp, Artificial Sequence; identical to SEQ ID NO: 4987
  Description of Artificial Sequence: Synthetic cashew; inner sequence

SEQ ID NO: 12939 - DNA, 30 bp, Artificial Sequence
  Description of Artificial Sequence: Synthetic cashew; inner sequence
gcccgaacgaccgatcgagtggcgcatgga

SEQ ID NO: 12940 - DNA, 30 bp, Artificial Sequence; identical to SEQ ID NO: 542
  Description of Artificial Sequence: Synthetic cashew; inner sequence

SEQ ID NO: 12941 - DNA, 30 bp, Artificial Sequence; identical to SEQ ID NO: 421
  Description of Artificial Sequence: Synthetic cashew; inner sequence

SEQ ID NO: 12942 - DNA, 29 bp, Artificial Sequence
  Description of Artificial Sequence: Synthetic cashew; inner sequence
gtacgccgatgccctcatgtggccgtgga

SEQ ID NO: 12943 - DNA, 30 bp, Artificial Sequence; identical to SEQ ID NO: 913
  Description of Artificial Sequence: Synthetic cashew; inner sequence

SEQ ID NO: 12944 - DNA, 30 bp, Artificial Sequence
  Description of Artificial Sequence: Synthetic cashew; inner sequence
ggcatgcacgcccctacacgtgggtatgga

SEQ ID NO: 12945 - DNA, 30 bp, Artificial Sequence
  Description of Artificial Sequence: Synthetic cashew; inner sequence
ctgtagcgacatcaagcggtggtgtgcgtg

SEQ ID NO: 12946 - DNA, 30 bp, Artificial Sequence; identical to SEQ ID NO: 561
  Description of Artificial Sequence: Synthetic cashew; inner sequence

SEQ ID NO: 12947 - DNA, 30 bp, Artificial Sequence; identical to SEQ ID NO: 479
  Description of Artificial Sequence: Synthetic cashew; inner sequence

SEQ ID NO: 12948 - DNA, 30 bp, Artificial Sequence; identical to SEQ ID NO: 983
  Description of Artificial Sequence: Synthetic cashew; inner sequence

SEQ ID NO: 12949 - DNA, 30 bp, Artificial Sequence; identical to SEQ ID NO: 8869
  Description of Artificial Sequence: Synthetic cashew; inner sequence

SEQ ID NO: 12950 - DNA, 30 bp, Artificial Sequence; identical to SEQ ID NO: 8586
  Description of Artificial Sequence: Synthetic cashew; inner sequence

SEQ ID NO: 12951 - DNA, 30 bp, Artificial Sequence; identical to SEQ ID NO: 906
  Description of Artificial Sequence: Synthetic cashew; inner sequence

SEQ ID NO: 12952 - DNA, 30 bp, Artificial Sequence; identical to SEQ ID NO: 263
  Description of Artificial Sequence: Synthetic cashew; inner sequence

SEQ ID NO: 12953 - DNA, 30 bp, Artificial Sequence
  Description of Artificial Sequence: Synthetic cashew; inner sequence
gtcatgcacgaacactatcacggcggcatg

SEQ ID NO: 12954 - DNA, 30 bp, Artificial Sequence; identical to SEQ ID NO: 945
  Description of Artificial Sequence: Synthetic cashew; inner sequence

SEQ ID NO: 12955 - DNA, 30 bp, Artificial Sequence; identical to SEQ ID NO: 8985
  Description of Artificial Sequence: Synthetic cashew; inner sequence

SEQ ID NO: 12956 - DNA, 30 bp, Artificial Sequence; identical to SEQ ID NO: 706
  Description of Artificial Sequence: Synthetic cashew; inner sequence

SEQ ID NO: 12957 - DNA, 30 bp, Artificial Sequence; identical to SEQ ID NO: 571
  Description of Artificial Sequence: Synthetic cashew; inner sequence

SEQ ID NO: 12958 - DNA, 30 bp, Artificial Sequence
  Description of Artificial Sequence: Synthetic cashew; inner sequence
ccgcacgtagccctatcagtggtgcatgta

SEQ ID NO: 12959 - DNA, 30 bp, Artificial Sequence
  Description of Artificial Sequence: Synthetic cashew; inner sequence
gcacgtcagcacgtcctctctggcgtggta

SEQ ID NO: 12960 - DNA, 30 bp, Artificial Sequence; identical to SEQ ID NO: 598
  Description of Artificial Sequence: Synthetic cashew; inner sequence

SEQ ID NO: 12961 - DNA, 30 bp, Artificial Sequence; identical to SEQ ID NO: 8804
  Description of Artificial Sequence: Synthetic cashew; inner sequence

SEQ ID NO: 12962 - DNA, 30 bp, Artificial Sequence; identical to SEQ ID NO: 863
  Description of Artificial Sequence: Synthetic cashew; inner sequence

SEQ ID NO: 12963 - DNA, 30 bp, Artificial Sequence; identical to SEQ ID NO: 8770
  Description of Artificial Sequence: Synthetic cashew; inner sequence

SEQ ID NO: 12964 - DNA, 30 bp, Artificial Sequence; identical to SEQ ID NO: 8892
  Description of Artificial Sequence: Synthetic cashew; inner sequence

SEQ ID NO: 12965 - DNA, 30 bp, Artificial Sequence; identical to SEQ ID NO: 4810
  Description of Artificial Sequence: Synthetic cashew; inner sequence

SEQ ID NO: 12966 - DNA, 30 bp, Artificial Sequence; identical to SEQ ID NO: 4881
  Description of Artificial Sequence: Synthetic cashew; inner sequence

SEQ ID NO: 12967 - DNA, 30 bp, Artificial Sequence; identical to SEQ ID NO: 751
  Description of Artificial Sequence: Synthetic cashew; inner sequence

SEQ ID NO: 12968 - DNA, 30 bp, Artificial Sequence; identical to SEQ ID NO: 4967
  Description of Artificial Sequence: Synthetic cashew; inner sequence

SEQ ID NO: 12969 - DNA, 30 bp, Artificial Sequence; identical to SEQ ID NO: 1001
  Description of Artificial Sequence: Synthetic cashew; inner sequence

SEQ ID NO: 12970 - DNA, 30 bp, Artificial Sequence; identical to SEQ ID NO: 4667
  Description of Artificial Sequence: Synthetic cashew; inner sequence

SEQ ID NO: 12971 - DNA, 30 bp, Artificial Sequence
  Description of Artificial Sequence: Synthetic cashew; inner sequence
ggccaatgcgccccttcatgttgtcgtgga

SEQ ID NO: 12972 - DNA, 30 bp, Artificial Sequence; identical to SEQ ID NO: 4943
  Description of Artificial Sequence: Synthetic cashew; inner sequence

SEQ ID NO: 12973 - DNA, 30 bp, Artificial Sequence; identical to SEQ ID NO: 644
  Description of Artificial Sequence: Synthetic cashew; inner sequence

SEQ ID NO: 12974 - DNA, 30 bp, Artificial Sequence; identical to SEQ ID NO: 4706
  Description of Artificial Sequence: Synthetic cashew; inner sequence

SEQ ID NO: 12975 - DNA, 30 bp, Artificial Sequence; identical to SEQ ID NO: 4621
  Description of Artificial Sequence: Synthetic cashew; inner sequence

SEQ ID NO: 12976 - DNA, 30 bp, Artificial Sequence; identical to SEQ ID NO: 4867
  Description of Artificial Sequence: Synthetic cashew; inner sequence

SEQ ID NO: 12977 - DNA, 30 bp, Artificial Sequence; identical to SEQ ID NO: 472
  Description of Artificial Sequence: Synthetic cashew; inner sequence

SEQ ID NO: 12978 - DNA, 30 bp, Artificial Sequence
  Description of Artificial Sequence: Synthetic cashew; inner sequence
ggccgagctgaccgtaaaggcaggcgtgta

SEQ ID NO: 12979 - DNA, 30 bp, Artificial Sequence; identical to SEQ ID NO: 4719
  Description of Artificial Sequence: Synthetic cashew; inner sequence

SEQ ID NO: 12980 - DNA, 29 bp, Artificial Sequence
  Description of Artificial Sequence: Synthetic cashew; inner sequence
ggcatgcgatggatgtggtggtgctgtca

SEQ ID NO: 12981 - DNA, 29 bp, Artificial Sequence
  Description of Artificial Sequence: Synthetic cashew; inner sequence
gtgcgaccgaccctatcaagtgcagcatg

SEQ ID NO: 12982 - DNA, 30 bp, Artificial Sequence; identical to SEQ ID NO: 601
  Description of Artificial Sequence: Synthetic cashew; inner sequence

SEQ ID NO: 12983 - DNA, 30 bp, Artificial Sequence; identical to SEQ ID NO: 4469
  Description of Artificial Sequence: Synthetic cashew; inner sequence

SEQ ID NO: 12984 - DNA, 30 bp, Artificial Sequence; identical to SEQ ID NO: 8962
  Description of Artificial Sequence: Synthetic cashew; inner sequence

SEQ ID NO: 12985 - DNA, 30 bp, Artificial Sequence
  Description of Artificial Sequence: Synthetic cashew; inner sequence
gcacgactctcaccctatcatgaggccatg

SEQ ID NO: 12986 - DNA, 30 bp, Artificial Sequence
  Description of Artificial Sequence: Synthetic cashew; inner sequence
gtacacagcgcaccctatcatgaggccatg

SEQ ID NO: 12987 - DNA, 30 bp, Artificial Sequence; identical to SEQ ID NO: 4631
  Description of Artificial Sequence: Synthetic cashew; inner sequence

SEQ ID NO: 12988 - DNA, 30 bp, Artificial Sequence; identical to SEQ ID NO: 497
  Description of Artificial Sequence: Synthetic cashew; inner sequence

SEQ ID NO: 12989 - DNA, 30 bp, Artificial Sequence; identical to SEQ ID NO: 4743
  Description of Artificial Sequence: Synthetic cashew; inner sequence

SEQ ID NO: 12990 - DNA, 30 bp, Artificial Sequence; identical to SEQ ID NO: 4381
  Description of Artificial Sequence: Synthetic cashew; inner sequence

SEQ ID NO: 12991 - DNA, 30 bp, Artificial Sequence; identical to SEQ ID NO: 688
  Description of Artificial Sequence: Synthetic cashew; inner sequence

SEQ ID NO: 12992 - DNA, 30 bp, Artificial Sequence
  Description of Artificial Sequence: Synthetic cashew; inner sequence
ccatcgcgtcactatcatgcgtgtcacgta

SEQ ID NO: 12993 - DNA, 30 bp, Artificial Sequence; identical to SEQ ID NO: 4591
  Description of Artificial Sequence: Synthetic cashew; inner sequence

SEQ ID NO: 12994 - DNA, 30 bp, Artificial Sequence; identical to SEQ ID NO: 677
  Description of Artificial Sequence: Synthetic cashew; inner sequence

SEQ ID NO: 12995 - DNA, 30 bp, Artificial Sequence; identical to SEQ ID NO: 307
  Description of Artificial Sequence: Synthetic cashew; inner sequence

SEQ ID NO: 12996 - DNA, 30 bp, Artificial Sequence
  Description of Artificial Sequence: Synthetic cashew; inner sequence
cgcaccctcgatacgtcatgcacgctgaca

SEQ ID NO: 12997 - DNA, 30 bp, Artificial Sequence
  Description of Artificial Sequence: Synthetic cashew; inner sequence
ggccacagcgtacctcaacgtggacgcgca

SEQ ID NO: 12998 - DNA, 30 bp, Artificial Sequence
  Description of Artificial Sequence: Synthetic cashew; inner sequence
gtacgcaaacggaccgatcggtggtgcgta

SEQ ID NO: 12999 - DNA, 30 bp, Artificial Sequence
  Description of Artificial Sequence: Synthetic cashew; inner sequence
gcgaccgcgacatacgatctgctctgcgtc

SEQ ID NO: 13000 - DNA, 30 bp, Artificial Sequence; identical to SEQ ID NO: 547
  Description of Artificial Sequence: Synthetic cashew; inner sequence

SEQ ID NO: 13001 - DNA, 30 bp, Artificial Sequence; identical to SEQ ID NO: 335
  Description of Artificial Sequence: Synthetic cashew; inner sequence

SEQ ID NO: 13002 - DNA, 30 bp, Artificial Sequence
  Description of Artificial Sequence: Synthetic cashew; inner sequence
gtcatgccatcccttcgagagtgacaggta

SEQ ID NO: 13003 - DNA, 53 bp, Artificial Sequence; identical to SEQ ID NO: 1004
  Description of Artificial Sequence: Synthetic cashew; 5' sequence and inner sequence

SEQ ID NO: 13004 - DNA, 53 bp, Artificial Sequence; identical to SEQ ID NO: 1003
  Description of Artificial Sequence: Synthetic cashew; 5' sequence and inner sequence

SEQ ID NO: 13005 - DNA, 53 bp, Artificial Sequence; identical to SEQ ID NO: 1008
  Description of Artificial Sequence: Synthetic cashew; 5' sequence and inner sequence

SEQ ID NO: 13006 - DNA, 53 bp, Artificial Sequence; identical to SEQ ID NO: 1006
  Description of Artificial Sequence: Synthetic cashew; 5' sequence and inner sequence

SEQ ID NO: 13007 - DNA, 53 bp, Artificial Sequence; identical to SEQ ID NO: 1007
  Description of Artificial Sequence: Synthetic cashew; 5' sequence and inner sequence

SEQ ID NO: 13008 - DNA, 53 bp, Artificial Sequence; identical to SEQ ID NO: 1005
  Description of Artificial Sequence: Synthetic cashew; 5' sequence and inner sequence

SEQ ID NO: 13009 - DNA, 53 bp, Artificial Sequence; identical to SEQ ID NO: 1009
  Description of Artificial Sequence: Synthetic cashew; 5' sequence and inner sequence

SEQ ID NO: 13010 - DNA, 53 bp, Artificial Sequence; identical to SEQ ID NO: 1012
  Description of Artificial Sequence: Synthetic cashew; 5' sequence and inner sequence

SEQ ID NO: 13011 - DNA, 53 bp, Artificial Sequence; identical to SEQ ID NO: 1060
  Description of Artificial Sequence: Synthetic cashew; 5' sequence and inner sequence

SEQ ID NO: 13012 - DNA, 53 bp, Artificial Sequence; identical to SEQ ID NO: 1010
  Description of Artificial Sequence: Synthetic cashew; 5' sequence and inner sequence

SEQ ID NO: 13013 - DNA, 53 bp, Artificial Sequence; identical to SEQ ID NO: 1016
  Description of Artificial Sequence: Synthetic cashew; 5' sequence and inner sequence

SEQ ID NO: 13014 - DNA, 53 bp, Artificial Sequence; identical to SEQ ID NO: 1023
  Description of Artificial Sequence: Synthetic cashew; 5' sequence and inner sequence

SEQ ID NO: 13015 - DNA, 53 bp, Artificial Sequence; identical to SEQ ID NO: 1011
  Description of Artificial Sequence: Synthetic cashew; 5' sequence and inner sequence

SEQ ID NO: 13016 - DNA, 53 bp, Artificial Sequence; identical to SEQ ID NO: 1014
  Description of Artificial Sequence: Synthetic cashew; 5' sequence and inner sequence

SEQ ID NO: 13017 - DNA, 53 bp, Artificial Sequence; identical to SEQ ID NO: 1018
  Description of Artificial Sequence: Synthetic cashew; 5' sequence and inner sequence

SEQ ID NO: 13018 - DNA, 52 bp, Artificial Sequence; identical to SEQ ID NO: 1193
  Description of Artificial Sequence: Synthetic cashew; 5' sequence and inner sequence

SEQ ID NO: 13019 - DNA, 53 bp, Artificial Sequence; identical to SEQ ID NO: 1037
  Description of Artificial Sequence: Synthetic cashew; 5' sequence and inner sequence

SEQ ID NO: 13020 - DNA, 53 bp, Artificial Sequence; identical to SEQ ID NO: 1013
  Description of Artificial Sequence: Synthetic cashew; 5' sequence and inner sequence

SEQ ID NO: 13021 - DNA, 53 bp, Artificial Sequence; identical to SEQ ID NO: 1017
  Description of Artificial Sequence: Synthetic cashew; 5' sequence and inner sequence

SEQ ID NO: 13022 - DNA, 53 bp, Artificial Sequence; identical to SEQ ID NO: 1028
  Description of Artificial Sequence: Synthetic cashew; 5' sequence and inner sequence

SEQ ID NO: 13023 - DNA, 53 bp, Artificial Sequence; identical to SEQ ID NO: 1022
  Description of Artificial Sequence: Synthetic cashew; 5' sequence and inner sequence

SEQ ID NO: 13024 - DNA, 53 bp, Artificial Sequence; identical to SEQ ID NO: 1020
  Description of Artificial Sequence: Synthetic cashew; 5' sequence and inner sequence

SEQ ID NO: 13025 - DNA, 53 bp, Artificial Sequence; identical to SEQ ID NO: 1030
  Description of Artificial Sequence: Synthetic cashew; 5' sequence and inner sequence

SEQ ID NO: 13026 - DNA, 53 bp, Artificial Sequence; identical to SEQ ID NO: 1045
  Description of Artificial Sequence: Synthetic cashew; 5' sequence and inner sequence

SEQ ID NO: 13027 - DNA, 53 bp, Artificial Sequence; identical to SEQ ID NO: 1034
  Description of Artificial Sequence: Synthetic cashew; 5' sequence and inner sequence

SEQ ID NO: 13028 - DNA, 53 bp, Artificial Sequence; identical to SEQ ID NO: 1015
  Description of Artificial Sequence: Synthetic cashew; 5' sequence and inner sequence

SEQ ID NO: 13029 - DNA, 53 bp, Artificial Sequence; identical to SEQ ID NO: 1046
  Description of Artificial Sequence: Synthetic cashew; 5' sequence and inner sequence

SEQ ID NO: 13030 - DNA, 53 bp, Artificial Sequence; identical to SEQ ID NO: 1049
  Description of Artificial Sequence: Synthetic cashew; 5' sequence and inner sequence

SEQ ID NO: 13031 - DNA, 53 bp, Artificial Sequence; identical to SEQ ID NO: 1021
  Description of Artificial Sequence: Synthetic cashew; 5' sequence and inner sequence

SEQ ID NO: 13032 - DNA, 53 bp, Artificial Sequence; identical to SEQ ID NO: 1033
  Description of Artificial Sequence: Synthetic cashew; 5' sequence and inner sequence

SEQ ID NO: 13033 - DNA, 53 bp, Artificial Sequence; identical to SEQ ID NO: 1032
  Description of Artificial Sequence: Synthetic cashew; 5' sequence and inner sequence

SEQ ID NO: 13034 - DNA, 53 bp, Artificial Sequence; identical to SEQ ID NO: 1055
  Description of Artificial Sequence: Synthetic cashew; 5' sequence and inner sequence

SEQ ID NO: 13035 - DNA, 53 bp, Artificial Sequence; identical to SEQ ID NO: 1029
  Description of Artificial Sequence: Synthetic cashew; 5' sequence and inner sequence

SEQ ID NO: 13036 - DNA, 53 bp, Artificial Sequence; identical to SEQ ID NO: 1041
  Description of Artificial Sequence: Synthetic cashew; 5' sequence and inner sequence

SEQ ID NO: 13037 - DNA, 53 bp, Artificial Sequence; identical to SEQ ID NO: 1024
  Description of Artificial Sequence: Synthetic cashew; 5' sequence and inner sequence

SEQ ID NO: 13038 - DNA, 52 bp, Artificial Sequence; identical to SEQ ID NO: 1070
  Description of Artificial Sequence: Synthetic cashew; 5' sequence and inner sequence

SEQ ID NO: 13039 - DNA, 53 bp, Artificial Sequence; identical to SEQ ID NO: 1038
  Description of Artificial Sequence: Synthetic cashew; 5' sequence and inner sequence

SEQ ID NO: 13040 - DNA, 53 bp, Artificial Sequence; identical to SEQ ID NO: 1040
  Description of Artificial Sequence: Synthetic cashew; 5' sequence and inner sequence

SEQ ID NO: 13041 - DNA, 53 bp, Artificial Sequence; identical to SEQ ID NO: 1131
  Description of Artificial Sequence: Synthetic cashew; 5' sequence and inner sequence

SEQ ID NO: 13042 - DNA, 53 bp, Artificial Sequence; identical to SEQ ID NO: 1077
  Description of Artificial Sequence: Synthetic cashew; 5' sequence and inner sequence

SEQ ID NO: 13043 - DNA, 53 bp, Artificial Sequence; identical to SEQ ID NO: 1044
  Description of Artificial Sequence: Synthetic cashew; 5' sequence and inner sequence

SEQ ID NO: 13044 - DNA, 53 bp, Artificial Sequence; identical to SEQ ID NO: 1019
  Description of Artificial Sequence: Synthetic cashew; 5' sequence and inner sequence

SEQ ID NO: 13045 - DNA, 53 bp, Artificial Sequence; identical to SEQ ID NO: 1039
  Description of Artificial Sequence: Synthetic cashew; 5' sequence and inner sequence

SEQ ID NO: 13046 - DNA, 53 bp, Artificial Sequence; identical to SEQ ID NO: 1088
  Description of Artificial Sequence: Synthetic cashew; 5' sequence and inner sequence

SEQ ID NO: 13047 - DNA, 53 bp, Artificial Sequence; identical to SEQ ID NO: 1054
  Description of Artificial Sequence: Synthetic cashew; 5' sequence and inner sequence

SEQ ID NO: 13048 - DNA, 53 bp, Artificial Sequence; identical to SEQ ID NO: 1048
  Description of Artificial Sequence: Synthetic cashew; 5' sequence and inner sequence

SEQ ID NO: 13049 - DNA, 53 bp, Artificial Sequence; identical to SEQ ID NO: 1082
  Description of Artificial Sequence: Synthetic cashew; 5' sequence and inner sequence

SEQ ID NO: 13050 - DNA, 53 bp, Artificial Sequence; identical to SEQ ID NO: 1074
  Description of Artificial Sequence: Synthetic cashew; 5' sequence and inner sequence

SEQ ID NO: 13051 - DNA, 53 bp, Artificial Sequence; identical to SEQ ID NO: 1035
  Description of Artificial Sequence: Synthetic cashew; 5' sequence and inner sequence

SEQ ID NO: 13052 - DNA, 53 bp, Artificial Sequence; identical to SEQ ID NO: 1064
  Description of Artificial Sequence: Synthetic cashew; 5' sequence and inner sequence

SEQ ID NO: 13053 - DNA, 53 bp, Artificial Sequence; identical to SEQ ID NO: 1050
  Description of Artificial Sequence: Synthetic cashew; 5' sequence and inner sequence

SEQ ID NO: 13054 - DNA, 53 bp, Artificial Sequence; identical to SEQ ID NO: 1066
  Description of Artificial Sequence: Synthetic cashew; 5' sequence and inner sequence

SEQ ID NO: 13055 - DNA, 53 bp, Artificial Sequence; identical to SEQ ID NO: 1061
  Description of Artificial Sequence: Synthetic cashew; 5' sequence and inner sequence

SEQ ID NO: 13056 - DNA, 53 bp, Artificial Sequence; identical to SEQ ID NO: 1031
  Description of Artificial Sequence: Synthetic cashew; 5' sequence and inner sequence

SEQ ID NO: 13057 - DNA, 53 bp, Artificial Sequence; identical to SEQ ID NO: 1052
  Description of Artificial Sequence: Synthetic cashew; 5' sequence and inner sequence

SEQ ID NO: 13058 - DNA, 53 bp, Artificial Sequence; identical to SEQ ID NO: 1117
  Description of Artificial Sequence: Synthetic cashew; 5' sequence and inner sequence

SEQ ID NO: 13059 - DNA, 53 bp, Artificial Sequence; identical to SEQ ID NO: 1043
  Description of Artificial Sequence: Synthetic cashew; 5' sequence and inner sequence

SEQ ID NO: 13060 - DNA, 53 bp, Artificial Sequence; identical to SEQ ID NO: 1053
  Description of Artificial Sequence: Synthetic cashew; 5' sequence and inner sequence

SEQ ID NO: 13061 - DNA, 53 bp, Artificial Sequence; identical to SEQ ID NO: 1051
  Description of Artificial Sequence: Synthetic cashew; 5' sequence and inner sequence

SEQ ID NO: 13062 - DNA, 53 bp, Artificial Sequence; identical to SEQ ID NO: 1076
  Description of Artificial Sequence: Synthetic cashew; 5' sequence and inner sequence

SEQ ID NO: 13063 - DNA, 53 bp, Artificial Sequence; identical to SEQ ID NO: 1063
  Description of Artificial Sequence: Synthetic cashew; 5' sequence and inner sequence

SEQ ID NO: 13064 - DNA, 53 bp, Artificial Sequence; identical to SEQ ID NO: 1133
  Description of Artificial Sequence: Synthetic cashew; 5' sequence and inner sequence

SEQ ID NO: 13065 - DNA, 53 bp, Artificial Sequence; identical to SEQ ID NO: 1058
  Description of Artificial Sequence: Synthetic cashew; 5' sequence and inner sequence

SEQ ID NO: 13066 - DNA, 53 bp, Artificial Sequence; identical to SEQ ID NO: 1112
  Description of Artificial Sequence: Synthetic cashew; 5' sequence and inner sequence

SEQ ID NO: 13067 - DNA, 53 bp, Artificial Sequence; identical to SEQ ID NO: 1042
  Description of Artificial Sequence: Synthetic cashew; 5' sequence and inner sequence

SEQ ID NO: 13068 - DNA, 53 bp, Artificial Sequence; identical to SEQ ID NO: 1129
  Description of Artificial Sequence: Synthetic cashew; 5' sequence and inner sequence

SEQ ID NO: 13069 - DNA, 53 bp, Artificial Sequence; identical to SEQ ID NO: 1081
  Description of Artificial Sequence: Synthetic cashew; 5' sequence and inner sequence

SEQ ID NO: 13070 - DNA, 53 bp, Artificial Sequence; identical to SEQ ID NO: 1080
  Description of Artificial Sequence: Synthetic cashew; 5' sequence and inner sequence

SEQ ID NO: 13071 - DNA, 53 bp, Artificial Sequence; identical to SEQ ID NO: 1183
  Description of Artificial Sequence: Synthetic cashew; 5' sequence and inner sequence

SEQ ID NO: 13072 - DNA, 53 bp, Artificial Sequence; identical to SEQ ID NO: 1026
  Description of Artificial Sequence: Synthetic cashew; 5' sequence and inner sequence

SEQ ID NO: 13073 - DNA, 53 bp, Artificial Sequence; identical to SEQ ID NO: 1120
  Description of Artificial Sequence: Synthetic cashew; 5' sequence and inner sequence

SEQ ID NO: 13074 - DNA, 53 bp, Artificial Sequence; identical to SEQ ID NO: 1093
  Description of Artificial Sequence: Synthetic cashew; 5' sequence and inner sequence

SEQ ID NO: 13075 - DNA, 53 bp, Artificial Sequence; identical to SEQ ID NO: 1036
  Description of Artificial Sequence: Synthetic cashew; 5' sequence and inner sequence

SEQ ID NO: 13076 - DNA, 53 bp, Artificial Sequence; identical to SEQ ID NO: 1057
  Description of Artificial Sequence: Synthetic cashew; 5' sequence and inner sequence

SEQ ID NO: 13077 - DNA, 53 bp, Artificial Sequence; identical to SEQ ID NO: 1065
  Description of Artificial Sequence: Synthetic cashew; 5' sequence and inner sequence

SEQ ID NO: 13078 - DNA, 53 bp, Artificial Sequence; identical to SEQ ID NO: 1059
  Description of Artificial Sequence: Synthetic cashew; 5' sequence and inner sequence

SEQ ID NO: 13079 - DNA, 53 bp, Artificial Sequence; identical to SEQ ID NO: 1126
  Description of Artificial Sequence: Synthetic cashew; 5' sequence and inner sequence

SEQ ID NO: 13080 - DNA, 53 bp, Artificial Sequence; identical to SEQ ID NO: 1025
  Description of Artificial Sequence: Synthetic cashew; 5' sequence and inner sequence

SEQ ID NO: 13081 - DNA, 53 bp, Artificial Sequence; identical to SEQ ID NO: 1047
  Description of Artificial Sequence: Synthetic cashew; 5' sequence and inner sequence

SEQ ID NO: 13082 - DNA, 53 bp, Artificial Sequence; identical to SEQ ID NO: 1097
  Description of Artificial Sequence: Synthetic cashew; 5' sequence and inner sequence

SEQ ID NO: 13083 - DNA, 53 bp, Artificial Sequence; identical to SEQ ID NO: 1211
  Description of Artificial Sequence: Synthetic cashew; 5' sequence and inner sequence

SEQ ID NO: 13084 - DNA, 53 bp, Artificial Sequence; identical to SEQ ID NO: 1136
  Description of Artificial Sequence: Synthetic cashew; 5' sequence and inner sequence

SEQ ID NO: 13085 - DNA, 53 bp, Artificial Sequence; identical to SEQ ID NO: 1092
  Description of Artificial Sequence: Synthetic cashew; 5' sequence and inner sequence

SEQ ID NO: 13086 - DNA, 53 bp, Artificial Sequence; identical to SEQ ID NO: 1311
  Description of Artificial Sequence: Synthetic cashew; 5' sequence and inner sequence

SEQ ID NO: 13087 - DNA, 53 bp, Artificial Sequence; identical to SEQ ID NO: 1122
  Description of Artificial Sequence: Synthetic cashew; 5' sequence and inner sequence

SEQ ID NO: 13088 - DNA, 53 bp, Artificial Sequence; identical to SEQ ID NO: 1144
  Description of Artificial Sequence: Synthetic cashew; 5' sequence and inner sequence

SEQ ID NO: 13089 - DNA, 53 bp, Artificial Sequence; identical to SEQ ID NO: 1257
  Description of Artificial Sequence: Synthetic cashew; 5' sequence and inner sequence

SEQ ID NO: 13090 - DNA, 53 bp, Artificial Sequence; identical to SEQ ID NO: 1154
  Description of Artificial Sequence: Synthetic cashew; 5' sequence and inner sequence

SEQ ID NO: 13091 - DNA, 53 bp, Artificial Sequence; identical to SEQ ID NO: 1185
  Description of Artificial Sequence: Synthetic cashew; 5' sequence and inner sequence

SEQ ID NO: 13092 - DNA, 53 bp, Artificial Sequence; identical to SEQ ID NO: 1027
  Description of Artificial Sequence: Synthetic cashew; 5' sequence and inner sequence

SEQ ID NO: 13093 - DNA, 53 bp, Artificial Sequence; identical to SEQ ID NO: 1207
  Description of Artificial Sequence: Synthetic cashew; 5' sequence and inner sequence

SEQ ID NO: 13094 - DNA, 53 bp, Artificial Sequence; identical to SEQ ID NO: 1142
  Description of Artificial Sequence: Synthetic cashew; 5' sequence and inner sequence

SEQ ID NO: 13095 - DNA, 53 bp, Artificial Sequence; identical to SEQ ID NO: 1287
  Description of Artificial Sequence: Synthetic cashew; 5' sequence and inner sequence

SEQ ID NO: 13096 - DNA, 53 bp, Artificial Sequence; identical to SEQ ID NO: 1067
  Description of Artificial Sequence: Synthetic cashew; 5' sequence and inner sequence

SEQ ID NO: 13097 - DNA, 53 bp, Artificial Sequence; identical to SEQ ID NO: 1100
  Description of Artificial Sequence: Synthetic cashew; 5' sequence and inner sequence

SEQ ID NO: 13098 - DNA, 53 bp, Artificial Sequence; identical to SEQ ID NO: 1096
  Description of Artificial Sequence: Synthetic cashew; 5' sequence and inner sequence

SEQ ID NO: 13099 - DNA, 53 bp, Artificial Sequence; identical to SEQ ID NO: 1094
  Description of Artificial Sequence: Synthetic cashew; 5' sequence and inner sequence

SEQ ID NO: 13100 - DNA, 53 bp, Artificial Sequence; identical to SEQ ID NO: 1078
  Description of Artificial Sequence: Synthetic cashew; 5' sequence and inner sequence

SEQ ID NO: 13101 - DNA, 53 bp, Artificial Sequence; identical to SEQ ID NO: 1099
  Description of Artificial Sequence: Synthetic cashew; 5' sequence and inner sequence

SEQ ID NO: 13102 - DNA, 53 bp, Artificial Sequence; identical to SEQ ID NO: 1151
  Description of Artificial Sequence: Synthetic cashew; 5' sequence and inner sequence

SEQ ID NO: 13103 - DNA, 53 bp, Artificial Sequence; identical to SEQ ID NO: 1091
  Description of Artificial Sequence: Synthetic cashew; 5' sequence and inner sequence

SEQ ID NO: 13104 - DNA, 53 bp, Artificial Sequence; identical to SEQ ID NO: 1083
  Description of Artificial Sequence: Synthetic cashew; 5' sequence and inner sequence

SEQ ID NO: 13105 - DNA, 53 bp, Artificial Sequence; identical to SEQ ID NO: 1068
  Description of Artificial Sequence: Synthetic cashew; 5' sequence and inner sequence

SEQ ID NO: 13106 - DNA, 53 bp, Artificial Sequence; identical to SEQ ID NO: 1430
  Description of Artificial Sequence: Synthetic cashew; 5' sequence and inner sequence

SEQ ID NO: 13107 - DNA, 53 bp, Artificial Sequence; identical to SEQ ID NO: 1196
  Description of Artificial Sequence: Synthetic cashew; 5' sequence and inner sequence

SEQ ID NO: 13108 - DNA, 53 bp, Artificial Sequence; identical to SEQ ID NO: 1056
  Description of Artificial Sequence: Synthetic cashew; 5' sequence and inner sequence

SEQ ID NO: 13109 - DNA, 53 bp, Artificial Sequence; identical to SEQ ID NO: 1567
  Description of Artificial Sequence: Synthetic cashew; 5' sequence and inner sequence

SEQ ID NO: 13110 - DNA, 53 bp, Artificial Sequence; identical to SEQ ID NO: 1208
  Description of Artificial Sequence: Synthetic cashew; 5' sequence and inner sequence

SEQ ID NO: 13111 - DNA, 53 bp, Artificial Sequence; identical to SEQ ID NO: 1468
  Description of Artificial Sequence: Synthetic cashew; 5' sequence and inner sequence

SEQ ID NO: 13112 - DNA, 53 bp, Artificial Sequence; identical to SEQ ID NO: 1264
  Description of Artificial Sequence: Synthetic cashew; 5' sequence and inner sequence

SEQ ID NO: 13113 - DNA, 53 bp, Artificial Sequence; identical to SEQ ID NO: 1127
  Description of Artificial Sequence: Synthetic cashew; 5' sequence and inner sequence

SEQ ID NO: 13114 - DNA, 53 bp, Artificial Sequence; identical to SEQ ID NO: 1118
  Description of Artificial Sequence: Synthetic cashew; 5' sequence and inner sequence

SEQ ID NO: 13115 - DNA, 53 bp, Artificial Sequence; identical to SEQ ID NO: 1692
  Description of Artificial Sequence: Synthetic cashew; 5' sequence and inner sequence

SEQ ID NO: 13116 - DNA, 53 bp, Artificial Sequence; identical to SEQ ID NO: 1147
  Description of Artificial Sequence: Synthetic cashew; 5' sequence and inner sequence

SEQ ID NO: 13117 - DNA, 53 bp, Artificial Sequence; identical to SEQ ID NO: 1079
  Description of Artificial Sequence: Synthetic cashew; 5' sequence and inner sequence

SEQ ID NO: 13118 - DNA, 53 bp, Artificial Sequence; identical to SEQ ID NO: 1233
  Description of Artificial Sequence: Synthetic cashew; 5' sequence and inner sequence

SEQ ID NO: 13119 - DNA, 53 bp, Artificial Sequence; identical to SEQ ID NO: 1095
  Description of Artificial Sequence: Synthetic cashew; 5' sequence and inner sequence

SEQ ID NO: 13120 - DNA, 53 bp, Artificial Sequence; identical to SEQ ID NO: 1288
  Description of Artificial Sequence: Synthetic cashew; 5' sequence and inner sequence

SEQ ID NO: 13121 - DNA, 53 bp, Artificial Sequence; identical to SEQ ID NO: 1237
  Description of Artificial Sequence: Synthetic cashew; 5' sequence and inner sequence

SEQ ID NO: 13122 - DNA, 53 bp, Artificial Sequence; identical to SEQ ID NO: 1179
  Description of Artificial Sequence: Synthetic cashew; 5' sequence and inner sequence

SEQ ID NO: 13123 - DNA, 53 bp, Artificial Sequence; identical to SEQ ID NO: 1146
  Description of Artificial Sequence: Synthetic cashew; 5' sequence and inner sequence

SEQ ID NO: 13124 - DNA, 53 bp, Artificial Sequence; identical to SEQ ID NO: 1230
  Description of Artificial Sequence: Synthetic cashew; 5' sequence and inner sequence

SEQ ID NO: 13125 - DNA, 53 bp, Artificial Sequence; identical to SEQ ID NO: 1203
  Description of Artificial Sequence: Synthetic cashew; 5' sequence and inner sequence

SEQ ID NO: 13126 - DNA, 53 bp, Artificial Sequence; identical to SEQ ID NO: 1247
  Description of Artificial Sequence: Synthetic cashew; 5' sequence and inner sequence

SEQ ID NO: 13127 - DNA, 53 bp, Artificial Sequence; identical to SEQ ID NO: 1194
  Description of Artificial Sequence: Synthetic cashew; 5' sequence and inner sequence

SEQ ID NO: 13128 - DNA, 53 bp, Artificial Sequence; identical to SEQ ID NO: 1164
  Description of Artificial Sequence: Synthetic cashew; 5' sequence and inner sequence

SEQ ID NO: 13129 - DNA, 53 bp, Artificial Sequence; identical to SEQ ID NO: 1270
  Description of Artificial Sequence: Synthetic cashew; 5' sequence and inner sequence

SEQ ID NO: 13130 - DNA, 53 bp, Artificial Sequence; identical to SEQ ID NO: 1103
  Description of Artificial Sequence: Synthetic cashew; 5' sequence and inner sequence

SEQ ID NO: 13131 - DNA, 53 bp, Artificial Sequence; identical to SEQ ID NO: 1470
  Description of Artificial Sequence: Synthetic cashew; 5' sequence and inner sequence

SEQ ID NO: 13132 - DNA, 53 bp, Artificial Sequence; identical to SEQ ID NO: 1360
  Description of Artificial Sequence: Synthetic cashew; 5' sequence and inner sequence

SEQ ID NO: 13133 - DNA, 53 bp, Artificial Sequence; identical to SEQ ID NO: 1245
  Description of Artificial Sequence: Synthetic cashew; 5' sequence and inner sequence

SEQ ID NO: 13134 - DNA, 53 bp, Artificial Sequence; identical to SEQ ID NO: 1161
  Description of Artificial Sequence: Synthetic cashew; 5' sequence and inner sequence

SEQ ID NO: 13135 - DNA, 53 bp, Artificial Sequence; identical to SEQ ID NO: 1285
  Description of Artificial Sequence: Synthetic cashew; 5' sequence and inner sequence

SEQ ID NO: 13136 - DNA, 53 bp, Artificial Sequence; identical to SEQ ID NO: 1171
  Description of Artificial Sequence: Synthetic cashew; 5' sequence and inner sequence

SEQ ID NO: 13137 - DNA, 53 bp, Artificial Sequence; identical to SEQ ID NO: 1168
  Description of Artificial Sequence: Synthetic cashew; 5' sequence and inner sequence

SEQ ID NO: 13138 - DNA, 53 bp, Artificial Sequence; identical to SEQ ID NO: 1312
  Description of Artificial Sequence: Synthetic cashew; 5' sequence and inner sequence

SEQ ID NO: 13139 - DNA, 53 bp, Artificial Sequence; identical to SEQ ID NO: 1111
  Description of Artificial Sequence: Synthetic cashew; 5' sequence and inner sequence

SEQ ID NO: 13140 - DNA, 53 bp, Artificial Sequence; identical to SEQ ID NO: 1145
  Description of Artificial Sequence: Synthetic cashew; 5' sequence and inner sequence

SEQ ID NO: 13141 - DNA, 54 bp, Artificial Sequence; identical to SEQ ID NO: 1150
  Description of Artificial Sequence: Synthetic cashew; 5' sequence and inner sequence

SEQ ID NO: 13142 - DNA, 51 bp, Artificial Sequence; identical to SEQ ID NO: 1148
  Description of Artificial Sequence: Synthetic cashew; 5' sequence and inner sequence

SEQ ID NO: 13143 - DNA, 53 bp, Artificial Sequence; identical to SEQ ID NO: 1240
  Description of Artificial Sequence: Synthetic cashew; 5' sequence and inner sequence

SEQ ID NO: 13144 - DNA, 53 bp, Artificial Sequence; identical to SEQ ID NO: 1107
  Description of Artificial Sequence: Synthetic cashew; 5' sequence and inner sequence

SEQ ID NO: 13145 - DNA, 53 bp, Artificial Sequence; identical to SEQ ID NO: 1125
  Description of Artificial Sequence: Synthetic cashew; 5' sequence and inner sequence

SEQ ID NO: 13146 - DNA, 53 bp, Artificial Sequence; identical to SEQ ID NO: 1215
  Description of Artificial Sequence: Synthetic cashew; 5' sequence and inner sequence

SEQ ID NO: 13147 - DNA, 53 bp, Artificial Sequence; identical to SEQ ID NO: 1115
  Description of Artificial Sequence: Synthetic cashew; 5' sequence and inner sequence

SEQ ID NO: 13148 - DNA, 53 bp, Artificial Sequence; identical to SEQ ID NO: 1253
  Description of Artificial Sequence: Synthetic cashew; 5' sequence and inner sequence

SEQ ID NO: 13149 - DNA, 53 bp, Artificial Sequence; identical to SEQ ID NO: 1113
  Description of Artificial Sequence: Synthetic cashew; 5' sequence and inner sequence

SEQ ID NO: 13150 - DNA, 53 bp, Artificial Sequence; identical to SEQ ID NO: 1163
  Description of Artificial Sequence: Synthetic cashew; 5' sequence and inner sequence

SEQ ID NO: 13151 - DNA, 53 bp, Artificial Sequence; identical to SEQ ID NO: 1155
  Description of Artificial Sequence: Synthetic cashew; 5' sequence and inner sequence

SEQ ID NO: 13152 - DNA, 53 bp, Artificial Sequence; identical to SEQ ID NO: 1188
  Description of Artificial Sequence: Synthetic cashew; 5' sequence and inner sequence

SEQ ID NO: 13153 - DNA, 53 bp, Artificial Sequence; identical to SEQ ID NO: 1108
  Description of Artificial Sequence: Synthetic cashew; 5' sequence and inner sequence

SEQ ID NO: 13154 - DNA, 53 bp, Artificial Sequence; identical to SEQ ID NO: 1282
  Description of Artificial Sequence: Synthetic cashew; 5' sequence and inner sequence

SEQ ID NO: 13155 - DNA, 53 bp, Artificial Sequence; identical to SEQ ID NO: 1354
  Description of Artificial Sequence: Synthetic cashew; 5' sequence and inner sequence

SEQ ID NO: 13156 - DNA, 53 bp, Artificial Sequence; identical to SEQ ID NO: 1071
  Description of Artificial Sequence: Synthetic cashew; 5' sequence and inner sequence

SEQ ID NO: 13157 - DNA, 53 bp, Artificial Sequence; identical to SEQ ID NO: 1293
  Description of Artificial Sequence: Synthetic cashew; 5' sequence and inner sequence

SEQ ID NO: 13158 - DNA, 53 bp, Artificial Sequence; identical to SEQ ID NO: 1355
  Description of Artificial Sequence: Synthetic cashew; 5' sequence and inner sequence

SEQ ID NO: 13159 - DNA, 53 bp, Artificial Sequence; identical to SEQ ID NO: 1166
  Description of Artificial Sequence: Synthetic cashew; 5' sequence and inner sequence

SEQ ID NO: 13160 - DNA, 53 bp, Artificial Sequence; identical to SEQ ID NO: 1073
  Description of Artificial Sequence: Synthetic cashew; 5' sequence and inner sequence

SEQ ID NO: 13161 - DNA, 53 bp, Artificial Sequence; identical to SEQ ID NO: 1200
  Description of Artificial Sequence: Synthetic cashew; 5' sequence and inner sequence

SEQ ID NO: 13162 - DNA, 53 bp, Artificial Sequence; identical to SEQ ID NO: 1106
  Description of Artificial Sequence: Synthetic cashew; 5' sequence and inner sequence

SEQ ID NO: 13163 - DNA, 53 bp, Artificial Sequence; identical to SEQ ID NO: 1186
  Description of Artificial Sequence: Synthetic cashew; 5' sequence and inner sequence

SEQ ID NO: 13164 - DNA, 53 bp, Artificial Sequence; identical to SEQ ID NO: 1187
  Description of Artificial Sequence: Synthetic cashew; 5' sequence and inner sequence

SEQ ID NO: 13165 - DNA, 53 bp, Artificial Sequence; identical to SEQ ID NO: 1062
  Description of Artificial Sequence: Synthetic cashew; 5' sequence and inner sequence

SEQ ID NO: 13166 - DNA, 53 bp, Artificial Sequence; identical to SEQ ID NO: 1075
  Description of Artificial Sequence: Synthetic cashew; 5' sequence and inner sequence

SEQ ID NO: 13167 - DNA, 53 bp, Artificial Sequence; identical to SEQ ID NO: 1157
  Description of Artificial Sequence: Synthetic cashew; 5' sequence and inner sequence

SEQ ID NO: 13168 - DNA, 53 bp, Artificial Sequence; identical to SEQ ID NO: 1232
  Description of Artificial Sequence: Synthetic cashew; 5' sequence and inner sequence

SEQ ID NO: 13169 - DNA, 53 bp, Artificial Sequence; identical to SEQ ID NO: 1109
  Description of Artificial Sequence: Synthetic cashew; 5' sequence and inner sequence

SEQ ID NO: 13170 - DNA, 53 bp, Artificial Sequence; identical to SEQ ID NO: 1229
  Description of Artificial Sequence: Synthetic cashew; 5' sequence and inner sequence

SEQ ID NO: 13171 - DNA, 53 bp, Artificial Sequence; identical to SEQ ID NO: 1552
  Description of Artificial Sequence: Synthetic cashew; 5' sequence and inner sequence

SEQ ID NO: 13172 - DNA, 53 bp, Artificial Sequence; identical to SEQ ID NO: 1174
  Description of Artificial Sequence: Synthetic cashew; 5' sequence and inner sequence

SEQ ID NO: 13173 - DNA, 53 bp, Artificial Sequence; identical to SEQ ID NO: 1105
  Description of Artificial Sequence: Synthetic cashew; 5' sequence and inner sequence

SEQ ID NO: 13174 - DNA, 53 bp, Artificial Sequence; identical to SEQ ID NO: 1175
  Description of Artificial Sequence: Synthetic cashew; 5' sequence and inner sequence

SEQ ID NO: 13175 - DNA, 53 bp, Artificial Sequence; identical to SEQ ID NO: 1438
  Description of Artificial Sequence: Synthetic cashew; 5' sequence and inner sequence

SEQ ID NO: 13176 - DNA, 53 bp, Artificial Sequence; identical to SEQ ID NO: 1205
  Description of Artificial Sequence: Synthetic cashew; 5' sequence and inner sequence

SEQ ID NO: 13177 - DNA, 53 bp, Artificial Sequence; identical to SEQ ID NO: 1308
  Description of Artificial Sequence: Synthetic cashew; 5' sequence and inner sequence

SEQ ID NO: 13178 - DNA, 53 bp, Artificial Sequence; identical to SEQ ID NO: 1377
  Description of Artificial Sequence: Synthetic cashew; 5' sequence and inner sequence

SEQ ID NO: 13179 - DNA, 53 bp, Artificial Sequence; identical to SEQ ID NO: 1362
  Description of Artificial Sequence: Synthetic cashew; 5' sequence and inner sequence

SEQ ID NO: 13180 - DNA, 53 bp, Artificial Sequence; identical to SEQ ID NO: 1086
  Description of Artificial Sequence: Synthetic cashew; 5' sequence and inner sequence

SEQ ID NO: 13181 - DNA, 53 bp, Artificial Sequence; identical to SEQ ID NO: 1165
  Description of Artificial Sequence: Synthetic cashew; 5' sequence and inner sequence

SEQ ID NO: 13182 - DNA, 53 bp, Artificial Sequence; identical to SEQ ID NO: 1138
  Description of Artificial Sequence: Synthetic cashew; 5' sequence and inner sequence

SEQ ID NO: 13183 - DNA, 53 bp, Artificial Sequence; identical to SEQ ID NO: 1222
  Description of Artificial Sequence: Synthetic cashew; 5' sequence and inner sequence

SEQ ID NO: 13184 - DNA, 53 bp, Artificial Sequence; identical to SEQ ID NO: 1184
  Description of Artificial Sequence: Synthetic cashew; 5' sequence and inner sequence

SEQ ID NO: 13185 - DNA, 53 bp, Artificial Sequence; identical to SEQ ID NO: 1084
  Description of Artificial Sequence: Synthetic cashew; 5' sequence and inner sequence

SEQ ID NO: 13186 - DNA, 54 bp, Artificial Sequence; identical to SEQ ID NO: 1258
  Description of Artificial Sequence: Synthetic cashew; 5' sequence and inner sequence

SEQ ID NO: 13187 - DNA, 54 bp, Artificial Sequence; identical to SEQ ID NO: 1221
  Description of Artificial Sequence: Synthetic cashew; 5' sequence and inner sequence

SEQ ID NO: 13188 - DNA, 53 bp, Artificial Sequence; identical to SEQ ID NO: 1089
  Description of Artificial Sequence: Synthetic cashew; 5' sequence and inner sequence

SEQ ID NO: 13189 - DNA, 53 bp, Artificial Sequence; identical to SEQ ID NO: 5336
  Description of Artificial Sequence: Synthetic cashew; 5' sequence and inner sequence

SEQ ID NO: 13190 - DNA, 53 bp, Artificial Sequence; identical to SEQ ID NO: 1290
  Description of Artificial Sequence: Synthetic cashew; 5' sequence and inner sequence

SEQ ID NO: 13191 - DNA, 53 bp, Artificial Sequence; identical to SEQ ID NO: 1645
  Description of Artificial Sequence: Synthetic cashew; 5' sequence and inner sequence

SEQ ID NO: 13192 - DNA, 53 bp, Artificial Sequence; identical to SEQ ID NO: 1385
  Description of Artificial Sequence: Synthetic cashew; 5' sequence and inner sequence

SEQ ID NO: 13193 - DNA, 53 bp, Artificial Sequence; identical to SEQ ID NO: 1090
  Description of Artificial Sequence: Synthetic cashew; 5' sequence and inner sequence

SEQ ID NO: 13194 - DNA, 53 bp, Artificial Sequence; identical to SEQ ID NO: 5205
  Description of Artificial Sequence: Synthetic cashew; 5' sequence and inner sequence

SEQ ID NO: 13195 - DNA, 53 bp, Artificial Sequence; identical to SEQ ID NO: 1134
  Description of Artificial Sequence: Synthetic cashew; 5' sequence and inner sequence

SEQ ID NO: 13196 - DNA, 53 bp, Artificial Sequence; identical to SEQ ID NO: 1448
  Description of Artificial Sequence: Synthetic cashew; 5' sequence and inner sequence

SEQ ID NO: 13197 - DNA, 53 bp, Artificial Sequence; identical to SEQ ID NO: 1376
  Description of Artificial Sequence: Synthetic cashew; 5' sequence and inner sequence

SEQ ID NO: 13198 - DNA, 53 bp, Artificial Sequence; identical to SEQ ID NO: 1159
  Description of Artificial Sequence: Synthetic cashew; 5' sequence and inner sequence

SEQ ID NO: 13199 - DNA, 53 bp, Artificial Sequence; identical to SEQ ID NO: 1191
  Description of Artificial Sequence: Synthetic cashew; 5' sequence and inner sequence

SEQ ID NO: 13200 - DNA, 53 bp, Artificial Sequence; identical to SEQ ID NO: 1198
  Description of Artificial Sequence: Synthetic cashew; 5' sequence and inner sequence

SEQ ID NO: 13201 - DNA, 53 bp, Artificial Sequence; identical to SEQ ID NO: 1139
  Description of Artificial Sequence: Synthetic cashew; 5' sequence and inner sequence

SEQ ID NO: 13202 - DNA, 53 bp, Artificial Sequence; identical to SEQ ID NO: 1262
  Description of Artificial Sequence: Synthetic cashew; 5' sequence and inner sequence

SEQ ID NO: 13203 - DNA, 53 bp, Artificial Sequence; identical to SEQ ID NO: 1329
  Description of Artificial Sequence: Synthetic cashew; 5' sequence and inner sequence

SEQ ID NO: 13204 - DNA, 53 bp, Artificial Sequence; identical to SEQ ID NO: 1541
  Description of Artificial Sequence: Synthetic cashew; 5' sequence and inner sequence

SEQ ID NO: 13205 - DNA, 53 bp, Artificial Sequence; identical to SEQ ID NO: 1110
  Description of Artificial Sequence: Synthetic cashew; 5' sequence and inner sequence

SEQ ID NO: 13206 - DNA, 53 bp, Artificial Sequence; identical to SEQ ID NO: 1121
  Description of Artificial Sequence: Synthetic cashew; 5' sequence and inner sequence

SEQ ID NO: 13207 - DNA, 53 bp, Artificial Sequence; identical to SEQ ID NO: 1201
  Description of Artificial Sequence: Synthetic cashew; 5' sequence and inner sequence

SEQ ID NO: 13208 - DNA, 53 bp, Artificial Sequence; identical to SEQ ID NO: 1283
  Description of Artificial Sequence: Synthetic cashew; 5' sequence and inner sequence

SEQ ID NO: 13209 - DNA, 53 bp, Artificial Sequence; identical to SEQ ID NO: 1085
  Description of Artificial Sequence: Synthetic cashew; 5' sequence and inner sequence

SEQ ID NO: 13210 - DNA, 53 bp, Artificial Sequence; identical to SEQ ID NO: 1269
  Description of Artificial Sequence: Synthetic cashew; 5' sequence and inner sequence

SEQ ID NO: 13211 - DNA, 53 bp, Artificial Sequence; identical to SEQ ID NO: 1373
  Description of Artificial Sequence: Synthetic cashew; 5' sequence and inner sequence

SEQ ID NO: 13212 - DNA, 53 bp, Artificial Sequence; identical to SEQ ID NO: 1406
  Description of Artificial Sequence: Synthetic cashew; 5' sequence and inner sequence

SEQ ID NO: 13213 - DNA, 53 bp, Artificial Sequence; identical to SEQ ID NO: 1630
  Description of Artificial Sequence: Synthetic cashew; 5' sequence and inner sequence

SEQ ID NO: 13214 - DNA, 53 bp, Artificial Sequence; identical to SEQ ID NO: 1371
  Description of Artificial Sequence: Synthetic cashew; 5' sequence and inner sequence

SEQ ID NO: 13215 - DNA, 53 bp, Artificial Sequence; identical to SEQ ID NO: 1069
  Description of Artificial Sequence: Synthetic cashew; 5' sequence and inner sequence

SEQ ID NO: 13216 - DNA, 53 bp, Artificial Sequence; identical to SEQ ID NO: 1299
  Description of Artificial Sequence: Synthetic cashew; 5' sequence and inner sequence

SEQ ID NO: 13217 - DNA, 53 bp, Artificial Sequence; identical to SEQ ID NO: 5229
  Description of Artificial Sequence: Synthetic cashew; 5' sequence and inner sequence

SEQ ID NO: 13218 - DNA, 53 bp, Artificial Sequence; identical to SEQ ID NO: 1673
  Description of Artificial Sequence: Synthetic cashew; 5' sequence and inner sequence

SEQ ID NO: 13219 - DNA, 53 bp, Artificial Sequence; identical to SEQ ID NO: 1369
  Description of Artificial Sequence: Synthetic cashew; 5' sequence and inner sequence

SEQ ID NO: 13220 - DNA, 53 bp, Artificial Sequence; identical to SEQ ID NO: 9401
  Description of Artificial Sequence: Synthetic cashew; 5' sequence and inner sequence

SEQ ID NO: 13221 - DNA, 53 bp, Artificial Sequence; identical to SEQ ID NO: 1522
  Description of Artificial Sequence: Synthetic cashew; 5' sequence and inner sequence

SEQ ID NO: 13222 - DNA, 53 bp, Artificial Sequence; identical to SEQ ID NO: 1140
  Description of Artificial Sequence: Synthetic cashew; 5' sequence and inner sequence

SEQ ID NO: 13223 - DNA, 53 bp, Artificial Sequence; identical to SEQ ID NO: 1156
  Description of Artificial Sequence: Synthetic cashew; 5' sequence and inner sequence

SEQ ID NO: 13224 - DNA, 53 bp, Artificial Sequence; identical to SEQ ID NO: 1153
  Description of Artificial Sequence: Synthetic cashew; 5' sequence and inner sequence

SEQ ID NO: 13225 - DNA, 53 bp, Artificial Sequence; identical to SEQ ID NO: 1189
  Description of Artificial Sequence: Synthetic cashew; 5' sequence and inner sequence

SEQ ID NO: 13226 - DNA, 53 bp, Artificial Sequence; identical to SEQ ID NO: 1389
  Description of Artificial Sequence: Synthetic cashew; 5' sequence and inner sequence

SEQ ID NO: 13227 - DNA, 53 bp, Artificial Sequence; identical to SEQ ID NO: 1102
  Description of Artificial Sequence: Synthetic cashew; 5' sequence and inner sequence

SEQ ID NO: 13228 - DNA, 53 bp, Artificial Sequence; identical to SEQ ID NO: 1123
  Description of Artificial Sequence: Synthetic cashew; 5' sequence and inner sequence

SEQ ID NO: 13229 - DNA, 53 bp, Artificial Sequence; identical to SEQ ID NO: 1532
  Description of Artificial Sequence: Synthetic cashew; 5' sequence and inner sequence

SEQ ID NO: 13230 - DNA, 53 bp, Artificial Sequence; identical to SEQ ID NO: 1234
  Description of Artificial Sequence: Synthetic cashew; 5' sequence and inner sequence

SEQ ID NO: 13231 - DNA, 53 bp, Artificial Sequence; identical to SEQ ID NO: 1266
  Description of Artificial Sequence: Synthetic cashew; 5' sequence and inner sequence

SEQ ID NO: 13232 - DNA, 53 bp, Artificial Sequence; identical to SEQ ID NO: 1347
  Description of Artificial Sequence: Synthetic cashew; 5' sequence and inner sequence

SEQ ID NO: 13233 - DNA, 53 bp, Artificial Sequence; identical to SEQ ID NO: 1454
  Description of Artificial Sequence: Synthetic cashew; 5' sequence and inner sequence

SEQ ID NO: 13234 - DNA, 53 bp, Artificial Sequence; identical to SEQ ID NO: 1553
  Description of Artificial Sequence: Synthetic cashew; 5' sequence and inner sequence

SEQ ID NO: 13235 - DNA, 53 bp, Artificial Sequence; identical to SEQ ID NO: 1243
  Description of Artificial Sequence: Synthetic cashew; 5' sequence and inner sequence

SEQ ID NO: 13236 - DNA, 53 bp, Artificial Sequence; identical to SEQ ID NO: 1132
  Description of Artificial Sequence: Synthetic cashew; 5' sequence and inner sequence

SEQ ID NO: 13237 - DNA, 53 bp, Artificial Sequence; identical to SEQ ID NO: 1401
  Description of Artificial Sequence: Synthetic cashew; 5' sequence and inner sequence

SEQ ID NO: 13238 - DNA, 53 bp, Artificial Sequence; identical to SEQ ID NO: 1152
  Description of Artificial Sequence: Synthetic cashew; 5' sequence and inner sequence

SEQ ID NO: 13239 - DNA, 53 bp, Artificial Sequence; identical to SEQ ID NO: 1321
  Description of Artificial Sequence: Synthetic cashew; 5' sequence and inner sequence

SEQ ID NO: 13240 - DNA, 53 bp, Artificial Sequence; identical to SEQ ID NO: 1413
  Description of Artificial Sequence: Synthetic cashew; 5' sequence and inner sequence

SEQ ID NO: 13241 - DNA, 53 bp, Artificial Sequence; identical to SEQ ID NO: 1182
  Description of Artificial Sequence: Synthetic cashew; 5' sequence and inner sequence

SEQ ID NO: 13242 - DNA, 54 bp, Artificial Sequence; identical to SEQ ID NO: 1250
  Description of Artificial Sequence: Synthetic cashew; 5' sequence and inner sequence

SEQ ID NO: 13243 - DNA, 53 bp, Artificial Sequence; identical to SEQ ID NO: 1585
  Description of Artificial Sequence: Synthetic cashew; 5' sequence and inner sequence

SEQ ID NO: 13244 - DNA, 53 bp, Artificial Sequence; identical to SEQ ID NO: 1325
  Description of Artificial Sequence: Synthetic cashew; 5' sequence and inner sequence

SEQ ID NO: 13245 - DNA, 53 bp, Artificial Sequence; identical to SEQ ID NO: 1343
  Description of Artificial Sequence: Synthetic cashew; 5' sequence and inner sequence

SEQ ID NO: 13246 - DNA, 53 bp, Artificial Sequence; identical to SEQ ID NO: 1341
  Description of Artificial Sequence: Synthetic cashew; 5' sequence and inner sequence

SEQ ID NO: 13247 - DNA, 53 bp, Artificial Sequence; identical to SEQ ID NO: 1654
  Description of Artificial Sequence: Synthetic cashew; 5' sequence and inner sequence

SEQ ID NO: 13248 - DNA, 53 bp, Artificial Sequence; identical to SEQ ID NO: 1158
  Description of Artificial Sequence: Synthetic cashew; 5' sequence and inner sequence

SEQ ID NO: 13249 - DNA, 53 bp, Artificial Sequence; identical to SEQ ID NO: 1429
  Description of Artificial Sequence: Synthetic cashew; 5' sequence and inner sequence

SEQ ID NO: 13250 - DNA, 53 bp, Artificial Sequence; identical to SEQ ID NO: 1353
  Description of Artificial Sequence: Synthetic cashew; 5' sequence and inner sequence

SEQ ID NO: 13251 - DNA, 53 bp, Artificial Sequence; identical to SEQ ID NO: 1195
  Description of Artificial Sequence: Synthetic cashew; 5' sequence and inner sequence

SEQ ID NO: 13252 - DNA, 53 bp, Artificial Sequence; identical to SEQ ID NO: 1298
  Description of Artificial Sequence: Synthetic cashew; 5' sequence and inner sequence

SEQ ID NO: 13253 - DNA, 53 bp, Artificial Sequence; identical to SEQ ID NO: 1336
  Description of Artificial Sequence: Synthetic cashew; 5' sequence and inner sequence

SEQ ID NO: 13254 - DNA, 53 bp, Artificial Sequence; identical to SEQ ID NO: 1178
  Description of Artificial Sequence: Synthetic cashew; 5' sequence and inner sequence

SEQ ID NO: 13255 - DNA, 53 bp, Artificial Sequence; identical to SEQ ID NO: 1180
  Description of Artificial Sequence: Synthetic cashew; 5' sequence and inner sequence

SEQ ID NO: 13256 - DNA, 53 bp, Artificial Sequence; identical to SEQ ID NO: 1634
  Description of Artificial Sequence: Synthetic cashew; 5' sequence and inner sequence

SEQ ID NO: 13257 - DNA, 53 bp, Artificial Sequence; identical to SEQ ID NO: 1436
  Description of Artificial Sequence: Synthetic cashew; 5' sequence and inner sequence

SEQ ID NO: 13258 - DNA, 53 bp, Artificial Sequence; identical to SEQ ID NO: 1116
  Description of Artificial Sequence: Synthetic cashew; 5' sequence and inner sequence

SEQ ID NO: 13259 - DNA, 53 bp, Artificial Sequence; identical to SEQ ID NO: 1365
  Description of Artificial Sequence: Synthetic cashew; 5' sequence and inner sequence

SEQ ID NO: 13260 - DNA, 53 bp, Artificial Sequence; identical to SEQ ID NO: 5449
  Description of Artificial Sequence: Synthetic cashew; 5' sequence and inner sequence

SEQ ID NO: 13261 - DNA, 53 bp, Artificial Sequence; identical to SEQ ID NO: 1284
  Description of Artificial Sequence: Synthetic cashew; 5' sequence and inner sequence

SEQ ID NO: 13262 - DNA, 53 bp, Artificial Sequence; identical to SEQ ID NO: 1319
  Description of Artificial Sequence: Synthetic cashew; 5' sequence and inner sequence

SEQ ID NO: 13263 - DNA, 53 bp, Artificial Sequence; identical to SEQ ID NO: 1202
  Description of Artificial Sequence: Synthetic cashew; 5' sequence and inner sequence

SEQ ID NO: 13264 - DNA, 53 bp, Artificial Sequence; identical to SEQ ID NO: 1135
  Description of Artificial Sequence: Synthetic cashew; 5' sequence and inner sequence

SEQ ID NO: 13265 - DNA, 53 bp, Artificial Sequence; identical to SEQ ID NO: 1579
  Description of Artificial Sequence: Synthetic cashew; 5' sequence and inner sequence

SEQ ID NO: 13266 - DNA, 53 bp, Artificial Sequence; identical to SEQ ID NO: 1527
  Description of Artificial Sequence: Synthetic cashew; 5' sequence and inner sequence

SEQ ID NO: 13267 - DNA, 53 bp, Artificial Sequence; identical to SEQ ID NO: 1301
  Description of Artificial Sequence: Synthetic cashew; 5' sequence and inner sequence

SEQ ID NO: 13268 - DNA, 53 bp, Artificial Sequence; identical to SEQ ID NO: 1791
  Description of Artificial Sequence: Synthetic cashew; 5' sequence and inner sequence

SEQ ID NO: 13269 - DNA, 53 bp, Artificial Sequence; identical to SEQ ID NO: 1524
  Description of Artificial Sequence: Synthetic cashew; 5' sequence and inner sequence

SEQ ID NO: 13270 - DNA, 53 bp, Artificial Sequence; identical to SEQ ID NO: 1197
  Description of Artificial Sequence: Synthetic cashew; 5' sequence and inner sequence

SEQ ID NO: 13271 - DNA, 53 bp, Artificial Sequence; identical to SEQ ID NO: 1190
  Description of Artificial Sequence: Synthetic cashew; 5' sequence and inner sequence

SEQ ID NO: 13272 - DNA, 53 bp, Artificial Sequence; identical to SEQ ID NO: 1172
  Description of Artificial Sequence: Synthetic cashew; 5' sequence and inner sequence

SEQ ID NO: 13273 - DNA, 53 bp, Artificial Sequence; identical to SEQ ID NO: 1228
  Description of Artificial Sequence: Synthetic cashew; 5' sequence and inner sequence

SEQ ID NO: 13274 - DNA, 53 bp, Artificial Sequence; identical to SEQ ID NO: 1383
  Description of Artificial Sequence: Synthetic cashew; 5' sequence and inner sequence

SEQ ID NO: 13275 - DNA, 53 bp, Artificial Sequence; identical to SEQ ID NO: 1540
  Description of Artificial Sequence: Synthetic cashew; 5' sequence and inner sequence

SEQ ID NO: 13276 - DNA, 53 bp, Artificial Sequence; identical to SEQ ID NO: 1072
  Description of Artificial Sequence: Synthetic cashew; 5' sequence and inner sequence

SEQ ID NO: 13277 - DNA, 53 bp, Artificial Sequence; identical to SEQ ID NO: 1511
  Description of Artificial Sequence: Synthetic cashew; 5' sequence and inner sequence

SEQ ID NO: 13278 - DNA, 53 bp, Artificial Sequence; identical to SEQ ID NO: 1572
  Description of Artificial Sequence: Synthetic cashew; 5' sequence and inner sequence

SEQ ID NO: 13279 - DNA, 53 bp, Artificial Sequence; identical to SEQ ID NO: 1119
  Description of Artificial Sequence: Synthetic cashew; 5' sequence and inner sequence

SEQ ID NO: 13280 - DNA, 53 bp, Artificial Sequence; identical to SEQ ID NO: 1204
  Description of Artificial Sequence: Synthetic cashew; 5' sequence and inner sequence

SEQ ID NO: 13281 - DNA, 53 bp, Artificial Sequence; identical to SEQ ID NO: 1439
  Description of Artificial Sequence: Synthetic cashew; 5' sequence and inner sequence

SEQ ID NO: 13282 - DNA, 53 bp, Artificial Sequence; identical to SEQ ID NO: 1254
  Description of Artificial Sequence: Synthetic cashew; 5' sequence and inner sequence

SEQ ID NO: 13283 - DNA, 53 bp, Artificial Sequence; identical to SEQ ID NO: 1305
  Description of Artificial Sequence: Synthetic cashew; 5' sequence and inner sequence

SEQ ID NO: 13284 - DNA, 53 bp, Artificial Sequence; identical to SEQ ID NO: 1496
  Description of Artificial Sequence: Synthetic cashew; 5' sequence and inner sequence

SEQ ID NO: 13285 - DNA, 53 bp, Artificial Sequence; identical to SEQ ID NO: 5234
  Description of Artificial Sequence: Synthetic cashew; 5' sequence and inner sequence

SEQ ID NO: 13286 - DNA, 53 bp, Artificial Sequence; identical to SEQ ID NO: 1320
  Description of Artificial Sequence: Synthetic cashew; 5' sequence and inner sequence

SEQ ID NO: 13287 - DNA, 53 bp, Artificial Sequence; identical to SEQ ID NO: 1098
  Description of Artificial Sequence: Synthetic cashew; 5' sequence and inner sequence

SEQ ID NO: 13288 - DNA, 53 bp, Artificial Sequence; identical to SEQ ID NO: 1671
  Description of Artificial Sequence: Synthetic cashew; 5' sequence and inner sequence

SEQ ID NO: 13289 - DNA, 53 bp, Artificial Sequence; identical to SEQ ID NO: 1352
  Description of Artificial Sequence: Synthetic cashew; 5' sequence and inner sequence

SEQ ID NO: 13290 - DNA, 53 bp, Artificial Sequence; identical to SEQ ID NO: 1314
  Description of Artificial Sequence: Synthetic cashew; 5' sequence and inner sequence

SEQ ID NO: 13291 - DNA, 53 bp, Artificial Sequence; identical to SEQ ID NO: 1529
  Description of Artificial Sequence: Synthetic cashew; 5' sequence and inner sequence

SEQ ID NO: 13292 - DNA, 53 bp, Artificial Sequence; identical to SEQ ID NO: 1323
  Description of Artificial Sequence: Synthetic cashew; 5' sequence and inner sequence

SEQ ID NO: 13293 - DNA, 53 bp, Artificial Sequence; identical to SEQ ID NO: 1916
  Description of Artificial Sequence: Synthetic cashew; 5' sequence and inner sequence

SEQ ID NO: 13294 - DNA, 54 bp, Artificial Sequence; identical to SEQ ID NO: 5245
  Description of Artificial Sequence: Synthetic cashew; 5' sequence and inner sequence

SEQ ID NO: 13295 - DNA, 53 bp, Artificial Sequence; identical to SEQ ID NO: 1303
  Description of Artificial Sequence: Synthetic cashew; 5' sequence and inner sequence

SEQ ID NO: 13296 - DNA, 53 bp, Artificial Sequence; identical to SEQ ID NO: 1528
  Description of Artificial Sequence: Synthetic cashew; 5' sequence and inner sequence

SEQ ID NO: 13297 - DNA, 53 bp, Artificial Sequence; identical to SEQ ID NO: 1213
  Description of Artificial Sequence: Synthetic cashew; 5' sequence and inner sequence

SEQ ID NO: 13298 - DNA, 53 bp, Artificial Sequence; identical to SEQ ID NO: 1206
  Description of Artificial Sequence: Synthetic cashew; 5' sequence and inner sequence

SEQ ID NO: 13299 - DNA, 53 bp, Artificial Sequence; identical to SEQ ID NO: 1611
  Description of Artificial Sequence: Synthetic cashew; 5' sequence and inner sequence

SEQ ID NO: 13300 - DNA, 53 bp, Artificial Sequence; identical to SEQ ID NO: 1173
  Description of Artificial Sequence: Synthetic cashew; 5' sequence and inner sequence

SEQ ID NO: 13301 - DNA, 53 bp, Artificial Sequence; identical to SEQ ID NO: 1238
  Description of Artificial Sequence: Synthetic cashew; 5' sequence and inner sequence

SEQ ID NO: 13302 - DNA, 53 bp, Artificial Sequence; identical to SEQ ID NO: 1783
  Description of Artificial Sequence: Synthetic cashew; 5' sequence and inner sequence

SEQ ID NO: 13303 - DNA, 53 bp, Artificial Sequence; identical to SEQ ID NO: 1741
  Description of Artificial Sequence: Synthetic cashew; 5' sequence and inner sequence

SEQ ID NO: 13304 - DNA, 53 bp, Artificial Sequence; identical to SEQ ID NO: 1344
  Description of Artificial Sequence: Synthetic cashew; 5' sequence and inner sequence

SEQ ID NO: 13305 - DNA, 53 bp, Artificial Sequence; identical to SEQ ID NO: 1268
  Description of Artificial Sequence: Synthetic cashew; 5' sequence and inner sequence

SEQ ID NO: 13306 - DNA, 53 bp, Artificial Sequence; identical to SEQ ID NO: 1087
  Description of Artificial Sequence: Synthetic cashew; 5' sequence and inner sequence

SEQ ID NO: 13307 - DNA, 53 bp, Artificial Sequence; identical to SEQ ID NO: 1192
  Description of Artificial Sequence: Synthetic cashew; 5' sequence and inner sequence

SEQ ID NO: 13308 - DNA, 53 bp, Artificial Sequence; identical to SEQ ID NO: 1310
  Description of Artificial Sequence: Synthetic cashew; 5' sequence and inner sequence

SEQ ID NO: 13309 - DNA, 53 bp, Artificial Sequence; identical to SEQ ID NO: 5254
  Description of Artificial Sequence: Synthetic cashew; 5' sequence and inner sequence

SEQ ID NO: 13310 - DNA, 53 bp, Artificial Sequence; identical to SEQ ID NO: 1884
  Description of Artificial Sequence: Synthetic cashew; 5' sequence and inner sequence

SEQ ID NO: 13311 - DNA, 53 bp, Artificial Sequence; identical to SEQ ID NO: 1348
  Description of Artificial Sequence: Synthetic cashew; 5' sequence and inner sequence

SEQ ID NO: 13312 - DNA, 53 bp, Artificial Sequence; identical to SEQ ID NO: 5691
  Description of Artificial Sequence: Synthetic cashew; 5' sequence and inner sequence

SEQ ID NO: 13313 - DNA, 53 bp, Artificial Sequence; identical to SEQ ID NO: 1309
  Description of Artificial Sequence: Synthetic cashew; 5' sequence and inner sequence

SEQ ID NO: 13314 - DNA, 53 bp, Artificial Sequence; identical to SEQ ID NO: 1570
  Description of Artificial Sequence: Synthetic cashew; 5' sequence and inner sequence

SEQ ID NO: 13315 - DNA, 53 bp, Artificial Sequence; identical to SEQ ID NO: 1177
  Description of Artificial Sequence: Synthetic cashew; 5' sequence and inner sequence

SEQ ID NO: 13316 - DNA, 53 bp, Artificial Sequence; identical to SEQ ID NO: 1556
  Description of Artificial Sequence: Synthetic cashew; 5' sequence and inner sequence

SEQ ID NO: 13317 - DNA, 53 bp, Artificial Sequence; identical to SEQ ID NO: 1246
  Description of Artificial Sequence: Synthetic cashew; 5' sequence and inner sequence

SEQ ID NO: 13318 - DNA, 53 bp, Artificial Sequence; identical to SEQ ID NO: 1367
  Description of Artificial Sequence: Synthetic cashew; 5' sequence and inner sequence

SEQ ID NO: 13319 - DNA, 53 bp, Artificial Sequence; identical to SEQ ID NO: 1130
  Description of Artificial Sequence: Synthetic cashew; 5' sequence and inner sequence

SEQ ID NO: 13320 - DNA, 53 bp, Artificial Sequence; identical to SEQ ID NO: 1349
  Description of Artificial Sequence: Synthetic cashew; 5' sequence and inner sequence

SEQ ID NO: 13321 - DNA, 53 bp, Artificial Sequence; identical to SEQ ID NO: 5376
  Description of Artificial Sequence: Synthetic cashew; 5' sequence and inner sequence

SEQ ID NO: 13322 - DNA, 53 bp, Artificial Sequence; identical to SEQ ID NO: 1696
  Description of Artificial Sequence: Synthetic cashew; 5' sequence and inner sequence

SEQ ID NO: 13323 - DNA, 53 bp, Artificial Sequence; identical to SEQ ID NO: 1271
  Description of Artificial Sequence: Synthetic cashew; 5' sequence and inner sequence

SEQ ID NO: 13324 - DNA, 53 bp, Artificial Sequence; identical to SEQ ID NO: 1394
  Description of Artificial Sequence: Synthetic cashew; 5' sequence and inner sequence

SEQ ID NO: 13325 - DNA, 53 bp, Artificial Sequence; identical to SEQ ID NO: 1104
  Description of Artificial Sequence: Synthetic cashew; 5' sequence and inner sequence

SEQ ID NO: 13326 - DNA, 53 bp, Artificial Sequence; identical to SEQ ID NO: 1149
  Description of Artificial Sequence: Synthetic cashew; 5' sequence and inner sequence

SEQ ID NO: 13327 - DNA, 53 bp, Artificial Sequence; identical to SEQ ID NO: 1487
  Description of Artificial Sequence: Synthetic cashew; 5' sequence and inner sequence

SEQ ID NO: 13328 - DNA, 53 bp, Artificial Sequence; identical to SEQ ID NO: 1359
  Description of Artificial Sequence: Synthetic cashew; 5' sequence and inner sequence

SEQ ID NO: 13329 - DNA, 53 bp, Artificial Sequence; identical to SEQ ID NO: 1370
  Description of Artificial Sequence: Synthetic cashew; 5' sequence and inner sequence

SEQ ID NO: 13330 - DNA, 53 bp, Artificial Sequence; identical to SEQ ID NO: 5364
  Description of Artificial Sequence: Synthetic cashew; 5' sequence and inner sequence

SEQ ID NO: 13331 - DNA, 53 bp, Artificial Sequence; identical to SEQ ID NO: 1836
  Description of Artificial Sequence: Synthetic cashew; 5' sequence and inner sequence

SEQ ID NO: 13332 - DNA, 53 bp, Artificial Sequence; identical to SEQ ID NO: 1676
  Description of Artificial Sequence: Synthetic cashew; 5' sequence and inner sequence

SEQ ID NO: 13333 - DNA, 53 bp, Artificial Sequence; identical to SEQ ID NO: 1414
  Description of Artificial Sequence: Synthetic cashew; 5' sequence and inner sequence

SEQ ID NO: 13334 - DNA, 53 bp, Artificial Sequence; identical to SEQ ID NO: 1764
  Description of Artificial Sequence: Synthetic cashew; 5' sequence and inner sequence

SEQ ID NO: 13335 - DNA, 53 bp, Artificial Sequence; identical to SEQ ID NO: 1340
  Description of Artificial Sequence: Synthetic cashew; 5' sequence and inner sequence

SEQ ID NO: 13336 - DNA, 53 bp, Artificial Sequence; identical to SEQ ID NO: 1286
  Description of Artificial Sequence: Synthetic cashew; 5' sequence and inner sequence

SEQ ID NO: 13337 - DNA, 53 bp, Artificial Sequence; identical to SEQ ID NO: 1409
  Description of Artificial Sequence: Synthetic cashew; 5' sequence and inner sequence

SEQ ID NO: 13338 - DNA, 53 bp, Artificial Sequence; identical to SEQ ID NO: 1217
  Description of Artificial Sequence: Synthetic cashew; 5' sequence and inner sequence

SEQ ID NO: 13339 - DNA, 53 bp, Artificial Sequence; identical to SEQ ID NO: 1485
  Description of Artificial Sequence: Synthetic cashew; 5' sequence and inner sequence

SEQ ID NO: 13340 - DNA, 53 bp, Artificial Sequence; identical to SEQ ID NO: 5420
  Description of Artificial Sequence: Synthetic cashew; 5' sequence and inner sequence

SEQ ID NO: 13341 - DNA, 53 bp, Artificial Sequence; identical to SEQ ID NO: 1640
  Description of Artificial Sequence: Synthetic cashew; 5' sequence and inner sequence

SEQ ID NO: 13342 - DNA, 53 bp, Artificial Sequence; identical to SEQ ID NO: 5348
  Description of Artificial Sequence: Synthetic cashew; 5' sequence and inner sequence

SEQ ID NO: 13343 - DNA, 53 bp, Artificial Sequence; identical to SEQ ID NO: 1530
  Description of Artificial Sequence: Synthetic cashew; 5' sequence and inner sequence

SEQ ID NO: 13344 - DNA, 53 bp, Artificial Sequence; identical to SEQ ID NO: 1390
  Description of Artificial Sequence: Synthetic cashew; 5' sequence and inner sequence

SEQ ID NO: 13345 - DNA, 53 bp, Artificial Sequence; identical to SEQ ID NO: 1214
  Description of Artificial Sequence: Synthetic cashew; 5' sequence and inner sequence

SEQ ID NO: 13346 - DNA, 53 bp, Artificial Sequence; identical to SEQ ID NO: 1255
  Description of Artificial Sequence: Synthetic cashew; 5' sequence and inner sequence

SEQ ID NO: 13347 - DNA, 53 bp, Artificial Sequence; identical to SEQ ID NO: 1170
  Description of Artificial Sequence: Synthetic cashew; 5' sequence and inner sequence

SEQ ID NO: 13348 - DNA, 53 bp, Artificial Sequence; identical to SEQ ID NO: 1387
  Description of Artificial Sequence: Synthetic cashew; 5' sequence and inner sequence

SEQ ID NO: 13349 - DNA, 53 bp, Artificial Sequence; identical to SEQ ID NO: 1128
  Description of Artificial Sequence: Synthetic cashew; 5' sequence and inner sequence

SEQ ID NO: 13350 - DNA, 53 bp, Artificial Sequence; identical to SEQ ID NO: 1400
  Description of Artificial Sequence: Synthetic cashew; 5' sequence and inner sequence

SEQ ID NO: 13351 - DNA, 53 bp, Artificial Sequence; identical to SEQ ID NO: 1346
  Description of Artificial Sequence: Synthetic cashew; 5' sequence and inner sequence

SEQ ID NO: 13352 - DNA, 53 bp, Artificial Sequence; identical to SEQ ID NO: 1775
  Description of Artificial Sequence: Synthetic cashew; 5' sequence and inner sequence

SEQ ID NO: 13353 - DNA, 53 bp, Artificial Sequence; identical to SEQ ID NO: 1361
  Description of Artificial Sequence: Synthetic cashew; 5' sequence and inner sequence

SEQ ID NO: 13354 - DNA, 53 bp, Artificial Sequence; identical to SEQ ID NO: 1568
  Description of Artificial Sequence: Synthetic cashew; 5' sequence and inner sequence

SEQ ID NO: 13355 - DNA, 53 bp, Artificial Sequence; identical to SEQ ID NO: 1613
  Description of Artificial Sequence: Synthetic cashew; 5' sequence and inner sequence

SEQ ID NO: 13356 - DNA, 53 bp, Artificial Sequence; identical to SEQ ID NO: 5651
  Description of Artificial Sequence: Synthetic cashew; 5' sequence and inner sequence

SEQ ID NO: 13357 - DNA, 53 bp, Artificial Sequence; identical to SEQ ID NO: 5814
  Description of Artificial Sequence: Synthetic cashew; 5' sequence and inner sequence

SEQ ID NO: 13358 - DNA, 53 bp, Artificial Sequence; identical to SEQ ID NO: 1218
  Description of Artificial Sequence: Synthetic cashew; 5' sequence and inner sequence

SEQ ID NO: 13359 - DNA, 53 bp, Artificial Sequence; identical to SEQ ID NO: 1366
  Description of Artificial Sequence: Synthetic cashew; 5' sequence and inner sequence

SEQ ID NO: 13360 - DNA, 53 bp, Artificial Sequence; identical to SEQ ID NO: 1419
  Description of Artificial Sequence: Synthetic cashew; 5' sequence and inner sequence

SEQ ID NO: 13361 - DNA, 53 bp, Artificial Sequence; identical to SEQ ID NO: 1137
  Description of Artificial Sequence: Synthetic cashew; 5' sequence and inner sequence

SEQ ID NO: 13362 - DNA, 53 bp, Artificial Sequence; identical to SEQ ID NO: 1273
  Description of Artificial Sequence: Synthetic cashew; 5' sequence and inner sequence

SEQ ID NO: 13363 - DNA, 53 bp, Artificial Sequence; identical to SEQ ID NO: 1392
  Description of Artificial Sequence: Synthetic cashew; 5' sequence and inner sequence

SEQ ID NO: 13364 - DNA, 53 bp, Artificial Sequence; identical to SEQ ID NO: 1294
  Description of Artificial Sequence: Synthetic cashew; 5' sequence and inner sequence

SEQ ID NO: 13365 - DNA, 51 bp, Artificial Sequence; identical to SEQ ID NO: 1241
  Description of Artificial Sequence: Synthetic cashew; 5' sequence and inner sequence

SEQ ID NO: 13366 - DNA, 53 bp, Artificial Sequence; identical to SEQ ID NO: 1901
  Description of Artificial Sequence: Synthetic cashew; 5' sequence and inner sequence

SEQ ID NO: 13367 - DNA, 53 bp, Artificial Sequence; identical to SEQ ID NO: 5419
  Description of Artificial Sequence: Synthetic cashew; 5' sequence and inner sequence

SEQ ID NO: 13368 - DNA, 53 bp, Artificial Sequence; identical to SEQ ID NO: 1695
  Description of Artificial Sequence: Synthetic cashew; 5' sequence and inner sequence

SEQ ID NO: 13369 - DNA, 53 bp, Artificial Sequence; identical to SEQ ID NO: 1968
  Description of Artificial Sequence: Synthetic cashew; 5' sequence and inner sequence

SEQ ID NO: 13370 - DNA, 53 bp, Artificial Sequence; identical to SEQ ID NO: 1457
  Description of Artificial Sequence: Synthetic cashew; 5' sequence and inner sequence

SEQ ID NO: 13371 - DNA, 53 bp, Artificial Sequence; identical to SEQ ID NO: 1506
  Description of Artificial Sequence: Synthetic cashew; 5' sequence and inner sequence

SEQ ID NO: 13372 - DNA, 53 bp, Artificial Sequence; identical to SEQ ID NO: 1478
  Description of Artificial Sequence: Synthetic cashew; 5' sequence and inner sequence

SEQ ID NO: 13373 - DNA, 53 bp, Artificial Sequence; identical to SEQ ID NO: 1224
  Description of Artificial Sequence: Synthetic cashew; 5' sequence and inner sequence

SEQ ID NO: 13374 - DNA, 53 bp, Artificial Sequence; identical to SEQ ID NO: 1563
  Description of Artificial Sequence: Synthetic cashew; 5' sequence and inner sequence

SEQ ID NO: 13375 - DNA, 53 bp, Artificial Sequence; identical to SEQ ID NO: 1160
  Description of Artificial Sequence: Synthetic cashew; 5' sequence and inner sequence

SEQ ID NO: 13376 - DNA, 53 bp, Artificial Sequence; identical to SEQ ID NO: 5406
  Description of Artificial Sequence: Synthetic cashew; 5' sequence and inner sequence

SEQ ID NO: 13377 - DNA, 53 bp, Artificial Sequence; identical to SEQ ID NO: 5394
  Description of Artificial Sequence: Synthetic cashew; 5' sequence and inner sequence

SEQ ID NO: 13378 - DNA, 53 bp, Artificial Sequence; identical to SEQ ID NO: 1519
  Description of Artificial Sequence: Synthetic cashew; 5' sequence and inner sequence

SEQ ID NO: 13379 - DNA, 53 bp, Artificial Sequence; identical to SEQ ID NO: 9891
  Description of Artificial Sequence: Synthetic cashew; 5' sequence and inner sequence

SEQ ID NO: 13380 - DNA, 53 bp, Artificial Sequence; identical to SEQ ID NO: 1379
  Description of Artificial Sequence: Synthetic cashew; 5' sequence and inner sequence

SEQ ID NO: 13381 - DNA, 53 bp, Artificial Sequence; identical to SEQ ID NO: 5301
  Description of Artificial Sequence: Synthetic cashew; 5' sequence and inner sequence

SEQ ID NO: 13382 - DNA, 53 bp, Artificial Sequence; identical to SEQ ID NO: 1523
  Description of Artificial Sequence: Synthetic cashew; 5' sequence and inner sequence

SEQ ID NO: 13383 - DNA, 53 bp, Artificial Sequence; identical to SEQ ID NO: 1364
  Description of Artificial Sequence: Synthetic cashew; 5' sequence and inner sequence

SEQ ID NO: 13384 - DNA, 53 bp, Artificial Sequence; identical to SEQ ID NO: 1350
  Description of Artificial Sequence: Synthetic cashew; 5' sequence and inner sequence

SEQ ID NO: 13385 - DNA, 53 bp, Artificial Sequence; identical to SEQ ID NO: 5592
  Description of Artificial Sequence: Synthetic cashew; 5' sequence and inner sequence

SEQ ID NO: 13386 - DNA, 53 bp, Artificial Sequence; identical to SEQ ID NO: 1517
  Description of Artificial Sequence: Synthetic cashew; 5' sequence and inner sequence

SEQ ID NO: 13387 - DNA, 53 bp, Artificial Sequence; identical to SEQ ID NO: 1176
  Description of Artificial Sequence: Synthetic cashew; 5' sequence and inner sequence

SEQ ID NO: 13388 - DNA, 53 bp, Artificial Sequence; identical to SEQ ID NO: 9618
  Description of Artificial Sequence: Synthetic cashew; 5' sequence and inner sequence

SEQ ID NO: 13389 - DNA, 53 bp, Artificial Sequence; identical to SEQ ID NO: 1484
  Description of Artificial Sequence: Synthetic cashew; 5' sequence and inner sequence

SEQ ID NO: 13390 - DNA, 53 bp, Artificial Sequence; identical to SEQ ID NO: 1433
  Description of Artificial Sequence: Synthetic cashew; 5' sequence and inner sequence

SEQ ID NO: 13391 - DNA, 53 bp, Artificial Sequence; identical to SEQ ID NO: 1450
  Description of Artificial Sequence: Synthetic cashew; 5' sequence and inner sequence

SEQ ID NO: 13392 - DNA, 53 bp, Artificial Sequence; identical to SEQ ID NO: 9546
  Description of Artificial Sequence: Synthetic cashew; 5' sequence and inner sequence

SEQ ID NO: 13393 - DNA, 53 bp, Artificial Sequence; identical to SEQ ID NO: 1272
  Description of Artificial Sequence: Synthetic cashew; 5' sequence and inner sequence

SEQ ID NO: 13394 - DNA, 53 bp, Artificial Sequence; identical to SEQ ID NO: 1124
  Description of Artificial Sequence: Synthetic cashew; 5' sequence and inner sequence

SEQ ID NO: 13395 - DNA, 53 bp, Artificial Sequence; identical to SEQ ID NO: 1167
  Description of Artificial Sequence: Synthetic cashew; 5' sequence and inner sequence

SEQ ID NO: 13396 - DNA, 53 bp, Artificial Sequence; identical to SEQ ID NO: 1391
  Description of Artificial Sequence: Synthetic cashew; 5' sequence and inner sequence

SEQ ID NO: 13397 - DNA, 53 bp, Artificial Sequence; identical to SEQ ID NO: 1928
  Description of Artificial Sequence: Synthetic cashew; 5' sequence and inner sequence

SEQ ID NO: 13398 - DNA, 53 bp, Artificial Sequence; identical to SEQ ID NO: 1313
  Description of Artificial Sequence: Synthetic cashew; 5' sequence and inner sequence

SEQ ID NO: 13399 - DNA, 53 bp, Artificial Sequence; identical to SEQ ID NO: 1279
  Description of Artificial Sequence: Synthetic cashew; 5' sequence and inner sequence

SEQ ID NO: 13400 - DNA, 53 bp, Artificial Sequence; identical to SEQ ID NO: 1296
  Description of Artificial Sequence: Synthetic cashew; 5' sequence and inner sequence

SEQ ID NO: 13401 - DNA, 53 bp, Artificial Sequence; identical to SEQ ID NO: 1869
  Description of Artificial Sequence: Synthetic cashew; 5' sequence and inner sequence

SEQ ID NO: 13402 - DNA, 53 bp, Artificial Sequence; identical to SEQ ID NO: 1953
  Description of Artificial Sequence: Synthetic cashew; 5' sequence and inner sequence

SEQ ID NO: 13403 - DNA, 53 bp, Artificial Sequence; identical to SEQ ID NO: 1220
  Description of Artificial Sequence: Synthetic cashew; 5' sequence and inner sequence

SEQ ID NO: 13404 - DNA, 53 bp, Artificial Sequence; identical to SEQ ID NO: 1727
  Description of Artificial Sequence: Synthetic cashew; 5' sequence and inner sequence

SEQ ID NO: 13405 - DNA, 53 bp, Artificial Sequence; identical to SEQ ID NO: 1520
  Description of Artificial Sequence: Synthetic cashew; 5' sequence and inner sequence

SEQ ID NO: 13406 - DNA, 53 bp, Artificial Sequence; identical to SEQ ID NO: 1441
  Description of Artificial Sequence: Synthetic cashew; 5' sequence and inner sequence

SEQ ID NO: 13407 - DNA, 53 bp, Artificial Sequence; identical to SEQ ID NO: 1925
  Description of Artificial Sequence: Synthetic cashew; 5' sequence and inner sequence

SEQ ID NO: 13408 - DNA, 53 bp, Artificial Sequence; identical to SEQ ID NO: 1426
  Description of Artificial Sequence: Synthetic cashew; 5' sequence and inner sequence

SEQ ID NO: 13409 - DNA, 53 bp, Artificial Sequence; identical to SEQ ID NO: 5535
  Description of Artificial Sequence: Synthetic cashew; 5' sequence and inner sequence

SEQ ID NO: 13410 - DNA, 53 bp, Artificial Sequence; identical to SEQ ID NO: 1994
  Description of Artificial Sequence: Synthetic cashew; 5' sequence and inner sequence

SEQ ID NO: 13411 - DNA, 53 bp, Artificial Sequence; identical to SEQ ID NO: 5380
  Description of Artificial Sequence: Synthetic cashew; 5' sequence and inner sequence

SEQ ID NO: 13412 - DNA, 53 bp, Artificial Sequence; identical to SEQ ID NO: 5907
  Description of Artificial Sequence: Synthetic cashew; 5' sequence and inner sequence

SEQ ID NO: 13413 - DNA, 53 bp, Artificial Sequence; identical to SEQ ID NO: 1209
  Description of Artificial Sequence: Synthetic cashew; 5' sequence and inner sequence

SEQ ID NO: 13414 - DNA, 53 bp, Artificial Sequence; identical to SEQ ID NO: 1625
  Description of Artificial Sequence: Synthetic cashew; 5' sequence and inner sequence

SEQ ID NO: 13415 - DNA, 53 bp, Artificial Sequence; identical to SEQ ID NO: 1248
  Description of Artificial Sequence: Synthetic cashew; 5' sequence and inner sequence

SEQ ID NO: 13416 - DNA, 53 bp, Artificial Sequence; identical to SEQ ID NO: 1481
  Description of Artificial Sequence: Synthetic cashew; 5' sequence and inner sequence

SEQ ID NO: 13417 - DNA, 53 bp, Artificial Sequence; identical to SEQ ID NO: 1850
  Description of Artificial Sequence: Synthetic cashew; 5' sequence and inner sequence

SEQ ID NO: 13418 - DNA, 53 bp, Artificial Sequence; identical to SEQ ID NO: 1793
  Description of Artificial Sequence: Synthetic cashew; 5' sequence and inner sequence

SEQ ID NO: 13419 - DNA, 53 bp, Artificial Sequence; identical to SEQ ID NO: 1358
  Description of Artificial Sequence: Synthetic cashew; 5' sequence and inner sequence

SEQ ID NO: 13420 - DNA, 53 bp, Artificial Sequence; identical to SEQ ID NO: 1244
  Description of Artificial Sequence: Synthetic cashew; 5' sequence and inner sequence

SEQ ID NO: 13421 - DNA, 53 bp, Artificial Sequence; identical to SEQ ID NO: 1274
  Description of Artificial Sequence: Synthetic cashew; 5' sequence and inner sequence

SEQ ID NO: 13422 - DNA, 52 bp, Artificial Sequence; identical to SEQ ID NO: 1334
  Description of Artificial Sequence: Synthetic cashew; 5' sequence and inner sequence

SEQ ID NO: 13423 - DNA, 53 bp, Artificial Sequence; identical to SEQ ID NO: 1628
  Description of Artificial Sequence: Synthetic cashew; 5' sequence and inner sequence

SEQ ID NO: 13424 - DNA, 53 bp, Artificial Sequence; identical to SEQ ID NO: 1504
  Description of Artificial Sequence: Synthetic cashew; 5' sequence and inner sequence

SEQ ID NO: 13425 - DNA, 53 bp, Artificial Sequence; identical to SEQ ID NO: 1300
  Description of Artificial Sequence: Synthetic cashew; 5' sequence and inner sequence

SEQ ID NO: 13426 - DNA, 53 bp, Artificial Sequence; identical to SEQ ID NO: 1615
  Description of Artificial Sequence: Synthetic cashew; 5' sequence and inner sequence

SEQ ID NO: 13427 - DNA, 53 bp, Artificial Sequence; identical to SEQ ID NO: 1714
  Description of Artificial Sequence: Synthetic cashew; 5' sequence and inner sequence

SEQ ID NO: 13428 - DNA, 53 bp, Artificial Sequence
  Description of Artificial Sequence: Synthetic cashew; 5' sequence and inner sequence
tagggaagagaaggacatatgatcgcgacgagtaggcatgtcttctgtgcgca

SEQ ID NO: 13429 - DNA, 53 bp, Artificial Sequence; identical to SEQ ID NO: 5525
  Description of Artificial Sequence: Synthetic cashew; 5' sequence and inner sequence

SEQ ID NO: 13430 - DNA, 53 bp, Artificial Sequence; identical to SEQ ID NO: 1278
  Description of Artificial Sequence: Synthetic cashew; 5' sequence and inner sequence

SEQ ID NO: 13431 - DNA, 53 bp, Artificial Sequence; identical to SEQ ID NO: 5401
  Description of Artificial Sequence: Synthetic cashew; 5' sequence and inner sequence

SEQ ID NO: 13432 - DNA, 53 bp, Artificial Sequence; identical to SEQ ID NO: 1239
  Description of Artificial Sequence: Synthetic cashew; 5' sequence and inner sequence

SEQ ID NO: 13433 - DNA, 53 bp, Artificial Sequence; identical to SEQ ID NO: 1410
  Description of Artificial Sequence: Synthetic cashew; 5' sequence and inner sequence

SEQ ID NO: 13434 - DNA, 53 bp, Artificial Sequence; identical to SEQ ID NO: 5260
  Description of Artificial Sequence: Synthetic cashew; 5' sequence and inner sequence

SEQ ID NO: 13435 - DNA, 53 bp, Artificial Sequence; identical to SEQ ID NO: 1846
  Description of Artificial Sequence: Synthetic cashew; 5' sequence and inner sequence

SEQ ID NO: 13436 - DNA, 53 bp, Artificial Sequence; identical to SEQ ID NO: 1276
  Description of Artificial Sequence: Synthetic cashew; 5' sequence and inner sequence

SEQ ID NO: 13437 - DNA, 53 bp, Artificial Sequence; identical to SEQ ID NO: 1281
  Description of Artificial Sequence: Synthetic cashew; 5' sequence and inner sequence

SEQ ID NO: 13438 - DNA, 53 bp, Artificial Sequence; identical to SEQ ID NO: 1631
  Description of Artificial Sequence: Synthetic cashew; 5' sequence and inner sequence

SEQ ID NO: 13439 - DNA, 53 bp, Artificial Sequence; identical to SEQ ID NO: 1950
  Description of Artificial Sequence: Synthetic cashew; 5' sequence and inner sequence

SEQ ID NO: 13440 - DNA, 53 bp, Artificial Sequence; identical to SEQ ID NO: 1395
  Description of Artificial Sequence: Synthetic cashew; 5' sequence and inner sequence

SEQ ID NO: 13441 - DNA, 53 bp, Artificial Sequence; identical to SEQ ID NO: 1891
  Description of Artificial Sequence: Synthetic cashew; 5' sequence and inner sequence

SEQ ID NO: 13442 - DNA, 53 bp, Artificial Sequence; identical to SEQ ID NO: 1280
  Description of Artificial Sequence: Synthetic cashew; 5' sequence and inner sequence

SEQ ID NO: 13443 - DNA, 53 bp, Artificial Sequence; identical to SEQ ID NO: 1374
  Description of Artificial Sequence: Synthetic cashew; 5' sequence and inner sequence

SEQ ID NO: 13444 - DNA, 53 bp, Artificial Sequence; identical to SEQ ID NO: 5280
  Description of Artificial Sequence: Synthetic cashew; 5' sequence and inner sequence

SEQ ID NO: 13445 - DNA, 53 bp, Artificial Sequence; identical to SEQ ID NO: 5792
  Description of Artificial Sequence: Synthetic cashew; 5' sequence and inner sequence

SEQ ID NO: 13446 - DNA, 53 bp, Artificial Sequence; identical to SEQ ID NO: 1657
  Description of Artificial Sequence: Synthetic cashew; 5' sequence and inner sequence

SEQ ID NO: 13447 - DNA, 52 bp, Artificial Sequence; identical to SEQ ID NO: 1259
  Description of Artificial Sequence: Synthetic cashew; 5' sequence and inner sequence

SEQ ID NO: 13448 - DNA, 53 bp, Artificial Sequence; identical to SEQ ID NO: 1807
  Description of Artificial Sequence: Synthetic cashew; 5' sequence and inner sequence

SEQ ID NO: 13449 - DNA, 53 bp, Artificial Sequence; identical to SEQ ID NO: 5238
  Description of Artificial Sequence: Synthetic cashew; 5' sequence and inner sequence

SEQ ID NO: 13450 - DNA, 53 bp, Artificial Sequence; identical to SEQ ID NO: 1801
  Description of Artificial Sequence: Synthetic cashew; 5' sequence and inner sequence

SEQ ID NO: 13451 - DNA, 53 bp, Artificial Sequence; identical to SEQ ID NO: 1212
  Description of Artificial Sequence: Synthetic cashew; 5' sequence and inner sequence

SEQ ID NO: 13452 - DNA, 53 bp, Artificial Sequence; identical to SEQ ID NO: 2002
  Description of Artificial Sequence: Synthetic cashew; 5' sequence and inner sequence

SEQ ID NO: 13453 - DNA, 53 bp, Artificial Sequence; identical to SEQ ID NO: 5585
  Description of Artificial Sequence: Synthetic cashew; 5' sequence and inner sequence

SEQ ID NO: 13454 - DNA, 53 bp, Artificial Sequence; identical to SEQ ID NO: 5351
  Description of Artificial Sequence: Synthetic cashew; 5' sequence and inner sequence

SEQ ID NO: 13455 - DNA, 53 bp, Artificial Sequence; identical to SEQ ID NO: 1811
  Description of Artificial Sequence: Synthetic cashew; 5' sequence and inner sequence

SEQ ID NO: 13456 - DNA, 53 bp, Artificial Sequence; identical to SEQ ID NO: 1403
  Description of Artificial Sequence: Synthetic cashew; 5' sequence and inner sequence

SEQ ID NO: 13457 - DNA, 53 bp, Artificial Sequence; identical to SEQ ID NO: 5613
  Description of Artificial Sequence: Synthetic cashew; 5' sequence and inner sequence

SEQ ID NO: 13458 - DNA, 53 bp, Artificial Sequence; identical to SEQ ID NO: 1617
  Description of Artificial Sequence: Synthetic cashew; 5' sequence and inner sequence

SEQ ID NO: 13459 - DNA, 53 bp, Artificial Sequence; identical to SEQ ID NO: 1620
  Description of Artificial Sequence: Synthetic cashew; 5' sequence and inner sequence

SEQ ID NO: 13460 - DNA, 53 bp, Artificial Sequence; identical to SEQ ID NO: 1260
  Description of Artificial Sequence: Synthetic cashew; 5' sequence and inner sequence

SEQ ID NO: 13461 - DNA, 53 bp, Artificial Sequence; identical to SEQ ID NO: 5755
  Description of Artificial Sequence: Synthetic cashew; 5' sequence and inner sequence

SEQ ID NO: 13462 - DNA, 53 bp, Artificial Sequence; identical to SEQ ID NO: 1632
  Description of Artificial Sequence: Synthetic cashew; 5' sequence and inner sequence

SEQ ID NO: 13463 - DNA, 53 bp, Artificial Sequence; identical to SEQ ID NO: 1771
  Description of Artificial Sequence: Synthetic cashew; 5' sequence and inner sequence

SEQ ID NO: 13464 - DNA, 53 bp, Artificial Sequence; identical to SEQ ID NO: 1603
  Description of Artificial Sequence: Synthetic cashew; 5' sequence and inner sequence

SEQ ID NO: 13465 - DNA, 53 bp, Artificial Sequence; identical to SEQ ID NO: 1515
  Description of Artificial Sequence: Synthetic cashew; 5' sequence and inner sequence

SEQ ID NO: 13466 - DNA, 53 bp, Artificial Sequence; identical to SEQ ID NO: 1912
  Description of Artificial Sequence: Synthetic cashew; 5' sequence and inner sequence

SEQ ID NO: 13467 - DNA, 53 bp, Artificial Sequence; identical to SEQ ID NO: 1249
  Description of Artificial Sequence: Synthetic cashew; 5' sequence and inner sequence

SEQ ID NO: 13468 - DNA, 53 bp, Artificial Sequence; identical to SEQ ID NO: 5870
  Description of Artificial Sequence: Synthetic cashew; 5' sequence and inner sequence

SEQ ID NO: 13469 - DNA, 53 bp, Artificial Sequence; identical to SEQ ID NO: 5384
  Description of Artificial Sequence: Synthetic cashew; 5' sequence and inner sequence

SEQ ID NO: 13470 - DNA, 53 bp, Artificial Sequence; identical to SEQ ID NO: 1915
  Description of Artificial Sequence: Synthetic cashew; 5' sequence and inner sequence

SEQ ID NO: 13471 - DNA, 53 bp, Artificial Sequence; identical to SEQ ID NO: 1534
  Description of Artificial Sequence: Synthetic cashew; 5' sequence and inner sequence

SEQ ID NO: 13472 - DNA, 53 bp, Artificial Sequence; identical to SEQ ID NO: 1437
  Description of Artificial Sequence: Synthetic cashew; 5' sequence and inner sequence

SEQ ID NO: 13473 - DNA, 53 bp, Artificial Sequence; identical to SEQ ID NO: 1900
  Description of Artificial Sequence: Synthetic cashew; 5' sequence and inner sequence

SEQ ID NO: 13474 - DNA, 53 bp, Artificial Sequence; identical to SEQ ID NO: 5692
  Description of Artificial Sequence: Synthetic cashew; 5' sequence and inner sequence

SEQ ID NO: 13475 - DNA, 53 bp, Artificial Sequence; identical to SEQ ID NO: 5775
  Description of Artificial Sequence: Synthetic cashew; 5' sequence and inner sequence

SEQ ID NO: 13476 - DNA, 53 bp, Artificial Sequence; identical to SEQ ID NO: 5543
  Description of Artificial Sequence: Synthetic cashew; 5' sequence and inner sequence

SEQ ID NO: 13477 - DNA, 53 bp, Artificial Sequence; identical to SEQ ID NO: 1210
  Description of Artificial Sequence: Synthetic cashew; 5' sequence and inner sequence

SEQ ID NO: 13478 - DNA, 53 bp, Artificial Sequence; identical to SEQ ID NO: 1800
  Description of Artificial Sequence: Synthetic cashew; 5' sequence and inner sequence

SEQ ID NO: 13479 - DNA, 53 bp, Artificial Sequence; identical to SEQ ID NO: 5230
  Description of Artificial Sequence: Synthetic cashew; 5' sequence and inner sequence

SEQ ID NO: 13480 - DNA, 53 bp, Artificial Sequence; identical to SEQ ID NO: 1256
  Description of Artificial Sequence: Synthetic cashew; 5' sequence and inner sequence

SEQ ID NO: 13481 - DNA, 53 bp, Artificial Sequence; identical to SEQ ID NO: 1345
  Description of Artificial Sequence: Synthetic cashew; 5' sequence and inner sequence

SEQ ID NO: 13482 - DNA, 53 bp, Artificial Sequence; identical to SEQ ID NO: 9564
  Description of Artificial Sequence: Synthetic cashew; 5' sequence and inner sequence

SEQ ID NO: 13483 - DNA, 53 bp, Artificial Sequence; identical to SEQ ID NO: 5312
  Description of Artificial Sequence: Synthetic cashew; 5' sequence and inner sequence

SEQ ID NO: 13484 - DNA, 53 bp, Artificial Sequence; identical to SEQ ID NO: 1991
  Description of Artificial Sequence: Synthetic cashew; 5' sequence and inner sequence

SEQ ID NO: 13485 - DNA, 52 bp, Artificial Sequence; identical to SEQ ID NO: 1251
  Description of Artificial Sequence: Synthetic cashew; 5' sequence and inner sequence

SEQ ID NO: 13486 - DNA, 53 bp, Artificial Sequence; identical to SEQ ID NO: 1545
  Description of Artificial Sequence: Synthetic cashew; 5' sequence and inner sequence

SEQ ID NO: 13487 - DNA, 53 bp, Artificial Sequence; identical to SEQ ID NO: 1701
  Description of Artificial Sequence: Synthetic cashew; 5' sequence and inner sequence

SEQ ID NO: 13488 - DNA, 53 bp, Artificial Sequence; identical to SEQ ID NO: 1461
  Description of Artificial Sequence: Synthetic cashew; 5' sequence and inner sequence

SEQ ID NO: 13489 - DNA, 53 bp, Artificial Sequence; identical to SEQ ID NO: 1867
  Description of Artificial Sequence: Synthetic cashew; 5' sequence and inner sequence

SEQ ID NO: 13490 - DNA, 53 bp, Artificial Sequence; identical to SEQ ID NO: 1622
  Description of Artificial Sequence: Synthetic cashew; 5' sequence and inner sequence

SEQ ID NO: 13491 - DNA, 53 bp, Artificial Sequence; identical to SEQ ID NO: 1333
  Description of Artificial Sequence: Synthetic cashew; 5' sequence and inner sequence

SEQ ID NO: 13492 - DNA, 53 bp, Artificial Sequence; identical to SEQ ID NO: 1386
  Description of Artificial Sequence: Synthetic cashew; 5' sequence and inner sequence

SEQ ID NO: 13493 - DNA, 53 bp, Artificial Sequence; identical to SEQ ID NO: 1984
  Description of Artificial Sequence: Synthetic cashew; 5' sequence and inner sequence

SEQ ID NO: 13494 - DNA, 53 bp, Artificial Sequence; identical to SEQ ID NO: 1777
  Description of Artificial Sequence: Synthetic cashew; 5' sequence and inner sequence

SEQ ID NO: 13495 - DNA, 53 bp, Artificial Sequence; identical to SEQ ID NO: 1275
  Description of Artificial Sequence: Synthetic cashew; 5' sequence and inner sequence

SEQ ID NO: 13496 - DNA, 53 bp, Artificial Sequence; identical to SEQ ID NO: 1226
  Description of Artificial Sequence: Synthetic cashew; 5' sequence and inner sequence

SEQ ID NO: 13497 - DNA, 53 bp, Artificial Sequence; identical to SEQ ID NO: 1647
  Description of Artificial Sequence: Synthetic cashew; 5' sequence and inner sequence

SEQ ID NO: 13498 - DNA, 53 bp, Artificial Sequence; identical to SEQ ID NO: 1635
  Description of Artificial Sequence: Synthetic cashew; 5' sequence and inner sequence

SEQ ID NO: 13499 - DNA, 53 bp, Artificial Sequence; identical to SEQ ID NO: 1375
  Description of Artificial Sequence: Synthetic cashew; 5' sequence and inner sequence

SEQ ID NO: 13500 - DNA, 53 bp, Artificial Sequence; identical to SEQ ID NO: 9670
  Description of Artificial Sequence: Synthetic cashew; 5' sequence and inner sequence

SEQ ID NO: 13501 - DNA, 53 bp, Artificial Sequence; identical to SEQ ID NO: 5499
  Description of Artificial Sequence: Synthetic cashew; 5' sequence and inner sequence

SEQ ID NO: 13502 - DNA, 53 bp, Artificial Sequence; identical to SEQ ID NO: 1475
  Description of Artificial Sequence: Synthetic cashew; 5' sequence and inner sequence

SEQ ID NO: 13503 - DNA, 53 bp, Artificial Sequence; identical to SEQ ID NO: 5605
  Description of Artificial Sequence: Synthetic cashew; 5' sequence and inner sequence

SEQ ID NO: 13504 - DNA, 53 bp, Artificial Sequence; identical to SEQ ID NO: 1633
  Description of Artificial Sequence: Synthetic cashew; 5' sequence and inner sequence

SEQ ID NO: 13505 - DNA, 53 bp, Artificial Sequence; identical to SEQ ID NO: 1789
  Description of Artificial Sequence: Synthetic cashew; 5' sequence and inner sequence

SEQ ID NO: 13506 - DNA, 53 bp, Artificial Sequence; identical to SEQ ID NO: 1780
  Description of Artificial Sequence: Synthetic cashew; 5' sequence and inner sequence

SEQ ID NO: 13507 - DNA, 53 bp, Artificial Sequence; identical to SEQ ID NO: 1396
  Description of Artificial Sequence: Synthetic cashew; 5' sequence and inner sequence

SEQ ID NO: 13508 - DNA, 53 bp, Artificial Sequence; identical to SEQ ID NO: 1728
  Description of Artificial Sequence: Synthetic cashew; 5' sequence and inner sequence

SEQ ID NO: 13509 - DNA, 53 bp, Artificial Sequence; identical to SEQ ID NO: 5393
  Description of Artificial Sequence: Synthetic cashew; 5' sequence and inner sequence

SEQ ID NO: 13510 - DNA, 53 bp, Artificial Sequence; identical to SEQ ID NO: 9458
  Description of Artificial Sequence: Synthetic cashew; 5' sequence and inner sequence

SEQ ID NO: 13511 - DNA, 53 bp, Artificial Sequence; identical to SEQ ID NO: 1181
  Description of Artificial Sequence: Synthetic cashew; 5' sequence and inner sequence

SEQ ID NO: 13512 - DNA, 53 bp, Artificial Sequence; identical to SEQ ID NO: 1114
  Description of Artificial Sequence: Synthetic cashew; 5' sequence and inner sequence

SEQ ID NO: 13513 - DNA, 56 bp, Artificial Sequence; identical to SEQ ID NO: 1864
  Description of Artificial Sequence: Synthetic cashew; 5' sequence and inner sequence

SEQ ID NO: 13514 - DNA, 53 bp, Artificial Sequence; identical to SEQ ID NO: 9763
  Description of Artificial Sequence: Synthetic cashew; 5' sequence and inner sequence

SEQ ID NO: 13515 - DNA, 53 bp, Artificial Sequence; identical to SEQ ID NO: 5492
  Description of Artificial Sequence: Synthetic cashew; 5' sequence and inner sequence

SEQ ID NO: 13516 - DNA, 53 bp, Artificial Sequence; identical to SEQ ID NO: 1356
  Description of Artificial Sequence: Synthetic cashew; 5' sequence and inner sequence

SEQ ID NO: 13517 - DNA, 53 bp, Artificial Sequence; identical to SEQ ID NO: 5999
  Description of Artificial Sequence: Synthetic cashew; 5' sequence and inner sequence

SEQ ID NO: 13518 - DNA, 53 bp, Artificial Sequence; identical to SEQ ID NO: 1951
  Description of Artificial Sequence: Synthetic cashew; 5' sequence and inner sequence

SEQ ID NO: 13519 - DNA, 53 bp, Artificial Sequence; identical to SEQ ID NO: 5428
  Description of Artificial Sequence: Synthetic cashew; 5' sequence and inner sequence

SEQ ID NO: 13520 - DNA, 53 bp, Artificial Sequence; identical to SEQ ID NO: 5653
  Description of Artificial Sequence: Synthetic cashew; 5' sequence and inner sequence

SEQ ID NO: 13521 - DNA, 53 bp, Artificial Sequence
  Description of Artificial Sequence: Synthetic cashew; 5' sequence and inner sequence
tagggaagagaaggacatatgatccgcacgtagccctatcaggggtgcatgca

SEQ ID NO: 13522 - DNA, 53 bp, Artificial Sequence; identical to SEQ ID NO: 9844
  Description of Artificial Sequence: Synthetic cashew; 5' sequence and inner sequence

SEQ ID NO: 13523 - DNA, 53 bp, Artificial Sequence; identical to SEQ ID NO: 1328
  Description of Artificial Sequence: Synthetic cashew; 5' sequence and inner sequence

SEQ ID NO: 13524 - DNA, 53 bp, Artificial Sequence; identical to SEQ ID NO: 5459
  Description of Artificial Sequence: Synthetic cashew; 5' sequence and inner sequence

SEQ ID NO: 13525 - DNA, 53 bp, Artificial Sequence; identical to SEQ ID NO: 5445
  Description of Artificial Sequence: Synthetic cashew; 5' sequence and inner sequence

SEQ ID NO: 13526 - DNA, 53 bp, Artificial Sequence; identical to SEQ ID NO: 1101
  Description of Artificial Sequence: Synthetic cashew; 5' sequence and inner sequence

SEQ ID NO: 13527 - DNA, 53 bp, Artificial Sequence; identical to SEQ ID NO: 1510
  Description of Artificial Sequence: Synthetic cashew; 5' sequence and inner sequence

SEQ ID NO: 13528 - DNA, 53 bp, Artificial Sequence; identical to SEQ ID NO: 1422
  Description of Artificial Sequence: Synthetic cashew; 5' sequence and inner sequence

SEQ ID NO: 13529 - DNA, 53 bp, Artificial Sequence; identical to SEQ ID NO: 1405
  Description of Artificial Sequence: Synthetic cashew; 5' sequence and inner sequence

SEQ ID NO: 13530 - DNA, 53 bp, Artificial Sequence; identical to SEQ ID NO: 1326
  Description of Artificial Sequence: Synthetic cashew; 5' sequence and inner sequence

SEQ ID NO: 13531 - DNA, 53 bp, Artificial Sequence; identical to SEQ ID NO: 5682
  Description of Artificial Sequence: Synthetic cashew; 5' sequence and inner sequence

SEQ ID NO: 13532 - DNA, 53 bp, Artificial Sequence; identical to SEQ ID NO: 1637
  Description of Artificial Sequence: Synthetic cashew; 5' sequence and inner sequence

SEQ ID NO: 13533 - DNA, 53 bp, Artificial Sequence; identical to SEQ ID NO: 1686
  Description of Artificial Sequence: Synthetic cashew; 5' sequence and inner sequence

SEQ ID NO: 13534 - DNA, 53 bp, Artificial Sequence; identical to SEQ ID NO: 1560
  Description of Artificial Sequence: Synthetic cashew; 5' sequence and inner sequence

SEQ ID NO: 13535 - DNA, 53 bp, Artificial Sequence; identical to SEQ ID NO: 1746
  Description of Artificial Sequence: Synthetic cashew; 5' sequence and inner sequence

SEQ ID NO: 13536 - DNA, 53 bp, Artificial Sequence; identical to SEQ ID NO: 1277
  Description of Artificial Sequence: Synthetic cashew; 5' sequence and inner sequence

SEQ ID NO: 13537 - DNA, 53 bp, Artificial Sequence; identical to SEQ ID NO: 1324
  Description of Artificial Sequence: Synthetic cashew; 5' sequence and inner sequence

SEQ ID NO: 13538 - DNA, 54 bp, Artificial Sequence; identical to SEQ ID NO: 1216
  Description of Artificial Sequence: Synthetic cashew; 5' sequence and inner sequence

SEQ ID NO: 13539 - DNA, 53 bp, Artificial Sequence; identical to SEQ ID NO: 5722
  Description of Artificial Sequence: Synthetic cashew; 5' sequence and inner sequence

SEQ ID NO: 13540 - DNA, 53 bp, Artificial Sequence; identical to SEQ ID NO: 5377
  Description of Artificial Sequence: Synthetic cashew; 5' sequence and inner sequence

SEQ ID NO: 13541 - DNA, 53 bp, Artificial Sequence; identical to SEQ ID NO: 1474
  Description of Artificial Sequence: Synthetic cashew; 5' sequence and inner sequence

SEQ ID NO: 13542 - DNA, 53 bp, Artificial Sequence; identical to SEQ ID NO: 1227
  Description of Artificial Sequence: Synthetic cashew; 5' sequence and inner sequence

SEQ ID NO: 13543 - DNA, 53 bp, Artificial Sequence; identical to SEQ ID NO: 9579
  Description of Artificial Sequence: Synthetic cashew; 5' sequence and inner sequence

SEQ ID NO: 13544 - DNA, 53 bp, Artificial Sequence; identical to SEQ ID NO: 1691
  Description of Artificial Sequence: Synthetic cashew; 5' sequence and inner sequence

SEQ ID NO: 13545 - DNA, 53 bp, Artificial Sequence; identical to SEQ ID NO: 5317
  Description of Artificial Sequence: Synthetic cashew; 5' sequence and inner sequence

SEQ ID NO: 13546 - DNA, 53 bp, Artificial Sequence; identical to SEQ ID NO: 1513
  Description of Artificial Sequence: Synthetic cashew; 5' sequence and inner sequence

SEQ ID NO: 13547 - DNA, 53 bp, Artificial Sequence; identical to SEQ ID NO: 1684
  Description of Artificial Sequence: Synthetic cashew; 5' sequence and inner sequence

SEQ ID NO: 13548 - DNA, 53 bp, Artificial Sequence; identical to SEQ ID NO: 5580
  Description of Artificial Sequence: Synthetic cashew; 5' sequence and inner sequence

SEQ ID NO: 13549 - DNA, 53 bp, Artificial Sequence; identical to SEQ ID NO: 1666
  Description of Artificial Sequence: Synthetic cashew; 5' sequence and inner sequence

SEQ ID NO: 13550 - DNA, 53 bp, Artificial Sequence; identical to SEQ ID NO: 5429
  Description of Artificial Sequence: Synthetic cashew; 5' sequence and inner sequence

SEQ ID NO: 13551 - DNA, 53 bp, Artificial Sequence; identical to SEQ ID NO: 1597
  Description of Artificial Sequence: Synthetic cashew; 5' sequence and inner sequence

SEQ ID NO: 13552 - DNA, 53 bp, Artificial Sequence; identical to SEQ ID NO: 1415
  Description of Artificial Sequence: Synthetic cashew; 5' sequence and inner sequence

SEQ ID NO: 13553 - DNA, 53 bp, Artificial Sequence; identical to SEQ ID NO: 1322
  Description of Artificial Sequence: Synthetic cashew; 5' sequence and inner sequence

SEQ ID NO: 13554 - DNA, 53 bp, Artificial Sequence; identical to SEQ ID NO: 5555
  Description of Artificial Sequence: Synthetic cashew; 5' sequence and inner sequence

SEQ ID NO: 13555 - DNA, 53 bp, Artificial Sequence; identical to SEQ ID NO: 1331
  Description of Artificial Sequence: Synthetic cashew; 5' sequence and inner sequence

SEQ ID NO: 13556 - DNA, 53 bp, Artificial Sequence; identical to SEQ ID NO: 1399
  Description of Artificial Sequence: Synthetic cashew; 5' sequence and inner sequence

SEQ ID NO: 13557 - DNA, 53 bp, Artificial Sequence; identical to SEQ ID NO: 1949
  Description of Artificial Sequence: Synthetic cashew; 5' sequence and inner sequence

SEQ ID NO: 13558 - DNA, 53 bp, Artificial Sequence; identical to SEQ ID NO: 1566
  Description of Artificial Sequence: Synthetic cashew; 5' sequence and inner sequence

SEQ ID NO: 13559 - DNA, 53 bp, Artificial Sequence; identical to SEQ ID NO: 1467
  Description of Artificial Sequence: Synthetic cashew; 5' sequence and inner sequence

SEQ ID NO: 13560 - DNA, 53 bp, Artificial Sequence; identical to SEQ ID NO: 1393
  Description of Artificial Sequence: Synthetic cashew; 5' sequence and inner sequence

SEQ ID NO: 13561 - DNA, 53 bp, Artificial Sequence; identical to SEQ ID NO: 1476
  Description of Artificial Sequence: Synthetic cashew; 5' sequence and inner sequence

SEQ ID NO: 13562 - DNA, 53 bp, Artificial Sequence; identical to SEQ ID NO: 1557
  Description of Artificial Sequence: Synthetic cashew; 5' sequence and inner sequence

SEQ ID NO: 13563 - DNA, 53 bp, Artificial Sequence; identical to SEQ ID NO: 1141
  Description of Artificial Sequence: Synthetic cashew; 5' sequence and inner sequence

SEQ ID NO: 13564 - DNA, 53 bp, Artificial Sequence; identical to SEQ ID NO: 1860
  Description of Artificial Sequence: Synthetic cashew; 5' sequence and inner sequence

SEQ ID NO: 13565 - DNA, 53 bp, Artificial Sequence; identical to SEQ ID NO: 5644
  Description of Artificial Sequence: Synthetic cashew; 5' sequence and inner sequence

SEQ ID NO: 13566 - DNA, 50 bp, Artificial Sequence; identical to SEQ ID NO: 1885
  Description of Artificial Sequence: Synthetic cashew; 5' sequence and inner sequence

SEQ ID NO: 13567 - DNA, 53 bp, Artificial Sequence; identical to SEQ ID NO: 5740
  Description of Artificial Sequence: Synthetic cashew; 5' sequence and inner sequence

SEQ ID NO: 13568 - DNA, 53 bp, Artificial Sequence; identical to SEQ ID NO: 1911
  Description of Artificial Sequence: Synthetic cashew; 5' sequence and inner sequence

SEQ ID NO: 13569 - DNA, 53 bp, Artificial Sequence; identical to SEQ ID NO: 1932
  Description of Artificial Sequence: Synthetic cashew; 5' sequence and inner sequence

SEQ ID NO: 13570 - DNA, 53 bp, Artificial Sequence; identical to SEQ ID NO: 5748
  Description of Artificial Sequence: Synthetic cashew; 5' sequence and inner sequence

SEQ ID NO: 13571 - DNA, 53 bp, Artificial Sequence; identical to SEQ ID NO: 1440
  Description of Artificial Sequence: Synthetic cashew; 5' sequence and inner sequence

SEQ ID NO: 13572 - DNA, 53 bp, Artificial Sequence; identical to SEQ ID NO: 1757
  Description of Artificial Sequence: Synthetic cashew; 5' sequence and inner sequence

SEQ ID NO: 13573 - DNA, 53 bp, Artificial Sequence; identical to SEQ ID NO: 5808
  Description of Artificial Sequence: Synthetic cashew; 5' sequence and inner sequence

SEQ ID NO: 13574 - DNA, 53 bp, Artificial Sequence; identical to SEQ ID NO: 1219
  Description of Artificial Sequence: Synthetic cashew; 5' sequence and inner sequence

SEQ ID NO: 13575 - DNA, 53 bp, Artificial Sequence; identical to SEQ ID NO: 5530
  Description of Artificial Sequence: Synthetic cashew; 5' sequence and inner sequence

SEQ ID NO: 13576 - DNA, 53 bp, Artificial Sequence; identical to SEQ ID NO: 1464
  Description of Artificial Sequence: Synthetic cashew; 5' sequence and inner sequence

SEQ ID NO: 13577 - DNA, 54 bp, Artificial Sequence; identical to SEQ ID NO: 5619
  Description of Artificial Sequence: Synthetic cashew; 5' sequence and inner sequence

SEQ ID NO: 13578 - DNA, 53 bp, Artificial Sequence; identical to SEQ ID NO: 9876
  Description of Artificial Sequence: Synthetic cashew; 5' sequence and inner sequence

SEQ ID NO: 13579 - DNA, 53 bp, Artificial Sequence; identical to SEQ ID NO: 1697
  Description of Artificial Sequence: Synthetic cashew; 5' sequence and inner sequence

SEQ ID NO: 13580 - DNA, 53 bp, Artificial Sequence; identical to SEQ ID NO: 5451
  Description of Artificial Sequence: Synthetic cashew; 5' sequence and inner sequence

SEQ ID NO: 13581 - DNA, 53 bp, Artificial Sequence
  Description of Artificial Sequence: Synthetic cashew; 5' sequence and inner sequence
tagggaagagaaggacatatgattcatcgcatgacgtctcatcgctgtggaca

SEQ ID NO: 13582 - DNA, 53 bp, Artificial Sequence; identical to SEQ ID NO: 5407
  Description of Artificial Sequence: Synthetic cashew; 5' sequence and inner sequence

SEQ ID NO: 13583 - DNA, 53 bp, Artificial Sequence; identical to SEQ ID NO: 1289
  Description of Artificial Sequence: Synthetic cashew; 5' sequence and inner sequence

SEQ ID NO: 13584 - DNA, 53 bp, Artificial Sequence; identical to SEQ ID NO: 1420
  Description of Artificial Sequence: Synthetic cashew; 5' sequence and inner sequence

SEQ ID NO: 13585 - DNA, 53 bp, Artificial Sequence; identical to SEQ ID NO: 5650
  Description of Artificial Sequence: Synthetic cashew; 5' sequence and inner sequence

SEQ ID NO: 13586 - DNA, 53 bp, Artificial Sequence; identical to SEQ ID NO: 1636
  Description of Artificial Sequence: Synthetic cashew; 5' sequence and inner sequence

SEQ ID NO: 13587 - DNA, 53 bp, Artificial Sequence; identical to SEQ ID NO: 1493
  Description of Artificial Sequence: Synthetic cashew; 5' sequence and inner sequence

SEQ ID NO: 13588 - DNA, 53 bp, Artificial Sequence; identical to SEQ ID NO: 5491
  Description of Artificial Sequence: Synthetic cashew; 5' sequence and inner sequence

SEQ ID NO: 13589 - DNA, 53 bp, Artificial Sequence; identical to SEQ ID NO: 9682
  Description of Artificial Sequence: Synthetic cashew; 5' sequence and inner sequence

SEQ ID NO: 13590 - DNA, 53 bp, Artificial Sequence; identical to SEQ ID NO: 9752
  Description of Artificial Sequence: Synthetic cashew; 5' sequence and inner sequence

SEQ ID NO: 13591 - DNA, 53 bp, Artificial Sequence; identical to SEQ ID NO: 5727
  Description of Artificial Sequence: Synthetic cashew; 5' sequence and inner sequence

SEQ ID NO: 13592 - DNA, 53 bp, Artificial Sequence
  Description of Artificial Sequence: Synthetic cashew; 5' sequence and inner sequence
tagggaagagaaggacatatgatcgcgacgagtaggcatgtcttctgcgtgca

SEQ ID NO: 13593 - DNA, 51 bp, Artificial Sequence; identical to SEQ ID NO: 1423
  Description of Artificial Sequence: Synthetic cashew; 5' sequence and inner sequence

SEQ ID NO: 13594 - DNA, 53 bp, Artificial Sequence; identical to SEQ ID NO: 1397
  Description of Artificial Sequence: Synthetic cashew; 5' sequence and inner sequence

SEQ ID NO: 13595 - DNA, 53 bp, Artificial Sequence; identical to SEQ ID NO: 1610
  Description of Artificial Sequence: Synthetic cashew; 5' sequence and inner sequence

SEQ ID NO: 13596 - DNA, 53 bp, Artificial Sequence; identical to SEQ ID NO: 5425
  Description of Artificial Sequence: Synthetic cashew; 5' sequence and inner sequence

SEQ ID NO: 13597 - DNA, 53 bp, Artificial Sequence; identical to SEQ ID NO: 1575
  Description of Artificial Sequence: Synthetic cashew; 5' sequence and inner sequence

SEQ ID NO: 13598 - DNA, 53 bp, Artificial Sequence; identical to SEQ ID NO: 9936
  Description of Artificial Sequence: Synthetic cashew; 5' sequence and inner sequence

SEQ ID NO: 13599 - DNA, 53 bp, Artificial Sequence; identical to SEQ ID NO: 9782
  Description of Artificial Sequence: Synthetic cashew; 5' sequence and inner sequence

SEQ ID NO: 13600 - DNA, 53 bp, Artificial Sequence; identical to SEQ ID NO: 5513
  Description of Artificial Sequence: Synthetic cashew; 5' sequence and inner sequence

SEQ ID NO: 13601 - DNA, 53 bp, Artificial Sequence; identical to SEQ ID NO: 1231
  Description of Artificial Sequence: Synthetic cashew; 5' sequence and inner sequence

SEQ ID NO: 13602 - DNA, 53 bp, Artificial Sequence; identical to SEQ ID NO: 1551
  Description of Artificial Sequence: Synthetic cashew; 5' sequence and inner sequence

SEQ ID NO: 13603 - DNA, 53 bp, Artificial Sequence; identical to SEQ ID NO: 1662
  Description of Artificial Sequence: Synthetic cashew; 5' sequence and inner sequence

SEQ ID NO: 13604 - DNA, 53 bp, Artificial Sequence; identical to SEQ ID NO: 1808
  Description of Artificial Sequence: Synthetic cashew; 5' sequence and inner sequence

SEQ ID NO: 13605 - DNA, 53 bp, Artificial Sequence; identical to SEQ ID NO: 1357
  Description of Artificial Sequence: Synthetic cashew; 5' sequence and inner sequence

SEQ ID NO: 13606 - DNA, 53 bp, Artificial Sequence; identical to SEQ ID NO: 6001
  Description of Artificial Sequence: Synthetic cashew; 5' sequence and inner sequence

SEQ ID NO: 13607 - DNA, 53 bp, Artificial Sequence; identical to SEQ ID NO: 1225
  Description of Artificial Sequence: Synthetic cashew; 5' sequence and inner sequence

SEQ ID NO: 13608 - DNA, 53 bp, Artificial Sequence; identical to SEQ ID NO: 1698
  Description of Artificial Sequence: Synthetic cashew; 5' sequence and inner sequence

SEQ ID NO: 13609 - DNA, 53 bp, Artificial Sequence; identical to SEQ ID NO: 1921
  Description of Artificial Sequence: Synthetic cashew; 5' sequence and inner sequence

SEQ ID NO: 13610 - DNA, 53 bp, Artificial Sequence; identical to SEQ ID NO: 1338
  Description of Artificial Sequence: Synthetic cashew; 5' sequence and inner sequence

SEQ ID NO: 13611 - DNA, 53 bp, Artificial Sequence; identical to SEQ ID NO: 1881
  Description of Artificial Sequence: Synthetic cashew; 5' sequence and inner sequence

SEQ ID NO: 13612 - DNA, 53 bp, Artificial Sequence
  Description of Artificial Sequence: Synthetic cashew; 5' sequence and inner sequence
tagggaagagaaggacatatgatcgcgacgcgtaggcatgtcttctgtgtgca

SEQ ID NO: 13613 - DNA, 53 bp, Artificial Sequence; identical to SEQ ID NO: 1306
  Description of Artificial Sequence: Synthetic cashew; 5' sequence and inner sequence

SEQ ID NO: 13614 - DNA, 53 bp, Artificial Sequence; identical to SEQ ID NO: 1574
  Description of Artificial Sequence: Synthetic cashew; 5' sequence and inner sequence

SEQ ID NO: 13615 - DNA, 53 bp, Artificial Sequence; identical to SEQ ID NO: 1363
  Description of Artificial Sequence: Synthetic cashew; 5' sequence and inner sequence

SEQ ID NO: 13616 - DNA, 53 bp, Artificial Sequence; identical to SEQ ID NO: 5240
  Description of Artificial Sequence: Synthetic cashew; 5' sequence and inner sequence

SEQ ID NO: 13617 - DNA, 53 bp, Artificial Sequence; identical to SEQ ID NO: 1143
  Description of Artificial Sequence: Synthetic cashew; 5' sequence and inner sequence

SEQ ID NO: 13618 - DNA, 53 bp, Artificial Sequence
  Description of Artificial Sequence: Synthetic cashew; 5' sequence and inner sequence
tagggaagagaaggacatatgatcgcgacgagtatgcatgtcttctgtgtgca

SEQ ID NO: 13619 - DNA, 53 bp, Artificial Sequence; identical to SEQ ID NO: 9950
  Description of Artificial Sequence: Synthetic cashew; 5' sequence and inner sequence

SEQ ID NO: 13620 - DNA, 53 bp, Artificial Sequence; identical to SEQ ID NO: 9877
  Description of Artificial Sequence: Synthetic cashew; 5' sequence and inner sequence

SEQ ID NO: 13621 - DNA, 53 bp, Artificial Sequence; identical to SEQ ID NO: 5573
  Description of Artificial Sequence: Synthetic cashew; 5' sequence and inner sequence

SEQ ID NO: 13622 - DNA, 53 bp, Artificial Sequence; identical to SEQ ID NO: 1236
  Description of Artificial Sequence: Synthetic cashew; 5' sequence and inner sequence

SEQ ID NO: 13623 - DNA, 53 bp, Artificial Sequence; identical to SEQ ID NO: 5935
  Description of Artificial Sequence: Synthetic cashew; 5' sequence and inner sequence

SEQ ID NO: 13624 - DNA, 53 bp, Artificial Sequence; identical to SEQ ID NO: 1535
  Description of Artificial Sequence: Synthetic cashew; 5' sequence and inner sequence

SEQ ID NO: 13625 - DNA, 53 bp, Artificial Sequence; identical to SEQ ID NO: 1862
  Description of Artificial Sequence: Synthetic cashew; 5' sequence and inner sequence

SEQ ID NO: 13626 - DNA, 52 bp, Artificial Sequence
  Description of Artificial Sequence: Synthetic cashew; 5' sequence and inner sequence
tagggaagagaaggacatatgatgcacgtcgaaacacgtagccatgcacggc

SEQ ID NO: 13627 - DNA, 53 bp, Artificial Sequence; identical to SEQ ID NO: 1424
  Description of Artificial Sequence: Synthetic cashew; 5' sequence and inner sequence

SEQ ID NO: 13628 - DNA, 53 bp, Artificial Sequence; identical to SEQ ID NO: 1831
  Description of Artificial Sequence: Synthetic cashew; 5' sequence and inner sequence

SEQ ID NO: 13629 - DNA, 53 bp, Artificial Sequence; identical to SEQ ID NO: 1398
  Description of Artificial Sequence: Synthetic cashew; 5' sequence and inner sequence

SEQ ID NO: 13630 - DNA, 53 bp, Artificial Sequence; identical to SEQ ID NO: 5889
  Description of Artificial Sequence: Synthetic cashew; 5' sequence and inner sequence

SEQ ID NO: 13631 - DNA, 53 bp, Artificial Sequence; identical to SEQ ID NO: 5472
  Description of Artificial Sequence: Synthetic cashew; 5' sequence and inner sequence

SEQ ID NO: 13632 - DNA, 53 bp, Artificial Sequence; identical to SEQ ID NO: 9825
  Description of Artificial Sequence: Synthetic cashew; 5' sequence and inner sequence

SEQ ID NO: 13633 - DNA, 53 bp, Artificial Sequence; identical to SEQ ID NO: 1452
  Description of Artificial Sequence: Synthetic cashew; 5' sequence and inner sequence

SEQ ID NO: 13634 - DNA, 53 bp, Artificial Sequence; identical to SEQ ID NO: 1486
  Description of Artificial Sequence: Synthetic cashew; 5' sequence and inner sequence

SEQ ID NO: 13635 - DNA, 53 bp, Artificial Sequence; identical to SEQ ID NO: 5913
  Description of Artificial Sequence: Synthetic cashew; 5' sequence and inner sequence

SEQ ID NO: 13636 - DNA, 53 bp, Artificial Sequence; identical to SEQ ID NO: 5611
  Description of Artificial Sequence: Synthetic cashew; 5' sequence and inner sequence

SEQ ID NO: 13637 - DNA, 53 bp, Artificial Sequence; identical to SEQ ID NO: 5356
  Description of Artificial Sequence: Synthetic cashew; 5' sequence and inner sequence

SEQ ID NO: 13638 - DNA, 53 bp, Artificial Sequence; identical to SEQ ID NO: 1626
  Description of Artificial Sequence: Synthetic cashew; 5' sequence and inner sequence

SEQ ID NO: 13639 - DNA, 53 bp, Artificial Sequence; identical to SEQ ID NO: 1380
  Description of Artificial Sequence: Synthetic cashew; 5' sequence and inner sequence

SEQ ID NO: 13640 - DNA, 53 bp, Artificial Sequence; identical to SEQ ID NO: 9767
  Description of Artificial Sequence: Synthetic cashew; 5' sequence and inner sequence

SEQ ID NO: 13641 - DNA, 53 bp, Artificial Sequence; identical to SEQ ID NO: 5940
  Description of Artificial Sequence: Synthetic cashew; 5' sequence and inner sequence

SEQ ID NO: 13642 - DNA, 53 bp, Artificial Sequence; identical to SEQ ID NO: 1596
  Description of Artificial Sequence: Synthetic cashew; 5' sequence and inner sequence

SEQ ID NO: 13643 - DNA, 53 bp, Artificial Sequence; identical to SEQ ID NO: 1518
  Description of Artificial Sequence: Synthetic cashew; 5' sequence and inner sequence

SEQ ID NO: 13644 - DNA, 54 bp, Artificial Sequence; identical to SEQ ID NO: 1503
  Description of Artificial Sequence: Synthetic cashew; 5' sequence and inner sequence

SEQ ID NO: 13645 - DNA, 53 bp, Artificial Sequence; identical to SEQ ID NO: 5845
  Description of Artificial Sequence: Synthetic cashew; 5' sequence and inner sequence

SEQ ID NO: 13646 - DNA, 53 bp, Artificial Sequence; identical to SEQ ID NO: 1919
  Description of Artificial Sequence: Synthetic cashew; 5' sequence and inner sequence

SEQ ID NO: 13647 - DNA, 53 bp, Artificial Sequence; identical to SEQ ID NO: 1920
  Description of Artificial Sequence: Synthetic cashew; 5' sequence and inner sequence

SEQ ID NO: 13648 - DNA, 53 bp, Artificial Sequence; identical to SEQ ID NO: 5616
  Description of Artificial Sequence: Synthetic cashew; 5' sequence and inner sequence

SEQ ID NO: 13649 - DNA, 53 bp, Artificial Sequence; identical to SEQ ID NO: 1465
  Description of Artificial Sequence: Synthetic cashew; 5' sequence and inner sequence

SEQ ID NO: 13650 - DNA, 53 bp, Artificial Sequence; identical to SEQ ID NO: 1317
  Description of Artificial Sequence: Synthetic cashew; 5' sequence and inner sequence

SEQ ID NO: 13651 - DNA, 53 bp, Artificial Sequence; identical to SEQ ID NO: 5717
  Description of Artificial Sequence: Synthetic cashew; 5' sequence and inner sequence

SEQ ID NO: 13652 - DNA, 53 bp, Artificial Sequence; identical to SEQ ID NO: 1621
  Description of Artificial Sequence: Synthetic cashew; 5' sequence and inner sequence

SEQ ID NO: 13653 - DNA, 53 bp, Artificial Sequence; identical to SEQ ID NO: 1297
  Description of Artificial Sequence: Synthetic cashew; 5' sequence and inner sequence

SEQ ID NO: 13654 - DNA, 53 bp, Artificial Sequence; identical to SEQ ID NO: 5690
  Description of Artificial Sequence: Synthetic cashew; 5' sequence and inner sequence

SEQ ID NO: 13655 - DNA, 53 bp, Artificial Sequence; identical to SEQ ID NO: 1773
  Description of Artificial Sequence: Synthetic cashew; 5' sequence and inner sequence

SEQ ID NO: 13656 - DNA, 53 bp, Artificial Sequence; identical to SEQ ID NO: 5799
  Description of Artificial Sequence: Synthetic cashew; 5' sequence and inner sequence

SEQ ID NO: 13657 - DNA, 53 bp, Artificial Sequence; identical to SEQ ID NO: 1956
  Description of Artificial Sequence: Synthetic cashew; 5' sequence and inner sequence

SEQ ID NO: 13658 - DNA, 53 bp, Artificial Sequence; identical to SEQ ID NO: 9939
  Description of Artificial Sequence: Synthetic cashew; 5' sequence and inner sequence

SEQ ID NO: 13659 - DNA, 53 bp, Artificial Sequence
  Description of Artificial Sequence: Synthetic cashew; 5' sequence and inner sequence
tagggaagagaaggacatatgatgtcatgccatcccttcgagggtgacaggta

SEQ ID NO: 13660 - DNA, 52 bp, Artificial Sequence; identical to SEQ ID NO: 5559
  Description of Artificial Sequence: Synthetic cashew; 5' sequence and inner sequence

SEQ ID NO: 13661 - DNA, 53 bp, Artificial Sequence; identical to SEQ ID NO: 5565
  Description of Artificial Sequence: Synthetic cashew; 5' sequence and inner sequence

SEQ ID NO: 13662 - DNA, 53 bp, Artificial Sequence; identical to SEQ ID NO: 1576
  Description of Artificial Sequence: Synthetic cashew; 5' sequence and inner sequence

SEQ ID NO: 13663 - DNA, 53 bp, Artificial Sequence; identical to SEQ ID NO: 1404
  Description of Artificial Sequence: Synthetic cashew; 5' sequence and inner sequence

SEQ ID NO: 13664 - DNA, 53 bp, Artificial Sequence; identical to SEQ ID NO: 1292
  Description of Artificial Sequence: Synthetic cashew; 5' sequence and inner sequence

SEQ ID NO: 13665 - DNA, 53 bp, Artificial Sequence; identical to SEQ ID NO: 1703
  Description of Artificial Sequence: Synthetic cashew; 5' sequence and inner sequence

SEQ ID NO: 13666 - DNA, 53 bp, Artificial Sequence; identical to SEQ ID NO: 1638
  Description of Artificial Sequence: Synthetic cashew; 5' sequence and inner sequence

SEQ ID NO: 13667 - DNA, 53 bp, Artificial Sequence; identical to SEQ ID NO: 9627
  Description of Artificial Sequence: Synthetic cashew; 5' sequence and inner sequence

SEQ ID NO: 13668 - DNA, 53 bp, Artificial Sequence; identical to SEQ ID NO: 1663
  Description of Artificial Sequence: Synthetic cashew; 5' sequence and inner sequence

SEQ ID NO: 13669 - DNA, 53 bp, Artificial Sequence; identical to SEQ ID NO: 1917
  Description of Artificial Sequence: Synthetic cashew; 5' sequence and inner sequence

SEQ ID NO: 13670 - DNA, 53 bp, Artificial Sequence
  Description of Artificial Sequence: Synthetic cashew; 5' sequence and inner sequence
tagggaagagaaggacatatgatcgcgacgagtaggcatgtcttctgtttgca

SEQ ID NO: 13671 - DNA, 53 bp, Artificial Sequence; identical to SEQ ID NO: 1805
  Description of Artificial Sequence: Synthetic cashew; 5' sequence and inner sequence

SEQ ID NO: 13672 - DNA, 53 bp, Artificial Sequence; identical to SEQ ID NO: 1199
  Description of Artificial Sequence: Synthetic cashew; 5' sequence and inner sequence

SEQ ID NO: 13673 - DNA, 53 bp, Artificial Sequence
  Description of Artificial Sequence: Synthetic cashew; 5' sequence and inner sequence
tagggaagagaaggacatatgatggcctgcacatccctcccttccgtgcgtca

SEQ ID NO: 13674 - DNA, 53 bp, Artificial Sequence; identical to SEQ ID NO: 1223
  Description of Artificial Sequence: Synthetic cashew; 5' sequence and inner sequence

SEQ ID NO: 13675 - DNA, 53 bp, Artificial Sequence; identical to SEQ ID NO: 1378
  Description of Artificial Sequence: Synthetic cashew; 5' sequence and inner sequence

SEQ ID NO: 13676 - DNA, 53 bp, Artificial Sequence; identical to SEQ ID NO: 1943
  Description of Artificial Sequence: Synthetic cashew; 5' sequence and inner sequence

SEQ ID NO: 13677 - DNA, 53 bp, Artificial Sequence; identical to SEQ ID NO: 5688
  Description of Artificial Sequence: Synthetic cashew; 5' sequence and inner sequence

SEQ ID NO: 13678 - DNA, 53 bp, Artificial Sequence; identical to SEQ ID NO: 1332
  Description of Artificial Sequence: Synthetic cashew; 5' sequence and inner sequence

SEQ ID NO: 13679 - DNA, 53 bp, Artificial Sequence; identical to SEQ ID NO: 5598
  Description of Artificial Sequence: Synthetic cashew; 5' sequence and inner sequence

SEQ ID NO: 13680 - DNA, 53 bp, Artificial Sequence; identical to SEQ ID NO: 5893
  Description of Artificial Sequence: Synthetic cashew; 5' sequence and inner sequence

SEQ ID NO: 13681 - DNA, 53 bp, Artificial Sequence; identical to SEQ ID NO: 5817
  Description of Artificial Sequence: Synthetic cashew; 5' sequence and inner sequence

SEQ ID NO: 13682 - DNA, 53 bp, Artificial Sequence; identical to SEQ ID NO: 1699
  Description of Artificial Sequence: Synthetic cashew; 5' sequence and inner sequence

SEQ ID NO: 13683 - DNA, 53 bp, Artificial Sequence; identical to SEQ ID NO: 1680
  Description of Artificial Sequence: Synthetic cashew; 5' sequence and inner sequence

SEQ ID NO: 13684 - DNA, 53 bp, Artificial Sequence; identical to SEQ ID NO: 1162
  Description of Artificial Sequence: Synthetic cashew; 5' sequence and inner sequence

SEQ ID NO: 13685 - DNA, 53 bp, Artificial Sequence; identical to SEQ ID NO: 5620
  Description of Artificial Sequence: Synthetic cashew; 5' sequence and inner sequence

SEQ ID NO: 13686 - DNA, 53 bp, Artificial Sequence; identical to SEQ ID NO: 1586
  Description of Artificial Sequence: Synthetic cashew; 5' sequence and inner sequence

SEQ ID NO: 13687 - DNA, 53 bp, Artificial Sequence; identical to SEQ ID NO: 1776
  Description of Artificial Sequence: Synthetic cashew; 5' sequence and inner sequence

SEQ ID NO: 13688 - DNA, 53 bp, Artificial Sequence; identical to SEQ ID NO: 1330
  Description of Artificial Sequence: Synthetic cashew; 5' sequence and inner sequence

SEQ ID NO: 13689 - DNA, 53 bp, Artificial Sequence; identical to SEQ ID NO: 1318
  Description of Artificial Sequence: Synthetic cashew; 5' sequence and inner sequence

SEQ ID NO: 13690 - DNA, 53 bp, Artificial Sequence; identical to SEQ ID NO: 1948
  Description of Artificial Sequence: Synthetic cashew; 5' sequence and inner sequence

SEQ ID NO: 13691 - DNA, 52 bp, Artificial Sequence
  Description of Artificial Sequence: Synthetic cashew; 5' sequence and inner sequence
tagggaagagaaggacatatgatgcacgtcgcaacacgtagccatgcacggt

SEQ ID NO: 13692 - DNA, 53 bp, Artificial Sequence; identical to SEQ ID NO: 1624
  Description of Artificial Sequence: Synthetic cashew; 5' sequence and inner sequence

SEQ ID NO: 13693 - DNA, 53 bp, Artificial Sequence; identical to SEQ ID NO: 9938
  Description of Artificial Sequence: Synthetic cashew; 5' sequence and inner sequence

SEQ ID NO: 13694 - DNA, 53 bp, Artificial Sequence; identical to SEQ ID NO: 1722
  Description of Artificial Sequence: Synthetic cashew; 5' sequence and inner sequence

SEQ ID NO: 13695 - DNA, 53 bp, Artificial Sequence; identical to SEQ ID NO: 1660
  Description of Artificial Sequence: Synthetic cashew; 5' sequence and inner sequence

SEQ ID NO: 13696 - DNA, 53 bp, Artificial Sequence; identical to SEQ ID NO: 1327
  Description of Artificial Sequence: Synthetic cashew; 5' sequence and inner sequence

SEQ ID NO: 13697 - DNA, 53 bp, Artificial Sequence; identical to SEQ ID NO: 1914
  Description of Artificial Sequence: Synthetic cashew; 5' sequence and inner sequence

SEQ ID NO: 13698 - DNA, 53 bp, Artificial Sequence; identical to SEQ ID NO: 5955
  Description of Artificial Sequence: Synthetic cashew; 5' sequence and inner sequence

SEQ ID NO: 13699 - DNA, 53 bp, Artificial Sequence; identical to SEQ ID NO: 1979
  Description of Artificial Sequence: Synthetic cashew; 5' sequence and inner sequence

SEQ ID NO: 13700 - DNA, 53 bp, Artificial Sequence
  Description of Artificial Sequence: Synthetic cashew; 5' sequence and inner sequence
tagggaagagaaggacatatgatgcacgactcgccccctatcatgaggccatg

SEQ ID NO: 13701 - DNA, 53 bp, Artificial Sequence; identical to SEQ ID NO: 1830
  Description of Artificial Sequence: Synthetic cashew; 5' sequence and inner sequence

SEQ ID NO: 13702 - DNA, 53 bp, Artificial Sequence; identical to SEQ ID NO: 1834
  Description of Artificial Sequence: Synthetic cashew; 5' sequence and inner sequence

SEQ ID NO: 13703 - DNA, 53 bp, Artificial Sequence; identical to SEQ ID NO: 9850
  Description of Artificial Sequence: Synthetic cashew; 5' sequence and inner sequence

SEQ ID NO: 13704 - DNA, 53 bp, Artificial Sequence; identical to SEQ ID NO: 9909
  Description of Artificial Sequence: Synthetic cashew; 5' sequence and inner sequence

SEQ ID NO: 13705 - DNA, 53 bp, Artificial Sequence; identical to SEQ ID NO: 1857
  Description of Artificial Sequence: Synthetic cashew; 5' sequence and inner sequence

SEQ ID NO: 13706 - DNA, 53 bp, Artificial Sequence; identical to SEQ ID NO: 1668
  Description of Artificial Sequence: Synthetic cashew; 5' sequence and inner sequence

SEQ ID NO: 13707 - DNA, 53 bp, Artificial Sequence; identical to SEQ ID NO: 5960
  Description of Artificial Sequence: Synthetic cashew; 5' sequence and inner sequence

SEQ ID NO: 13708 - DNA, 53 bp, Artificial Sequence; identical to SEQ ID NO: 5494
  Description of Artificial Sequence: Synthetic cashew; 5' sequence and inner sequence

SEQ ID NO: 13709 - DNA, 52 bp, Artificial Sequence
  Description of Artificial Sequence: Synthetic cashew; 5' sequence and inner sequence
tagggaagagaaggacatatgatgcacgccgaaacacgtagccatgcacggt

SEQ ID NO: 13710 - DNA, 53 bp, Artificial Sequence; identical to SEQ ID NO: 1729
  Description of Artificial Sequence: Synthetic cashew; 5' sequence and inner sequence

SEQ ID NO: 13711 - DNA, 53 bp, Artificial Sequence; identical to SEQ ID NO: 5662
  Description of Artificial Sequence: Synthetic cashew; 5' sequence and inner sequence

SEQ ID NO: 13712 - DNA, 53 bp, Artificial Sequence
  Description of Artificial Sequence: Synthetic cashew; 5' sequence and inner sequence
tagggaagagaaggacatatgatacatgtgggccgatgtgcactgagtggtgt

SEQ ID NO: 13713 - DNA, 53 bp, Artificial Sequence; identical to SEQ ID NO: 1351
  Description of Artificial Sequence: Synthetic cashew; 5' sequence and inner sequence

SEQ ID NO: 13714 - DNA, 53 bp, Artificial Sequence; identical to SEQ ID NO: 5552
  Description of Artificial Sequence: Synthetic cashew; 5' sequence and inner sequence

SEQ ID NO: 13715 - DNA, 53 bp, Artificial Sequence; identical to SEQ ID NO: 1432
  Description of Artificial Sequence: Synthetic cashew; 5' sequence and inner sequence

SEQ ID NO: 13716 - DNA, 53 bp, Artificial Sequence; identical to SEQ ID NO: 1733
  Description of Artificial Sequence: Synthetic cashew; 5' sequence and inner sequence

SEQ ID NO: 13717 - DNA, 53 bp, Artificial Sequence; identical to SEQ ID NO: 1505
  Description of Artificial Sequence: Synthetic cashew; 5' sequence and inner sequence

SEQ ID NO: 13718 - DNA, 53 bp, Artificial Sequence; identical to SEQ ID NO: 5728
  Description of Artificial Sequence: Synthetic cashew; 5' sequence and inner sequence

SEQ ID NO: 13719 - DNA, 53 bp, Artificial Sequence; identical to SEQ ID NO: 1265
  Description of Artificial Sequence: Synthetic cashew; 5' sequence and inner sequence

SEQ ID NO: 13720 - DNA, 53 bp, Artificial Sequence; identical to SEQ ID NO: 1548
  Description of Artificial Sequence: Synthetic cashew; 5' sequence and inner sequence

SEQ ID NO: 13721 - DNA, 53 bp, Artificial Sequence; identical to SEQ ID NO: 1832
  Description of Artificial Sequence: Synthetic cashew; 5' sequence and inner sequence

SEQ ID NO: 13722 - DNA, 53 bp, Artificial Sequence; identical to SEQ ID NO: 5498
  Description of Artificial Sequence: Synthetic cashew; 5' sequence and inner sequence

SEQ ID NO: 13723 - DNA, 53 bp, Artificial Sequence; identical to SEQ ID NO: 1768
  Description of Artificial Sequence: Synthetic cashew; 5' sequence and inner sequence

SEQ ID NO: 13724 - DNA, 53 bp, Artificial Sequence; identical to SEQ ID NO: 1874
  Description of Artificial Sequence: Synthetic cashew; 5' sequence and inner sequence

SEQ ID NO: 13725 - DNA, 53 bp, Artificial Sequence; identical to SEQ ID NO: 5859
  Description of Artificial Sequence: Synthetic cashew; 5' sequence and inner sequence

SEQ ID NO: 13726 - DNA, 53 bp, Artificial Sequence; identical to SEQ ID NO: 5436
  Description of Artificial Sequence: Synthetic cashew; 5' sequence and inner sequence

SEQ ID NO: 13727 - DNA, 53 bp, Artificial Sequence; identical to SEQ ID NO: 1500
  Description of Artificial Sequence: Synthetic cashew; 5' sequence and inner sequence

SEQ ID NO: 13728 - DNA, 53 bp, Artificial Sequence; identical to SEQ ID NO: 1889
  Description of Artificial Sequence: Synthetic cashew; 5' sequence and inner sequence

SEQ ID NO: 13729 - DNA, 53 bp, Artificial Sequence; identical to SEQ ID NO: 1592
  Description of Artificial Sequence: Synthetic cashew; 5' sequence and inner sequence

SEQ ID NO: 13730 - DNA, 52 bp, Artificial Sequence
  Description of Artificial Sequence: Synthetic cashew; 5' sequence and inner sequence
tagggaagagaaggacatatgatgcacgtcgaaacacgcagccatgcacggt

SEQ ID NO: 13731 - DNA, 53 bp, Artificial Sequence; identical to SEQ ID NO: 5985
  Description of Artificial Sequence: Synthetic cashew; 5' sequence and inner sequence

SEQ ID NO: 13732 - DNA, 53 bp, Artificial Sequence; identical to SEQ ID NO: 5802
  Description of Artificial Sequence: Synthetic cashew; 5' sequence and inner sequence

SEQ ID NO: 13733 - DNA, 53 bp, Artificial Sequence; identical to SEQ ID NO: 9807
  Description of Artificial Sequence: Synthetic cashew; 5' sequence and inner sequence

SEQ ID NO: 13734 - DNA, 53 bp, Artificial Sequence; identical to SEQ ID NO: 1909
  Description of Artificial Sequence: Synthetic cashew; 5' sequence and inner sequence

SEQ ID NO: 13735 - DNA, 53 bp, Artificial Sequence; identical to SEQ ID NO: 9712
  Description of Artificial Sequence: Synthetic cashew; 5' sequence and inner sequence

SEQ ID NO: 13736 - DNA, 53 bp, Artificial Sequence; identical to SEQ ID NO: 5700
  Description of Artificial Sequence: Synthetic cashew; 5' sequence and inner sequence

SEQ ID NO: 13737 - DNA, 53 bp, Artificial Sequence; identical to SEQ ID NO: 9633
  Description of Artificial Sequence: Synthetic cashew; 5' sequence and inner sequence

SEQ ID NO: 13738 - DNA, 53 bp, Artificial Sequence; identical to SEQ ID NO: 5829
  Description of Artificial Sequence: Synthetic cashew; 5' sequence and inner sequence

SEQ ID NO: 13739 - DNA, 53 bp, Artificial Sequence; identical to SEQ ID NO: 9902
  Description of Artificial Sequence: Synthetic cashew; 5' sequence and inner sequence

SEQ ID NO: 13740 - DNA, 53 bp, Artificial Sequence; identical to SEQ ID NO: 9748
  Description of Artificial Sequence: Synthetic cashew; 5' sequence and inner sequence

SEQ ID NO: 13741 - DNA, 53 bp, Artificial Sequence; identical to SEQ ID NO: 5603
  Description of Artificial Sequence: Synthetic cashew; 5' sequence and inner sequence

SEQ ID NO: 13742 - DNA, 53 bp, Artificial Sequence; identical to SEQ ID NO: 1930
  Description of Artificial Sequence: Synthetic cashew; 5' sequence and inner sequence

SEQ ID NO: 13743 - DNA, 53 bp, Artificial Sequence
  Description of Artificial Sequence: Synthetic cashew; 5' sequence and inner sequence
tagggaagagaaggacatatgatgtcattccgcatcatacacgtgggcacgta

SEQ ID NO: 13744 - DNA, 53 bp, Artificial Sequence
  Description of Artificial Sequence: Synthetic cashew; 5' sequence and inner sequence
tagggaagagaaggacatatgatgaccgcaacgaccaaagtgccatgtggtgc

SEQ ID NO: 13745 - DNA, 53 bp, Artificial Sequence; identical to SEQ ID NO: 1466
  Description of Artificial Sequence: Synthetic cashew; 5' sequence and inner sequence

SEQ ID NO: 13746 - DNA, 53 bp, Artificial Sequence; identical to SEQ ID NO: 1606
  Description of Artificial Sequence: Synthetic cashew; 5' sequence and inner sequence

SEQ ID NO: 13747 - DNA, 53 bp, Artificial Sequence; identical to SEQ ID NO: 1813
  Description of Artificial Sequence: Synthetic cashew; 5' sequence and inner sequence

SEQ ID NO: 13748 - DNA, 53 bp, Artificial Sequence; identical to SEQ ID NO: 1384
  Description of Artificial Sequence: Synthetic cashew; 5' sequence and inner sequence

SEQ ID NO: 13749 - DNA, 53 bp, Artificial Sequence; identical to SEQ ID NO: 5289
  Description of Artificial Sequence: Synthetic cashew; 5' sequence and inner sequence

SEQ ID NO: 13750 - DNA, 53 bp, Artificial Sequence; identical to SEQ ID NO: 5787
  Description of Artificial Sequence: Synthetic cashew; 5' sequence and inner sequence

SEQ ID NO: 13751 - DNA, 53 bp, Artificial Sequence; identical to SEQ ID NO: 1302
  Description of Artificial Sequence: Synthetic cashew; 5' sequence and inner sequence

SEQ ID NO: 13752 - DNA, 53 bp, Artificial Sequence; identical to SEQ ID NO: 1463
  Description of Artificial Sequence: Synthetic cashew; 5' sequence and inner sequence

SEQ ID NO: 13753 - DNA, 53 bp, Artificial Sequence; identical to SEQ ID NO: 5579
  Description of Artificial Sequence: Synthetic cashew; 5' sequence and inner sequence

SEQ ID NO: 13754 - DNA, 53 bp, Artificial Sequence; identical to SEQ ID NO: 1502
  Description of Artificial Sequence: Synthetic cashew; 5' sequence and inner sequence

SEQ ID NO: 13755 - DNA, 52 bp, Artificial Sequence
  Description of Artificial Sequence: Synthetic cashew; 5' sequence and inner sequence
tagggaagagaaggacatatgatgcacgtcgaaacacgtagccatgcccggt

SEQ ID NO: 13756 - DNA, 53 bp, Artificial Sequence; identical to SEQ ID NO: 5856
  Description of Artificial Sequence: Synthetic cashew; 5' sequence and inner sequence

SEQ ID NO: 13757 - DNA, 53 bp, Artificial Sequence; identical to SEQ ID NO: 5590
  Description of Artificial Sequence: Synthetic cashew; 5' sequence and inner sequence

SEQ ID NO: 13758 - DNA, 53 bp, Artificial Sequence; identical to SEQ ID NO: 5521
  Description of Artificial Sequence: Synthetic cashew; 5' sequence and inner sequence

SEQ ID NO: 13759 - DNA, 52 bp, Artificial Sequence; identical to SEQ ID NO: 1873
  Description of Artificial Sequence: Synthetic cashew; 5' sequence and inner sequence

SEQ ID NO: 13760 - DNA, 53 bp, Artificial Sequence; identical to SEQ ID NO: 9910
  Description of Artificial Sequence: Synthetic cashew; 5' sequence and inner sequence

SEQ ID NO: 13761 - DNA, 53 bp, Artificial Sequence; identical to SEQ ID NO: 1477
  Description of Artificial Sequence: Synthetic cashew; 5' sequence and inner sequence

SEQ ID NO: 13762 - DNA, 53 bp, Artificial Sequence; identical to SEQ ID NO: 1772
  Description of Artificial Sequence: Synthetic cashew; 5' sequence and inner sequence

SEQ ID NO: 13763 - DNA, 53 bp, Artificial Sequence; identical to SEQ ID NO: 1458
  Description of Artificial Sequence: Synthetic cashew; 5' sequence and inner sequence

SEQ ID NO: 13764 - DNA, 53 bp, Artificial Sequence; identical to SEQ ID NO: 1816
  Description of Artificial Sequence: Synthetic cashew; 5' sequence and inner sequence

SEQ ID NO: 13765 - DNA, 53 bp, Artificial Sequence; identical to SEQ ID NO: 1713
  Description of Artificial Sequence: Synthetic cashew; 5' sequence and inner sequence

SEQ ID NO: 13766 - DNA, 53 bp, Artificial Sequence; identical to SEQ ID NO: 5884
  Description of Artificial Sequence: Synthetic cashew; 5' sequence and inner sequence

SEQ ID NO: 13767 - DNA, 53 bp, Artificial Sequence
  Description of Artificial Sequence: Synthetic cashew; 5' sequence and inner sequence
tagggaagagaaggacatatgatgtcatgcacgaccactatcatggcggcatg

SEQ ID NO: 13768 - DNA, 53 bp, Artificial Sequence; identical to SEQ ID NO: 1702
  Description of Artificial Sequence: Synthetic cashew; 5' sequence and inner sequence

SEQ ID NO: 13769 - DNA, 53 bp, Artificial Sequence; identical to SEQ ID NO: 1583
  Description of Artificial Sequence: Synthetic cashew; 5' sequence and inner sequence

SEQ ID NO: 13770 - DNA, 53 bp, Artificial Sequence; identical to SEQ ID NO: 1685
  Description of Artificial Sequence: Synthetic cashew; 5' sequence and inner sequence

SEQ ID NO: 13771 - DNA, 53 bp, Artificial Sequence; identical to SEQ ID NO: 5610
  Description of Artificial Sequence: Synthetic cashew; 5' sequence and inner sequence

SEQ ID NO: 13772 - DNA, 53 bp, Artificial Sequence; identical to SEQ ID NO: 5981
  Description of Artificial Sequence: Synthetic cashew; 5' sequence and inner sequence

SEQ ID NO: 13773 - DNA, 53 bp, Artificial Sequence
  Description of Artificial Sequence: Synthetic cashew; 5' sequence and inner sequence
tagggaagagaaggacatatgatccgcacgtagccctatcagaggtgcatgca

SEQ ID NO: 13774 - DNA, 53 bp, Artificial Sequence; identical to SEQ ID NO: 1787
  Description of Artificial Sequence: Synthetic cashew; 5' sequence and inner sequence

SEQ ID NO: 13775 - DNA, 53 bp, Artificial Sequence
  Description of Artificial Sequence: Synthetic cashew; 5' sequence and inner sequence
tagggaagagaaggacatatgatgtacgcatcgtcccgtcatgtggctccgta

SEQ ID NO: 13776 - DNA, 53 bp, Artificial Sequence; identical to SEQ ID NO: 1826
  Description of Artificial Sequence: Synthetic cashew; 5' sequence and inner sequence

SEQ ID NO: 13777 - DNA, 53 bp, Artificial Sequence; identical to SEQ ID NO: 5339
  Description of Artificial Sequence: Synthetic cashew; 5' sequence and inner sequence

SEQ ID NO: 13778 - DNA, 53 bp, Artificial Sequence; identical to SEQ ID NO: 1417
  Description of Artificial Sequence: Synthetic cashew; 5' sequence and inner sequence

SEQ ID NO: 13779 - DNA, 53 bp, Artificial Sequence; identical to SEQ ID NO: 1753
  Description of Artificial Sequence: Synthetic cashew; 5' sequence and inner sequence

SEQ ID NO: 13780 - DNA, 53 bp, Artificial Sequence; identical to SEQ ID NO: 5503
  Description of Artificial Sequence: Synthetic cashew; 5' sequence and inner sequence

SEQ ID NO: 13781 - DNA, 53 bp, Artificial Sequence; identical to SEQ ID NO: 9889
  Description of Artificial Sequence: Synthetic cashew; 5' sequence and inner sequence

SEQ ID NO: 13782 - DNA, 53 bp, Artificial Sequence; identical to SEQ ID NO: 1488
  Description of Artificial Sequence: Synthetic cashew; 5' sequence and inner sequence

SEQ ID NO: 13783 - DNA, 53 bp, Artificial Sequence; identical to SEQ ID NO: 5721
  Description of Artificial Sequence: Synthetic cashew; 5' sequence and inner sequence

SEQ ID NO: 13784 - DNA, 53 bp, Artificial Sequence; identical to SEQ ID NO: 9860
  Description of Artificial Sequence: Synthetic cashew; 5' sequence and inner sequence

SEQ ID NO: 13785 - DNA, 53 bp, Artificial Sequence; identical to SEQ ID NO: 9871
  Description of Artificial Sequence: Synthetic cashew; 5' sequence and inner sequence

SEQ ID NO: 13786 - DNA, 53 bp, Artificial Sequence; identical to SEQ ID NO: 1672
  Description of Artificial Sequence: Synthetic cashew; 5' sequence and inner sequence

SEQ ID NO: 13787 - DNA, 53 bp, Artificial Sequence; identical to SEQ ID NO: 1591
  Description of Artificial Sequence: Synthetic cashew; 5' sequence and inner sequence

SEQ ID NO: 13788 - DNA, 53 bp, Artificial Sequence; identical to SEQ ID NO: 5997
  Description of Artificial Sequence: Synthetic cashew; 5' sequence and inner sequence

SEQ ID NO: 13789 - DNA, 53 bp, Artificial Sequence; identical to SEQ ID NO: 9935
  Description of Artificial Sequence: Synthetic cashew; 5' sequence and inner sequence

SEQ ID NO: 13790 - DNA, 53 bp, Artificial Sequence; identical to SEQ ID NO: 1492
  Description of Artificial Sequence: Synthetic cashew; 5' sequence and inner sequence

SEQ ID NO: 13791 - DNA, 53 bp, Artificial Sequence
  Description of Artificial Sequence: Synthetic cashew; 5' sequence and inner sequence
tagggaagagaaggacatatgatcatgtggcgtgcgttccgttcaagttgaca

SEQ ID NO: 13792 - DNA, 53 bp, Artificial Sequence; identical to SEQ ID NO: 1507
  Description of Artificial Sequence: Synthetic cashew; 5' sequence and inner sequence

SEQ ID NO: 13793 - DNA, 53 bp, Artificial Sequence; identical to SEQ ID NO: 5801
  Description of Artificial Sequence: Synthetic cashew; 5' sequence and inner sequence

SEQ ID NO: 13794 - DNA, 53 bp, Artificial Sequence; identical to SEQ ID NO: 1929
  Description of Artificial Sequence: Synthetic cashew; 5' sequence and inner sequence

SEQ ID NO: 13795 - DNA, 53 bp, Artificial Sequence
  Description of Artificial Sequence: Synthetic cashew; 5' sequence and inner sequence
tagggaagagaaggacatatgatgtgtcatgggtacgtcgctgggtgtggaca

SEQ ID NO: 13796 - DNA, 53 bp, Artificial Sequence; identical to SEQ ID NO: 5198
  Description of Artificial Sequence: Synthetic cashew; 5' sequence and inner sequence

SEQ ID NO: 13797 - DNA, 53 bp, Artificial Sequence; identical to SEQ ID NO: 1435
  Description of Artificial Sequence: Synthetic cashew; 5' sequence and inner sequence

SEQ ID NO: 13798 - DNA, 53 bp, Artificial Sequence; identical to SEQ ID NO: 1718
  Description of Artificial Sequence: Synthetic cashew; 5' sequence and inner sequence

SEQ ID NO: 13799 - DNA, 53 bp, Artificial Sequence
  Description of Artificial Sequence: Synthetic cashew; 5' sequence and inner sequence
tagggaagagaaggacatatgatgggccgacacgaaccctatcaacgtggaca

SEQ ID NO: 13800 - DNA, 54 bp, Artificial Sequence; identical to SEQ ID NO: 1489
  Description of Artificial Sequence: Synthetic cashew; 5' sequence and inner sequence

SEQ ID NO: 13801 - DNA, 53 bp, Artificial Sequence; identical to SEQ ID NO: 5713
  Description of Artificial Sequence: Synthetic cashew; 5' sequence and inner sequence

SEQ ID NO: 13802 - DNA, 53 bp, Artificial Sequence; identical to SEQ ID NO: 1442
  Description of Artificial Sequence: Synthetic cashew; 5' sequence and inner sequence

SEQ ID NO: 13803 - DNA, 53 bp, Artificial Sequence
  Description of Artificial Sequence: Synthetic cashew; 5' sequence and inner sequence
tagggaagagaaggacatatgatggcatgcgatggatgggggctggggcagtc

SEQ ID NO: 13804 - DNA, 53 bp, Artificial Sequence; identical to SEQ ID NO: 1926
  Description of Artificial Sequence: Synthetic cashew; 5' sequence and inner sequence

SEQ ID NO: 13805 - DNA, 53 bp, Artificial Sequence; identical to SEQ ID NO: 1761
  Description of Artificial Sequence: Synthetic cashew; 5' sequence and inner sequence

SEQ ID NO: 13806 - DNA, 53 bp, Artificial Sequence; identical to SEQ ID NO: 1315
  Description of Artificial Sequence: Synthetic cashew; 5' sequence and inner sequence

SEQ ID NO: 13807 - DNA, 53 bp, Artificial Sequence; identical to SEQ ID NO: 5642
  Description of Artificial Sequence: Synthetic cashew; 5' sequence and inner sequence

SEQ ID NO: 13808 - DNA, 53 bp, Artificial Sequence; identical to SEQ ID NO: 5711
  Description of Artificial Sequence: Synthetic cashew; 5' sequence and inner sequence

SEQ ID NO: 13809 - DNA, 53 bp, Artificial Sequence; identical to SEQ ID NO: 5873
  Description of Artificial Sequence: Synthetic cashew; 5' sequence and inner sequence

SEQ ID NO: 13810 - DNA, 53 bp, Artificial Sequence; identical to SEQ ID NO: 9769
  Description of Artificial Sequence: Synthetic cashew; 5' sequence and inner sequence

SEQ ID NO: 13811 - DNA, 53 bp, Artificial Sequence; identical to SEQ ID NO: 1261
  Description of Artificial Sequence: Synthetic cashew; 5' sequence and inner sequence

SEQ ID NO: 13812 - DNA, 53 bp, Artificial Sequence; identical to SEQ ID NO: 5526
  Description of Artificial Sequence: Synthetic cashew; 5' sequence and inner sequence

SEQ ID NO: 13813 - DNA, 53 bp, Artificial Sequence; identical to SEQ ID NO: 1679
  Description of Artificial Sequence: Synthetic cashew; 5' sequence and inner sequence

SEQ ID NO: 13814 - DNA, 52 bp, Artificial Sequence; identical to SEQ ID NO: 1453
  Description of Artificial Sequence: Synthetic cashew; 5' sequence and inner sequence

SEQ ID NO: 13815 - DNA, 53 bp, Artificial Sequence; identical to SEQ ID NO: 5739
  Description of Artificial Sequence: Synthetic cashew; 5' sequence and inner sequence

SEQ ID NO: 13816 - DNA, 53 bp, Artificial Sequence; identical to SEQ ID NO: 1607
  Description of Artificial Sequence: Synthetic cashew; 5' sequence and inner sequence

SEQ ID NO: 13817 - DNA, 53 bp, Artificial Sequence
  Description of Artificial Sequence: Synthetic cashew; 5' sequence and inner sequence
tagggaagagaaggacatatgatcgcgacgagtaggcatgtcttctgtgttca

SEQ ID NO: 13818 - DNA, 53 bp, Artificial Sequence; identical to SEQ ID NO: 5905
  Description of Artificial Sequence: Synthetic cashew; 5' sequence and inner sequence

SEQ ID NO: 13819 - DNA, 53 bp, Artificial Sequence; identical to SEQ ID NO: 1960
  Description of Artificial Sequence: Synthetic cashew; 5' sequence and inner sequence

SEQ ID NO: 13820 - DNA, 54 bp, Artificial Sequence; identical to SEQ ID NO: 1652
  Description of Artificial Sequence: Synthetic cashew; 5' sequence and inner sequence

SEQ ID NO: 13821 - DNA, 53 bp, Artificial Sequence
  Description of Artificial Sequence: Synthetic cashew; 5' sequence and inner sequence
tagggaagagaaggacatatgatgtcattccgcatcctacacgggggcacgta

SEQ ID NO: 13822 - DNA, 53 bp, Artificial Sequence; identical to SEQ ID NO: 5756
  Description of Artificial Sequence: Synthetic cashew; 5' sequence and inner sequence

SEQ ID NO: 13823 - DNA, 53 bp, Artificial Sequence; identical to SEQ ID NO: 1291
  Description of Artificial Sequence: Synthetic cashew; 5' sequence and inner sequence

SEQ ID NO: 13824 - DNA, 53 bp, Artificial Sequence; identical to SEQ ID NO: 1781
  Description of Artificial Sequence: Synthetic cashew; 5' sequence and inner sequence

SEQ ID NO: 13825 - DNA, 53 bp, Artificial Sequence; identical to SEQ ID NO: 9953
  Description of Artificial Sequence: Synthetic cashew; 5' sequence and inner sequence

SEQ ID NO: 13826 - DNA, 53 bp, Artificial Sequence; identical to SEQ ID NO: 5707
  Description of Artificial Sequence: Synthetic cashew; 5' sequence and inner sequence

SEQ ID NO: 13827 - DNA, 53 bp, Artificial Sequence
  Description of Artificial Sequence: Synthetic cashew; 5' sequence and inner sequence
tagggaagagaaggacatatgatcagcacgtagccctatcagtggtgcatgca

SEQ ID NO: 13828 - DNA, 53 bp, Artificial Sequence; identical to SEQ ID NO: 5641
  Description of Artificial Sequence: Synthetic cashew; 5' sequence and inner sequence

SEQ ID NO: 13829 - DNA, 53 bp, Artificial Sequence; identical to SEQ ID NO: 1763
  Description of Artificial Sequence: Synthetic cashew; 5' sequence and inner sequence

SEQ ID NO: 13830 - DNA, 53 bp, Artificial Sequence; identical to SEQ ID NO: 1715
  Description of Artificial Sequence: Synthetic cashew; 5' sequence and inner sequence

SEQ ID NO: 13831 - DNA, 53 bp, Artificial Sequence; identical to SEQ ID NO: 1456
  Description of Artificial Sequence: Synthetic cashew; 5' sequence and inner sequence

SEQ ID NO: 13832 - DNA, 53 bp, Artificial Sequence; identical to SEQ ID NO: 1726
  Description of Artificial Sequence: Synthetic cashew; 5' sequence and inner sequence

SEQ ID NO: 13833 - DNA, 53 bp, Artificial Sequence; identical to SEQ ID NO: 1582
  Description of Artificial Sequence: Synthetic cashew; 5' sequence and inner sequence

SEQ ID NO: 13834 - DNA, 53 bp, Artificial Sequence; identical to SEQ ID NO: 1629
  Description of Artificial Sequence: Synthetic cashew; 5' sequence and inner sequence

SEQ ID NO: 13835 - DNA, 53 bp, Artificial Sequence
  Description of Artificial Sequence: Synthetic cashew; 5' sequence and inner sequence
tagggaagagaaggacatatgatcgcgccgagtaggcatgtcttctgtgtgca

SEQ ID NO: 13836 - DNA, 53 bp, Artificial Sequence
  Description of Artificial Sequence: Synthetic cashew; 5' sequence and inner sequence
tagggaagagaaggacatatgatcgcgacgagtcggcatgtcttctgtgtgca

SEQ ID NO: 13837 - DNA, 53 bp, Artificial Sequence; identical to SEQ ID NO: 1892
  Description of Artificial Sequence: Synthetic cashew; 5' sequence and inner sequence

SEQ ID NO: 13838 - DNA, 53 bp, Artificial Sequence; identical to SEQ ID NO: 5627
  Description of Artificial Sequence: Synthetic cashew; 5' sequence and inner sequence

SEQ ID NO: 13839 - DNA, 53 bp, Artificial Sequence; identical to SEQ ID NO: 1952
  Description of Artificial Sequence: Synthetic cashew; 5' sequence and inner sequence

SEQ ID NO: 13840 - DNA, 53 bp, Artificial Sequence; identical to SEQ ID NO: 5785
  Description of Artificial Sequence: Synthetic cashew; 5' sequence and inner sequence

SEQ ID NO: 13841 - DNA, 53 bp, Artificial Sequence; identical to SEQ ID NO: 1252
  Description of Artificial Sequence: Synthetic cashew; 5' sequence and inner sequence

SEQ ID NO: 13842 - DNA, 53 bp, Artificial Sequence; identical to SEQ ID NO: 9659
  Description of Artificial Sequence: Synthetic cashew; 5' sequence and inner sequence

SEQ ID NO: 13843 - DNA, 53 bp, Artificial Sequence; identical to SEQ ID NO: 5470
  Description of Artificial Sequence: Synthetic cashew; 5' sequence and inner sequence

SEQ ID NO: 13844 - DNA, 53 bp, Artificial Sequence; identical to SEQ ID NO: 5485
  Description of Artificial Sequence: Synthetic cashew; 5' sequence and inner sequence

SEQ ID NO: 13845 - DNA, 53 bp, Artificial Sequence; identical to SEQ ID NO: 5816
  Description of Artificial Sequence: Synthetic cashew; 5' sequence and inner sequence

SEQ ID NO: 13846 - DNA, 53 bp, Artificial Sequence; identical to SEQ ID NO: 9879
  Description of Artificial Sequence: Synthetic cashew; 5' sequence and inner sequence

SEQ ID NO: 13847 - DNA, 53 bp, Artificial Sequence; identical to SEQ ID NO: 5925
  Description of Artificial Sequence: Synthetic cashew; 5' sequence and inner sequence

SEQ ID NO: 13848 - DNA, 53 bp, Artificial Sequence; identical to SEQ ID NO: 1242
  Description of Artificial Sequence: Synthetic cashew; 5' sequence and inner sequence

SEQ ID NO: 13849 - DNA, 53 bp, Artificial Sequence; identical to SEQ ID NO: 1600
  Description of Artificial Sequence: Synthetic cashew; 5' sequence and inner sequence

SEQ ID NO: 13850 - DNA, 53 bp, Artificial Sequence; identical to SEQ ID NO: 5949
  Description of Artificial Sequence: Synthetic cashew; 5' sequence and inner sequence

SEQ ID NO: 13851 - DNA, 53 bp, Artificial Sequence; identical to SEQ ID NO: 5939
  Description of Artificial Sequence: Synthetic cashew; 5' sequence and inner sequence

SEQ ID NO: 13852 - DNA, 53 bp, Artificial Sequence; identical to SEQ ID NO: 9837
  Description of Artificial Sequence: Synthetic cashew; 5' sequence and inner sequence

SEQ ID NO: 13853 - DNA, 53 bp, Artificial Sequence
  Description of Artificial Sequence: Synthetic cashew; 5' sequence and inner sequence
tagggaagagaaggacatatgatgtcctgccatcccttcgagtgtgacaggta

SEQ ID NO: 13854 - DNA, 53 bp, Artificial Sequence; identical to SEQ ID NO: 1937
  Description of Artificial Sequence: Synthetic cashew; 5' sequence and inner sequence

SEQ ID NO: 13855 - DNA, 53 bp, Artificial Sequence; identical to SEQ ID NO: 1169
  Description of Artificial Sequence: Synthetic cashew; 5' sequence and inner sequence

SEQ ID NO: 13856 - DNA, 53 bp, Artificial Sequence; identical to SEQ ID NO: 5969
  Description of Artificial Sequence: Synthetic cashew; 5' sequence and inner sequence

SEQ ID NO: 13857 - DNA, 53 bp, Artificial Sequence; identical to SEQ ID NO: 1559
  Description of Artificial Sequence: Synthetic cashew; 5' sequence and inner sequence

SEQ ID NO: 13858 - DNA, 53 bp, Artificial Sequence; identical to SEQ ID NO: 5638
  Description of Artificial Sequence: Synthetic cashew; 5' sequence and inner sequence

SEQ ID NO: 13859 - DNA, 53 bp, Artificial Sequence; identical to SEQ ID NO: 5857
  Description of Artificial Sequence: Synthetic cashew; 5' sequence and inner sequence

SEQ ID NO: 13860 - DNA, 53 bp, Artificial Sequence; identical to SEQ ID NO: 5708
  Description of Artificial Sequence: Synthetic cashew; 5' sequence and inner sequence

SEQ ID NO: 13861 - DNA, 53 bp, Artificial Sequence; identical to SEQ ID NO: 1339
  Description of Artificial Sequence: Synthetic cashew; 5' sequence and inner sequence

SEQ ID NO: 13862 - DNA, 53 bp, Artificial Sequence; identical to SEQ ID NO: 1835
  Description of Artificial Sequence: Synthetic cashew; 5' sequence and inner sequence

SEQ ID NO: 13863 - DNA, 53 bp, Artificial Sequence; identical to SEQ ID NO: 1521
  Description of Artificial Sequence: Synthetic cashew; 5' sequence and inner sequence

SEQ ID NO: 13864 - DNA, 53 bp, Artificial Sequence
  Description of Artificial Sequence: Synthetic cashew; 5' sequence and inner sequence
tagggaagagaaggacatatgatcgaccacgcgggagatggacatgtcgcatg

SEQ ID NO: 13865 - DNA, 53 bp, Artificial Sequence; identical to SEQ ID NO: 9787
  Description of Artificial Sequence: Synthetic cashew; 5' sequence and inner sequence

SEQ ID NO: 13866 - DNA, 53 bp, Artificial Sequence
  Description of Artificial Sequence: Synthetic cashew; 5' sequence and inner sequence
tagggaagagaaggacatatgatctgcacgtagccctatcagtggtgcatgca

SEQ ID NO: 13867 - DNA, 53 bp, Artificial Sequence; identical to SEQ ID NO: 1498
  Description of Artificial Sequence: Synthetic cashew; 5' sequence and inner sequence

SEQ ID NO: 13868 - DNA, 53 bp, Artificial Sequence; identical to SEQ ID NO: 1977
  Description of Artificial Sequence: Synthetic cashew; 5' sequence and inner sequence

SEQ ID NO: 13869 - DNA, 53 bp, Artificial Sequence
  Description of Artificial Sequence: Synthetic cashew; 5' sequence and inner sequence
tagggaagagaaggacatatgatcgcaccgtcgatacgtcatggacgctgaca

SEQ ID NO: 13870 - DNA, 53 bp, Artificial Sequence; identical to SEQ ID NO: 9676
  Description of Artificial Sequence: Synthetic cashew; 5' sequence and inner sequence

SEQ ID NO: 13871 - DNA, 53 bp, Artificial Sequence; identical to SEQ ID NO: 1650
  Description of Artificial Sequence: Synthetic cashew; 5' sequence and inner sequence

SEQ ID NO: 13872 - DNA, 53 bp, Artificial Sequence
  Description of Artificial Sequence: Synthetic cashew; 5' sequence and inner sequence
tagggaagagaaggacatatgatccgaacaaccgaacgtggacgtggctgtcc

SEQ ID NO: 13873 - DNA, 53 bp, Artificial Sequence; identical to SEQ ID NO: 1316
  Description of Artificial Sequence: Synthetic cashew; 5' sequence and inner sequence

SEQ ID NO: 13874 - DNA, 53 bp, Artificial Sequence; identical to SEQ ID NO: 5837
  Description of Artificial Sequence: Synthetic cashew; 5' sequence and inner sequence

SEQ ID NO: 13875 - DNA, 53 bp, Artificial Sequence; identical to SEQ ID NO: 5742
  Description of Artificial Sequence: Synthetic cashew; 5' sequence and inner sequence

SEQ ID NO: 13876 - DNA, 53 bp, Artificial Sequence; identical to SEQ ID NO: 1719
  Description of Artificial Sequence: Synthetic cashew; 5' sequence and inner sequence

SEQ ID NO: 13877 - DNA, 53 bp, Artificial Sequence; identical to SEQ ID NO: 1720
  Description of Artificial Sequence: Synthetic cashew; 5' sequence and inner sequence

SEQ ID NO: 13878 - DNA, 53 bp, Artificial Sequence
  Description of Artificial Sequence: Synthetic cashew; 5' sequence and inner sequence
tagggaagagaaggacatatgatcgctacgagtaggcatgtcttctgtgtgca

SEQ ID NO: 13879 - DNA, 53 bp, Artificial Sequence; identical to SEQ ID NO: 5864
  Description of Artificial Sequence: Synthetic cashew; 5' sequence and inner sequence

SEQ ID NO: 13880 - DNA, 53 bp, Artificial Sequence; identical to SEQ ID NO: 1664
  Description of Artificial Sequence: Synthetic cashew; 5' sequence and inner sequence

SEQ ID NO: 13881 - DNA, 53 bp, Artificial Sequence; identical to SEQ ID NO: 1758
  Description of Artificial Sequence: Synthetic cashew; 5' sequence and inner sequence

SEQ ID NO: 13882 - DNA, 54 bp, Artificial Sequence; identical to SEQ ID NO: 5858
  Description of Artificial Sequence: Synthetic cashew; 5' sequence and inner sequence

SEQ ID NO: 13883 - DNA, 53 bp, Artificial Sequence; identical to SEQ ID NO: 1740
  Description of Artificial Sequence: Synthetic cashew; 5' sequence and inner sequence

SEQ ID NO: 13884 - DNA, 53 bp, Artificial Sequence; identical to SEQ ID NO: 1669
  Description of Artificial Sequence: Synthetic cashew; 5' sequence and inner sequence

SEQ ID NO: 13885 - DNA, 51 bp, Artificial Sequence
  Description of Artificial Sequence: Synthetic cashew; 5' sequence and inner sequence
tagggaagagaaggacatatgatgtgcgaccgaccctatcatgaggccatg

SEQ ID NO: 13886 - DNA, 53 bp, Artificial Sequence; identical to SEQ ID NO: 1482
  Description of Artificial Sequence: Synthetic cashew; 5' sequence and inner sequence

SEQ ID NO: 13887 - DNA, 53 bp, Artificial Sequence; identical to SEQ ID NO: 9922
  Description of Artificial Sequence: Synthetic cashew; 5' sequence and inner sequence

SEQ ID NO: 13888 - DNA, 53 bp, Artificial Sequence; identical to SEQ ID NO: 9907
  Description of Artificial Sequence: Synthetic cashew; 5' sequence and inner sequence

SEQ ID NO: 13889 - DNA, 53 bp, Artificial Sequence
  Description of Artificial Sequence: Synthetic cashew; 5' sequence and inner sequence
tagggaagagaaggacatatgatccgatgcgacacggaggcggtcttgcactg

SEQ ID NO: 13890 - DNA, 53 bp, Artificial Sequence; identical to SEQ ID NO: 1748
  Description of Artificial Sequence: Synthetic cashew; 5' sequence and inner sequence

SEQ ID NO: 13891 - DNA, 53 bp, Artificial Sequence; identical to SEQ ID NO: 1957
  Description of Artificial Sequence: Synthetic cashew; 5' sequence and inner sequence

SEQ ID NO: 13892 - DNA, 53 bp, Artificial Sequence
  Description of Artificial Sequence: Synthetic cashew; 5' sequence and inner sequence
tagggaagagaaggacatatgatccgcacgtagccctatcagtggttcatgca

SEQ ID NO: 13893 - DNA, 52 bp, Artificial Sequence; identical to SEQ ID NO: 1549
  Description of Artificial Sequence: Synthetic cashew; 5' sequence and inner sequence

SEQ ID NO: 13894 - DNA, 53 bp, Artificial Sequence; identical to SEQ ID NO: 1717
  Description of Artificial Sequence: Synthetic cashew; 5' sequence and inner sequence

SEQ ID NO: 13895 - DNA, 53 bp, Artificial Sequence
  Description of Artificial Sequence: Synthetic cashew; 5' sequence and inner sequence
tagggaagagaaggacatatgatcgcgacgcaagtgcatggacctcggcatgc

SEQ ID NO: 13896 - DNA, 48 bp, Artificial Sequence; identical to SEQ ID NO: 1427
  Description of Artificial Sequence: Synthetic cashew; 5' sequence and inner sequence

SEQ ID NO: 13897 - DNA, 53 bp, Artificial Sequence; identical to SEQ ID NO: 1490
  Description of Artificial Sequence: Synthetic cashew; 5' sequence and inner sequence

SEQ ID NO: 13898 - DNA, 53 bp, Artificial Sequence; identical to SEQ ID NO: 9855
  Description of Artificial Sequence: Synthetic cashew; 5' sequence and inner sequence

SEQ ID NO: 13899 - DNA, 53 bp, Artificial Sequence; identical to SEQ ID NO: 1670
  Description of Artificial Sequence: Synthetic cashew; 5' sequence and inner sequence

SEQ ID NO: 13900 - DNA, 53 bp, Artificial Sequence; identical to SEQ ID NO: 1788
  Description of Artificial Sequence: Synthetic cashew; 5' sequence and inner sequence

SEQ ID NO: 13901 - DNA, 53 bp, Artificial Sequence
  Description of Artificial Sequence: Synthetic cashew; 5' sequence and inner sequence
tagggaagagaaggacatatgatcgcgacgagcaggcatgtcttctgtgtgca

SEQ ID NO: 13902 - DNA, 53 bp, Artificial Sequence; identical to SEQ ID NO: 1931
  Description of Artificial Sequence: Synthetic cashew; 5' sequence and inner sequence

SEQ ID NO: 13903 - DNA, 53 bp, Artificial Sequence; identical to SEQ ID NO: 5571
  Description of Artificial Sequence: Synthetic cashew; 5' sequence and inner sequence

SEQ ID NO: 13904 - DNA, 53 bp, Artificial Sequence; identical to SEQ ID NO: 5872
  Description of Artificial Sequence: Synthetic cashew; 5' sequence and inner sequence

SEQ ID NO: 13905 - DNA, 53 bp, Artificial Sequence; identical to SEQ ID NO: 5976
  Description of Artificial Sequence: Synthetic cashew; 5' sequence and inner sequence

SEQ ID NO: 13906 - DNA, 53 bp, Artificial Sequence; identical to SEQ ID NO: 1996
  Description of Artificial Sequence: Synthetic cashew; 5' sequence and inner sequence

SEQ ID NO: 13907 - DNA, 53 bp, Artificial Sequence; identical to SEQ ID NO: 1705
  Description of Artificial Sequence: Synthetic cashew; 5' sequence and inner sequence

SEQ ID NO: 13908 - DNA, 53 bp, Artificial Sequence; identical to SEQ ID NO: 1434
  Description of Artificial Sequence: Synthetic cashew; 5' sequence and inner sequence

SEQ ID NO: 13909 - DNA, 53 bp, Artificial Sequence; identical to SEQ ID NO: 9792
  Description of Artificial Sequence: Synthetic cashew; 5' sequence and inner sequence

SEQ ID NO: 13910 - DNA, 53 bp, Artificial Sequence; identical to SEQ ID NO: 5874
  Description of Artificial Sequence: Synthetic cashew; 5' sequence and inner sequence

SEQ ID NO: 13911 - DNA, 53 bp, Artificial Sequence; identical to SEQ ID NO: 1782
  Description of Artificial Sequence: Synthetic cashew; 5' sequence and inner sequence

SEQ ID NO: 13912 - DNA, 53 bp, Artificial Sequence
  Description of Artificial Sequence: Synthetic cashew; 5' sequence and inner sequence
tagggaagagaaggacatatgatagcgtgcggcacggtccacttcgctgcatg

SEQ ID NO: 13913 - DNA, 53 bp, Artificial Sequence; identical to SEQ ID NO: 5634
  Description of Artificial Sequence: Synthetic cashew; 5' sequence and inner sequence

SEQ ID NO: 13914 - DNA, 53 bp, Artificial Sequence
  Description of Artificial Sequence: Synthetic cashew; 5' sequence and inner sequence
tagggaagagaaggacatatgatgcgtcatgggtacgtcgctgggtgtggaca

SEQ ID NO: 13915 - DNA, 53 bp, Artificial Sequence; identical to SEQ ID NO: 9826
  Description of Artificial Sequence: Synthetic cashew; 5' sequence and inner sequence

SEQ ID NO: 13916 - DNA, 53 bp, Artificial Sequence; identical to SEQ ID NO: 5710
  Description of Artificial Sequence: Synthetic cashew; 5' sequence and inner sequence

SEQ ID NO: 13917 - DNA, 53 bp, Artificial Sequence; identical to SEQ ID NO: 1580
  Description of Artificial Sequence: Synthetic cashew; 5' sequence and inner sequence

SEQ ID NO: 13918 - DNA, 52 bp, Artificial Sequence
  Description of Artificial Sequence: Synthetic cashew; 5' sequence and inner sequence
tagggaagagaaggacatatgatcgtgctacgaggacctggaccggtgcgtc

SEQ ID NO: 13919 - DNA, 53 bp, Artificial Sequence; identical to SEQ ID NO: 1444
  Description of Artificial Sequence: Synthetic cashew; 5' sequence and inner sequence

SEQ ID NO: 13920 - DNA, 53 bp, Artificial Sequence; identical to SEQ ID NO: 9988
  Description of Artificial Sequence: Synthetic cashew; 5' sequence and inner sequence

SEQ ID NO: 13921 - DNA, 53 bp, Artificial Sequence; identical to SEQ ID NO: 5930
  Description of Artificial Sequence: Synthetic cashew; 5' sequence and inner sequence

SEQ ID NO: 13922 - DNA, 53 bp, Artificial Sequence
  Description of Artificial Sequence: Synthetic cashew; 5' sequence and inner sequence
tagggaagagaaggacatatgatgtcatgcacgaacactatcatgacggcatg

SEQ ID NO: 13923 - DNA, 53 bp, Artificial Sequence; identical to SEQ ID NO: 1962
  Description of Artificial Sequence: Synthetic cashew; 5' sequence and inner sequence

SEQ ID NO: 13924 - DNA, 52 bp, Artificial Sequence; identical to SEQ ID NO: 5763
  Description of Artificial Sequence: Synthetic cashew; 5' sequence and inner sequence

SEQ ID NO: 13925 - DNA, 53 bp, Artificial Sequence; identical to SEQ ID NO: 5933
  Description of Artificial Sequence: Synthetic cashew; 5' sequence and inner sequence

SEQ ID NO: 13926 - DNA, 53 bp, Artificial Sequence; identical to SEQ ID NO: 5807
  Description of Artificial Sequence: Synthetic cashew; 5' sequence and inner sequence

SEQ ID NO: 13927 - DNA, 53 bp, Artificial Sequence; identical to SEQ ID NO: 1842
  Description of Artificial Sequence: Synthetic cashew; 5' sequence and inner sequence

SEQ ID NO: 13928 - DNA, 53 bp, Artificial Sequence; identical to SEQ ID NO: 5880
  Description of Artificial Sequence: Synthetic cashew; 5' sequence and inner sequence

SEQ ID NO: 13929 - DNA, 53 bp, Artificial Sequence; identical to SEQ ID NO: 1526
  Description of Artificial Sequence: Synthetic cashew; 5' sequence and inner sequence

SEQ ID NO: 13930 - DNA, 53 bp, Artificial Sequence; identical to SEQ ID NO: 1823
  Description of Artificial Sequence: Synthetic cashew; 5' sequence and inner sequence

SEQ ID NO: 13931 - DNA, 53 bp, Artificial Sequence
  Description of Artificial Sequence: Synthetic cashew; 5' sequence and inner sequence
tagggaagagaaggacatatgatgtgctgcactgccctacacgtgggaatgga

SEQ ID NO: 13932 - DNA, 53 bp, Artificial Sequence
  Description of Artificial Sequence: Synthetic cashew; 5' sequence and inner sequence
tagggaagagaaggacatatgatcgcaccgagagtgatcgttgttcgcagtca

SEQ ID NO: 13933 - DNA, 53 bp, Artificial Sequence
  Description of Artificial Sequence: Synthetic cashew; 5' sequence and inner sequence
tagggaagagaaggacatatgatggcatgcgatggatgtgggccagtacgcgc

SEQ ID NO: 13934 - DNA, 53 bp, Artificial Sequence; identical to SEQ ID NO: 1778
  Description of Artificial Sequence: Synthetic cashew; 5' sequence and inner sequence

SEQ ID NO: 13935 - DNA, 53 bp, Artificial Sequence; identical to SEQ ID NO: 1555
  Description of Artificial Sequence: Synthetic cashew; 5' sequence and inner sequence

SEQ ID NO: 13936 - DNA, 53 bp, Artificial Sequence
  Description of Artificial Sequence: Synthetic cashew; 5' sequence and inner sequence
tagggaagagaaggacatatgatgcacgactcgcaccttatcatgaggccatg

SEQ ID NO: 13937 - DNA, 53 bp, Artificial Sequence; identical to SEQ ID NO: 1408
  Description of Artificial Sequence: Synthetic cashew; 5' sequence and inner sequence

SEQ ID NO: 13938 - DNA, 53 bp, Artificial Sequence; identical to SEQ ID NO: 5987
  Description of Artificial Sequence: Synthetic cashew; 5' sequence and inner sequence

SEQ ID NO: 13939 - DNA, 53 bp, Artificial Sequence
  Description of Artificial Sequence: Synthetic cashew; 5' sequence and inner sequence
tagggaagagaaggacatatgatgcccgaacgaccgatcgagtggcgcatgga

SEQ ID NO: 13940 - DNA, 53 bp, Artificial Sequence; identical to SEQ ID NO: 1542
  Description of Artificial Sequence: Synthetic cashew; 5' sequence and inner sequence

SEQ ID NO: 13941 - DNA, 53 bp, Artificial Sequence; identical to SEQ ID NO: 1421
  Description of Artificial Sequence: Synthetic cashew; 5' sequence and inner sequence

SEQ ID NO: 13942 - DNA, 52 bp, Artificial Sequence; identical to SEQ ID NO: 5968
  Description of Artificial Sequence: Synthetic cashew; 5' sequence and inner sequence

SEQ ID NO: 13943 - DNA, 53 bp, Artificial Sequence; identical to SEQ ID NO: 1913
  Description of Artificial Sequence: Synthetic cashew; 5' sequence and inner sequence

SEQ ID NO: 13944 - DNA, 53 bp, Artificial Sequence
  Description of Artificial Sequence: Synthetic cashew; 5' sequence and inner sequence
tagggaagagaaggacatatgatggcatgcacgcccctacacgtgggtatgga

SEQ ID NO: 13945 - DNA, 53 bp, Artificial Sequence
  Description of Artificial Sequence: Synthetic cashew; 5' sequence and inner sequence
tagggaagagaaggacatatgatctgtagcgacatcaagcggtggtgtgcgtg

SEQ ID NO: 13946 - DNA, 53 bp, Artificial Sequence; identical to SEQ ID NO: 1561
  Description of Artificial Sequence: Synthetic cashew; 5' sequence and inner sequence

SEQ ID NO: 13947 - DNA, 53 bp, Artificial Sequence; identical to SEQ ID NO: 1479
  Description of Artificial Sequence: Synthetic cashew; 5' sequence and inner sequence

SEQ ID NO: 13948 - DNA, 53 bp, Artificial Sequence; identical to SEQ ID NO: 1983
  Description of Artificial Sequence: Synthetic cashew; 5' sequence and inner sequence

SEQ ID NO: 13949 - DNA, 53 bp, Artificial Sequence; identical to SEQ ID NO: 9869
  Description of Artificial Sequence: Synthetic cashew; 5' sequence and inner sequence

SEQ ID NO: 13950 - DNA, 53 bp, Artificial Sequence; identical to SEQ ID NO: 9586
  Description of Artificial Sequence: Synthetic cashew; 5' sequence and inner sequence

SEQ ID NO: 13951 - DNA, 53 bp, Artificial Sequence; identical to SEQ ID NO: 1906
  Description of Artificial Sequence: Synthetic cashew; 5' sequence and inner sequence

SEQ ID NO: 13952 - DNA, 53 bp, Artificial Sequence; identical to SEQ ID NO: 1263
  Description of Artificial Sequence: Synthetic cashew; 5' sequence and inner sequence

SEQ ID NO: 13953 - DNA, 53 bp, Artificial Sequence
  Description of Artificial Sequence: Synthetic cashew; 5' sequence and inner sequence
tagggaagagaaggacatatgatgtcatgcacgaacactatcacggcggcatg

SEQ ID NO: 13954 - DNA, 53 bp, Artificial Sequence; identical to SEQ ID NO: 1945
  Description of Artificial Sequence: Synthetic cashew; 5' sequence and inner sequence

SEQ ID NO: 13955 - DNA, 53 bp, Artificial Sequence; identical to SEQ ID NO: 9985
  Description of Artificial Sequence: Synthetic cashew; 5' sequence and inner sequence

SEQ ID NO: 13956 - DNA, 53 bp, Artificial Sequence; identical to SEQ ID NO: 1706
  Description of Artificial Sequence: Synthetic cashew; 5' sequence and inner sequence

SEQ ID NO: 13957 - DNA, 53 bp, Artificial Sequence; identical to SEQ ID NO: 1571
  Description of Artificial Sequence: Synthetic cashew; 5' sequence and inner sequence

SEQ ID NO: 13958 - DNA, 53 bp, Artificial Sequence
  Description of Artificial Sequence: Synthetic cashew; 5' sequence and inner sequence
tagggaagagaaggacatatgatccgcacgtagccctatcagtggtgcatgta

SEQ ID NO: 13959 - DNA, 53 bp, Artificial Sequence
  Description of Artificial Sequence: Synthetic cashew; 5' sequence and inner sequence
tagggaagagaaggacatatgatgcacgtcagcacgtcctctctggcgtggta

SEQ ID NO: 13960 - DNA, 53 bp, Artificial Sequence; identical to SEQ ID NO: 1598
  Description of Artificial Sequence: Synthetic cashew; 5' sequence and inner sequence

SEQ ID NO: 13961 - DNA, 53 bp, Artificial Sequence; identical to SEQ ID NO: 9804
  Description of Artificial Sequence: Synthetic cashew; 5' sequence and inner sequence

SEQ ID NO: 13962 - DNA, 53 bp, Artificial Sequence; identical to SEQ ID NO: 1863
  Description of Artificial Sequence: Synthetic cashew; 5' sequence and inner sequence

SEQ ID NO: 13963 - DNA, 53 bp, Artificial Sequence; identical to SEQ ID NO: 9770
  Description of Artificial Sequence: Synthetic cashew; 5' sequence and inner sequence

SEQ ID NO: 13964 - DNA, 53 bp, Artificial Sequence; identical to SEQ ID NO: 9892
  Description of Artificial Sequence: Synthetic cashew; 5' sequence and inner sequence

SEQ ID NO: 13965 - DNA, 53 bp, Artificial Sequence; identical to SEQ ID NO: 5810
  Description of Artificial Sequence: Synthetic cashew; 5' sequence and inner sequence

SEQ ID NO: 13966 - DNA, 53 bp, Artificial Sequence; identical to SEQ ID NO: 5881
  Description of Artificial Sequence: Synthetic cashew; 5' sequence and inner sequence

SEQ ID NO: 13967 - DNA, 53 bp, Artificial Sequence; identical to SEQ ID NO: 1751
  Description of Artificial Sequence: Synthetic cashew; 5' sequence and inner sequence

SEQ ID NO: 13968 - DNA, 53 bp, Artificial Sequence; identical to SEQ ID NO: 5967
  Description of Artificial Sequence: Synthetic cashew; 5' sequence and inner sequence

SEQ ID NO: 13969 - DNA, 53 bp, Artificial Sequence; identical to SEQ ID NO: 2001
  Description of Artificial Sequence: Synthetic cashew; 5' sequence and inner sequence

SEQ ID NO: 13970 - DNA, 53 bp, Artificial Sequence; identical to SEQ ID NO: 5667
  Description of Artificial Sequence: Synthetic cashew; 5' sequence and inner sequence

SEQ ID NO: 13971 - DNA, 53 bp, Artificial Sequence
  Description of Artificial Sequence: Synthetic cashew; 5' sequence and inner sequence
tagggaagagaaggacatatgatggccaatgcgccccttcatgttgtcgtgga

SEQ ID NO: 13972 - DNA, 53 bp, Artificial Sequence; identical to SEQ ID NO: 5943
  Description of Artificial Sequence: Synthetic cashew; 5' sequence and inner sequence

SEQ ID NO: 13973 - DNA, 53 bp, Artificial Sequence; identical to SEQ ID NO: 1644
  Description of Artificial Sequence: Synthetic cashew; 5' sequence and inner sequence

SEQ ID NO: 13974 - DNA, 53 bp, Artificial Sequence; identical to SEQ ID NO: 5706
  Description of Artificial Sequence: Synthetic cashew; 5' sequence and inner sequence

SEQ ID NO: 13975 - DNA, 53 bp, Artificial Sequence; identical to SEQ ID NO: 5621
  Description of Artificial Sequence: Synthetic cashew; 5' sequence and inner sequence

SEQ ID NO: 13976 - DNA, 53 bp, Artificial Sequence; identical to SEQ ID NO: 5867
  Description of Artificial Sequence: Synthetic cashew; 5' sequence and inner sequence

SEQ ID NO: 13977 - DNA, 53 bp, Artificial Sequence; identical to SEQ ID NO: 1472
  Description of Artificial Sequence: Synthetic cashew; 5' sequence and inner sequence

SEQ ID NO: 13978 - DNA, 53 bp, Artificial Sequence
  Description of Artificial Sequence: Synthetic cashew; 5' sequence and inner sequence
tagggaagagaaggacatatgatggccgagctgaccgtaaaggcaggcgtgta

SEQ ID NO: 13979 - DNA, 53 bp, Artificial Sequence; identical to SEQ ID NO: 5719
  Description of Artificial Sequence: Synthetic cashew; 5' sequence and inner sequence

SEQ ID NO: 13980 - DNA, 52 bp, Artificial Sequence; identical to SEQ ID NO: 1879
  Description of Artificial Sequence: Synthetic cashew; 5' sequence and inner sequence

SEQ ID NO: 13981 - DNA, 52 bp, Artificial Sequence; identical to SEQ ID NO: 1648
  Description of Artificial Sequence: Synthetic cashew; 5' sequence and inner sequence

SEQ ID NO: 13982 - DNA, 53 bp, Artificial Sequence; identical to SEQ ID NO: 1601
  Description of Artificial Sequence: Synthetic cashew; 5' sequence and inner sequence

SEQ ID NO: 13983 - DNA, 53 bp, Artificial Sequence; identical to SEQ ID NO: 5469
  Description of Artificial Sequence: Synthetic cashew; 5' sequence and inner sequence

SEQ ID NO: 13984 - DNA, 53 bp, Artificial Sequence; identical to SEQ ID NO: 9962
  Description of Artificial Sequence: Synthetic cashew; 5' sequence and inner sequence

SEQ ID NO: 13985 - DNA, 53 bp, Artificial Sequence
  Description of Artificial Sequence: Synthetic cashew; 5' sequence and inner sequence
tagggaagagaaggacatatgatgcacgactctcaccctatcatgaggccatg

SEQ ID NO: 13986 - DNA, 53 bp, Artificial Sequence
  Description of Artificial Sequence: Synthetic cashew; 5' sequence and inner sequence
tagggaagagaaggacatatgatgtacacagcgcaccctatcatgaggccatg

SEQ ID NO: 13987 - DNA, 53 bp, Artificial Sequence; identical to SEQ ID NO: 5631
  Description of Artificial Sequence: Synthetic cashew; 5' sequence and inner sequence

SEQ ID NO: 13988 - DNA, 53 bp, Artificial Sequence; identical to SEQ ID NO: 1497
  Description of Artificial Sequence: Synthetic cashew; 5' sequence and inner sequence

SEQ ID NO: 13989 - DNA, 53 bp, Artificial Sequence; identical to SEQ ID NO: 5743
  Description of Artificial Sequence: Synthetic cashew; 5' sequence and inner sequence

SEQ ID NO: 13990 - DNA, 53 bp, Artificial Sequence; identical to SEQ ID NO: 5381
  Description of Artificial Sequence: Synthetic cashew; 5' sequence and inner sequence

SEQ ID NO: 13991 - DNA, 53 bp, Artificial Sequence; identical to SEQ ID NO: 1688
  Description of Artificial Sequence: Synthetic cashew; 5' sequence and inner sequence

SEQ ID NO: 13992 - DNA, 53 bp, Artificial Sequence
  Description of Artificial Sequence: Synthetic cashew; 5' sequence and inner sequence
tagggaagagaaggacatatgatccatcgcgtcactatcatgcgtgtcacgta

SEQ ID NO: 13993 - DNA, 53 bp, Artificial Sequence; identical to SEQ ID NO: 5591
  Description of Artificial Sequence: Synthetic cashew; 5' sequence and inner sequence

SEQ ID NO: 13994 - DNA, 53 bp, Artificial Sequence; identical to SEQ ID NO: 1677
  Description of Artificial Sequence: Synthetic cashew; 5' sequence and inner sequence

SEQ ID NO: 13995 - DNA, 53 bp, Artificial Sequence; identical to SEQ ID NO: 1307
  Description of Artificial Sequence: Synthetic cashew; 5' sequence and inner sequence

SEQ ID NO: 13996 - DNA, 53 bp, Artificial Sequence
  Description of Artificial Sequence: Synthetic cashew; 5' sequence and inner sequence
tagggaagagaaggacatatgatcgcaccctcgatacgtcatgcacgctgaca

SEQ ID NO: 13997 - DNA, 53 bp, Artificial Sequence
  Description of Artificial Sequence: Synthetic cashew; 5' sequence and inner sequence
tagggaagagaaggacatatgatggccacagcgtacctcaacgtggacgcgca

SEQ ID NO: 13998 - DNA, 53 bp, Artificial Sequence
  Description of Artificial Sequence: Synthetic cashew; 5' sequence and inner sequence
tagggaagagaaggacatatgatgtacgcaaacggaccgatcggtggtgcgta

SEQ ID NO: 13999 - DNA, 53 bp, Artificial Sequence
  Description of Artificial Sequence: Synthetic cashew; 5' sequence and inner sequence
tagggaagagaaggacatatgatgcgaccgcgacatacgatctgctctgcgtc

SEQ ID NO: 14000 - DNA, 53 bp, Artificial Sequence; identical to SEQ ID NO: 1547
  Description of Artificial Sequence: Synthetic cashew; 5' sequence and inner sequence

SEQ ID NO: 14001 - DNA, 53 bp, Artificial Sequence; identical to SEQ ID NO: 1335
  Description of Artificial Sequence: Synthetic cashew; 5' sequence and inner sequence

SEQ ID NO: 14002 - DNA, 53 bp, Artificial Sequence
  Description of Artificial Sequence: Synthetic cashew; 5' sequence and inner sequence
tagggaagagaaggacatatgatgtcatgccatcccttcgagagtgacaggta

SEQ ID NO: 14003 - DNA, 53 bp, Artificial Sequence; identical to SEQ ID NO: 2004
  Description of Artificial Sequence: Synthetic cashew; inner sequence and 3' sequence

SEQ ID NO: 14004 - DNA, 53 bp, Artificial Sequence; identical to SEQ ID NO: 2003
  Description of Artificial Sequence: Synthetic cashew; inner sequence and 3' sequence

SEQ ID NO: 14005 - DNA, 53 bp, Artificial Sequence; identical to SEQ ID NO: 2008
  Description of Artificial Sequence: Synthetic cashew; inner sequence and 3' sequence

SEQ ID NO: 14006 - DNA, 53 bp, Artificial Sequence; identical to SEQ ID NO: 2006
  Description of Artificial Sequence: Synthetic cashew; inner sequence and 3' sequence

SEQ ID NO: 14007 - DNA, 53 bp, Artificial Sequence; identical to SEQ ID NO: 2007
  Description of Artificial Sequence: Synthetic cashew; inner sequence and 3' sequence

SEQ ID NO: 14008 - DNA, 53 bp, Artificial Sequence; identical to SEQ ID NO: 2005
  Description of Artificial Sequence: Synthetic cashew; inner sequence and 3' sequence

SEQ ID NO: 14009 - DNA, 53 bp, Artificial Sequence; identical to SEQ ID NO: 2009
  Description of Artificial Sequence: Synthetic cashew; inner sequence and 3' sequence

SEQ ID NO: 14010 - DNA, 53 bp, Artificial Sequence; identical to SEQ ID NO: 2012
  Description of Artificial Sequence: Synthetic cashew; inner sequence and 3' sequence

SEQ ID NO: 14011 - DNA, 53 bp, Artificial Sequence; identical to SEQ ID NO: 2060
  Description of Artificial Sequence: Synthetic cashew; inner sequence and 3' sequence

SEQ ID NO: 14012 - DNA, 53 bp, Artificial Sequence; identical to SEQ ID NO: 2010
  Description of Artificial Sequence: Synthetic cashew; inner sequence and 3' sequence

SEQ ID NO: 14013 - DNA, 53 bp, Artificial Sequence; identical to SEQ ID NO: 2016
  Description of Artificial Sequence: Synthetic cashew; inner sequence and 3' sequence

SEQ ID NO: 14014 - DNA, 53 bp, Artificial Sequence; identical to SEQ ID NO: 2023
  Description of Artificial Sequence: Synthetic cashew; inner sequence and 3' sequence

SEQ ID NO: 14015 - DNA, 53 bp, Artificial Sequence; identical to SEQ ID NO: 2011
  Description of Artificial Sequence: Synthetic cashew; inner sequence and 3' sequence

SEQ ID NO: 14016 - DNA, 53 bp, Artificial Sequence; identical to SEQ ID NO: 2014
  Description of Artificial Sequence: Synthetic cashew; inner sequence and 3' sequence

SEQ ID NO: 14017 - DNA, 53 bp, Artificial Sequence; identical to SEQ ID NO: 2018
  Description of Artificial Sequence: Synthetic cashew; inner sequence and 3' sequence

SEQ ID NO: 14018 - DNA, 52 bp, Artificial Sequence; identical to SEQ ID NO: 2193
  Description of Artificial Sequence: Synthetic cashew; inner sequence and 3' sequence

SEQ ID NO: 14019 - DNA, 53 bp, Artificial Sequence; identical to SEQ ID NO: 2037
  Description of Artificial Sequence: Synthetic cashew; inner sequence and 3' sequence

SEQ ID NO: 14020 - DNA, 53 bp, Artificial Sequence; identical to SEQ ID NO: 2013
  Description of Artificial Sequence: Synthetic cashew; inner sequence and 3' sequence

SEQ ID NO: 14021 - DNA, 53 bp, Artificial Sequence; identical to SEQ ID NO: 2017
  Description of Artificial Sequence: Synthetic cashew; inner sequence and 3' sequence

SEQ ID NO: 14022 - DNA, 53 bp, Artificial Sequence; identical to SEQ ID NO: 2028
  Description of Artificial Sequence: Synthetic cashew; inner sequence and 3' sequence

SEQ ID NO: 14023 - DNA, 53 bp, Artificial Sequence; identical to SEQ ID NO: 2022
  Description of Artificial Sequence: Synthetic cashew; inner sequence and 3' sequence

SEQ ID NO: 14024 - DNA, 53 bp, Artificial Sequence; identical to SEQ ID NO: 2020
  Description of Artificial Sequence: Synthetic cashew; inner sequence and 3' sequence

SEQ ID NO: 14025 - DNA, 53 bp, Artificial Sequence; identical to SEQ ID NO: 2030
  Description of Artificial Sequence: Synthetic cashew; inner sequence and 3' sequence

SEQ ID NO: 14026 - DNA, 53 bp, Artificial Sequence; identical to SEQ ID NO: 2045
  Description of Artificial Sequence: Synthetic cashew; inner sequence and 3' sequence

SEQ ID NO: 14027 - DNA, 53 bp, Artificial Sequence; identical to SEQ ID NO: 2034
  Description of Artificial Sequence: Synthetic cashew; inner sequence and 3' sequence

SEQ ID NO: 14028 - DNA, 53 bp, Artificial Sequence; identical to SEQ ID NO: 2015
  Description of Artificial Sequence: Synthetic cashew; inner sequence and 3' sequence

SEQ ID NO: 14029 - DNA, 53 bp, Artificial Sequence; identical to SEQ ID NO: 2046
  Description of Artificial Sequence: Synthetic cashew; inner sequence and 3' sequence

SEQ ID NO: 14030 - DNA, 53 bp, Artificial Sequence; identical to SEQ ID NO: 2049
  Description of Artificial Sequence: Synthetic cashew; inner sequence and 3' sequence

SEQ ID NO: 14031 - DNA, 53 bp, Artificial Sequence; identical to SEQ ID NO: 2021
  Description of Artificial Sequence: Synthetic cashew; inner sequence and 3' sequence

SEQ ID NO: 14032 - DNA, 53 bp, Artificial Sequence; identical to SEQ ID NO: 2033
  Description of Artificial Sequence: Synthetic cashew; inner sequence and 3' sequence

SEQ ID NO: 14033 - DNA, 53 bp, Artificial Sequence; identical to SEQ ID NO: 2032
  Description of Artificial Sequence: Synthetic cashew; inner sequence and 3' sequence

SEQ ID NO: 14034 - DNA, 53 bp, Artificial Sequence; identical to SEQ ID NO: 2055
  Description of Artificial Sequence: Synthetic cashew; inner sequence and 3' sequence

SEQ ID NO: 14035 - DNA, 53 bp, Artificial Sequence; identical to SEQ ID NO: 2029
  Description of Artificial Sequence: Synthetic cashew; inner sequence and 3' sequence

SEQ ID NO: 14036 - DNA, 53 bp, Artificial Sequence; identical to SEQ ID NO: 2041
  Description of Artificial Sequence: Synthetic cashew; inner sequence and 3' sequence

SEQ ID NO: 14037 - DNA, 53 bp, Artificial Sequence; identical to SEQ ID NO: 2024
  Description of Artificial Sequence: Synthetic cashew; inner sequence and 3' sequence

SEQ ID NO: 14038 - DNA, 52 bp, Artificial Sequence; identical to SEQ ID NO: 2070
  Description of Artificial Sequence: Synthetic cashew; inner sequence and 3' sequence

SEQ ID NO: 14039 - DNA, 53 bp, Artificial Sequence; identical to SEQ ID NO: 2038
  Description of Artificial Sequence: Synthetic cashew; inner sequence and 3' sequence

SEQ ID NO: 14040 - DNA, 53 bp, Artificial Sequence; identical to SEQ ID NO: 2040
  Description of Artificial Sequence: Synthetic cashew; inner sequence and 3' sequence

SEQ ID NO: 14041 - DNA, 53 bp, Artificial Sequence; identical to SEQ ID NO: 2131
  Description of Artificial Sequence: Synthetic cashew; inner sequence and 3' sequence

SEQ ID NO: 14042 - DNA, 53 bp, Artificial Sequence; identical to SEQ ID NO: 2077
  Description of Artificial Sequence: Synthetic cashew; inner sequence and 3' sequence

SEQ ID NO: 14043 - DNA, 53 bp, Artificial Sequence; identical to SEQ ID NO: 2044
  Description of Artificial Sequence: Synthetic cashew; inner sequence and 3' sequence

SEQ ID NO: 14044 - DNA, 53 bp, Artificial Sequence; identical to SEQ ID NO: 2019
  Description of Artificial Sequence: Synthetic cashew; inner sequence and 3' sequence

SEQ ID NO: 14045 - DNA, 53 bp, Artificial Sequence; identical to SEQ ID NO: 2039
  Description of Artificial Sequence: Synthetic cashew; inner sequence and 3' sequence

SEQ ID NO: 14046 - DNA, 53 bp, Artificial Sequence; identical to SEQ ID NO: 2088
  Description of Artificial Sequence: Synthetic cashew; inner sequence and 3' sequence

SEQ ID NO: 14047 - DNA, 53 bp, Artificial Sequence; identical to SEQ ID NO: 2054
  Description of Artificial Sequence: Synthetic cashew; inner sequence and 3' sequence

SEQ ID NO: 14048 - DNA, 53 bp, Artificial Sequence; identical to SEQ ID NO: 2048
  Description of Artificial Sequence: Synthetic cashew; inner sequence and 3' sequence

SEQ ID NO: 14049 - DNA, 53 bp, Artificial Sequence; identical to SEQ ID NO: 2082
  Description of Artificial Sequence: Synthetic cashew; inner sequence and 3' sequence

SEQ ID NO: 14050 - DNA, 53 bp, Artificial Sequence; identical to SEQ ID NO: 2074
  Description of Artificial Sequence: Synthetic cashew; inner sequence and 3' sequence

SEQ ID NO: 14051 - DNA, 53 bp, Artificial Sequence; identical to SEQ ID NO: 2035
  Description of Artificial Sequence: Synthetic cashew; inner sequence and 3' sequence

SEQ ID NO: 14052 - DNA, 53 bp, Artificial Sequence; identical to SEQ ID NO: 2064
  Description of Artificial Sequence: Synthetic cashew; inner sequence and 3' sequence

SEQ ID NO: 14053 - DNA, 53 bp, Artificial Sequence; identical to SEQ ID NO: 2050
  Description of Artificial Sequence: Synthetic cashew; inner sequence and 3' sequence

SEQ ID NO: 14054 - DNA, 53 bp, Artificial Sequence; identical to SEQ ID NO: 2066
  Description of Artificial Sequence: Synthetic cashew; inner sequence and 3' sequence

SEQ ID NO: 14055 - DNA, 53 bp, Artificial Sequence; identical to SEQ ID NO: 2061
  Description of Artificial Sequence: Synthetic cashew; inner sequence and 3' sequence

SEQ ID NO: 14056 - DNA, 53 bp, Artificial Sequence; identical to SEQ ID NO: 2031
  Description of Artificial Sequence: Synthetic cashew; inner sequence and 3' sequence

SEQ ID NO: 14057 - DNA, 53 bp, Artificial Sequence; identical to SEQ ID NO: 2052
  Description of Artificial Sequence: Synthetic cashew; inner sequence and 3' sequence

SEQ ID NO: 14058 - DNA, 53 bp, Artificial Sequence; identical to SEQ ID NO: 2117
  Description of Artificial Sequence: Synthetic cashew; inner sequence and 3' sequence

SEQ ID NO: 14059 - DNA, 53 bp, Artificial Sequence; identical to SEQ ID NO: 2043
  Description of Artificial Sequence: Synthetic cashew; inner sequence and 3' sequence

SEQ ID NO: 14060 - DNA, 53 bp, Artificial Sequence; identical to SEQ ID NO: 2053
  Description of Artificial Sequence: Synthetic cashew; inner sequence and 3' sequence

SEQ ID NO: 14061 - DNA, 53 bp, Artificial Sequence; identical to SEQ ID NO: 2051
  Description of Artificial Sequence: Synthetic cashew; inner sequence and 3' sequence

SEQ ID NO: 14062 - DNA, 53 bp, Artificial Sequence; identical to SEQ ID NO: 2076
  Description of Artificial Sequence: Synthetic cashew; inner sequence and 3' sequence

SEQ ID NO: 14063 - DNA, 53 bp, Artificial Sequence; identical to SEQ ID NO: 2063
  Description of Artificial Sequence: Synthetic cashew; inner sequence and 3' sequence

SEQ ID NO: 14064 - DNA, 53 bp, Artificial Sequence; identical to SEQ ID NO: 2133
  Description of Artificial Sequence: Synthetic cashew; inner sequence and 3' sequence

SEQ ID NO: 14065 - DNA, 53 bp, Artificial Sequence; identical to SEQ ID NO: 2058
  Description of Artificial Sequence: Synthetic cashew; inner sequence and 3' sequence

SEQ ID NO: 14066 - DNA, 53 bp, Artificial Sequence; identical to SEQ ID NO: 2112
  Description of Artificial Sequence: Synthetic cashew; inner sequence and 3' sequence

SEQ ID NO: 14067 - DNA, 53 bp, Artificial Sequence; identical to SEQ ID NO: 2042
  Description of Artificial Sequence: Synthetic cashew; inner sequence and 3' sequence

SEQ ID NO: 14068 - DNA, 53 bp, Artificial Sequence; identical to SEQ ID NO: 2129
  Description of Artificial Sequence: Synthetic cashew; inner sequence and 3' sequence

SEQ ID NO: 14069 - DNA, 53 bp, Artificial Sequence; identical to SEQ ID NO: 2081
  Description of Artificial Sequence: Synthetic cashew; inner sequence and 3' sequence

SEQ ID NO: 14070 - DNA, 53 bp, Artificial Sequence; identical to SEQ ID NO: 2080
  Description of Artificial Sequence: Synthetic cashew; inner sequence and 3' sequence

SEQ ID NO: 14071 - DNA, 53 bp, Artificial Sequence; identical to SEQ ID NO: 2183
  Description of Artificial Sequence: Synthetic cashew; inner sequence and 3' sequence

SEQ ID NO: 14072 - DNA, 53 bp, Artificial Sequence; identical to SEQ ID NO: 2026
  Description of Artificial Sequence: Synthetic cashew; inner sequence and 3' sequence

SEQ ID NO: 14073 - DNA, 53 bp, Artificial Sequence; identical to SEQ ID NO: 2120
  Description of Artificial Sequence: Synthetic cashew; inner sequence and 3' sequence

SEQ ID NO: 14074 - DNA, 53 bp, Artificial Sequence; identical to SEQ ID NO: 2093
  Description of Artificial Sequence: Synthetic cashew; inner sequence and 3' sequence

SEQ ID NO: 14075 - DNA, 53 bp, Artificial Sequence; identical to SEQ ID NO: 2036
  Description of Artificial Sequence: Synthetic cashew; inner sequence and 3' sequence

SEQ ID NO: 14076 - DNA, 53 bp, Artificial Sequence; identical to SEQ ID NO: 2057
  Description of Artificial Sequence: Synthetic cashew; inner sequence and 3' sequence

SEQ ID NO: 14077 - DNA, 53 bp, Artificial Sequence; identical to SEQ ID NO: 2065
  Description of Artificial Sequence: Synthetic cashew; inner sequence and 3' sequence

SEQ ID NO: 14078 - DNA, 53 bp, Artificial Sequence; identical to SEQ ID NO: 2059
  Description of Artificial Sequence: Synthetic cashew; inner sequence and 3' sequence

SEQ ID NO: 14079 - DNA, 53 bp, Artificial Sequence; identical to SEQ ID NO: 2126
  Description of Artificial Sequence: Synthetic cashew; inner sequence and 3' sequence

SEQ ID NO: 14080 - DNA, 53 bp, Artificial Sequence; identical to SEQ ID NO: 2025
  Description of Artificial Sequence: Synthetic cashew; inner sequence and 3' sequence

SEQ ID NO: 14081 - DNA, 53 bp, Artificial Sequence; identical to SEQ ID NO: 2047
  Description of Artificial Sequence: Synthetic cashew; inner sequence and 3' sequence

SEQ ID NO: 14082 - DNA, 53 bp, Artificial Sequence; identical to SEQ ID NO: 2097
  Description of Artificial Sequence: Synthetic cashew; inner sequence and 3' sequence

SEQ ID NO: 14083 - DNA, 53 bp, Artificial Sequence; identical to SEQ ID NO: 2211
  Description of Artificial Sequence: Synthetic cashew; inner sequence and 3' sequence

SEQ ID NO: 14084 - DNA, 53 bp, Artificial Sequence; identical to SEQ ID NO: 2136
  Description of Artificial Sequence: Synthetic cashew; inner sequence and 3' sequence

SEQ ID NO: 14085 - DNA, 53 bp, Artificial Sequence; identical to SEQ ID NO: 2092
  Description of Artificial Sequence: Synthetic cashew; inner sequence and 3' sequence

SEQ ID NO: 14086 - DNA, 53 bp, Artificial Sequence; identical to SEQ ID NO: 2311
  Description of Artificial Sequence: Synthetic cashew; inner sequence and 3' sequence

SEQ ID NO: 14087 - DNA, 53 bp, Artificial Sequence; identical to SEQ ID NO: 2122
  Description of Artificial Sequence: Synthetic cashew; inner sequence and 3' sequence

SEQ ID NO: 14088 - DNA, 53 bp, Artificial Sequence; identical to SEQ ID NO: 2144
  Description of Artificial Sequence: Synthetic cashew; inner sequence and 3' sequence

SEQ ID NO: 14089 - DNA, 53 bp, Artificial Sequence; identical to SEQ ID NO: 2257
  Description of Artificial Sequence: Synthetic cashew; inner sequence and 3' sequence

SEQ ID NO: 14090 - DNA, 53 bp, Artificial Sequence; identical to SEQ ID NO: 2154
  Description of Artificial Sequence: Synthetic cashew; inner sequence and 3' sequence

SEQ ID NO: 14091 - DNA, 53 bp, Artificial Sequence; identical to SEQ ID NO: 2185
  Description of Artificial Sequence: Synthetic cashew; inner sequence and 3' sequence

SEQ ID NO: 14092 - DNA, 53 bp, Artificial Sequence; identical to SEQ ID NO: 2027
  Description of Artificial Sequence: Synthetic cashew; inner sequence and 3' sequence

SEQ ID NO: 14093 - DNA, 53 bp, Artificial Sequence; identical to SEQ ID NO: 2207
  Description of Artificial Sequence: Synthetic cashew; inner sequence and 3' sequence

SEQ ID NO: 14094 - DNA, 53 bp, Artificial Sequence; identical to SEQ ID NO: 2142
  Description of Artificial Sequence: Synthetic cashew; inner sequence and 3' sequence

SEQ ID NO: 14095 - DNA, 53 bp, Artificial Sequence; identical to SEQ ID NO: 2287
  Description of Artificial Sequence: Synthetic cashew; inner sequence and 3' sequence

SEQ ID NO: 14096 - DNA, 53 bp, Artificial Sequence; identical to SEQ ID NO: 2067
  Description of Artificial Sequence: Synthetic cashew; inner sequence and 3' sequence

SEQ ID NO: 14097 - DNA, 53 bp, Artificial Sequence; identical to SEQ ID NO: 2100
  Description of Artificial Sequence: Synthetic cashew; inner sequence and 3' sequence

SEQ ID NO: 14098 - DNA, 53 bp, Artificial Sequence; identical to SEQ ID NO: 2096
  Description of Artificial Sequence: Synthetic cashew; inner sequence and 3' sequence

SEQ ID NO: 14099 - DNA, 53 bp, Artificial Sequence; identical to SEQ ID NO: 2094
  Description of Artificial Sequence: Synthetic cashew; inner sequence and 3' sequence

SEQ ID NO: 14100 - DNA, 53 bp, Artificial Sequence; identical to SEQ ID NO: 2078
  Description of Artificial Sequence: Synthetic cashew; inner sequence and 3' sequence

SEQ ID NO: 14101 - DNA, 53 bp, Artificial Sequence; identical to SEQ ID NO: 2099
  Description of Artificial Sequence: Synthetic cashew; inner sequence and 3' sequence

SEQ ID NO: 14102 - DNA, 53 bp, Artificial Sequence; identical to SEQ ID NO: 2151
  Description of Artificial Sequence: Synthetic cashew; inner sequence and 3' sequence

SEQ ID NO: 14103 - DNA, 53 bp, Artificial Sequence; identical to SEQ ID NO: 2091
  Description of Artificial Sequence: Synthetic cashew; inner sequence and 3' sequence

SEQ ID NO: 14104 - DNA, 53 bp, Artificial Sequence; identical to SEQ ID NO: 2083
  Description of Artificial Sequence: Synthetic cashew; inner sequence and 3' sequence

SEQ ID NO: 14105 - DNA, 53 bp, Artificial Sequence; identical to SEQ ID NO: 2068
  Description of Artificial Sequence: Synthetic cashew; inner sequence and 3' sequence

SEQ ID NO: 14106 - DNA, 53 bp, Artificial Sequence; identical to SEQ ID NO: 2430
  Description of Artificial Sequence: Synthetic cashew; inner sequence and 3' sequence

SEQ ID NO: 14107 - DNA, 53 bp, Artificial Sequence; identical to SEQ ID NO: 2196
  Description of Artificial Sequence: Synthetic cashew; inner sequence and 3' sequence

SEQ ID NO: 14108 - DNA, 53 bp, Artificial Sequence; identical to SEQ ID NO: 2056
  Description of Artificial Sequence: Synthetic cashew; inner sequence and 3' sequence

SEQ ID NO: 14109 - DNA, 53 bp, Artificial Sequence; identical to SEQ ID NO: 2567
  Description of Artificial Sequence: Synthetic cashew; inner sequence and 3' sequence

SEQ ID NO: 14110 - DNA, 53 bp, Artificial Sequence; identical to SEQ ID NO: 2208
  Description of Artificial Sequence: Synthetic cashew; inner sequence and 3' sequence

SEQ ID NO: 14111 - DNA, 53 bp, Artificial Sequence; identical to SEQ ID NO: 2468
  Description of Artificial Sequence: Synthetic cashew; inner sequence and 3' sequence

SEQ ID NO: 14112 - DNA, 53 bp, Artificial Sequence; identical to SEQ ID NO: 2264
  Description of Artificial Sequence: Synthetic cashew; inner sequence and 3' sequence

SEQ ID NO: 14113 - DNA, 53 bp, Artificial Sequence; identical to SEQ ID NO: 2127
  Description of Artificial Sequence: Synthetic cashew; inner sequence and 3' sequence

SEQ ID NO: 14114 - DNA, 53 bp, Artificial Sequence; identical to SEQ ID NO: 2118
  Description of Artificial Sequence: Synthetic cashew; inner sequence and 3' sequence

SEQ ID NO: 14115 - DNA, 53 bp, Artificial Sequence; identical to SEQ ID NO: 2692
  Description of Artificial Sequence: Synthetic cashew; inner sequence and 3' sequence

SEQ ID NO: 14116 - DNA, 53 bp, Artificial Sequence; identical to SEQ ID NO: 2147
  Description of Artificial Sequence: Synthetic cashew; inner sequence and 3' sequence

SEQ ID NO: 14117 - DNA, 53 bp, Artificial Sequence; identical to SEQ ID NO: 2079
  Description of Artificial Sequence: Synthetic cashew; inner sequence and 3' sequence

SEQ ID NO: 14118 - DNA, 53 bp, Artificial Sequence; identical to SEQ ID NO: 2233
  Description of Artificial Sequence: Synthetic cashew; inner sequence and 3' sequence

SEQ ID NO: 14119 - DNA, 53 bp, Artificial Sequence; identical to SEQ ID NO: 2095
  Description of Artificial Sequence: Synthetic cashew; inner sequence and 3' sequence

SEQ ID NO: 14120 - DNA, 53 bp, Artificial Sequence; identical to SEQ ID NO: 2288
  Description of Artificial Sequence: Synthetic cashew; inner sequence and 3' sequence

SEQ ID NO: 14121 - DNA, 53 bp, Artificial Sequence; identical to SEQ ID NO: 2237
  Description of Artificial Sequence: Synthetic cashew; inner sequence and 3' sequence

SEQ ID NO: 14122 - DNA, 53 bp, Artificial Sequence; identical to SEQ ID NO: 2179
  Description of Artificial Sequence: Synthetic cashew; inner sequence and 3' sequence

SEQ ID NO: 14123 - DNA, 53 bp, Artificial Sequence; identical to SEQ ID NO: 2146
  Description of Artificial Sequence: Synthetic cashew; inner sequence and 3' sequence

SEQ ID NO: 14124 - DNA, 53 bp, Artificial Sequence; identical to SEQ ID NO: 2230
  Description of Artificial Sequence: Synthetic cashew; inner sequence and 3' sequence

SEQ ID NO: 14125 - DNA, 53 bp, Artificial Sequence; identical to SEQ ID NO: 2203
  Description of Artificial Sequence: Synthetic cashew; inner sequence and 3' sequence

SEQ ID NO: 14126 - DNA, 53 bp, Artificial Sequence; identical to SEQ ID NO: 2247
  Description of Artificial Sequence: Synthetic cashew; inner sequence and 3' sequence

SEQ ID NO: 14127 - DNA, 53 bp, Artificial Sequence; identical to SEQ ID NO: 2194
  Description of Artificial Sequence: Synthetic cashew; inner sequence and 3' sequence

SEQ ID NO: 14128 - DNA, 53 bp, Artificial Sequence; identical to SEQ ID NO: 2164
  Description of Artificial Sequence: Synthetic cashew; inner sequence and 3' sequence

SEQ ID NO: 14129 - DNA, 53 bp, Artificial Sequence; identical to SEQ ID NO: 2270
  Description of Artificial Sequence: Synthetic cashew; inner sequence and 3' sequence

SEQ ID NO: 14130 - DNA, 53 bp, Artificial Sequence; identical to SEQ ID NO: 2103
  Description of Artificial Sequence: Synthetic cashew; inner sequence and 3' sequence

SEQ ID NO: 14131 - DNA, 53 bp, Artificial Sequence; identical to SEQ ID NO: 2470
  Description of Artificial Sequence: Synthetic cashew; inner sequence and 3' sequence

SEQ ID NO: 14132 - DNA, 53 bp, Artificial Sequence; identical to SEQ ID NO: 2360
  Description of Artificial Sequence: Synthetic cashew; inner sequence and 3' sequence

SEQ ID NO: 14133 - DNA, 53 bp, Artificial Sequence; identical to SEQ ID NO: 2245
  Description of Artificial Sequence: Synthetic cashew; inner sequence and 3' sequence

SEQ ID NO: 14134 - DNA, 53 bp, Artificial Sequence; identical to SEQ ID NO: 2161
  Description of Artificial Sequence: Synthetic cashew; inner sequence and 3' sequence

SEQ ID NO: 14135 - DNA, 53 bp, Artificial Sequence; identical to SEQ ID NO: 2285
  Description of Artificial Sequence: Synthetic cashew; inner sequence and 3' sequence

SEQ ID NO: 14136 - DNA, 53 bp, Artificial Sequence; identical to SEQ ID NO: 2171
  Description of Artificial Sequence: Synthetic cashew; inner sequence and 3' sequence

SEQ ID NO: 14137 - DNA, 53 bp, Artificial Sequence; identical to SEQ ID NO: 2168
  Description of Artificial Sequence: Synthetic cashew; inner sequence and 3' sequence

SEQ ID NO: 14138 - DNA, 53 bp, Artificial Sequence; identical to SEQ ID NO: 2312
  Description of Artificial Sequence: Synthetic cashew; inner sequence and 3' sequence

SEQ ID NO: 14139 - DNA, 53 bp, Artificial Sequence; identical to SEQ ID NO: 2111
  Description of Artificial Sequence: Synthetic cashew; inner sequence and 3' sequence

SEQ ID NO: 14140 - DNA, 53 bp, Artificial Sequence; identical to SEQ ID NO: 2145
  Description of Artificial Sequence: Synthetic cashew; inner sequence and 3' sequence

SEQ ID NO: 14141 - DNA, 54 bp, Artificial Sequence; identical to SEQ ID NO: 2150
  Description of Artificial Sequence: Synthetic cashew; inner sequence and 3' sequence

SEQ ID NO: 14142 - DNA, 51 bp, Artificial Sequence; identical to SEQ ID NO: 2148
  Description of Artificial Sequence: Synthetic cashew; inner sequence and 3' sequence

SEQ ID NO: 14143 - DNA, 53 bp, Artificial Sequence; identical to SEQ ID NO: 2240
  Description of Artificial Sequence: Synthetic cashew; inner sequence and 3' sequence

SEQ ID NO: 14144 - DNA, 53 bp, Artificial Sequence; identical to SEQ ID NO: 2107
  Description of Artificial Sequence: Synthetic cashew; inner sequence and 3' sequence

SEQ ID NO: 14145 - DNA, 53 bp, Artificial Sequence; identical to SEQ ID NO: 2125
  Description of Artificial Sequence: Synthetic cashew; inner sequence and 3' sequence

SEQ ID NO: 14146 - DNA, 53 bp, Artificial Sequence; identical to SEQ ID NO: 2215
  Description of Artificial Sequence: Synthetic cashew; inner sequence and 3' sequence

SEQ ID NO: 14147 - DNA, 53 bp, Artificial Sequence; identical to SEQ ID NO: 2115
  Description of Artificial Sequence: Synthetic cashew; inner sequence and 3' sequence

SEQ ID NO: 14148 - DNA, 53 bp, Artificial Sequence; identical to SEQ ID NO: 2253
  Description of Artificial Sequence: Synthetic cashew; inner sequence and 3' sequence

SEQ ID NO: 14149 - DNA, 53 bp, Artificial Sequence; identical to SEQ ID NO: 2113
  Description of Artificial Sequence: Synthetic cashew; inner sequence and 3' sequence

SEQ ID NO: 14150 - DNA, 53 bp, Artificial Sequence; identical to SEQ ID NO: 2163
  Description of Artificial Sequence: Synthetic cashew; inner sequence and 3' sequence

SEQ ID NO: 14151 - DNA, 53 bp, Artificial Sequence; identical to SEQ ID NO: 2155
  Description of Artificial Sequence: Synthetic cashew; inner sequence and 3' sequence

SEQ ID NO: 14152 - DNA, 53 bp, Artificial Sequence; identical to SEQ ID NO: 2188
  Description of Artificial Sequence: Synthetic cashew; inner sequence and 3' sequence

SEQ ID NO: 14153 - DNA, 53 bp, Artificial Sequence; identical to SEQ ID NO: 2108
  Description of Artificial Sequence: Synthetic cashew; inner sequence and 3' sequence

SEQ ID NO: 14154 - DNA, 53 bp, Artificial Sequence; identical to SEQ ID NO: 2282
  Description of Artificial Sequence: Synthetic cashew; inner sequence and 3' sequence

SEQ ID NO: 14155 - DNA, 53 bp, Artificial Sequence; identical to SEQ ID NO: 2354
  Description of Artificial Sequence: Synthetic cashew; inner sequence and 3' sequence

SEQ ID NO: 14156 - DNA, 53 bp, Artificial Sequence; identical to SEQ ID NO: 2071
  Description of Artificial Sequence: Synthetic cashew; inner sequence and 3' sequence

SEQ ID NO: 14157 - DNA, 53 bp, Artificial Sequence; identical to SEQ ID NO: 2293
  Description of Artificial Sequence: Synthetic cashew; inner sequence and 3' sequence

SEQ ID NO: 14158 - DNA, 53 bp, Artificial Sequence; identical to SEQ ID NO: 2355
  Description of Artificial Sequence: Synthetic cashew; inner sequence and 3' sequence

SEQ ID NO: 14159 - DNA, 53 bp, Artificial Sequence; identical to SEQ ID NO: 2166
  Description of Artificial Sequence: Synthetic cashew; inner sequence and 3' sequence

SEQ ID NO: 14160 - DNA, 53 bp, Artificial Sequence; identical to SEQ ID NO: 2073
  Description of Artificial Sequence: Synthetic cashew; inner sequence and 3' sequence

SEQ ID NO: 14161 - DNA, 53 bp, Artificial Sequence; identical to SEQ ID NO: 2200
  Description of Artificial Sequence: Synthetic cashew; inner sequence and 3' sequence

SEQ ID NO: 14162 - DNA, 53 bp, Artificial Sequence; identical to SEQ ID NO: 2106
  Description of Artificial Sequence: Synthetic cashew; inner sequence and 3' sequence

SEQ ID NO: 14163 - DNA, 53 bp, Artificial Sequence; identical to SEQ ID NO: 2186
  Description of Artificial Sequence: Synthetic cashew; inner sequence and 3' sequence

SEQ ID NO: 14164 - DNA, 53 bp, Artificial Sequence; identical to SEQ ID NO: 2187
  Description of Artificial Sequence: Synthetic cashew; inner sequence and 3' sequence

SEQ ID NO: 14165 - DNA, 53 bp, Artificial Sequence; identical to SEQ ID NO: 2062
  Description of Artificial Sequence: Synthetic cashew; inner sequence and 3' sequence

SEQ ID NO: 14166 - DNA, 53 bp, Artificial Sequence; identical to SEQ ID NO: 2075
  Description of Artificial Sequence: Synthetic cashew; inner sequence and 3' sequence

SEQ ID NO: 14167 - DNA, 53 bp, Artificial Sequence; identical to SEQ ID NO: 2157
  Description of Artificial Sequence: Synthetic cashew; inner sequence and 3' sequence

SEQ ID NO: 14168 - DNA, 53 bp, Artificial Sequence; identical to SEQ ID NO: 2232
  Description of Artificial Sequence: Synthetic cashew; inner sequence and 3' sequence

SEQ ID NO: 14169 - DNA, 53 bp, Artificial Sequence; identical to SEQ ID NO: 2109
  Description of Artificial Sequence: Synthetic cashew; inner sequence and 3' sequence

SEQ ID NO: 14170 - DNA, 53 bp, Artificial Sequence; identical to SEQ ID NO: 2229
  Description of Artificial Sequence: Synthetic cashew; inner sequence and 3' sequence

SEQ ID NO: 14171 - DNA, 53 bp, Artificial Sequence; identical to SEQ ID NO: 2552
  Description of Artificial Sequence: Synthetic cashew; inner sequence and 3' sequence

SEQ ID NO: 14172 - DNA, 53 bp, Artificial Sequence; identical to SEQ ID NO: 2174
  Description of Artificial Sequence: Synthetic cashew; inner sequence and 3' sequence

SEQ ID NO: 14173 - DNA, 53 bp, Artificial Sequence; identical to SEQ ID NO: 2105
  Description of Artificial Sequence: Synthetic cashew; inner sequence and 3' sequence

SEQ ID NO: 14174 - DNA, 53 bp, Artificial Sequence; identical to SEQ ID NO: 2175
  Description of Artificial Sequence: Synthetic cashew; inner sequence and 3' sequence

SEQ ID NO: 14175 - DNA, 53 bp, Artificial Sequence; identical to SEQ ID NO: 2438
  Description of Artificial Sequence: Synthetic cashew; inner sequence and 3' sequence

SEQ ID NO: 14176 - DNA, 53 bp, Artificial Sequence; identical to SEQ ID NO: 2205
  Description of Artificial Sequence: Synthetic cashew; inner sequence and 3' sequence

SEQ ID NO: 14177 - DNA, 53 bp, Artificial Sequence; identical to SEQ ID NO: 2308
  Description of Artificial Sequence: Synthetic cashew; inner sequence and 3' sequence

SEQ ID NO: 14178 - DNA, 53 bp, Artificial Sequence; identical to SEQ ID NO: 2377
  Description of Artificial Sequence: Synthetic cashew; inner sequence and 3' sequence

SEQ ID NO: 14179 - DNA, 53 bp, Artificial Sequence; identical to SEQ ID NO: 2362
  Description of Artificial Sequence: Synthetic cashew; inner sequence and 3' sequence

SEQ ID NO: 14180 - DNA, 53 bp, Artificial Sequence; identical to SEQ ID NO: 2086
  Description of Artificial Sequence: Synthetic cashew; inner sequence and 3' sequence

SEQ ID NO: 14181 - DNA, 53 bp, Artificial Sequence; identical to SEQ ID NO: 2165
  Description of Artificial Sequence: Synthetic cashew; inner sequence and 3' sequence

SEQ ID NO: 14182 - DNA, 53 bp, Artificial Sequence; identical to SEQ ID NO: 2138
  Description of Artificial Sequence: Synthetic cashew; inner sequence and 3' sequence

SEQ ID NO: 14183 - DNA, 53 bp, Artificial Sequence; identical to SEQ ID NO: 2222
  Description of Artificial Sequence: Synthetic cashew; inner sequence and 3' sequence

SEQ ID NO: 14184 - DNA, 53 bp, Artificial Sequence; identical to SEQ ID NO: 2184
  Description of Artificial Sequence: Synthetic cashew; inner sequence and 3' sequence

SEQ ID NO: 14185 - DNA, 53 bp, Artificial Sequence; identical to SEQ ID NO: 2084
  Description of Artificial Sequence: Synthetic cashew; inner sequence and 3' sequence

SEQ ID NO: 14186 - DNA, 54 bp, Artificial Sequence; identical to SEQ ID NO: 2258
  Description of Artificial Sequence: Synthetic cashew; inner sequence and 3' sequence

SEQ ID NO: 14187 - DNA, 54 bp, Artificial Sequence; identical to SEQ ID NO: 2221
  Description of Artificial Sequence: Synthetic cashew; inner sequence and 3' sequence

SEQ ID NO: 14188 - DNA, 53 bp, Artificial Sequence; identical to SEQ ID NO: 2089
  Description of Artificial Sequence: Synthetic cashew; inner sequence and 3' sequence

SEQ ID NO: 14189 - DNA, 53 bp, Artificial Sequence; identical to SEQ ID NO: 6336
  Description of Artificial Sequence: Synthetic cashew; inner sequence and 3' sequence

SEQ ID NO: 14190 - DNA, 53 bp, Artificial Sequence; identical to SEQ ID NO: 2290
  Description of Artificial Sequence: Synthetic cashew; inner sequence and 3' sequence

SEQ ID NO: 14191 - DNA, 53 bp, Artificial Sequence; identical to SEQ ID NO: 2645
  Description of Artificial Sequence: Synthetic cashew; inner sequence and 3' sequence

SEQ ID NO: 14192 - DNA, 53 bp, Artificial Sequence; identical to SEQ ID NO: 2385
  Description of Artificial Sequence: Synthetic cashew; inner sequence and 3' sequence

SEQ ID NO: 14193 - DNA, 53 bp, Artificial Sequence; identical to SEQ ID NO: 2090
  Description of Artificial Sequence: Synthetic cashew; inner sequence and 3' sequence

SEQ ID NO: 14194 - DNA, 53 bp, Artificial Sequence; identical to SEQ ID NO: 6205
  Description of Artificial Sequence: Synthetic cashew; inner sequence and 3' sequence

SEQ ID NO: 14195 - DNA, 53 bp, Artificial Sequence; identical to SEQ ID NO: 2134
  Description of Artificial Sequence: Synthetic cashew; inner sequence and 3' sequence

SEQ ID NO: 14196 - DNA, 53 bp, Artificial Sequence; identical to SEQ ID NO: 2448
  Description of Artificial Sequence: Synthetic cashew; inner sequence and 3' sequence

SEQ ID NO: 14197 - DNA, 53 bp, Artificial Sequence; identical to SEQ ID NO: 2376
  Description of Artificial Sequence: Synthetic cashew; inner sequence and 3' sequence

SEQ ID NO: 14198 - DNA, 53 bp, Artificial Sequence; identical to SEQ ID NO: 2159
  Description of Artificial Sequence: Synthetic cashew; inner sequence and 3' sequence

SEQ ID NO: 14199 - DNA, 53 bp, Artificial Sequence; identical to SEQ ID NO: 2191
  Description of Artificial Sequence: Synthetic cashew; inner sequence and 3' sequence

SEQ ID NO: 14200 - DNA, 53 bp, Artificial Sequence; identical to SEQ ID NO: 2198
  Description of Artificial Sequence: Synthetic cashew; inner sequence and 3' sequence

SEQ ID NO: 14201 - DNA, 53 bp, Artificial Sequence; identical to SEQ ID NO: 2139
  Description of Artificial Sequence: Synthetic cashew; inner sequence and 3' sequence

SEQ ID NO: 14202 - DNA, 53 bp, Artificial Sequence; identical to SEQ ID NO: 2262
  Description of Artificial Sequence: Synthetic cashew; inner sequence and 3' sequence

SEQ ID NO: 14203 - DNA, 53 bp, Artificial Sequence; identical to SEQ ID NO: 2329
  Description of Artificial Sequence: Synthetic cashew; inner sequence and 3' sequence

SEQ ID NO: 14204 - DNA, 53 bp, Artificial Sequence; identical to SEQ ID NO: 2541
  Description of Artificial Sequence: Synthetic cashew; inner sequence and 3' sequence

SEQ ID NO: 14205 - DNA, 53 bp, Artificial Sequence; identical to SEQ ID NO: 2110
  Description of Artificial Sequence: Synthetic cashew; inner sequence and 3' sequence

SEQ ID NO: 14206 - DNA, 53 bp, Artificial Sequence; identical to SEQ ID NO: 2121
  Description of Artificial Sequence: Synthetic cashew; inner sequence and 3' sequence

SEQ ID NO: 14207 - DNA, 53 bp, Artificial Sequence; identical to SEQ ID NO: 2201
  Description of Artificial Sequence: Synthetic cashew; inner sequence and 3' sequence

SEQ ID NO: 14208 - DNA, 53 bp, Artificial Sequence; identical to SEQ ID NO: 2283
  Description of Artificial Sequence: Synthetic cashew; inner sequence and 3' sequence

SEQ ID NO: 14209 - DNA, 53 bp, Artificial Sequence; identical to SEQ ID NO: 2085
  Description of Artificial Sequence: Synthetic cashew; inner sequence and 3' sequence

SEQ ID NO: 14210 - DNA, 53 bp, Artificial Sequence; identical to SEQ ID NO: 2269
  Description of Artificial Sequence: Synthetic cashew; inner sequence and 3' sequence

SEQ ID NO: 14211 - DNA, 53 bp, Artificial Sequence; identical to SEQ ID NO: 2373
  Description of Artificial Sequence: Synthetic cashew; inner sequence and 3' sequence

SEQ ID NO: 14212 - DNA, 53 bp, Artificial Sequence; identical to SEQ ID NO: 2406
  Description of Artificial Sequence: Synthetic cashew; inner sequence and 3' sequence

SEQ ID NO: 14213 - DNA, 53 bp, Artificial Sequence; identical to SEQ ID NO: 2630
  Description of Artificial Sequence: Synthetic cashew; inner sequence and 3' sequence

SEQ ID NO: 14214 - DNA, 53 bp, Artificial Sequence; identical to SEQ ID NO: 2371
  Description of Artificial Sequence: Synthetic cashew; inner sequence and 3' sequence

SEQ ID NO: 14215 - DNA, 53 bp, Artificial Sequence; identical to SEQ ID NO: 2069
  Description of Artificial Sequence: Synthetic cashew; inner sequence and 3' sequence

SEQ ID NO: 14216 - DNA, 53 bp, Artificial Sequence; identical to SEQ ID NO: 2299
  Description of Artificial Sequence: Synthetic cashew; inner sequence and 3' sequence

SEQ ID NO: 14217 - DNA, 53 bp, Artificial Sequence; identical to SEQ ID NO: 6229
  Description of Artificial Sequence: Synthetic cashew; inner sequence and 3' sequence

SEQ ID NO: 14218 - DNA, 53 bp, Artificial Sequence; identical to SEQ ID NO: 2673
  Description of Artificial Sequence: Synthetic cashew; inner sequence and 3' sequence

SEQ ID NO: 14219 - DNA, 53 bp, Artificial Sequence; identical to SEQ ID NO: 2369
  Description of Artificial Sequence: Synthetic cashew; inner sequence and 3' sequence

SEQ ID NO: 14220 - DNA, 53 bp, Artificial Sequence; identical to SEQ ID NO: 10401
  Description of Artificial Sequence: Synthetic cashew; inner sequence and 3' sequence

SEQ ID NO: 14221 - DNA, 53 bp, Artificial Sequence; identical to SEQ ID NO: 2522
  Description of Artificial Sequence: Synthetic cashew; inner sequence and 3' sequence

SEQ ID NO: 14222 - DNA, 53 bp, Artificial Sequence; identical to SEQ ID NO: 2140
  Description of Artificial Sequence: Synthetic cashew; inner sequence and 3' sequence

SEQ ID NO: 14223 - DNA, 53 bp, Artificial Sequence; identical to SEQ ID NO: 2156
  Description of Artificial Sequence: Synthetic cashew; inner sequence and 3' sequence

SEQ ID NO: 14224 - DNA, 53 bp, Artificial Sequence; identical to SEQ ID NO: 2153
  Description of Artificial Sequence: Synthetic cashew; inner sequence and 3' sequence

SEQ ID NO: 14225 - DNA, 53 bp, Artificial Sequence; identical to SEQ ID NO: 2189
  Description of Artificial Sequence: Synthetic cashew; inner sequence and 3' sequence

SEQ ID NO: 14226 - DNA, 53 bp, Artificial Sequence; identical to SEQ ID NO: 2389
  Description of Artificial Sequence: Synthetic cashew; inner sequence and 3' sequence

SEQ ID NO: 14227 - DNA, 53 bp, Artificial Sequence; identical to SEQ ID NO: 2102
  Description of Artificial Sequence: Synthetic cashew; inner sequence and 3' sequence

SEQ ID NO: 14228 - DNA, 53 bp, Artificial Sequence; identical to SEQ ID NO: 2123
  Description of Artificial Sequence: Synthetic cashew; inner sequence and 3' sequence

SEQ ID NO: 14229 - DNA, 53 bp, Artificial Sequence; identical to SEQ ID NO: 2532
  Description of Artificial Sequence: Synthetic cashew; inner sequence and 3' sequence

SEQ ID NO: 14230 - DNA, 53 bp, Artificial Sequence; identical to SEQ ID NO: 2234
  Description of Artificial Sequence: Synthetic cashew; inner sequence and 3' sequence

SEQ ID NO: 14231 - DNA, 53 bp, Artificial Sequence; identical to SEQ ID NO: 2266
  Description of Artificial Sequence: Synthetic cashew; inner sequence and 3' sequence

SEQ ID NO: 14232 - DNA, 53 bp, Artificial Sequence; identical to SEQ ID NO: 2347
  Description of Artificial Sequence: Synthetic cashew; inner sequence and 3' sequence

SEQ ID NO: 14233 - DNA, 53 bp, Artificial Sequence; identical to SEQ ID NO: 2454
  Description of Artificial Sequence: Synthetic cashew; inner sequence and 3' sequence

SEQ ID NO: 14234 - DNA, 53 bp, Artificial Sequence; identical to SEQ ID NO: 2553
  Description of Artificial Sequence: Synthetic cashew; inner sequence and 3' sequence

SEQ ID NO: 14235 - DNA, 53 bp, Artificial Sequence; identical to SEQ ID NO: 2243
  Description of Artificial Sequence: Synthetic cashew; inner sequence and 3' sequence

SEQ ID NO: 14236 - DNA, 53 bp, Artificial Sequence; identical to SEQ ID NO: 2132
  Description of Artificial Sequence: Synthetic cashew; inner sequence and 3' sequence

SEQ ID NO: 14237 - DNA, 53 bp, Artificial Sequence; identical to SEQ ID NO: 2401
  Description of Artificial Sequence: Synthetic cashew; inner sequence and 3' sequence

SEQ ID NO: 14238 - DNA, 53 bp, Artificial Sequence; identical to SEQ ID NO: 2152
  Description of Artificial Sequence: Synthetic cashew; inner sequence and 3' sequence

SEQ ID NO: 14239 - DNA, 53 bp, Artificial Sequence; identical to SEQ ID NO: 2321
  Description of Artificial Sequence: Synthetic cashew; inner sequence and 3' sequence

SEQ ID NO: 14240 - DNA, 53 bp, Artificial Sequence; identical to SEQ ID NO: 2413
  Description of Artificial Sequence: Synthetic cashew; inner sequence and 3' sequence

SEQ ID NO: 14241 - DNA, 53 bp, Artificial Sequence; identical to SEQ ID NO: 2182
  Description of Artificial Sequence: Synthetic cashew; inner sequence and 3' sequence

SEQ ID NO: 14242 - DNA, 54 bp, Artificial Sequence; identical to SEQ ID NO: 2250
  Description of Artificial Sequence: Synthetic cashew; inner sequence and 3' sequence

SEQ ID NO: 14243 - DNA, 53 bp, Artificial Sequence; identical to SEQ ID NO: 2585
  Description of Artificial Sequence: Synthetic cashew; inner sequence and 3' sequence

SEQ ID NO: 14244 - DNA, 53 bp, Artificial Sequence; identical to SEQ ID NO: 2325
  Description of Artificial Sequence: Synthetic cashew; inner sequence and 3' sequence

SEQ ID NO: 14245 - DNA, 53 bp, Artificial Sequence; identical to SEQ ID NO: 2343
  Description of Artificial Sequence: Synthetic cashew; inner sequence and 3' sequence

SEQ ID NO: 14246 - DNA, 53 bp, Artificial Sequence; identical to SEQ ID NO: 2341
  Description of Artificial Sequence: Synthetic cashew; inner sequence and 3' sequence

SEQ ID NO: 14247 - DNA, 53 bp, Artificial Sequence; identical to SEQ ID NO: 2654
  Description of Artificial Sequence: Synthetic cashew; inner sequence and 3' sequence

SEQ ID NO: 14248 - DNA, 53 bp, Artificial Sequence; identical to SEQ ID NO: 2158
  Description of Artificial Sequence: Synthetic cashew; inner sequence and 3' sequence

SEQ ID NO: 14249 - DNA, 53 bp, Artificial Sequence; identical to SEQ ID NO: 2429
  Description of Artificial Sequence: Synthetic cashew; inner sequence and 3' sequence

SEQ ID NO: 14250 - DNA, 53 bp, Artificial Sequence; identical to SEQ ID NO: 2353
  Description of Artificial Sequence: Synthetic cashew; inner sequence and 3' sequence

SEQ ID NO: 14251 - DNA, 53 bp, Artificial Sequence; identical to SEQ ID NO: 2195
  Description of Artificial Sequence: Synthetic cashew; inner sequence and 3' sequence

SEQ ID NO: 14252 - DNA, 53 bp, Artificial Sequence; identical to SEQ ID NO: 2298
  Description of Artificial Sequence: Synthetic cashew; inner sequence and 3' sequence

SEQ ID NO: 14253 - DNA, 53 bp, Artificial Sequence; identical to SEQ ID NO: 2336
  Description of Artificial Sequence: Synthetic cashew; inner sequence and 3' sequence

SEQ ID NO: 14254 - DNA, 53 bp, Artificial Sequence; identical to SEQ ID NO: 2178
  Description of Artificial Sequence: Synthetic cashew; inner sequence and 3' sequence

SEQ ID NO: 14255 - DNA, 53 bp, Artificial Sequence; identical to SEQ ID NO: 2180
  Description of Artificial Sequence: Synthetic cashew; inner sequence and 3' sequence

SEQ ID NO: 14256 - DNA, 53 bp, Artificial Sequence; identical to SEQ ID NO: 2634
  Description of Artificial Sequence: Synthetic cashew; inner sequence and 3' sequence

SEQ ID NO: 14257 - DNA, 53 bp, Artificial Sequence; identical to SEQ ID NO: 2436
  Description of Artificial Sequence: Synthetic cashew; inner sequence and 3' sequence

SEQ ID NO: 14258 - DNA, 53 bp, Artificial Sequence; identical to SEQ ID NO: 2116
  Description of Artificial Sequence: Synthetic cashew; inner sequence and 3' sequence

SEQ ID NO: 14259 - DNA, 53 bp, Artificial Sequence; identical to SEQ ID NO: 2365
  Description of Artificial Sequence: Synthetic cashew; inner sequence and 3' sequence

SEQ ID NO: 14260 - DNA, 53 bp, Artificial Sequence; identical to SEQ ID NO: 6449
  Description of Artificial Sequence: Synthetic cashew; inner sequence and 3' sequence

SEQ ID NO: 14261 - DNA, 53 bp, Artificial Sequence; identical to SEQ ID NO: 2284
  Description of Artificial Sequence: Synthetic cashew; inner sequence and 3' sequence

SEQ ID NO: 14262 - DNA, 53 bp, Artificial Sequence; identical to SEQ ID NO: 2319
  Description of Artificial Sequence: Synthetic cashew; inner sequence and 3' sequence

SEQ ID NO: 14263 - DNA, 53 bp, Artificial Sequence; identical to SEQ ID NO: 2202
  Description of Artificial Sequence: Synthetic cashew; inner sequence and 3' sequence

SEQ ID NO: 14264 - DNA, 53 bp, Artificial Sequence; identical to SEQ ID NO: 2135
  Description of Artificial Sequence: Synthetic cashew; inner sequence and 3' sequence

SEQ ID NO: 14265 - DNA, 53 bp, Artificial Sequence; identical to SEQ ID NO: 2579
  Description of Artificial Sequence: Synthetic cashew; inner sequence and 3' sequence

SEQ ID NO: 14266 - DNA, 53 bp, Artificial Sequence; identical to SEQ ID NO: 2527
  Description of Artificial Sequence: Synthetic cashew; inner sequence and 3' sequence

SEQ ID NO: 14267 - DNA, 53 bp, Artificial Sequence; identical to SEQ ID NO: 2301
  Description of Artificial Sequence: Synthetic cashew; inner sequence and 3' sequence

SEQ ID NO: 14268 - DNA, 53 bp, Artificial Sequence; identical to SEQ ID NO: 2791
  Description of Artificial Sequence: Synthetic cashew; inner sequence and 3' sequence

SEQ ID NO: 14269 - DNA, 53 bp, Artificial Sequence; identical to SEQ ID NO: 2524
  Description of Artificial Sequence: Synthetic cashew; inner sequence and 3' sequence

SEQ ID NO: 14270 - DNA, 53 bp, Artificial Sequence; identical to SEQ ID NO: 2197
  Description of Artificial Sequence: Synthetic cashew; inner sequence and 3' sequence

SEQ ID NO: 14271 - DNA, 53 bp, Artificial Sequence; identical to SEQ ID NO: 2190
  Description of Artificial Sequence: Synthetic cashew; inner sequence and 3' sequence

SEQ ID NO: 14272 - DNA, 53 bp, Artificial Sequence; identical to SEQ ID NO: 2172
  Description of Artificial Sequence: Synthetic cashew; inner sequence and 3' sequence

SEQ ID NO: 14273 - DNA, 53 bp, Artificial Sequence; identical to SEQ ID NO: 2228
  Description of Artificial Sequence: Synthetic cashew; inner sequence and 3' sequence

SEQ ID NO: 14274 - DNA, 53 bp, Artificial Sequence; identical to SEQ ID NO: 2383
  Description of Artificial Sequence: Synthetic cashew; inner sequence and 3' sequence

SEQ ID NO: 14275 - DNA, 53 bp, Artificial Sequence; identical to SEQ ID NO: 2540
  Description of Artificial Sequence: Synthetic cashew; inner sequence and 3' sequence

SEQ ID NO: 14276 - DNA, 53 bp, Artificial Sequence; identical to SEQ ID NO: 2072
  Description of Artificial Sequence: Synthetic cashew; inner sequence and 3' sequence

SEQ ID NO: 14277 - DNA, 53 bp, Artificial Sequence; identical to SEQ ID NO: 2511
  Description of Artificial Sequence: Synthetic cashew; inner sequence and 3' sequence

SEQ ID NO: 14278 - DNA, 53 bp, Artificial Sequence; identical to SEQ ID NO: 2572
  Description of Artificial Sequence: Synthetic cashew; inner sequence and 3' sequence

SEQ ID NO: 14279 - DNA, 53 bp, Artificial Sequence; identical to SEQ ID NO: 2119
  Description of Artificial Sequence: Synthetic cashew; inner sequence and 3' sequence

SEQ ID NO: 14280 - DNA, 53 bp, Artificial Sequence; identical to SEQ ID NO: 2204
  Description of Artificial Sequence: Synthetic cashew; inner sequence and 3' sequence

SEQ ID NO: 14281 - DNA, 53 bp, Artificial Sequence; identical to SEQ ID NO: 2439
  Description of Artificial Sequence: Synthetic cashew; inner sequence and 3' sequence

SEQ ID NO: 14282 - DNA, 53 bp, Artificial Sequence; identical to SEQ ID NO: 2254
  Description of Artificial Sequence: Synthetic cashew; inner sequence and 3' sequence

SEQ ID NO: 14283 - DNA, 53 bp, Artificial Sequence; identical to SEQ ID NO: 2305
  Description of Artificial Sequence: Synthetic cashew; inner sequence and 3' sequence

SEQ ID NO: 14284 - DNA, 53 bp, Artificial Sequence; identical to SEQ ID NO: 2496
  Description of Artificial Sequence: Synthetic cashew; inner sequence and 3' sequence

SEQ ID NO: 14285 - DNA, 53 bp, Artificial Sequence; identical to SEQ ID NO: 6234
  Description of Artificial Sequence: Synthetic cashew; inner sequence and 3' sequence

SEQ ID NO: 14286 - DNA, 53 bp, Artificial Sequence; identical to SEQ ID NO: 2320
  Description of Artificial Sequence: Synthetic cashew; inner sequence and 3' sequence

SEQ ID NO: 14287 - DNA, 53 bp, Artificial Sequence; identical to SEQ ID NO: 2098
  Description of Artificial Sequence: Synthetic cashew; inner sequence and 3' sequence

SEQ ID NO: 14288 - DNA, 53 bp, Artificial Sequence; identical to SEQ ID NO: 2671
  Description of Artificial Sequence: Synthetic cashew; inner sequence and 3' sequence

SEQ ID NO: 14289 - DNA, 53 bp, Artificial Sequence; identical to SEQ ID NO: 2352
  Description of Artificial Sequence: Synthetic cashew; inner sequence and 3' sequence

SEQ ID NO: 14290 - DNA, 53 bp, Artificial Sequence; identical to SEQ ID NO: 2314
  Description of Artificial Sequence: Synthetic cashew; inner sequence and 3' sequence

SEQ ID NO: 14291 - DNA, 53 bp, Artificial Sequence; identical to SEQ ID NO: 2529
  Description of Artificial Sequence: Synthetic cashew; inner sequence and 3' sequence

SEQ ID NO: 14292 - DNA, 53 bp, Artificial Sequence; identical to SEQ ID NO: 2323
  Description of Artificial Sequence: Synthetic cashew; inner sequence and 3' sequence

SEQ ID NO: 14293 - DNA, 53 bp, Artificial Sequence; identical to SEQ ID NO: 2916
  Description of Artificial Sequence: Synthetic cashew; inner sequence and 3' sequence

SEQ ID NO: 14294 - DNA, 54 bp, Artificial Sequence; identical to SEQ ID NO: 6245
  Description of Artificial Sequence: Synthetic cashew; inner sequence and 3' sequence

SEQ ID NO: 14295 - DNA, 53 bp, Artificial Sequence; identical to SEQ ID NO: 2303
  Description of Artificial Sequence: Synthetic cashew; inner sequence and 3' sequence

SEQ ID NO: 14296 - DNA, 53 bp, Artificial Sequence; identical to SEQ ID NO: 2528
  Description of Artificial Sequence: Synthetic cashew; inner sequence and 3' sequence

SEQ ID NO: 14297 - DNA, 53 bp, Artificial Sequence; identical to SEQ ID NO: 2213
  Description of Artificial Sequence: Synthetic cashew; inner sequence and 3' sequence

SEQ ID NO: 14298 - DNA, 53 bp, Artificial Sequence; identical to SEQ ID NO: 2206
  Description of Artificial Sequence: Synthetic cashew; inner sequence and 3' sequence

SEQ ID NO: 14299 - DNA, 53 bp, Artificial Sequence; identical to SEQ ID NO: 2611
  Description of Artificial Sequence: Synthetic cashew; inner sequence and 3' sequence

SEQ ID NO: 14300 - DNA, 53 bp, Artificial Sequence; identical to SEQ ID NO: 2173
  Description of Artificial Sequence: Synthetic cashew; inner sequence and 3' sequence

SEQ ID NO: 14301 - DNA, 53 bp, Artificial Sequence; identical to SEQ ID NO: 2238
  Description of Artificial Sequence: Synthetic cashew; inner sequence and 3' sequence

SEQ ID NO: 14302 - DNA, 53 bp, Artificial Sequence; identical to SEQ ID NO: 2783
  Description of Artificial Sequence: Synthetic cashew; inner sequence and 3' sequence

SEQ ID NO: 14303 - DNA, 53 bp, Artificial Sequence; identical to SEQ ID NO: 2741
  Description of Artificial Sequence: Synthetic cashew; inner sequence and 3' sequence

SEQ ID NO: 14304 - DNA, 53 bp, Artificial Sequence; identical to SEQ ID NO: 2344
  Description of Artificial Sequence: Synthetic cashew; inner sequence and 3' sequence

SEQ ID NO: 14305 - DNA, 53 bp, Artificial Sequence; identical to SEQ ID NO: 2268
  Description of Artificial Sequence: Synthetic cashew; inner sequence and 3' sequence

SEQ ID NO: 14306 - DNA, 53 bp, Artificial Sequence; identical to SEQ ID NO: 2087
  Description of Artificial Sequence: Synthetic cashew; inner sequence and 3' sequence

SEQ ID NO: 14307 - DNA, 53 bp, Artificial Sequence; identical to SEQ ID NO: 2192
  Description of Artificial Sequence: Synthetic cashew; inner sequence and 3' sequence

SEQ ID NO: 14308 - DNA, 53 bp, Artificial Sequence; identical to SEQ ID NO: 2310
  Description of Artificial Sequence: Synthetic cashew; inner sequence and 3' sequence

SEQ ID NO: 14309 - DNA, 53 bp, Artificial Sequence; identical to SEQ ID NO: 6254
  Description of Artificial Sequence: Synthetic cashew; inner sequence and 3' sequence

SEQ ID NO: 14310 - DNA, 53 bp, Artificial Sequence; identical to SEQ ID NO: 2884
  Description of Artificial Sequence: Synthetic cashew; inner sequence and 3' sequence

SEQ ID NO: 14311 - DNA, 53 bp, Artificial Sequence; identical to SEQ ID NO: 2348
  Description of Artificial Sequence: Synthetic cashew; inner sequence and 3' sequence

SEQ ID NO: 14312 - DNA, 53 bp, Artificial Sequence; identical to SEQ ID NO: 6691
  Description of Artificial Sequence: Synthetic cashew; inner sequence and 3' sequence

SEQ ID NO: 14313 - DNA, 53 bp, Artificial Sequence; identical to SEQ ID NO: 2309
  Description of Artificial Sequence: Synthetic cashew; inner sequence and 3' sequence

SEQ ID NO: 14314 - DNA, 53 bp, Artificial Sequence; identical to SEQ ID NO: 2570
  Description of Artificial Sequence: Synthetic cashew; inner sequence and 3' sequence

SEQ ID NO: 14315 - DNA, 53 bp, Artificial Sequence; identical to SEQ ID NO: 2177
  Description of Artificial Sequence: Synthetic cashew; inner sequence and 3' sequence

SEQ ID NO: 14316 - DNA, 53 bp, Artificial Sequence; identical to SEQ ID NO: 2556
  Description of Artificial Sequence: Synthetic cashew; inner sequence and 3' sequence

SEQ ID NO: 14317 - DNA, 53 bp, Artificial Sequence; identical to SEQ ID NO: 2246
  Description of Artificial Sequence: Synthetic cashew; inner sequence and 3' sequence

SEQ ID NO: 14318 - DNA, 53 bp, Artificial Sequence; identical to SEQ ID NO: 2367
  Description of Artificial Sequence: Synthetic cashew; inner sequence and 3' sequence

SEQ ID NO: 14319 - DNA, 53 bp, Artificial Sequence; identical to SEQ ID NO: 2130
  Description of Artificial Sequence: Synthetic cashew; inner sequence and 3' sequence

SEQ ID NO: 14320 - DNA, 53 bp, Artificial Sequence; identical to SEQ ID NO: 2349
  Description of Artificial Sequence: Synthetic cashew; inner sequence and 3' sequence

SEQ ID NO: 14321 - DNA, 53 bp, Artificial Sequence; identical to SEQ ID NO: 6376
  Description of Artificial Sequence: Synthetic cashew; inner sequence and 3' sequence

SEQ ID NO: 14322 - DNA, 53 bp, Artificial Sequence; identical to SEQ ID NO: 2696
  Description of Artificial Sequence: Synthetic cashew; inner sequence and 3' sequence

SEQ ID NO: 14323 - DNA, 53 bp, Artificial Sequence; identical to SEQ ID NO: 2271
  Description of Artificial Sequence: Synthetic cashew; inner sequence and 3' sequence

SEQ ID NO: 14324 - DNA, 53 bp, Artificial Sequence; identical to SEQ ID NO: 2394
  Description of Artificial Sequence: Synthetic cashew; inner sequence and 3' sequence

SEQ ID NO: 14325 - DNA, 53 bp, Artificial Sequence; identical to SEQ ID NO: 2104
  Description of Artificial Sequence: Synthetic cashew; inner sequence and 3' sequence

SEQ ID NO: 14326 - DNA, 53 bp, Artificial Sequence; identical to SEQ ID NO: 2149
  Description of Artificial Sequence: Synthetic cashew; inner sequence and 3' sequence

SEQ ID NO: 14327 - DNA, 53 bp, Artificial Sequence; identical to SEQ ID NO: 2487
  Description of Artificial Sequence: Synthetic cashew; inner sequence and 3' sequence

SEQ ID NO: 14328 - DNA, 53 bp, Artificial Sequence; identical to SEQ ID NO: 2359
  Description of Artificial Sequence: Synthetic cashew; inner sequence and 3' sequence

SEQ ID NO: 14329 - DNA, 53 bp, Artificial Sequence; identical to SEQ ID NO: 2370
  Description of Artificial Sequence: Synthetic cashew; inner sequence and 3' sequence

SEQ ID NO: 14330 - DNA, 53 bp, Artificial Sequence; identical to SEQ ID NO: 6364
  Description of Artificial Sequence: Synthetic cashew; inner sequence and 3' sequence

SEQ ID NO: 14331 - DNA, 53 bp, Artificial Sequence; identical to SEQ ID NO: 2836
  Description of Artificial Sequence: Synthetic cashew; inner sequence and 3' sequence

SEQ ID NO: 14332 - DNA, 53 bp, Artificial Sequence; identical to SEQ ID NO: 2676
  Description of Artificial Sequence: Synthetic cashew; inner sequence and 3' sequence

SEQ ID NO: 14333 - DNA, 53 bp, Artificial Sequence; identical to SEQ ID NO: 2414
  Description of Artificial Sequence: Synthetic cashew; inner sequence and 3' sequence

SEQ ID NO: 14334 - DNA, 53 bp, Artificial Sequence; identical to SEQ ID NO: 2764
  Description of Artificial Sequence: Synthetic cashew; inner sequence and 3' sequence

SEQ ID NO: 14335 - DNA, 53 bp, Artificial Sequence; identical to SEQ ID NO: 2340
  Description of Artificial Sequence: Synthetic cashew; inner sequence and 3' sequence

SEQ ID NO: 14336 - DNA, 53 bp, Artificial Sequence; identical to SEQ ID NO: 2286
  Description of Artificial Sequence: Synthetic cashew; inner sequence and 3' sequence

SEQ ID NO: 14337 - DNA, 53 bp, Artificial Sequence; identical to SEQ ID NO: 2409
  Description of Artificial Sequence: Synthetic cashew; inner sequence and 3' sequence

SEQ ID NO: 14338 - DNA, 53 bp, Artificial Sequence; identical to SEQ ID NO: 2217
  Description of Artificial Sequence: Synthetic cashew; inner sequence and 3' sequence

SEQ ID NO: 14339 - DNA, 53 bp, Artificial Sequence; identical to SEQ ID NO: 2485
  Description of Artificial Sequence: Synthetic cashew; inner sequence and 3' sequence

SEQ ID NO: 14340 - DNA, 53 bp, Artificial Sequence; identical to SEQ ID NO: 6420
  Description of Artificial Sequence: Synthetic cashew; inner sequence and 3' sequence

SEQ ID NO: 14341 - DNA, 53 bp, Artificial Sequence; identical to SEQ ID NO: 2640
  Description of Artificial Sequence: Synthetic cashew; inner sequence and 3' sequence

SEQ ID NO: 14342 - DNA, 53 bp, Artificial Sequence; identical to SEQ ID NO: 6348
  Description of Artificial Sequence: Synthetic cashew; inner sequence and 3' sequence

SEQ ID NO: 14343 - DNA, 53 bp, Artificial Sequence; identical to SEQ ID NO: 2530
  Description of Artificial Sequence: Synthetic cashew; inner sequence and 3' sequence

SEQ ID NO: 14344 - DNA, 53 bp, Artificial Sequence; identical to SEQ ID NO: 2390
  Description of Artificial Sequence: Synthetic cashew; inner sequence and 3' sequence

SEQ ID NO: 14345 - DNA, 53 bp, Artificial Sequence; identical to SEQ ID NO: 2214
  Description of Artificial Sequence: Synthetic cashew; inner sequence and 3' sequence

SEQ ID NO: 14346 - DNA, 53 bp, Artificial Sequence; identical to SEQ ID NO: 2255
  Description of Artificial Sequence: Synthetic cashew; inner sequence and 3' sequence

SEQ ID NO: 14347 - DNA, 53 bp, Artificial Sequence; identical to SEQ ID NO: 2170
  Description of Artificial Sequence: Synthetic cashew; inner sequence and 3' sequence

SEQ ID NO: 14348 - DNA, 53 bp, Artificial Sequence; identical to SEQ ID NO: 2387
  Description of Artificial Sequence: Synthetic cashew; inner sequence and 3' sequence

SEQ ID NO: 14349 - DNA, 53 bp, Artificial Sequence; identical to SEQ ID NO: 2128
  Description of Artificial Sequence: Synthetic cashew; inner sequence and 3' sequence

SEQ ID NO: 14350 - DNA, 53 bp, Artificial Sequence; identical to SEQ ID NO: 2400
  Description of Artificial Sequence: Synthetic cashew; inner sequence and 3' sequence

SEQ ID NO: 14351 - DNA, 53 bp, Artificial Sequence; identical to SEQ ID NO: 2346
  Description of Artificial Sequence: Synthetic cashew; inner sequence and 3' sequence

SEQ ID NO: 14352 - DNA, 53 bp, Artificial Sequence; identical to SEQ ID NO: 2775
  Description of Artificial Sequence: Synthetic cashew; inner sequence and 3' sequence

SEQ ID NO: 14353 - DNA, 53 bp, Artificial Sequence; identical to SEQ ID NO: 2361
  Description of Artificial Sequence: Synthetic cashew; inner sequence and 3' sequence

SEQ ID NO: 14354 - DNA, 53 bp, Artificial Sequence; identical to SEQ ID NO: 2568
  Description of Artificial Sequence: Synthetic cashew; inner sequence and 3' sequence

SEQ ID NO: 14355 - DNA, 53 bp, Artificial Sequence; identical to SEQ ID NO: 2613
  Description of Artificial Sequence: Synthetic cashew; inner sequence and 3' sequence

SEQ ID NO: 14356 - DNA, 53 bp, Artificial Sequence; identical to SEQ ID NO: 6651
  Description of Artificial Sequence: Synthetic cashew; inner sequence and 3' sequence

SEQ ID NO: 14357 - DNA, 53 bp, Artificial Sequence; identical to SEQ ID NO: 6814
  Description of Artificial Sequence: Synthetic cashew; inner sequence and 3' sequence

SEQ ID NO: 14358 - DNA, 53 bp, Artificial Sequence; identical to SEQ ID NO: 2218
  Description of Artificial Sequence: Synthetic cashew; inner sequence and 3' sequence

SEQ ID NO: 14359 - DNA, 53 bp, Artificial Sequence; identical to SEQ ID NO: 2366
  Description of Artificial Sequence: Synthetic cashew; inner sequence and 3' sequence

SEQ ID NO: 14360 - DNA, 53 bp, Artificial Sequence; identical to SEQ ID NO: 2419
  Description of Artificial Sequence: Synthetic cashew; inner sequence and 3' sequence

SEQ ID NO: 14361 - DNA, 53 bp, Artificial Sequence; identical to SEQ ID NO: 2137
  Description of Artificial Sequence: Synthetic cashew; inner sequence and 3' sequence

SEQ ID NO: 14362 - DNA, 53 bp, Artificial Sequence; identical to SEQ ID NO: 2273
  Description of Artificial Sequence: Synthetic cashew; inner sequence and 3' sequence

SEQ ID NO: 14363 - DNA, 53 bp, Artificial Sequence; identical to SEQ ID NO: 2392
  Description of Artificial Sequence: Synthetic cashew; inner sequence and 3' sequence

SEQ ID NO: 14364 - DNA, 53 bp, Artificial Sequence; identical to SEQ ID NO: 2294
  Description of Artificial Sequence: Synthetic cashew; inner sequence and 3' sequence

SEQ ID NO: 14365 - DNA, 51 bp, Artificial Sequence; identical to SEQ ID NO: 2241
  Description of Artificial Sequence: Synthetic cashew; inner sequence and 3' sequence

SEQ ID NO: 14366 - DNA, 53 bp, Artificial Sequence; identical to SEQ ID NO: 2901
  Description of Artificial Sequence: Synthetic cashew; inner sequence and 3' sequence

SEQ ID NO: 14367 - DNA, 53 bp, Artificial Sequence; identical to SEQ ID NO: 6419
  Description of Artificial Sequence: Synthetic cashew; inner sequence and 3' sequence

SEQ ID NO: 14368 - DNA, 53 bp, Artificial Sequence; identical to SEQ ID NO: 2695
  Description of Artificial Sequence: Synthetic cashew; inner sequence and 3' sequence

SEQ ID NO: 14369 - DNA, 53 bp, Artificial Sequence; identical to SEQ ID NO: 2968
  Description of Artificial Sequence: Synthetic cashew; inner sequence and 3' sequence

SEQ ID NO: 14370 - DNA, 53 bp, Artificial Sequence; identical to SEQ ID NO: 2457
  Description of Artificial Sequence: Synthetic cashew; inner sequence and 3' sequence

SEQ ID NO: 14371 - DNA, 53 bp, Artificial Sequence; identical to SEQ ID NO: 2506
  Description of Artificial Sequence: Synthetic cashew; inner sequence and 3' sequence

SEQ ID NO: 14372 - DNA, 53 bp, Artificial Sequence; identical to SEQ ID NO: 2478
  Description of Artificial Sequence: Synthetic cashew; inner sequence and 3' sequence

SEQ ID NO: 14373 - DNA, 53 bp, Artificial Sequence; identical to SEQ ID NO: 2224
  Description of Artificial Sequence: Synthetic cashew; inner sequence and 3' sequence

SEQ ID NO: 14374 - DNA, 53 bp, Artificial Sequence; identical to SEQ ID NO: 2563
  Description of Artificial Sequence: Synthetic cashew; inner sequence and 3' sequence

SEQ ID NO: 14375 - DNA, 53 bp, Artificial Sequence; identical to SEQ ID NO: 2160
  Description of Artificial Sequence: Synthetic cashew; inner sequence and 3' sequence

SEQ ID NO: 14376 - DNA, 53 bp, Artificial Sequence; identical to SEQ ID NO: 6406
  Description of Artificial Sequence: Synthetic cashew; inner sequence and 3' sequence

SEQ ID NO: 14377 - DNA, 53 bp, Artificial Sequence; identical to SEQ ID NO: 6394
  Description of Artificial Sequence: Synthetic cashew; inner sequence and 3' sequence

SEQ ID NO: 14378 - DNA, 53 bp, Artificial Sequence; identical to SEQ ID NO: 2519
  Description of Artificial Sequence: Synthetic cashew; inner sequence and 3' sequence

SEQ ID NO: 14379 - DNA, 53 bp, Artificial Sequence; identical to SEQ ID NO: 10891
  Description of Artificial Sequence: Synthetic cashew; inner sequence and 3' sequence

SEQ ID NO: 14380 - DNA, 53 bp, Artificial Sequence; identical to SEQ ID NO: 2379
  Description of Artificial Sequence: Synthetic cashew; inner sequence and 3' sequence

SEQ ID NO: 14381 - DNA, 53 bp, Artificial Sequence; identical to SEQ ID NO: 6301
  Description of Artificial Sequence: Synthetic cashew; inner sequence and 3' sequence

SEQ ID NO: 14382 - DNA, 53 bp, Artificial Sequence; identical to SEQ ID NO: 2523
  Description of Artificial Sequence: Synthetic cashew; inner sequence and 3' sequence

SEQ ID NO: 14383 - DNA, 53 bp, Artificial Sequence; identical to SEQ ID NO: 2364
  Description of Artificial Sequence: Synthetic cashew; inner sequence and 3' sequence

SEQ ID NO: 14384 - DNA, 53 bp, Artificial Sequence; identical to SEQ ID NO: 2350
  Description of Artificial Sequence: Synthetic cashew; inner sequence and 3' sequence

SEQ ID NO: 14385 - DNA, 53 bp, Artificial Sequence; identical to SEQ ID NO: 6592
  Description of Artificial Sequence: Synthetic cashew; inner sequence and 3' sequence

SEQ ID NO: 14386 - DNA, 53 bp, Artificial Sequence; identical to SEQ ID NO: 2517
  Description of Artificial Sequence: Synthetic cashew; inner sequence and 3' sequence

SEQ ID NO: 14387 - DNA, 53 bp, Artificial Sequence; identical to SEQ ID NO: 2176
  Description of Artificial Sequence: Synthetic cashew; inner sequence and 3' sequence

SEQ ID NO: 14388 - DNA, 53 bp, Artificial Sequence; identical to SEQ ID NO: 10618
  Description of Artificial Sequence: Synthetic cashew; inner sequence and 3' sequence

SEQ ID NO: 14389 - DNA, 53 bp, Artificial Sequence; identical to SEQ ID NO: 2484
  Description of Artificial Sequence: Synthetic cashew; inner sequence and 3' sequence

SEQ ID NO: 14390 - DNA, 53 bp, Artificial Sequence; identical to SEQ ID NO: 2433
  Description of Artificial Sequence: Synthetic cashew; inner sequence and 3' sequence

SEQ ID NO: 14391 - DNA, 53 bp, Artificial Sequence; identical to SEQ ID NO: 2450
  Description of Artificial Sequence: Synthetic cashew; inner sequence and 3' sequence

SEQ ID NO: 14392 - DNA, 53 bp, Artificial Sequence; identical to SEQ ID NO: 10546
  Description of Artificial Sequence: Synthetic cashew; inner sequence and 3' sequence

SEQ ID NO: 14393 - DNA, 53 bp, Artificial Sequence; identical to SEQ ID NO: 2272
  Description of Artificial Sequence: Synthetic cashew; inner sequence and 3' sequence

SEQ ID NO: 14394 - DNA, 53 bp, Artificial Sequence; identical to SEQ ID NO: 2124
  Description of Artificial Sequence: Synthetic cashew; inner sequence and 3' sequence

SEQ ID NO: 14395 - DNA, 53 bp, Artificial Sequence; identical to SEQ ID NO: 2167
  Description of Artificial Sequence: Synthetic cashew; inner sequence and 3' sequence

SEQ ID NO: 14396 - DNA, 53 bp, Artificial Sequence; identical to SEQ ID NO: 2391
  Description of Artificial Sequence: Synthetic cashew; inner sequence and 3' sequence

SEQ ID NO: 14397 - DNA, 53 bp, Artificial Sequence; identical to SEQ ID NO: 2928
  Description of Artificial Sequence: Synthetic cashew; inner sequence and 3' sequence

SEQ ID NO: 14398 - DNA, 53 bp, Artificial Sequence; identical to SEQ ID NO: 2313
  Description of Artificial Sequence: Synthetic cashew; inner sequence and 3' sequence

SEQ ID NO: 14399 - DNA, 53 bp, Artificial Sequence; identical to SEQ ID NO: 2279
  Description of Artificial Sequence: Synthetic cashew; inner sequence and 3' sequence

SEQ ID NO: 14400 - DNA, 53 bp, Artificial Sequence; identical to SEQ ID NO: 2296
  Description of Artificial Sequence: Synthetic cashew; inner sequence and 3' sequence

SEQ ID NO: 14401 - DNA, 53 bp, Artificial Sequence; identical to SEQ ID NO: 2869
  Description of Artificial Sequence: Synthetic cashew; inner sequence and 3' sequence

SEQ ID NO: 14402 - DNA, 53 bp, Artificial Sequence; identical to SEQ ID NO: 2953
  Description of Artificial Sequence: Synthetic cashew; inner sequence and 3' sequence

SEQ ID NO: 14403 - DNA, 53 bp, Artificial Sequence; identical to SEQ ID NO: 2220
  Description of Artificial Sequence: Synthetic cashew; inner sequence and 3' sequence

SEQ ID NO: 14404 - DNA, 53 bp, Artificial Sequence; identical to SEQ ID NO: 2727
  Description of Artificial Sequence: Synthetic cashew; inner sequence and 3' sequence

SEQ ID NO: 14405 - DNA, 53 bp, Artificial Sequence; identical to SEQ ID NO: 2520
  Description of Artificial Sequence: Synthetic cashew; inner sequence and 3' sequence

SEQ ID NO: 14406 - DNA, 53 bp, Artificial Sequence; identical to SEQ ID NO: 2441
  Description of Artificial Sequence: Synthetic cashew; inner sequence and 3' sequence

SEQ ID NO: 14407 - DNA, 53 bp, Artificial Sequence; identical to SEQ ID NO: 2925
  Description of Artificial Sequence: Synthetic cashew; inner sequence and 3' sequence

SEQ ID NO: 14408 - DNA, 53 bp, Artificial Sequence; identical to SEQ ID NO: 2426
  Description of Artificial Sequence: Synthetic cashew; inner sequence and 3' sequence

SEQ ID NO: 14409 - DNA, 53 bp, Artificial Sequence; identical to SEQ ID NO: 6535
  Description of Artificial Sequence: Synthetic cashew; inner sequence and 3' sequence

SEQ ID NO: 14410 - DNA, 53 bp, Artificial Sequence; identical to SEQ ID NO: 2994
  Description of Artificial Sequence: Synthetic cashew; inner sequence and 3' sequence

SEQ ID NO: 14411 - DNA, 53 bp, Artificial Sequence; identical to SEQ ID NO: 6380
  Description of Artificial Sequence: Synthetic cashew; inner sequence and 3' sequence

SEQ ID NO: 14412 - DNA, 53 bp, Artificial Sequence; identical to SEQ ID NO: 6907
  Description of Artificial Sequence: Synthetic cashew; inner sequence and 3' sequence

SEQ ID NO: 14413 - DNA, 53 bp, Artificial Sequence; identical to SEQ ID NO: 2209
  Description of Artificial Sequence: Synthetic cashew; inner sequence and 3' sequence

SEQ ID NO: 14414 - DNA, 53 bp, Artificial Sequence; identical to SEQ ID NO: 2625
  Description of Artificial Sequence: Synthetic cashew; inner sequence and 3' sequence

SEQ ID NO: 14415 - DNA, 53 bp, Artificial Sequence; identical to SEQ ID NO: 2248
  Description of Artificial Sequence: Synthetic cashew; inner sequence and 3' sequence

SEQ ID NO: 14416 - DNA, 53 bp, Artificial Sequence; identical to SEQ ID NO: 2481
  Description of Artificial Sequence: Synthetic cashew; inner sequence and 3' sequence

SEQ ID NO: 14417 - DNA, 53 bp, Artificial Sequence; identical to SEQ ID NO: 2850
  Description of Artificial Sequence: Synthetic cashew; inner sequence and 3' sequence

SEQ ID NO: 14418 - DNA, 53 bp, Artificial Sequence; identical to SEQ ID NO: 2793
  Description of Artificial Sequence: Synthetic cashew; inner sequence and 3' sequence

SEQ ID NO: 14419 - DNA, 53 bp, Artificial Sequence; identical to SEQ ID NO: 2358
  Description of Artificial Sequence: Synthetic cashew; inner sequence and 3' sequence

SEQ ID NO: 14420 - DNA, 53 bp, Artificial Sequence; identical to SEQ ID NO: 2244
  Description of Artificial Sequence: Synthetic cashew; inner sequence and 3' sequence

SEQ ID NO: 14421 - DNA, 53 bp, Artificial Sequence; identical to SEQ ID NO: 2274
  Description of Artificial Sequence: Synthetic cashew; inner sequence and 3' sequence

SEQ ID NO: 14422 - DNA, 52 bp, Artificial Sequence; identical to SEQ ID NO: 2334
  Description of Artificial Sequence: Synthetic cashew; inner sequence and 3' sequence

SEQ ID NO: 14423 - DNA, 53 bp, Artificial Sequence; identical to SEQ ID NO: 2628
  Description of Artificial Sequence: Synthetic cashew; inner sequence and 3' sequence

SEQ ID NO: 14424 - DNA, 53 bp, Artificial Sequence; identical to SEQ ID NO: 2504
  Description of Artificial Sequence: Synthetic cashew; inner sequence and 3' sequence

SEQ ID NO: 14425 - DNA, 53 bp, Artificial Sequence; identical to SEQ ID NO: 2300
  Description of Artificial Sequence: Synthetic cashew; inner sequence and 3' sequence

SEQ ID NO: 14426 - DNA, 53 bp, Artificial Sequence; identical to SEQ ID NO: 2615
  Description of Artificial Sequence: Synthetic cashew; inner sequence and 3' sequence

SEQ ID NO: 14427 - DNA, 53 bp, Artificial Sequence; identical to SEQ ID NO: 2714
  Description of Artificial Sequence: Synthetic cashew; inner sequence and 3' sequence

SEQ ID NO: 14428 - DNA, 53 bp, Artificial Sequence
  Description of Artificial Sequence: Synthetic cashew; inner sequence and 3' sequence
cgcgacgagtaggcatgtcttctgtgcgcattgactagtacatgaccacttga

SEQ ID NO: 14429 - DNA, 53 bp, Artificial Sequence; identical to SEQ ID NO: 6525
  Description of Artificial Sequence: Synthetic cashew; inner sequence and 3' sequence

SEQ ID NO: 14430 - DNA, 53 bp, Artificial Sequence; identical to SEQ ID NO: 2278
  Description of Artificial Sequence: Synthetic cashew; inner sequence and 3' sequence

SEQ ID NO: 14431 - DNA, 53 bp, Artificial Sequence; identical to SEQ ID NO: 6401
  Description of Artificial Sequence: Synthetic cashew; inner sequence and 3' sequence

SEQ ID NO: 14432 - DNA, 53 bp, Artificial Sequence; identical to SEQ ID NO: 2239
  Description of Artificial Sequence: Synthetic cashew; inner sequence and 3' sequence

SEQ ID NO: 14433 - DNA, 53 bp, Artificial Sequence; identical to SEQ ID NO: 2410
  Description of Artificial Sequence: Synthetic cashew; inner sequence and 3' sequence

SEQ ID NO: 14434 - DNA, 53 bp, Artificial Sequence; identical to SEQ ID NO: 6260
  Description of Artificial Sequence: Synthetic cashew; inner sequence and 3' sequence

SEQ ID NO: 14435 - DNA, 53 bp, Artificial Sequence; identical to SEQ ID NO: 2846
  Description of Artificial Sequence: Synthetic cashew; inner sequence and 3' sequence

SEQ ID NO: 14436 - DNA, 53 bp, Artificial Sequence; identical to SEQ ID NO: 2276
  Description of Artificial Sequence: Synthetic cashew; inner sequence and 3' sequence

SEQ ID NO: 14437 - DNA, 53 bp, Artificial Sequence; identical to SEQ ID NO: 2281
  Description of Artificial Sequence: Synthetic cashew; inner sequence and 3' sequence

SEQ ID NO: 14438 - DNA, 53 bp, Artificial Sequence; identical to SEQ ID NO: 2631
  Description of Artificial Sequence: Synthetic cashew; inner sequence and 3' sequence

SEQ ID NO: 14439 - DNA, 53 bp, Artificial Sequence; identical to SEQ ID NO: 2950
  Description of Artificial Sequence: Synthetic cashew; inner sequence and 3' sequence

SEQ ID NO: 14440 - DNA, 53 bp, Artificial Sequence; identical to SEQ ID NO: 2395
  Description of Artificial Sequence: Synthetic cashew; inner sequence and 3' sequence

SEQ ID NO: 14441 - DNA, 53 bp, Artificial Sequence; identical to SEQ ID NO: 2891
  Description of Artificial Sequence: Synthetic cashew; inner sequence and 3' sequence

SEQ ID NO: 14442 - DNA, 53 bp, Artificial Sequence; identical to SEQ ID NO: 2280
  Description of Artificial Sequence: Synthetic cashew; inner sequence and 3' sequence

SEQ ID NO: 14443 - DNA, 53 bp, Artificial Sequence; identical to SEQ ID NO: 2374
  Description of Artificial Sequence: Synthetic cashew; inner sequence and 3' sequence

SEQ ID NO: 14444 - DNA, 53 bp, Artificial Sequence; identical to SEQ ID NO: 6280
  Description of Artificial Sequence: Synthetic cashew; inner sequence and 3' sequence

SEQ ID NO: 14445 - DNA, 53 bp, Artificial Sequence; identical to SEQ ID NO: 6792
  Description of Artificial Sequence: Synthetic cashew; inner sequence and 3' sequence

SEQ ID NO: 14446 - DNA, 53 bp, Artificial Sequence; identical to SEQ ID NO: 2657
  Description of Artificial Sequence: Synthetic cashew; inner sequence and 3' sequence

SEQ ID NO: 14447 - DNA, 52 bp, Artificial Sequence; identical to SEQ ID NO: 2259
  Description of Artificial Sequence: Synthetic cashew; inner sequence and 3' sequence

SEQ ID NO: 14448 - DNA, 53 bp, Artificial Sequence; identical to SEQ ID NO: 2807
  Description of Artificial Sequence: Synthetic cashew; inner sequence and 3' sequence

SEQ ID NO: 14449 - DNA, 53 bp, Artificial Sequence; identical to SEQ ID NO: 6238
  Description of Artificial Sequence: Synthetic cashew; inner sequence and 3' sequence

SEQ ID NO: 14450 - DNA, 53 bp, Artificial Sequence; identical to SEQ ID NO: 2801
  Description of Artificial Sequence: Synthetic cashew; inner sequence and 3' sequence

SEQ ID NO: 14451 - DNA, 53 bp, Artificial Sequence; identical to SEQ ID NO: 2212
  Description of Artificial Sequence: Synthetic cashew; inner sequence and 3' sequence

SEQ ID NO: 14452 - DNA, 53 bp, Artificial Sequence; identical to SEQ ID NO: 3002
  Description of Artificial Sequence: Synthetic cashew; inner sequence and 3' sequence

SEQ ID NO: 14453 - DNA, 53 bp, Artificial Sequence; identical to SEQ ID NO: 6585
  Description of Artificial Sequence: Synthetic cashew; inner sequence and 3' sequence

SEQ ID NO: 14454 - DNA, 53 bp, Artificial Sequence; identical to SEQ ID NO: 6351
  Description of Artificial Sequence: Synthetic cashew; inner sequence and 3' sequence

SEQ ID NO: 14455 - DNA, 53 bp, Artificial Sequence; identical to SEQ ID NO: 2811
  Description of Artificial Sequence: Synthetic cashew; inner sequence and 3' sequence

SEQ ID NO: 14456 - DNA, 53 bp, Artificial Sequence; identical to SEQ ID NO: 2403
  Description of Artificial Sequence: Synthetic cashew; inner sequence and 3' sequence

SEQ ID NO: 14457 - DNA, 53 bp, Artificial Sequence; identical to SEQ ID NO: 6613
  Description of Artificial Sequence: Synthetic cashew; inner sequence and 3' sequence

SEQ ID NO: 14458 - DNA, 53 bp, Artificial Sequence; identical to SEQ ID NO: 2617
  Description of Artificial Sequence: Synthetic cashew; inner sequence and 3' sequence

SEQ ID NO: 14459 - DNA, 53 bp, Artificial Sequence; identical to SEQ ID NO: 2620
  Description of Artificial Sequence: Synthetic cashew; inner sequence and 3' sequence

SEQ ID NO: 14460 - DNA, 53 bp, Artificial Sequence; identical to SEQ ID NO: 2260
  Description of Artificial Sequence: Synthetic cashew; inner sequence and 3' sequence

SEQ ID NO: 14461 - DNA, 53 bp, Artificial Sequence; identical to SEQ ID NO: 6755
  Description of Artificial Sequence: Synthetic cashew; inner sequence and 3' sequence

SEQ ID NO: 14462 - DNA, 53 bp, Artificial Sequence; identical to SEQ ID NO: 2632
  Description of Artificial Sequence: Synthetic cashew; inner sequence and 3' sequence

SEQ ID NO: 14463 - DNA, 53 bp, Artificial Sequence; identical to SEQ ID NO: 2771
  Description of Artificial Sequence: Synthetic cashew; inner sequence and 3' sequence

SEQ ID NO: 14464 - DNA, 53 bp, Artificial Sequence; identical to SEQ ID NO: 2603
  Description of Artificial Sequence: Synthetic cashew; inner sequence and 3' sequence

SEQ ID NO: 14465 - DNA, 53 bp, Artificial Sequence; identical to SEQ ID NO: 2515
  Description of Artificial Sequence: Synthetic cashew; inner sequence and 3' sequence

SEQ ID NO: 14466 - DNA, 53 bp, Artificial Sequence; identical to SEQ ID NO: 2912
  Description of Artificial Sequence: Synthetic cashew; inner sequence and 3' sequence

SEQ ID NO: 14467 - DNA, 53 bp, Artificial Sequence; identical to SEQ ID NO: 2249
  Description of Artificial Sequence: Synthetic cashew; inner sequence and 3' sequence

SEQ ID NO: 14468 - DNA, 53 bp, Artificial Sequence; identical to SEQ ID NO: 6870
  Description of Artificial Sequence: Synthetic cashew; inner sequence and 3' sequence

SEQ ID NO: 14469 - DNA, 53 bp, Artificial Sequence; identical to SEQ ID NO: 6384
  Description of Artificial Sequence: Synthetic cashew; inner sequence and 3' sequence

SEQ ID NO: 14470 - DNA, 53 bp, Artificial Sequence; identical to SEQ ID NO: 2915
  Description of Artificial Sequence: Synthetic cashew; inner sequence and 3' sequence

SEQ ID NO: 14471 - DNA, 53 bp, Artificial Sequence; identical to SEQ ID NO: 2534
  Description of Artificial Sequence: Synthetic cashew; inner sequence and 3' sequence

SEQ ID NO: 14472 - DNA, 53 bp, Artificial Sequence; identical to SEQ ID NO: 2437
  Description of Artificial Sequence: Synthetic cashew; inner sequence and 3' sequence

SEQ ID NO: 14473 - DNA, 53 bp, Artificial Sequence; identical to SEQ ID NO: 2900
  Description of Artificial Sequence: Synthetic cashew; inner sequence and 3' sequence

SEQ ID NO: 14474 - DNA, 53 bp, Artificial Sequence; identical to SEQ ID NO: 6692
  Description of Artificial Sequence: Synthetic cashew; inner sequence and 3' sequence

SEQ ID NO: 14475 - DNA, 53 bp, Artificial Sequence; identical to SEQ ID NO: 6775
  Description of Artificial Sequence: Synthetic cashew; inner sequence and 3' sequence

SEQ ID NO: 14476 - DNA, 53 bp, Artificial Sequence; identical to SEQ ID NO: 6543
  Description of Artificial Sequence: Synthetic cashew; inner sequence and 3' sequence

SEQ ID NO: 14477 - DNA, 53 bp, Artificial Sequence; identical to SEQ ID NO: 2210
  Description of Artificial Sequence: Synthetic cashew; inner sequence and 3' sequence

SEQ ID NO: 14478 - DNA, 53 bp, Artificial Sequence; identical to SEQ ID NO: 2800
  Description of Artificial Sequence: Synthetic cashew; inner sequence and 3' sequence

SEQ ID NO: 14479 - DNA, 53 bp, Artificial Sequence; identical to SEQ ID NO: 6230
  Description of Artificial Sequence: Synthetic cashew; inner sequence and 3' sequence

SEQ ID NO: 14480 - DNA, 53 bp, Artificial Sequence; identical to SEQ ID NO: 2256
  Description of Artificial Sequence: Synthetic cashew; inner sequence and 3' sequence

SEQ ID NO: 14481 - DNA, 53 bp, Artificial Sequence; identical to SEQ ID NO: 2345
  Description of Artificial Sequence: Synthetic cashew; inner sequence and 3' sequence

SEQ ID NO: 14482 - DNA, 53 bp, Artificial Sequence; identical to SEQ ID NO: 10564
  Description of Artificial Sequence: Synthetic cashew; inner sequence and 3' sequence

SEQ ID NO: 14483 - DNA, 53 bp, Artificial Sequence; identical to SEQ ID NO: 6312
  Description of Artificial Sequence: Synthetic cashew; inner sequence and 3' sequence

SEQ ID NO: 14484 - DNA, 53 bp, Artificial Sequence; identical to SEQ ID NO: 2991
  Description of Artificial Sequence: Synthetic cashew; inner sequence and 3' sequence

SEQ ID NO: 14485 - DNA, 52 bp, Artificial Sequence; identical to SEQ ID NO: 2251
  Description of Artificial Sequence: Synthetic cashew; inner sequence and 3' sequence

SEQ ID NO: 14486 - DNA, 53 bp, Artificial Sequence; identical to SEQ ID NO: 2545
  Description of Artificial Sequence: Synthetic cashew; inner sequence and 3' sequence

SEQ ID NO: 14487 - DNA, 53 bp, Artificial Sequence; identical to SEQ ID NO: 2701
  Description of Artificial Sequence: Synthetic cashew; inner sequence and 3' sequence

SEQ ID NO: 14488 - DNA, 53 bp, Artificial Sequence; identical to SEQ ID NO: 2461
  Description of Artificial Sequence: Synthetic cashew; inner sequence and 3' sequence

SEQ ID NO: 14489 - DNA, 53 bp, Artificial Sequence; identical to SEQ ID NO: 2867
  Description of Artificial Sequence: Synthetic cashew; inner sequence and 3' sequence

SEQ ID NO: 14490 - DNA, 53 bp, Artificial Sequence; identical to SEQ ID NO: 2622
  Description of Artificial Sequence: Synthetic cashew; inner sequence and 3' sequence

SEQ ID NO: 14491 - DNA, 53 bp, Artificial Sequence; identical to SEQ ID NO: 2333
  Description of Artificial Sequence: Synthetic cashew; inner sequence and 3' sequence

SEQ ID NO: 14492 - DNA, 53 bp, Artificial Sequence; identical to SEQ ID NO: 2386
  Description of Artificial Sequence: Synthetic cashew; inner sequence and 3' sequence

SEQ ID NO: 14493 - DNA, 53 bp, Artificial Sequence; identical to SEQ ID NO: 2984
  Description of Artificial Sequence: Synthetic cashew; inner sequence and 3' sequence

SEQ ID NO: 14494 - DNA, 53 bp, Artificial Sequence; identical to SEQ ID NO: 2777
  Description of Artificial Sequence: Synthetic cashew; inner sequence and 3' sequence

SEQ ID NO: 14495 - DNA, 53 bp, Artificial Sequence; identical to SEQ ID NO: 2275
  Description of Artificial Sequence: Synthetic cashew; inner sequence and 3' sequence

SEQ ID NO: 14496 - DNA, 53 bp, Artificial Sequence; identical to SEQ ID NO: 2226
  Description of Artificial Sequence: Synthetic cashew; inner sequence and 3' sequence

SEQ ID NO: 14497 - DNA, 53 bp, Artificial Sequence; identical to SEQ ID NO: 2647
  Description of Artificial Sequence: Synthetic cashew; inner sequence and 3' sequence

SEQ ID NO: 14498 - DNA, 53 bp, Artificial Sequence; identical to SEQ ID NO: 2635
  Description of Artificial Sequence: Synthetic cashew; inner sequence and 3' sequence

SEQ ID NO: 14499 - DNA, 53 bp, Artificial Sequence; identical to SEQ ID NO: 2375
  Description of Artificial Sequence: Synthetic cashew; inner sequence and 3' sequence

SEQ ID NO: 14500 - DNA, 53 bp, Artificial Sequence; identical to SEQ ID NO: 10670
  Description of Artificial Sequence: Synthetic cashew; inner sequence and 3' sequence

SEQ ID NO: 14501 - DNA, 53 bp, Artificial Sequence; identical to SEQ ID NO: 6499
  Description of Artificial Sequence: Synthetic cashew; inner sequence and 3' sequence

SEQ ID NO: 14502 - DNA, 53 bp, Artificial Sequence; identical to SEQ ID NO: 2475
  Description of Artificial Sequence: Synthetic cashew; inner sequence and 3' sequence

SEQ ID NO: 14503 - DNA, 53 bp, Artificial Sequence; identical to SEQ ID NO: 6605
  Description of Artificial Sequence: Synthetic cashew; inner sequence and 3' sequence

SEQ ID NO: 14504 - DNA, 53 bp, Artificial Sequence; identical to SEQ ID NO: 2633
  Description of Artificial Sequence: Synthetic cashew; inner sequence and 3' sequence

SEQ ID NO: 14505 - DNA, 53 bp, Artificial Sequence; identical to SEQ ID NO: 2789
  Description of Artificial Sequence: Synthetic cashew; inner sequence and 3' sequence

SEQ ID NO: 14506 - DNA, 53 bp, Artificial Sequence; identical to SEQ ID NO: 2780
  Description of Artificial Sequence: Synthetic cashew; inner sequence and 3' sequence

SEQ ID NO: 14507 - DNA, 53 bp, Artificial Sequence; identical to SEQ ID NO: 2396
  Description of Artificial Sequence: Synthetic cashew; inner sequence and 3' sequence

SEQ ID NO: 14508 - DNA, 53 bp, Artificial Sequence; identical to SEQ ID NO: 2728
  Description of Artificial Sequence: Synthetic cashew; inner sequence and 3' sequence

SEQ ID NO: 14509 - DNA, 53 bp, Artificial Sequence; identical to SEQ ID NO: 6393
  Description of Artificial Sequence: Synthetic cashew; inner sequence and 3' sequence

SEQ ID NO: 14510 - DNA, 53 bp, Artificial Sequence; identical to SEQ ID NO: 10458
  Description of Artificial Sequence: Synthetic cashew; inner sequence and 3' sequence

SEQ ID NO: 14511 - DNA, 53 bp, Artificial Sequence; identical to SEQ ID NO: 2181
  Description of Artificial Sequence: Synthetic cashew; inner sequence and 3' sequence

SEQ ID NO: 14512 - DNA, 53 bp, Artificial Sequence; identical to SEQ ID NO: 2114
  Description of Artificial Sequence: Synthetic cashew; inner sequence and 3' sequence

SEQ ID NO: 14513 - DNA, 56 bp, Artificial Sequence; identical to SEQ ID NO: 2864
  Description of Artificial Sequence: Synthetic cashew; inner sequence and 3' sequence

SEQ ID NO: 14514 - DNA, 53 bp, Artificial Sequence; identical to SEQ ID NO: 10763
  Description of Artificial Sequence: Synthetic cashew; inner sequence and 3' sequence

SEQ ID NO: 14515 - DNA, 53 bp, Artificial Sequence; identical to SEQ ID NO: 6492
  Description of Artificial Sequence: Synthetic cashew; inner sequence and 3' sequence

SEQ ID NO: 14516 - DNA, 53 bp, Artificial Sequence; identical to SEQ ID NO: 2356
  Description of Artificial Sequence: Synthetic cashew; inner sequence and 3' sequence

SEQ ID NO: 14517 - DNA, 53 bp, Artificial Sequence; identical to SEQ ID NO: 6999
  Description of Artificial Sequence: Synthetic cashew; inner sequence and 3' sequence

SEQ ID NO: 14518 - DNA, 53 bp, Artificial Sequence; identical to SEQ ID NO: 2951
  Description of Artificial Sequence: Synthetic cashew; inner sequence and 3' sequence

SEQ ID NO: 14519 - DNA, 53 bp, Artificial Sequence; identical to SEQ ID NO: 6428
  Description of Artificial Sequence: Synthetic cashew; inner sequence and 3' sequence

SEQ ID NO: 14520 - DNA, 53 bp, Artificial Sequence; identical to SEQ ID NO: 6653
  Description of Artificial Sequence: Synthetic cashew; inner sequence and 3' sequence

SEQ ID NO: 14521 - DNA, 53 bp, Artificial Sequence
  Description of Artificial Sequence: Synthetic cashew; inner sequence and 3' sequence
ccgcacgtagccctatcaggggtgcatgcattgactagtacatgaccacttga

SEQ ID NO: 14522 - DNA, 53 bp, Artificial Sequence; identical to SEQ ID NO: 10844
  Description of Artificial Sequence: Synthetic cashew; inner sequence and 3' sequence

SEQ ID NO: 14523 - DNA, 53 bp, Artificial Sequence; identical to SEQ ID NO: 2328
  Description of Artificial Sequence: Synthetic cashew; inner sequence and 3' sequence

SEQ ID NO: 14524 - DNA, 53 bp, Artificial Sequence; identical to SEQ ID NO: 6459
  Description of Artificial Sequence: Synthetic cashew; inner sequence and 3' sequence

SEQ ID NO: 14525 - DNA, 53 bp, Artificial Sequence; identical to SEQ ID NO: 6445
  Description of Artificial Sequence: Synthetic cashew; inner sequence and 3' sequence

SEQ ID NO: 14526 - DNA, 53 bp, Artificial Sequence; identical to SEQ ID NO: 2101
  Description of Artificial Sequence: Synthetic cashew; inner sequence and 3' sequence

SEQ ID NO: 14527 - DNA, 53 bp, Artificial Sequence; identical to SEQ ID NO: 2510
  Description of Artificial Sequence: Synthetic cashew; inner sequence and 3' sequence

SEQ ID NO: 14528 - DNA, 53 bp, Artificial Sequence; identical to SEQ ID NO: 2422
  Description of Artificial Sequence: Synthetic cashew; inner sequence and 3' sequence

SEQ ID NO: 14529 - DNA, 53 bp, Artificial Sequence; identical to SEQ ID NO: 2405
  Description of Artificial Sequence: Synthetic cashew; inner sequence and 3' sequence

SEQ ID NO: 14530 - DNA, 53 bp, Artificial Sequence; identical to SEQ ID NO: 2326
  Description of Artificial Sequence: Synthetic cashew; inner sequence and 3' sequence

SEQ ID NO: 14531 - DNA, 53 bp, Artificial Sequence; identical to SEQ ID NO: 6682
  Description of Artificial Sequence: Synthetic cashew; inner sequence and 3' sequence

SEQ ID NO: 14532 - DNA, 53 bp, Artificial Sequence; identical to SEQ ID NO: 2637
  Description of Artificial Sequence: Synthetic cashew; inner sequence and 3' sequence

SEQ ID NO: 14533 - DNA, 53 bp, Artificial Sequence; identical to SEQ ID NO: 2686
  Description of Artificial Sequence: Synthetic cashew; inner sequence and 3' sequence

SEQ ID NO: 14534 - DNA, 53 bp, Artificial Sequence; identical to SEQ ID NO: 2560
  Description of Artificial Sequence: Synthetic cashew; inner sequence and 3' sequence

SEQ ID NO: 14535 - DNA, 53 bp, Artificial Sequence; identical to SEQ ID NO: 2746
  Description of Artificial Sequence: Synthetic cashew; inner sequence and 3' sequence

SEQ ID NO: 14536 - DNA, 53 bp, Artificial Sequence; identical to SEQ ID NO: 2277
  Description of Artificial Sequence: Synthetic cashew; inner sequence and 3' sequence

SEQ ID NO: 14537 - DNA, 53 bp, Artificial Sequence; identical to SEQ ID NO: 2324
  Description of Artificial Sequence: Synthetic cashew; inner sequence and 3' sequence

SEQ ID NO: 14538 - DNA, 54 bp, Artificial Sequence; identical to SEQ ID NO: 2216
  Description of Artificial Sequence: Synthetic cashew; inner sequence and 3' sequence

SEQ ID NO: 14539 - DNA, 53 bp, Artificial Sequence; identical to SEQ ID NO: 6722
  Description of Artificial Sequence: Synthetic cashew; inner sequence and 3' sequence

SEQ ID NO: 14540 - DNA, 53 bp, Artificial Sequence; identical to SEQ ID NO: 6377
  Description of Artificial Sequence: Synthetic cashew; inner sequence and 3' sequence

SEQ ID NO: 14541 - DNA, 53 bp, Artificial Sequence; identical to SEQ ID NO: 2474
  Description of Artificial Sequence: Synthetic cashew; inner sequence and 3' sequence

SEQ ID NO: 14542 - DNA, 53 bp, Artificial Sequence; identical to SEQ ID NO: 2227
  Description of Artificial Sequence: Synthetic cashew; inner sequence and 3' sequence

SEQ ID NO: 14543 - DNA, 53 bp, Artificial Sequence; identical to SEQ ID NO: 10579
  Description of Artificial Sequence: Synthetic cashew; inner sequence and 3' sequence

SEQ ID NO: 14544 - DNA, 53 bp, Artificial Sequence; identical to SEQ ID NO: 2691
  Description of Artificial Sequence: Synthetic cashew; inner sequence and 3' sequence

SEQ ID NO: 14545 - DNA, 53 bp, Artificial Sequence; identical to SEQ ID NO: 6317
  Description of Artificial Sequence: Synthetic cashew; inner sequence and 3' sequence

SEQ ID NO: 14546 - DNA, 53 bp, Artificial Sequence; identical to SEQ ID NO: 2513
  Description of Artificial Sequence: Synthetic cashew; inner sequence and 3' sequence

SEQ ID NO: 14547 - DNA, 53 bp, Artificial Sequence; identical to SEQ ID NO: 2684
  Description of Artificial Sequence: Synthetic cashew; inner sequence and 3' sequence

SEQ ID NO: 14548 - DNA, 53 bp, Artificial Sequence; identical to SEQ ID NO: 6580
  Description of Artificial Sequence: Synthetic cashew; inner sequence and 3' sequence

SEQ ID NO: 14549 - DNA, 53 bp, Artificial Sequence; identical to SEQ ID NO: 2666
  Description of Artificial Sequence: Synthetic cashew; inner sequence and 3' sequence

SEQ ID NO: 14550 - DNA, 53 bp, Artificial Sequence; identical to SEQ ID NO: 6429
  Description of Artificial Sequence: Synthetic cashew; inner sequence and 3' sequence

SEQ ID NO: 14551 - DNA, 53 bp, Artificial Sequence; identical to SEQ ID NO: 2597
  Description of Artificial Sequence: Synthetic cashew; inner sequence and 3' sequence

SEQ ID NO: 14552 - DNA, 53 bp, Artificial Sequence; identical to SEQ ID NO: 2415
  Description of Artificial Sequence: Synthetic cashew; inner sequence and 3' sequence

SEQ ID NO: 14553 - DNA, 53 bp, Artificial Sequence; identical to SEQ ID NO: 2322
  Description of Artificial Sequence: Synthetic cashew; inner sequence and 3' sequence

SEQ ID NO: 14554 - DNA, 53 bp, Artificial Sequence; identical to SEQ ID NO: 6555
  Description of Artificial Sequence: Synthetic cashew; inner sequence and 3' sequence

SEQ ID NO: 14555 - DNA, 53 bp, Artificial Sequence; identical to SEQ ID NO: 2331
  Description of Artificial Sequence: Synthetic cashew; inner sequence and 3' sequence

SEQ ID NO: 14556 - DNA, 53 bp, Artificial Sequence; identical to SEQ ID NO: 2399
  Description of Artificial Sequence: Synthetic cashew; inner sequence and 3' sequence

SEQ ID NO: 14557 - DNA, 53 bp, Artificial Sequence; identical to SEQ ID NO: 2949
  Description of Artificial Sequence: Synthetic cashew; inner sequence and 3' sequence

SEQ ID NO: 14558 - DNA, 53 bp, Artificial Sequence; identical to SEQ ID NO: 2566
  Description of Artificial Sequence: Synthetic cashew; inner sequence and 3' sequence

SEQ ID NO: 14559 - DNA, 53 bp, Artificial Sequence; identical to SEQ ID NO: 2467
  Description of Artificial Sequence: Synthetic cashew; inner sequence and 3' sequence

SEQ ID NO: 14560 - DNA, 53 bp, Artificial Sequence; identical to SEQ ID NO: 2393
  Description of Artificial Sequence: Synthetic cashew; inner sequence and 3' sequence

SEQ ID NO: 14561 - DNA, 53 bp, Artificial Sequence; identical to SEQ ID NO: 2476
  Description of Artificial Sequence: Synthetic cashew; inner sequence and 3' sequence

SEQ ID NO: 14562 - DNA, 53 bp, Artificial Sequence; identical to SEQ ID NO: 2557
  Description of Artificial Sequence: Synthetic cashew; inner sequence and 3' sequence

SEQ ID NO: 14563 - DNA, 53 bp, Artificial Sequence; identical to SEQ ID NO: 2141
  Description of Artificial Sequence: Synthetic cashew; inner sequence and 3' sequence

SEQ ID NO: 14564 - DNA, 53 bp, Artificial Sequence; identical to SEQ ID NO: 2860
  Description of Artificial Sequence: Synthetic cashew; inner sequence and 3' sequence

SEQ ID NO: 14565 - DNA, 53 bp, Artificial Sequence; identical to SEQ ID NO: 6644
  Description of Artificial Sequence: Synthetic cashew; inner sequence and 3' sequence

SEQ ID NO: 14566 - DNA, 50 bp, Artificial Sequence; identical to SEQ ID NO: 2885
  Description of Artificial Sequence: Synthetic cashew; inner sequence and 3' sequence

SEQ ID NO: 14567 - DNA, 53 bp, Artificial Sequence; identical to SEQ ID NO: 6740
  Description of Artificial Sequence: Synthetic cashew; inner sequence and 3' sequence

SEQ ID NO: 14568 - DNA, 53 bp, Artificial Sequence; identical to SEQ ID NO: 2911
  Description of Artificial Sequence: Synthetic cashew; inner sequence and 3' sequence

SEQ ID NO: 14569 - DNA, 53 bp, Artificial Sequence; identical to SEQ ID NO: 2932
  Description of Artificial Sequence: Synthetic cashew; inner sequence and 3' sequence

SEQ ID NO: 14570 - DNA, 53 bp, Artificial Sequence; identical to SEQ ID NO: 6748
  Description of Artificial Sequence: Synthetic cashew; inner sequence and 3' sequence

SEQ ID NO: 14571 - DNA, 53 bp, Artificial Sequence; identical to SEQ ID NO: 2440
  Description of Artificial Sequence: Synthetic cashew; inner sequence and 3' sequence

SEQ ID NO: 14572 - DNA, 53 bp, Artificial Sequence; identical to SEQ ID NO: 2757
  Description of Artificial Sequence: Synthetic cashew; inner sequence and 3' sequence

SEQ ID NO: 14573 - DNA, 53 bp, Artificial Sequence; identical to SEQ ID NO: 6808
  Description of Artificial Sequence: Synthetic cashew; inner sequence and 3' sequence

SEQ ID NO: 14574 - DNA, 53 bp, Artificial Sequence; identical to SEQ ID NO: 2219
  Description of Artificial Sequence: Synthetic cashew; inner sequence and 3' sequence

SEQ ID NO: 14575 - DNA, 53 bp, Artificial Sequence; identical to SEQ ID NO: 6530
  Description of Artificial Sequence: Synthetic cashew; inner sequence and 3' sequence

SEQ ID NO: 14576 - DNA, 53 bp, Artificial Sequence; identical to SEQ ID NO: 2464
  Description of Artificial Sequence: Synthetic cashew; inner sequence and 3' sequence

SEQ ID NO: 14577 - DNA, 54 bp, Artificial Sequence; identical to SEQ ID NO: 6619
  Description of Artificial Sequence: Synthetic cashew; inner sequence and 3' sequence

SEQ ID NO: 14578 - DNA, 53 bp, Artificial Sequence; identical to SEQ ID NO: 10876
  Description of Artificial Sequence: Synthetic cashew; inner sequence and 3' sequence

SEQ ID NO: 14579 - DNA, 53 bp, Artificial Sequence; identical to SEQ ID NO: 2697
  Description of Artificial Sequence: Synthetic cashew; inner sequence and 3' sequence

SEQ ID NO: 14580 - DNA, 53 bp, Artificial Sequence; identical to SEQ ID NO: 6451
  Description of Artificial Sequence: Synthetic cashew; inner sequence and 3' sequence

SEQ ID NO: 14581 - DNA, 53 bp, Artificial Sequence
  Description of Artificial Sequence: Synthetic cashew; inner sequence and 3' sequence
tcatcgcatgacgtctcatcgctgtggacattgactagtacatgaccacttga

SEQ ID NO: 14582 - DNA, 53 bp, Artificial Sequence; identical to SEQ ID NO: 6407
  Description of Artificial Sequence: Synthetic cashew; inner sequence and 3' sequence

SEQ ID NO: 14583 - DNA, 53 bp, Artificial Sequence; identical to SEQ ID NO: 2289
  Description of Artificial Sequence: Synthetic cashew; inner sequence and 3' sequence

SEQ ID NO: 14584 - DNA, 53 bp, Artificial Sequence; identical to SEQ ID NO: 2420
  Description of Artificial Sequence: Synthetic cashew; inner sequence and 3' sequence

SEQ ID NO: 14585 - DNA, 53 bp, Artificial Sequence; identical to SEQ ID NO: 6650
  Description of Artificial Sequence: Synthetic cashew; inner sequence and 3' sequence

SEQ ID NO: 14586 - DNA, 53 bp, Artificial Sequence; identical to SEQ ID NO: 2636
  Description of Artificial Sequence: Synthetic cashew; inner sequence and 3' sequence

SEQ ID NO: 14587 - DNA, 53 bp, Artificial Sequence; identical to SEQ ID NO: 2493
  Description of Artificial Sequence: Synthetic cashew; inner sequence and 3' sequence

SEQ ID NO: 14588 - DNA, 53 bp, Artificial Sequence; identical to SEQ ID NO: 6491
  Description of Artificial Sequence: Synthetic cashew; inner sequence and 3' sequence

SEQ ID NO: 14589 - DNA, 53 bp, Artificial Sequence; identical to SEQ ID NO: 10682
  Description of Artificial Sequence: Synthetic cashew; inner sequence and 3' sequence

SEQ ID NO: 14590 - DNA, 53 bp, Artificial Sequence; identical to SEQ ID NO: 10752
  Description of Artificial Sequence: Synthetic cashew; inner sequence and 3' sequence

SEQ ID NO: 14591 - DNA, 53 bp, Artificial Sequence; identical to SEQ ID NO: 6727
  Description of Artificial Sequence: Synthetic cashew; inner sequence and 3' sequence

SEQ ID NO: 14592 - DNA, 53 bp, Artificial Sequence
  Description of Artificial Sequence: Synthetic cashew; inner sequence and 3' sequence
cgcgacgagtaggcatgtcttctgcgtgcattgactagtacatgaccacttga

SEQ ID NO: 14593 - DNA, 51 bp, Artificial Sequence; identical to SEQ ID NO: 2423
  Description of Artificial Sequence: Synthetic cashew; inner sequence and 3' sequence

SEQ ID NO: 14594 - DNA, 53 bp, Artificial Sequence; identical to SEQ ID NO: 2397
  Description of Artificial Sequence: Synthetic cashew; inner sequence and 3' sequence

SEQ ID NO: 14595 - DNA, 53 bp, Artificial Sequence; identical to SEQ ID NO: 2610
  Description of Artificial Sequence: Synthetic cashew; inner sequence and 3' sequence

SEQ ID NO: 14596 - DNA, 53 bp, Artificial Sequence; identical to SEQ ID NO: 6425
  Description of Artificial Sequence: Synthetic cashew; inner sequence and 3' sequence

SEQ ID NO: 14597 - DNA, 53 bp, Artificial Sequence; identical to SEQ ID NO: 2575
  Description of Artificial Sequence: Synthetic cashew; inner sequence and 3' sequence

SEQ ID NO: 14598 - DNA, 53 bp, Artificial Sequence; identical to SEQ ID NO: 10936
  Description of Artificial Sequence: Synthetic cashew; inner sequence and 3' sequence

SEQ ID NO: 14599 - DNA, 53 bp, Artificial Sequence; identical to SEQ ID NO: 10782
  Description of Artificial Sequence: Synthetic cashew; inner sequence and 3' sequence

SEQ ID NO: 14600 - DNA, 53 bp, Artificial Sequence; identical to SEQ ID NO: 6513
  Description of Artificial Sequence: Synthetic cashew; inner sequence and 3' sequence

SEQ ID NO: 14601 - DNA, 53 bp, Artificial Sequence; identical to SEQ ID NO: 2231
  Description of Artificial Sequence: Synthetic cashew; inner sequence and 3' sequence

SEQ ID NO: 14602 - DNA, 53 bp, Artificial Sequence; identical to SEQ ID NO: 2551
  Description of Artificial Sequence: Synthetic cashew; inner sequence and 3' sequence

SEQ ID NO: 14603 - DNA, 53 bp, Artificial Sequence; identical to SEQ ID NO: 2662
  Description of Artificial Sequence: Synthetic cashew; inner sequence and 3' sequence

SEQ ID NO: 14604 - DNA, 53 bp, Artificial Sequence; identical to SEQ ID NO: 2808
  Description of Artificial Sequence: Synthetic cashew; inner sequence and 3' sequence

SEQ ID NO: 14605 - DNA, 53 bp, Artificial Sequence; identical to SEQ ID NO: 2357
  Description of Artificial Sequence: Synthetic cashew; inner sequence and 3' sequence

SEQ ID NO: 14606 - DNA, 53 bp, Artificial Sequence; identical to SEQ ID NO: 7001
  Description of Artificial Sequence: Synthetic cashew; inner sequence and 3' sequence

SEQ ID NO: 14607 - DNA, 53 bp, Artificial Sequence; identical to SEQ ID NO: 2225
  Description of Artificial Sequence: Synthetic cashew; inner sequence and 3' sequence

SEQ ID NO: 14608 - DNA, 53 bp, Artificial Sequence; identical to SEQ ID NO: 2698
  Description of Artificial Sequence: Synthetic cashew; inner sequence and 3' sequence

SEQ ID NO: 14609 - DNA, 53 bp, Artificial Sequence; identical to SEQ ID NO: 2921
  Description of Artificial Sequence: Synthetic cashew; inner sequence and 3' sequence

SEQ ID NO: 14610 - DNA, 53 bp, Artificial Sequence; identical to SEQ ID NO: 2338
  Description of Artificial Sequence: Synthetic cashew; inner sequence and 3' sequence

SEQ ID NO: 14611 - DNA, 53 bp, Artificial Sequence; identical to SEQ ID NO: 2881
  Description of Artificial Sequence: Synthetic cashew; inner sequence and 3' sequence

SEQ ID NO: 14612 - DNA, 53 bp, Artificial Sequence
  Description of Artificial Sequence: Synthetic cashew; inner sequence and 3' sequence
cgcgacgcgtaggcatgtcttctgtgtgcattgactagtacatgaccacttga

SEQ ID NO: 14613 - DNA, 53 bp, Artificial Sequence; identical to SEQ ID NO: 2306
  Description of Artificial Sequence: Synthetic cashew; inner sequence and 3' sequence

SEQ ID NO: 14614 - DNA, 53 bp, Artificial Sequence; identical to SEQ ID NO: 2574
  Description of Artificial Sequence: Synthetic cashew; inner sequence and 3' sequence

SEQ ID NO: 14615 - DNA, 53 bp, Artificial Sequence; identical to SEQ ID NO: 2363
  Description of Artificial Sequence: Synthetic cashew; inner sequence and 3' sequence

SEQ ID NO: 14616 - DNA, 53 bp, Artificial Sequence; identical to SEQ ID NO: 6240
  Description of Artificial Sequence: Synthetic cashew; inner sequence and 3' sequence

SEQ ID NO: 14617 - DNA, 53 bp, Artificial Sequence; identical to SEQ ID NO: 2143
  Description of Artificial Sequence: Synthetic cashew; inner sequence and 3' sequence

SEQ ID NO: 14618 - DNA, 53 bp, Artificial Sequence
  Description of Artificial Sequence: Synthetic cashew; inner sequence and 3' sequence
cgcgacgagtatgcatgtcttctgtgtgcattgactagtacatgaccacttga

SEQ ID NO: 14619 - DNA, 53 bp, Artificial Sequence; identical to SEQ ID NO: 10950
  Description of Artificial Sequence: Synthetic cashew; inner sequence and 3' sequence

SEQ ID NO: 14620 - DNA, 53 bp, Artificial Sequence; identical to SEQ ID NO: 10877
  Description of Artificial Sequence: Synthetic cashew; inner sequence and 3' sequence

SEQ ID NO: 14621 - DNA, 53 bp, Artificial Sequence; identical to SEQ ID NO: 6573
  Description of Artificial Sequence: Synthetic cashew; inner sequence and 3' sequence

SEQ ID NO: 14622 - DNA, 53 bp, Artificial Sequence; identical to SEQ ID NO: 2236
  Description of Artificial Sequence: Synthetic cashew; inner sequence and 3' sequence

SEQ ID NO: 14623 - DNA, 53 bp, Artificial Sequence; identical to SEQ ID NO: 6935
  Description of Artificial Sequence: Synthetic cashew; inner sequence and 3' sequence

SEQ ID NO: 14624 - DNA, 53 bp, Artificial Sequence; identical to SEQ ID NO: 2535
  Description of Artificial Sequence: Synthetic cashew; inner sequence and 3' sequence

SEQ ID NO: 14625 - DNA, 53 bp, Artificial Sequence; identical to SEQ ID NO: 2862
  Description of Artificial Sequence: Synthetic cashew; inner sequence and 3' sequence

SEQ ID NO: 14626 - DNA, 52 bp, Artificial Sequence
  Description of Artificial Sequence: Synthetic cashew; inner sequence and 3' sequence
gcacgtcgaaacacgtagccatgcacggcttgactagtacatgaccacttga

SEQ ID NO: 14627 - DNA, 53 bp, Artificial Sequence; identical to SEQ ID NO: 2424
  Description of Artificial Sequence: Synthetic cashew; inner sequence and 3' sequence

SEQ ID NO: 14628 - DNA, 53 bp, Artificial Sequence; identical to SEQ ID NO: 2831
  Description of Artificial Sequence: Synthetic cashew; inner sequence and 3' sequence

SEQ ID NO: 14629 - DNA, 53 bp, Artificial Sequence; identical to SEQ ID NO: 2398
  Description of Artificial Sequence: Synthetic cashew; inner sequence and 3' sequence

SEQ ID NO: 14630 - DNA, 53 bp, Artificial Sequence; identical to SEQ ID NO: 6889
  Description of Artificial Sequence: Synthetic cashew; inner sequence and 3' sequence

SEQ ID NO: 14631 - DNA, 53 bp, Artificial Sequence; identical to SEQ ID NO: 6472
  Description of Artificial Sequence: Synthetic cashew; inner sequence and 3' sequence

SEQ ID NO: 14632 - DNA, 53 bp, Artificial Sequence; identical to SEQ ID NO: 10825
  Description of Artificial Sequence: Synthetic cashew; inner sequence and 3' sequence

SEQ ID NO: 14633 - DNA, 53 bp, Artificial Sequence; identical to SEQ ID NO: 2452
  Description of Artificial Sequence: Synthetic cashew; inner sequence and 3' sequence

SEQ ID NO: 14634 - DNA, 53 bp, Artificial Sequence; identical to SEQ ID NO: 2486
  Description of Artificial Sequence: Synthetic cashew; inner sequence and 3' sequence

SEQ ID NO: 14635 - DNA, 53 bp, Artificial Sequence; identical to SEQ ID NO: 6913
  Description of Artificial Sequence: Synthetic cashew; inner sequence and 3' sequence

SEQ ID NO: 14636 - DNA, 53 bp, Artificial Sequence; identical to SEQ ID NO: 6611
  Description of Artificial Sequence: Synthetic cashew; inner sequence and 3' sequence

SEQ ID NO: 14637 - DNA, 53 bp, Artificial Sequence; identical to SEQ ID NO: 6356
  Description of Artificial Sequence: Synthetic cashew; inner sequence and 3' sequence

SEQ ID NO: 14638 - DNA, 53 bp, Artificial Sequence; identical to SEQ ID NO: 2626
  Description of Artificial Sequence: Synthetic cashew; inner sequence and 3' sequence

SEQ ID NO: 14639 - DNA, 53 bp, Artificial Sequence; identical to SEQ ID NO: 2380
  Description of Artificial Sequence: Synthetic cashew; inner sequence and 3' sequence

SEQ ID NO: 14640 - DNA, 53 bp, Artificial Sequence; identical to SEQ ID NO: 10767
  Description of Artificial Sequence: Synthetic cashew; inner sequence and 3' sequence

SEQ ID NO: 14641 - DNA, 53 bp, Artificial Sequence; identical to SEQ ID NO: 6940
  Description of Artificial Sequence: Synthetic cashew; inner sequence and 3' sequence

SEQ ID NO: 14642 - DNA, 53 bp, Artificial Sequence; identical to SEQ ID NO: 2596
  Description of Artificial Sequence: Synthetic cashew; inner sequence and 3' sequence

SEQ ID NO: 14643 - DNA, 53 bp, Artificial Sequence; identical to SEQ ID NO: 2518
  Description of Artificial Sequence: Synthetic cashew; inner sequence and 3' sequence

SEQ ID NO: 14644 - DNA, 54 bp, Artificial Sequence; identical to SEQ ID NO: 2503
  Description of Artificial Sequence: Synthetic cashew; inner sequence and 3' sequence

SEQ ID NO: 14645 - DNA, 53 bp, Artificial Sequence; identical to SEQ ID NO: 6845
  Description of Artificial Sequence: Synthetic cashew; inner sequence and 3' sequence

SEQ ID NO: 14646 - DNA, 53 bp, Artificial Sequence; identical to SEQ ID NO: 2919
  Description of Artificial Sequence: Synthetic cashew; inner sequence and 3' sequence

SEQ ID NO: 14647 - DNA, 53 bp, Artificial Sequence; identical to SEQ ID NO: 2920
  Description of Artificial Sequence: Synthetic cashew; inner sequence and 3' sequence

SEQ ID NO: 14648 - DNA, 53 bp, Artificial Sequence; identical to SEQ ID NO: 6616
  Description of Artificial Sequence: Synthetic cashew; inner sequence and 3' sequence

SEQ ID NO: 14649 - DNA, 53 bp, Artificial Sequence; identical to SEQ ID NO: 2465
  Description of Artificial Sequence: Synthetic cashew; inner sequence and 3' sequence

SEQ ID NO: 14650 - DNA, 53 bp, Artificial Sequence; identical to SEQ ID NO: 2317
  Description of Artificial Sequence: Synthetic cashew; inner sequence and 3' sequence

SEQ ID NO: 14651 - DNA, 53 bp, Artificial Sequence; identical to SEQ ID NO: 6717
  Description of Artificial Sequence: Synthetic cashew; inner sequence and 3' sequence

SEQ ID NO: 14652 - DNA, 53 bp, Artificial Sequence; identical to SEQ ID NO: 2621
  Description of Artificial Sequence: Synthetic cashew; inner sequence and 3' sequence

SEQ ID NO: 14653 - DNA, 53 bp, Artificial Sequence; identical to SEQ ID NO: 2297
  Description of Artificial Sequence: Synthetic cashew; inner sequence and 3' sequence

SEQ ID NO: 14654 - DNA, 53 bp, Artificial Sequence; identical to SEQ ID NO: 6690
  Description of Artificial Sequence: Synthetic cashew; inner sequence and 3' sequence

SEQ ID NO: 14655 - DNA, 53 bp, Artificial Sequence; identical to SEQ ID NO: 2773
  Description of Artificial Sequence: Synthetic cashew; inner sequence and 3' sequence

SEQ ID NO: 14656 - DNA, 53 bp, Artificial Sequence; identical to SEQ ID NO: 6799
  Description of Artificial Sequence: Synthetic cashew; inner sequence and 3' sequence

SEQ ID NO: 14657 - DNA, 53 bp, Artificial Sequence; identical to SEQ ID NO: 2956
  Description of Artificial Sequence: Synthetic cashew; inner sequence and 3' sequence

SEQ ID NO: 14658 - DNA, 53 bp, Artificial Sequence; identical to SEQ ID NO: 10939
  Description of Artificial Sequence: Synthetic cashew; inner sequence and 3' sequence

SEQ ID NO: 14659 - DNA, 53 bp, Artificial Sequence
  Description of Artificial Sequence: Synthetic cashew; inner sequence and 3' sequence
gtcatgccatcccttcgagggtgacaggtattgactagtacatgaccacttga

SEQ ID NO: 14660 - DNA, 52 bp, Artificial Sequence; identical to SEQ ID NO: 6559
  Description of Artificial Sequence: Synthetic cashew; inner sequence and 3' sequence

SEQ ID NO: 14661 - DNA, 53 bp, Artificial Sequence; identical to SEQ ID NO: 6565
  Description of Artificial Sequence: Synthetic cashew; inner sequence and 3' sequence

SEQ ID NO: 14662 - DNA, 53 bp, Artificial Sequence; identical to SEQ ID NO: 2576
  Description of Artificial Sequence: Synthetic cashew; inner sequence and 3' sequence

SEQ ID NO: 14663 - DNA, 53 bp, Artificial Sequence; identical to SEQ ID NO: 2404
  Description of Artificial Sequence: Synthetic cashew; inner sequence and 3' sequence

SEQ ID NO: 14664 - DNA, 53 bp, Artificial Sequence; identical to SEQ ID NO: 2292
  Description of Artificial Sequence: Synthetic cashew; inner sequence and 3' sequence

SEQ ID NO: 14665 - DNA, 53 bp, Artificial Sequence; identical to SEQ ID NO: 2703
  Description of Artificial Sequence: Synthetic cashew; inner sequence and 3' sequence

SEQ ID NO: 14666 - DNA, 53 bp, Artificial Sequence; identical to SEQ ID NO: 2638
  Description of Artificial Sequence: Synthetic cashew; inner sequence and 3' sequence

SEQ ID NO: 14667 - DNA, 53 bp, Artificial Sequence; identical to SEQ ID NO: 10627
  Description of Artificial Sequence: Synthetic cashew; inner sequence and 3' sequence

SEQ ID NO: 14668 - DNA, 53 bp, Artificial Sequence; identical to SEQ ID NO: 2663
  Description of Artificial Sequence: Synthetic cashew; inner sequence and 3' sequence

SEQ ID NO: 14669 - DNA, 53 bp, Artificial Sequence; identical to SEQ ID NO: 2917
  Description of Artificial Sequence: Synthetic cashew; inner sequence and 3' sequence

SEQ ID NO: 14670 - DNA, 53 bp, Artificial Sequence
  Description of Artificial Sequence: Synthetic cashew; inner sequence and 3' sequence
cgcgacgagtaggcatgtcttctgtttgcattgactagtacatgaccacttga

SEQ ID NO: 14671 - DNA, 53 bp, Artificial Sequence; identical to SEQ ID NO: 2805
  Description of Artificial Sequence: Synthetic cashew; inner sequence and 3' sequence

SEQ ID NO: 14672 - DNA, 53 bp, Artificial Sequence; identical to SEQ ID NO: 2199
  Description of Artificial Sequence: Synthetic cashew; inner sequence and 3' sequence

SEQ ID NO: 14673 - DNA, 53 bp, Artificial Sequence
  Description of Artificial Sequence: Synthetic cashew; inner sequence and 3' sequence
ggcctgcacatccctcccttccgtgcgtcattgactagtacatgaccacttga

SEQ ID NO: 14674 - DNA, 53 bp, Artificial Sequence; identical to SEQ ID NO: 2223
  Description of Artificial Sequence: Synthetic cashew; inner sequence and 3' sequence

SEQ ID NO: 14675 - DNA, 53 bp, Artificial Sequence; identical to SEQ ID NO: 2378
  Description of Artificial Sequence: Synthetic cashew; inner sequence and 3' sequence

SEQ ID NO: 14676 - DNA, 53 bp, Artificial Sequence; identical to SEQ ID NO: 2943
  Description of Artificial Sequence: Synthetic cashew; inner sequence and 3' sequence

SEQ ID NO: 14677 - DNA, 53 bp, Artificial Sequence; identical to SEQ ID NO: 6688
  Description of Artificial Sequence: Synthetic cashew; inner sequence and 3' sequence

SEQ ID NO: 14678 - DNA, 53 bp, Artificial Sequence; identical to SEQ ID NO: 2332
  Description of Artificial Sequence: Synthetic cashew; inner sequence and 3' sequence

SEQ ID NO: 14679 - DNA, 53 bp, Artificial Sequence; identical to SEQ ID NO: 6598
  Description of Artificial Sequence: Synthetic cashew; inner sequence and 3' sequence

SEQ ID NO: 14680 - DNA, 53 bp, Artificial Sequence; identical to SEQ ID NO: 6893
  Description of Artificial Sequence: Synthetic cashew; inner sequence and 3' sequence

SEQ ID NO: 14681 - DNA, 53 bp, Artificial Sequence; identical to SEQ ID NO: 6817
  Description of Artificial Sequence: Synthetic cashew; inner sequence and 3' sequence

SEQ ID NO: 14682 - DNA, 53 bp, Artificial Sequence; identical to SEQ ID NO: 2699
  Description of Artificial Sequence: Synthetic cashew; inner sequence and 3' sequence

SEQ ID NO: 14683 - DNA, 53 bp, Artificial Sequence; identical to SEQ ID NO: 2680
  Description of Artificial Sequence: Synthetic cashew; inner sequence and 3' sequence

SEQ ID NO: 14684 - DNA, 53 bp, Artificial Sequence; identical to SEQ ID NO: 2162
  Description of Artificial Sequence: Synthetic cashew; inner sequence and 3' sequence

SEQ ID NO: 14685 - DNA, 53 bp, Artificial Sequence; identical to SEQ ID NO: 6620
  Description of Artificial Sequence: Synthetic cashew; inner sequence and 3' sequence

SEQ ID NO: 14686 - DNA, 53 bp, Artificial Sequence; identical to SEQ ID NO: 2586
  Description of Artificial Sequence: Synthetic cashew; inner sequence and 3' sequence

SEQ ID NO: 14687 - DNA, 53 bp, Artificial Sequence; identical to SEQ ID NO: 2776
  Description of Artificial Sequence: Synthetic cashew; inner sequence and 3' sequence

SEQ ID NO: 14688 - DNA, 53 bp, Artificial Sequence; identical to SEQ ID NO: 2330
  Description of Artificial Sequence: Synthetic cashew; inner sequence and 3' sequence

SEQ ID NO: 14689 - DNA, 53 bp, Artificial Sequence; identical to SEQ ID NO: 2318
  Description of Artificial Sequence: Synthetic cashew; inner sequence and 3' sequence

SEQ ID NO: 14690 - DNA, 53 bp, Artificial Sequence; identical to SEQ ID NO: 2948
  Description of Artificial Sequence: Synthetic cashew; inner sequence and 3' sequence

SEQ ID NO: 14691 - DNA, 52 bp, Artificial Sequence
  Description of Artificial Sequence: Synthetic cashew; inner sequence and 3' sequence
gcacgtcgcaacacgtagccatgcacggtttgactagtacatgaccacttga

SEQ ID NO: 14692 - DNA, 53 bp, Artificial Sequence; identical to SEQ ID NO: 2624
  Description of Artificial Sequence: Synthetic cashew; inner sequence and 3' sequence

SEQ ID NO: 14693 - DNA, 53 bp, Artificial Sequence; identical to SEQ ID NO: 10938
  Description of Artificial Sequence: Synthetic cashew; inner sequence and 3' sequence

SEQ ID NO: 14694 - DNA, 53 bp, Artificial Sequence; identical to SEQ ID NO: 2722
  Description of Artificial Sequence: Synthetic cashew; inner sequence and 3' sequence

SEQ ID NO: 14695 - DNA, 53 bp, Artificial Sequence; identical to SEQ ID NO: 2660
  Description of Artificial Sequence: Synthetic cashew; inner sequence and 3' sequence

SEQ ID NO: 14696 - DNA, 53 bp, Artificial Sequence; identical to SEQ ID NO: 2327
  Description of Artificial Sequence: Synthetic cashew; inner sequence and 3' sequence

SEQ ID NO: 14697 - DNA, 53 bp, Artificial Sequence; identical to SEQ ID NO: 2914
  Description of Artificial Sequence: Synthetic cashew; inner sequence and 3' sequence

SEQ ID NO: 14698 - DNA, 53 bp, Artificial Sequence; identical to SEQ ID NO: 6955
  Description of Artificial Sequence: Synthetic cashew; inner sequence and 3' sequence

SEQ ID NO: 14699 - DNA, 53 bp, Artificial Sequence; identical to SEQ ID NO: 2979
  Description of Artificial Sequence: Synthetic cashew; inner sequence and 3' sequence

SEQ ID NO: 14700 - DNA, 53 bp, Artificial Sequence
  Description of Artificial Sequence: Synthetic cashew; inner sequence and 3' sequence
gcacgactcgccccctatcatgaggccatgttgactagtacatgaccacttga

SEQ ID NO: 14701 - DNA, 53 bp, Artificial Sequence; identical to SEQ ID NO: 2830
  Description of Artificial Sequence: Synthetic cashew; inner sequence and 3' sequence

SEQ ID NO: 14702 - DNA, 53 bp, Artificial Sequence; identical to SEQ ID NO: 2834
  Description of Artificial Sequence: Synthetic cashew; inner sequence and 3' sequence

SEQ ID NO: 14703 - DNA, 53 bp, Artificial Sequence; identical to SEQ ID NO: 10850
  Description of Artificial Sequence: Synthetic cashew; inner sequence and 3' sequence

SEQ ID NO: 14704 - DNA, 53 bp, Artificial Sequence; identical to SEQ ID NO: 10909
  Description of Artificial Sequence: Synthetic cashew; inner sequence and 3' sequence

SEQ ID NO: 14705 - DNA, 53 bp, Artificial Sequence; identical to SEQ ID NO: 2857
  Description of Artificial Sequence: Synthetic cashew; inner sequence and 3' sequence

SEQ ID NO: 14706 - DNA, 53 bp, Artificial Sequence; identical to SEQ ID NO: 2668
  Description of Artificial Sequence: Synthetic cashew; inner sequence and 3' sequence

SEQ ID NO: 14707 - DNA, 53 bp, Artificial Sequence; identical to SEQ ID NO: 6960
  Description of Artificial Sequence: Synthetic cashew; inner sequence and 3' sequence

SEQ ID NO: 14708 - DNA, 53 bp, Artificial Sequence; identical to SEQ ID NO: 6494
  Description of Artificial Sequence: Synthetic cashew; inner sequence and 3' sequence

SEQ ID NO: 14709 - DNA, 52 bp, Artificial Sequence
  Description of Artificial Sequence: Synthetic cashew; inner sequence and 3' sequence
gcacgccgaaacacgtagccatgcacggtttgactagtacatgaccacttga

SEQ ID NO: 14710 - DNA, 53 bp, Artificial Sequence; identical to SEQ ID NO: 2729
  Description of Artificial Sequence: Synthetic cashew; inner sequence and 3' sequence

SEQ ID NO: 14711 - DNA, 53 bp, Artificial Sequence; identical to SEQ ID NO: 6662
  Description of Artificial Sequence: Synthetic cashew; inner sequence and 3' sequence

SEQ ID NO: 14712 - DNA, 53 bp, Artificial Sequence
  Description of Artificial Sequence: Synthetic cashew; inner sequence and 3' sequence
acatgtgggccgatgtgcactgagtggtgtttgactagtacatgaccacttga

SEQ ID NO: 14713 - DNA, 53 bp, Artificial Sequence; identical to SEQ ID NO: 2351
  Description of Artificial Sequence: Synthetic cashew; inner sequence and 3' sequence

SEQ ID NO: 14714 - DNA, 53 bp, Artificial Sequence; identical to SEQ ID NO: 6552
  Description of Artificial Sequence: Synthetic cashew; inner sequence and 3' sequence

SEQ ID NO: 14715 - DNA, 53 bp, Artificial Sequence; identical to SEQ ID NO: 2432
  Description of Artificial Sequence: Synthetic cashew; inner sequence and 3' sequence

SEQ ID NO: 14716 - DNA, 53 bp, Artificial Sequence; identical to SEQ ID NO: 2733
  Description of Artificial Sequence: Synthetic cashew; inner sequence and 3' sequence

SEQ ID NO: 14717 - DNA, 53 bp, Artificial Sequence; identical to SEQ ID NO: 2505
  Description of Artificial Sequence: Synthetic cashew; inner sequence and 3' sequence

SEQ ID NO: 14718 - DNA, 53 bp, Artificial Sequence; identical to SEQ ID NO: 6728
  Description of Artificial Sequence: Synthetic cashew; inner sequence and 3' sequence

SEQ ID NO: 14719 - DNA, 53 bp, Artificial Sequence; identical to SEQ ID NO: 2265
  Description of Artificial Sequence: Synthetic cashew; inner sequence and 3' sequence

SEQ ID NO: 14720 - DNA, 53 bp, Artificial Sequence; identical to SEQ ID NO: 2548
  Description of Artificial Sequence: Synthetic cashew; inner sequence and 3' sequence

SEQ ID NO: 14721 - DNA, 53 bp, Artificial Sequence; identical to SEQ ID NO: 2832
  Description of Artificial Sequence: Synthetic cashew; inner sequence and 3' sequence

SEQ ID NO: 14722 - DNA, 53 bp, Artificial Sequence; identical to SEQ ID NO: 6498
  Description of Artificial Sequence: Synthetic cashew; inner sequence and 3' sequence

SEQ ID NO: 14723 - DNA, 53 bp, Artificial Sequence; identical to SEQ ID NO: 2768
  Description of Artificial Sequence: Synthetic cashew; inner sequence and 3' sequence

SEQ ID NO: 14724 - DNA, 53 bp, Artificial Sequence; identical to SEQ ID NO: 2874
  Description of Artificial Sequence: Synthetic cashew; inner sequence and 3' sequence

SEQ ID NO: 14725 - DNA, 53 bp, Artificial Sequence; identical to SEQ ID NO: 6859
  Description of Artificial Sequence: Synthetic cashew; inner sequence and 3' sequence

SEQ ID NO: 14726 - DNA, 53 bp, Artificial Sequence; identical to SEQ ID NO: 6436
  Description of Artificial Sequence: Synthetic cashew; inner sequence and 3' sequence

SEQ ID NO: 14727 - DNA, 53 bp, Artificial Sequence; identical to SEQ ID NO: 2500
  Description of Artificial Sequence: Synthetic cashew; inner sequence and 3' sequence

SEQ ID NO: 14728 - DNA, 53 bp, Artificial Sequence; identical to SEQ ID NO: 2889
  Description of Artificial Sequence: Synthetic cashew; inner sequence and 3' sequence

SEQ ID NO: 14729 - DNA, 53 bp, Artificial Sequence; identical to SEQ ID NO: 2592
  Description of Artificial Sequence: Synthetic cashew; inner sequence and 3' sequence

SEQ ID NO: 14730 - DNA, 52 bp, Artificial Sequence
  Description of Artificial Sequence: Synthetic cashew; inner sequence and 3' sequence
gcacgtcgaaacacgcagccatgcacggtttgactagtacatgaccacttga

SEQ ID NO: 14731 - DNA, 53 bp, Artificial Sequence; identical to SEQ ID NO: 6985
  Description of Artificial Sequence: Synthetic cashew; inner sequence and 3' sequence

SEQ ID NO: 14732 - DNA, 53 bp, Artificial Sequence; identical to SEQ ID NO: 6802
  Description of Artificial Sequence: Synthetic cashew; inner sequence and 3' sequence

SEQ ID NO: 14733 - DNA, 53 bp, Artificial Sequence; identical to SEQ ID NO: 10807
  Description of Artificial Sequence: Synthetic cashew; inner sequence and 3' sequence

SEQ ID NO: 14734 - DNA, 53 bp, Artificial Sequence; identical to SEQ ID NO: 2909
  Description of Artificial Sequence: Synthetic cashew; inner sequence and 3' sequence

SEQ ID NO: 14735 - DNA, 53 bp, Artificial Sequence; identical to SEQ ID NO: 10712
  Description of Artificial Sequence: Synthetic cashew; inner sequence and 3' sequence

SEQ ID NO: 14736 - DNA, 53 bp, Artificial Sequence; identical to SEQ ID NO: 6700
  Description of Artificial Sequence: Synthetic cashew; inner sequence and 3' sequence

SEQ ID NO: 14737 - DNA, 53 bp, Artificial Sequence; identical to SEQ ID NO: 10633
  Description of Artificial Sequence: Synthetic cashew; inner sequence and 3' sequence

SEQ ID NO: 14738 - DNA, 53 bp, Artificial Sequence; identical to SEQ ID NO: 6829
  Description of Artificial Sequence: Synthetic cashew; inner sequence and 3' sequence

SEQ ID NO: 14739 - DNA, 53 bp, Artificial Sequence; identical to SEQ ID NO: 10902
  Description of Artificial Sequence: Synthetic cashew; inner sequence and 3' sequence

SEQ ID NO: 14740 - DNA, 53 bp, Artificial Sequence; identical to SEQ ID NO: 10748
  Description of Artificial Sequence: Synthetic cashew; inner sequence and 3' sequence

SEQ ID NO: 14741 - DNA, 53 bp, Artificial Sequence; identical to SEQ ID NO: 6603
  Description of Artificial Sequence: Synthetic cashew; inner sequence and 3' sequence

SEQ ID NO: 14742 - DNA, 53 bp, Artificial Sequence; identical to SEQ ID NO: 2930
  Description of Artificial Sequence: Synthetic cashew; inner sequence and 3' sequence

SEQ ID NO: 14743 - DNA, 53 bp, Artificial Sequence
  Description of Artificial Sequence: Synthetic cashew; inner sequence and 3' sequence
gtcattccgcatcatacacgtgggcacgtattgactagtacatgaccacttga

SEQ ID NO: 14744 - DNA, 53 bp, Artificial Sequence
  Description of Artificial Sequence: Synthetic cashew; inner sequence and 3' sequence
gaccgcaacgaccaaagtgccatgtggtgcttgactagtacatgaccacttga

SEQ ID NO: 14745 - DNA, 53 bp, Artificial Sequence; identical to SEQ ID NO: 2466
  Description of Artificial Sequence: Synthetic cashew; inner sequence and 3' sequence

SEQ ID NO: 14746 - DNA, 53 bp, Artificial Sequence; identical to SEQ ID NO: 2606
  Description of Artificial Sequence: Synthetic cashew; inner sequence and 3' sequence

SEQ ID NO: 14747 - DNA, 53 bp, Artificial Sequence; identical to SEQ ID NO: 2813
  Description of Artificial Sequence: Synthetic cashew; inner sequence and 3' sequence

SEQ ID NO: 14748 - DNA, 53 bp, Artificial Sequence; identical to SEQ ID NO: 2384
  Description of Artificial Sequence: Synthetic cashew; inner sequence and 3' sequence

SEQ ID NO: 14749 - DNA, 53 bp, Artificial Sequence; identical to SEQ ID NO: 6289
  Description of Artificial Sequence: Synthetic cashew; inner sequence and 3' sequence

SEQ ID NO: 14750 - DNA, 53 bp, Artificial Sequence; identical to SEQ ID NO: 6787
  Description of Artificial Sequence: Synthetic cashew; inner sequence and 3' sequence

SEQ ID NO: 14751 - DNA, 53 bp, Artificial Sequence; identical to SEQ ID NO: 2302
  Description of Artificial Sequence: Synthetic cashew; inner sequence and 3' sequence

SEQ ID NO: 14752 - DNA, 53 bp, Artificial Sequence; identical to SEQ ID NO: 2463
  Description of Artificial Sequence: Synthetic cashew; inner sequence and 3' sequence

SEQ ID NO: 14753 - DNA, 53 bp, Artificial Sequence; identical to SEQ ID NO: 6579
  Description of Artificial Sequence: Synthetic cashew; inner sequence and 3' sequence

SEQ ID NO: 14754 - DNA, 53 bp, Artificial Sequence; identical to SEQ ID NO: 2502
  Description of Artificial Sequence: Synthetic cashew; inner sequence and 3' sequence

SEQ ID NO: 14755 - DNA, 52 bp, Artificial Sequence
  Description of Artificial Sequence: Synthetic cashew; inner sequence and 3' sequence
gcacgtcgaaacacgtagccatgcccggtttgactagtacatgaccacttga

SEQ ID NO: 14756 - DNA, 53 bp, Artificial Sequence; identical to SEQ ID NO: 6856
  Description of Artificial Sequence: Synthetic cashew; inner sequence and 3' sequence

SEQ ID NO: 14757 - DNA, 53 bp, Artificial Sequence; identical to SEQ ID NO: 6590
  Description of Artificial Sequence: Synthetic cashew; inner sequence and 3' sequence

SEQ ID NO: 14758 - DNA, 53 bp, Artificial Sequence; identical to SEQ ID NO: 6521
  Description of Artificial Sequence: Synthetic cashew; inner sequence and 3' sequence

SEQ ID NO: 14759 - DNA, 52 bp, Artificial Sequence; identical to SEQ ID NO: 2873
  Description of Artificial Sequence: Synthetic cashew; inner sequence and 3' sequence

SEQ ID NO: 14760 - DNA, 53 bp, Artificial Sequence; identical to SEQ ID NO: 10910
  Description of Artificial Sequence: Synthetic cashew; inner sequence and 3' sequence

SEQ ID NO: 14761 - DNA, 53 bp, Artificial Sequence; identical to SEQ ID NO: 2477
  Description of Artificial Sequence: Synthetic cashew; inner sequence and 3' sequence

SEQ ID NO: 14762 - DNA, 53 bp, Artificial Sequence; identical to SEQ ID NO: 2772
  Description of Artificial Sequence: Synthetic cashew; inner sequence and 3' sequence

SEQ ID NO: 14763 - DNA, 53 bp, Artificial Sequence; identical to SEQ ID NO: 2458
  Description of Artificial Sequence: Synthetic cashew; inner sequence and 3' sequence

SEQ ID NO: 14764 - DNA, 53 bp, Artificial Sequence; identical to SEQ ID NO: 2816
  Description of Artificial Sequence: Synthetic cashew; inner sequence and 3' sequence

SEQ ID NO: 14765 - DNA, 53 bp, Artificial Sequence; identical to SEQ ID NO: 2713
  Description of Artificial Sequence: Synthetic cashew; inner sequence and 3' sequence

SEQ ID NO: 14766 - DNA, 53 bp, Artificial Sequence; identical to SEQ ID NO: 6884
  Description of Artificial Sequence: Synthetic cashew; inner sequence and 3' sequence

SEQ ID NO: 14767 - DNA, 53 bp, Artificial Sequence
  Description of Artificial Sequence: Synthetic cashew; inner sequence and 3' sequence
gtcatgcacgaccactatcatggcggcatgttgactagtacatgaccacttga

SEQ ID NO: 14768 - DNA, 53 bp, Artificial Sequence; identical to SEQ ID NO: 2702
  Description of Artificial Sequence: Synthetic cashew; inner sequence and 3' sequence

SEQ ID NO: 14769 - DNA, 53 bp, Artificial Sequence; identical to SEQ ID NO: 2583
  Description of Artificial Sequence: Synthetic cashew; inner sequence and 3' sequence

SEQ ID NO: 14770 - DNA, 53 bp, Artificial Sequence; identical to SEQ ID NO: 2685
  Description of Artificial Sequence: Synthetic cashew; inner sequence and 3' sequence

SEQ ID NO: 14771 - DNA, 53 bp, Artificial Sequence; identical to SEQ ID NO: 6610
  Description of Artificial Sequence: Synthetic cashew; inner sequence and 3' sequence

SEQ ID NO: 14772 - DNA, 53 bp, Artificial Sequence; identical to SEQ ID NO: 6981
  Description of Artificial Sequence: Synthetic cashew; inner sequence and 3' sequence

SEQ ID NO: 14773 - DNA, 53 bp, Artificial Sequence
  Description of Artificial Sequence: Synthetic cashew; inner sequence and 3' sequence
ccgcacgtagccctatcagaggtgcatgcattgactagtacatgaccacttga

SEQ ID NO: 14774 - DNA, 53 bp, Artificial Sequence; identical to SEQ ID NO: 2787
  Description of Artificial Sequence: Synthetic cashew; inner sequence and 3' sequence

SEQ ID NO: 14775 - DNA, 53 bp, Artificial Sequence
  Description of Artificial Sequence: Synthetic cashew; inner sequence and 3' sequence
gtacgcatcgtcccgtcatgtggctccgtattgactagtacatgaccacttga

SEQ ID NO: 14776 - DNA, 53 bp, Artificial Sequence; identical to SEQ ID NO: 2826
  Description of Artificial Sequence: Synthetic cashew; inner sequence and 3' sequence

SEQ ID NO: 14777 - DNA, 53 bp, Artificial Sequence; identical to SEQ ID NO: 6339
  Description of Artificial Sequence: Synthetic cashew; inner sequence and 3' sequence

SEQ ID NO: 14778 - DNA, 53 bp, Artificial Sequence; identical to SEQ ID NO: 2417
  Description of Artificial Sequence: Synthetic cashew; inner sequence and 3' sequence

SEQ ID NO: 14779 - DNA, 53 bp, Artificial Sequence; identical to SEQ ID NO: 2753
  Description of Artificial Sequence: Synthetic cashew; inner sequence and 3' sequence

SEQ ID NO: 14780 - DNA, 53 bp, Artificial Sequence; identical to SEQ ID NO: 6503
  Description of Artificial Sequence: Synthetic cashew; inner sequence and 3' sequence

SEQ ID NO: 14781 - DNA, 53 bp, Artificial Sequence; identical to SEQ ID NO: 10889
  Description of Artificial Sequence: Synthetic cashew; inner sequence and 3' sequence

SEQ ID NO: 14782 - DNA, 53 bp, Artificial Sequence; identical to SEQ ID NO: 2488
  Description of Artificial Sequence: Synthetic cashew; inner sequence and 3' sequence

SEQ ID NO: 14783 - DNA, 53 bp, Artificial Sequence; identical to SEQ ID NO: 6721
  Description of Artificial Sequence: Synthetic cashew; inner sequence and 3' sequence

SEQ ID NO: 14784 - DNA, 53 bp, Artificial Sequence; identical to SEQ ID NO: 10860
  Description of Artificial Sequence: Synthetic cashew; inner sequence and 3' sequence

SEQ ID NO: 14785 - DNA, 53 bp, Artificial Sequence; identical to SEQ ID NO: 10871
  Description of Artificial Sequence: Synthetic cashew; inner sequence and 3' sequence

SEQ ID NO: 14786 - DNA, 53 bp, Artificial Sequence; identical to SEQ ID NO: 2672
  Description of Artificial Sequence: Synthetic cashew; inner sequence and 3' sequence

SEQ ID NO: 14787 - DNA, 53 bp, Artificial Sequence; identical to SEQ ID NO: 2591
  Description of Artificial Sequence: Synthetic cashew; inner sequence and 3' sequence

SEQ ID NO: 14788 - DNA, 53 bp, Artificial Sequence; identical to SEQ ID NO: 6997
  Description of Artificial Sequence: Synthetic cashew; inner sequence and 3' sequence

SEQ ID NO: 14789 - DNA, 53 bp, Artificial Sequence; identical to SEQ ID NO: 10935
  Description of Artificial Sequence: Synthetic cashew; inner sequence and 3' sequence

SEQ ID NO: 14790 - DNA, 53 bp, Artificial Sequence; identical to SEQ ID NO: 2492
  Description of Artificial Sequence: Synthetic cashew; inner sequence and 3' sequence

SEQ ID NO: 14791 - DNA, 53 bp, Artificial Sequence
  Description of Artificial Sequence: Synthetic cashew; inner sequence and 3' sequence
catgtggcgtgcgttccgttcaagttgacattgactagtacatgaccacttga

SEQ ID NO: 14792 - DNA, 53 bp, Artificial Sequence; identical to SEQ ID NO: 2507
  Description of Artificial Sequence: Synthetic cashew; inner sequence and 3' sequence

SEQ ID NO: 14793 - DNA, 53 bp, Artificial Sequence; identical to SEQ ID NO: 6801
  Description of Artificial Sequence: Synthetic cashew; inner sequence and 3' sequence

SEQ ID NO: 14794 - DNA, 53 bp, Artificial Sequence; identical to SEQ ID NO: 2929
  Description of Artificial Sequence: Synthetic cashew; inner sequence and 3' sequence

SEQ ID NO: 14795 - DNA, 53 bp, Artificial Sequence
  Description of Artificial Sequence: Synthetic cashew; inner sequence and 3' sequence
gtgtcatgggtacgtcgctgggtgtggacattgactagtacatgaccacttga

SEQ ID NO: 14796 - DNA, 53 bp, Artificial Sequence; identical to SEQ ID NO: 6198
  Description of Artificial Sequence: Synthetic cashew; inner sequence and 3' sequence

SEQ ID NO: 14797 - DNA, 53 bp, Artificial Sequence; identical to SEQ ID NO: 2435
  Description of Artificial Sequence: Synthetic cashew; inner sequence and 3' sequence

SEQ ID NO: 14798 - DNA, 53 bp, Artificial Sequence; identical to SEQ ID NO: 2718
  Description of Artificial Sequence: Synthetic cashew; inner sequence and 3' sequence

SEQ ID NO: 14799 - DNA, 53 bp, Artificial Sequence
  Description of Artificial Sequence: Synthetic cashew; inner sequence and 3' sequence
gggccgacacgaaccctatcaacgtggacattgactagtacatgaccacttga

SEQ ID NO: 14800 - DNA, 54 bp, Artificial Sequence; identical to SEQ ID NO: 2489
  Description of Artificial Sequence: Synthetic cashew; inner sequence and 3' sequence

SEQ ID NO: 14801 - DNA, 53 bp, Artificial Sequence; identical to SEQ ID NO: 6713
  Description of Artificial Sequence: Synthetic cashew; inner sequence and 3' sequence

SEQ ID NO: 14802 - DNA, 53 bp, Artificial Sequence; identical to SEQ ID NO: 2442
  Description of Artificial Sequence: Synthetic cashew; inner sequence and 3' sequence

SEQ ID NO: 14803 - DNA, 53 bp, Artificial Sequence
  Description of Artificial Sequence: Synthetic cashew; inner sequence and 3' sequence
ggcatgcgatggatgggggctggggcagtcttgactagtacatgaccacttga

SEQ ID NO: 14804 - DNA, 53 bp, Artificial Sequence; identical to SEQ ID NO: 2926
  Description of Artificial Sequence: Synthetic cashew; inner sequence and 3' sequence

SEQ ID NO: 14805 - DNA, 53 bp, Artificial Sequence; identical to SEQ ID NO: 2761
  Description of Artificial Sequence: Synthetic cashew; inner sequence and 3' sequence

SEQ ID NO: 14806 - DNA, 53 bp, Artificial Sequence; identical to SEQ ID NO: 2315
  Description of Artificial Sequence: Synthetic cashew; inner sequence and 3' sequence

SEQ ID NO: 14807 - DNA, 53 bp, Artificial Sequence; identical to SEQ ID NO: 6642
  Description of Artificial Sequence: Synthetic cashew; inner sequence and 3' sequence

SEQ ID NO: 14808 - DNA, 53 bp, Artificial Sequence; identical to SEQ ID NO: 6711
  Description of Artificial Sequence: Synthetic cashew; inner sequence and 3' sequence

SEQ ID NO: 14809 - DNA, 53 bp, Artificial Sequence; identical to SEQ ID NO: 6873
  Description of Artificial Sequence: Synthetic cashew; inner sequence and 3' sequence

SEQ ID NO: 14810 - DNA, 53 bp, Artificial Sequence; identical to SEQ ID NO: 10769
  Description of Artificial Sequence: Synthetic cashew; inner sequence and 3' sequence

SEQ ID NO: 14811 - DNA, 53 bp, Artificial Sequence; identical to SEQ ID NO: 2261
  Description of Artificial Sequence: Synthetic cashew; inner sequence and 3' sequence

SEQ ID NO: 14812 - DNA, 53 bp, Artificial Sequence; identical to SEQ ID NO: 6526
  Description of Artificial Sequence: Synthetic cashew; inner sequence and 3' sequence

SEQ ID NO: 14813 - DNA, 53 bp, Artificial Sequence; identical to SEQ ID NO: 2679
  Description of Artificial Sequence: Synthetic cashew; inner sequence and 3' sequence

SEQ ID NO: 14814 - DNA, 52 bp, Artificial Sequence; identical to SEQ ID NO: 2453
  Description of Artificial Sequence: Synthetic cashew; inner sequence and 3' sequence

SEQ ID NO: 14815 - DNA, 53 bp, Artificial Sequence; identical to SEQ ID NO: 6739
  Description of Artificial Sequence: Synthetic cashew; inner sequence and 3' sequence

SEQ ID NO: 14816 - DNA, 53 bp, Artificial Sequence; identical to SEQ ID NO: 2607
  Description of Artificial Sequence: Synthetic cashew; inner sequence and 3' sequence

SEQ ID NO: 14817 - DNA, 53 bp, Artificial Sequence
  Description of Artificial Sequence: Synthetic cashew; inner sequence and 3' sequence
cgcgacgagtaggcatgtcttctgtgttcattgactagtacatgaccacttga

SEQ ID NO: 14818 - DNA, 53 bp, Artificial Sequence; identical to SEQ ID NO: 6905
  Description of Artificial Sequence: Synthetic cashew; inner sequence and 3' sequence

SEQ ID NO: 14819 - DNA, 53 bp, Artificial Sequence; identical to SEQ ID NO: 2960
  Description of Artificial Sequence: Synthetic cashew; inner sequence and 3' sequence

SEQ ID NO: 14820 - DNA, 54 bp, Artificial Sequence; identical to SEQ ID NO: 2652
  Description of Artificial Sequence: Synthetic cashew; inner sequence and 3' sequence

SEQ ID NO: 14821 - DNA, 53 bp, Artificial Sequence
  Description of Artificial Sequence: Synthetic cashew; inner sequence and 3' sequence
gtcattccgcatcctacacgggggcacgtattgactagtacatgaccacttga

SEQ ID NO: 14822 - DNA, 53 bp, Artificial Sequence; identical to SEQ ID NO: 6756
  Description of Artificial Sequence: Synthetic cashew; inner sequence and 3' sequence

SEQ ID NO: 14823 - DNA, 53 bp, Artificial Sequence; identical to SEQ ID NO: 2291
  Description of Artificial Sequence: Synthetic cashew; inner sequence and 3' sequence

SEQ ID NO: 14824 - DNA, 53 bp, Artificial Sequence; identical to SEQ ID NO: 2781
  Description of Artificial Sequence: Synthetic cashew; inner sequence and 3' sequence

SEQ ID NO: 14825 - DNA, 53 bp, Artificial Sequence; identical to SEQ ID NO: 10953
  Description of Artificial Sequence: Synthetic cashew; inner sequence and 3' sequence

SEQ ID NO: 14826 - DNA, 53 bp, Artificial Sequence; identical to SEQ ID NO: 6707
  Description of Artificial Sequence: Synthetic cashew; inner sequence and 3' sequence

SEQ ID NO: 14827 - DNA, 53 bp, Artificial Sequence
  Description of Artificial Sequence: Synthetic cashew; inner sequence and 3' sequence
cagcacgtagccctatcagtggtgcatgcattgactagtacatgaccacttga

SEQ ID NO: 14828 - DNA, 53 bp, Artificial Sequence; identical to SEQ ID NO: 6641
  Description of Artificial Sequence: Synthetic cashew; inner sequence and 3' sequence

SEQ ID NO: 14829 - DNA, 53 bp, Artificial Sequence; identical to SEQ ID NO: 2763
  Description of Artificial Sequence: Synthetic cashew; inner sequence and 3' sequence

SEQ ID NO: 14830 - DNA, 53 bp, Artificial Sequence; identical to SEQ ID NO: 2715
  Description of Artificial Sequence: Synthetic cashew; inner sequence and 3' sequence

SEQ ID NO: 14831 - DNA, 53 bp, Artificial Sequence; identical to SEQ ID NO: 2456
  Description of Artificial Sequence: Synthetic cashew; inner sequence and 3' sequence

SEQ ID NO: 14832 - DNA, 53 bp, Artificial Sequence; identical to SEQ ID NO: 2726
  Description of Artificial Sequence: Synthetic cashew; inner sequence and 3' sequence

SEQ ID NO: 14833 - DNA, 53 bp, Artificial Sequence; identical to SEQ ID NO: 2582
  Description of Artificial Sequence: Synthetic cashew; inner sequence and 3' sequence

SEQ ID NO: 14834 - DNA, 53 bp, Artificial Sequence; identical to SEQ ID NO: 2629
  Description of Artificial Sequence: Synthetic cashew; inner sequence and 3' sequence

SEQ ID NO: 14835 - DNA, 53 bp, Artificial Sequence
  Description of Artificial Sequence: Synthetic cashew; inner sequence and 3' sequence
cgcgccgagtaggcatgtcttctgtgtgcattgactagtacatgaccacttga

SEQ ID NO: 14836 - DNA, 53 bp, Artificial Sequence
  Description of Artificial Sequence: Synthetic cashew; inner sequence and 3' sequence
cgcgacgagtcggcatgtcttctgtgtgcattgactagtacatgaccacttga

SEQ ID NO: 14837 - DNA, 53 bp, Artificial Sequence; identical to SEQ ID NO: 2892
  Description of Artificial Sequence: Synthetic cashew; inner sequence and 3' sequence

SEQ ID NO: 14838 - DNA, 53 bp, Artificial Sequence; identical to SEQ ID NO: 6627
  Description of Artificial Sequence: Synthetic cashew; inner sequence and 3' sequence

SEQ ID NO: 14839 - DNA, 53 bp, Artificial Sequence; identical to SEQ ID NO: 2952
  Description of Artificial Sequence: Synthetic cashew; inner sequence and 3' sequence

SEQ ID NO: 14840 - DNA, 53 bp, Artificial Sequence; identical to SEQ ID NO: 6785
  Description of Artificial Sequence: Synthetic cashew; inner sequence and 3' sequence

SEQ ID NO: 14841 - DNA, 53 bp, Artificial Sequence; identical to SEQ ID NO: 2252
  Description of Artificial Sequence: Synthetic cashew; inner sequence and 3' sequence

SEQ ID NO: 14842 - DNA, 53 bp, Artificial Sequence; identical to SEQ ID NO: 10659
  Description of Artificial Sequence: Synthetic cashew; inner sequence and 3' sequence

SEQ ID NO: 14843 - DNA, 53 bp, Artificial Sequence; identical to SEQ ID NO: 6470
  Description of Artificial Sequence: Synthetic cashew; inner sequence and 3' sequence

SEQ ID NO: 14844 - DNA, 53 bp, Artificial Sequence; identical to SEQ ID NO: 6485
  Description of Artificial Sequence: Synthetic cashew; inner sequence and 3' sequence

SEQ ID NO: 14845 - DNA, 53 bp, Artificial Sequence; identical to SEQ ID NO: 6816
  Description of Artificial Sequence: Synthetic cashew; inner sequence and 3' sequence

SEQ ID NO: 14846 - DNA, 53 bp, Artificial Sequence; identical to SEQ ID NO: 10879
  Description of Artificial Sequence: Synthetic cashew; inner sequence and 3' sequence

SEQ ID NO: 14847 - DNA, 53 bp, Artificial Sequence; identical to SEQ ID NO: 6925
  Description of Artificial Sequence: Synthetic cashew; inner sequence and 3' sequence

SEQ ID NO: 14848 - DNA, 53 bp, Artificial Sequence; identical to SEQ ID NO: 2242
  Description of Artificial Sequence: Synthetic cashew; inner sequence and 3' sequence

SEQ ID NO: 14849 - DNA, 53 bp, Artificial Sequence; identical to SEQ ID NO: 2600
  Description of Artificial Sequence: Synthetic cashew; inner sequence and 3' sequence

SEQ ID NO: 14850 - DNA, 53 bp, Artificial Sequence; identical to SEQ ID NO: 6949
  Description of Artificial Sequence: Synthetic cashew; inner sequence and 3' sequence

SEQ ID NO: 14851 - DNA, 53 bp, Artificial Sequence; identical to SEQ ID NO: 6939
  Description of Artificial Sequence: Synthetic cashew; inner sequence and 3' sequence

SEQ ID NO: 14852 - DNA, 53 bp, Artificial Sequence; identical to SEQ ID NO: 10837
  Description of Artificial Sequence: Synthetic cashew; inner sequence and 3' sequence

SEQ ID NO: 14853 - DNA, 53 bp, Artificial Sequence
  Description of Artificial Sequence: Synthetic cashew; inner sequence and 3' sequence
gtcctgccatcccttcgagtgtgacaggtattgactagtacatgaccacttga

SEQ ID NO: 14854 - DNA, 53 bp, Artificial Sequence; identical to SEQ ID NO: 2937
  Description of Artificial Sequence: Synthetic cashew; inner sequence and 3' sequence

SEQ ID NO: 14855 - DNA, 53 bp, Artificial Sequence; identical to SEQ ID NO: 2169
  Description of Artificial Sequence: Synthetic cashew; inner sequence and 3' sequence

SEQ ID NO: 14856 - DNA, 53 bp, Artificial Sequence; identical to SEQ ID NO: 6969
  Description of Artificial Sequence: Synthetic cashew; inner sequence and 3' sequence

SEQ ID NO: 14857 - DNA, 53 bp, Artificial Sequence; identical to SEQ ID NO: 2559
  Description of Artificial Sequence: Synthetic cashew; inner sequence and 3' sequence

SEQ ID NO: 14858 - DNA, 53 bp, Artificial Sequence; identical to SEQ ID NO: 6638
  Description of Artificial Sequence: Synthetic cashew; inner sequence and 3' sequence

SEQ ID NO: 14859 - DNA, 53 bp, Artificial Sequence; identical to SEQ ID NO: 6857
  Description of Artificial Sequence: Synthetic cashew; inner sequence and 3' sequence

SEQ ID NO: 14860 - DNA, 53 bp, Artificial Sequence; identical to SEQ ID NO: 6708
  Description of Artificial Sequence: Synthetic cashew; inner sequence and 3' sequence

SEQ ID NO: 14861 - DNA, 53 bp, Artificial Sequence; identical to SEQ ID NO: 2339
  Description of Artificial Sequence: Synthetic cashew; inner sequence and 3' sequence

SEQ ID NO: 14862 - DNA, 53 bp, Artificial Sequence; identical to SEQ ID NO: 2835
  Description of Artificial Sequence: Synthetic cashew; inner sequence and 3' sequence

SEQ ID NO: 14863 - DNA, 53 bp, Artificial Sequence; identical to SEQ ID NO: 2521
  Description of Artificial Sequence: Synthetic cashew; inner sequence and 3' sequence

SEQ ID NO: 14864 - DNA, 53 bp, Artificial Sequence
  Description of Artificial Sequence: Synthetic cashew; inner sequence and 3' sequence
cgaccacgcgggagatggacatgtcgcatgttgactagtacatgaccacttga

SEQ ID NO: 14865 - DNA, 53 bp, Artificial Sequence; identical to SEQ ID NO: 10787
  Description of Artificial Sequence: Synthetic cashew; inner sequence and 3' sequence

SEQ ID NO: 14866 - DNA, 53 bp, Artificial Sequence
  Description of Artificial Sequence: Synthetic cashew; inner sequence and 3' sequence
ctgcacgtagccctatcagtggtgcatgcattgactagtacatgaccacttga

SEQ ID NO: 14867 - DNA, 53 bp, Artificial Sequence; identical to SEQ ID NO: 2498
  Description of Artificial Sequence: Synthetic cashew; inner sequence and 3' sequence

SEQ ID NO: 14868 - DNA, 53 bp, Artificial Sequence; identical to SEQ ID NO: 2977
  Description of Artificial Sequence: Synthetic cashew; inner sequence and 3' sequence

SEQ ID NO: 14869 - DNA, 53 bp, Artificial Sequence
  Description of Artificial Sequence: Synthetic cashew; inner sequence and 3' sequence
cgcaccgtcgatacgtcatggacgctgacattgactagtacatgaccacttga

SEQ ID NO: 14870 - DNA, 53 bp, Artificial Sequence; identical to SEQ ID NO: 10676
  Description of Artificial Sequence: Synthetic cashew; inner sequence and 3' sequence

SEQ ID NO: 14871 - DNA, 53 bp, Artificial Sequence; identical to SEQ ID NO: 2650
  Description of Artificial Sequence: Synthetic cashew; inner sequence and 3' sequence

SEQ ID NO: 14872 - DNA, 53 bp, Artificial Sequence
  Description of Artificial Sequence: Synthetic cashew; inner sequence and 3' sequence
ccgaacaaccgaacgtggacgtggctgtccttgactagtacatgaccacttga

SEQ ID NO: 14873 - DNA, 53 bp, Artificial Sequence; identical to SEQ ID NO: 2316
  Description of Artificial Sequence: Synthetic cashew; inner sequence and 3' sequence

SEQ ID NO: 14874 - DNA, 53 bp, Artificial Sequence; identical to SEQ ID NO: 6837
  Description of Artificial Sequence: Synthetic cashew; inner sequence and 3' sequence

SEQ ID NO: 14875 - DNA, 53 bp, Artificial Sequence; identical to SEQ ID NO: 6742
  Description of Artificial Sequence: Synthetic cashew; inner sequence and 3' sequence

SEQ ID NO: 14876 - DNA, 53 bp, Artificial Sequence; identical to SEQ ID NO: 2719
  Description of Artificial Sequence: Synthetic cashew; inner sequence and 3' sequence

SEQ ID NO: 14877 - DNA, 53 bp, Artificial Sequence; identical to SEQ ID NO: 2720
  Description of Artificial Sequence: Synthetic cashew; inner sequence and 3' sequence

SEQ ID NO: 14878 - DNA, 53 bp, Artificial Sequence
  Description of Artificial Sequence: Synthetic cashew; inner sequence and 3' sequence
cgctacgagtaggcatgtcttctgtgtgcattgactagtacatgaccacttga

SEQ ID NO: 14879 - DNA, 53 bp, Artificial Sequence; identical to SEQ ID NO: 6864
  Description of Artificial Sequence: Synthetic cashew; inner sequence and 3' sequence

SEQ ID NO: 14880 - DNA, 53 bp, Artificial Sequence; identical to SEQ ID NO: 2664
  Description of Artificial Sequence: Synthetic cashew; inner sequence and 3' sequence

SEQ ID NO: 14881 - DNA, 53 bp, Artificial Sequence; identical to SEQ ID NO: 2758
  Description of Artificial Sequence: Synthetic cashew; inner sequence and 3' sequence

SEQ ID NO: 14882 - DNA, 54 bp, Artificial Sequence; identical to SEQ ID NO: 6858
  Description of Artificial Sequence: Synthetic cashew; inner sequence and 3' sequence

SEQ ID NO: 14883 - DNA, 53 bp, Artificial Sequence; identical to SEQ ID NO: 2740
  Description of Artificial Sequence: Synthetic cashew; inner sequence and 3' sequence

SEQ ID NO: 14884 - DNA, 53 bp, Artificial Sequence; identical to SEQ ID NO: 2669
  Description of Artificial Sequence: Synthetic cashew; inner sequence and 3' sequence

SEQ ID NO: 14885 - DNA, 51 bp, Artificial Sequence
  Description of Artificial Sequence: Synthetic cashew; inner sequence and 3' sequence
gtgcgaccgaccctatcatgaggccatgttgactagtacatgaccacttga

SEQ ID NO: 14886 - DNA, 53 bp, Artificial Sequence; identical to SEQ ID NO: 2482
  Description of Artificial Sequence: Synthetic cashew; inner sequence and 3' sequence

SEQ ID NO: 14887 - DNA, 53 bp, Artificial Sequence; identical to SEQ ID NO: 10922
  Description of Artificial Sequence: Synthetic cashew; inner sequence and 3' sequence

SEQ ID NO: 14888 - DNA, 53 bp, Artificial Sequence; identical to SEQ ID NO: 10907
  Description of Artificial Sequence: Synthetic cashew; inner sequence and 3' sequence

SEQ ID NO: 14889 - DNA, 53 bp, Artificial Sequence
  Description of Artificial Sequence: Synthetic cashew; inner sequence and 3' sequence
ccgatgcgacacggaggcggtcttgcactgttgactagtacatgaccacttga

SEQ ID NO: 14890 - DNA, 53 bp, Artificial Sequence; identical to SEQ ID NO: 2748
  Description of Artificial Sequence: Synthetic cashew; inner sequence and 3' sequence

SEQ ID NO: 14891 - DNA, 53 bp, Artificial Sequence; identical to SEQ ID NO: 2957
  Description of Artificial Sequence: Synthetic cashew; inner sequence and 3' sequence

SEQ ID NO: 14892 - DNA, 53 bp, Artificial Sequence
  Description of Artificial Sequence: Synthetic cashew; inner sequence and 3' sequence
ccgcacgtagccctatcagtggttcatgcattgactagtacatgaccacttga

SEQ ID NO: 14893 - DNA, 52 bp, Artificial Sequence; identical to SEQ ID NO: 2549
  Description of Artificial Sequence: Synthetic cashew; inner sequence and 3' sequence

SEQ ID NO: 14894 - DNA, 53 bp, Artificial Sequence; identical to SEQ ID NO: 2717
  Description of Artificial Sequence: Synthetic cashew; inner sequence and 3' sequence

SEQ ID NO: 14895 - DNA, 53 bp, Artificial Sequence
  Description of Artificial Sequence: Synthetic cashew; inner sequence and 3' sequence
cgcgacgcaagtgcatggacctcggcatgcttgactagtacatgaccacttga

SEQ ID NO: 14896 - DNA, 48 bp, Artificial Sequence; identical to SEQ ID NO: 2427
  Description of Artificial Sequence: Synthetic cashew; inner sequence and 3' sequence

SEQ ID NO: 14897 - DNA, 53 bp, Artificial Sequence; identical to SEQ ID NO: 2490
  Description of Artificial Sequence: Synthetic cashew; inner sequence and 3' sequence

SEQ ID NO: 14898 - DNA, 53 bp, Artificial Sequence; identical to SEQ ID NO: 10855
  Description of Artificial Sequence: Synthetic cashew; inner sequence and 3' sequence

SEQ ID NO: 14899 - DNA, 53 bp, Artificial Sequence; identical to SEQ ID NO: 2670
  Description of Artificial Sequence: Synthetic cashew; inner sequence and 3' sequence

SEQ ID NO: 14900 - DNA, 53 bp, Artificial Sequence; identical to SEQ ID NO: 2788
  Description of Artificial Sequence: Synthetic cashew; inner sequence and 3' sequence

SEQ ID NO: 14901 - DNA, 53 bp, Artificial Sequence
  Description of Artificial Sequence: Synthetic cashew; inner sequence and 3' sequence
cgcgacgagcaggcatgtcttctgtgtgcattgactagtacatgaccacttga

SEQ ID NO: 14902 - DNA, 53 bp, Artificial Sequence; identical to SEQ ID NO: 2931
  Description of Artificial Sequence: Synthetic cashew; inner sequence and 3' sequence

SEQ ID NO: 14903 - DNA, 53 bp, Artificial Sequence; identical to SEQ ID NO: 6571
  Description of Artificial Sequence: Synthetic cashew; inner sequence and 3' sequence

SEQ ID NO: 14904 - DNA, 53 bp, Artificial Sequence; identical to SEQ ID NO: 6872
  Description of Artificial Sequence: Synthetic cashew; inner sequence and 3' sequence

SEQ ID NO: 14905 - DNA, 53 bp, Artificial Sequence; identical to SEQ ID NO: 6976
  Description of Artificial Sequence: Synthetic cashew; inner sequence and 3' sequence

SEQ ID NO: 14906 - DNA, 53 bp, Artificial Sequence; identical to SEQ ID NO: 2996
  Description of Artificial Sequence: Synthetic cashew; inner sequence and 3' sequence

SEQ ID NO: 14907 - DNA, 53 bp, Artificial Sequence; identical to SEQ ID NO: 2705
  Description of Artificial Sequence: Synthetic cashew; inner sequence and 3' sequence

SEQ ID NO: 14908 - DNA, 53 bp, Artificial Sequence; identical to SEQ ID NO: 2434
  Description of Artificial Sequence: Synthetic cashew; inner sequence and 3' sequence

SEQ ID NO: 14909 - DNA, 53 bp, Artificial Sequence; identical to SEQ ID NO: 10792
  Description of Artificial Sequence: Synthetic cashew; inner sequence and 3' sequence

SEQ ID NO: 14910 - DNA, 53 bp, Artificial Sequence; identical to SEQ ID NO: 6874
  Description of Artificial Sequence: Synthetic cashew; inner sequence and 3' sequence

SEQ ID NO: 14911 - DNA, 53 bp, Artificial Sequence; identical to SEQ ID NO: 2782
  Description of Artificial Sequence: Synthetic cashew; inner sequence and 3' sequence

SEQ ID NO: 14912 - DNA, 53 bp, Artificial Sequence
  Description of Artificial Sequence: Synthetic cashew; inner sequence and 3' sequence
agcgtgcggcacggtccacttcgctgcatgttgactagtacatgaccacttga

SEQ ID NO: 14913 - DNA, 53 bp, Artificial Sequence; identical to SEQ ID NO: 6634
  Description of Artificial Sequence: Synthetic cashew; inner sequence and 3' sequence

SEQ ID NO: 14914 - DNA, 53 bp, Artificial Sequence
  Description of Artificial Sequence: Synthetic cashew; inner sequence and 3' sequence
gcgtcatgggtacgtcgctgggtgtggacattgactagtacatgaccacttga

SEQ ID NO: 14915 - DNA, 53 bp, Artificial Sequence; identical to SEQ ID NO: 10826
  Description of Artificial Sequence: Synthetic cashew; inner sequence and 3' sequence

SEQ ID NO: 14916 - DNA, 53 bp, Artificial Sequence; identical to SEQ ID NO: 6710
  Description of Artificial Sequence: Synthetic cashew; inner sequence and 3' sequence

SEQ ID NO: 14917 - DNA, 53 bp, Artificial Sequence; identical to SEQ ID NO: 2580
  Description of Artificial Sequence: Synthetic cashew; inner sequence and 3' sequence

SEQ ID NO: 14918 - DNA, 52 bp, Artificial Sequence
  Description of Artificial Sequence: Synthetic cashew; inner sequence and 3' sequence
cgtgctacgaggacctggaccggtgcgtcttgactagtacatgaccacttga

SEQ ID NO: 14919 - DNA, 53 bp, Artificial Sequence; identical to SEQ ID NO: 2444
  Description of Artificial Sequence: Synthetic cashew; inner sequence and 3' sequence

SEQ ID NO: 14920 - DNA, 53 bp, Artificial Sequence; identical to SEQ ID NO: 10988
  Description of Artificial Sequence: Synthetic cashew; inner sequence and 3' sequence

SEQ ID NO: 14921 - DNA, 53 bp, Artificial Sequence; identical to SEQ ID NO: 6930
  Description of Artificial Sequence: Synthetic cashew; inner sequence and 3' sequence

SEQ ID NO: 14922 - DNA, 53 bp, Artificial Sequence
  Description of Artificial Sequence: Synthetic cashew; inner sequence and 3' sequence
gtcatgcacgaacactatcatgacggcatgttgactagtacatgaccacttga

SEQ ID NO: 14923 - DNA, 53 bp, Artificial Sequence; identical to SEQ ID NO: 2962
  Description of Artificial Sequence: Synthetic cashew; inner sequence and 3' sequence

SEQ ID NO: 14924 - DNA, 52 bp, Artificial Sequence; identical to SEQ ID NO: 6763
  Description of Artificial Sequence: Synthetic cashew; inner sequence and 3' sequence

SEQ ID NO: 14925 - DNA, 53 bp, Artificial Sequence; identical to SEQ ID NO: 6933
  Description of Artificial Sequence: Synthetic cashew; inner sequence and 3' sequence

SEQ ID NO: 14926 - DNA, 53 bp, Artificial Sequence; identical to SEQ ID NO: 6807
  Description of Artificial Sequence: Synthetic cashew; inner sequence and 3' sequence

SEQ ID NO: 14927 - DNA, 53 bp, Artificial Sequence; identical to SEQ ID NO: 2842
  Description of Artificial Sequence: Synthetic cashew; inner sequence and 3' sequence

SEQ ID NO: 14928 - DNA, 53 bp, Artificial Sequence; identical to SEQ ID NO: 6880
  Description of Artificial Sequence: Synthetic cashew; inner sequence and 3' sequence

SEQ ID NO: 14929 - DNA, 53 bp, Artificial Sequence; identical to SEQ ID NO: 2526
  Description of Artificial Sequence: Synthetic cashew; inner sequence and 3' sequence

SEQ ID NO: 14930 - DNA, 53 bp, Artificial Sequence; identical to SEQ ID NO: 2823
  Description of Artificial Sequence: Synthetic cashew; inner sequence and 3' sequence

SEQ ID NO: 14931 - DNA, 53 bp, Artificial Sequence
  Description of Artificial Sequence: Synthetic cashew; inner sequence and 3' sequence
gtgctgcactgccctacacgtgggaatggattgactagtacatgaccacttga

SEQ ID NO: 14932 - DNA, 53 bp, Artificial Sequence
  Description of Artificial Sequence: Synthetic cashew; inner sequence and 3' sequence
cgcaccgagagtgatcgttgttcgcagtcattgactagtacatgaccacttga

SEQ ID NO: 14933 - DNA, 53 bp, Artificial Sequence
  Description of Artificial Sequence: Synthetic cashew; inner sequence and 3' sequence
ggcatgcgatggatgtgggccagtacgcgcttgactagtacatgaccacttga

SEQ ID NO: 14934 - DNA, 53 bp, Artificial Sequence; identical to SEQ ID NO: 2778
  Description of Artificial Sequence: Synthetic cashew; inner sequence and 3' sequence

SEQ ID NO: 14935 - DNA, 53 bp, Artificial Sequence; identical to SEQ ID NO: 2555
  Description of Artificial Sequence: Synthetic cashew; inner sequence and 3' sequence

SEQ ID NO: 14936 - DNA, 53 bp, Artificial Sequence
  Description of Artificial Sequence: Synthetic cashew; inner sequence and 3' sequence
gcacgactcgcaccttatcatgaggccatgttgactagtacatgaccacttga

SEQ ID NO: 14937 - DNA, 53 bp, Artificial Sequence; identical to SEQ ID NO: 2408
  Description of Artificial Sequence: Synthetic cashew; inner sequence and 3' sequence

SEQ ID NO: 14938 - DNA, 53 bp, Artificial Sequence; identical to SEQ ID NO: 6987
  Description of Artificial Sequence: Synthetic cashew; inner sequence and 3' sequence

SEQ ID NO: 14939 - DNA, 53 bp, Artificial Sequence
  Description of Artificial Sequence: Synthetic cashew; inner sequence and 3' sequence
gcccgaacgaccgatcgagtggcgcatggattgactagtacatgaccacttga

SEQ ID NO: 14940 - DNA, 53 bp, Artificial Sequence; identical to SEQ ID NO: 2542
  Description of Artificial Sequence: Synthetic cashew; inner sequence and 3' sequence

SEQ ID NO: 14941 - DNA, 53 bp, Artificial Sequence; identical to SEQ ID NO: 2421
  Description of Artificial Sequence: Synthetic cashew; inner sequence and 3' sequence

SEQ ID NO: 14942 - DNA, 52 bp, Artificial Sequence; identical to SEQ ID NO: 6968
  Description of Artificial Sequence: Synthetic cashew; inner sequence and 3' sequence

SEQ ID NO: 14943 - DNA, 53 bp, Artificial Sequence; identical to SEQ ID NO: 2913
  Description of Artificial Sequence: Synthetic cashew; inner sequence and 3' sequence

SEQ ID NO: 14944 - DNA, 53 bp, Artificial Sequence
  Description of Artificial Sequence: Synthetic cashew; inner sequence and 3' sequence
ggcatgcacgcccctacacgtgggtatggattgactagtacatgaccacttga

SEQ ID NO: 14945 - DNA, 53 bp, Artificial Sequence
  Description of Artificial Sequence: Synthetic cashew; inner sequence and 3' sequence
ctgtagcgacatcaagcggtggtgtgcgtgttgactagtacatgaccacttga

SEQ ID NO: 14946 - DNA, 53 bp, Artificial Sequence; identical to SEQ ID NO: 2561
  Description of Artificial Sequence: Synthetic cashew; inner sequence and 3' sequence

SEQ ID NO: 14947 - DNA, 53 bp, Artificial Sequence; identical to SEQ ID NO: 2479
  Description of Artificial Sequence: Synthetic cashew; inner sequence and 3' sequence

SEQ ID NO: 14948 - DNA, 53 bp, Artificial Sequence; identical to SEQ ID NO: 2983
  Description of Artificial Sequence: Synthetic cashew; inner sequence and 3' sequence

SEQ ID NO: 14949 - DNA, 53 bp, Artificial Sequence; identical to SEQ ID NO: 10869
  Description of Artificial Sequence: Synthetic cashew; inner sequence and 3' sequence

SEQ ID NO: 14950 - DNA, 53 bp, Artificial Sequence; identical to SEQ ID NO: 10586
  Description of Artificial Sequence: Synthetic cashew; inner sequence and 3' sequence

SEQ ID NO: 14951 - DNA, 53 bp, Artificial Sequence; identical to SEQ ID NO: 2906
  Description of Artificial Sequence: Synthetic cashew; inner sequence and 3' sequence

SEQ ID NO: 14952 - DNA, 53 bp, Artificial Sequence; identical to SEQ ID NO: 2263
  Description of Artificial Sequence: Synthetic cashew; inner sequence and 3' sequence

SEQ ID NO: 14953 - DNA, 53 bp, Artificial Sequence
  Description of Artificial Sequence: Synthetic cashew; inner sequence and 3' sequence
gtcatgcacgaacactatcacggcggcatgttgactagtacatgaccacttga

SEQ ID NO: 14954 - DNA, 53 bp, Artificial Sequence; identical to SEQ ID NO: 2945
  Description of Artificial Sequence: Synthetic cashew; inner sequence and 3' sequence

SEQ ID NO: 14955 - DNA, 53 bp, Artificial Sequence; identical to SEQ ID NO: 10985
  Description of Artificial Sequence: Synthetic cashew; inner sequence and 3' sequence

SEQ ID NO: 14956 - DNA, 53 bp, Artificial Sequence; identical to SEQ ID NO: 2706
  Description of Artificial Sequence: Synthetic cashew; inner sequence and 3' sequence

SEQ ID NO: 14957 - DNA, 53 bp, Artificial Sequence; identical to SEQ ID NO: 2571
  Description of Artificial Sequence: Synthetic cashew; inner sequence and 3' sequence

SEQ ID NO: 14958 - DNA, 53 bp, Artificial Sequence
  Description of Artificial Sequence: Synthetic cashew; inner sequence and 3' sequence
ccgcacgtagccctatcagtggtgcatgtattgactagtacatgaccacttga

SEQ ID NO: 14959 - DNA, 53 bp, Artificial Sequence
  Description of Artificial Sequence: Synthetic cashew; inner sequence and 3' sequence
gcacgtcagcacgtcctctctggcgtggtattgactagtacatgaccacttga

SEQ ID NO: 14960 - DNA, 53 bp, Artificial Sequence; identical to SEQ ID NO: 2598
  Description of Artificial Sequence: Synthetic cashew; inner sequence and 3' sequence

SEQ ID NO: 14961 - DNA, 53 bp, Artificial Sequence; identical to SEQ ID NO: 10804
  Description of Artificial Sequence: Synthetic cashew; inner sequence and 3' sequence

SEQ ID NO: 14962 - DNA, 53 bp, Artificial Sequence; identical to SEQ ID NO: 2863
  Description of Artificial Sequence: Synthetic cashew; inner sequence and 3' sequence

SEQ ID NO: 14963 - DNA, 53 bp, Artificial Sequence; identical to SEQ ID NO: 10770
  Description of Artificial Sequence: Synthetic cashew; inner sequence and 3' sequence

SEQ ID NO: 14964 - DNA, 53 bp, Artificial Sequence; identical to SEQ ID NO: 10892
  Description of Artificial Sequence: Synthetic cashew; inner sequence and 3' sequence

SEQ ID NO: 14965 - DNA, 53 bp, Artificial Sequence; identical to SEQ ID NO: 6810
  Description of Artificial Sequence: Synthetic cashew; inner sequence and 3' sequence

SEQ ID NO: 14966 - DNA, 53 bp, Artificial Sequence; identical to SEQ ID NO: 6881
  Description of Artificial Sequence: Synthetic cashew; inner sequence and 3' sequence

SEQ ID NO: 14967 - DNA, 53 bp, Artificial Sequence; identical to SEQ ID NO: 2751
  Description of Artificial Sequence: Synthetic cashew; inner sequence and 3' sequence

SEQ ID NO: 14968 - DNA, 53 bp, Artificial Sequence; identical to SEQ ID NO: 6967
  Description of Artificial Sequence: Synthetic cashew; inner sequence and 3' sequence

SEQ ID NO: 14969 - DNA, 53 bp, Artificial Sequence; identical to SEQ ID NO: 3001
  Description of Artificial Sequence: Synthetic cashew; inner sequence and 3' sequence

SEQ ID NO: 14970 - DNA, 53 bp, Artificial Sequence; identical to SEQ ID NO: 6667
  Description of Artificial Sequence: Synthetic cashew; inner sequence and 3' sequence

SEQ ID NO: 14971 - DNA, 53 bp, Artificial Sequence
  Description of Artificial Sequence: Synthetic cashew; inner sequence and 3' sequence
ggccaatgcgccccttcatgttgtcgtggattgactagtacatgaccacttga

SEQ ID NO: 14972 - DNA, 53 bp, Artificial Sequence; identical to SEQ ID NO: 6943
  Description of Artificial Sequence: Synthetic cashew; inner sequence and 3' sequence

SEQ ID NO: 14973 - DNA, 53 bp, Artificial Sequence; identical to SEQ ID NO: 2644
  Description of Artificial Sequence: Synthetic cashew; inner sequence and 3' sequence

SEQ ID NO: 14974 - DNA, 53 bp, Artificial Sequence; identical to SEQ ID NO: 6706
  Description of Artificial Sequence: Synthetic cashew; inner sequence and 3' sequence

SEQ ID NO: 14975 - DNA, 53 bp, Artificial Sequence; identical to SEQ ID NO: 6621
  Description of Artificial Sequence: Synthetic cashew; inner sequence and 3' sequence

SEQ ID NO: 14976 - DNA, 53 bp, Artificial Sequence; identical to SEQ ID NO: 6867
  Description of Artificial Sequence: Synthetic cashew; inner sequence and 3' sequence

SEQ ID NO: 14977 - DNA, 53 bp, Artificial Sequence; identical to SEQ ID NO: 2472
  Description of Artificial Sequence: Synthetic cashew; inner sequence and 3' sequence

SEQ ID NO: 14978 - DNA, 53 bp, Artificial Sequence
  Description of Artificial Sequence: Synthetic cashew; inner sequence and 3' sequence
ggccgagctgaccgtaaaggcaggcgtgtattgactagtacatgaccacttga

SEQ ID NO: 14979 - DNA, 53 bp, Artificial Sequence; identical to SEQ ID NO: 6719
  Description of Artificial Sequence: Synthetic cashew; inner sequence and 3' sequence

SEQ ID NO: 14980 - DNA, 52 bp, Artificial Sequence; identical to SEQ ID NO: 2879
  Description of Artificial Sequence: Synthetic cashew; inner sequence and 3' sequence

SEQ ID NO: 14981 - DNA, 52 bp, Artificial Sequence; identical to SEQ ID NO: 2648
  Description of Artificial Sequence: Synthetic cashew; inner sequence and 3' sequence

SEQ ID NO: 14982 - DNA, 53 bp, Artificial Sequence; identical to SEQ ID NO: 2601
  Description of Artificial Sequence: Synthetic cashew; inner sequence and 3' sequence

SEQ ID NO: 14983 - DNA, 53 bp, Artificial Sequence; identical to SEQ ID NO: 6469
  Description of Artificial Sequence: Synthetic cashew; inner sequence and 3' sequence

SEQ ID NO: 14984 - DNA, 53 bp, Artificial Sequence; identical to SEQ ID NO: 10962
  Description of Artificial Sequence: Synthetic cashew; inner sequence and 3' sequence

SEQ ID NO: 14985 - DNA, 53 bp, Artificial Sequence
  Description of Artificial Sequence: Synthetic cashew; inner sequence and 3' sequence
gcacgactctcaccctatcatgaggccatgttgactagtacatgaccacttga

SEQ ID NO: 14986 - DNA, 53 bp, Artificial Sequence
  Description of Artificial Sequence: Synthetic cashew; inner sequence and 3' sequence
gtacacagcgcaccctatcatgaggccatgttgactagtacatgaccacttga

SEQ ID NO: 14987 - DNA, 53 bp, Artificial Sequence; identical to SEQ ID NO: 6631
  Description of Artificial Sequence: Synthetic cashew; inner sequence and 3' sequence

SEQ ID NO: 14988 - DNA, 53 bp, Artificial Sequence; identical to SEQ ID NO: 2497
  Description of Artificial Sequence: Synthetic cashew; inner sequence and 3' sequence

SEQ ID NO: 14989 - DNA, 53 bp, Artificial Sequence; identical to SEQ ID NO: 6743
  Description of Artificial Sequence: Synthetic cashew; inner sequence and 3' sequence

SEQ ID NO: 14990 - DNA, 53 bp, Artificial Sequence; identical to SEQ ID NO: 6381
  Description of Artificial Sequence: Synthetic cashew; inner sequence and 3' sequence

SEQ ID NO: 14991 - DNA, 53 bp, Artificial Sequence; identical to SEQ ID NO: 2688
  Description of Artificial Sequence: Synthetic cashew; inner sequence and 3' sequence

SEQ ID NO: 14992 - DNA, 53 bp, Artificial Sequence
  Description of Artificial Sequence: Synthetic cashew; inner sequence and 3' sequence
ccatcgcgtcactatcatgcgtgtcacgtattgactagtacatgaccacttga

SEQ ID NO: 14993 - DNA, 53 bp, Artificial Sequence; identical to SEQ ID NO: 6591
  Description of Artificial Sequence: Synthetic cashew; inner sequence and 3' sequence

SEQ ID NO: 14994 - DNA, 53 bp, Artificial Sequence; identical to SEQ ID NO: 2677
  Description of Artificial Sequence: Synthetic cashew; inner sequence and 3' sequence

SEQ ID NO: 14995 - DNA, 53 bp, Artificial Sequence; identical to SEQ ID NO: 2307
  Description of Artificial Sequence: Synthetic cashew; inner sequence and 3' sequence

SEQ ID NO: 14996 - DNA, 53 bp, Artificial Sequence
  Description of Artificial Sequence: Synthetic cashew; inner sequence and 3' sequence
cgcaccctcgatacgtcatgcacgctgacattgactagtacatgaccacttga

SEQ ID NO: 14997 - DNA, 53 bp, Artificial Sequence
  Description of Artificial Sequence: Synthetic cashew; inner sequence and 3' sequence
ggccacagcgtacctcaacgtggacgcgcattgactagtacatgaccacttga

SEQ ID NO: 14998 - DNA, 53 bp, Artificial Sequence
  Description of Artificial Sequence: Synthetic cashew; inner sequence and 3' sequence
gtacgcaaacggaccgatcggtggtgcgtattgactagtacatgaccacttga

SEQ ID NO: 14999 - DNA, 53 bp, Artificial Sequence
  Description of Artificial Sequence: Synthetic cashew; inner sequence and 3' sequence
gcgaccgcgacatacgatctgctctgcgtcttgactagtacatgaccacttga

SEQ ID NO: 15000 - DNA, 53 bp, Artificial Sequence; identical to SEQ ID NO: 2547
  Description of Artificial Sequence: Synthetic cashew; inner sequence and 3' sequence

SEQ ID NO: 15001 - DNA, 53 bp, Artificial Sequence; identical to SEQ ID NO: 2335
  Description of Artificial Sequence: Synthetic cashew; inner sequence and 3' sequence

SEQ ID NO: 15002 - DNA, 53 bp, Artificial Sequence
  Description of Artificial Sequence: Synthetic cashew; inner sequence and 3' sequence
gtcatgccatcccttcgagagtgacaggtattgactagtacatgaccacttga

SEQ ID NO: 15003 - DNA, 76 bp, Artificial Sequence; identical to SEQ ID NO: 3004
  Description of Artificial Sequence: Synthetic cashew; 5' sequence + inner sequence + 3' sequence

SEQ ID NO: 15004 - DNA, 76 bp, Artificial Sequence; identical to SEQ ID NO: 3003
  Description of Artificial Sequence: Synthetic cashew; 5' sequence + inner sequence + 3' sequence

SEQ ID NO: 15005 - DNA, 76 bp, Artificial Sequence; identical to SEQ ID NO: 3008
  Description of Artificial Sequence: Synthetic cashew; 5' sequence + inner sequence + 3' sequence

SEQ ID NO: 15006 - DNA, 76 bp, Artificial Sequence; identical to SEQ ID NO: 3006
  Description of Artificial Sequence: Synthetic cashew; 5' sequence + inner sequence + 3' sequence

SEQ ID NO: 15007 - DNA, 76 bp, Artificial Sequence; identical to SEQ ID NO: 3007
  Description of Artificial Sequence: Synthetic cashew; 5' sequence + inner sequence + 3' sequence

SEQ ID NO: 15008 - DNA, 76 bp, Artificial Sequence; identical to SEQ ID NO: 3005
  Description of Artificial Sequence: Synthetic cashew; 5' sequence + inner sequence + 3' sequence

SEQ ID NO: 15009 - DNA, 76 bp, Artificial Sequence; identical to SEQ ID NO: 3009
  Description of Artificial Sequence: Synthetic cashew; 5' sequence + inner sequence + 3' sequence

SEQ ID NO: 15010 - DNA, 76 bp, Artificial Sequence; identical to SEQ ID NO: 3012
  Description of Artificial Sequence: Synthetic cashew; 5' sequence + inner sequence + 3' sequence

SEQ ID NO: 15011 - DNA, 76 bp, Artificial Sequence; identical to SEQ ID NO: 3060
  Description of Artificial Sequence: Synthetic cashew; 5' sequence + inner sequence + 3' sequence

SEQ ID NO: 15012 - DNA, 76 bp, Artificial Sequence; identical to SEQ ID NO: 3010
  Description of Artificial Sequence: Synthetic cashew; 5' sequence + inner sequence + 3' sequence

SEQ ID NO: 15013 - DNA, 76 bp, Artificial Sequence; identical to SEQ ID NO: 3016
  Description of Artificial Sequence: Synthetic cashew; 5' sequence + inner sequence + 3' sequence

SEQ ID NO: 15014 - DNA, 76 bp, Artificial Sequence; identical to SEQ ID NO: 3023
  Description of Artificial Sequence: Synthetic cashew; 5' sequence + inner sequence + 3' sequence

SEQ ID NO: 15015 - DNA, 76 bp, Artificial Sequence; identical to SEQ ID NO: 3011
  Description of Artificial Sequence: Synthetic cashew; 5' sequence + inner sequence + 3' sequence

SEQ ID NO: 15016 - DNA, 76 bp, Artificial Sequence; identical to SEQ ID NO: 3014
  Description of Artificial Sequence: Synthetic cashew; 5' sequence + inner sequence + 3' sequence

SEQ ID NO: 15017 - DNA, 76 bp, Artificial Sequence; identical to SEQ ID NO: 3018
  Description of Artificial Sequence: Synthetic cashew; 5' sequence + inner sequence + 3' sequence

SEQ ID NO: 15018 - DNA, 75 bp, Artificial Sequence; identical to SEQ ID NO: 3193
  Description of Artificial Sequence: Synthetic cashew; 5' sequence + inner sequence + 3' sequence

SEQ ID NO: 15019 - DNA, 76 bp, Artificial Sequence; identical to SEQ ID NO: 3037
  Description of Artificial Sequence: Synthetic cashew; 5' sequence + inner sequence + 3' sequence

SEQ ID NO: 15020 - DNA, 76 bp, Artificial Sequence; identical to SEQ ID NO: 3013
  Description of Artificial Sequence: Synthetic cashew; 5' sequence + inner sequence + 3' sequence

SEQ ID NO: 15021 - DNA, 76 bp, Artificial Sequence; identical to SEQ ID NO: 3017
  Description of Artificial Sequence: Synthetic cashew; 5' sequence + inner sequence + 3' sequence

SEQ ID NO: 15022 - DNA, 76 bp, Artificial Sequence; identical to SEQ ID NO: 3028
  Description of Artificial Sequence: Synthetic cashew; 5' sequence + inner sequence + 3' sequence

SEQ ID NO: 15023 - DNA, 76 bp, Artificial Sequence; identical to SEQ ID NO: 3022
  Description of Artificial Sequence: Synthetic cashew; 5' sequence + inner sequence + 3' sequence

SEQ ID NO: 15024 - DNA, 76 bp, Artificial Sequence; identical to SEQ ID NO: 3020
  Description of Artificial Sequence: Synthetic cashew; 5' sequence + inner sequence + 3' sequence

SEQ ID NO: 15025 - DNA, 76 bp, Artificial Sequence; identical to SEQ ID NO: 3030
  Description of Artificial Sequence: Synthetic cashew; 5' sequence + inner sequence + 3' sequence

SEQ ID NO: 15026 - DNA, 76 bp, Artificial Sequence; identical to SEQ ID NO: 3045
  Description of Artificial Sequence: Synthetic cashew; 5' sequence + inner sequence + 3' sequence

SEQ ID NO: 15027 - DNA, 76 bp, Artificial Sequence; identical to SEQ ID NO: 3034
  Description of Artificial Sequence: Synthetic cashew; 5' sequence + inner sequence + 3' sequence

SEQ ID NO: 15028 - DNA, 76 bp, Artificial Sequence; identical to SEQ ID NO: 3015
  Description of Artificial Sequence: Synthetic cashew; 5' sequence + inner sequence + 3' sequence

SEQ ID NO: 15029 - DNA, 76 bp, Artificial Sequence; identical to SEQ ID NO: 3046
  Description of Artificial Sequence: Synthetic cashew; 5' sequence + inner sequence + 3' sequence

SEQ ID NO: 15030 - DNA, 76 bp, Artificial Sequence; identical to SEQ ID NO: 3049
  Description of Artificial Sequence: Synthetic cashew; 5' sequence + inner sequence + 3' sequence

SEQ ID NO: 15031 - DNA, 76 bp, Artificial Sequence; identical to SEQ ID NO: 3021
  Description of Artificial Sequence: Synthetic cashew; 5' sequence + inner sequence + 3' sequence

SEQ ID NO: 15032 - DNA, 76 bp, Artificial Sequence; identical to SEQ ID NO: 3033
  Description of Artificial Sequence: Synthetic cashew; 5' sequence + inner sequence + 3' sequence

SEQ ID NO: 15033 - DNA, 76 bp, Artificial Sequence; identical to SEQ ID NO: 3032
  Description of Artificial Sequence: Synthetic cashew; 5' sequence + inner sequence + 3' sequence

SEQ ID NO: 15034 - DNA, 76 bp, Artificial Sequence; identical to SEQ ID NO: 3055
  Description of Artificial Sequence: Synthetic cashew; 5' sequence + inner sequence + 3' sequence

SEQ ID NO: 15035 - DNA, 76 bp, Artificial Sequence; identical to SEQ ID NO: 3029
  Description of Artificial Sequence: Synthetic cashew; 5' sequence + inner sequence + 3' sequence

SEQ ID NO: 15036 - DNA, 76 bp, Artificial Sequence; identical to SEQ ID NO: 3041
  Description of Artificial Sequence: Synthetic cashew; 5' sequence + inner sequence + 3' sequence

SEQ ID NO: 15037 - DNA, 76 bp, Artificial Sequence; identical to SEQ ID NO: 3024
  Description of Artificial Sequence: Synthetic cashew; 5' sequence + inner sequence + 3' sequence

SEQ ID NO: 15038 - DNA, 75 bp, Artificial Sequence; identical to SEQ ID NO: 3070
  Description of Artificial Sequence: Synthetic cashew; 5' sequence + inner sequence + 3' sequence

SEQ ID NO: 15039 - DNA, 76 bp, Artificial Sequence; identical to SEQ ID NO: 3038
  Description of Artificial Sequence: Synthetic cashew; 5' sequence + inner sequence + 3' sequence

SEQ ID NO: 15040 - DNA, 76 bp, Artificial Sequence; identical to SEQ ID NO: 3040
  Description of Artificial Sequence: Synthetic cashew; 5' sequence + inner sequence + 3' sequence

SEQ ID NO: 15041 - DNA, 76 bp, Artificial Sequence; identical to SEQ ID NO: 3131
  Description of Artificial Sequence: Synthetic cashew; 5' sequence + inner sequence + 3' sequence

SEQ ID NO: 15042 - DNA, 76 bp, Artificial Sequence; identical to SEQ ID NO: 3077
  Description of Artificial Sequence: Synthetic cashew; 5' sequence + inner sequence + 3' sequence

SEQ ID NO: 15043 - DNA, 76 bp, Artificial Sequence; identical to SEQ ID NO: 3044
  Description of Artificial Sequence: Synthetic cashew; 5' sequence + inner sequence + 3' sequence

SEQ ID NO: 15044 - DNA, 76 bp, Artificial Sequence; identical to SEQ ID NO: 3019
  Description of Artificial Sequence: Synthetic cashew; 5' sequence + inner sequence + 3' sequence

SEQ ID NO: 15045 - DNA, 76 bp, Artificial Sequence; identical to SEQ ID NO: 3039
  Description of Artificial Sequence: Synthetic cashew; 5' sequence + inner sequence + 3' sequence

SEQ ID NO: 15046 - DNA, 76 bp, Artificial Sequence; identical to SEQ ID NO: 3088
  Description of Artificial Sequence: Synthetic cashew; 5' sequence + inner sequence + 3' sequence

SEQ ID NO: 15047 - DNA, 76 bp, Artificial Sequence; identical to SEQ ID NO: 3054
  Description of Artificial Sequence: Synthetic cashew; 5' sequence + inner sequence + 3' sequence

SEQ ID NO: 15048 - DNA, 76 bp, Artificial Sequence; identical to SEQ ID NO: 3048
  Description of Artificial Sequence: Synthetic cashew; 5' sequence + inner sequence + 3' sequence

SEQ ID NO: 15049 - DNA, 76 bp, Artificial Sequence; identical to SEQ ID NO: 3082
  Description of Artificial Sequence: Synthetic cashew; 5' sequence + inner sequence + 3' sequence

SEQ ID NO: 15050 - DNA, 76 bp, Artificial Sequence; identical to SEQ ID NO: 3074
  Description of Artificial Sequence: Synthetic cashew; 5' sequence + inner sequence + 3' sequence

SEQ ID NO: 15051 - DNA, 76 bp, Artificial Sequence; identical to SEQ ID NO: 3035
  Description of Artificial Sequence: Synthetic cashew; 5' sequence + inner sequence + 3' sequence

SEQ ID NO: 15052 - DNA, 76 bp, Artificial Sequence; identical to SEQ ID NO: 3064
  Description of Artificial Sequence: Synthetic cashew; 5' sequence + inner sequence + 3' sequence

SEQ ID NO: 15053 - DNA, 76 bp, Artificial Sequence; identical to SEQ ID NO: 3050
  Description of Artificial Sequence: Synthetic cashew; 5' sequence + inner sequence + 3' sequence

SEQ ID NO: 15054 - DNA, 76 bp, Artificial Sequence; identical to SEQ ID NO: 3066
  Description of Artificial Sequence: Synthetic cashew; 5' sequence + inner sequence + 3' sequence

SEQ ID NO: 15055 - DNA, 76 bp, Artificial Sequence; identical to SEQ ID NO: 3061
  Description of Artificial Sequence: Synthetic cashew; 5' sequence + inner sequence + 3' sequence

SEQ ID NO: 15056 - DNA, 76 bp, Artificial Sequence; identical to SEQ ID NO: 3031
  Description of Artificial Sequence: Synthetic cashew; 5' sequence + inner sequence + 3' sequence

SEQ ID NO: 15057 - DNA, 76 bp, Artificial Sequence; identical to SEQ ID NO: 3052
  Description of Artificial Sequence: Synthetic cashew; 5' sequence + inner sequence + 3' sequence

SEQ ID NO: 15058 - DNA, 76 bp, Artificial Sequence; identical to SEQ ID NO: 3117
  Description of Artificial Sequence: Synthetic cashew; 5' sequence + inner sequence + 3' sequence

SEQ ID NO: 15059 - DNA, 76 bp, Artificial Sequence; identical to SEQ ID NO: 3043
  Description of Artificial Sequence: Synthetic cashew; 5' sequence + inner sequence + 3' sequence

SEQ ID NO: 15060 - DNA, 76 bp, Artificial Sequence; identical to SEQ ID NO: 3053
  Description of Artificial Sequence: Synthetic cashew; 5' sequence + inner sequence + 3' sequence

SEQ ID NO: 15061 - DNA, 76 bp, Artificial Sequence; identical to SEQ ID NO: 3051
  Description of Artificial Sequence: Synthetic cashew; 5' sequence + inner sequence + 3' sequence

SEQ ID NO: 15062 - DNA, 76 bp, Artificial Sequence; identical to SEQ ID NO: 3076
  Description of Artificial Sequence: Synthetic cashew; 5' sequence + inner sequence + 3' sequence

SEQ ID NO: 15063 - DNA, 76 bp, Artificial Sequence; identical to SEQ ID NO: 3063
  Description of Artificial Sequence: Synthetic cashew; 5' sequence + inner sequence + 3' sequence

SEQ ID NO: 15064 - DNA, 76 bp, Artificial Sequence; identical to SEQ ID NO: 3133
  Description of Artificial Sequence: Synthetic cashew; 5' sequence + inner sequence + 3' sequence

SEQ ID NO: 15065 - DNA, 76 bp, Artificial Sequence; identical to SEQ ID NO: 3058
  Description of Artificial Sequence: Synthetic cashew; 5' sequence + inner sequence + 3' sequence

SEQ ID NO: 15066 - DNA, 76 bp, Artificial Sequence; identical to SEQ ID NO: 3112
  Description of Artificial Sequence: Synthetic cashew; 5' sequence + inner sequence + 3' sequence

SEQ ID NO: 15067 - DNA, 76 bp, Artificial Sequence; identical to SEQ ID NO: 3042
  Description of Artificial Sequence: Synthetic cashew; 5' sequence + inner sequence + 3' sequence

SEQ ID NO: 15068 - DNA, 76 bp, Artificial Sequence; identical to SEQ ID NO: 3129
  Description of Artificial Sequence: Synthetic cashew; 5' sequence + inner sequence + 3' sequence

SEQ ID NO: 15069 - DNA, 76 bp, Artificial Sequence; identical to SEQ ID NO: 3081
  Description of Artificial Sequence: Synthetic cashew; 5' sequence + inner sequence + 3' sequence

SEQ ID NO: 15070 - DNA, 76 bp, Artificial Sequence; identical to SEQ ID NO: 3080
  Description of Artificial Sequence: Synthetic cashew; 5' sequence + inner sequence + 3' sequence

SEQ ID NO: 15071 - DNA, 76 bp, Artificial Sequence; identical to SEQ ID NO: 3183
  Description of Artificial Sequence: Synthetic cashew; 5' sequence + inner sequence + 3' sequence

SEQ ID NO: 15072 - DNA, 76 bp, Artificial Sequence; identical to SEQ ID NO: 3026
  Description of Artificial Sequence: Synthetic cashew; 5' sequence + inner sequence + 3' sequence

SEQ ID NO: 15073 - DNA, 76 bp, Artificial Sequence; identical to SEQ ID NO: 3120
  Description of Artificial Sequence: Synthetic cashew; 5' sequence + inner sequence + 3' sequence

SEQ ID NO: 15074 - DNA, 76 bp, Artificial Sequence; identical to SEQ ID NO: 3093
  Description of Artificial Sequence: Synthetic cashew; 5' sequence + inner sequence + 3' sequence

SEQ ID NO: 15075 - DNA, 76 bp, Artificial Sequence; identical to SEQ ID NO: 3036
  Description of Artificial Sequence: Synthetic cashew; 5' sequence + inner sequence + 3' sequence

SEQ ID NO: 15076 - DNA, 76 bp, Artificial Sequence; identical to SEQ ID NO: 3057
  Description of Artificial Sequence: Synthetic cashew; 5' sequence + inner sequence + 3' sequence

SEQ ID NO: 15077 - DNA, 76 bp, Artificial Sequence; identical to SEQ ID NO: 3065
  Description of Artificial Sequence: Synthetic cashew; 5' sequence + inner sequence + 3' sequence

SEQ ID NO: 15078 - DNA, 76 bp, Artificial Sequence; identical to SEQ ID NO: 3059
  Description of Artificial Sequence: Synthetic cashew; 5' sequence + inner sequence + 3' sequence

SEQ ID NO: 15079 - DNA, 76 bp, Artificial Sequence; identical to SEQ ID NO: 3126
  Description of Artificial Sequence: Synthetic cashew; 5' sequence + inner sequence + 3' sequence

SEQ ID NO: 15080 - DNA, 76 bp, Artificial Sequence; identical to SEQ ID NO: 3025
  Description of Artificial Sequence: Synthetic cashew; 5' sequence + inner sequence + 3' sequence

SEQ ID NO: 15081 - DNA, 76 bp, Artificial Sequence; identical to SEQ ID NO: 3047
  Description of Artificial Sequence: Synthetic cashew; 5' sequence + inner sequence + 3' sequence

SEQ ID NO: 15082 - DNA, 76 bp, Artificial Sequence; identical to SEQ ID NO: 3097
  Description of Artificial Sequence: Synthetic cashew; 5' sequence + inner sequence + 3' sequence

SEQ ID NO: 15083 - DNA, 76 bp, Artificial Sequence; identical to SEQ ID NO: 3211
  Description of Artificial Sequence: Synthetic cashew; 5' sequence + inner sequence + 3' sequence

SEQ ID NO: 15084 - DNA, 76 bp, Artificial Sequence; identical to SEQ ID NO: 3136
  Description of Artificial Sequence: Synthetic cashew; 5' sequence + inner sequence + 3' sequence

SEQ ID NO: 15085 - DNA, 76 bp, Artificial Sequence; identical to SEQ ID NO: 3092
  Description of Artificial Sequence: Synthetic cashew; 5' sequence + inner sequence + 3' sequence

SEQ ID NO: 15086 - DNA, 76 bp, Artificial Sequence; identical to SEQ ID NO: 3311
  Description of Artificial Sequence: Synthetic cashew; 5' sequence + inner sequence + 3' sequence

SEQ ID NO: 15087 - DNA, 76 bp, Artificial Sequence; identical to SEQ ID NO: 3122
  Description of Artificial Sequence: Synthetic cashew; 5' sequence + inner sequence + 3' sequence

SEQ ID NO: 15088 - DNA, 76 bp, Artificial Sequence; identical to SEQ ID NO: 3144
  Description of Artificial Sequence: Synthetic cashew; 5' sequence + inner sequence + 3' sequence

SEQ ID NO: 15089 - DNA, 76 bp, Artificial Sequence; identical to SEQ ID NO: 3257
  Description of Artificial Sequence: Synthetic cashew; 5' sequence + inner sequence + 3' sequence

SEQ ID NO: 15090 - DNA, 76 bp, Artificial Sequence; identical to SEQ ID NO: 3154
  Description of Artificial Sequence: Synthetic cashew; 5' sequence + inner sequence + 3' sequence

SEQ ID NO: 15091 - DNA, 76 bp, Artificial Sequence; identical to SEQ ID NO: 3185
  Description of Artificial Sequence: Synthetic cashew; 5' sequence + inner sequence + 3' sequence

SEQ ID NO: 15092 - DNA, 76 bp, Artificial Sequence; identical to SEQ ID NO: 3027
  Description of Artificial Sequence: Synthetic cashew; 5' sequence + inner sequence + 3' sequence

SEQ ID NO: 15093 - DNA, 76 bp, Artificial Sequence; identical to SEQ ID NO: 3207
  Description of Artificial Sequence: Synthetic cashew; 5' sequence + inner sequence + 3' sequence

SEQ ID NO: 15094 - DNA, 76 bp, Artificial Sequence; identical to SEQ ID NO: 3142
  Description of Artificial Sequence: Synthetic cashew; 5' sequence + inner sequence + 3' sequence

SEQ ID NO: 15095 - DNA, 76 bp, Artificial Sequence; identical to SEQ ID NO: 3287
  Description of Artificial Sequence: Synthetic cashew; 5' sequence + inner sequence + 3' sequence

SEQ ID NO: 15096 - DNA, 76 bp, Artificial Sequence; identical to SEQ ID NO: 3067
  Description of Artificial Sequence: Synthetic cashew; 5' sequence + inner sequence + 3' sequence

SEQ ID NO: 15097 - DNA, 76 bp, Artificial Sequence; identical to SEQ ID NO: 3100
  Description of Artificial Sequence: Synthetic cashew; 5' sequence + inner sequence + 3' sequence

SEQ ID NO: 15098 - DNA, 76 bp, Artificial Sequence; identical to SEQ ID NO: 3096
  Description of Artificial Sequence: Synthetic cashew; 5' sequence + inner sequence + 3' sequence

SEQ ID NO: 15099 - DNA, 76 bp, Artificial Sequence; identical to SEQ ID NO: 3094
  Description of Artificial Sequence: Synthetic cashew; 5' sequence + inner sequence + 3' sequence

SEQ ID NO: 15100 - DNA, 76 bp, Artificial Sequence; identical to SEQ ID NO: 3078
  Description of Artificial Sequence: Synthetic cashew; 5' sequence + inner sequence + 3' sequence

SEQ ID NO: 15101 - DNA, 76 bp, Artificial Sequence; identical to SEQ ID NO: 3099
  Description of Artificial Sequence: Synthetic cashew; 5' sequence + inner sequence + 3' sequence

SEQ ID NO: 15102 - DNA, 76 bp, Artificial Sequence; identical to SEQ ID NO: 3151
  Description of Artificial Sequence: Synthetic cashew; 5' sequence + inner sequence + 3' sequence

SEQ ID NO: 15103 - DNA, 76 bp, Artificial Sequence; identical to SEQ ID NO: 3091
  Description of Artificial Sequence: Synthetic cashew; 5' sequence + inner sequence + 3' sequence

SEQ ID NO: 15104 - DNA, 76 bp, Artificial Sequence; identical to SEQ ID NO: 3083
  Description of Artificial Sequence: Synthetic cashew; 5' sequence + inner sequence + 3' sequence

SEQ ID NO: 15105 - DNA, 76 bp, Artificial Sequence; identical to SEQ ID NO: 3068
  Description of Artificial Sequence: Synthetic cashew; 5' sequence + inner sequence + 3' sequence

SEQ ID NO: 15106 - DNA, 76 bp, Artificial Sequence; identical to SEQ ID NO: 3430
  Description of Artificial Sequence: Synthetic cashew; 5' sequence + inner sequence + 3' sequence

SEQ ID NO: 15107 - DNA, 76 bp, Artificial Sequence; identical to SEQ ID NO: 3196
  Description of Artificial Sequence: Synthetic cashew; 5' sequence + inner sequence + 3' sequence

SEQ ID NO: 15108 - DNA, 76 bp, Artificial Sequence; identical to SEQ ID NO: 3056
  Description of Artificial Sequence: Synthetic cashew; 5' sequence + inner sequence + 3' sequence

SEQ ID NO: 15109 - DNA, 76 bp, Artificial Sequence; identical to SEQ ID NO: 3567
  Description of Artificial Sequence: Synthetic cashew; 5' sequence + inner sequence + 3' sequence

SEQ ID NO: 15110 - DNA, 76 bp, Artificial Sequence; identical to SEQ ID NO: 3208
  Description of Artificial Sequence: Synthetic cashew; 5' sequence + inner sequence + 3' sequence

SEQ ID NO: 15111 - DNA, 76 bp, Artificial Sequence; identical to SEQ ID NO: 3468
  Description of Artificial Sequence: Synthetic cashew; 5' sequence + inner sequence + 3' sequence

SEQ ID NO: 15112 - DNA, 76 bp, Artificial Sequence; identical to SEQ ID NO: 3264
  Description of Artificial Sequence: Synthetic cashew; 5' sequence + inner sequence + 3' sequence

SEQ ID NO: 15113 - DNA, 76 bp, Artificial Sequence; identical to SEQ ID NO: 3127
  Description of Artificial Sequence: Synthetic cashew; 5' sequence + inner sequence + 3' sequence

SEQ ID NO: 15114 - DNA, 76 bp, Artificial Sequence; identical to SEQ ID NO: 3118
  Description of Artificial Sequence: Synthetic cashew; 5' sequence + inner sequence + 3' sequence

SEQ ID NO: 15115 - DNA, 76 bp, Artificial Sequence; identical to SEQ ID NO: 3692
  Description of Artificial Sequence: Synthetic cashew; 5' sequence + inner sequence + 3' sequence

SEQ ID NO: 15116 - DNA, 76 bp, Artificial Sequence; identical to SEQ ID NO: 3147
  Description of Artificial Sequence: Synthetic cashew; 5' sequence + inner sequence + 3' sequence

SEQ ID NO: 15117 - DNA, 76 bp, Artificial Sequence; identical to SEQ ID NO: 3079
  Description of Artificial Sequence: Synthetic cashew; 5' sequence + inner sequence + 3' sequence

SEQ ID NO: 15118 - DNA, 76 bp, Artificial Sequence; identical to SEQ ID NO: 3233
  Description of Artificial Sequence: Synthetic cashew; 5' sequence + inner sequence + 3' sequence

SEQ ID NO: 15119 - DNA, 76 bp, Artificial Sequence; identical to SEQ ID NO: 3095
  Description of Artificial Sequence: Synthetic cashew; 5' sequence + inner sequence + 3' sequence

SEQ ID NO: 15120 - DNA, 76 bp, Artificial Sequence; identical to SEQ ID NO: 3288
  Description of Artificial Sequence: Synthetic cashew; 5' sequence + inner sequence + 3' sequence

SEQ ID NO: 15121 - DNA, 76 bp, Artificial Sequence; identical to SEQ ID NO: 3237
  Description of Artificial Sequence: Synthetic cashew; 5' sequence + inner sequence + 3' sequence

SEQ ID NO: 15122 - DNA, 76 bp, Artificial Sequence; identical to SEQ ID NO: 3179
  Description of Artificial Sequence: Synthetic cashew; 5' sequence + inner sequence + 3' sequence

SEQ ID NO: 15123 - DNA, 76 bp, Artificial Sequence; identical to SEQ ID NO: 3146
  Description of Artificial Sequence: Synthetic cashew; 5' sequence + inner sequence + 3' sequence

SEQ ID NO: 15124 - DNA, 76 bp, Artificial Sequence; identical to SEQ ID NO: 3230
  Description of Artificial Sequence: Synthetic cashew; 5' sequence + inner sequence + 3' sequence

SEQ ID NO: 15125 - DNA, 76 bp, Artificial Sequence; identical to SEQ ID NO: 3203
  Description of Artificial Sequence: Synthetic cashew; 5' sequence + inner sequence + 3' sequence

SEQ ID NO: 15126 - DNA, 76 bp, Artificial Sequence; identical to SEQ ID NO: 3247
  Description of Artificial Sequence: Synthetic cashew; 5' sequence + inner sequence + 3' sequence

SEQ ID NO: 15127 - DNA, 76 bp, Artificial Sequence; identical to SEQ ID NO: 3194
  Description of Artificial Sequence: Synthetic cashew; 5' sequence + inner sequence + 3' sequence

SEQ ID NO: 15128 - DNA, 76 bp, Artificial Sequence; identical to SEQ ID NO: 3164
  Description of Artificial Sequence: Synthetic cashew; 5' sequence + inner sequence + 3' sequence

SEQ ID NO: 15129 - DNA, 76 bp, Artificial Sequence; identical to SEQ ID NO: 3270
  Description of Artificial Sequence: Synthetic cashew; 5' sequence + inner sequence + 3' sequence

SEQ ID NO: 15130 - DNA, 76 bp, Artificial Sequence; identical to SEQ ID NO: 3103
  Description of Artificial Sequence: Synthetic cashew; 5' sequence + inner sequence + 3' sequence

SEQ ID NO: 15131 - DNA, 76 bp, Artificial Sequence; identical to SEQ ID NO: 3470
  Description of Artificial Sequence: Synthetic cashew; 5' sequence + inner sequence + 3' sequence

SEQ ID NO: 15132 - DNA, 76 bp, Artificial Sequence; identical to SEQ ID NO: 3360
  Description of Artificial Sequence: Synthetic cashew; 5' sequence + inner sequence + 3' sequence

SEQ ID NO: 15133 - DNA, 76 bp, Artificial Sequence; identical to SEQ ID NO: 3245
  Description of Artificial Sequence: Synthetic cashew; 5' sequence + inner sequence + 3' sequence

SEQ ID NO: 15134 - DNA, 76 bp, Artificial Sequence; identical to SEQ ID NO: 3161
  Description of Artificial Sequence: Synthetic cashew; 5' sequence + inner sequence + 3' sequence

SEQ ID NO: 15135 - DNA, 76 bp, Artificial Sequence; identical to SEQ ID NO: 3285
  Description of Artificial Sequence: Synthetic cashew; 5' sequence + inner sequence + 3' sequence

SEQ ID NO: 15136 - DNA, 76 bp, Artificial Sequence; identical to SEQ ID NO: 3171
  Description of Artificial Sequence: Synthetic cashew; 5' sequence + inner sequence + 3' sequence

SEQ ID NO: 15137 - DNA, 76 bp, Artificial Sequence; identical to SEQ ID NO: 3168
  Description of Artificial Sequence: Synthetic cashew; 5' sequence + inner sequence + 3' sequence

SEQ ID NO: 15138 - DNA, 76 bp, Artificial Sequence; identical to SEQ ID NO: 3312
  Description of Artificial Sequence: Synthetic cashew; 5' sequence + inner sequence + 3' sequence

SEQ ID NO: 15139 - DNA, 76 bp, Artificial Sequence; identical to SEQ ID NO: 3111
  Description of Artificial Sequence: Synthetic cashew; 5' sequence + inner sequence + 3' sequence

SEQ ID NO: 15140 - DNA, 76 bp, Artificial Sequence; identical to SEQ ID NO: 3145
  Description of Artificial Sequence: Synthetic cashew; 5' sequence + inner sequence + 3' sequence

SEQ ID NO: 15141 - DNA, 77 bp, Artificial Sequence; identical to SEQ ID NO: 3150
  Description of Artificial Sequence: Synthetic cashew; 5' sequence + inner sequence + 3' sequence

SEQ ID NO: 15142 - DNA, 74 bp, Artificial Sequence; identical to SEQ ID NO: 3148
  Description of Artificial Sequence: Synthetic cashew; 5' sequence + inner sequence + 3' sequence

SEQ ID NO: 15143 - DNA, 76 bp, Artificial Sequence; identical to SEQ ID NO: 3240
  Description of Artificial Sequence: Synthetic cashew; 5' sequence + inner sequence + 3' sequence

SEQ ID NO: 15144 - DNA, 76 bp, Artificial Sequence; identical to SEQ ID NO: 3107
  Description of Artificial Sequence: Synthetic cashew; 5' sequence + inner sequence + 3' sequence

SEQ ID NO: 15145 - DNA, 76 bp, Artificial Sequence; identical to SEQ ID NO: 3125
  Description of Artificial Sequence: Synthetic cashew; 5' sequence + inner sequence + 3' sequence

SEQ ID NO: 15146 - DNA, 76 bp, Artificial Sequence; identical to SEQ ID NO: 3215
  Description of Artificial Sequence: Synthetic cashew; 5' sequence + inner sequence + 3' sequence

SEQ ID NO: 15147 - DNA, 76 bp, Artificial Sequence; identical to SEQ ID NO: 3115
  Description of Artificial Sequence: Synthetic cashew; 5' sequence + inner sequence + 3' sequence

SEQ ID NO: 15148 - DNA, 76 bp, Artificial Sequence; identical to SEQ ID NO: 3253
  Description of Artificial Sequence: Synthetic cashew; 5' sequence + inner sequence + 3' sequence

SEQ ID NO: 15149 - DNA, 76 bp, Artificial Sequence; identical to SEQ ID NO: 3113
  Description of Artificial Sequence: Synthetic cashew; 5' sequence + inner sequence + 3' sequence

SEQ ID NO: 15150 - DNA, 76 bp, Artificial Sequence; identical to SEQ ID NO: 3163
  Description of Artificial Sequence: Synthetic cashew; 5' sequence + inner sequence + 3' sequence

SEQ ID NO: 15151 - DNA, 76 bp, Artificial Sequence; identical to SEQ ID NO: 3155
  Description of Artificial Sequence: Synthetic cashew; 5' sequence + inner sequence + 3' sequence

SEQ ID NO: 15152 - DNA, 76 bp, Artificial Sequence; identical to SEQ ID NO: 3188
  Description of Artificial Sequence: Synthetic cashew; 5' sequence + inner sequence + 3' sequence

SEQ ID NO: 15153 - DNA, 76 bp, Artificial Sequence; identical to SEQ ID NO: 3108
  Description of Artificial Sequence: Synthetic cashew; 5' sequence + inner sequence + 3' sequence

SEQ ID NO: 15154 - DNA, 76 bp, Artificial Sequence; identical to SEQ ID NO: 3282
  Description of Artificial Sequence: Synthetic cashew; 5' sequence + inner sequence + 3' sequence

SEQ ID NO: 15155 - DNA, 76 bp, Artificial Sequence; identical to SEQ ID NO: 3354
  Description of Artificial Sequence: Synthetic cashew; 5' sequence + inner sequence + 3' sequence

SEQ ID NO: 15156 - DNA, 76 bp, Artificial Sequence; identical to SEQ ID NO: 3071
  Description of Artificial Sequence: Synthetic cashew; 5' sequence + inner sequence + 3' sequence

SEQ ID NO: 15157 - DNA, 76 bp, Artificial Sequence; identical to SEQ ID NO: 3293
  Description of Artificial Sequence: Synthetic cashew; 5' sequence + inner sequence + 3' sequence

SEQ ID NO: 15158 - DNA, 76 bp, Artificial Sequence; identical to SEQ ID NO: 3355
  Description of Artificial Sequence: Synthetic cashew; 5' sequence + inner sequence + 3' sequence

SEQ ID NO: 15159 - DNA, 76 bp, Artificial Sequence; identical to SEQ ID NO: 3166
  Description of Artificial Sequence: Synthetic cashew; 5' sequence + inner sequence + 3' sequence

SEQ ID NO: 15160 - DNA, 76 bp, Artificial Sequence; identical to SEQ ID NO: 3073
  Description of Artificial Sequence: Synthetic cashew; 5' sequence + inner sequence + 3' sequence

SEQ ID NO: 15161 - DNA, 76 bp, Artificial Sequence; identical to SEQ ID NO: 3200
  Description of Artificial Sequence: Synthetic cashew; 5' sequence + inner sequence + 3' sequence

SEQ ID NO: 15162 - DNA, 76 bp, Artificial Sequence; identical to SEQ ID NO: 3106
  Description of Artificial Sequence: Synthetic cashew; 5' sequence + inner sequence + 3' sequence

SEQ ID NO: 15163 - DNA, 76 bp, Artificial Sequence; identical to SEQ ID NO: 3186
  Description of Artificial Sequence: Synthetic cashew; 5' sequence + inner sequence + 3' sequence

SEQ ID NO: 15164 - DNA, 76 bp, Artificial Sequence; identical to SEQ ID NO: 3187
  Description of Artificial Sequence: Synthetic cashew; 5' sequence + inner sequence + 3' sequence

SEQ ID NO: 15165 - DNA, 76 bp, Artificial Sequence; identical to SEQ ID NO: 3062
  Description of Artificial Sequence: Synthetic cashew; 5' sequence + inner sequence + 3' sequence

SEQ ID NO: 15166 - DNA, 76 bp, Artificial Sequence; identical to SEQ ID NO: 3075
  Description of Artificial Sequence: Synthetic cashew; 5' sequence + inner sequence + 3' sequence

SEQ ID NO: 15167 - DNA, 76 bp, Artificial Sequence; identical to SEQ ID NO: 3157
  Description of Artificial Sequence: Synthetic cashew; 5' sequence + inner sequence + 3' sequence

SEQ ID NO: 15168 - DNA, 76 bp, Artificial Sequence; identical to SEQ ID NO: 3232
  Description of Artificial Sequence: Synthetic cashew; 5' sequence + inner sequence + 3' sequence

SEQ ID NO: 15169 - DNA, 76 bp, Artificial Sequence; identical to SEQ ID NO: 3109
  Description of Artificial Sequence: Synthetic cashew; 5' sequence + inner sequence + 3' sequence

SEQ ID NO: 15170 - DNA, 76 bp, Artificial Sequence; identical to SEQ ID NO: 3229
  Description of Artificial Sequence: Synthetic cashew; 5' sequence + inner sequence + 3' sequence

SEQ ID NO: 15171 - DNA, 76 bp, Artificial Sequence; identical to SEQ ID NO: 3552
  Description of Artificial Sequence: Synthetic cashew; 5' sequence + inner sequence + 3' sequence

SEQ ID NO: 15172 - DNA, 76 bp, Artificial Sequence; identical to SEQ ID NO: 3174
  Description of Artificial Sequence: Synthetic cashew; 5' sequence + inner sequence + 3' sequence

SEQ ID NO: 15173 - DNA, 76 bp, Artificial Sequence; identical to SEQ ID NO: 3105
  Description of Artificial Sequence: Synthetic cashew; 5' sequence + inner sequence + 3' sequence

SEQ ID NO: 15174 - DNA, 76 bp, Artificial Sequence; identical to SEQ ID NO: 3175
  Description of Artificial Sequence: Synthetic cashew; 5' sequence + inner sequence + 3' sequence

SEQ ID NO: 15175 - DNA, 76 bp, Artificial Sequence; identical to SEQ ID NO: 3438
  Description of Artificial Sequence: Synthetic cashew; 5' sequence + inner sequence + 3' sequence

SEQ ID NO: 15176 - DNA, 76 bp, Artificial Sequence; identical to SEQ ID NO: 3205
  Description of Artificial Sequence: Synthetic cashew; 5' sequence + inner sequence + 3' sequence

SEQ ID NO: 15177 - DNA, 76 bp, Artificial Sequence; identical to SEQ ID NO: 3308
  Description of Artificial Sequence: Synthetic cashew; 5' sequence + inner sequence + 3' sequence

SEQ ID NO: 15178 - DNA, 76 bp, Artificial Sequence; identical to SEQ ID NO: 3377
  Description of Artificial Sequence: Synthetic cashew; 5' sequence + inner sequence + 3' sequence

SEQ ID NO: 15179 - DNA, 76 bp, Artificial Sequence; identical to SEQ ID NO: 3362
  Description of Artificial Sequence: Synthetic cashew; 5' sequence + inner sequence + 3' sequence

SEQ ID NO: 15180 - DNA, 76 bp, Artificial Sequence; identical to SEQ ID NO: 3086
  Description of Artificial Sequence: Synthetic cashew; 5' sequence + inner sequence + 3' sequence

SEQ ID NO: 15181 - DNA, 76 bp, Artificial Sequence; identical to SEQ ID NO: 3165
  Description of Artificial Sequence: Synthetic cashew; 5' sequence + inner sequence + 3' sequence

SEQ ID NO: 15182 - DNA, 76 bp, Artificial Sequence; identical to SEQ ID NO: 3138
  Description of Artificial Sequence: Synthetic cashew; 5' sequence + inner sequence + 3' sequence

SEQ ID NO: 15183 - DNA, 76 bp, Artificial Sequence; identical to SEQ ID NO: 3222
  Description of Artificial Sequence: Synthetic cashew; 5' sequence + inner sequence + 3' sequence

SEQ ID NO: 15184 - DNA, 76 bp, Artificial Sequence; identical to SEQ ID NO: 3184
  Description of Artificial Sequence: Synthetic cashew; 5' sequence + inner sequence + 3' sequence

SEQ ID NO: 15185 - DNA, 76 bp, Artificial Sequence; identical to SEQ ID NO: 3084
  Description of Artificial Sequence: Synthetic cashew; 5' sequence + inner sequence + 3' sequence

SEQ ID NO: 15186 - DNA, 77 bp, Artificial Sequence; identical to SEQ ID NO: 3258
  Description of Artificial Sequence: Synthetic cashew; 5' sequence + inner sequence + 3' sequence

SEQ ID NO: 15187 - DNA, 77 bp, Artificial Sequence; identical to SEQ ID NO: 3221
  Description of Artificial Sequence: Synthetic cashew; 5' sequence + inner sequence + 3' sequence

SEQ ID NO: 15188 - DNA, 76 bp, Artificial Sequence; identical to SEQ ID NO: 3089
  Description of Artificial Sequence: Synthetic cashew; 5' sequence + inner sequence + 3' sequence

SEQ ID NO: 15189 - DNA, 76 bp, Artificial Sequence; identical to SEQ ID NO: 7336
  Description of Artificial Sequence: Synthetic cashew; 5' sequence + inner sequence + 3' sequence

SEQ ID NO: 15190 - DNA, 76 bp, Artificial Sequence; identical to SEQ ID NO: 3290
  Description of Artificial Sequence: Synthetic cashew; 5' sequence + inner sequence + 3' sequence

SEQ ID NO: 15191 - DNA, 76 bp, Artificial Sequence; identical to SEQ ID NO: 3645
  Description of Artificial Sequence: Synthetic cashew; 5' sequence + inner sequence + 3' sequence

SEQ ID NO: 15192 - DNA, 76 bp, Artificial Sequence; identical to SEQ ID NO: 3385
  Description of Artificial Sequence: Synthetic cashew; 5' sequence + inner sequence + 3' sequence

SEQ ID NO: 15193 - DNA, 76 bp, Artificial Sequence; identical to SEQ ID NO: 3090
  Description of Artificial Sequence: Synthetic cashew; 5' sequence + inner sequence + 3' sequence

SEQ ID NO: 15194 - DNA, 76 bp, Artificial Sequence; identical to SEQ ID NO: 7205
  Description of Artificial Sequence: Synthetic cashew; 5' sequence + inner sequence + 3' sequence

SEQ ID NO: 15195 - DNA, 76 bp, Artificial Sequence; identical to SEQ ID NO: 3134
  Description of Artificial Sequence: Synthetic cashew; 5' sequence + inner sequence + 3' sequence

SEQ ID NO: 15196 - DNA, 76 bp, Artificial Sequence; identical to SEQ ID NO: 3448
  Description of Artificial Sequence: Synthetic cashew; 5' sequence + inner sequence + 3' sequence

SEQ ID NO: 15197 - DNA, 76 bp, Artificial Sequence; identical to SEQ ID NO: 3376
  Description of Artificial Sequence: Synthetic cashew; 5' sequence + inner sequence + 3' sequence

SEQ ID NO: 15198 - DNA, 76 bp, Artificial Sequence; identical to SEQ ID NO: 3159
  Description of Artificial Sequence: Synthetic cashew; 5' sequence + inner sequence + 3' sequence

SEQ ID NO: 15199 - DNA, 76 bp, Artificial Sequence; identical to SEQ ID NO: 3191
  Description of Artificial Sequence: Synthetic cashew; 5' sequence + inner sequence + 3' sequence

SEQ ID NO: 15200 - DNA, 76 bp, Artificial Sequence; identical to SEQ ID NO: 3198
  Description of Artificial Sequence: Synthetic cashew; 5' sequence + inner sequence + 3' sequence

SEQ ID NO: 15201 - DNA, 76 bp, Artificial Sequence; identical to SEQ ID NO: 3139
  Description of Artificial Sequence: Synthetic cashew; 5' sequence + inner sequence + 3' sequence

SEQ ID NO: 15202 - DNA, 76 bp, Artificial Sequence; identical to SEQ ID NO: 3262
  Description of Artificial Sequence: Synthetic cashew; 5' sequence + inner sequence + 3' sequence

SEQ ID NO: 15203 - DNA, 76 bp, Artificial Sequence; identical to SEQ ID NO: 3329
  Description of Artificial Sequence: Synthetic cashew; 5' sequence + inner sequence + 3' sequence

SEQ ID NO: 15204 - DNA, 76 bp, Artificial Sequence; identical to SEQ ID NO: 3541
  Description of Artificial Sequence: Synthetic cashew; 5' sequence + inner sequence + 3' sequence

SEQ ID NO: 15205 - DNA, 76 bp, Artificial Sequence; identical to SEQ ID NO: 3110
  Description of Artificial Sequence: Synthetic cashew; 5' sequence + inner sequence + 3' sequence

SEQ ID NO: 15206 - DNA, 76 bp, Artificial Sequence; identical to SEQ ID NO: 3121
  Description of Artificial Sequence: Synthetic cashew; 5' sequence + inner sequence + 3' sequence

SEQ ID NO: 15207 - DNA, 76 bp, Artificial Sequence; identical to SEQ ID NO: 3201
  Description of Artificial Sequence: Synthetic cashew; 5' sequence + inner sequence + 3' sequence

SEQ ID NO: 15208 - DNA, 76 bp, Artificial Sequence; identical to SEQ ID NO: 3283
  Description of Artificial Sequence: Synthetic cashew; 5' sequence + inner sequence + 3' sequence

SEQ ID NO: 15209 - DNA, 76 bp, Artificial Sequence; identical to SEQ ID NO: 3085
  Description of Artificial Sequence: Synthetic cashew; 5' sequence + inner sequence + 3' sequence

SEQ ID NO: 15210 - DNA, 76 bp, Artificial Sequence; identical to SEQ ID NO: 3269
  Description of Artificial Sequence: Synthetic cashew; 5' sequence + inner sequence + 3' sequence

SEQ ID NO: 15211 - DNA, 76 bp, Artificial Sequence; identical to SEQ ID NO: 3373
  Description of Artificial Sequence: Synthetic cashew; 5' sequence + inner sequence + 3' sequence

SEQ ID NO: 15212 - DNA, 76 bp, Artificial Sequence; identical to SEQ ID NO: 3406
  Description of Artificial Sequence: Synthetic cashew; 5' sequence + inner sequence + 3' sequence

SEQ ID NO: 15213 - DNA, 76 bp, Artificial Sequence; identical to SEQ ID NO: 3630
  Description of Artificial Sequence: Synthetic cashew; 5' sequence + inner sequence + 3' sequence

SEQ ID NO: 15214 - DNA, 76 bp, Artificial Sequence; identical to SEQ ID NO: 3371
  Description of Artificial Sequence: Synthetic cashew; 5' sequence + inner sequence + 3' sequence

SEQ ID NO: 15215 - DNA, 76 bp, Artificial Sequence; identical to SEQ ID NO: 3069
  Description of Artificial Sequence: Synthetic cashew; 5' sequence + inner sequence + 3' sequence

SEQ ID NO: 15216 - DNA, 76 bp, Artificial Sequence; identical to SEQ ID NO: 3299
  Description of Artificial Sequence: Synthetic cashew; 5' sequence + inner sequence + 3' sequence

SEQ ID NO: 15217 - DNA, 76 bp, Artificial Sequence; identical to SEQ ID NO: 7229
  Description of Artificial Sequence: Synthetic cashew; 5' sequence + inner sequence + 3' sequence

SEQ ID NO: 15218 - DNA, 76 bp, Artificial Sequence; identical to SEQ ID NO: 3673
  Description of Artificial Sequence: Synthetic cashew; 5' sequence + inner sequence + 3' sequence

SEQ ID NO: 15219 - DNA, 76 bp, Artificial Sequence; identical to SEQ ID NO: 3369
  Description of Artificial Sequence: Synthetic cashew; 5' sequence + inner sequence + 3' sequence

SEQ ID NO: 15220 - DNA, 76 bp, Artificial Sequence; identical to SEQ ID NO: 11401
  Description of Artificial Sequence: Synthetic cashew; 5' sequence + inner sequence + 3' sequence

SEQ ID NO: 15221 - DNA, 76 bp, Artificial Sequence; identical to SEQ ID NO: 3522
  Description of Artificial Sequence: Synthetic cashew; 5' sequence + inner sequence + 3' sequence

SEQ ID NO: 15222 - DNA, 76 bp, Artificial Sequence; identical to SEQ ID NO: 3140
  Description of Artificial Sequence: Synthetic cashew; 5' sequence + inner sequence + 3' sequence

SEQ ID NO: 15223 - DNA, 76 bp, Artificial Sequence; identical to SEQ ID NO: 3156
  Description of Artificial Sequence: Synthetic cashew; 5' sequence + inner sequence + 3' sequence

SEQ ID NO: 15224 - DNA, 76 bp, Artificial Sequence; identical to SEQ ID NO: 3153
  Description of Artificial Sequence: Synthetic cashew; 5' sequence + inner sequence + 3' sequence

SEQ ID NO: 15225 - DNA, 76 bp, Artificial Sequence; identical to SEQ ID NO: 3189
  Description of Artificial Sequence: Synthetic cashew; 5' sequence + inner sequence + 3' sequence

SEQ ID NO: 15226 - DNA, 76 bp, Artificial Sequence; identical to SEQ ID NO: 3389
  Description of Artificial Sequence: Synthetic cashew; 5' sequence + inner sequence + 3' sequence

SEQ ID NO: 15227 - DNA, 76 bp, Artificial Sequence; identical to SEQ ID NO: 3102
  Description of Artificial Sequence: Synthetic cashew; 5' sequence + inner sequence + 3' sequence

SEQ ID NO: 15228 - DNA, 76 bp, Artificial Sequence; identical to SEQ ID NO: 3123
  Description of Artificial Sequence: Synthetic cashew; 5' sequence + inner sequence + 3' sequence

SEQ ID NO: 15229 - DNA, 76 bp, Artificial Sequence; identical to SEQ ID NO: 3532
  Description of Artificial Sequence: Synthetic cashew; 5' sequence + inner sequence + 3' sequence

SEQ ID NO: 15230 - DNA, 76 bp, Artificial Sequence; identical to SEQ ID NO: 3234
  Description of Artificial Sequence: Synthetic cashew; 5' sequence + inner sequence + 3' sequence

SEQ ID NO: 15231 - DNA, 76 bp, Artificial Sequence; identical to SEQ ID NO: 3266
  Description of Artificial Sequence: Synthetic cashew; 5' sequence + inner sequence + 3' sequence

SEQ ID NO: 15232 - DNA, 76 bp, Artificial Sequence; identical to SEQ ID NO: 3347
  Description of Artificial Sequence: Synthetic cashew; 5' sequence + inner sequence + 3' sequence

SEQ ID NO: 15233 - DNA, 76 bp, Artificial Sequence; identical to SEQ ID NO: 3454
  Description of Artificial Sequence: Synthetic cashew; 5' sequence + inner sequence + 3' sequence

SEQ ID NO: 15234 - DNA, 76 bp, Artificial Sequence; identical to SEQ ID NO: 3553
  Description of Artificial Sequence: Synthetic cashew; 5' sequence + inner sequence + 3' sequence

SEQ ID NO: 15235 - DNA, 76 bp, Artificial Sequence; identical to SEQ ID NO: 3243
  Description of Artificial Sequence: Synthetic cashew; 5' sequence + inner sequence + 3' sequence

SEQ ID NO: 15236 - DNA, 76 bp, Artificial Sequence; identical to SEQ ID NO: 3132
  Description of Artificial Sequence: Synthetic cashew; 5' sequence + inner sequence + 3' sequence

SEQ ID NO: 15237 - DNA, 76 bp, Artificial Sequence; identical to SEQ ID NO: 3401
  Description of Artificial Sequence: Synthetic cashew; 5' sequence + inner sequence + 3' sequence

SEQ ID NO: 15238 - DNA, 76 bp, Artificial Sequence; identical to SEQ ID NO: 3152
  Description of Artificial Sequence: Synthetic cashew; 5' sequence + inner sequence + 3' sequence

SEQ ID NO: 15239 - DNA, 76 bp, Artificial Sequence; identical to SEQ ID NO: 3321
  Description of Artificial Sequence: Synthetic cashew; 5' sequence + inner sequence + 3' sequence

SEQ ID NO: 15240 - DNA, 76 bp, Artificial Sequence; identical to SEQ ID NO: 3413
  Description of Artificial Sequence: Synthetic cashew; 5' sequence + inner sequence + 3' sequence

SEQ ID NO: 15241 - DNA, 76 bp, Artificial Sequence; identical to SEQ ID NO: 3182
  Description of Artificial Sequence: Synthetic cashew; 5' sequence + inner sequence + 3' sequence

SEQ ID NO: 15242 - DNA, 77 bp, Artificial Sequence; identical to SEQ ID NO: 3250
  Description of Artificial Sequence: Synthetic cashew; 5' sequence + inner sequence + 3' sequence

SEQ ID NO: 15243 - DNA, 76 bp, Artificial Sequence; identical to SEQ ID NO: 3585
  Description of Artificial Sequence: Synthetic cashew; 5' sequence + inner sequence + 3' sequence

SEQ ID NO: 15244 - DNA, 76 bp, Artificial Sequence; identical to SEQ ID NO: 3325
  Description of Artificial Sequence: Synthetic cashew; 5' sequence + inner sequence + 3' sequence

SEQ ID NO: 15245 - DNA, 76 bp, Artificial Sequence; identical to SEQ ID NO: 3343
  Description of Artificial Sequence: Synthetic cashew; 5' sequence + inner sequence + 3' sequence

SEQ ID NO: 15246 - DNA, 76 bp, Artificial Sequence; identical to SEQ ID NO: 3341
  Description of Artificial Sequence: Synthetic cashew; 5' sequence + inner sequence + 3' sequence

SEQ ID NO: 15247 - DNA, 76 bp, Artificial Sequence; identical to SEQ ID NO: 3654
  Description of Artificial Sequence: Synthetic cashew; 5' sequence + inner sequence + 3' sequence

SEQ ID NO: 15248 - DNA, 76 bp, Artificial Sequence; identical to SEQ ID NO: 3158
  Description of Artificial Sequence: Synthetic cashew; 5' sequence + inner sequence + 3' sequence

SEQ ID NO: 15249 - DNA, 76 bp, Artificial Sequence; identical to SEQ ID NO: 3429
  Description of Artificial Sequence: Synthetic cashew; 5' sequence + inner sequence + 3' sequence

SEQ ID NO: 15250 - DNA, 76 bp, Artificial Sequence; identical to SEQ ID NO: 3353
  Description of Artificial Sequence: Synthetic cashew; 5' sequence + inner sequence + 3' sequence

SEQ ID NO: 15251 - DNA, 76 bp, Artificial Sequence; identical to SEQ ID NO: 3195
  Description of Artificial Sequence: Synthetic cashew; 5' sequence + inner sequence + 3' sequence

SEQ ID NO: 15252 - DNA, 76 bp, Artificial Sequence; identical to SEQ ID NO: 3298
  Description of Artificial Sequence: Synthetic cashew; 5' sequence + inner sequence + 3' sequence

SEQ ID NO: 15253 - DNA, 76 bp, Artificial Sequence; identical to SEQ ID NO: 3336
  Description of Artificial Sequence: Synthetic cashew; 5' sequence + inner sequence + 3' sequence

SEQ ID NO: 15254 - DNA, 76 bp, Artificial Sequence; identical to SEQ ID NO: 3178
  Description of Artificial Sequence: Synthetic cashew; 5' sequence + inner sequence + 3' sequence

SEQ ID NO: 15255 - DNA, 76 bp, Artificial Sequence; identical to SEQ ID NO: 3180
  Description of Artificial Sequence: Synthetic cashew; 5' sequence + inner sequence + 3' sequence

SEQ ID NO: 15256 - DNA, 76 bp, Artificial Sequence; identical to SEQ ID NO: 3634
  Description of Artificial Sequence: Synthetic cashew; 5' sequence + inner sequence + 3' sequence

SEQ ID NO: 15257 - DNA, 76 bp, Artificial Sequence; identical to SEQ ID NO: 3436
  Description of Artificial Sequence: Synthetic cashew; 5' sequence + inner sequence + 3' sequence

SEQ ID NO: 15258 - DNA, 76 bp, Artificial Sequence; identical to SEQ ID NO: 3116
  Description of Artificial Sequence: Synthetic cashew; 5' sequence + inner sequence + 3' sequence

SEQ ID NO: 15259 - DNA, 76 bp, Artificial Sequence; identical to SEQ ID NO: 3365
  Description of Artificial Sequence: Synthetic cashew; 5' sequence + inner sequence + 3' sequence

SEQ ID NO: 15260 - DNA, 76 bp, Artificial Sequence; identical to SEQ ID NO: 7449
  Description of Artificial Sequence: Synthetic cashew; 5' sequence + inner sequence + 3' sequence

SEQ ID NO: 15261 - DNA, 76 bp, Artificial Sequence; identical to SEQ ID NO: 3284
  Description of Artificial Sequence: Synthetic cashew; 5' sequence + inner sequence + 3' sequence

SEQ ID NO: 15262 - DNA, 76 bp, Artificial Sequence; identical to SEQ ID NO: 3319
  Description of Artificial Sequence: Synthetic cashew; 5' sequence + inner sequence + 3' sequence

SEQ ID NO: 15263 - DNA, 76 bp, Artificial Sequence; identical to SEQ ID NO: 3202
  Description of Artificial Sequence: Synthetic cashew; 5' sequence + inner sequence + 3' sequence

SEQ ID NO: 15264 - DNA, 76 bp, Artificial Sequence; identical to SEQ ID NO: 3135
  Description of Artificial Sequence: Synthetic cashew; 5' sequence + inner sequence + 3' sequence

SEQ ID NO: 15265 - DNA, 76 bp, Artificial Sequence; identical to SEQ ID NO: 3579
  Description of Artificial Sequence: Synthetic cashew; 5' sequence + inner sequence + 3' sequence

SEQ ID NO: 15266 - DNA, 76 bp, Artificial Sequence; identical to SEQ ID NO: 3527
  Description of Artificial Sequence: Synthetic cashew; 5' sequence + inner sequence + 3' sequence

SEQ ID NO: 15267 - DNA, 76 bp, Artificial Sequence; identical to SEQ ID NO: 3301
  Description of Artificial Sequence: Synthetic cashew; 5' sequence + inner sequence + 3' sequence

SEQ ID NO: 15268 - DNA, 76 bp, Artificial Sequence; identical to SEQ ID NO: 3791
  Description of Artificial Sequence: Synthetic cashew; 5' sequence + inner sequence + 3' sequence

SEQ ID NO: 15269 - DNA, 76 bp, Artificial Sequence; identical to SEQ ID NO: 3524
  Description of Artificial Sequence: Synthetic cashew; 5' sequence + inner sequence + 3' sequence

SEQ ID NO: 15270 - DNA, 76 bp, Artificial Sequence; identical to SEQ ID NO: 3197
  Description of Artificial Sequence: Synthetic cashew; 5' sequence + inner sequence + 3' sequence

SEQ ID NO: 15271 - DNA, 76 bp, Artificial Sequence; identical to SEQ ID NO: 3190
  Description of Artificial Sequence: Synthetic cashew; 5' sequence + inner sequence + 3' sequence

SEQ ID NO: 15272 - DNA, 76 bp, Artificial Sequence; identical to SEQ ID NO: 3172
  Description of Artificial Sequence: Synthetic cashew; 5' sequence + inner sequence + 3' sequence

SEQ ID NO: 15273 - DNA, 76 bp, Artificial Sequence; identical to SEQ ID NO: 3228
  Description of Artificial Sequence: Synthetic cashew; 5' sequence + inner sequence + 3' sequence

SEQ ID NO: 15274 - DNA, 76 bp, Artificial Sequence; identical to SEQ ID NO: 3383
  Description of Artificial Sequence: Synthetic cashew; 5' sequence + inner sequence + 3' sequence

SEQ ID NO: 15275 - DNA, 76 bp, Artificial Sequence; identical to SEQ ID NO: 3540
  Description of Artificial Sequence: Synthetic cashew; 5' sequence + inner sequence + 3' sequence

SEQ ID NO: 15276 - DNA, 76 bp, Artificial Sequence; identical to SEQ ID NO: 3072
  Description of Artificial Sequence: Synthetic cashew; 5' sequence + inner sequence + 3' sequence

SEQ ID NO: 15277 - DNA, 76 bp, Artificial Sequence; identical to SEQ ID NO: 3511
  Description of Artificial Sequence: Synthetic cashew; 5' sequence + inner sequence + 3' sequence

SEQ ID NO: 15278 - DNA, 76 bp, Artificial Sequence; identical to SEQ ID NO: 3572
  Description of Artificial Sequence: Synthetic cashew; 5' sequence + inner sequence + 3' sequence

SEQ ID NO: 15279 - DNA, 76 bp, Artificial Sequence; identical to SEQ ID NO: 3119
  Description of Artificial Sequence: Synthetic cashew; 5' sequence + inner sequence + 3' sequence

SEQ ID NO: 15280 - DNA, 76 bp, Artificial Sequence; identical to SEQ ID NO: 3204
  Description of Artificial Sequence: Synthetic cashew; 5' sequence + inner sequence + 3' sequence

SEQ ID NO: 15281 - DNA, 76 bp, Artificial Sequence; identical to SEQ ID NO: 3439
  Description of Artificial Sequence: Synthetic cashew; 5' sequence + inner sequence + 3' sequence

SEQ ID NO: 15282 - DNA, 76 bp, Artificial Sequence; identical to SEQ ID NO: 3254
  Description of Artificial Sequence: Synthetic cashew; 5' sequence + inner sequence + 3' sequence

SEQ ID NO: 15283 - DNA, 76 bp, Artificial Sequence; identical to SEQ ID NO: 3305
  Description of Artificial Sequence: Synthetic cashew; 5' sequence + inner sequence + 3' sequence

SEQ ID NO: 15284 - DNA, 76 bp, Artificial Sequence; identical to SEQ ID NO: 3496
  Description of Artificial Sequence: Synthetic cashew; 5' sequence + inner sequence + 3' sequence

SEQ ID NO: 15285 - DNA, 76 bp, Artificial Sequence; identical to SEQ ID NO: 7234
  Description of Artificial Sequence: Synthetic cashew; 5' sequence + inner sequence + 3' sequence

SEQ ID NO: 15286 - DNA, 76 bp, Artificial Sequence; identical to SEQ ID NO: 3320
  Description of Artificial Sequence: Synthetic cashew; 5' sequence + inner sequence + 3' sequence

SEQ ID NO: 15287 - DNA, 76 bp, Artificial Sequence; identical to SEQ ID NO: 3098
  Description of Artificial Sequence: Synthetic cashew; 5' sequence + inner sequence + 3' sequence

SEQ ID NO: 15288 - DNA, 76 bp, Artificial Sequence; identical to SEQ ID NO: 3671
  Description of Artificial Sequence: Synthetic cashew; 5' sequence + inner sequence + 3' sequence

SEQ ID NO: 15289 - DNA, 76 bp, Artificial Sequence; identical to SEQ ID NO: 3352
  Description of Artificial Sequence: Synthetic cashew; 5' sequence + inner sequence + 3' sequence

SEQ ID NO: 15290 - DNA, 76 bp, Artificial Sequence; identical to SEQ ID NO: 3314
  Description of Artificial Sequence: Synthetic cashew; 5' sequence + inner sequence + 3' sequence

SEQ ID NO: 15291 - DNA, 76 bp, Artificial Sequence; identical to SEQ ID NO: 3529
  Description of Artificial Sequence: Synthetic cashew; 5' sequence + inner sequence + 3' sequence

SEQ ID NO: 15292 - DNA, 76 bp, Artificial Sequence; identical to SEQ ID NO: 3323
  Description of Artificial Sequence: Synthetic cashew; 5' sequence + inner sequence + 3' sequence

SEQ ID NO: 15293 - DNA, 76 bp, Artificial Sequence; identical to SEQ ID NO: 3916
  Description of Artificial Sequence: Synthetic cashew; 5' sequence + inner sequence + 3' sequence

SEQ ID NO: 15294 - DNA, 77 bp, Artificial Sequence; identical to SEQ ID NO: 7245
  Description of Artificial Sequence: Synthetic cashew; 5' sequence + inner sequence + 3' sequence

SEQ ID NO: 15295 - DNA, 76 bp, Artificial Sequence; identical to SEQ ID NO: 3303
  Description of Artificial Sequence: Synthetic cashew; 5' sequence + inner sequence + 3' sequence

SEQ ID NO: 15296 - DNA, 76 bp, Artificial Sequence; identical to SEQ ID NO: 3528
  Description of Artificial Sequence: Synthetic cashew; 5' sequence + inner sequence + 3' sequence

SEQ ID NO: 15297 - DNA, 76 bp, Artificial Sequence; identical to SEQ ID NO: 3213
  Description of Artificial Sequence: Synthetic cashew; 5' sequence + inner sequence + 3' sequence

SEQ ID NO: 15298 - DNA, 76 bp, Artificial Sequence; identical to SEQ ID NO: 3206
  Description of Artificial Sequence: Synthetic cashew; 5' sequence + inner sequence + 3' sequence

SEQ ID NO: 15299 - DNA, 76 bp, Artificial Sequence; identical to SEQ ID NO: 3611
  Description of Artificial Sequence: Synthetic cashew; 5' sequence + inner sequence + 3' sequence

SEQ ID NO: 15300 - DNA, 76 bp, Artificial Sequence; identical to SEQ ID NO: 3173
  Description of Artificial Sequence: Synthetic cashew; 5' sequence + inner sequence + 3' sequence

SEQ ID NO: 15301 - DNA, 76 bp, Artificial Sequence; identical to SEQ ID NO: 3238
  Description of Artificial Sequence: Synthetic cashew; 5' sequence + inner sequence + 3' sequence

SEQ ID NO: 15302 - DNA, 76 bp, Artificial Sequence; identical to SEQ ID NO: 3783
  Description of Artificial Sequence: Synthetic cashew; 5' sequence + inner sequence + 3' sequence

SEQ ID NO: 15303 - DNA, 76 bp, Artificial Sequence; identical to SEQ ID NO: 3741
  Description of Artificial Sequence: Synthetic cashew; 5' sequence + inner sequence + 3' sequence

SEQ ID NO: 15304 - DNA, 76 bp, Artificial Sequence; identical to SEQ ID NO: 3344
  Description of Artificial Sequence: Synthetic cashew; 5' sequence + inner sequence + 3' sequence

SEQ ID NO: 15305 - DNA, 76 bp, Artificial Sequence; identical to SEQ ID NO: 3268
  Description of Artificial Sequence: Synthetic cashew; 5' sequence + inner sequence + 3' sequence

SEQ ID NO: 15306 - DNA, 76 bp, Artificial Sequence; identical to SEQ ID NO: 3087
  Description of Artificial Sequence: Synthetic cashew; 5' sequence + inner sequence + 3' sequence

SEQ ID NO: 15307 - DNA, 76 bp, Artificial Sequence; identical to SEQ ID NO: 3192
  Description of Artificial Sequence: Synthetic cashew; 5' sequence + inner sequence + 3' sequence

SEQ ID NO: 15308 - DNA, 76 bp, Artificial Sequence; identical to SEQ ID NO: 3310
  Description of Artificial Sequence: Synthetic cashew; 5' sequence + inner sequence + 3' sequence

SEQ ID NO: 15309 - DNA, 76 bp, Artificial Sequence; identical to SEQ ID NO: 7254
  Description of Artificial Sequence: Synthetic cashew; 5' sequence + inner sequence + 3' sequence

SEQ ID NO: 15310 - DNA, 76 bp, Artificial Sequence; identical to SEQ ID NO: 3884
  Description of Artificial Sequence: Synthetic cashew; 5' sequence + inner sequence + 3' sequence

SEQ ID NO: 15311 - DNA, 76 bp, Artificial Sequence; identical to SEQ ID NO: 3348
  Description of Artificial Sequence: Synthetic cashew; 5' sequence + inner sequence + 3' sequence

SEQ ID NO: 15312 - DNA, 76 bp, Artificial Sequence; identical to SEQ ID NO: 7691
  Description of Artificial Sequence: Synthetic cashew; 5' sequence + inner sequence + 3' sequence

SEQ ID NO: 15313 - DNA, 76 bp, Artificial Sequence; identical to SEQ ID NO: 3309
  Description of Artificial Sequence: Synthetic cashew; 5' sequence + inner sequence + 3' sequence

SEQ ID NO: 15314 - DNA, 76 bp, Artificial Sequence; identical to SEQ ID NO: 3570
  Description of Artificial Sequence: Synthetic cashew; 5' sequence + inner sequence + 3' sequence

SEQ ID NO: 15315 - DNA, 76 bp, Artificial Sequence; identical to SEQ ID NO: 3177
  Description of Artificial Sequence: Synthetic cashew; 5' sequence + inner sequence + 3' sequence

SEQ ID NO: 15316 - DNA, 76 bp, Artificial Sequence; identical to SEQ ID NO: 3556
  Description of Artificial Sequence: Synthetic cashew; 5' sequence + inner sequence + 3' sequence

SEQ ID NO: 15317 - DNA, 76 bp, Artificial Sequence; identical to SEQ ID NO: 3246
  Description of Artificial Sequence: Synthetic cashew; 5' sequence + inner sequence + 3' sequence

SEQ ID NO: 15318 - DNA, 76 bp, Artificial Sequence; identical to SEQ ID NO: 3367
  Description of Artificial Sequence: Synthetic cashew; 5' sequence + inner sequence + 3' sequence

SEQ ID NO: 15319 - DNA, 76 bp, Artificial Sequence; identical to SEQ ID NO: 3130
  Description of Artificial Sequence: Synthetic cashew; 5' sequence + inner sequence + 3' sequence

SEQ ID NO: 15320 - DNA, 76 bp, Artificial Sequence; identical to SEQ ID NO: 3349
  Description of Artificial Sequence: Synthetic cashew; 5' sequence + inner sequence + 3' sequence

SEQ ID NO: 15321 - DNA, 76 bp, Artificial Sequence; identical to SEQ ID NO: 7376
  Description of Artificial Sequence: Synthetic cashew; 5' sequence + inner sequence + 3' sequence

SEQ ID NO: 15322 - DNA, 76 bp, Artificial Sequence; identical to SEQ ID NO: 3696
  Description of Artificial Sequence: Synthetic cashew; 5' sequence + inner sequence + 3' sequence

SEQ ID NO: 15323 - DNA, 76 bp, Artificial Sequence; identical to SEQ ID NO: 3271
  Description of Artificial Sequence: Synthetic cashew; 5' sequence + inner sequence + 3' sequence

SEQ ID NO: 15324 - DNA, 76 bp, Artificial Sequence; identical to SEQ ID NO: 3394
  Description of Artificial Sequence: Synthetic cashew; 5' sequence + inner sequence + 3' sequence

SEQ ID NO: 15325 - DNA, 76 bp, Artificial Sequence; identical to SEQ ID NO: 3104
  Description of Artificial Sequence: Synthetic cashew; 5' sequence + inner sequence + 3' sequence

SEQ ID NO: 15326 - DNA, 76 bp, Artificial Sequence; identical to SEQ ID NO: 3149
  Description of Artificial Sequence: Synthetic cashew; 5' sequence + inner sequence + 3' sequence

SEQ ID NO: 15327 - DNA, 76 bp, Artificial Sequence; identical to SEQ ID NO: 3487
  Description of Artificial Sequence: Synthetic cashew; 5' sequence + inner sequence + 3' sequence

SEQ ID NO: 15328 - DNA, 76 bp, Artificial Sequence; identical to SEQ ID NO: 3359
  Description of Artificial Sequence: Synthetic cashew; 5' sequence + inner sequence + 3' sequence

SEQ ID NO: 15329 - DNA, 76 bp, Artificial Sequence; identical to SEQ ID NO: 3370
  Description of Artificial Sequence: Synthetic cashew; 5' sequence + inner sequence + 3' sequence

SEQ ID NO: 15330 - DNA, 76 bp, Artificial Sequence; identical to SEQ ID NO: 7364
  Description of Artificial Sequence: Synthetic cashew; 5' sequence + inner sequence + 3' sequence

SEQ ID NO: 15331 - DNA, 76 bp, Artificial Sequence; identical to SEQ ID NO: 3836
  Description of Artificial Sequence: Synthetic cashew; 5' sequence + inner sequence + 3' sequence

SEQ ID NO: 15332 - DNA, 76 bp, Artificial Sequence; identical to SEQ ID NO: 3676
  Description of Artificial Sequence: Synthetic cashew; 5' sequence + inner sequence + 3' sequence

SEQ ID NO: 15333 - DNA, 76 bp, Artificial Sequence; identical to SEQ ID NO: 3414
  Description of Artificial Sequence: Synthetic cashew; 5' sequence + inner sequence + 3' sequence

SEQ ID NO: 15334 - DNA, 76 bp, Artificial Sequence; identical to SEQ ID NO: 3764
  Description of Artificial Sequence: Synthetic cashew; 5' sequence + inner sequence + 3' sequence

SEQ ID NO: 15335 - DNA, 76 bp, Artificial Sequence; identical to SEQ ID NO: 3340
  Description of Artificial Sequence: Synthetic cashew; 5' sequence + inner sequence + 3' sequence

SEQ ID NO: 15336 - DNA, 76 bp, Artificial Sequence; identical to SEQ ID NO: 3286
  Description of Artificial Sequence: Synthetic cashew; 5' sequence + inner sequence + 3' sequence

SEQ ID NO: 15337 - DNA, 76 bp, Artificial Sequence; identical to SEQ ID NO: 3409
  Description of Artificial Sequence: Synthetic cashew; 5' sequence + inner sequence + 3' sequence

SEQ ID NO: 15338 - DNA, 76 bp, Artificial Sequence; identical to SEQ ID NO: 3217
  Description of Artificial Sequence: Synthetic cashew; 5' sequence + inner sequence + 3' sequence

SEQ ID NO: 15339 - DNA, 76 bp, Artificial Sequence; identical to SEQ ID NO: 3485
  Description of Artificial Sequence: Synthetic cashew; 5' sequence + inner sequence + 3' sequence

SEQ ID NO: 15340 - DNA, 76 bp, Artificial Sequence; identical to SEQ ID NO: 7420
  Description of Artificial Sequence: Synthetic cashew; 5' sequence + inner sequence + 3' sequence

SEQ ID NO: 15341 - DNA, 76 bp, Artificial Sequence; identical to SEQ ID NO: 3640
  Description of Artificial Sequence: Synthetic cashew; 5' sequence + inner sequence + 3' sequence

SEQ ID NO: 15342 - DNA, 76 bp, Artificial Sequence; identical to SEQ ID NO: 7348
  Description of Artificial Sequence: Synthetic cashew; 5' sequence + inner sequence + 3' sequence

SEQ ID NO: 15343 - DNA, 76 bp, Artificial Sequence; identical to SEQ ID NO: 3530
  Description of Artificial Sequence: Synthetic cashew; 5' sequence + inner sequence + 3' sequence

SEQ ID NO: 15344 - DNA, 76 bp, Artificial Sequence; identical to SEQ ID NO: 3390
  Description of Artificial Sequence: Synthetic cashew; 5' sequence + inner sequence + 3' sequence

SEQ ID NO: 15345 - DNA, 76 bp, Artificial Sequence; identical to SEQ ID NO: 3214
  Description of Artificial Sequence: Synthetic cashew; 5' sequence + inner sequence + 3' sequence

SEQ ID NO: 15346 - DNA, 76 bp, Artificial Sequence; identical to SEQ ID NO: 3255
  Description of Artificial Sequence: Synthetic cashew; 5' sequence + inner sequence + 3' sequence

SEQ ID NO: 15347 - DNA, 76 bp, Artificial Sequence; identical to SEQ ID NO: 3170
  Description of Artificial Sequence: Synthetic cashew; 5' sequence + inner sequence + 3' sequence

SEQ ID NO: 15348 - DNA, 76 bp, Artificial Sequence; identical to SEQ ID NO: 3387
  Description of Artificial Sequence: Synthetic cashew; 5' sequence + inner sequence + 3' sequence

SEQ ID NO: 15349 - DNA, 76 bp, Artificial Sequence; identical to SEQ ID NO: 3128
  Description of Artificial Sequence: Synthetic cashew; 5' sequence + inner sequence + 3' sequence

SEQ ID NO: 15350 - DNA, 76 bp, Artificial Sequence; identical to SEQ ID NO: 3400
  Description of Artificial Sequence: Synthetic cashew; 5' sequence + inner sequence + 3' sequence

SEQ ID NO: 15351 - DNA, 76 bp, Artificial Sequence; identical to SEQ ID NO: 3346
  Description of Artificial Sequence: Synthetic cashew; 5' sequence + inner sequence + 3' sequence

SEQ ID NO: 15352 - DNA, 76 bp, Artificial Sequence; identical to SEQ ID NO: 3775
  Description of Artificial Sequence: Synthetic cashew; 5' sequence + inner sequence + 3' sequence

SEQ ID NO: 15353 - DNA, 76 bp, Artificial Sequence; identical to SEQ ID NO: 3361
  Description of Artificial Sequence: Synthetic cashew; 5' sequence + inner sequence + 3' sequence

SEQ ID NO: 15354 - DNA, 76 bp, Artificial Sequence; identical to SEQ ID NO: 3568
  Description of Artificial Sequence: Synthetic cashew; 5' sequence + inner sequence + 3' sequence

SEQ ID NO: 15355 - DNA, 76 bp, Artificial Sequence; identical to SEQ ID NO: 3613
  Description of Artificial Sequence: Synthetic cashew; 5' sequence + inner sequence + 3' sequence

SEQ ID NO: 15356 - DNA, 76 bp, Artificial Sequence; identical to SEQ ID NO: 7651
  Description of Artificial Sequence: Synthetic cashew; 5' sequence + inner sequence + 3' sequence

SEQ ID NO: 15357 - DNA, 76 bp, Artificial Sequence; identical to SEQ ID NO: 7814
  Description of Artificial Sequence: Synthetic cashew; 5' sequence + inner sequence + 3' sequence

SEQ ID NO: 15358 - DNA, 76 bp, Artificial Sequence; identical to SEQ ID NO: 3218
  Description of Artificial Sequence: Synthetic cashew; 5' sequence + inner sequence + 3' sequence

SEQ ID NO: 15359 - DNA, 76 bp, Artificial Sequence; identical to SEQ ID NO: 3366
  Description of Artificial Sequence: Synthetic cashew; 5' sequence + inner sequence + 3' sequence

SEQ ID NO: 15360 - DNA, 76 bp, Artificial Sequence; identical to SEQ ID NO: 3419
  Description of Artificial Sequence: Synthetic cashew; 5' sequence + inner sequence + 3' sequence

SEQ ID NO: 15361 - DNA, 76 bp, Artificial Sequence; identical to SEQ ID NO: 3137
  Description of Artificial Sequence: Synthetic cashew; 5' sequence + inner sequence + 3' sequence

SEQ ID NO: 15362 - DNA, 76 bp, Artificial Sequence; identical to SEQ ID NO: 3273
  Description of Artificial Sequence: Synthetic cashew; 5' sequence + inner sequence + 3' sequence

SEQ ID NO: 15363 - DNA, 76 bp, Artificial Sequence; identical to SEQ ID NO: 3392
  Description of Artificial Sequence: Synthetic cashew; 5' sequence + inner sequence + 3' sequence

SEQ ID NO: 15364 - DNA, 76 bp, Artificial Sequence; identical to SEQ ID NO: 3294
  Description of Artificial Sequence: Synthetic cashew; 5' sequence + inner sequence + 3' sequence

SEQ ID NO: 15365 - DNA, 74 bp, Artificial Sequence; identical to SEQ ID NO: 3241
  Description of Artificial Sequence: Synthetic cashew; 5' sequence + inner sequence + 3' sequence

SEQ ID NO: 15366 - DNA, 76 bp, Artificial Sequence; identical to SEQ ID NO: 3901
  Description of Artificial Sequence: Synthetic cashew; 5' sequence + inner sequence + 3' sequence

SEQ ID NO: 15367 - DNA, 76 bp, Artificial Sequence; identical to SEQ ID NO: 7419
  Description of Artificial Sequence: Synthetic cashew; 5' sequence + inner sequence + 3' sequence

SEQ ID NO: 15368 - DNA, 76 bp, Artificial Sequence; identical to SEQ ID NO: 3695
  Description of Artificial Sequence: Synthetic cashew; 5' sequence + inner sequence + 3' sequence

SEQ ID NO: 15369 - DNA, 76 bp, Artificial Sequence; identical to SEQ ID NO: 3968
  Description of Artificial Sequence: Synthetic cashew; 5' sequence + inner sequence + 3' sequence

SEQ ID NO: 15370 - DNA, 76 bp, Artificial Sequence; identical to SEQ ID NO: 3457
  Description of Artificial Sequence: Synthetic cashew; 5' sequence + inner sequence + 3' sequence

SEQ ID NO: 15371 - DNA, 76 bp, Artificial Sequence; identical to SEQ ID NO: 3506
  Description of Artificial Sequence: Synthetic cashew; 5' sequence + inner sequence + 3' sequence

SEQ ID NO: 15372 - DNA, 76 bp, Artificial Sequence; identical to SEQ ID NO: 3478
  Description of Artificial Sequence: Synthetic cashew; 5' sequence + inner sequence + 3' sequence

SEQ ID NO: 15373 - DNA, 76 bp, Artificial Sequence; identical to SEQ ID NO: 3224
  Description of Artificial Sequence: Synthetic cashew; 5' sequence + inner sequence + 3' sequence

SEQ ID NO: 15374 - DNA, 76 bp, Artificial Sequence; identical to SEQ ID NO: 3563
  Description of Artificial Sequence: Synthetic cashew; 5' sequence + inner sequence + 3' sequence

SEQ ID NO: 15375 - DNA, 76 bp, Artificial Sequence; identical to SEQ ID NO: 3160
  Description of Artificial Sequence: Synthetic cashew; 5' sequence + inner sequence + 3' sequence

SEQ ID NO: 15376 - DNA, 76 bp, Artificial Sequence; identical to SEQ ID NO: 7406
  Description of Artificial Sequence: Synthetic cashew; 5' sequence + inner sequence + 3' sequence

SEQ ID NO: 15377 - DNA, 76 bp, Artificial Sequence; identical to SEQ ID NO: 7394
  Description of Artificial Sequence: Synthetic cashew; 5' sequence + inner sequence + 3' sequence

SEQ ID NO: 15378 - DNA, 76 bp, Artificial Sequence; identical to SEQ ID NO: 3519
  Description of Artificial Sequence: Synthetic cashew; 5' sequence + inner sequence + 3' sequence

SEQ ID NO: 15379 - DNA, 76 bp, Artificial Sequence; identical to SEQ ID NO: 11891
  Description of Artificial Sequence: Synthetic cashew; 5' sequence + inner sequence + 3' sequence

SEQ ID NO: 15380 - DNA, 76 bp, Artificial Sequence; identical to SEQ ID NO: 3379
  Description of Artificial Sequence: Synthetic cashew; 5' sequence + inner sequence + 3' sequence

SEQ ID NO: 15381 - DNA, 76 bp, Artificial Sequence; identical to SEQ ID NO: 7301
  Description of Artificial Sequence: Synthetic cashew; 5' sequence + inner sequence + 3' sequence

SEQ ID NO: 15382 - DNA, 76 bp, Artificial Sequence; identical to SEQ ID NO: 3523
  Description of Artificial Sequence: Synthetic cashew; 5' sequence + inner sequence + 3' sequence

SEQ ID NO: 15383 - DNA, 76 bp, Artificial Sequence; identical to SEQ ID NO: 3364
  Description of Artificial Sequence: Synthetic cashew; 5' sequence + inner sequence + 3' sequence

SEQ ID NO: 15384 - DNA, 76 bp, Artificial Sequence; identical to SEQ ID NO: 3350
  Description of Artificial Sequence: Synthetic cashew; 5' sequence + inner sequence + 3' sequence

SEQ ID NO: 15385 - DNA, 76 bp, Artificial Sequence; identical to SEQ ID NO: 7592
  Description of Artificial Sequence: Synthetic cashew; 5' sequence + inner sequence + 3' sequence

SEQ ID NO: 15386 - DNA, 76 bp, Artificial Sequence; identical to SEQ ID NO: 3517
  Description of Artificial Sequence: Synthetic cashew; 5' sequence + inner sequence + 3' sequence

SEQ ID NO: 15387 - DNA, 76 bp, Artificial Sequence; identical to SEQ ID NO: 3176
  Description of Artificial Sequence: Synthetic cashew; 5' sequence + inner sequence + 3' sequence

SEQ ID NO: 15388 - DNA, 76 bp, Artificial Sequence; identical to SEQ ID NO: 11618
  Description of Artificial Sequence: Synthetic cashew; 5' sequence + inner sequence + 3' sequence

SEQ ID NO: 15389 - DNA, 76 bp, Artificial Sequence; identical to SEQ ID NO: 3484
  Description of Artificial Sequence: Synthetic cashew; 5' sequence + inner sequence + 3' sequence

SEQ ID NO: 15390 - DNA, 76 bp, Artificial Sequence; identical to SEQ ID NO: 3433
  Description of Artificial Sequence: Synthetic cashew; 5' sequence + inner sequence + 3' sequence

SEQ ID NO: 15391 - DNA, 76 bp, Artificial Sequence; identical to SEQ ID NO: 3450
  Description of Artificial Sequence: Synthetic cashew; 5' sequence + inner sequence + 3' sequence

SEQ ID NO: 15392 - DNA, 76 bp, Artificial Sequence; identical to SEQ ID NO: 11546
  Description of Artificial Sequence: Synthetic cashew; 5' sequence + inner sequence + 3' sequence

SEQ ID NO: 15393 - DNA, 76 bp, Artificial Sequence; identical to SEQ ID NO: 3272
  Description of Artificial Sequence: Synthetic cashew; 5' sequence + inner sequence + 3' sequence

SEQ ID NO: 15394 - DNA, 76 bp, Artificial Sequence; identical to SEQ ID NO: 3124
  Description of Artificial Sequence: Synthetic cashew; 5' sequence + inner sequence + 3' sequence

SEQ ID NO: 15395 - DNA, 76 bp, Artificial Sequence; identical to SEQ ID NO: 3167
  Description of Artificial Sequence: Synthetic cashew; 5' sequence + inner sequence + 3' sequence

SEQ ID NO: 15396 - DNA, 76 bp, Artificial Sequence; identical to SEQ ID NO: 3391
  Description of Artificial Sequence: Synthetic cashew; 5' sequence + inner sequence + 3' sequence

SEQ ID NO: 15397 - DNA, 76 bp, Artificial Sequence; identical to SEQ ID NO: 3928
  Description of Artificial Sequence: Synthetic cashew; 5' sequence + inner sequence + 3' sequence

SEQ ID NO: 15398 - DNA, 76 bp, Artificial Sequence; identical to SEQ ID NO: 3313
  Description of Artificial Sequence: Synthetic cashew; 5' sequence + inner sequence + 3' sequence

SEQ ID NO: 15399 - DNA, 76 bp, Artificial Sequence; identical to SEQ ID NO: 3279
  Description of Artificial Sequence: Synthetic cashew; 5' sequence + inner sequence + 3' sequence

SEQ ID NO: 15400 - DNA, 76 bp, Artificial Sequence; identical to SEQ ID NO: 3296
  Description of Artificial Sequence: Synthetic cashew; 5' sequence + inner sequence + 3' sequence

SEQ ID NO: 15401 - DNA, 76 bp, Artificial Sequence; identical to SEQ ID NO: 3869
  Description of Artificial Sequence: Synthetic cashew; 5' sequence + inner sequence + 3' sequence

SEQ ID NO: 15402 - DNA, 76 bp, Artificial Sequence; identical to SEQ ID NO: 3953
  Description of Artificial Sequence: Synthetic cashew; 5' sequence + inner sequence + 3' sequence

SEQ ID NO: 15403 - DNA, 76 bp, Artificial Sequence; identical to SEQ ID NO: 3220
  Description of Artificial Sequence: Synthetic cashew; 5' sequence + inner sequence + 3' sequence

SEQ ID NO: 15404 - DNA, 76 bp, Artificial Sequence; identical to SEQ ID NO: 3727
  Description of Artificial Sequence: Synthetic cashew; 5' sequence + inner sequence + 3' sequence

SEQ ID NO: 15405 - DNA, 76 bp, Artificial Sequence; identical to SEQ ID NO: 3520
  Description of Artificial Sequence: Synthetic cashew; 5' sequence + inner sequence + 3' sequence

SEQ ID NO: 15406 - DNA, 76 bp, Artificial Sequence; identical to SEQ ID NO: 3441
  Description of Artificial Sequence: Synthetic cashew; 5' sequence + inner sequence + 3' sequence

SEQ ID NO: 15407 - DNA, 76 bp, Artificial Sequence; identical to SEQ ID NO: 3925
  Description of Artificial Sequence: Synthetic cashew; 5' sequence + inner sequence + 3' sequence

SEQ ID NO: 15408 - DNA, 76 bp, Artificial Sequence; identical to SEQ ID NO: 3426
  Description of Artificial Sequence: Synthetic cashew; 5' sequence + inner sequence + 3' sequence

SEQ ID NO: 15409 - DNA, 76 bp, Artificial Sequence; identical to SEQ ID NO: 7535
  Description of Artificial Sequence: Synthetic cashew; 5' sequence + inner sequence + 3' sequence

SEQ ID NO: 15410 - DNA, 76 bp, Artificial Sequence; identical to SEQ ID NO: 3994
  Description of Artificial Sequence: Synthetic cashew; 5' sequence + inner sequence + 3' sequence

SEQ ID NO: 15411 - DNA, 76 bp, Artificial Sequence; identical to SEQ ID NO: 7380
  Description of Artificial Sequence: Synthetic cashew; 5' sequence + inner sequence + 3' sequence

SEQ ID NO: 15412 - DNA, 76 bp, Artificial Sequence; identical to SEQ ID NO: 7907
  Description of Artificial Sequence: Synthetic cashew; 5' sequence + inner sequence + 3' sequence

SEQ ID NO: 15413 - DNA, 76 bp, Artificial Sequence; identical to SEQ ID NO: 3209
  Description of Artificial Sequence: Synthetic cashew; 5' sequence + inner sequence + 3' sequence

SEQ ID NO: 15414 - DNA, 76 bp, Artificial Sequence; identical to SEQ ID NO: 3625
  Description of Artificial Sequence: Synthetic cashew; 5' sequence + inner sequence + 3' sequence

SEQ ID NO: 15415 - DNA, 76 bp, Artificial Sequence; identical to SEQ ID NO: 3248
  Description of Artificial Sequence: Synthetic cashew; 5' sequence + inner sequence + 3' sequence

SEQ ID NO: 15416 - DNA, 76 bp, Artificial Sequence; identical to SEQ ID NO: 3481
  Description of Artificial Sequence: Synthetic cashew; 5' sequence + inner sequence + 3' sequence

SEQ ID NO: 15417 - DNA, 76 bp, Artificial Sequence; identical to SEQ ID NO: 3850
  Description of Artificial Sequence: Synthetic cashew; 5' sequence + inner sequence + 3' sequence

SEQ ID NO: 15418 - DNA, 76 bp, Artificial Sequence; identical to SEQ ID NO: 3793
  Description of Artificial Sequence: Synthetic cashew; 5' sequence + inner sequence + 3' sequence

SEQ ID NO: 15419 - DNA, 76 bp, Artificial Sequence; identical to SEQ ID NO: 3358
  Description of Artificial Sequence: Synthetic cashew; 5' sequence + inner sequence + 3' sequence

SEQ ID NO: 15420 - DNA, 76 bp, Artificial Sequence; identical to SEQ ID NO: 3244
  Description of Artificial Sequence: Synthetic cashew; 5' sequence + inner sequence + 3' sequence

SEQ ID NO: 15421 - DNA, 76 bp, Artificial Sequence; identical to SEQ ID NO: 3274
  Description of Artificial Sequence: Synthetic cashew; 5' sequence + inner sequence + 3' sequence

SEQ ID NO: 15422 - DNA, 75 bp, Artificial Sequence; identical to SEQ ID NO: 3334
  Description of Artificial Sequence: Synthetic cashew; 5' sequence + inner sequence + 3' sequence

SEQ ID NO: 15423 - DNA, 76 bp, Artificial Sequence; identical to SEQ ID NO: 3628
  Description of Artificial Sequence: Synthetic cashew; 5' sequence + inner sequence + 3' sequence

SEQ ID NO: 15424 - DNA, 76 bp, Artificial Sequence; identical to SEQ ID NO: 3504
  Description of Artificial Sequence: Synthetic cashew; 5' sequence + inner sequence + 3' sequence

SEQ ID NO: 15425 - DNA, 76 bp, Artificial Sequence; identical to SEQ ID NO: 3300
  Description of Artificial Sequence: Synthetic cashew; 5' sequence + inner sequence + 3' sequence

SEQ ID NO: 15426 - DNA, 76 bp, Artificial Sequence; identical to SEQ ID NO: 3615
  Description of Artificial Sequence: Synthetic cashew; 5' sequence + inner sequence + 3' sequence

SEQ ID NO: 15427 - DNA, 76 bp, Artificial Sequence; identical to SEQ ID NO: 3714
  Description of Artificial Sequence: Synthetic cashew; 5' sequence + inner sequence + 3' sequence

SEQ ID NO: 15428 - DNA, 76 bp, Artificial Sequence
  Description of Artificial Sequence: Synthetic cashew; 5' sequence + inner sequence + 3' sequence
tagggaagagaaggacatatgatcgcgacgagtaggcatgtcttctgtgcgcattgactagtacatgaccacttga

SEQ ID NO: 15429 - DNA, 76 bp, Artificial Sequence; identical to SEQ ID NO: 7525
  Description of Artificial Sequence: Synthetic cashew; 5' sequence + inner sequence + 3' sequence

SEQ ID NO: 15430 - DNA, 76 bp, Artificial Sequence; identical to SEQ ID NO: 3278
  Description of Artificial Sequence: Synthetic cashew; 5' sequence + inner sequence + 3' sequence

SEQ ID NO: 15431 - DNA, 76 bp, Artificial Sequence; identical to SEQ ID NO: 7401
  Description of Artificial Sequence: Synthetic cashew; 5' sequence + inner sequence + 3' sequence

SEQ ID NO: 15432 - DNA, 76 bp, Artificial Sequence; identical to SEQ ID NO: 3239
  Description of Artificial Sequence: Synthetic cashew; 5' sequence + inner sequence + 3' sequence

SEQ ID NO: 15433 - DNA, 76 bp, Artificial Sequence; identical to SEQ ID NO: 3410
  Description of Artificial Sequence: Synthetic cashew; 5' sequence + inner sequence + 3' sequence

SEQ ID NO: 15434 - DNA, 76 bp, Artificial Sequence; identical to SEQ ID NO: 7260
  Description of Artificial Sequence: Synthetic cashew; 5' sequence + inner sequence + 3' sequence

SEQ ID NO: 15435 - DNA, 76 bp, Artificial Sequence; identical to SEQ ID NO: 3846
  Description of Artificial Sequence: Synthetic cashew; 5' sequence + inner sequence + 3' sequence

SEQ ID NO: 15436 - DNA, 76 bp, Artificial Sequence; identical to SEQ ID NO: 3276
  Description of Artificial Sequence: Synthetic cashew; 5' sequence + inner sequence + 3' sequence

SEQ ID NO: 15437 - DNA, 76 bp, Artificial Sequence; identical to SEQ ID NO: 3281
  Description of Artificial Sequence: Synthetic cashew; 5' sequence + inner sequence + 3' sequence

SEQ ID NO: 15438 - DNA, 76 bp, Artificial Sequence; identical to SEQ ID NO: 3631
  Description of Artificial Sequence: Synthetic cashew; 5' sequence + inner sequence + 3' sequence

SEQ ID NO: 15439 - DNA, 76 bp, Artificial Sequence; identical to SEQ ID NO: 3950
  Description of Artificial Sequence: Synthetic cashew; 5' sequence + inner sequence + 3' sequence

SEQ ID NO: 15440 - DNA, 76 bp, Artificial Sequence; identical to SEQ ID NO: 3395
  Description of Artificial Sequence: Synthetic cashew; 5' sequence + inner sequence + 3' sequence

SEQ ID NO: 15441 - DNA, 76 bp, Artificial Sequence; identical to SEQ ID NO: 3891
  Description of Artificial Sequence: Synthetic cashew; 5' sequence + inner sequence + 3' sequence

SEQ ID NO: 15442 - DNA, 76 bp, Artificial Sequence; identical to SEQ ID NO: 3280
  Description of Artificial Sequence: Synthetic cashew; 5' sequence + inner sequence + 3' sequence

SEQ ID NO: 15443 - DNA, 76 bp, Artificial Sequence; identical to SEQ ID NO: 3374
  Description of Artificial Sequence: Synthetic cashew; 5' sequence + inner sequence + 3' sequence

SEQ ID NO: 15444 - DNA, 76 bp, Artificial Sequence; identical to SEQ ID NO: 7280
  Description of Artificial Sequence: Synthetic cashew; 5' sequence + inner sequence + 3' sequence

SEQ ID NO: 15445 - DNA, 76 bp, Artificial Sequence; identical to SEQ ID NO: 7792
  Description of Artificial Sequence: Synthetic cashew; 5' sequence + inner sequence + 3' sequence

SEQ ID NO: 15446 - DNA, 76 bp, Artificial Sequence; identical to SEQ ID NO: 3657
  Description of Artificial Sequence: Synthetic cashew; 5' sequence + inner sequence + 3' sequence

SEQ ID NO: 15447 - DNA, 75 bp, Artificial Sequence; identical to SEQ ID NO: 3259
  Description of Artificial Sequence: Synthetic cashew; 5' sequence + inner sequence + 3' sequence

SEQ ID NO: 15448 - DNA, 76 bp, Artificial Sequence; identical to SEQ ID NO: 3807
  Description of Artificial Sequence: Synthetic cashew; 5' sequence + inner sequence + 3' sequence

SEQ ID NO: 15449 - DNA, 76 bp, Artificial Sequence; identical to SEQ ID NO: 7238
  Description of Artificial Sequence: Synthetic cashew; 5' sequence + inner sequence + 3' sequence

SEQ ID NO: 15450 - DNA, 76 bp, Artificial Sequence; identical to SEQ ID NO: 3801
  Description of Artificial Sequence: Synthetic cashew; 5' sequence + inner sequence + 3' sequence

SEQ ID NO: 15451 - DNA, 76 bp, Artificial Sequence; identical to SEQ ID NO: 3212
  Description of Artificial Sequence: Synthetic cashew; 5' sequence + inner sequence + 3' sequence

SEQ ID NO: 15452 - DNA, 76 bp, Artificial Sequence; identical to SEQ ID NO: 4002
  Description of Artificial Sequence: Synthetic cashew; 5' sequence + inner sequence + 3' sequence

SEQ ID NO: 15453 - DNA, 76 bp, Artificial Sequence; identical to SEQ ID NO: 7585
  Description of Artificial Sequence: Synthetic cashew; 5' sequence + inner sequence + 3' sequence

SEQ ID NO: 15454 - DNA, 76 bp, Artificial Sequence; identical to SEQ ID NO: 7351
  Description of Artificial Sequence: Synthetic cashew; 5' sequence + inner sequence + 3' sequence

SEQ ID NO: 15455 - DNA, 76 bp, Artificial Sequence; identical to SEQ ID NO: 3811
  Description of Artificial Sequence: Synthetic cashew; 5' sequence + inner sequence + 3' sequence

SEQ ID NO: 15456 - DNA, 76 bp, Artificial Sequence; identical to SEQ ID NO: 3403
  Description of Artificial Sequence: Synthetic cashew; 5' sequence + inner sequence + 3' sequence

SEQ ID NO: 15457 - DNA, 76 bp, Artificial Sequence; identical to SEQ ID NO: 7613
  Description of Artificial Sequence: Synthetic cashew; 5' sequence + inner sequence + 3' sequence

SEQ ID NO: 15458 - DNA, 76 bp, Artificial Sequence; identical to SEQ ID NO: 3617
  Description of Artificial Sequence: Synthetic cashew; 5' sequence + inner sequence + 3' sequence

SEQ ID NO: 15459 - DNA, 76 bp, Artificial Sequence; identical to SEQ ID NO: 3620
  Description of Artificial Sequence: Synthetic cashew; 5' sequence + inner sequence + 3' sequence

SEQ ID NO: 15460 - DNA, 76 bp, Artificial Sequence; identical to SEQ ID NO: 3260
  Description of Artificial Sequence: Synthetic cashew; 5' sequence + inner sequence + 3' sequence

SEQ ID NO: 15461 - DNA, 76 bp, Artificial Sequence; identical to SEQ ID NO: 7755
  Description of Artificial Sequence: Synthetic cashew; 5' sequence + inner sequence + 3' sequence

SEQ ID NO: 15462 - DNA, 76 bp, Artificial Sequence; identical to SEQ ID NO: 3632
  Description of Artificial Sequence: Synthetic cashew; 5' sequence + inner sequence + 3' sequence

SEQ ID NO: 15463 - DNA, 76 bp, Artificial Sequence; identical to SEQ ID NO: 3771
  Description of Artificial Sequence: Synthetic cashew; 5' sequence + inner sequence + 3' sequence

SEQ ID NO: 15464 - DNA, 76 bp, Artificial Sequence; identical to SEQ ID NO: 3603
  Description of Artificial Sequence: Synthetic cashew; 5' sequence + inner sequence + 3' sequence

SEQ ID NO: 15465 - DNA, 76 bp, Artificial Sequence; identical to SEQ ID NO: 3515
  Description of Artificial Sequence: Synthetic cashew; 5' sequence + inner sequence + 3' sequence

SEQ ID NO: 15466 - DNA, 76 bp, Artificial Sequence; identical to SEQ ID NO: 3912
  Description of Artificial Sequence: Synthetic cashew; 5' sequence + inner sequence + 3' sequence

SEQ ID NO: 15467 - DNA, 76 bp, Artificial Sequence; identical to SEQ ID NO: 3249
  Description of Artificial Sequence: Synthetic cashew; 5' sequence + inner sequence + 3' sequence

SEQ ID NO: 15468 - DNA, 76 bp, Artificial Sequence; identical to SEQ ID NO: 7870
  Description of Artificial Sequence: Synthetic cashew; 5' sequence + inner sequence + 3' sequence

SEQ ID NO: 15469 - DNA, 76 bp, Artificial Sequence; identical to SEQ ID NO: 7384
  Description of Artificial Sequence: Synthetic cashew; 5' sequence + inner sequence + 3' sequence

SEQ ID NO: 15470 - DNA, 76 bp, Artificial Sequence; identical to SEQ ID NO: 3915
  Description of Artificial Sequence: Synthetic cashew; 5' sequence + inner sequence + 3' sequence

SEQ ID NO: 15471 - DNA, 76 bp, Artificial Sequence; identical to SEQ ID NO: 3534
  Description of Artificial Sequence: Synthetic cashew; 5' sequence + inner sequence + 3' sequence

SEQ ID NO: 15472 - DNA, 76 bp, Artificial Sequence; identical to SEQ ID NO: 3437
  Description of Artificial Sequence: Synthetic cashew; 5' sequence + inner sequence + 3' sequence

SEQ ID NO: 15473 - DNA, 76 bp, Artificial Sequence; identical to SEQ ID NO: 3900
  Description of Artificial Sequence: Synthetic cashew; 5' sequence + inner sequence + 3' sequence

SEQ ID NO: 15474 - DNA, 76 bp, Artificial Sequence; identical to SEQ ID NO: 7692
  Description of Artificial Sequence: Synthetic cashew; 5' sequence + inner sequence + 3' sequence

SEQ ID NO: 15475 - DNA, 76 bp, Artificial Sequence; identical to SEQ ID NO: 7775
  Description of Artificial Sequence: Synthetic cashew; 5' sequence + inner sequence + 3' sequence

SEQ ID NO: 15476 - DNA, 76 bp, Artificial Sequence; identical to SEQ ID NO: 7543
  Description of Artificial Sequence: Synthetic cashew; 5' sequence + inner sequence + 3' sequence

SEQ ID NO: 15477 - DNA, 76 bp, Artificial Sequence; identical to SEQ ID NO: 3210
  Description of Artificial Sequence: Synthetic cashew; 5' sequence + inner sequence + 3' sequence

SEQ ID NO: 15478 - DNA, 76 bp, Artificial Sequence; identical to SEQ ID NO: 3800
  Description of Artificial Sequence: Synthetic cashew; 5' sequence + inner sequence + 3' sequence

SEQ ID NO: 15479 - DNA, 76 bp, Artificial Sequence; identical to SEQ ID NO: 7230
  Description of Artificial Sequence: Synthetic cashew; 5' sequence + inner sequence + 3' sequence

SEQ ID NO: 15480 - DNA, 76 bp, Artificial Sequence; identical to SEQ ID NO: 3256
  Description of Artificial Sequence: Synthetic cashew; 5' sequence + inner sequence + 3' sequence

SEQ ID NO: 15481 - DNA, 76 bp, Artificial Sequence; identical to SEQ ID NO: 3345
  Description of Artificial Sequence: Synthetic cashew; 5' sequence + inner sequence + 3' sequence

SEQ ID NO: 15482 - DNA, 76 bp, Artificial Sequence; identical to SEQ ID NO: 11564
  Description of Artificial Sequence: Synthetic cashew; 5' sequence + inner sequence + 3' sequence

SEQ ID NO: 15483 - DNA, 76 bp, Artificial Sequence; identical to SEQ ID NO: 7312
  Description of Artificial Sequence: Synthetic cashew; 5' sequence + inner sequence + 3' sequence

SEQ ID NO: 15484 - DNA, 76 bp, Artificial Sequence; identical to SEQ ID NO: 3991
  Description of Artificial Sequence: Synthetic cashew; 5' sequence + inner sequence + 3' sequence

SEQ ID NO: 15485 - DNA, 75 bp, Artificial Sequence; identical to SEQ ID NO: 3251
  Description of Artificial Sequence: Synthetic cashew; 5' sequence + inner sequence + 3' sequence

SEQ ID NO: 15486 - DNA, 76 bp, Artificial Sequence; identical to SEQ ID NO: 3545
  Description of Artificial Sequence: Synthetic cashew; 5' sequence + inner sequence + 3' sequence

SEQ ID NO: 15487 - DNA, 76 bp, Artificial Sequence; identical to SEQ ID NO: 3701
  Description of Artificial Sequence: Synthetic cashew; 5' sequence + inner sequence + 3' sequence

SEQ ID NO: 15488 - DNA, 76 bp, Artificial Sequence; identical to SEQ ID NO: 3461
  Description of Artificial Sequence: Synthetic cashew; 5' sequence + inner sequence + 3' sequence

SEQ ID NO: 15489 - DNA, 76 bp, Artificial Sequence; identical to SEQ ID NO: 3867
  Description of Artificial Sequence: Synthetic cashew; 5' sequence + inner sequence + 3' sequence

SEQ ID NO: 15490 - DNA, 76 bp, Artificial Sequence; identical to SEQ ID NO: 3622
  Description of Artificial Sequence: Synthetic cashew; 5' sequence + inner sequence + 3' sequence

SEQ ID NO: 15491 - DNA, 76 bp, Artificial Sequence; identical to SEQ ID NO: 3333
  Description of Artificial Sequence: Synthetic cashew; 5' sequence + inner sequence + 3' sequence

SEQ ID NO: 15492 - DNA, 76 bp, Artificial Sequence; identical to SEQ ID NO: 3386
  Description of Artificial Sequence: Synthetic cashew; 5' sequence + inner sequence + 3' sequence

SEQ ID NO: 15493 - DNA, 76 bp, Artificial Sequence; identical to SEQ ID NO: 3984
  Description of Artificial Sequence: Synthetic cashew; 5' sequence + inner sequence + 3' sequence

SEQ ID NO: 15494 - DNA, 76 bp, Artificial Sequence; identical to SEQ ID NO: 3777
  Description of Artificial Sequence: Synthetic cashew; 5' sequence + inner sequence + 3' sequence

SEQ ID NO: 15495 - DNA, 76 bp, Artificial Sequence; identical to SEQ ID NO: 3275
  Description of Artificial Sequence: Synthetic cashew; 5' sequence + inner sequence + 3' sequence

SEQ ID NO: 15496 - DNA, 76 bp, Artificial Sequence; identical to SEQ ID NO: 3226
  Description of Artificial Sequence: Synthetic cashew; 5' sequence + inner sequence + 3' sequence

SEQ ID NO: 15497 - DNA, 76 bp, Artificial Sequence; identical to SEQ ID NO: 3647
  Description of Artificial Sequence: Synthetic cashew; 5' sequence + inner sequence + 3' sequence

SEQ ID NO: 15498 - DNA, 76 bp, Artificial Sequence; identical to SEQ ID NO: 3635
  Description of Artificial Sequence: Synthetic cashew; 5' sequence + inner sequence + 3' sequence

SEQ ID NO: 15499 - DNA, 76 bp, Artificial Sequence; identical to SEQ ID NO: 3375
  Description of Artificial Sequence: Synthetic cashew; 5' sequence + inner sequence + 3' sequence

SEQ ID NO: 15500 - DNA, 76 bp, Artificial Sequence; identical to SEQ ID NO: 11670
  Description of Artificial Sequence: Synthetic cashew; 5' sequence + inner sequence + 3' sequence

SEQ ID NO: 15501 - DNA, 76 bp, Artificial Sequence; identical to SEQ ID NO: 7499
  Description of Artificial Sequence: Synthetic cashew; 5' sequence + inner sequence + 3' sequence

SEQ ID NO: 15502 - DNA, 76 bp, Artificial Sequence; identical to SEQ ID NO: 3475
  Description of Artificial Sequence: Synthetic cashew; 5' sequence + inner sequence + 3' sequence

SEQ ID NO: 15503 - DNA, 76 bp, Artificial Sequence; identical to SEQ ID NO: 7605
  Description of Artificial Sequence: Synthetic cashew; 5' sequence + inner sequence + 3' sequence

SEQ ID NO: 15504 - DNA, 76 bp, Artificial Sequence; identical to SEQ ID NO: 3633
  Description of Artificial Sequence: Synthetic cashew; 5' sequence + inner sequence + 3' sequence

SEQ ID NO: 15505 - DNA, 76 bp, Artificial Sequence; identical to SEQ ID NO: 3789
  Description of Artificial Sequence: Synthetic cashew; 5' sequence + inner sequence + 3' sequence

SEQ ID NO: 15506 - DNA, 76 bp, Artificial Sequence; identical to SEQ ID NO: 3780
  Description of Artificial Sequence: Synthetic cashew; 5' sequence + inner sequence + 3' sequence

SEQ ID NO: 15507 - DNA, 76 bp, Artificial Sequence; identical to SEQ ID NO: 3396
  Description of Artificial Sequence: Synthetic cashew; 5' sequence + inner sequence + 3' sequence

SEQ ID NO: 15508 - DNA, 76 bp, Artificial Sequence; identical to SEQ ID NO: 3728
  Description of Artificial Sequence: Synthetic cashew; 5' sequence + inner sequence + 3' sequence

SEQ ID NO: 15509 - DNA, 76 bp, Artificial Sequence; identical to SEQ ID NO: 7393
  Description of Artificial Sequence: Synthetic cashew; 5' sequence + inner sequence + 3' sequence

SEQ ID NO: 15510 - DNA, 76 bp, Artificial Sequence; identical to SEQ ID NO: 11458
  Description of Artificial Sequence: Synthetic cashew; 5' sequence + inner sequence + 3' sequence

SEQ ID NO: 15511 - DNA, 76 bp, Artificial Sequence; identical to SEQ ID NO: 3181
  Description of Artificial Sequence: Synthetic cashew; 5' sequence + inner sequence + 3' sequence

SEQ ID NO: 15512 - DNA, 76 bp, Artificial Sequence; identical to SEQ ID NO: 3114
  Description of Artificial Sequence: Synthetic cashew; 5' sequence + inner sequence + 3' sequence

SEQ ID NO: 15513 - DNA, 79 bp, Artificial Sequence; identical to SEQ ID NO: 3864
  Description of Artificial Sequence: Synthetic cashew; 5' sequence + inner sequence + 3' sequence

SEQ ID NO: 15514 - DNA, 76 bp, Artificial Sequence; identical to SEQ ID NO: 11763
  Description of Artificial Sequence: Synthetic cashew; 5' sequence + inner sequence + 3' sequence

SEQ ID NO: 15515 - DNA, 76 bp, Artificial Sequence; identical to SEQ ID NO: 7492
  Description of Artificial Sequence: Synthetic cashew; 5' sequence + inner sequence + 3' sequence

SEQ ID NO: 15516 - DNA, 76 bp, Artificial Sequence; identical to SEQ ID NO: 3356
  Description of Artificial Sequence: Synthetic cashew; 5' sequence + inner sequence + 3' sequence

SEQ ID NO: 15517 - DNA, 76 bp, Artificial Sequence; identical to SEQ ID NO: 7999
  Description of Artificial Sequence: Synthetic cashew; 5' sequence + inner sequence + 3' sequence

SEQ ID NO: 15518 - DNA, 76 bp, Artificial Sequence; identical to SEQ ID NO: 3951
  Description of Artificial Sequence: Synthetic cashew; 5' sequence + inner sequence + 3' sequence

SEQ ID NO: 15519 - DNA, 76 bp, Artificial Sequence; identical to SEQ ID NO: 7428
  Description of Artificial Sequence: Synthetic cashew; 5' sequence + inner sequence + 3' sequence

SEQ ID NO: 15520 - DNA, 76 bp, Artificial Sequence; identical to SEQ ID NO: 7653
  Description of Artificial Sequence: Synthetic cashew; 5' sequence + inner sequence + 3' sequence

SEQ ID NO: 15521 - DNA, 76 bp, Artificial Sequence
  Description of Artificial Sequence: Synthetic cashew; 5' sequence + inner sequence + 3' sequence
tagggaagagaaggacatatgatccgcacgtagccctatcaggggtgcatgcattgactagtacatgaccacttga

SEQ ID NO: 15522 - DNA, 76 bp, Artificial Sequence; identical to SEQ ID NO: 11844
  Description of Artificial Sequence: Synthetic cashew; 5' sequence + inner sequence + 3' sequence

SEQ ID NO: 15523 - DNA, 76 bp, Artificial Sequence; identical to SEQ ID NO: 3328
  Description of Artificial Sequence: Synthetic cashew; 5' sequence + inner sequence + 3' sequence

SEQ ID NO: 15524 - DNA, 76 bp, Artificial Sequence; identical to SEQ ID NO: 7459
  Description of Artificial Sequence: Synthetic cashew; 5' sequence + inner sequence + 3' sequence

SEQ ID NO: 15525 - DNA, 76 bp, Artificial Sequence; identical to SEQ ID NO: 7445
  Description of Artificial Sequence: Synthetic cashew; 5' sequence + inner sequence + 3' sequence

SEQ ID NO: 15526 - DNA, 76 bp, Artificial Sequence; identical to SEQ ID NO: 3101
  Description of Artificial Sequence: Synthetic cashew; 5' sequence + inner sequence + 3' sequence

SEQ ID NO: 15527 - DNA, 76 bp, Artificial Sequence; identical to SEQ ID NO: 3510
  Description of Artificial Sequence: Synthetic cashew; 5' sequence + inner sequence + 3' sequence

SEQ ID NO: 15528 - DNA, 76 bp, Artificial Sequence; identical to SEQ ID NO: 3422
  Description of Artificial Sequence: Synthetic cashew; 5' sequence + inner sequence + 3' sequence

SEQ ID NO: 15529 - DNA, 76 bp, Artificial Sequence; identical to SEQ ID NO: 3405
  Description of Artificial Sequence: Synthetic cashew; 5' sequence + inner sequence + 3' sequence

SEQ ID NO: 15530 - DNA, 76 bp, Artificial Sequence; identical to SEQ ID NO: 3326
  Description of Artificial Sequence: Synthetic cashew; 5' sequence + inner sequence + 3' sequence

SEQ ID NO: 15531 - DNA, 76 bp, Artificial Sequence; identical to SEQ ID NO: 7682
  Description of Artificial Sequence: Synthetic cashew; 5' sequence + inner sequence + 3' sequence

SEQ ID NO: 15532 - DNA, 76 bp, Artificial Sequence; identical to SEQ ID NO: 3637
  Description of Artificial Sequence: Synthetic cashew; 5' sequence + inner sequence + 3' sequence

SEQ ID NO: 15533 - DNA, 76 bp, Artificial Sequence; identical to SEQ ID NO: 3686
  Description of Artificial Sequence: Synthetic cashew; 5' sequence + inner sequence + 3' sequence

SEQ ID NO: 15534 - DNA, 76 bp, Artificial Sequence; identical to SEQ ID NO: 3560
  Description of Artificial Sequence: Synthetic cashew; 5' sequence + inner sequence + 3' sequence

SEQ ID NO: 15535 - DNA, 76 bp, Artificial Sequence; identical to SEQ ID NO: 3746
  Description of Artificial Sequence: Synthetic cashew; 5' sequence + inner sequence + 3' sequence

SEQ ID NO: 15536 - DNA, 76 bp, Artificial Sequence; identical to SEQ ID NO: 3277
  Description of Artificial Sequence: Synthetic cashew; 5' sequence + inner sequence + 3' sequence

SEQ ID NO: 15537 - DNA, 76 bp, Artificial Sequence; identical to SEQ ID NO: 3324
  Description of Artificial Sequence: Synthetic cashew; 5' sequence + inner sequence + 3' sequence

SEQ ID NO: 15538 - DNA, 77 bp, Artificial Sequence; identical to SEQ ID NO: 3216
  Description of Artificial Sequence: Synthetic cashew; 5' sequence + inner sequence + 3' sequence

SEQ ID NO: 15539 - DNA, 76 bp, Artificial Sequence; identical to SEQ ID NO: 7722
  Description of Artificial Sequence: Synthetic cashew; 5' sequence + inner sequence + 3' sequence

SEQ ID NO: 15540 - DNA, 76 bp, Artificial Sequence; identical to SEQ ID NO: 7377
  Description of Artificial Sequence: Synthetic cashew; 5' sequence + inner sequence + 3' sequence

SEQ ID NO: 15541 - DNA, 76 bp, Artificial Sequence; identical to SEQ ID NO: 3474
  Description of Artificial Sequence: Synthetic cashew; 5' sequence + inner sequence + 3' sequence

SEQ ID NO: 15542 - DNA, 76 bp, Artificial Sequence; identical to SEQ ID NO: 3227
  Description of Artificial Sequence: Synthetic cashew; 5' sequence + inner sequence + 3' sequence

SEQ ID NO: 15543 - DNA, 76 bp, Artificial Sequence; identical to SEQ ID NO: 11579
  Description of Artificial Sequence: Synthetic cashew; 5' sequence + inner sequence + 3' sequence

SEQ ID NO: 15544 - DNA, 76 bp, Artificial Sequence; identical to SEQ ID NO: 3691
  Description of Artificial Sequence: Synthetic cashew; 5' sequence + inner sequence + 3' sequence

SEQ ID NO: 15545 - DNA, 76 bp, Artificial Sequence; identical to SEQ ID NO: 7317
  Description of Artificial Sequence: Synthetic cashew; 5' sequence + inner sequence + 3' sequence

SEQ ID NO: 15546 - DNA, 76 bp, Artificial Sequence; identical to SEQ ID NO: 3513
  Description of Artificial Sequence: Synthetic cashew; 5' sequence + inner sequence + 3' sequence

SEQ ID NO: 15547 - DNA, 76 bp, Artificial Sequence; identical to SEQ ID NO: 3684
  Description of Artificial Sequence: Synthetic cashew; 5' sequence + inner sequence + 3' sequence

SEQ ID NO: 15548 - DNA, 76 bp, Artificial Sequence; identical to SEQ ID NO: 7580
  Description of Artificial Sequence: Synthetic cashew; 5' sequence + inner sequence + 3' sequence

SEQ ID NO: 15549 - DNA, 76 bp, Artificial Sequence; identical to SEQ ID NO: 3666
  Description of Artificial Sequence: Synthetic cashew; 5' sequence + inner sequence + 3' sequence

SEQ ID NO: 15550 - DNA, 76 bp, Artificial Sequence; identical to SEQ ID NO: 7429
  Description of Artificial Sequence: Synthetic cashew; 5' sequence + inner sequence + 3' sequence

SEQ ID NO: 15551 - DNA, 76 bp, Artificial Sequence; identical to SEQ ID NO: 3597
  Description of Artificial Sequence: Synthetic cashew; 5' sequence + inner sequence + 3' sequence

SEQ ID NO: 15552 - DNA, 76 bp, Artificial Sequence; identical to SEQ ID NO: 3415
  Description of Artificial Sequence: Synthetic cashew; 5' sequence + inner sequence + 3' sequence

SEQ ID NO: 15553 - DNA, 76 bp, Artificial Sequence; identical to SEQ ID NO: 3322
  Description of Artificial Sequence: Synthetic cashew; 5' sequence + inner sequence + 3' sequence

SEQ ID NO: 15554 - DNA, 76 bp, Artificial Sequence; identical to SEQ ID NO: 7555
  Description of Artificial Sequence: Synthetic cashew; 5' sequence + inner sequence + 3' sequence

SEQ ID NO: 15555 - DNA, 76 bp, Artificial Sequence; identical to SEQ ID NO: 3331
  Description of Artificial Sequence: Synthetic cashew; 5' sequence + inner sequence + 3' sequence

SEQ ID NO: 15556 - DNA, 76 bp, Artificial Sequence; identical to SEQ ID NO: 3399
  Description of Artificial Sequence: Synthetic cashew; 5' sequence + inner sequence + 3' sequence

SEQ ID NO: 15557 - DNA, 76 bp, Artificial Sequence; identical to SEQ ID NO: 3949
  Description of Artificial Sequence: Synthetic cashew; 5' sequence + inner sequence + 3' sequence

SEQ ID NO: 15558 - DNA, 76 bp, Artificial Sequence; identical to SEQ ID NO: 3566
  Description of Artificial Sequence: Synthetic cashew; 5' sequence + inner sequence + 3' sequence

SEQ ID NO: 15559 - DNA, 76 bp, Artificial Sequence; identical to SEQ ID NO: 3467
  Description of Artificial Sequence: Synthetic cashew; 5' sequence + inner sequence + 3' sequence

SEQ ID NO: 15560 - DNA, 76 bp, Artificial Sequence; identical to SEQ ID NO: 3393
  Description of Artificial Sequence: Synthetic cashew; 5' sequence + inner sequence + 3' sequence

SEQ ID NO: 15561 - DNA, 76 bp, Artificial Sequence; identical to SEQ ID NO: 3476
  Description of Artificial Sequence: Synthetic cashew; 5' sequence + inner sequence + 3' sequence

SEQ ID NO: 15562 - DNA, 76 bp, Artificial Sequence; identical to SEQ ID NO: 3557
  Description of Artificial Sequence: Synthetic cashew; 5' sequence + inner sequence + 3' sequence

SEQ ID NO: 15563 - DNA, 76 bp, Artificial Sequence; identical to SEQ ID NO: 3141
  Description of Artificial Sequence: Synthetic cashew; 5' sequence + inner sequence + 3' sequence

SEQ ID NO: 15564 - DNA, 76 bp, Artificial Sequence; identical to SEQ ID NO: 3860
  Description of Artificial Sequence: Synthetic cashew; 5' sequence + inner sequence + 3' sequence

SEQ ID NO: 15565 - DNA, 76 bp, Artificial Sequence; identical to SEQ ID NO: 7644
  Description of Artificial Sequence: Synthetic cashew; 5' sequence + inner sequence + 3' sequence

SEQ ID NO: 15566 - DNA, 73 bp, Artificial Sequence; identical to SEQ ID NO: 3885
  Description of Artificial Sequence: Synthetic cashew; 5' sequence + inner sequence + 3' sequence

SEQ ID NO: 15567 - DNA, 76 bp, Artificial Sequence; identical to SEQ ID NO: 7740
  Description of Artificial Sequence: Synthetic cashew; 5' sequence + inner sequence + 3' sequence

SEQ ID NO: 15568 - DNA, 76 bp, Artificial Sequence; identical to SEQ ID NO: 3911
  Description of Artificial Sequence: Synthetic cashew; 5' sequence + inner sequence + 3' sequence

SEQ ID NO: 15569 - DNA, 76 bp, Artificial Sequence; identical to SEQ ID NO: 3932
  Description of Artificial Sequence: Synthetic cashew; 5' sequence + inner sequence + 3' sequence

SEQ ID NO: 15570 - DNA, 76 bp, Artificial Sequence; identical to SEQ ID NO: 7748
  Description of Artificial Sequence: Synthetic cashew; 5' sequence + inner sequence + 3' sequence

SEQ ID NO: 15571 - DNA, 76 bp, Artificial Sequence; identical to SEQ ID NO: 3440
  Description of Artificial Sequence: Synthetic cashew; 5' sequence + inner sequence + 3' sequence

SEQ ID NO: 15572 - DNA, 76 bp, Artificial Sequence; identical to SEQ ID NO: 3757
  Description of Artificial Sequence: Synthetic cashew; 5' sequence + inner sequence + 3' sequence

SEQ ID NO: 15573 - DNA, 76 bp, Artificial Sequence; identical to SEQ ID NO: 7808
  Description of Artificial Sequence: Synthetic cashew; 5' sequence + inner sequence + 3' sequence

SEQ ID NO: 15574 - DNA, 76 bp, Artificial Sequence; identical to SEQ ID NO: 3219
  Description of Artificial Sequence: Synthetic cashew; 5' sequence + inner sequence + 3' sequence

SEQ ID NO: 15575 - DNA, 76 bp, Artificial Sequence; identical to SEQ ID NO: 7530
  Description of Artificial Sequence: Synthetic cashew; 5' sequence + inner sequence + 3' sequence

SEQ ID NO: 15576 - DNA, 76 bp, Artificial Sequence; identical to SEQ ID NO: 3464
  Description of Artificial Sequence: Synthetic cashew; 5' sequence + inner sequence + 3' sequence

SEQ ID NO: 15577 - DNA, 77 bp, Artificial Sequence; identical to SEQ ID NO: 7619
  Description of Artificial Sequence: Synthetic cashew; 5' sequence + inner sequence + 3' sequence

SEQ ID NO: 15578 - DNA, 76 bp, Artificial Sequence; identical to SEQ ID NO: 11876
  Description of Artificial Sequence: Synthetic cashew; 5' sequence + inner sequence + 3' sequence

SEQ ID NO: 15579 - DNA, 76 bp, Artificial Sequence; identical to SEQ ID NO: 3697
  Description of Artificial Sequence: Synthetic cashew; 5' sequence + inner sequence + 3' sequence

SEQ ID NO: 15580 - DNA, 76 bp, Artificial Sequence; identical to SEQ ID NO: 7451
  Description of Artificial Sequence: Synthetic cashew; 5' sequence + inner sequence + 3' sequence

SEQ ID NO: 15581 - DNA, 76 bp, Artificial Sequence
  Description of Artificial Sequence: Synthetic cashew; 5' sequence + inner sequence + 3' sequence
tagggaagagaaggacatatgattcatcgcatgacgtctcatcgctgtggacattgactagtacatgaccacttga

SEQ ID NO: 15582 - DNA, 76 bp, Artificial Sequence; identical to SEQ ID NO: 7407
  Description of Artificial Sequence: Synthetic cashew; 5' sequence + inner sequence + 3' sequence

SEQ ID NO: 15583 - DNA, 76 bp, Artificial Sequence; identical to SEQ ID NO: 3289
  Description of Artificial Sequence: Synthetic cashew; 5' sequence + inner sequence + 3' sequence

SEQ ID NO: 15584 - DNA, 76 bp, Artificial Sequence; identical to SEQ ID NO: 3420
  Description of Artificial Sequence: Synthetic cashew; 5' sequence + inner sequence + 3' sequence

SEQ ID NO: 15585 - DNA, 76 bp, Artificial Sequence; identical to SEQ ID NO: 7650
  Description of Artificial Sequence: Synthetic cashew; 5' sequence + inner sequence + 3' sequence

SEQ ID NO: 15586 - DNA, 76 bp, Artificial Sequence; identical to SEQ ID NO: 3636
  Description of Artificial Sequence: Synthetic cashew; 5' sequence + inner sequence + 3' sequence

SEQ ID NO: 15587 - DNA, 76 bp, Artificial Sequence; identical to SEQ ID NO: 3493
  Description of Artificial Sequence: Synthetic cashew; 5' sequence + inner sequence + 3' sequence

SEQ ID NO: 15588 - DNA, 76 bp, Artificial Sequence; identical to SEQ ID NO: 7491
  Description of Artificial Sequence: Synthetic cashew; 5' sequence + inner sequence + 3' sequence

SEQ ID NO: 15589 - DNA, 76 bp, Artificial Sequence; identical to SEQ ID NO: 11682
  Description of Artificial Sequence: Synthetic cashew; 5' sequence + inner sequence + 3' sequence

SEQ ID NO: 15590 - DNA, 76 bp, Artificial Sequence; identical to SEQ ID NO: 11752
  Description of Artificial Sequence: Synthetic cashew; 5' sequence + inner sequence + 3' sequence

SEQ ID NO: 15591 - DNA, 76 bp, Artificial Sequence; identical to SEQ ID NO: 7727
  Description of Artificial Sequence: Synthetic cashew; 5' sequence + inner sequence + 3' sequence

SEQ ID NO: 15592 - DNA, 76 bp, Artificial Sequence
  Description of Artificial Sequence: Synthetic cashew; 5' sequence + inner sequence + 3' sequence
tagggaagagaaggacatatgatcgcgacgagtaggcatgtcttctgcgtgcattgactagtacatgaccacttga

SEQ ID NO: 15593 - DNA, 74 bp, Artificial Sequence; identical to SEQ ID NO: 3423
  Description of Artificial Sequence: Synthetic cashew; 5' sequence + inner sequence + 3' sequence

SEQ ID NO: 15594 - DNA, 76 bp, Artificial Sequence; identical to SEQ ID NO: 3397
  Description of Artificial Sequence: Synthetic cashew; 5' sequence + inner sequence + 3' sequence

SEQ ID NO: 15595 - DNA, 76 bp, Artificial Sequence; identical to SEQ ID NO: 3610
  Description of Artificial Sequence: Synthetic cashew; 5' sequence + inner sequence + 3' sequence

SEQ ID NO: 15596 - DNA, 76 bp, Artificial Sequence; identical to SEQ ID NO: 7425
  Description of Artificial Sequence: Synthetic cashew; 5' sequence + inner sequence + 3' sequence

SEQ ID NO: 15597 - DNA, 76 bp, Artificial Sequence; identical to SEQ ID NO: 3575
  Description of Artificial Sequence: Synthetic cashew; 5' sequence + inner sequence + 3' sequence

SEQ ID NO: 15598 - DNA, 76 bp, Artificial Sequence; identical to SEQ ID NO: 11936
  Description of Artificial Sequence: Synthetic cashew; 5' sequence + inner sequence + 3' sequence

SEQ ID NO: 15599 - DNA, 76 bp, Artificial Sequence; identical to SEQ ID NO: 11782
  Description of Artificial Sequence: Synthetic cashew; 5' sequence + inner sequence + 3' sequence

SEQ ID NO: 15600 - DNA, 76 bp, Artificial Sequence; identical to SEQ ID NO: 7513
  Description of Artificial Sequence: Synthetic cashew; 5' sequence + inner sequence + 3' sequence

SEQ ID NO: 15601 - DNA, 76 bp, Artificial Sequence; identical to SEQ ID NO: 3231
  Description of Artificial Sequence: Synthetic cashew; 5' sequence + inner sequence + 3' sequence

SEQ ID NO: 15602 - DNA, 76 bp, Artificial Sequence; identical to SEQ ID NO: 3551
  Description of Artificial Sequence: Synthetic cashew; 5' sequence + inner sequence + 3' sequence

SEQ ID NO: 15603 - DNA, 76 bp, Artificial Sequence; identical to SEQ ID NO: 3662
  Description of Artificial Sequence: Synthetic cashew; 5' sequence + inner sequence + 3' sequence

SEQ ID NO: 15604 - DNA, 76 bp, Artificial Sequence; identical to SEQ ID NO: 3808
  Description of Artificial Sequence: Synthetic cashew; 5' sequence + inner sequence + 3' sequence

SEQ ID NO: 15605 - DNA, 76 bp, Artificial Sequence; identical to SEQ ID NO: 3357
  Description of Artificial Sequence: Synthetic cashew; 5' sequence + inner sequence + 3' sequence

SEQ ID NO: 15606 - DNA, 76 bp, Artificial Sequence; identical to SEQ ID NO: 8001
  Description of Artificial Sequence: Synthetic cashew; 5' sequence + inner sequence + 3' sequence

SEQ ID NO: 15607 - DNA, 76 bp, Artificial Sequence; identical to SEQ ID NO: 3225
  Description of Artificial Sequence: Synthetic cashew; 5' sequence + inner sequence + 3' sequence

SEQ ID NO: 15608 - DNA, 76 bp, Artificial Sequence; identical to SEQ ID NO: 3698
  Description of Artificial Sequence: Synthetic cashew; 5' sequence + inner sequence + 3' sequence

SEQ ID NO: 15609 - DNA, 76 bp, Artificial Sequence; identical to SEQ ID NO: 3921
  Description of Artificial Sequence: Synthetic cashew; 5' sequence + inner sequence + 3' sequence

SEQ ID NO: 15610 - DNA, 76 bp, Artificial Sequence; identical to SEQ ID NO: 3338
  Description of Artificial Sequence: Synthetic cashew; 5' sequence + inner sequence + 3' sequence

SEQ ID NO: 15611 - DNA, 76 bp, Artificial Sequence; identical to SEQ ID NO: 3881
  Description of Artificial Sequence: Synthetic cashew; 5' sequence + inner sequence + 3' sequence

SEQ ID NO: 15612 - DNA, 76 bp, Artificial Sequence
  Description of Artificial Sequence: Synthetic cashew; 5' sequence + inner sequence + 3' sequence
tagggaagagaaggacatatgatcgcgacgcgtaggcatgtcttctgtgtgcattgactagtacatgaccacttga

SEQ ID NO: 15613 - DNA, 76 bp, Artificial Sequence; identical to SEQ ID NO: 3306
  Description of Artificial Sequence: Synthetic cashew; 5' sequence + inner sequence + 3' sequence

SEQ ID NO: 15614 - DNA, 76 bp, Artificial Sequence; identical to SEQ ID NO: 3574
  Description of Artificial Sequence: Synthetic cashew; 5' sequence + inner sequence + 3' sequence

SEQ ID NO: 15615 - DNA, 76 bp, Artificial Sequence; identical to SEQ ID NO: 3363
  Description of Artificial Sequence: Synthetic cashew; 5' sequence + inner sequence + 3' sequence

SEQ ID NO: 15616 - DNA, 76 bp, Artificial Sequence; identical to SEQ ID NO: 7240
  Description of Artificial Sequence: Synthetic cashew; 5' sequence + inner sequence + 3' sequence

SEQ ID NO: 15617 - DNA, 76 bp, Artificial Sequence; identical to SEQ ID NO: 3143
  Description of Artificial Sequence: Synthetic cashew; 5' sequence + inner sequence + 3' sequence

SEQ ID NO: 15618 - DNA, 76 bp, Artificial Sequence
  Description of Artificial Sequence: Synthetic cashew; 5' sequence + inner sequence + 3' sequence
tagggaagagaaggacatatgatcgcgacgagtatgcatgtcttctgtgtgcattgactagtacatgaccacttga

SEQ ID NO: 15619 - DNA, 76 bp, Artificial Sequence; identical to SEQ ID NO: 11950
  Description of Artificial Sequence: Synthetic cashew; 5' sequence + inner sequence + 3' sequence

SEQ ID NO: 15620 - DNA, 76 bp, Artificial Sequence; identical to SEQ ID NO: 11877
  Description of Artificial Sequence: Synthetic cashew; 5' sequence + inner sequence + 3' sequence

SEQ ID NO: 15621 - DNA, 76 bp, Artificial Sequence; identical to SEQ ID NO: 7573
  Description of Artificial Sequence: Synthetic cashew; 5' sequence + inner sequence + 3' sequence

SEQ ID NO: 15622 - DNA, 76 bp, Artificial Sequence; identical to SEQ ID NO: 3236
  Description of Artificial Sequence: Synthetic cashew; 5' sequence + inner sequence + 3' sequence

SEQ ID NO: 15623 - DNA, 76 bp, Artificial Sequence; identical to SEQ ID NO: 7935
  Description of Artificial Sequence: Synthetic cashew; 5' sequence + inner sequence + 3' sequence

SEQ ID NO: 15624 - DNA, 76 bp, Artificial Sequence; identical to SEQ ID NO: 3535
  Description of Artificial Sequence: Synthetic cashew; 5' sequence + inner sequence + 3' sequence

SEQ ID NO: 15625 - DNA, 76 bp, Artificial Sequence; identical to SEQ ID NO: 3862
  Description of Artificial Sequence: Synthetic cashew; 5' sequence + inner sequence + 3' sequence

SEQ ID NO: 15626 - DNA, 75 bp, Artificial Sequence
  Description of Artificial Sequence: Synthetic cashew; 5' sequence + inner sequence + 3' sequence
tagggaagagaaggacatatgatgcacgtcgaaacacgtagccatgcacggcttgactagtacatgaccacttga

SEQ ID NO: 15627 - DNA, 76 bp, Artificial Sequence; identical to SEQ ID NO: 3424
  Description of Artificial Sequence: Synthetic cashew; 5' sequence + inner sequence + 3' sequence

SEQ ID NO: 15628 - DNA, 76 bp, Artificial Sequence; identical to SEQ ID NO: 3831
  Description of Artificial Sequence: Synthetic cashew; 5' sequence + inner sequence + 3' sequence

SEQ ID NO: 15629 - DNA, 76 bp, Artificial Sequence; identical to SEQ ID NO: 3398
  Description of Artificial Sequence: Synthetic cashew; 5' sequence + inner sequence + 3' sequence

SEQ ID NO: 15630 - DNA, 76 bp, Artificial Sequence; identical to SEQ ID NO: 7889
  Description of Artificial Sequence: Synthetic cashew; 5' sequence + inner sequence + 3' sequence

SEQ ID NO: 15631 - DNA, 76 bp, Artificial Sequence; identical to SEQ ID NO: 7472
  Description of Artificial Sequence: Synthetic cashew; 5' sequence + inner sequence + 3' sequence

SEQ ID NO: 15632 - DNA, 76 bp, Artificial Sequence; identical to SEQ ID NO: 11825
  Description of Artificial Sequence: Synthetic cashew; 5' sequence + inner sequence + 3' sequence

SEQ ID NO: 15633 - DNA, 76 bp, Artificial Sequence; identical to SEQ ID NO: 3452
  Description of Artificial Sequence: Synthetic cashew; 5' sequence + inner sequence + 3' sequence

SEQ ID NO: 15634 - DNA, 76 bp, Artificial Sequence; identical to SEQ ID NO: 3486
  Description of Artificial Sequence: Synthetic cashew; 5' sequence + inner sequence + 3' sequence

SEQ ID NO: 15635 - DNA, 76 bp, Artificial Sequence; identical to SEQ ID NO: 7913
  Description of Artificial Sequence: Synthetic cashew; 5' sequence + inner sequence + 3' sequence

SEQ ID NO: 15636 - DNA, 76 bp, Artificial Sequence; identical to SEQ ID NO: 7611
  Description of Artificial Sequence: Synthetic cashew; 5' sequence + inner sequence + 3' sequence

SEQ ID NO: 15637 - DNA, 76 bp, Artificial Sequence; identical to SEQ ID NO: 7356
  Description of Artificial Sequence: Synthetic cashew; 5' sequence + inner sequence + 3' sequence

SEQ ID NO: 15638 - DNA, 76 bp, Artificial Sequence; identical to SEQ ID NO: 3626
  Description of Artificial Sequence: Synthetic cashew; 5' sequence + inner sequence + 3' sequence

SEQ ID NO: 15639 - DNA, 76 bp, Artificial Sequence; identical to SEQ ID NO: 3380
  Description of Artificial Sequence: Synthetic cashew; 5' sequence + inner sequence + 3' sequence

SEQ ID NO: 15640 - DNA, 76 bp, Artificial Sequence; identical to SEQ ID NO: 11767
  Description of Artificial Sequence: Synthetic cashew; 5' sequence + inner sequence + 3' sequence

SEQ ID NO: 15641 - DNA, 76 bp, Artificial Sequence; identical to SEQ ID NO: 7940
  Description of Artificial Sequence: Synthetic cashew; 5' sequence + inner sequence + 3' sequence

SEQ ID NO: 15642 - DNA, 76 bp, Artificial Sequence; identical to SEQ ID NO: 3596
  Description of Artificial Sequence: Synthetic cashew; 5' sequence + inner sequence + 3' sequence

SEQ ID NO: 15643 - DNA, 76 bp, Artificial Sequence; identical to SEQ ID NO: 3518
  Description of Artificial Sequence: Synthetic cashew; 5' sequence + inner sequence + 3' sequence

SEQ ID NO: 15644 - DNA, 77 bp, Artificial Sequence; identical to SEQ ID NO: 3503
  Description of Artificial Sequence: Synthetic cashew; 5' sequence + inner sequence + 3' sequence

SEQ ID NO: 15645 - DNA, 76 bp, Artificial Sequence; identical to SEQ ID NO: 7845
  Description of Artificial Sequence: Synthetic cashew; 5' sequence + inner sequence + 3' sequence

SEQ ID NO: 15646 - DNA, 76 bp, Artificial Sequence; identical to SEQ ID NO: 3919
  Description of Artificial Sequence: Synthetic cashew; 5' sequence + inner sequence + 3' sequence

SEQ ID NO: 15647 - DNA, 76 bp, Artificial Sequence; identical to SEQ ID NO: 3920
  Description of Artificial Sequence: Synthetic cashew; 5' sequence + inner sequence + 3' sequence

SEQ ID NO: 15648 - DNA, 76 bp, Artificial Sequence; identical to SEQ ID NO: 7616
  Description of Artificial Sequence: Synthetic cashew; 5' sequence + inner sequence + 3' sequence

SEQ ID NO: 15649 - DNA, 76 bp, Artificial Sequence; identical to SEQ ID NO: 3465
  Description of Artificial Sequence: Synthetic cashew; 5' sequence + inner sequence + 3' sequence

SEQ ID NO: 15650 - DNA, 76 bp, Artificial Sequence; identical to SEQ ID NO: 3317
  Description of Artificial Sequence: Synthetic cashew; 5' sequence + inner sequence + 3' sequence

SEQ ID NO: 15651 - DNA, 76 bp, Artificial Sequence; identical to SEQ ID NO: 7717
  Description of Artificial Sequence: Synthetic cashew; 5' sequence + inner sequence + 3' sequence

SEQ ID NO: 15652 - DNA, 76 bp, Artificial Sequence; identical to SEQ ID NO: 3621
  Description of Artificial Sequence: Synthetic cashew; 5' sequence + inner sequence + 3' sequence

SEQ ID NO: 15653 - DNA, 76 bp, Artificial Sequence; identical to SEQ ID NO: 3297
  Description of Artificial Sequence: Synthetic cashew; 5' sequence + inner sequence + 3' sequence

SEQ ID NO: 15654 - DNA, 76 bp, Artificial Sequence; identical to SEQ ID NO: 7690
  Description of Artificial Sequence: Synthetic cashew; 5' sequence + inner sequence + 3' sequence

SEQ ID NO: 15655 - DNA, 76 bp, Artificial Sequence; identical to SEQ ID NO: 3773
  Description of Artificial Sequence: Synthetic cashew; 5' sequence + inner sequence + 3' sequence

SEQ ID NO: 15656 - DNA, 76 bp, Artificial Sequence; identical to SEQ ID NO: 7799
  Description of Artificial Sequence: Synthetic cashew; 5' sequence + inner sequence + 3' sequence

SEQ ID NO: 15657 - DNA, 76 bp, Artificial Sequence; identical to SEQ ID NO: 3956
  Description of Artificial Sequence: Synthetic cashew; 5' sequence + inner sequence + 3' sequence

SEQ ID NO: 15658 - DNA, 76 bp, Artificial Sequence; identical to SEQ ID NO: 11939
  Description of Artificial Sequence: Synthetic cashew; 5' sequence + inner sequence + 3' sequence

SEQ ID NO: 15659 - DNA, 76 bp, Artificial Sequence
  Description of Artificial Sequence: Synthetic cashew; 5' sequence + inner sequence + 3' sequence
tagggaagagaaggacatatgatgtcatgccatcccttcgagggtgacaggtattgactagtacatgaccacttga

SEQ ID NO: 15660 - DNA, 75 bp, Artificial Sequence; identical to SEQ ID NO: 7559
  Description of Artificial Sequence: Synthetic cashew; 5' sequence + inner sequence + 3' sequence

SEQ ID NO: 15661 - DNA, 76 bp, Artificial Sequence; identical to SEQ ID NO: 7565
  Description of Artificial Sequence: Synthetic cashew; 5' sequence + inner sequence + 3' sequence

SEQ ID NO: 15662 - DNA, 76 bp, Artificial Sequence; identical to SEQ ID NO: 3576
  Description of Artificial Sequence: Synthetic cashew; 5' sequence + inner sequence + 3' sequence

SEQ ID NO: 15663 - DNA, 76 bp, Artificial Sequence; identical to SEQ ID NO: 3404
  Description of Artificial Sequence: Synthetic cashew; 5' sequence + inner sequence + 3' sequence

SEQ ID NO: 15664 - DNA, 76 bp, Artificial Sequence; identical to SEQ ID NO: 3292
  Description of Artificial Sequence: Synthetic cashew; 5' sequence + inner sequence + 3' sequence

SEQ ID NO: 15665 - DNA, 76 bp, Artificial Sequence; identical to SEQ ID NO: 3703
  Description of Artificial Sequence: Synthetic cashew; 5' sequence + inner sequence + 3' sequence

SEQ ID NO: 15666 - DNA, 76 bp, Artificial Sequence; identical to SEQ ID NO: 3638
  Description of Artificial Sequence: Synthetic cashew; 5' sequence + inner sequence + 3' sequence

SEQ ID NO: 15667 - DNA, 76 bp, Artificial Sequence; identical to SEQ ID NO: 11627
  Description of Artificial Sequence: Synthetic cashew; 5' sequence + inner sequence + 3' sequence

SEQ ID NO: 15668 - DNA, 76 bp, Artificial Sequence; identical to SEQ ID NO: 3663
  Description of Artificial Sequence: Synthetic cashew; 5' sequence + inner sequence + 3' sequence

SEQ ID NO: 15669 - DNA, 76 bp, Artificial Sequence; identical to SEQ ID NO: 3917
  Description of Artificial Sequence: Synthetic cashew; 5' sequence + inner sequence + 3' sequence

SEQ ID NO: 15670 - DNA, 76 bp, Artificial Sequence
  Description of Artificial Sequence: Synthetic cashew; 5' sequence + inner sequence + 3' sequence
tagggaagagaaggacatatgatcgcgacgagtaggcatgtcttctgtttgcattgactagtacatgaccacttga

SEQ ID NO: 15671 - DNA, 76 bp, Artificial Sequence; identical to SEQ ID NO: 3805
  Description of Artificial Sequence: Synthetic cashew; 5' sequence + inner sequence + 3' sequence

SEQ ID NO: 15672 - DNA, 76 bp, Artificial Sequence; identical to SEQ ID NO: 3199
  Description of Artificial Sequence: Synthetic cashew; 5' sequence + inner sequence + 3' sequence

SEQ ID NO: 15673 - DNA, 76 bp, Artificial Sequence
  Description of Artificial Sequence: Synthetic cashew; 5' sequence + inner sequence + 3' sequence
tagggaagagaaggacatatgatggcctgcacatccctcccttccgtgcgtcattgactagtacatgaccacttga

SEQ ID NO: 15674 - DNA, 76 bp, Artificial Sequence; identical to SEQ ID NO: 3223
  Description of Artificial Sequence: Synthetic cashew; 5' sequence + inner sequence + 3' sequence

SEQ ID NO: 15675 - DNA, 76 bp, Artificial Sequence; identical to SEQ ID NO: 3378
  Description of Artificial Sequence: Synthetic cashew; 5' sequence + inner sequence + 3' sequence

SEQ ID NO: 15676 - DNA, 76 bp, Artificial Sequence; identical to SEQ ID NO: 3943
  Description of Artificial Sequence: Synthetic cashew; 5' sequence + inner sequence + 3' sequence

SEQ ID NO: 15677 - DNA, 76 bp, Artificial Sequence; identical to SEQ ID NO: 7688
  Description of Artificial Sequence: Synthetic cashew; 5' sequence + inner sequence + 3' sequence

SEQ ID NO: 15678 - DNA, 76 bp, Artificial Sequence; identical to SEQ ID NO: 3332
  Description of Artificial Sequence: Synthetic cashew; 5' sequence + inner sequence + 3' sequence

SEQ ID NO: 15679 - DNA, 76 bp, Artificial Sequence; identical to SEQ ID NO: 7598
  Description of Artificial Sequence: Synthetic cashew; 5' sequence + inner sequence + 3' sequence

SEQ ID NO: 15680 - DNA, 76 bp, Artificial Sequence; identical to SEQ ID NO: 7893
  Description of Artificial Sequence: Synthetic cashew; 5' sequence + inner sequence + 3' sequence

SEQ ID NO: 15681 - DNA, 76 bp, Artificial Sequence; identical to SEQ ID NO: 7817
  Description of Artificial Sequence: Synthetic cashew; 5' sequence + inner sequence + 3' sequence

SEQ ID NO: 15682 - DNA, 76 bp, Artificial Sequence; identical to SEQ ID NO: 3699
  Description of Artificial Sequence: Synthetic cashew; 5' sequence + inner sequence + 3' sequence

SEQ ID NO: 15683 - DNA, 76 bp, Artificial Sequence; identical to SEQ ID NO: 3680
  Description of Artificial Sequence: Synthetic cashew; 5' sequence + inner sequence + 3' sequence

SEQ ID NO: 15684 - DNA, 76 bp, Artificial Sequence; identical to SEQ ID NO: 3162
  Description of Artificial Sequence: Synthetic cashew; 5' sequence + inner sequence + 3' sequence

SEQ ID NO: 15685 - DNA, 76 bp, Artificial Sequence; identical to SEQ ID NO: 7620
  Description of Artificial Sequence: Synthetic cashew; 5' sequence + inner sequence + 3' sequence

SEQ ID NO: 15686 - DNA, 76 bp, Artificial Sequence; identical to SEQ ID NO: 3586
  Description of Artificial Sequence: Synthetic cashew; 5' sequence + inner sequence + 3' sequence

SEQ ID NO: 15687 - DNA, 76 bp, Artificial Sequence; identical to SEQ ID NO: 3776
  Description of Artificial Sequence: Synthetic cashew; 5' sequence + inner sequence + 3' sequence

SEQ ID NO: 15688 - DNA, 76 bp, Artificial Sequence; identical to SEQ ID NO: 3330
  Description of Artificial Sequence: Synthetic cashew; 5' sequence + inner sequence + 3' sequence

SEQ ID NO: 15689 - DNA, 76 bp, Artificial Sequence; identical to SEQ ID NO: 3318
  Description of Artificial Sequence: Synthetic cashew; 5' sequence + inner sequence + 3' sequence

SEQ ID NO: 15690 - DNA, 76 bp, Artificial Sequence; identical to SEQ ID NO: 3948
  Description of Artificial Sequence: Synthetic cashew; 5' sequence + inner sequence + 3' sequence

SEQ ID NO: 15691 - DNA, 75 bp, Artificial Sequence
  Description of Artificial Sequence: Synthetic cashew; 5' sequence + inner sequence + 3' sequence
tagggaagagaaggacatatgatgcacgtcgcaacacgtagccatgcacggtttgactagtacatgaccacttga

SEQ ID NO: 15692 - DNA, 76 bp, Artificial Sequence; identical to SEQ ID NO: 3624
  Description of Artificial Sequence: Synthetic cashew; 5' sequence + inner sequence + 3' sequence

SEQ ID NO: 15693 - DNA, 76 bp, Artificial Sequence; identical to SEQ ID NO: 11938
  Description of Artificial Sequence: Synthetic cashew; 5' sequence + inner sequence + 3' sequence

SEQ ID NO: 15694 - DNA, 76 bp, Artificial Sequence; identical to SEQ ID NO: 3722
  Description of Artificial Sequence: Synthetic cashew; 5' sequence + inner sequence + 3' sequence

SEQ ID NO: 15695 - DNA, 76 bp, Artificial Sequence; identical to SEQ ID NO: 3660
  Description of Artificial Sequence: Synthetic cashew; 5' sequence + inner sequence + 3' sequence

SEQ ID NO: 15696 - DNA, 76 bp, Artificial Sequence; identical to SEQ ID NO: 3327
  Description of Artificial Sequence: Synthetic cashew; 5' sequence + inner sequence + 3' sequence

SEQ ID NO: 15697 - DNA, 76 bp, Artificial Sequence; identical to SEQ ID NO: 3914
  Description of Artificial Sequence: Synthetic cashew; 5' sequence + inner sequence + 3' sequence

SEQ ID NO: 15698 - DNA, 76 bp, Artificial Sequence; identical to SEQ ID NO: 7955
  Description of Artificial Sequence: Synthetic cashew; 5' sequence + inner sequence + 3' sequence

SEQ ID NO: 15699 - DNA, 76 bp, Artificial Sequence; identical to SEQ ID NO: 3979
  Description of Artificial Sequence: Synthetic cashew; 5' sequence + inner sequence + 3' sequence

SEQ ID NO: 15700 - DNA, 76 bp, Artificial Sequence
  Description of Artificial Sequence: Synthetic cashew; 5' sequence + inner sequence + 3' sequence
tagggaagagaaggacatatgatgcacgactcgccccctatcatgaggccatgttgactagtacatgaccacttga

SEQ ID NO: 15701 - DNA, 76 bp, Artificial Sequence; identical to SEQ ID NO: 3830
  Description of Artificial Sequence: Synthetic cashew; 5' sequence + inner sequence + 3' sequence

SEQ ID NO: 15702 - DNA, 76 bp, Artificial Sequence; identical to SEQ ID NO: 3834
  Description of Artificial Sequence: Synthetic cashew; 5' sequence + inner sequence + 3' sequence

SEQ ID NO: 15703 - DNA, 76 bp, Artificial Sequence; identical to SEQ ID NO: 11850
  Description of Artificial Sequence: Synthetic cashew; 5' sequence + inner sequence + 3' sequence

SEQ ID NO: 15704 - DNA, 76 bp, Artificial Sequence; identical to SEQ ID NO: 11909
  Description of Artificial Sequence: Synthetic cashew; 5' sequence + inner sequence + 3' sequence

SEQ ID NO: 15705 - DNA, 76 bp, Artificial Sequence; identical to SEQ ID NO: 3857
  Description of Artificial Sequence: Synthetic cashew; 5' sequence + inner sequence + 3' sequence

SEQ ID NO: 15706 - DNA, 76 bp, Artificial Sequence; identical to SEQ ID NO: 3668
  Description of Artificial Sequence: Synthetic cashew; 5' sequence + inner sequence + 3' sequence

SEQ ID NO: 15707 - DNA, 76 bp, Artificial Sequence; identical to SEQ ID NO: 7960
  Description of Artificial Sequence: Synthetic cashew; 5' sequence + inner sequence + 3' sequence

SEQ ID NO: 15708 - DNA, 76 bp, Artificial Sequence; identical to SEQ ID NO: 7494
  Description of Artificial Sequence: Synthetic cashew; 5' sequence + inner sequence + 3' sequence

SEQ ID NO: 15709 - DNA, 75 bp, Artificial Sequence
  Description of Artificial Sequence: Synthetic cashew; 5' sequence + inner sequence + 3' sequence
tagggaagagaaggacatatgatgcacgccgaaacacgtagccatgcacggtttgactagtacatgaccacttga

SEQ ID NO: 15710 - DNA, 76 bp, Artificial Sequence; identical to SEQ ID NO: 3729
  Description of Artificial Sequence: Synthetic cashew; 5' sequence + inner sequence + 3' sequence

SEQ ID NO: 15711 - DNA, 76 bp, Artificial Sequence; identical to SEQ ID NO: 7662
  Description of Artificial Sequence: Synthetic cashew; 5' sequence + inner sequence + 3' sequence

SEQ ID NO: 15712 - DNA, 76 bp, Artificial Sequence
  Description of Artificial Sequence: Synthetic cashew; 5' sequence + inner sequence + 3' sequence
tagggaagagaaggacatatgatacatgtgggccgatgtgcactgagtggtgtttgactagtacatgaccacttga

SEQ ID NO: 15713 - DNA, 76 bp, Artificial Sequence; identical to SEQ ID NO: 3351
  Description of Artificial Sequence: Synthetic cashew; 5' sequence + inner sequence + 3' sequence

SEQ ID NO: 15714 - DNA, 76 bp, Artificial Sequence; identical to SEQ ID NO: 7552
  Description of Artificial Sequence: Synthetic cashew; 5' sequence + inner sequence + 3' sequence

SEQ ID NO: 15715 - DNA, 76 bp, Artificial Sequence; identical to SEQ ID NO: 3432
  Description of Artificial Sequence: Synthetic cashew; 5' sequence + inner sequence + 3' sequence

SEQ ID NO: 15716 - DNA, 76 bp, Artificial Sequence; identical to SEQ ID NO: 3733
  Description of Artificial Sequence: Synthetic cashew; 5' sequence + inner sequence + 3' sequence

SEQ ID NO: 15717 - DNA, 76 bp, Artificial Sequence; identical to SEQ ID NO: 3505
  Description of Artificial Sequence: Synthetic cashew; 5' sequence + inner sequence + 3' sequence

SEQ ID NO: 15718 - DNA, 76 bp, Artificial Sequence; identical to SEQ ID NO: 7728
  Description of Artificial Sequence: Synthetic cashew; 5' sequence + inner sequence + 3' sequence

SEQ ID NO: 15719 - DNA, 76 bp, Artificial Sequence; identical to SEQ ID NO: 3265
  Description of Artificial Sequence: Synthetic cashew; 5' sequence + inner sequence + 3' sequence

SEQ ID NO: 15720 - DNA, 76 bp, Artificial Sequence; identical to SEQ ID NO: 3548
  Description of Artificial Sequence: Synthetic cashew; 5' sequence + inner sequence + 3' sequence

SEQ ID NO: 15721 - DNA, 76 bp, Artificial Sequence; identical to SEQ ID NO: 3832
  Description of Artificial Sequence: Synthetic cashew; 5' sequence + inner sequence + 3' sequence

SEQ ID NO: 15722 - DNA, 76 bp, Artificial Sequence; identical to SEQ ID NO: 7498
  Description of Artificial Sequence: Synthetic cashew; 5' sequence + inner sequence + 3' sequence

SEQ ID NO: 15723 - DNA, 76 bp, Artificial Sequence; identical to SEQ ID NO: 3768
  Description of Artificial Sequence: Synthetic cashew; 5' sequence + inner sequence + 3' sequence

SEQ ID NO: 15724 - DNA, 76 bp, Artificial Sequence; identical to SEQ ID NO: 3874
  Description of Artificial Sequence: Synthetic cashew; 5' sequence + inner sequence + 3' sequence

SEQ ID NO: 15725 - DNA, 76 bp, Artificial Sequence; identical to SEQ ID NO: 7859
  Description of Artificial Sequence: Synthetic cashew; 5' sequence + inner sequence + 3' sequence

SEQ ID NO: 15726 - DNA, 76 bp, Artificial Sequence; identical to SEQ ID NO: 7436
  Description of Artificial Sequence: Synthetic cashew; 5' sequence + inner sequence + 3' sequence

SEQ ID NO: 15727 - DNA, 76 bp, Artificial Sequence; identical to SEQ ID NO: 3500
  Description of Artificial Sequence: Synthetic cashew; 5' sequence + inner sequence + 3' sequence

SEQ ID NO: 15728 - DNA, 76 bp, Artificial Sequence; identical to SEQ ID NO: 3889
  Description of Artificial Sequence: Synthetic cashew; 5' sequence + inner sequence + 3' sequence

SEQ ID NO: 15729 - DNA, 76 bp, Artificial Sequence; identical to SEQ ID NO: 3592
  Description of Artificial Sequence: Synthetic cashew; 5' sequence + inner sequence + 3' sequence

SEQ ID NO: 15730 - DNA, 75 bp, Artificial Sequence
  Description of Artificial Sequence: Synthetic cashew; 5' sequence + inner sequence + 3' sequence
tagggaagagaaggacatatgatgcacgtcgaaacacgcagccatgcacggtttgactagtacatgaccacttga

SEQ ID NO: 15731 - DNA, 76 bp, Artificial Sequence; identical to SEQ ID NO: 7985
  Description of Artificial Sequence: Synthetic cashew; 5' sequence + inner sequence + 3' sequence

SEQ ID NO: 15732 - DNA, 76 bp, Artificial Sequence; identical to SEQ ID NO: 7802
  Description of Artificial Sequence: Synthetic cashew; 5' sequence + inner sequence + 3' sequence

SEQ ID NO: 15733 - DNA, 76 bp, Artificial Sequence; identical to SEQ ID NO: 11807
  Description of Artificial Sequence: Synthetic cashew; 5' sequence + inner sequence + 3' sequence

SEQ ID NO: 15734 - DNA, 76 bp, Artificial Sequence; identical to SEQ ID NO: 3909
  Description of Artificial Sequence: Synthetic cashew; 5' sequence + inner sequence + 3' sequence

SEQ ID NO: 15735 - DNA, 76 bp, Artificial Sequence; identical to SEQ ID NO: 11712
  Description of Artificial Sequence: Synthetic cashew; 5' sequence + inner sequence + 3' sequence

SEQ ID NO: 15736 - DNA, 76 bp, Artificial Sequence; identical to SEQ ID NO: 7700
  Description of Artificial Sequence: Synthetic cashew; 5' sequence + inner sequence + 3' sequence

SEQ ID NO: 15737 - DNA, 76 bp, Artificial Sequence; identical to SEQ ID NO: 11633
  Description of Artificial Sequence: Synthetic cashew; 5' sequence + inner sequence + 3' sequence

SEQ ID NO: 15738 - DNA, 76 bp, Artificial Sequence; identical to SEQ ID NO: 7829
  Description of Artificial Sequence: Synthetic cashew; 5' sequence + inner sequence + 3' sequence

SEQ ID NO: 15739 - DNA, 76 bp, Artificial Sequence; identical to SEQ ID NO: 11902
  Description of Artificial Sequence: Synthetic cashew; 5' sequence + inner sequence + 3' sequence

SEQ ID NO: 15740 - DNA, 76 bp, Artificial Sequence; identical to SEQ ID NO: 11748
  Description of Artificial Sequence: Synthetic cashew; 5' sequence + inner sequence + 3' sequence

SEQ ID NO: 15741 - DNA, 76 bp, Artificial Sequence; identical to SEQ ID NO: 7603
  Description of Artificial Sequence: Synthetic cashew; 5' sequence + inner sequence + 3' sequence

SEQ ID NO: 15742 - DNA, 76 bp, Artificial Sequence; identical to SEQ ID NO: 3930
  Description of Artificial Sequence: Synthetic cashew; 5' sequence + inner sequence + 3' sequence

SEQ ID NO: 15743 - DNA, 76 bp, Artificial Sequence
  Description of Artificial Sequence: Synthetic cashew; 5' sequence + inner sequence + 3' sequence
tagggaagagaaggacatatgatgtcattccgcatcatacacgtgggcacgtattgactagtacatgaccacttga

SEQ ID NO: 15744 - DNA, 76 bp, Artificial Sequence
  Description of Artificial Sequence: Synthetic cashew; 5' sequence + inner sequence + 3' sequence
tagggaagagaaggacatatgatgaccgcaacgaccaaagtgccatgtggtgcttgactagtacatgaccacttga

SEQ ID NO: 15745 - DNA, 76 bp, Artificial Sequence; identical to SEQ ID NO: 3466
  Description of Artificial Sequence: Synthetic cashew; 5' sequence + inner sequence + 3' sequence

SEQ ID NO: 15746 - DNA, 76 bp, Artificial Sequence; identical to SEQ ID NO: 3606
  Description of Artificial Sequence: Synthetic cashew; 5' sequence + inner sequence + 3' sequence

SEQ ID NO: 15747 - DNA, 76 bp, Artificial Sequence; identical to SEQ ID NO: 3813
  Description of Artificial Sequence: Synthetic cashew; 5' sequence + inner sequence + 3' sequence

SEQ ID NO: 15748 - DNA, 76 bp, Artificial Sequence; identical to SEQ ID NO: 3384
  Description of Artificial Sequence: Synthetic cashew; 5' sequence + inner sequence + 3' sequence

SEQ ID NO: 15749 - DNA, 76 bp, Artificial Sequence; identical to SEQ ID NO: 7289
  Description of Artificial Sequence: Synthetic cashew; 5' sequence + inner sequence + 3' sequence

SEQ ID NO: 15750 - DNA, 76 bp, Artificial Sequence; identical to SEQ ID NO: 7787
  Description of Artificial Sequence: Synthetic cashew; 5' sequence + inner sequence + 3' sequence

SEQ ID NO: 15751 - DNA, 76 bp, Artificial Sequence; identical to SEQ ID NO: 3302
  Description of Artificial Sequence: Synthetic cashew; 5' sequence + inner sequence + 3' sequence

SEQ ID NO: 15752 - DNA, 76 bp, Artificial Sequence; identical to SEQ ID NO: 3463
  Description of Artificial Sequence: Synthetic cashew; 5' sequence + inner sequence + 3' sequence

SEQ ID NO: 15753 - DNA, 76 bp, Artificial Sequence; identical to SEQ ID NO: 7579
  Description of Artificial Sequence: Synthetic cashew; 5' sequence + inner sequence + 3' sequence

SEQ ID NO: 15754 - DNA, 76 bp, Artificial Sequence; identical to SEQ ID NO: 3502
  Description of Artificial Sequence: Synthetic cashew; 5' sequence + inner sequence + 3' sequence

SEQ ID NO: 15755 - DNA, 75 bp, Artificial Sequence
  Description of Artificial Sequence: Synthetic cashew; 5' sequence + inner sequence + 3' sequence
tagggaagagaaggacatatgatgcacgtcgaaacacgtagccatgcccggtttgactagtacatgaccacttga

SEQ ID NO: 15756 - DNA, 76 bp, Artificial Sequence; identical to SEQ ID NO: 7856
  Description of Artificial Sequence: Synthetic cashew; 5' sequence + inner sequence + 3' sequence

SEQ ID NO: 15757 - DNA, 76 bp, Artificial Sequence; identical to SEQ ID NO: 7590
  Description of Artificial Sequence: Synthetic cashew; 5' sequence + inner sequence + 3' sequence

SEQ ID NO: 15758 - DNA, 76 bp, Artificial Sequence; identical to SEQ ID NO: 7521
  Description of Artificial Sequence: Synthetic cashew; 5' sequence + inner sequence + 3' sequence

SEQ ID NO: 15759 - DNA, 75 bp, Artificial Sequence; identical to SEQ ID NO: 3873
  Description of Artificial Sequence: Synthetic cashew; 5' sequence + inner sequence + 3' sequence

SEQ ID NO: 15760 - DNA, 76 bp, Artificial Sequence; identical to SEQ ID NO: 11910
  Description of Artificial Sequence: Synthetic cashew; 5' sequence + inner sequence + 3' sequence

SEQ ID NO: 15761 - DNA, 76 bp, Artificial Sequence; identical to SEQ ID NO: 3477
  Description of Artificial Sequence: Synthetic cashew; 5' sequence + inner sequence + 3' sequence

SEQ ID NO: 15762 - DNA, 76 bp, Artificial Sequence; identical to SEQ ID NO: 3772
  Description of Artificial Sequence: Synthetic cashew; 5' sequence + inner sequence + 3' sequence

SEQ ID NO: 15763 - DNA, 76 bp, Artificial Sequence; identical to SEQ ID NO: 3458
  Description of Artificial Sequence: Synthetic cashew; 5' sequence + inner sequence + 3' sequence

SEQ ID NO: 15764 - DNA, 76 bp, Artificial Sequence; identical to SEQ ID NO: 3816
  Description of Artificial Sequence: Synthetic cashew; 5' sequence + inner sequence + 3' sequence

SEQ ID NO: 15765 - DNA, 76 bp, Artificial Sequence; identical to SEQ ID NO: 3713
  Description of Artificial Sequence: Synthetic cashew; 5' sequence + inner sequence + 3' sequence

SEQ ID NO: 15766 - DNA, 76 bp, Artificial Sequence; identical to SEQ ID NO: 7884
  Description of Artificial Sequence: Synthetic cashew; 5' sequence + inner sequence + 3' sequence

SEQ ID NO: 15767 - DNA, 76 bp, Artificial Sequence
  Description of Artificial Sequence: Synthetic cashew; 5' sequence + inner sequence + 3' sequence
tagggaagagaaggacatatgatgtcatgcacgaccactatcatggcggcatgttgactagtacatgaccacttga

SEQ ID NO: 15768 - DNA, 76 bp, Artificial Sequence; identical to SEQ ID NO: 3702
  Description of Artificial Sequence: Synthetic cashew; 5' sequence + inner sequence + 3' sequence

SEQ ID NO: 15769 - DNA, 76 bp, Artificial Sequence; identical to SEQ ID NO: 3583
  Description of Artificial Sequence: Synthetic cashew; 5' sequence + inner sequence + 3' sequence

SEQ ID NO: 15770 - DNA, 76 bp, Artificial Sequence; identical to SEQ ID NO: 3685
  Description of Artificial Sequence: Synthetic cashew; 5' sequence + inner sequence + 3' sequence

SEQ ID NO: 15771 - DNA, 76 bp, Artificial Sequence; identical to SEQ ID NO: 7610
  Description of Artificial Sequence: Synthetic cashew; 5' sequence + inner sequence + 3' sequence

SEQ ID NO: 15772 - DNA, 76 bp, Artificial Sequence; identical to SEQ ID NO: 7981
  Description of Artificial Sequence: Synthetic cashew; 5' sequence + inner sequence + 3' sequence

SEQ ID NO: 15773 - DNA, 76 bp, Artificial Sequence
  Description of Artificial Sequence: Synthetic cashew; 5' sequence + inner sequence + 3' sequence
tagggaagagaaggacatatgatccgcacgtagccctatcagaggtgcatgcattgactagtacatgaccacttga

SEQ ID NO: 15774 - DNA, 76 bp, Artificial Sequence; identical to SEQ ID NO: 3787
  Description of Artificial Sequence: Synthetic cashew; 5' sequence + inner sequence + 3' sequence

SEQ ID NO: 15775 - DNA, 76 bp, Artificial Sequence
  Description of Artificial Sequence: Synthetic cashew; 5' sequence + inner sequence + 3' sequence
tagggaagagaaggacatatgatgtacgcatcgtcccgtcatgtggctccgtattgactagtacatgaccacttga

SEQ ID NO: 15776 - DNA, 76 bp, Artificial Sequence; identical to SEQ ID NO: 3826
  Description of Artificial Sequence: Synthetic cashew; 5' sequence + inner sequence + 3' sequence

SEQ ID NO: 15777 - DNA, 76 bp, Artificial Sequence; identical to SEQ ID NO: 7339
  Description of Artificial Sequence: Synthetic cashew; 5' sequence + inner sequence + 3' sequence

SEQ ID NO: 15778 - DNA, 76 bp, Artificial Sequence; identical to SEQ ID NO: 3417
  Description of Artificial Sequence: Synthetic cashew; 5' sequence + inner sequence + 3' sequence

SEQ ID NO: 15779 - DNA, 76 bp, Artificial Sequence; identical to SEQ ID NO: 3753
  Description of Artificial Sequence: Synthetic cashew; 5' sequence + inner sequence + 3' sequence

SEQ ID NO: 15780 - DNA, 76 bp, Artificial Sequence; identical to SEQ ID NO: 7503
  Description of Artificial Sequence: Synthetic cashew; 5' sequence + inner sequence + 3' sequence

SEQ ID NO: 15781 - DNA, 76 bp, Artificial Sequence; identical to SEQ ID NO: 11889
  Description of Artificial Sequence: Synthetic cashew; 5' sequence + inner sequence + 3' sequence

SEQ ID NO: 15782 - DNA, 76 bp, Artificial Sequence; identical to SEQ ID NO: 3488
  Description of Artificial Sequence: Synthetic cashew; 5' sequence + inner sequence + 3' sequence

SEQ ID NO: 15783 - DNA, 76 bp, Artificial Sequence; identical to SEQ ID NO: 7721
  Description of Artificial Sequence: Synthetic cashew; 5' sequence + inner sequence + 3' sequence

SEQ ID NO: 15784 - DNA, 76 bp, Artificial Sequence; identical to SEQ ID NO: 11860
  Description of Artificial Sequence: Synthetic cashew; 5' sequence + inner sequence + 3' sequence

SEQ ID NO: 15785 - DNA, 76 bp, Artificial Sequence; identical to SEQ ID NO: 11871
  Description of Artificial Sequence: Synthetic cashew; 5' sequence + inner sequence + 3' sequence

SEQ ID NO: 15786 - DNA, 76 bp, Artificial Sequence; identical to SEQ ID NO: 3672
  Description of Artificial Sequence: Synthetic cashew; 5' sequence + inner sequence + 3' sequence

SEQ ID NO: 15787 - DNA, 76 bp, Artificial Sequence; identical to SEQ ID NO: 3591
  Description of Artificial Sequence: Synthetic cashew; 5' sequence + inner sequence + 3' sequence

SEQ ID NO: 15788 - DNA, 76 bp, Artificial Sequence; identical to SEQ ID NO: 7997
  Description of Artificial Sequence: Synthetic cashew; 5' sequence + inner sequence + 3' sequence

SEQ ID NO: 15789 - DNA, 76 bp, Artificial Sequence; identical to SEQ ID NO: 11935
  Description of Artificial Sequence: Synthetic cashew; 5' sequence + inner sequence + 3' sequence

SEQ ID NO: 15790 - DNA, 76 bp, Artificial Sequence; identical to SEQ ID NO: 3492
  Description of Artificial Sequence: Synthetic cashew; 5' sequence + inner sequence + 3' sequence

SEQ ID NO: 15791 - DNA, 76 bp, Artificial Sequence
  Description of Artificial Sequence: Synthetic cashew; 5' sequence + inner sequence + 3' sequence
tagggaagagaaggacatatgatcatgtggcgtgcgttccgttcaagttgacattgactagtacatgaccacttga

SEQ ID NO: 15792 - DNA, 76 bp, Artificial Sequence; identical to SEQ ID NO: 3507
  Description of Artificial Sequence: Synthetic cashew; 5' sequence + inner sequence + 3' sequence

SEQ ID NO: 15793 - DNA, 76 bp, Artificial Sequence; identical to SEQ ID NO: 7801
  Description of Artificial Sequence: Synthetic cashew; 5' sequence + inner sequence + 3' sequence

SEQ ID NO: 15794 - DNA, 76 bp, Artificial Sequence; identical to SEQ ID NO: 3929
  Description of Artificial Sequence: Synthetic cashew; 5' sequence + inner sequence + 3' sequence

SEQ ID NO: 15795 - DNA, 76 bp, Artificial Sequence
  Description of Artificial Sequence: Synthetic cashew; 5' sequence + inner sequence + 3' sequence
tagggaagagaaggacatatgatgtgtcatgggtacgtcgctgggtgtggacattgactagtacatgaccacttga

SEQ ID NO: 15796 - DNA, 76 bp, Artificial Sequence; identical to SEQ ID NO: 7198
  Description of Artificial Sequence: Synthetic cashew; 5' sequence + inner sequence + 3' sequence

SEQ ID NO: 15797 - DNA, 76 bp, Artificial Sequence; identical to SEQ ID NO: 3435
  Description of Artificial Sequence: Synthetic cashew; 5' sequence + inner sequence + 3' sequence

SEQ ID NO: 15798 - DNA, 76 bp, Artificial Sequence; identical to SEQ ID NO: 3718
  Description of Artificial Sequence: Synthetic cashew; 5' sequence + inner sequence + 3' sequence

SEQ ID NO: 15799 - DNA, 76 bp, Artificial Sequence
  Description of Artificial Sequence: Synthetic cashew; 5' sequence + inner sequence + 3' sequence
tagggaagagaaggacatatgatgggccgacacgaaccctatcaacgtggacattgactagtacatgaccacttga

SEQ ID NO: 15800 - DNA, 77 bp, Artificial Sequence; identical to SEQ ID NO: 3489
  Description of Artificial Sequence: Synthetic cashew; 5' sequence + inner sequence + 3' sequence

SEQ ID NO: 15801 - DNA, 76 bp, Artificial Sequence; identical to SEQ ID NO: 7713
  Description of Artificial Sequence: Synthetic cashew; 5' sequence + inner sequence + 3' sequence

SEQ ID NO: 15802 - DNA, 76 bp, Artificial Sequence; identical to SEQ ID NO: 3442
  Description of Artificial Sequence: Synthetic cashew; 5' sequence + inner sequence + 3' sequence

SEQ ID NO: 15803 - DNA, 76 bp, Artificial Sequence
  Description of Artificial Sequence: Synthetic cashew; 5' sequence + inner sequence + 3' sequence
tagggaagagaaggacatatgatggcatgcgatggatgggggctggggcagtcttgactagtacatgaccacttga

SEQ ID NO: 15804 - DNA, 76 bp, Artificial Sequence; identical to SEQ ID NO: 3926
  Description of Artificial Sequence: Synthetic cashew; 5' sequence + inner sequence + 3' sequence

SEQ ID NO: 15805 - DNA, 76 bp, Artificial Sequence; identical to SEQ ID NO: 3761
  Description of Artificial Sequence: Synthetic cashew; 5' sequence + inner sequence + 3' sequence

SEQ ID NO: 15806 - DNA, 76 bp, Artificial Sequence; identical to SEQ ID NO: 3315
  Description of Artificial Sequence: Synthetic cashew; 5' sequence + inner sequence + 3' sequence

SEQ ID NO: 15807 - DNA, 76 bp, Artificial Sequence; identical to SEQ ID NO: 7642
  Description of Artificial Sequence: Synthetic cashew; 5' sequence + inner sequence + 3' sequence

SEQ ID NO: 15808 - DNA, 76 bp, Artificial Sequence; identical to SEQ ID NO: 7711
  Description of Artificial Sequence: Synthetic cashew; 5' sequence + inner sequence + 3' sequence

SEQ ID NO: 15809 - DNA, 76 bp, Artificial Sequence; identical to SEQ ID NO: 7873
  Description of Artificial Sequence: Synthetic cashew; 5' sequence + inner sequence + 3' sequence

SEQ ID NO: 15810 - DNA, 76 bp, Artificial Sequence; identical to SEQ ID NO: 11769
  Description of Artificial Sequence: Synthetic cashew; 5' sequence + inner sequence + 3' sequence

SEQ ID NO: 15811 - DNA, 76 bp, Artificial Sequence; identical to SEQ ID NO: 3261
  Description of Artificial Sequence: Synthetic cashew; 5' sequence + inner sequence + 3' sequence

SEQ ID NO: 15812 - DNA, 76 bp, Artificial Sequence; identical to SEQ ID NO: 7526
  Description of Artificial Sequence: Synthetic cashew; 5' sequence + inner sequence + 3' sequence

SEQ ID NO: 15813 - DNA, 76 bp, Artificial Sequence; identical to SEQ ID NO: 3679
  Description of Artificial Sequence: Synthetic cashew; 5' sequence + inner sequence + 3' sequence

SEQ ID NO: 15814 - DNA, 75 bp, Artificial Sequence; identical to SEQ ID NO: 3453
  Description of Artificial Sequence: Synthetic cashew; 5' sequence + inner sequence + 3' sequence

SEQ ID NO: 15815 - DNA, 76 bp, Artificial Sequence; identical to SEQ ID NO: 7739
  Description of Artificial Sequence: Synthetic cashew; 5' sequence + inner sequence + 3' sequence

SEQ ID NO: 15816 - DNA, 76 bp, Artificial Sequence; identical to SEQ ID NO: 3607
  Description of Artificial Sequence: Synthetic cashew; 5' sequence + inner sequence + 3' sequence

SEQ ID NO: 15817 - DNA, 76 bp, Artificial Sequence
  Description of Artificial Sequence: Synthetic cashew; 5' sequence + inner sequence + 3' sequence
tagggaagagaaggacatatgatcgcgacgagtaggcatgtcttctgtgttcattgactagtacatgaccacttga

SEQ ID NO: 15818 - DNA, 76 bp, Artificial Sequence; identical to SEQ ID NO: 7905
  Description of Artificial Sequence: Synthetic cashew; 5' sequence + inner sequence + 3' sequence

SEQ ID NO: 15819 - DNA, 76 bp, Artificial Sequence; identical to SEQ ID NO: 3960
  Description of Artificial Sequence: Synthetic cashew; 5' sequence + inner sequence + 3' sequence

SEQ ID NO: 15820 - DNA, 77 bp, Artificial Sequence; identical to SEQ ID NO: 3652
  Description of Artificial Sequence: Synthetic cashew; 5' sequence + inner sequence + 3' sequence

SEQ ID NO: 15821 - DNA, 76 bp, Artificial Sequence
  Description of Artificial Sequence: Synthetic cashew; 5' sequence + inner sequence + 3' sequence
tagggaagagaaggacatatgatgtcattccgcatcctacacgggggcacgtattgactagtacatgaccacttga

SEQ ID NO: 15822 - DNA, 76 bp, Artificial Sequence; identical to SEQ ID NO: 7756
  Description of Artificial Sequence: Synthetic cashew; 5' sequence + inner sequence + 3' sequence

SEQ ID NO: 15823 - DNA, 76 bp, Artificial Sequence; identical to SEQ ID NO: 3291
  Description of Artificial Sequence: Synthetic cashew; 5' sequence + inner sequence + 3' sequence

SEQ ID NO: 15824 - DNA, 76 bp, Artificial Sequence; identical to SEQ ID NO: 3781
  Description of Artificial Sequence: Synthetic cashew; 5' sequence + inner sequence + 3' sequence

SEQ ID NO: 15825 - DNA, 76 bp, Artificial Sequence; identical to SEQ ID NO: 11953
  Description of Artificial Sequence: Synthetic cashew; 5' sequence + inner sequence + 3' sequence

SEQ ID NO: 15826 - DNA, 76 bp, Artificial Sequence; identical to SEQ ID NO: 7707
  Description of Artificial Sequence: Synthetic cashew; 5' sequence + inner sequence + 3' sequence

SEQ ID NO: 15827 - DNA, 76 bp, Artificial Sequence
  Description of Artificial Sequence: Synthetic cashew; 5' sequence + inner sequence + 3' sequence
tagggaagagaaggacatatgatcagcacgtagccctatcagtggtgcatgcattgactagtacatgaccacttga

SEQ ID NO: 15828 - DNA, 76 bp, Artificial Sequence; identical to SEQ ID NO: 7641
  Description of Artificial Sequence: Synthetic cashew; 5' sequence + inner sequence + 3' sequence

SEQ ID NO: 15829 - DNA, 76 bp, Artificial Sequence; identical to SEQ ID NO: 3763
  Description of Artificial Sequence: Synthetic cashew; 5' sequence + inner sequence + 3' sequence

SEQ ID NO: 15830 - DNA, 76 bp, Artificial Sequence; identical to SEQ ID NO: 3715
  Description of Artificial Sequence: Synthetic cashew; 5' sequence + inner sequence + 3' sequence

SEQ ID NO: 15831 - DNA, 76 bp, Artificial Sequence; identical to SEQ ID NO: 3456
  Description of Artificial Sequence: Synthetic cashew; 5' sequence + inner sequence + 3' sequence

SEQ ID NO: 15832 - DNA, 76 bp, Artificial Sequence; identical to SEQ ID NO: 3726
  Description of Artificial Sequence: Synthetic cashew; 5' sequence + inner sequence + 3' sequence

SEQ ID NO: 15833 - DNA, 76 bp, Artificial Sequence; identical to SEQ ID NO: 3582
  Description of Artificial Sequence: Synthetic cashew; 5' sequence + inner sequence + 3' sequence

SEQ ID NO: 15834 - DNA, 76 bp, Artificial Sequence; identical to SEQ ID NO: 3629
  Description of Artificial Sequence: Synthetic cashew; 5' sequence + inner sequence + 3' sequence

SEQ ID NO: 15835 - DNA, 76 bp, Artificial Sequence
  Description of Artificial Sequence: Synthetic cashew; 5' sequence + inner sequence + 3' sequence
tagggaagagaaggacatatgatcgcgccgagtaggcatgtcttctgtgtgcattgactagtacatgaccacttga

SEQ ID NO: 15836 - DNA, 76 bp, Artificial Sequence
  Description of Artificial Sequence: Synthetic cashew; 5' sequence + inner sequence + 3' sequence
tagggaagagaaggacatatgatcgcgacgagtcggcatgtcttctgtgtgcattgactagtacatgaccacttga

SEQ ID NO: 15837 - DNA, 76 bp, Artificial Sequence; identical to SEQ ID NO: 3892
  Description of Artificial Sequence: Synthetic cashew; 5' sequence + inner sequence + 3' sequence

SEQ ID NO: 15838 - DNA, 76 bp, Artificial Sequence; identical to SEQ ID NO: 7627
  Description of Artificial Sequence: Synthetic cashew; 5' sequence + inner sequence + 3' sequence

SEQ ID NO: 15839 - DNA, 76 bp, Artificial Sequence; identical to SEQ ID NO: 3952
  Description of Artificial Sequence: Synthetic cashew; 5' sequence + inner sequence + 3' sequence

SEQ ID NO: 15840 - DNA, 76 bp, Artificial Sequence; identical to SEQ ID NO: 7785
  Description of Artificial Sequence: Synthetic cashew; 5' sequence + inner sequence + 3' sequence

SEQ ID NO: 15841 - DNA, 76 bp, Artificial Sequence; identical to SEQ ID NO: 3252
  Description of Artificial Sequence: Synthetic cashew; 5' sequence + inner sequence + 3' sequence

SEQ ID NO: 15842 - DNA, 76 bp, Artificial Sequence; identical to SEQ ID NO: 11659
  Description of Artificial Sequence: Synthetic cashew; 5' sequence + inner sequence + 3' sequence

SEQ ID NO: 15843 - DNA, 76 bp, Artificial Sequence; identical to SEQ ID NO: 7470
  Description of Artificial Sequence: Synthetic cashew; 5' sequence + inner sequence + 3' sequence

SEQ ID NO: 15844 - DNA, 76 bp, Artificial Sequence; identical to SEQ ID NO: 7485
  Description of Artificial Sequence: Synthetic cashew; 5' sequence + inner sequence + 3' sequence

SEQ ID NO: 15845 - DNA, 76 bp, Artificial Sequence; identical to SEQ ID NO: 7816
  Description of Artificial Sequence: Synthetic cashew; 5' sequence + inner sequence + 3' sequence

SEQ ID NO: 15846 - DNA, 76 bp, Artificial Sequence; identical to SEQ ID NO: 11879
  Description of Artificial Sequence: Synthetic cashew; 5' sequence + inner sequence + 3' sequence

SEQ ID NO: 15847 - DNA, 76 bp, Artificial Sequence; identical to SEQ ID NO: 7925
  Description of Artificial Sequence: Synthetic cashew; 5' sequence + inner sequence + 3' sequence

SEQ ID NO: 15848 - DNA, 76 bp, Artificial Sequence; identical to SEQ ID NO: 3242
  Description of Artificial Sequence: Synthetic cashew; 5' sequence + inner sequence + 3' sequence

SEQ ID NO: 15849 - DNA, 76 bp, Artificial Sequence; identical to SEQ ID NO: 3600
  Description of Artificial Sequence: Synthetic cashew; 5' sequence + inner sequence + 3' sequence

SEQ ID NO: 15850 - DNA, 76 bp, Artificial Sequence; identical to SEQ ID NO: 7949
  Description of Artificial Sequence: Synthetic cashew; 5' sequence + inner sequence + 3' sequence

SEQ ID NO: 15851 - DNA, 76 bp, Artificial Sequence; identical to SEQ ID NO: 7939
  Description of Artificial Sequence: Synthetic cashew; 5' sequence + inner sequence + 3' sequence

SEQ ID NO: 15852 - DNA, 76 bp, Artificial Sequence; identical to SEQ ID NO: 11837
  Description of Artificial Sequence: Synthetic cashew; 5' sequence + inner sequence + 3' sequence

SEQ ID NO: 15853 - DNA, 76 bp, Artificial Sequence
  Description of Artificial Sequence: Synthetic cashew; 5' sequence + inner sequence + 3' sequence
tagggaagagaaggacatatgatgtcctgccatcccttcgagtgtgacaggtattgactagtacatgaccacttga

SEQ ID NO: 15854 - DNA, 76 bp, Artificial Sequence; identical to SEQ ID NO: 3937
  Description of Artificial Sequence: Synthetic cashew; 5' sequence + inner sequence + 3' sequence

SEQ ID NO: 15855 - DNA, 76 bp, Artificial Sequence; identical to SEQ ID NO: 3169
  Description of Artificial Sequence: Synthetic cashew; 5' sequence + inner sequence + 3' sequence

SEQ ID NO: 15856 - DNA, 76 bp, Artificial Sequence; identical to SEQ ID NO: 7969
  Description of Artificial Sequence: Synthetic cashew; 5' sequence + inner sequence + 3' sequence

SEQ ID NO: 15857 - DNA, 76 bp, Artificial Sequence; identical to SEQ ID NO: 3559
  Description of Artificial Sequence: Synthetic cashew; 5' sequence + inner sequence + 3' sequence

SEQ ID NO: 15858 - DNA, 76 bp, Artificial Sequence; identical to SEQ ID NO: 7638
  Description of Artificial Sequence: Synthetic cashew; 5' sequence + inner sequence + 3' sequence

SEQ ID NO: 15859 - DNA, 76 bp, Artificial Sequence; identical to SEQ ID NO: 7857
  Description of Artificial Sequence: Synthetic cashew; 5' sequence + inner sequence + 3' sequence

SEQ ID NO: 15860 - DNA, 76 bp, Artificial Sequence; identical to SEQ ID NO: 7708
  Description of Artificial Sequence: Synthetic cashew; 5' sequence + inner sequence + 3' sequence

SEQ ID NO: 15861 - DNA, 76 bp, Artificial Sequence; identical to SEQ ID NO: 3339
  Description of Artificial Sequence: Synthetic cashew; 5' sequence + inner sequence + 3' sequence

SEQ ID NO: 15862 - DNA, 76 bp, Artificial Sequence; identical to SEQ ID NO: 3835
  Description of Artificial Sequence: Synthetic cashew; 5' sequence + inner sequence + 3' sequence

SEQ ID NO: 15863 - DNA, 76 bp, Artificial Sequence; identical to SEQ ID NO: 3521
  Description of Artificial Sequence: Synthetic cashew; 5' sequence + inner sequence + 3' sequence

SEQ ID NO: 15864 - DNA, 76 bp, Artificial Sequence
  Description of Artificial Sequence: Synthetic cashew; 5' sequence + inner sequence + 3' sequence
tagggaagagaaggacatatgatcgaccacgcgggagatggacatgtcgcatgttgactagtacatgaccacttga

SEQ ID NO: 15865 - DNA, 76 bp, Artificial Sequence; identical to SEQ ID NO: 11787
  Description of Artificial Sequence: Synthetic cashew; 5' sequence + inner sequence + 3' sequence

SEQ ID NO: 15866 - DNA, 76 bp, Artificial Sequence
  Description of Artificial Sequence: Synthetic cashew; 5' sequence + inner sequence + 3' sequence
tagggaagagaaggacatatgatctgcacgtagccctatcagtggtgcatgcattgactagtacatgaccacttga

SEQ ID NO: 15867 - DNA, 76 bp, Artificial Sequence; identical to SEQ ID NO: 3498
  Description of Artificial Sequence: Synthetic cashew; 5' sequence + inner sequence + 3' sequence

SEQ ID NO: 15868 - DNA, 76 bp, Artificial Sequence; identical to SEQ ID NO: 3977
  Description of Artificial Sequence: Synthetic cashew; 5' sequence + inner sequence + 3' sequence

SEQ ID NO: 15869 - DNA, 76 bp, Artificial Sequence
  Description of Artificial Sequence: Synthetic cashew; 5' sequence + inner sequence + 3' sequence
tagggaagagaaggacatatgatcgcaccgtcgatacgtcatggacgctgacattgactagtacatgaccacttga

SEQ ID NO: 15870 - DNA, 76 bp, Artificial Sequence; identical to SEQ ID NO: 11676
  Description of Artificial Sequence: Synthetic cashew; 5' sequence + inner sequence + 3' sequence

SEQ ID NO: 15871 - DNA, 76 bp, Artificial Sequence; identical to SEQ ID NO: 3650
  Description of Artificial Sequence: Synthetic cashew; 5' sequence + inner sequence + 3' sequence

SEQ ID NO: 15872 - DNA, 76 bp, Artificial Sequence
  Description of Artificial Sequence: Synthetic cashew; 5' sequence + inner sequence + 3' sequence
tagggaagagaaggacatatgatccgaacaaccgaacgtggacgtggctgtccttgactagtacatgaccacttga

SEQ ID NO: 15873 - DNA, 76 bp, Artificial Sequence; identical to SEQ ID NO: 3316
  Description of Artificial Sequence: Synthetic cashew; 5' sequence + inner sequence + 3' sequence

SEQ ID NO: 15874 - DNA, 76 bp, Artificial Sequence; identical to SEQ ID NO: 7837
  Description of Artificial Sequence: Synthetic cashew; 5' sequence + inner sequence + 3' sequence

SEQ ID NO: 15875 - DNA, 76 bp, Artificial Sequence; identical to SEQ ID NO: 7742
  Description of Artificial Sequence: Synthetic cashew; 5' sequence + inner sequence + 3' sequence

SEQ ID NO: 15876 - DNA, 76 bp, Artificial Sequence; identical to SEQ ID NO: 3719
  Description of Artificial Sequence: Synthetic cashew; 5' sequence + inner sequence + 3' sequence

SEQ ID NO: 15877 - DNA, 76 bp, Artificial Sequence; identical to SEQ ID NO: 3720
  Description of Artificial Sequence: Synthetic cashew; 5' sequence + inner sequence + 3' sequence

SEQ ID NO: 15878 - DNA, 76 bp, Artificial Sequence
  Description of Artificial Sequence: Synthetic cashew; 5' sequence + inner sequence + 3' sequence
tagggaagagaaggacatatgatcgctacgagtaggcatgtcttctgtgtgcattgactagtacatgaccacttga

SEQ ID NO: 15879 - DNA, 76 bp, Artificial Sequence; identical to SEQ ID NO: 7864
  Description of Artificial Sequence: Synthetic cashew; 5' sequence + inner sequence + 3' sequence

SEQ ID NO: 15880 - DNA, 76 bp, Artificial Sequence; identical to SEQ ID NO: 3664
  Description of Artificial Sequence: Synthetic cashew; 5' sequence + inner sequence + 3' sequence

SEQ ID NO: 15881 - DNA, 76 bp, Artificial Sequence; identical to SEQ ID NO: 3758
  Description of Artificial Sequence: Synthetic cashew; 5' sequence + inner sequence + 3' sequence

SEQ ID NO: 15882 - DNA, 77 bp, Artificial Sequence; identical to SEQ ID NO: 7858
  Description of Artificial Sequence: Synthetic cashew; 5' sequence + inner sequence + 3' sequence

SEQ ID NO: 15883 - DNA, 76 bp, Artificial Sequence; identical to SEQ ID NO: 3740
  Description of Artificial Sequence: Synthetic cashew; 5' sequence + inner sequence + 3' sequence

SEQ ID NO: 15884 - DNA, 76 bp, Artificial Sequence; identical to SEQ ID NO: 3669
  Description of Artificial Sequence: Synthetic cashew; 5' sequence + inner sequence + 3' sequence

SEQ ID NO: 15885 - DNA, 74 bp, Artificial Sequence
  Description of Artificial Sequence: Synthetic cashew; 5' sequence + inner sequence + 3' sequence
tagggaagagaaggacatatgatgtgcgaccgaccctatcatgaggccatgttgactagtacatgaccacttga

SEQ ID NO: 15886 - DNA, 76 bp, Artificial Sequence; identical to SEQ ID NO: 3482
  Description of Artificial Sequence: Synthetic cashew; 5' sequence + inner sequence + 3' sequence

SEQ ID NO: 15887 - DNA, 76 bp, Artificial Sequence; identical to SEQ ID NO: 11922
  Description of Artificial Sequence: Synthetic cashew; 5' sequence + inner sequence + 3' sequence

SEQ ID NO: 15888 - DNA, 76 bp, Artificial Sequence; identical to SEQ ID NO: 11907
  Description of Artificial Sequence: Synthetic cashew; 5' sequence + inner sequence + 3' sequence

SEQ ID NO: 15889 - DNA, 76 bp, Artificial Sequence
  Description of Artificial Sequence: Synthetic cashew; 5' sequence + inner sequence + 3' sequence
tagggaagagaaggacatatgatccgatgcgacacggaggcggtcttgcactgttgactagtacatgaccacttga

SEQ ID NO: 15890 - DNA, 76 bp, Artificial Sequence; identical to SEQ ID NO: 3748
  Description of Artificial Sequence: Synthetic cashew; 5' sequence + inner sequence + 3' sequence

SEQ ID NO: 15891 - DNA, 76 bp, Artificial Sequence; identical to SEQ ID NO: 3957
  Description of Artificial Sequence: Synthetic cashew; 5' sequence + inner sequence + 3' sequence

SEQ ID NO: 15892 - DNA, 76 bp, Artificial Sequence
  Description of Artificial Sequence: Synthetic cashew; 5' sequence + inner sequence + 3' sequence
tagggaagagaaggacatatgatccgcacgtagccctatcagtggttcatgcattgactagtacatgaccacttga

SEQ ID NO: 15893 - DNA, 75 bp, Artificial Sequence; identical to SEQ ID NO: 3549
  Description of Artificial Sequence: Synthetic cashew; 5' sequence + inner sequence + 3' sequence

SEQ ID NO: 15894 - DNA, 76 bp, Artificial Sequence; identical to SEQ ID NO: 3717
  Description of Artificial Sequence: Synthetic cashew; 5' sequence + inner sequence + 3' sequence

SEQ ID NO: 15895 - DNA, 76 bp, Artificial Sequence
  Description of Artificial Sequence: Synthetic cashew; 5' sequence + inner sequence + 3' sequence
tagggaagagaaggacatatgatcgcgacgcaagtgcatggacctcggcatgcttgactagtacatgaccacttga

SEQ ID NO: 15896 - DNA, 71 bp, Artificial Sequence; identical to SEQ ID NO: 3427
  Description of Artificial Sequence: Synthetic cashew; 5' sequence + inner sequence + 3' sequence

SEQ ID NO: 15897 - DNA, 76 bp, Artificial Sequence; identical to SEQ ID NO: 3490
  Description of Artificial Sequence: Synthetic cashew; 5' sequence + inner sequence + 3' sequence

SEQ ID NO: 15898 - DNA, 76 bp, Artificial Sequence; identical to SEQ ID NO: 11855
  Description of Artificial Sequence: Synthetic cashew; 5' sequence + inner sequence + 3' sequence

SEQ ID NO: 15899 - DNA, 76 bp, Artificial Sequence; identical to SEQ ID NO: 3670
  Description of Artificial Sequence: Synthetic cashew; 5' sequence + inner sequence + 3' sequence

SEQ ID NO: 15900 - DNA, 76 bp, Artificial Sequence; identical to SEQ ID NO: 3788
  Description of Artificial Sequence: Synthetic cashew; 5' sequence + inner sequence + 3' sequence

SEQ ID NO: 15901 - DNA, 76 bp, Artificial Sequence
  Description of Artificial Sequence: Synthetic cashew; 5' sequence + inner sequence + 3' sequence
tagggaagagaaggacatatgatcgcgacgagcaggcatgtcttctgtgtgcattgactagtacatgaccacttga

SEQ ID NO: 15902 - DNA, 76 bp, Artificial Sequence; identical to SEQ ID NO: 3931
  Description of Artificial Sequence: Synthetic cashew; 5' sequence + inner sequence + 3' sequence

SEQ ID NO: 15903 - DNA, 76 bp, Artificial Sequence; identical to SEQ ID NO: 7571
  Description of Artificial Sequence: Synthetic cashew; 5' sequence + inner sequence + 3' sequence

SEQ ID NO: 15904 - DNA, 76 bp, Artificial Sequence; identical to SEQ ID NO: 7872
  Description of Artificial Sequence: Synthetic cashew; 5' sequence + inner sequence + 3' sequence

SEQ ID NO: 15905 - DNA, 76 bp, Artificial Sequence; identical to SEQ ID NO: 7976
  Description of Artificial Sequence: Synthetic cashew; 5' sequence + inner sequence + 3' sequence

SEQ ID NO: 15906 - DNA, 76 bp, Artificial Sequence; identical to SEQ ID NO: 3996
  Description of Artificial Sequence: Synthetic cashew; 5' sequence + inner sequence + 3' sequence

SEQ ID NO: 15907 - DNA, 76 bp, Artificial Sequence; identical to SEQ ID NO: 3705
  Description of Artificial Sequence: Synthetic cashew; 5' sequence + inner sequence + 3' sequence

SEQ ID NO: 15908 - DNA, 76 bp, Artificial Sequence; identical to SEQ ID NO: 3434
  Description of Artificial Sequence: Synthetic cashew; 5' sequence + inner sequence + 3' sequence

SEQ ID NO: 15909 - DNA, 76 bp, Artificial Sequence; identical to SEQ ID NO: 11792
  Description of Artificial Sequence: Synthetic cashew; 5' sequence + inner sequence + 3' sequence

SEQ ID NO: 15910 - DNA, 76 bp, Artificial Sequence; identical to SEQ ID NO: 7874
  Description of Artificial Sequence: Synthetic cashew; 5' sequence + inner sequence + 3' sequence

SEQ ID NO: 15911 - DNA, 76 bp, Artificial Sequence; identical to SEQ ID NO: 3782
  Description of Artificial Sequence: Synthetic cashew; 5' sequence + inner sequence + 3' sequence

SEQ ID NO: 15912 - DNA, 76 bp, Artificial Sequence
  Description of Artificial Sequence: Synthetic cashew; 5' sequence + inner sequence + 3' sequence
tagggaagagaaggacatatgatagcgtgcggcacggtccacttcgctgcatgttgactagtacatgaccacttga

SEQ ID NO: 15913 - DNA, 76 bp, Artificial Sequence; identical to SEQ ID NO: 7634
  Description of Artificial Sequence: Synthetic cashew; 5' sequence + inner sequence + 3' sequence

SEQ ID NO: 15914 - DNA, 76 bp, Artificial Sequence
  Description of Artificial Sequence: Synthetic cashew; 5' sequence + inner sequence + 3' sequence
tagggaagagaaggacatatgatgcgtcatgggtacgtcgctgggtgtggacattgactagtacatgaccacttga

SEQ ID NO: 15915 - DNA, 76 bp, Artificial Sequence; identical to SEQ ID NO: 11826
  Description of Artificial Sequence: Synthetic cashew; 5' sequence + inner sequence + 3' sequence

SEQ ID NO: 15916 - DNA, 76 bp, Artificial Sequence; identical to SEQ ID NO: 7710
  Description of Artificial Sequence: Synthetic cashew; 5' sequence + inner sequence + 3' sequence

SEQ ID NO: 15917 - DNA, 76 bp, Artificial Sequence; identical to SEQ ID NO: 3580
  Description of Artificial Sequence: Synthetic cashew; 5' sequence + inner sequence + 3' sequence

SEQ ID NO: 15918 - DNA, 75 bp, Artificial Sequence
  Description of Artificial Sequence: Synthetic cashew; 5' sequence + inner sequence + 3' sequence
tagggaagagaaggacatatgatcgtgctacgaggacctggaccggtgcgtcttgactagtacatgaccacttga

SEQ ID NO: 15919 - DNA, 76 bp, Artificial Sequence; identical to SEQ ID NO: 3444
  Description of Artificial Sequence: Synthetic cashew; 5' sequence + inner sequence + 3' sequence

SEQ ID NO: 15920 - DNA, 76 bp, Artificial Sequence; identical to SEQ ID NO: 11988
  Description of Artificial Sequence: Synthetic cashew; 5' sequence + inner sequence + 3' sequence

SEQ ID NO: 15921 - DNA, 76 bp, Artificial Sequence; identical to SEQ ID NO: 7930
  Description of Artificial Sequence: Synthetic cashew; 5' sequence + inner sequence + 3' sequence

SEQ ID NO: 15922 - DNA, 76 bp, Artificial Sequence
  Description of Artificial Sequence: Synthetic cashew; 5' sequence + inner sequence + 3' sequence
tagggaagagaaggacatatgatgtcatgcacgaacactatcatgacggcatgttgactagtacatgaccacttga

SEQ ID NO: 15923 - DNA, 76 bp, Artificial Sequence; identical to SEQ ID NO: 3962
  Description of Artificial Sequence: Synthetic cashew; 5' sequence + inner sequence + 3' sequence

SEQ ID NO: 15924 - DNA, 75 bp, Artificial Sequence; identical to SEQ ID NO: 7763
  Description of Artificial Sequence: Synthetic cashew; 5' sequence + inner sequence + 3' sequence

SEQ ID NO: 15925 - DNA, 76 bp, Artificial Sequence; identical to SEQ ID NO: 7933
  Description of Artificial Sequence: Synthetic cashew; 5' sequence + inner sequence + 3' sequence

SEQ ID NO: 15926 - DNA, 76 bp, Artificial Sequence; identical to SEQ ID NO: 7807
  Description of Artificial Sequence: Synthetic cashew; 5' sequence + inner sequence + 3' sequence

SEQ ID NO: 15927 - DNA, 76 bp, Artificial Sequence; identical to SEQ ID NO: 3842
  Description of Artificial Sequence: Synthetic cashew; 5' sequence + inner sequence + 3' sequence

SEQ ID NO: 15928 - DNA, 76 bp, Artificial Sequence; identical to SEQ ID NO: 7880
  Description of Artificial Sequence: Synthetic cashew; 5' sequence + inner sequence + 3' sequence

SEQ ID NO: 15929 - DNA, 76 bp, Artificial Sequence; identical to SEQ ID NO: 3526
  Description of Artificial Sequence: Synthetic cashew; 5' sequence + inner sequence + 3' sequence

SEQ ID NO: 15930 - DNA, 76 bp, Artificial Sequence; identical to SEQ ID NO: 3823
  Description of Artificial Sequence: Synthetic cashew; 5' sequence + inner sequence + 3' sequence

SEQ ID NO: 15931 - DNA, 76 bp, Artificial Sequence
  Description of Artificial Sequence: Synthetic cashew; 5' sequence + inner sequence + 3' sequence
tagggaagagaaggacatatgatgtgctgcactgccctacacgtgggaatggattgactagtacatgaccacttga

SEQ ID NO: 15932 - DNA, 76 bp, Artificial Sequence
  Description of Artificial Sequence: Synthetic cashew; 5' sequence + inner sequence + 3' sequence
tagggaagagaaggacatatgatcgcaccgagagtgatcgttgttcgcagtcattgactagtacatgaccacttga

SEQ ID NO: 15933 - DNA, 76 bp, Artificial Sequence
  Description of Artificial Sequence: Synthetic cashew; 5' sequence + inner sequence + 3' sequence
tagggaagagaaggacatatgatggcatgcgatggatgtgggccagtacgcgcttgactagtacatgaccacttga

SEQ ID NO: 15934 - DNA, 76 bp, Artificial Sequence; identical to SEQ ID NO: 3778
  Description of Artificial Sequence: Synthetic cashew; 5' sequence + inner sequence + 3' sequence

SEQ ID NO: 15935 - DNA, 76 bp, Artificial Sequence; identical to SEQ ID NO: 3555
  Description of Artificial Sequence: Synthetic cashew; 5' sequence + inner sequence + 3' sequence

SEQ ID NO: 15936 - DNA, 76 bp, Artificial Sequence
  Description of Artificial Sequence: Synthetic cashew; 5' sequence + inner sequence + 3' sequence
tagggaagagaaggacatatgatgcacgactcgcaccttatcatgaggccatgttgactagtacatgaccacttga

SEQ ID NO: 15937 - DNA, 76 bp, Artificial Sequence; identical to SEQ ID NO: 3408
  Description of Artificial Sequence: Synthetic cashew; 5' sequence + inner sequence + 3' sequence

SEQ ID NO: 15938 - DNA, 76 bp, Artificial Sequence; identical to SEQ ID NO: 7987
  Description of Artificial Sequence: Synthetic cashew; 5' sequence + inner sequence + 3' sequence

SEQ ID NO: 15939 - DNA, 76 bp, Artificial Sequence
  Description of Artificial Sequence: Synthetic cashew; 5' sequence + inner sequence + 3' sequence
tagggaagagaaggacatatgatgcccgaacgaccgatcgagtggcgcatggattgactagtacatgaccacttga

SEQ ID NO: 15940 - DNA, 76 bp, Artificial Sequence; identical to SEQ ID NO: 3542
  Description of Artificial Sequence: Synthetic cashew; 5' sequence + inner sequence + 3' sequence

SEQ ID NO: 15941 - DNA, 76 bp, Artificial Sequence; identical to SEQ ID NO: 3421
  Description of Artificial Sequence: Synthetic cashew; 5' sequence + inner sequence + 3' sequence

SEQ ID NO: 15942 - DNA, 75 bp, Artificial Sequence; identical to SEQ ID NO: 7968
  Description of Artificial Sequence: Synthetic cashew; 5' sequence + inner sequence + 3' sequence

SEQ ID NO: 15943 - DNA, 76 bp, Artificial Sequence; identical to SEQ ID NO: 3913
  Description of Artificial Sequence: Synthetic cashew; 5' sequence + inner sequence + 3' sequence

SEQ ID NO: 15944 - DNA, 76 bp, Artificial Sequence
  Description of Artificial Sequence: Synthetic cashew; 5' sequence + inner sequence + 3' sequence
tagggaagagaaggacatatgatggcatgcacgcccctacacgtgggtatggattgactagtacatgaccacttga

SEQ ID NO: 15945 - DNA, 76 bp, Artificial Sequence
  Description of Artificial Sequence: Synthetic cashew; 5' sequence + inner sequence + 3' sequence
tagggaagagaaggacatatgatctgtagcgacatcaagcggtggtgtgcgtgttgactagtacatgaccacttga

SEQ ID NO: 15946 - DNA, 76 bp, Artificial Sequence; identical to SEQ ID NO: 3561
  Description of Artificial Sequence: Synthetic cashew; 5' sequence + inner sequence + 3' sequence

SEQ ID NO: 15947 - DNA, 76 bp, Artificial Sequence; identical to SEQ ID NO: 3479
  Description of Artificial Sequence: Synthetic cashew; 5' sequence + inner sequence + 3' sequence

SEQ ID NO: 15948 - DNA, 76 bp, Artificial Sequence; identical to SEQ ID NO: 3983
  Description of Artificial Sequence: Synthetic cashew; 5' sequence + inner sequence + 3' sequence

SEQ ID NO: 15949 - DNA, 76 bp, Artificial Sequence; identical to SEQ ID NO: 11869
  Description of Artificial Sequence: Synthetic cashew; 5' sequence + inner sequence + 3' sequence

SEQ ID NO: 15950 - DNA, 76 bp, Artificial Sequence; identical to SEQ ID NO: 11586
  Description of Artificial Sequence: Synthetic cashew; 5' sequence + inner sequence + 3' sequence

SEQ ID NO: 15951 - DNA, 76 bp, Artificial Sequence; identical to SEQ ID NO: 3906
  Description of Artificial Sequence: Synthetic cashew; 5' sequence + inner sequence + 3' sequence

SEQ ID NO: 15952 - DNA, 76 bp, Artificial Sequence; identical to SEQ ID NO: 3263
  Description of Artificial Sequence: Synthetic cashew; 5' sequence + inner sequence + 3' sequence

SEQ ID NO: 15953 - DNA, 76 bp, Artificial Sequence
  Description of Artificial Sequence: Synthetic cashew; 5' sequence + inner sequence + 3' sequence
tagggaagagaaggacatatgatgtcatgcacgaacactatcacggcggcatgttgactagtacatgaccacttga

SEQ ID NO: 15954 - DNA, 76 bp, Artificial Sequence; identical to SEQ ID NO: 3945
  Description of Artificial Sequence: Synthetic cashew; 5' sequence + inner sequence + 3' sequence

SEQ ID NO: 15955 - DNA, 76 bp, Artificial Sequence; identical to SEQ ID NO: 11985
  Description of Artificial Sequence: Synthetic cashew; 5' sequence + inner sequence + 3' sequence

SEQ ID NO: 15956 - DNA, 76 bp, Artificial Sequence; identical to SEQ ID NO: 3706
  Description of Artificial Sequence: Synthetic cashew; 5' sequence + inner sequence + 3' sequence

SEQ ID NO: 15957 - DNA, 76 bp, Artificial Sequence; identical to SEQ ID NO: 3571
  Description of Artificial Sequence: Synthetic cashew; 5' sequence + inner sequence + 3' sequence

SEQ ID NO: 15958 - DNA, 76 bp, Artificial Sequence
  Description of Artificial Sequence: Synthetic cashew; 5' sequence + inner sequence + 3' sequence
tagggaagagaaggacatatgatccgcacgtagccctatcagtggtgcatgtattgactagtacatgaccacttga

SEQ ID NO: 15959 - DNA, 76 bp, Artificial Sequence
  Description of Artificial Sequence: Synthetic cashew; 5' sequence + inner sequence + 3' sequence
tagggaagagaaggacatatgatgcacgtcagcacgtcctctctggcgtggtattgactagtacatgaccacttga

SEQ ID NO: 15960 - DNA, 76 bp, Artificial Sequence; identical to SEQ ID NO: 3598
  Description of Artificial Sequence: Synthetic cashew; 5' sequence + inner sequence + 3' sequence

SEQ ID NO: 15961 - DNA, 76 bp, Artificial Sequence; identical to SEQ ID NO: 11804
  Description of Artificial Sequence: Synthetic cashew; 5' sequence + inner sequence + 3' sequence

SEQ ID NO: 15962 - DNA, 76 bp, Artificial Sequence; identical to SEQ ID NO: 3863
  Description of Artificial Sequence: Synthetic cashew; 5' sequence + inner sequence + 3' sequence

SEQ ID NO: 15963 - DNA, 76 bp, Artificial Sequence; identical to SEQ ID NO: 11770
  Description of Artificial Sequence: Synthetic cashew; 5' sequence + inner sequence + 3' sequence

SEQ ID NO: 15964 - DNA, 76 bp, Artificial Sequence; identical to SEQ ID NO: 11892
  Description of Artificial Sequence: Synthetic cashew; 5' sequence + inner sequence + 3' sequence

SEQ ID NO: 15965 - DNA, 76 bp, Artificial Sequence; identical to SEQ ID NO: 7810
  Description of Artificial Sequence: Synthetic cashew; 5' sequence + inner sequence + 3' sequence

SEQ ID NO: 15966 - DNA, 76 bp, Artificial Sequence; identical to SEQ ID NO: 7881
  Description of Artificial Sequence: Synthetic cashew; 5' sequence + inner sequence + 3' sequence

SEQ ID NO: 15967 - DNA, 76 bp, Artificial Sequence; identical to SEQ ID NO: 3751
  Description of Artificial Sequence: Synthetic cashew; 5' sequence + inner sequence + 3' sequence

SEQ ID NO: 15968 - DNA, 76 bp, Artificial Sequence; identical to SEQ ID NO: 7967
  Description of Artificial Sequence: Synthetic cashew; 5' sequence + inner sequence + 3' sequence

SEQ ID NO: 15969 - DNA, 76 bp, Artificial Sequence; identical to SEQ ID NO: 4001
  Description of Artificial Sequence: Synthetic cashew; 5' sequence + inner sequence + 3' sequence

SEQ ID NO: 15970 - DNA, 76 bp, Artificial Sequence; identical to SEQ ID NO: 7667
  Description of Artificial Sequence: Synthetic cashew; 5' sequence + inner sequence + 3' sequence

SEQ ID NO: 15971 - DNA, 76 bp, Artificial Sequence
  Description of Artificial Sequence: Synthetic cashew; 5' sequence + inner sequence + 3' sequence
tagggaagagaaggacatatgatggccaatgcgccccttcatgttgtcgtggattgactagtacatgaccacttga

SEQ ID NO: 15972 - DNA, 76 bp, Artificial Sequence; identical to SEQ ID NO: 7943
  Description of Artificial Sequence: Synthetic cashew; 5' sequence + inner sequence + 3' sequence

SEQ ID NO: 15973 - DNA, 76 bp, Artificial Sequence; identical to SEQ ID NO: 3644
  Description of Artificial Sequence: Synthetic cashew; 5' sequence + inner sequence + 3' sequence

SEQ ID NO: 15974 - DNA, 76 bp, Artificial Sequence; identical to SEQ ID NO: 7706
  Description of Artificial Sequence: Synthetic cashew; 5' sequence + inner sequence + 3' sequence

SEQ ID NO: 15975 - DNA, 76 bp, Artificial Sequence; identical to SEQ ID NO: 7621
  Description of Artificial Sequence: Synthetic cashew; 5' sequence + inner sequence + 3' sequence

SEQ ID NO: 15976 - DNA, 76 bp, Artificial Sequence; identical to SEQ ID NO: 7867
  Description of Artificial Sequence: Synthetic cashew; 5' sequence + inner sequence + 3' sequence

SEQ ID NO: 15977 - DNA, 76 bp, Artificial Sequence; identical to SEQ ID NO: 3472
  Description of Artificial Sequence: Synthetic cashew; 5' sequence + inner sequence + 3' sequence

SEQ ID NO: 15978 - DNA, 76 bp, Artificial Sequence
  Description of Artificial Sequence: Synthetic cashew; 5' sequence + inner sequence + 3' sequence
tagggaagagaaggacatatgatggccgagctgaccgtaaaggcaggcgtgtattgactagtacatgaccacttga

SEQ ID NO: 15979 - DNA, 76 bp, Artificial Sequence; identical to SEQ ID NO: 7719
  Description of Artificial Sequence: Synthetic cashew; 5' sequence + inner sequence + 3' sequence

SEQ ID NO: 15980 - DNA, 75 bp, Artificial Sequence; identical to SEQ ID NO: 3879
  Description of Artificial Sequence: Synthetic cashew; 5' sequence + inner sequence + 3' sequence

SEQ ID NO: 15981 - DNA, 75 bp, Artificial Sequence; identical to SEQ ID NO: 3648
  Description of Artificial Sequence: Synthetic cashew; 5' sequence + inner sequence + 3' sequence

SEQ ID NO: 15982 - DNA, 76 bp, Artificial Sequence; identical to SEQ ID NO: 3601
  Description of Artificial Sequence: Synthetic cashew; 5' sequence + inner sequence + 3' sequence

SEQ ID NO: 15983 - DNA, 76 bp, Artificial Sequence; identical to SEQ ID NO: 7469
  Description of Artificial Sequence: Synthetic cashew; 5' sequence + inner sequence + 3' sequence

SEQ ID NO: 15984 - DNA, 76 bp, Artificial Sequence; identical to SEQ ID NO: 11962
  Description of Artificial Sequence: Synthetic cashew; 5' sequence + inner sequence + 3' sequence

SEQ ID NO: 15985 - DNA, 76 bp, Artificial Sequence
  Description of Artificial Sequence: Synthetic cashew; 5' sequence + inner sequence + 3' sequence
tagggaagagaaggacatatgatgcacgactctcaccctatcatgaggccatgttgactagtacatgaccacttga

SEQ ID NO: 15986 - DNA, 76 bp, Artificial Sequence
  Description of Artificial Sequence: Synthetic cashew; 5' sequence + inner sequence + 3' sequence
tagggaagagaaggacatatgatgtacacagcgcaccctatcatgaggccatgttgactagtacatgaccacttga

SEQ ID NO: 15987 - DNA, 76 bp, Artificial Sequence; identical to SEQ ID NO: 7631
  Description of Artificial Sequence: Synthetic cashew; 5' sequence + inner sequence + 3' sequence

SEQ ID NO: 15988 - DNA, 76 bp, Artificial Sequence; identical to SEQ ID NO: 3497
  Description of Artificial Sequence: Synthetic cashew; 5' sequence + inner sequence + 3' sequence

SEQ ID NO: 15989 - DNA, 76 bp, Artificial Sequence; identical to SEQ ID NO: 7743
  Description of Artificial Sequence: Synthetic cashew; 5' sequence + inner sequence + 3' sequence

SEQ ID NO: 15990 - DNA, 76 bp, Artificial Sequence; identical to SEQ ID NO: 7381
  Description of Artificial Sequence: Synthetic cashew; 5' sequence + inner sequence + 3' sequence

SEQ ID NO: 15991 - DNA, 76 bp, Artificial Sequence; identical to SEQ ID NO: 3688
  Description of Artificial Sequence: Synthetic cashew; 5' sequence + inner sequence + 3' sequence

SEQ ID NO: 15992 - DNA, 76 bp, Artificial Sequence
  Description of Artificial Sequence: Synthetic cashew; 5' sequence + inner sequence + 3' sequence
tagggaagagaaggacatatgatccatcgcgtcactatcatgcgtgtcacgtattgactagtacatgaccacttga

SEQ ID NO: 15993 - DNA, 76 bp, Artificial Sequence; identical to SEQ ID NO: 7591
  Description of Artificial Sequence: Synthetic cashew; 5' sequence + inner sequence + 3' sequence

SEQ ID NO: 15994 - DNA, 76 bp, Artificial Sequence; identical to SEQ ID NO: 3677
  Description of Artificial Sequence: Synthetic cashew; 5' sequence + inner sequence + 3' sequence

SEQ ID NO: 15995 - DNA, 76 bp, Artificial Sequence; identical to SEQ ID NO: 3307
  Description of Artificial Sequence: Synthetic cashew; 5' sequence + inner sequence + 3' sequence

SEQ ID NO: 15996 - DNA, 76 bp, Artificial Sequence
  Description of Artificial Sequence: Synthetic cashew; 5' sequence + inner sequence + 3' sequence
tagggaagagaaggacatatgatcgcaccctcgatacgtcatgcacgctgacattgactagtacatgaccacttga

SEQ ID NO: 15997 - DNA, 76 bp, Artificial Sequence
  Description of Artificial Sequence: Synthetic cashew; 5' sequence + inner sequence + 3' sequence
tagggaagagaaggacatatgatggccacagcgtacctcaacgtggacgcgcattgactagtacatgaccacttga

SEQ ID NO: 15998 - DNA, 76 bp, Artificial Sequence
  Description of Artificial Sequence: Synthetic cashew; 5' sequence + inner sequence + 3' sequence
tagggaagagaaggacatatgatgtacgcaaacggaccgatcggtggtgcgtattgactagtacatgaccacttga

SEQ ID NO: 15999 - DNA, 76 bp, Artificial Sequence
  Description of Artificial Sequence: Synthetic cashew; 5' sequence + inner sequence + 3' sequence
tagggaagagaaggacatatgatgcgaccgcgacatacgatctgctctgcgtcttgactagtacatgaccacttga

SEQ ID NO: 16000 - DNA, 76 bp, Artificial Sequence; identical to SEQ ID NO: 3547
  Description of Artificial Sequence: Synthetic cashew; 5' sequence + inner sequence + 3' sequence

SEQ ID NO: 16001 - DNA, 76 bp, Artificial Sequence; identical to SEQ ID NO: 3335
  Description of Artificial Sequence: Synthetic cashew; 5' sequence + inner sequence + 3' sequence

SEQ ID NO: 16002 - DNA, 76 bp, Artificial Sequence
  Description of Artificial Sequence: Synthetic cashew; 5' sequence + inner sequence + 3' sequence
tagggaagagaaggacatatgatgtcatgccatcccttcgagagtgacaggtattgactagtacatgaccacttga

SEQ ID NO: 16003 - DNA, 30 bp, Artificial Sequence; identical to SEQ ID NO: 3
  Description of Artificial Sequence: Synthetic hazel nut; inner sequence

SEQ ID NO: 16004 - DNA, 30 bp, Artificial Sequence; identical to SEQ ID NO: 10
  Description of Artificial Sequence: Synthetic hazel nut; inner sequence

SEQ ID NO: 16005 - DNA, 30 bp, Artificial Sequence; identical to SEQ ID NO: 4
  Description of Artificial Sequence: Synthetic hazel nut; inner sequence

SEQ ID NO: 16006 - DNA, 30 bp, Artificial Sequence; identical to SEQ ID NO: 8
  Description of Artificial Sequence: Synthetic hazel nut; inner sequence

SEQ ID NO: 16007 - DNA, 30 bp, Artificial Sequence; identical to SEQ ID NO: 6
  Description of Artificial Sequence: Synthetic hazel nut; inner sequence

SEQ ID NO: 16008 - DNA, 30 bp, Artificial Sequence; identical to SEQ ID NO: 5
  Description of Artificial Sequence: Synthetic hazel nut; inner sequence

SEQ ID NO: 16009 - DNA, 30 bp, Artificial Sequence; identical to SEQ ID NO: 20
  Description of Artificial Sequence: Synthetic hazel nut; inner sequence

SEQ ID NO: 16010 - DNA, 30 bp, Artificial Sequence; identical to SEQ ID NO: 36
  Description of Artificial Sequence: Synthetic hazel nut; inner sequence

SEQ ID NO: 16011 - DNA, 30 bp, Artificial Sequence; identical to SEQ ID NO: 9
  Description of Artificial Sequence: Synthetic hazel nut; inner sequence

SEQ ID NO: 16012 - DNA, 30 bp, Artificial Sequence; identical to SEQ ID NO: 7
  Description of Artificial Sequence: Synthetic hazel nut; inner sequence

SEQ ID NO: 16013 - DNA, 30 bp, Artificial Sequence; identical to SEQ ID NO: 12
  Description of Artificial Sequence: Synthetic hazel nut; inner sequence

SEQ ID NO: 16014 - DNA, 30 bp, Artificial Sequence; identical to SEQ ID NO: 40
  Description of Artificial Sequence: Synthetic hazel nut; inner sequence

SEQ ID NO: 16015 - DNA, 30 bp, Artificial Sequence; identical to SEQ ID NO: 11
  Description of Artificial Sequence: Synthetic hazel nut; inner sequence

SEQ ID NO: 16016 - DNA, 30 bp, Artificial Sequence; identical to SEQ ID NO: 45
  Description of Artificial Sequence: Synthetic hazel nut; inner sequence

SEQ ID NO: 16017 - DNA, 30 bp, Artificial Sequence; identical to SEQ ID NO: 23
  Description of Artificial Sequence: Synthetic hazel nut; inner sequence

SEQ ID NO: 16018 - DNA, 30 bp, Artificial Sequence; identical to SEQ ID NO: 30
  Description of Artificial Sequence: Synthetic hazel nut; inner sequence

SEQ ID NO: 16019 - DNA, 30 bp, Artificial Sequence; identical to SEQ ID NO: 22
  Description of Artificial Sequence: Synthetic hazel nut; inner sequence

SEQ ID NO: 16020 - DNA, 30 bp, Artificial Sequence; identical to SEQ ID NO: 108
  Description of Artificial Sequence: Synthetic hazel nut; inner sequence

SEQ ID NO: 16021 - DNA, 30 bp, Artificial Sequence; identical to SEQ ID NO: 21
  Description of Artificial Sequence: Synthetic hazel nut; inner sequence

SEQ ID NO: 16022 - DNA, 30 bp, Artificial Sequence; identical to SEQ ID NO: 14
  Description of Artificial Sequence: Synthetic hazel nut; inner sequence

SEQ ID NO: 16023 - DNA, 30 bp, Artificial Sequence; identical to SEQ ID NO: 44
  Description of Artificial Sequence: Synthetic hazel nut; inner sequence

SEQ ID NO: 16024 - DNA, 30 bp, Artificial Sequence; identical to SEQ ID NO: 129
  Description of Artificial Sequence: Synthetic hazel nut; inner sequence

SEQ ID NO: 16025 - DNA, 30 bp, Artificial Sequence; identical to SEQ ID NO: 28
  Description of Artificial Sequence: Synthetic hazel nut; inner sequence

SEQ ID NO: 16026 - DNA, 30 bp, Artificial Sequence; identical to SEQ ID NO: 41
  Description of Artificial Sequence: Synthetic hazel nut; inner sequence

SEQ ID NO: 16027 - DNA, 30 bp, Artificial Sequence; identical to SEQ ID NO: 33
  Description of Artificial Sequence: Synthetic hazel nut; inner sequence

SEQ ID NO: 16028 - DNA, 29 bp, Artificial Sequence
  Description of Artificial Sequence: Synthetic hazel nut; inner sequence
gcacgtcgaaacacgtagccatgcacggt

SEQ ID NO: 16029 - DNA, 30 bp, Artificial Sequence; identical to SEQ ID NO: 79
  Description of Artificial Sequence: Synthetic hazel nut; inner sequence

SEQ ID NO: 16030 - DNA, 30 bp, Artificial Sequence; identical to SEQ ID NO: 52
  Description of Artificial Sequence: Synthetic hazel nut; inner sequence

SEQ ID NO: 16031 - DNA, 30 bp, Artificial Sequence; identical to SEQ ID NO: 46
  Description of Artificial Sequence: Synthetic hazel nut; inner sequence

SEQ ID NO: 16032 - DNA, 30 bp, Artificial Sequence; identical to SEQ ID NO: 16
  Description of Artificial Sequence: Synthetic hazel nut; inner sequence

SEQ ID NO: 16033 - DNA, 30 bp, Artificial Sequence; identical to SEQ ID NO: 60
  Description of Artificial Sequence: Synthetic hazel nut; inner sequence

SEQ ID NO: 16034 - DNA, 30 bp, Artificial Sequence; identical to SEQ ID NO: 17
  Description of Artificial Sequence: Synthetic hazel nut; inner sequence

SEQ ID NO: 16035 - DNA, 30 bp, Artificial Sequence; identical to SEQ ID NO: 13
  Description of Artificial Sequence: Synthetic hazel nut; inner sequence

SEQ ID NO: 16036 - DNA, 30 bp, Artificial Sequence; identical to SEQ ID NO: 25
  Description of Artificial Sequence: Synthetic hazel nut; inner sequence

SEQ ID NO: 16037 - DNA, 30 bp, Artificial Sequence; identical to SEQ ID NO: 77
  Description of Artificial Sequence: Synthetic hazel nut; inner sequence

SEQ ID NO: 16038 - DNA, 30 bp, Artificial Sequence; identical to SEQ ID NO: 18
  Description of Artificial Sequence: Synthetic hazel nut; inner sequence

SEQ ID NO: 16039 - DNA, 30 bp, Artificial Sequence; identical to SEQ ID NO: 51
  Description of Artificial Sequence: Synthetic hazel nut; inner sequence

SEQ ID NO: 16040 - DNA, 30 bp, Artificial Sequence; identical to SEQ ID NO: 15
  Description of Artificial Sequence: Synthetic hazel nut; inner sequence

SEQ ID NO: 16041 - DNA, 30 bp, Artificial Sequence; identical to SEQ ID NO: 49
  Description of Artificial Sequence: Synthetic hazel nut; inner sequence

SEQ ID NO: 16042 - DNA, 30 bp, Artificial Sequence; identical to SEQ ID NO: 50
  Description of Artificial Sequence: Synthetic hazel nut; inner sequence

SEQ ID NO: 16043 - DNA, 30 bp, Artificial Sequence; identical to SEQ ID NO: 64
  Description of Artificial Sequence: Synthetic hazel nut; inner sequence

SEQ ID NO: 16044 - DNA, 30 bp, Artificial Sequence; identical to SEQ ID NO: 53
  Description of Artificial Sequence: Synthetic hazel nut; inner sequence

SEQ ID NO: 16045 - DNA, 30 bp, Artificial Sequence; identical to SEQ ID NO: 98
  Description of Artificial Sequence: Synthetic hazel nut; inner sequence

SEQ ID NO: 16046 - DNA, 30 bp, Artificial Sequence; identical to SEQ ID NO: 88
  Description of Artificial Sequence: Synthetic hazel nut; inner sequence

SEQ ID NO: 16047 - DNA, 30 bp, Artificial Sequence; identical to SEQ ID NO: 74
  Description of Artificial Sequence: Synthetic hazel nut; inner sequence

SEQ ID NO: 16048 - DNA, 30 bp, Artificial Sequence; identical to SEQ ID NO: 247
  Description of Artificial Sequence: Synthetic hazel nut; inner sequence

SEQ ID NO: 16049 - DNA, 30 bp, Artificial Sequence; identical to SEQ ID NO: 37
  Description of Artificial Sequence: Synthetic hazel nut; inner sequence

SEQ ID NO: 16050 - DNA, 30 bp, Artificial Sequence; identical to SEQ ID NO: 96
  Description of Artificial Sequence: Synthetic hazel nut; inner sequence

SEQ ID NO: 16051 - DNA, 30 bp, Artificial Sequence; identical to SEQ ID NO: 131
  Description of Artificial Sequence: Synthetic hazel nut; inner sequence

SEQ ID NO: 16052 - DNA, 30 bp, Artificial Sequence; identical to SEQ ID NO: 178
  Description of Artificial Sequence: Synthetic hazel nut; inner sequence

SEQ ID NO: 16053 - DNA, 30 bp, Artificial Sequence; identical to SEQ ID NO: 66
  Description of Artificial Sequence: Synthetic hazel nut; inner sequence

SEQ ID NO: 16054 - DNA, 30 bp, Artificial Sequence; identical to SEQ ID NO: 81
  Description of Artificial Sequence: Synthetic hazel nut; inner sequence

SEQ ID NO: 16055 - DNA, 30 bp, Artificial Sequence; identical to SEQ ID NO: 115
  Description of Artificial Sequence: Synthetic hazel nut; inner sequence

SEQ ID NO: 16056 - DNA, 30 bp, Artificial Sequence; identical to SEQ ID NO: 138
  Description of Artificial Sequence: Synthetic hazel nut; inner sequence

SEQ ID NO: 16057 - DNA, 30 bp, Artificial Sequence; identical to SEQ ID NO: 34
  Description of Artificial Sequence: Synthetic hazel nut; inner sequence

SEQ ID NO: 16058 - DNA, 30 bp, Artificial Sequence; identical to SEQ ID NO: 73
  Description of Artificial Sequence: Synthetic hazel nut; inner sequence

SEQ ID NO: 16059 - DNA, 29 bp, Artificial Sequence
  Description of Artificial Sequence: Synthetic hazel nut; inner sequence
gcacgccgatgccctcatgtggccgtgga

SEQ ID NO: 16060 - DNA, 30 bp, Artificial Sequence; identical to SEQ ID NO: 519
  Description of Artificial Sequence: Synthetic hazel nut; inner sequence

SEQ ID NO: 16061 - DNA, 30 bp, Artificial Sequence; identical to SEQ ID NO: 172
  Description of Artificial Sequence: Synthetic hazel nut; inner sequence

SEQ ID NO: 16062 - DNA, 30 bp, Artificial Sequence; identical to SEQ ID NO: 185
  Description of Artificial Sequence: Synthetic hazel nut; inner sequence

SEQ ID NO: 16063 - DNA, 30 bp, Artificial Sequence; identical to SEQ ID NO: 255
  Description of Artificial Sequence: Synthetic hazel nut; inner sequence

SEQ ID NO: 16064 - DNA, 30 bp, Artificial Sequence; identical to SEQ ID NO: 67
  Description of Artificial Sequence: Synthetic hazel nut; inner sequence

SEQ ID NO: 16065 - DNA, 30 bp, Artificial Sequence; identical to SEQ ID NO: 281
  Description of Artificial Sequence: Synthetic hazel nut; inner sequence

SEQ ID NO: 16066 - DNA, 30 bp, Artificial Sequence; identical to SEQ ID NO: 35
  Description of Artificial Sequence: Synthetic hazel nut; inner sequence

SEQ ID NO: 16067 - DNA, 30 bp, Artificial Sequence; identical to SEQ ID NO: 57
  Description of Artificial Sequence: Synthetic hazel nut; inner sequence

SEQ ID NO: 16068 - DNA, 30 bp, Artificial Sequence; identical to SEQ ID NO: 38
  Description of Artificial Sequence: Synthetic hazel nut; inner sequence

SEQ ID NO: 16069 - DNA, 30 bp, Artificial Sequence; identical to SEQ ID NO: 29
  Description of Artificial Sequence: Synthetic hazel nut; inner sequence

SEQ ID NO: 16070 - DNA, 30 bp, Artificial Sequence; identical to SEQ ID NO: 366
  Description of Artificial Sequence: Synthetic hazel nut; inner sequence

SEQ ID NO: 16071 - DNA, 30 bp, Artificial Sequence; identical to SEQ ID NO: 54
  Description of Artificial Sequence: Synthetic hazel nut; inner sequence

SEQ ID NO: 16072 - DNA, 30 bp, Artificial Sequence; identical to SEQ ID NO: 526
  Description of Artificial Sequence: Synthetic hazel nut; inner sequence

SEQ ID NO: 16073 - DNA, 30 bp, Artificial Sequence; identical to SEQ ID NO: 31
  Description of Artificial Sequence: Synthetic hazel nut; inner sequence

SEQ ID NO: 16074 - DNA, 30 bp, Artificial Sequence; identical to SEQ ID NO: 470
  Description of Artificial Sequence: Synthetic hazel nut; inner sequence

SEQ ID NO: 16075 - DNA, 30 bp, Artificial Sequence; identical to SEQ ID NO: 90
  Description of Artificial Sequence: Synthetic hazel nut; inner sequence

SEQ ID NO: 16076 - DNA, 30 bp, Artificial Sequence; identical to SEQ ID NO: 285
  Description of Artificial Sequence: Synthetic hazel nut; inner sequence

SEQ ID NO: 16077 - DNA, 30 bp, Artificial Sequence; identical to SEQ ID NO: 32
  Description of Artificial Sequence: Synthetic hazel nut; inner sequence

SEQ ID NO: 16078 - DNA, 30 bp, Artificial Sequence; identical to SEQ ID NO: 55
  Description of Artificial Sequence: Synthetic hazel nut; inner sequence

SEQ ID NO: 16079 - DNA, 30 bp, Artificial Sequence; identical to SEQ ID NO: 42
  Description of Artificial Sequence: Synthetic hazel nut; inner sequence

SEQ ID NO: 16080 - DNA, 30 bp, Artificial Sequence; identical to SEQ ID NO: 80
  Description of Artificial Sequence: Synthetic hazel nut; inner sequence

SEQ ID NO: 16081 - DNA, 30 bp, Artificial Sequence; identical to SEQ ID NO: 61
  Description of Artificial Sequence: Synthetic hazel nut; inner sequence

SEQ ID NO: 16082 - DNA, 30 bp, Artificial Sequence; identical to SEQ ID NO: 59
  Description of Artificial Sequence: Synthetic hazel nut; inner sequence

SEQ ID NO: 16083 - DNA, 30 bp, Artificial Sequence; identical to SEQ ID NO: 219
  Description of Artificial Sequence: Synthetic hazel nut; inner sequence

SEQ ID NO: 16084 - DNA, 30 bp, Artificial Sequence; identical to SEQ ID NO: 144
  Description of Artificial Sequence: Synthetic hazel nut; inner sequence

SEQ ID NO: 16085 - DNA, 30 bp, Artificial Sequence; identical to SEQ ID NO: 102
  Description of Artificial Sequence: Synthetic hazel nut; inner sequence

SEQ ID NO: 16086 - DNA, 30 bp, Artificial Sequence; identical to SEQ ID NO: 4356
  Description of Artificial Sequence: Synthetic hazel nut; inner sequence

SEQ ID NO: 16087 - DNA, 30 bp, Artificial Sequence; identical to SEQ ID NO: 48
  Description of Artificial Sequence: Synthetic hazel nut; inner sequence

SEQ ID NO: 16088 - DNA, 30 bp, Artificial Sequence; identical to SEQ ID NO: 24
  Description of Artificial Sequence: Synthetic hazel nut; inner sequence

SEQ ID NO: 16089 - DNA, 30 bp, Artificial Sequence; identical to SEQ ID NO: 203
  Description of Artificial Sequence: Synthetic hazel nut; inner sequence

SEQ ID NO: 16090 - DNA, 30 bp, Artificial Sequence; identical to SEQ ID NO: 19
  Description of Artificial Sequence: Synthetic hazel nut; inner sequence

SEQ ID NO: 16091 - DNA, 30 bp, Artificial Sequence; identical to SEQ ID NO: 188
  Description of Artificial Sequence: Synthetic hazel nut; inner sequence

SEQ ID NO: 16092 - DNA, 30 bp, Artificial Sequence; identical to SEQ ID NO: 151
  Description of Artificial Sequence: Synthetic hazel nut; inner sequence

SEQ ID NO: 16093 - DNA, 30 bp, Artificial Sequence; identical to SEQ ID NO: 62
  Description of Artificial Sequence: Synthetic hazel nut; inner sequence

SEQ ID NO: 16094 - DNA, 30 bp, Artificial Sequence; identical to SEQ ID NO: 152
  Description of Artificial Sequence: Synthetic hazel nut; inner sequence

SEQ ID NO: 16095 - DNA, 30 bp, Artificial Sequence; identical to SEQ ID NO: 4469
  Description of Artificial Sequence: Synthetic hazel nut; inner sequence

SEQ ID NO: 16096 - DNA, 30 bp, Artificial Sequence; identical to SEQ ID NO: 111
  Description of Artificial Sequence: Synthetic hazel nut; inner sequence

SEQ ID NO: 16097 - DNA, 30 bp, Artificial Sequence; identical to SEQ ID NO: 63
  Description of Artificial Sequence: Synthetic hazel nut; inner sequence

SEQ ID NO: 16098 - DNA, 30 bp, Artificial Sequence; identical to SEQ ID NO: 84
  Description of Artificial Sequence: Synthetic hazel nut; inner sequence

SEQ ID NO: 16099 - DNA, 30 bp, Artificial Sequence; identical to SEQ ID NO: 613
  Description of Artificial Sequence: Synthetic hazel nut; inner sequence

SEQ ID NO: 16100 - DNA, 30 bp, Artificial Sequence; identical to SEQ ID NO: 230
  Description of Artificial Sequence: Synthetic hazel nut; inner sequence

SEQ ID NO: 16101 - DNA, 30 bp, Artificial Sequence; identical to SEQ ID NO: 97
  Description of Artificial Sequence: Synthetic hazel nut; inner sequence

SEQ ID NO: 16102 - DNA, 30 bp, Artificial Sequence; identical to SEQ ID NO: 195
  Description of Artificial Sequence: Synthetic hazel nut; inner sequence

SEQ ID NO: 16103 - DNA, 30 bp, Artificial Sequence; identical to SEQ ID NO: 229
  Description of Artificial Sequence: Synthetic hazel nut; inner sequence

SEQ ID NO: 16104 - DNA, 30 bp, Artificial Sequence; identical to SEQ ID NO: 136
  Description of Artificial Sequence: Synthetic hazel nut; inner sequence

SEQ ID NO: 16105 - DNA, 30 bp, Artificial Sequence; identical to SEQ ID NO: 197
  Description of Artificial Sequence: Synthetic hazel nut; inner sequence

SEQ ID NO: 16106 - DNA, 30 bp, Artificial Sequence; identical to SEQ ID NO: 245
  Description of Artificial Sequence: Synthetic hazel nut; inner sequence

SEQ ID NO: 16107 - DNA, 30 bp, Artificial Sequence; identical to SEQ ID NO: 117
  Description of Artificial Sequence: Synthetic hazel nut; inner sequence

SEQ ID NO: 16108 - DNA, 30 bp, Artificial Sequence; identical to SEQ ID NO: 171
  Description of Artificial Sequence: Synthetic hazel nut; inner sequence

SEQ ID NO: 16109 - DNA, 30 bp, Artificial Sequence; identical to SEQ ID NO: 68
  Description of Artificial Sequence: Synthetic hazel nut; inner sequence

SEQ ID NO: 16110 - DNA, 30 bp, Artificial Sequence; identical to SEQ ID NO: 325
  Description of Artificial Sequence: Synthetic hazel nut; inner sequence

SEQ ID NO: 16111 - DNA, 30 bp, Artificial Sequence; identical to SEQ ID NO: 149
  Description of Artificial Sequence: Synthetic hazel nut; inner sequence

SEQ ID NO: 16112 - DNA, 30 bp, Artificial Sequence; identical to SEQ ID NO: 126
  Description of Artificial Sequence: Synthetic hazel nut; inner sequence

SEQ ID NO: 16113 - DNA, 30 bp, Artificial Sequence; identical to SEQ ID NO: 492
  Description of Artificial Sequence: Synthetic hazel nut; inner sequence

SEQ ID NO: 16114 - DNA, 30 bp, Artificial Sequence; identical to SEQ ID NO: 321
  Description of Artificial Sequence: Synthetic hazel nut; inner sequence

SEQ ID NO: 16115 - DNA, 30 bp, Artificial Sequence; identical to SEQ ID NO: 313
  Description of Artificial Sequence: Synthetic hazel nut; inner sequence

SEQ ID NO: 16116 - DNA, 30 bp, Artificial Sequence; identical to SEQ ID NO: 359
  Description of Artificial Sequence: Synthetic hazel nut; inner sequence

SEQ ID NO: 16117 - DNA, 30 bp, Artificial Sequence; identical to SEQ ID NO: 65
  Description of Artificial Sequence: Synthetic hazel nut; inner sequence

SEQ ID NO: 16118 - DNA, 30 bp, Artificial Sequence; identical to SEQ ID NO: 112
  Description of Artificial Sequence: Synthetic hazel nut; inner sequence

SEQ ID NO: 16119 - DNA, 30 bp, Artificial Sequence; identical to SEQ ID NO: 164
  Description of Artificial Sequence: Synthetic hazel nut; inner sequence

SEQ ID NO: 16120 - DNA, 30 bp, Artificial Sequence; identical to SEQ ID NO: 4289
  Description of Artificial Sequence: Synthetic hazel nut; inner sequence

SEQ ID NO: 16121 - DNA, 30 bp, Artificial Sequence; identical to SEQ ID NO: 103
  Description of Artificial Sequence: Synthetic hazel nut; inner sequence

SEQ ID NO: 16122 - DNA, 30 bp, Artificial Sequence; identical to SEQ ID NO: 181
  Description of Artificial Sequence: Synthetic hazel nut; inner sequence

SEQ ID NO: 16123 - DNA, 30 bp, Artificial Sequence; identical to SEQ ID NO: 269
  Description of Artificial Sequence: Synthetic hazel nut; inner sequence

SEQ ID NO: 16124 - DNA, 30 bp, Artificial Sequence; identical to SEQ ID NO: 610
  Description of Artificial Sequence: Synthetic hazel nut; inner sequence

SEQ ID NO: 16125 - DNA, 30 bp, Artificial Sequence; identical to SEQ ID NO: 929
  Description of Artificial Sequence: Synthetic hazel nut; inner sequence

SEQ ID NO: 16126 - DNA, 30 bp, Artificial Sequence; identical to SEQ ID NO: 276
  Description of Artificial Sequence: Synthetic hazel nut; inner sequence

SEQ ID NO: 16127 - DNA, 30 bp, Artificial Sequence; identical to SEQ ID NO: 275
  Description of Artificial Sequence: Synthetic hazel nut; inner sequence

SEQ ID NO: 16128 - DNA, 30 bp, Artificial Sequence; identical to SEQ ID NO: 39
  Description of Artificial Sequence: Synthetic hazel nut; inner sequence

SEQ ID NO: 16129 - DNA, 30 bp, Artificial Sequence; identical to SEQ ID NO: 552
  Description of Artificial Sequence: Synthetic hazel nut; inner sequence

SEQ ID NO: 16130 - DNA, 30 bp, Artificial Sequence; identical to SEQ ID NO: 71
  Description of Artificial Sequence: Synthetic hazel nut; inner sequence

SEQ ID NO: 16131 - DNA, 30 bp, Artificial Sequence; identical to SEQ ID NO: 43
  Description of Artificial Sequence: Synthetic hazel nut; inner sequence

SEQ ID NO: 16132 - DNA, 30 bp, Artificial Sequence; identical to SEQ ID NO: 93
  Description of Artificial Sequence: Synthetic hazel nut; inner sequence

SEQ ID NO: 16133 - DNA, 30 bp, Artificial Sequence; identical to SEQ ID NO: 72
  Description of Artificial Sequence: Synthetic hazel nut; inner sequence

SEQ ID NO: 16134 - DNA, 30 bp, Artificial Sequence; identical to SEQ ID NO: 86
  Description of Artificial Sequence: Synthetic hazel nut; inner sequence

SEQ ID NO: 16135 - DNA, 30 bp, Artificial Sequence; identical to SEQ ID NO: 207
  Description of Artificial Sequence: Synthetic hazel nut; inner sequence

SEQ ID NO: 16136 - DNA, 30 bp, Artificial Sequence; identical to SEQ ID NO: 706
  Description of Artificial Sequence: Synthetic hazel nut; inner sequence

SEQ ID NO: 16137 - DNA, 30 bp, Artificial Sequence; identical to SEQ ID NO: 95
  Description of Artificial Sequence: Synthetic hazel nut; inner sequence

SEQ ID NO: 16138 - DNA, 30 bp, Artificial Sequence; identical to SEQ ID NO: 76
  Description of Artificial Sequence: Synthetic hazel nut; inner sequence

SEQ ID NO: 16139 - DNA, 30 bp, Artificial Sequence; identical to SEQ ID NO: 209
  Description of Artificial Sequence: Synthetic hazel nut; inner sequence

SEQ ID NO: 16140 - DNA, 30 bp, Artificial Sequence; identical to SEQ ID NO: 47
  Description of Artificial Sequence: Synthetic hazel nut; inner sequence

SEQ ID NO: 16141 - DNA, 30 bp, Artificial Sequence; identical to SEQ ID NO: 99
  Description of Artificial Sequence: Synthetic hazel nut; inner sequence

SEQ ID NO: 16142 - DNA, 30 bp, Artificial Sequence; identical to SEQ ID NO: 956
  Description of Artificial Sequence: Synthetic hazel nut; inner sequence

SEQ ID NO: 16143 - DNA, 30 bp, Artificial Sequence; identical to SEQ ID NO: 78
  Description of Artificial Sequence: Synthetic hazel nut; inner sequence

SEQ ID NO: 16144 - DNA, 30 bp, Artificial Sequence; identical to SEQ ID NO: 174
  Description of Artificial Sequence: Synthetic hazel nut; inner sequence

SEQ ID NO: 16145 - DNA, 30 bp, Artificial Sequence; identical to SEQ ID NO: 134
  Description of Artificial Sequence: Synthetic hazel nut; inner sequence

SEQ ID NO: 16146 - DNA, 30 bp, Artificial Sequence; identical to SEQ ID NO: 69
  Description of Artificial Sequence: Synthetic hazel nut; inner sequence

SEQ ID NO: 16147 - DNA, 30 bp, Artificial Sequence; identical to SEQ ID NO: 140
  Description of Artificial Sequence: Synthetic hazel nut; inner sequence

SEQ ID NO: 16148 - DNA, 30 bp, Artificial Sequence; identical to SEQ ID NO: 82
  Description of Artificial Sequence: Synthetic hazel nut; inner sequence

SEQ ID NO: 16149 - DNA, 30 bp, Artificial Sequence; identical to SEQ ID NO: 110
  Description of Artificial Sequence: Synthetic hazel nut; inner sequence

SEQ ID NO: 16150 - DNA, 30 bp, Artificial Sequence; identical to SEQ ID NO: 283
  Description of Artificial Sequence: Synthetic hazel nut; inner sequence

SEQ ID NO: 16151 - DNA, 30 bp, Artificial Sequence; identical to SEQ ID NO: 58
  Description of Artificial Sequence: Synthetic hazel nut; inner sequence

SEQ ID NO: 16152 - DNA, 30 bp, Artificial Sequence; identical to SEQ ID NO: 314
  Description of Artificial Sequence: Synthetic hazel nut; inner sequence

SEQ ID NO: 16153 - DNA, 30 bp, Artificial Sequence; identical to SEQ ID NO: 190
  Description of Artificial Sequence: Synthetic hazel nut; inner sequence

SEQ ID NO: 16154 - DNA, 30 bp, Artificial Sequence; identical to SEQ ID NO: 121
  Description of Artificial Sequence: Synthetic hazel nut; inner sequence

SEQ ID NO: 16155 - DNA, 30 bp, Artificial Sequence; identical to SEQ ID NO: 663
  Description of Artificial Sequence: Synthetic hazel nut; inner sequence

SEQ ID NO: 16156 - DNA, 30 bp, Artificial Sequence; identical to SEQ ID NO: 4659
  Description of Artificial Sequence: Synthetic hazel nut; inner sequence

SEQ ID NO: 16157 - DNA, 30 bp, Artificial Sequence; identical to SEQ ID NO: 120
  Description of Artificial Sequence: Synthetic hazel nut; inner sequence

SEQ ID NO: 16158 - DNA, 30 bp, Artificial Sequence; identical to SEQ ID NO: 92
  Description of Artificial Sequence: Synthetic hazel nut; inner sequence

SEQ ID NO: 16159 - DNA, 30 bp, Artificial Sequence; identical to SEQ ID NO: 579
  Description of Artificial Sequence: Synthetic hazel nut; inner sequence

SEQ ID NO: 16160 - DNA, 30 bp, Artificial Sequence; identical to SEQ ID NO: 182
  Description of Artificial Sequence: Synthetic hazel nut; inner sequence

SEQ ID NO: 16161 - DNA, 30 bp, Artificial Sequence; identical to SEQ ID NO: 200
  Description of Artificial Sequence: Synthetic hazel nut; inner sequence

SEQ ID NO: 16162 - DNA, 30 bp, Artificial Sequence; identical to SEQ ID NO: 100
  Description of Artificial Sequence: Synthetic hazel nut; inner sequence

SEQ ID NO: 16163 - DNA, 30 bp, Artificial Sequence; identical to SEQ ID NO: 458
  Description of Artificial Sequence: Synthetic hazel nut; inner sequence

SEQ ID NO: 16164 - DNA, 30 bp, Artificial Sequence; identical to SEQ ID NO: 232
  Description of Artificial Sequence: Synthetic hazel nut; inner sequence

SEQ ID NO: 16165 - DNA, 30 bp, Artificial Sequence; identical to SEQ ID NO: 246
  Description of Artificial Sequence: Synthetic hazel nut; inner sequence

SEQ ID NO: 16166 - DNA, 30 bp, Artificial Sequence; identical to SEQ ID NO: 465
  Description of Artificial Sequence: Synthetic hazel nut; inner sequence

SEQ ID NO: 16167 - DNA, 30 bp, Artificial Sequence; identical to SEQ ID NO: 311
  Description of Artificial Sequence: Synthetic hazel nut; inner sequence

SEQ ID NO: 16168 - DNA, 30 bp, Artificial Sequence; identical to SEQ ID NO: 4272
  Description of Artificial Sequence: Synthetic hazel nut; inner sequence

SEQ ID NO: 16169 - DNA, 30 bp, Artificial Sequence; identical to SEQ ID NO: 266
  Description of Artificial Sequence: Synthetic hazel nut; inner sequence

SEQ ID NO: 16170 - DNA, 30 bp, Artificial Sequence; identical to SEQ ID NO: 184
  Description of Artificial Sequence: Synthetic hazel nut; inner sequence

SEQ ID NO: 16171 - DNA, 30 bp, Artificial Sequence; identical to SEQ ID NO: 762
  Description of Artificial Sequence: Synthetic hazel nut; inner sequence

SEQ ID NO: 16172 - DNA, 30 bp, Artificial Sequence; identical to SEQ ID NO: 567
  Description of Artificial Sequence: Synthetic hazel nut; inner sequence

SEQ ID NO: 16173 - DNA, 30 bp, Artificial Sequence; identical to SEQ ID NO: 520
  Description of Artificial Sequence: Synthetic hazel nut; inner sequence

SEQ ID NO: 16174 - DNA, 30 bp, Artificial Sequence; identical to SEQ ID NO: 353
  Description of Artificial Sequence: Synthetic hazel nut; inner sequence

SEQ ID NO: 16175 - DNA, 30 bp, Artificial Sequence; identical to SEQ ID NO: 367
  Description of Artificial Sequence: Synthetic hazel nut; inner sequence

SEQ ID NO: 16176 - DNA, 30 bp, Artificial Sequence; identical to SEQ ID NO: 4240
  Description of Artificial Sequence: Synthetic hazel nut; inner sequence

SEQ ID NO: 16177 - DNA, 30 bp, Artificial Sequence; identical to SEQ ID NO: 194
  Description of Artificial Sequence: Synthetic hazel nut; inner sequence

SEQ ID NO: 16178 - DNA, 30 bp, Artificial Sequence; identical to SEQ ID NO: 154
  Description of Artificial Sequence: Synthetic hazel nut; inner sequence

SEQ ID NO: 16179 - DNA, 30 bp, Artificial Sequence; identical to SEQ ID NO: 26
  Description of Artificial Sequence: Synthetic hazel nut; inner sequence

SEQ ID NO: 16180 - DNA, 30 bp, Artificial Sequence; identical to SEQ ID NO: 240
  Description of Artificial Sequence: Synthetic hazel nut; inner sequence

SEQ ID NO: 16181 - DNA, 30 bp, Artificial Sequence; identical to SEQ ID NO: 290
  Description of Artificial Sequence: Synthetic hazel nut; inner sequence

SEQ ID NO: 16182 - DNA, 30 bp, Artificial Sequence; identical to SEQ ID NO: 233
  Description of Artificial Sequence: Synthetic hazel nut; inner sequence

SEQ ID NO: 16183 - DNA, 30 bp, Artificial Sequence; identical to SEQ ID NO: 201
  Description of Artificial Sequence: Synthetic hazel nut; inner sequence

SEQ ID NO: 16184 - DNA, 30 bp, Artificial Sequence; identical to SEQ ID NO: 27
  Description of Artificial Sequence: Synthetic hazel nut; inner sequence

SEQ ID NO: 16185 - DNA, 31 bp, Artificial Sequence; identical to SEQ ID NO: 221
  Description of Artificial Sequence: Synthetic hazel nut; inner sequence

SEQ ID NO: 16186 - DNA, 30 bp, Artificial Sequence; identical to SEQ ID NO: 505
  Description of Artificial Sequence: Synthetic hazel nut; inner sequence

SEQ ID NO: 16187 - DNA, 30 bp, Artificial Sequence; identical to SEQ ID NO: 133
  Description of Artificial Sequence: Synthetic hazel nut; inner sequence

SEQ ID NO: 16188 - DNA, 30 bp, Artificial Sequence; identical to SEQ ID NO: 217
  Description of Artificial Sequence: Synthetic hazel nut; inner sequence

SEQ ID NO: 16189 - DNA, 30 bp, Artificial Sequence; identical to SEQ ID NO: 823
  Description of Artificial Sequence: Synthetic hazel nut; inner sequence

SEQ ID NO: 16190 - DNA, 30 bp, Artificial Sequence; identical to SEQ ID NO: 137
  Description of Artificial Sequence: Synthetic hazel nut; inner sequence

SEQ ID NO: 16191 - DNA, 30 bp, Artificial Sequence; identical to SEQ ID NO: 4755
  Description of Artificial Sequence: Synthetic hazel nut; inner sequence

SEQ ID NO: 16192 - DNA, 30 bp, Artificial Sequence; identical to SEQ ID NO: 4583
  Description of Artificial Sequence: Synthetic hazel nut; inner sequence

SEQ ID NO: 16193 - DNA, 30 bp, Artificial Sequence; identical to SEQ ID NO: 94
  Description of Artificial Sequence: Synthetic hazel nut; inner sequence

SEQ ID NO: 16194 - DNA, 30 bp, Artificial Sequence; identical to SEQ ID NO: 168
  Description of Artificial Sequence: Synthetic hazel nut; inner sequence

SEQ ID NO: 16195 - DNA, 30 bp, Artificial Sequence; identical to SEQ ID NO: 125
  Description of Artificial Sequence: Synthetic hazel nut; inner sequence

SEQ ID NO: 16196 - DNA, 30 bp, Artificial Sequence; identical to SEQ ID NO: 360
  Description of Artificial Sequence: Synthetic hazel nut; inner sequence

SEQ ID NO: 16197 - DNA, 30 bp, Artificial Sequence; identical to SEQ ID NO: 104
  Description of Artificial Sequence: Synthetic hazel nut; inner sequence

SEQ ID NO: 16198 - DNA, 30 bp, Artificial Sequence; identical to SEQ ID NO: 225
  Description of Artificial Sequence: Synthetic hazel nut; inner sequence

SEQ ID NO: 16199 - DNA, 30 bp, Artificial Sequence; identical to SEQ ID NO: 4429
  Description of Artificial Sequence: Synthetic hazel nut; inner sequence

SEQ ID NO: 16200 - DNA, 30 bp, Artificial Sequence; identical to SEQ ID NO: 4230
  Description of Artificial Sequence: Synthetic hazel nut; inner sequence

SEQ ID NO: 16201 - DNA, 30 bp, Artificial Sequence; identical to SEQ ID NO: 626
  Description of Artificial Sequence: Synthetic hazel nut; inner sequence

SEQ ID NO: 16202 - DNA, 30 bp, Artificial Sequence; identical to SEQ ID NO: 4521
  Description of Artificial Sequence: Synthetic hazel nut; inner sequence

SEQ ID NO: 16203 - DNA, 30 bp, Artificial Sequence; identical to SEQ ID NO: 101
  Description of Artificial Sequence: Synthetic hazel nut; inner sequence

SEQ ID NO: 16204 - DNA, 30 bp, Artificial Sequence; identical to SEQ ID NO: 4985
  Description of Artificial Sequence: Synthetic hazel nut; inner sequence

SEQ ID NO: 16205 - DNA, 30 bp, Artificial Sequence; identical to SEQ ID NO: 105
  Description of Artificial Sequence: Synthetic hazel nut; inner sequence

SEQ ID NO: 16206 - DNA, 30 bp, Artificial Sequence; identical to SEQ ID NO: 722
  Description of Artificial Sequence: Synthetic hazel nut; inner sequence

SEQ ID NO: 16207 - DNA, 30 bp, Artificial Sequence; identical to SEQ ID NO: 220
  Description of Artificial Sequence: Synthetic hazel nut; inner sequence

SEQ ID NO: 16208 - DNA, 30 bp, Artificial Sequence; identical to SEQ ID NO: 909
  Description of Artificial Sequence: Synthetic hazel nut; inner sequence

SEQ ID NO: 16209 - DNA, 30 bp, Artificial Sequence; identical to SEQ ID NO: 606
  Description of Artificial Sequence: Synthetic hazel nut; inner sequence

SEQ ID NO: 16210 - DNA, 30 bp, Artificial Sequence; identical to SEQ ID NO: 122
  Description of Artificial Sequence: Synthetic hazel nut; inner sequence

SEQ ID NO: 16211 - DNA, 30 bp, Artificial Sequence
  Description of Artificial Sequence: Synthetic hazel nut; inner sequence
cgcaacgcacgtcacgtccttggcggcaca

SEQ ID NO: 16212 - DNA, 28 bp, Artificial Sequence
  Description of Artificial Sequence: Synthetic hazel nut; inner sequence
ggacgcagctgacctagcatgtgtgtca

SEQ ID NO: 16213 - DNA, 30 bp, Artificial Sequence; identical to SEQ ID NO: 124
  Description of Artificial Sequence: Synthetic hazel nut; inner sequence

SEQ ID NO: 16214 - DNA, 30 bp, Artificial Sequence; identical to SEQ ID NO: 118
  Description of Artificial Sequence: Synthetic hazel nut; inner sequence

SEQ ID NO: 16215 - DNA, 30 bp, Artificial Sequence; identical to SEQ ID NO: 630
  Description of Artificial Sequence: Synthetic hazel nut; inner sequence

SEQ ID NO: 16216 - DNA, 30 bp, Artificial Sequence; identical to SEQ ID NO: 257
  Description of Artificial Sequence: Synthetic hazel nut; inner sequence

SEQ ID NO: 16217 - DNA, 30 bp, Artificial Sequence; identical to SEQ ID NO: 123
  Description of Artificial Sequence: Synthetic hazel nut; inner sequence

SEQ ID NO: 16218 - DNA, 30 bp, Artificial Sequence
  Description of Artificial Sequence: Synthetic hazel nut; inner sequence
cgtaccacaggctcggtccgctacgacacg

SEQ ID NO: 16219 - DNA, 30 bp, Artificial Sequence; identical to SEQ ID NO: 355
  Description of Artificial Sequence: Synthetic hazel nut; inner sequence

SEQ ID NO: 16220 - DNA, 30 bp, Artificial Sequence; identical to SEQ ID NO: 333
  Description of Artificial Sequence: Synthetic hazel nut; inner sequence

SEQ ID NO: 16221 - DNA, 30 bp, Artificial Sequence; identical to SEQ ID NO: 4662
  Description of Artificial Sequence: Synthetic hazel nut; inner sequence

SEQ ID NO: 16222 - DNA, 30 bp, Artificial Sequence; identical to SEQ ID NO: 114
  Description of Artificial Sequence: Synthetic hazel nut; inner sequence

SEQ ID NO: 16223 - DNA, 30 bp, Artificial Sequence; identical to SEQ ID NO: 436
  Description of Artificial Sequence: Synthetic hazel nut; inner sequence

SEQ ID NO: 16224 - DNA, 30 bp, Artificial Sequence; identical to SEQ ID NO: 953
  Description of Artificial Sequence: Synthetic hazel nut; inner sequence

SEQ ID NO: 16225 - DNA, 30 bp, Artificial Sequence; identical to SEQ ID NO: 176
  Description of Artificial Sequence: Synthetic hazel nut; inner sequence

SEQ ID NO: 16226 - DNA, 30 bp, Artificial Sequence; identical to SEQ ID NO: 8678
  Description of Artificial Sequence: Synthetic hazel nut; inner sequence

SEQ ID NO: 16227 - DNA, 30 bp, Artificial Sequence; identical to SEQ ID NO: 4772
  Description of Artificial Sequence: Synthetic hazel nut; inner sequence

SEQ ID NO: 16228 - DNA, 30 bp, Artificial Sequence; identical to SEQ ID NO: 56
  Description of Artificial Sequence: Synthetic hazel nut; inner sequence

SEQ ID NO: 16229 - DNA, 30 bp, Artificial Sequence; identical to SEQ ID NO: 450
  Description of Artificial Sequence: Synthetic hazel nut; inner sequence

SEQ ID NO: 16230 - DNA, 30 bp, Artificial Sequence; identical to SEQ ID NO: 142
  Description of Artificial Sequence: Synthetic hazel nut; inner sequence

SEQ ID NO: 16231 - DNA, 30 bp, Artificial Sequence; identical to SEQ ID NO: 169
  Description of Artificial Sequence: Synthetic hazel nut; inner sequence

SEQ ID NO: 16232 - DNA, 30 bp, Artificial Sequence; identical to SEQ ID NO: 718
  Description of Artificial Sequence: Synthetic hazel nut; inner sequence

SEQ ID NO: 16233 - DNA, 30 bp, Artificial Sequence; identical to SEQ ID NO: 222
  Description of Artificial Sequence: Synthetic hazel nut; inner sequence

SEQ ID NO: 16234 - DNA, 30 bp, Artificial Sequence; identical to SEQ ID NO: 293
  Description of Artificial Sequence: Synthetic hazel nut; inner sequence

SEQ ID NO: 16235 - DNA, 30 bp, Artificial Sequence; identical to SEQ ID NO: 163
  Description of Artificial Sequence: Synthetic hazel nut; inner sequence

SEQ ID NO: 16236 - DNA, 30 bp, Artificial Sequence; identical to SEQ ID NO: 253
  Description of Artificial Sequence: Synthetic hazel nut; inner sequence

SEQ ID NO: 16237 - DNA, 30 bp, Artificial Sequence; identical to SEQ ID NO: 196
  Description of Artificial Sequence: Synthetic hazel nut; inner sequence

SEQ ID NO: 16238 - DNA, 30 bp, Artificial Sequence; identical to SEQ ID NO: 279
  Description of Artificial Sequence: Synthetic hazel nut; inner sequence

SEQ ID NO: 16239 - DNA, 30 bp, Artificial Sequence; identical to SEQ ID NO: 468
  Description of Artificial Sequence: Synthetic hazel nut; inner sequence

SEQ ID NO: 16240 - DNA, 30 bp, Artificial Sequence; identical to SEQ ID NO: 206
  Description of Artificial Sequence: Synthetic hazel nut; inner sequence

SEQ ID NO: 16241 - DNA, 30 bp, Artificial Sequence; identical to SEQ ID NO: 274
  Description of Artificial Sequence: Synthetic hazel nut; inner sequence

SEQ ID NO: 16242 - DNA, 30 bp, Artificial Sequence; identical to SEQ ID NO: 506
  Description of Artificial Sequence: Synthetic hazel nut; inner sequence

SEQ ID NO: 16243 - DNA, 30 bp, Artificial Sequence; identical to SEQ ID NO: 332
  Description of Artificial Sequence: Synthetic hazel nut; inner sequence

SEQ ID NO: 16244 - DNA, 30 bp, Artificial Sequence; identical to SEQ ID NO: 4627
  Description of Artificial Sequence: Synthetic hazel nut; inner sequence

SEQ ID NO: 16245 - DNA, 30 bp, Artificial Sequence; identical to SEQ ID NO: 4612
  Description of Artificial Sequence: Synthetic hazel nut; inner sequence

SEQ ID NO: 16246 - DNA, 30 bp, Artificial Sequence; identical to SEQ ID NO: 91
  Description of Artificial Sequence: Synthetic hazel nut; inner sequence

SEQ ID NO: 16247 - DNA, 30 bp, Artificial Sequence; identical to SEQ ID NO: 8984
  Description of Artificial Sequence: Synthetic hazel nut; inner sequence

SEQ ID NO: 16248 - DNA, 30 bp, Artificial Sequence; identical to SEQ ID NO: 228
  Description of Artificial Sequence: Synthetic hazel nut; inner sequence

SEQ ID NO: 16249 - DNA, 30 bp, Artificial Sequence; identical to SEQ ID NO: 4673
  Description of Artificial Sequence: Synthetic hazel nut; inner sequence

SEQ ID NO: 16250 - DNA, 30 bp, Artificial Sequence; identical to SEQ ID NO: 832
  Description of Artificial Sequence: Synthetic hazel nut; inner sequence

SEQ ID NO: 16251 - DNA, 30 bp, Artificial Sequence; identical to SEQ ID NO: 237
  Description of Artificial Sequence: Synthetic hazel nut; inner sequence

SEQ ID NO: 16252 - DNA, 30 bp, Artificial Sequence; identical to SEQ ID NO: 177
  Description of Artificial Sequence: Synthetic hazel nut; inner sequence

SEQ ID NO: 16253 - DNA, 30 bp, Artificial Sequence; identical to SEQ ID NO: 4492
  Description of Artificial Sequence: Synthetic hazel nut; inner sequence

SEQ ID NO: 16254 - DNA, 30 bp, Artificial Sequence; identical to SEQ ID NO: 145
  Description of Artificial Sequence: Synthetic hazel nut; inner sequence

SEQ ID NO: 16255 - DNA, 30 bp, Artificial Sequence; identical to SEQ ID NO: 371
  Description of Artificial Sequence: Synthetic hazel nut; inner sequence

SEQ ID NO: 16256 - DNA, 30 bp, Artificial Sequence; identical to SEQ ID NO: 816
  Description of Artificial Sequence: Synthetic hazel nut; inner sequence

SEQ ID NO: 16257 - DNA, 30 bp, Artificial Sequence; identical to SEQ ID NO: 278
  Description of Artificial Sequence: Synthetic hazel nut; inner sequence

SEQ ID NO: 16258 - DNA, 30 bp, Artificial Sequence; identical to SEQ ID NO: 4571
  Description of Artificial Sequence: Synthetic hazel nut; inner sequence

SEQ ID NO: 16259 - DNA, 30 bp, Artificial Sequence; identical to SEQ ID NO: 249
  Description of Artificial Sequence: Synthetic hazel nut; inner sequence

SEQ ID NO: 16260 - DNA, 30 bp, Artificial Sequence; identical to SEQ ID NO: 300
  Description of Artificial Sequence: Synthetic hazel nut; inner sequence

SEQ ID NO: 16261 - DNA, 30 bp, Artificial Sequence; identical to SEQ ID NO: 364
  Description of Artificial Sequence: Synthetic hazel nut; inner sequence

SEQ ID NO: 16262 - DNA, 30 bp, Artificial Sequence; identical to SEQ ID NO: 234
  Description of Artificial Sequence: Synthetic hazel nut; inner sequence

SEQ ID NO: 16263 - DNA, 30 bp, Artificial Sequence; identical to SEQ ID NO: 4576
  Description of Artificial Sequence: Synthetic hazel nut; inner sequence

SEQ ID NO: 16264 - DNA, 30 bp, Artificial Sequence
  Description of Artificial Sequence: Synthetic hazel nut; inner sequence
ggacgcacaccgaccgtacgccgtgtcgca

SEQ ID NO: 16265 - DNA, 30 bp, Artificial Sequence
  Description of Artificial Sequence: Synthetic hazel nut; inner sequence
gcgacacggtagcatcgacggtacgcgcga

SEQ ID NO: 16266 - DNA, 30 bp, Artificial Sequence
  Description of Artificial Sequence: Synthetic hazel nut; inner sequence
cgtgcgcaacgagcaggaccacgcgtcacg

SEQ ID NO: 16267 - DNA, 30 bp, Artificial Sequence; identical to SEQ ID NO: 4489
  Description of Artificial Sequence: Synthetic hazel nut; inner sequence

SEQ ID NO: 16268 - DNA, 30 bp, Artificial Sequence; identical to SEQ ID NO: 950
  Description of Artificial Sequence: Synthetic hazel nut; inner sequence

SEQ ID NO: 16269 - DNA, 30 bp, Artificial Sequence; identical to SEQ ID NO: 352
  Description of Artificial Sequence: Synthetic hazel nut; inner sequence

SEQ ID NO: 16270 - DNA, 30 bp, Artificial Sequence
  Description of Artificial Sequence: Synthetic hazel nut; inner sequence
gacggatcgacctcaacgtgttgcgatgca

SEQ ID NO: 16271 - DNA, 30 bp, Artificial Sequence; identical to SEQ ID NO: 160
  Description of Artificial Sequence: Synthetic hazel nut; inner sequence

SEQ ID NO: 16272 - DNA, 30 bp, Artificial Sequence; identical to SEQ ID NO: 256
  Description of Artificial Sequence: Synthetic hazel nut; inner sequence

SEQ ID NO: 16273 - DNA, 30 bp, Artificial Sequence; identical to SEQ ID NO: 4485
  Description of Artificial Sequence: Synthetic hazel nut; inner sequence

SEQ ID NO: 16274 - DNA, 30 bp, Artificial Sequence; identical to SEQ ID NO: 158
  Description of Artificial Sequence: Synthetic hazel nut; inner sequence

SEQ ID NO: 16275 - DNA, 30 bp, Artificial Sequence; identical to SEQ ID NO: 592
  Description of Artificial Sequence: Synthetic hazel nut; inner sequence

SEQ ID NO: 16276 - DNA, 30 bp, Artificial Sequence; identical to SEQ ID NO: 433
  Description of Artificial Sequence: Synthetic hazel nut; inner sequence

SEQ ID NO: 16277 - DNA, 30 bp, Artificial Sequence; identical to SEQ ID NO: 697
  Description of Artificial Sequence: Synthetic hazel nut; inner sequence

SEQ ID NO: 16278 - DNA, 30 bp, Artificial Sequence; identical to SEQ ID NO: 881
  Description of Artificial Sequence: Synthetic hazel nut; inner sequence

SEQ ID NO: 16279 - DNA, 30 bp, Artificial Sequence; identical to SEQ ID NO: 575
  Description of Artificial Sequence: Synthetic hazel nut; inner sequence

SEQ ID NO: 16280 - DNA, 30 bp, Artificial Sequence; identical to SEQ ID NO: 673
  Description of Artificial Sequence: Synthetic hazel nut; inner sequence

SEQ ID NO: 16281 - DNA, 30 bp, Artificial Sequence; identical to SEQ ID NO: 4746
  Description of Artificial Sequence: Synthetic hazel nut; inner sequence

SEQ ID NO: 16282 - DNA, 30 bp, Artificial Sequence; identical to SEQ ID NO: 4871
  Description of Artificial Sequence: Synthetic hazel nut; inner sequence

SEQ ID NO: 16283 - DNA, 30 bp, Artificial Sequence; identical to SEQ ID NO: 231
  Description of Artificial Sequence: Synthetic hazel nut; inner sequence

SEQ ID NO: 16284 - DNA, 30 bp, Artificial Sequence; identical to SEQ ID NO: 161
  Description of Artificial Sequence: Synthetic hazel nut; inner sequence

SEQ ID NO: 16285 - DNA, 30 bp, Artificial Sequence; identical to SEQ ID NO: 687
  Description of Artificial Sequence: Synthetic hazel nut; inner sequence

SEQ ID NO: 16286 - DNA, 30 bp, Artificial Sequence; identical to SEQ ID NO: 429
  Description of Artificial Sequence: Synthetic hazel nut; inner sequence

SEQ ID NO: 16287 - DNA, 30 bp, Artificial Sequence; identical to SEQ ID NO: 147
  Description of Artificial Sequence: Synthetic hazel nut; inner sequence

SEQ ID NO: 16288 - DNA, 30 bp, Artificial Sequence; identical to SEQ ID NO: 430
  Description of Artificial Sequence: Synthetic hazel nut; inner sequence

SEQ ID NO: 16289 - DNA, 30 bp, Artificial Sequence; identical to SEQ ID NO: 527
  Description of Artificial Sequence: Synthetic hazel nut; inner sequence

SEQ ID NO: 16290 - DNA, 30 bp, Artificial Sequence; identical to SEQ ID NO: 277
  Description of Artificial Sequence: Synthetic hazel nut; inner sequence

SEQ ID NO: 16291 - DNA, 30 bp, Artificial Sequence; identical to SEQ ID NO: 362
  Description of Artificial Sequence: Synthetic hazel nut; inner sequence

SEQ ID NO: 16292 - DNA, 30 bp, Artificial Sequence; identical to SEQ ID NO: 315
  Description of Artificial Sequence: Synthetic hazel nut; inner sequence

SEQ ID NO: 16293 - DNA, 30 bp, Artificial Sequence; identical to SEQ ID NO: 282
  Description of Artificial Sequence: Synthetic hazel nut; inner sequence

SEQ ID NO: 16294 - DNA, 30 bp, Artificial Sequence; identical to SEQ ID NO: 634
  Description of Artificial Sequence: Synthetic hazel nut; inner sequence

SEQ ID NO: 16295 - DNA, 30 bp, Artificial Sequence; identical to SEQ ID NO: 671
  Description of Artificial Sequence: Synthetic hazel nut; inner sequence

SEQ ID NO: 16296 - DNA, 30 bp, Artificial Sequence; identical to SEQ ID NO: 268
  Description of Artificial Sequence: Synthetic hazel nut; inner sequence

SEQ ID NO: 16297 - DNA, 30 bp, Artificial Sequence; identical to SEQ ID NO: 783
  Description of Artificial Sequence: Synthetic hazel nut; inner sequence

SEQ ID NO: 16298 - DNA, 30 bp, Artificial Sequence; identical to SEQ ID NO: 270
  Description of Artificial Sequence: Synthetic hazel nut; inner sequence

SEQ ID NO: 16299 - DNA, 30 bp, Artificial Sequence; identical to SEQ ID NO: 338
  Description of Artificial Sequence: Synthetic hazel nut; inner sequence

SEQ ID NO: 16300 - DNA, 30 bp, Artificial Sequence; identical to SEQ ID NO: 202
  Description of Artificial Sequence: Synthetic hazel nut; inner sequence

SEQ ID NO: 16301 - DNA, 30 bp, Artificial Sequence; identical to SEQ ID NO: 107
  Description of Artificial Sequence: Synthetic hazel nut; inner sequence

SEQ ID NO: 16302 - DNA, 30 bp, Artificial Sequence; identical to SEQ ID NO: 448
  Description of Artificial Sequence: Synthetic hazel nut; inner sequence

SEQ ID NO: 16303 - DNA, 30 bp, Artificial Sequence; identical to SEQ ID NO: 287
  Description of Artificial Sequence: Synthetic hazel nut; inner sequence

SEQ ID NO: 16304 - DNA, 30 bp, Artificial Sequence; identical to SEQ ID NO: 292
  Description of Artificial Sequence: Synthetic hazel nut; inner sequence

SEQ ID NO: 16305 - DNA, 30 bp, Artificial Sequence; identical to SEQ ID NO: 323
  Description of Artificial Sequence: Synthetic hazel nut; inner sequence

SEQ ID NO: 16306 - DNA, 30 bp, Artificial Sequence; identical to SEQ ID NO: 597
  Description of Artificial Sequence: Synthetic hazel nut; inner sequence

SEQ ID NO: 16307 - DNA, 30 bp, Artificial Sequence; identical to SEQ ID NO: 4813
  Description of Artificial Sequence: Synthetic hazel nut; inner sequence

SEQ ID NO: 16308 - DNA, 30 bp, Artificial Sequence; identical to SEQ ID NO: 173
  Description of Artificial Sequence: Synthetic hazel nut; inner sequence

SEQ ID NO: 16309 - DNA, 30 bp, Artificial Sequence; identical to SEQ ID NO: 89
  Description of Artificial Sequence: Synthetic hazel nut; inner sequence

SEQ ID NO: 16310 - DNA, 30 bp, Artificial Sequence; identical to SEQ ID NO: 223
  Description of Artificial Sequence: Synthetic hazel nut; inner sequence

SEQ ID NO: 16311 - DNA, 30 bp, Artificial Sequence; identical to SEQ ID NO: 4707
  Description of Artificial Sequence: Synthetic hazel nut; inner sequence

SEQ ID NO: 16312 - DNA, 30 bp, Artificial Sequence; identical to SEQ ID NO: 157
  Description of Artificial Sequence: Synthetic hazel nut; inner sequence

SEQ ID NO: 16313 - DNA, 30 bp, Artificial Sequence; identical to SEQ ID NO: 875
  Description of Artificial Sequence: Synthetic hazel nut; inner sequence

SEQ ID NO: 16314 - DNA, 30 bp, Artificial Sequence; identical to SEQ ID NO: 208
  Description of Artificial Sequence: Synthetic hazel nut; inner sequence

SEQ ID NO: 16315 - DNA, 30 bp, Artificial Sequence; identical to SEQ ID NO: 8401
  Description of Artificial Sequence: Synthetic hazel nut; inner sequence

SEQ ID NO: 16316 - DNA, 30 bp, Artificial Sequence; identical to SEQ ID NO: 248
  Description of Artificial Sequence: Synthetic hazel nut; inner sequence

SEQ ID NO: 16317 - DNA, 30 bp, Artificial Sequence; identical to SEQ ID NO: 170
  Description of Artificial Sequence: Synthetic hazel nut; inner sequence

SEQ ID NO: 16318 - DNA, 30 bp, Artificial Sequence; identical to SEQ ID NO: 688
  Description of Artificial Sequence: Synthetic hazel nut; inner sequence

SEQ ID NO: 16319 - DNA, 30 bp, Artificial Sequence; identical to SEQ ID NO: 4517
  Description of Artificial Sequence: Synthetic hazel nut; inner sequence

SEQ ID NO: 16320 - DNA, 30 bp, Artificial Sequence; identical to SEQ ID NO: 309
  Description of Artificial Sequence: Synthetic hazel nut; inner sequence

SEQ ID NO: 16321 - DNA, 30 bp, Artificial Sequence; identical to SEQ ID NO: 4745
  Description of Artificial Sequence: Synthetic hazel nut; inner sequence

SEQ ID NO: 16322 - DNA, 30 bp, Artificial Sequence; identical to SEQ ID NO: 224
  Description of Artificial Sequence: Synthetic hazel nut; inner sequence

SEQ ID NO: 16323 - DNA, 30 bp, Artificial Sequence; identical to SEQ ID NO: 261
  Description of Artificial Sequence: Synthetic hazel nut; inner sequence

SEQ ID NO: 16324 - DNA, 30 bp, Artificial Sequence; identical to SEQ ID NO: 551
  Description of Artificial Sequence: Synthetic hazel nut; inner sequence

SEQ ID NO: 16325 - DNA, 30 bp, Artificial Sequence; identical to SEQ ID NO: 132
  Description of Artificial Sequence: Synthetic hazel nut; inner sequence

SEQ ID NO: 16326 - DNA, 28 bp, Artificial Sequence
  Description of Artificial Sequence: Synthetic hazel nut; inner sequence
ggacgcaacgtaccgtatcgtggccatg

SEQ ID NO: 16327 - DNA, 30 bp, Artificial Sequence; identical to SEQ ID NO: 561
  Description of Artificial Sequence: Synthetic hazel nut; inner sequence

SEQ ID NO: 16328 - DNA, 30 bp, Artificial Sequence; identical to SEQ ID NO: 541
  Description of Artificial Sequence: Synthetic hazel nut; inner sequence

SEQ ID NO: 16329 - DNA, 30 bp, Artificial Sequence; identical to SEQ ID NO: 4940
  Description of Artificial Sequence: Synthetic hazel nut; inner sequence

SEQ ID NO: 16330 - DNA, 30 bp, Artificial Sequence; identical to SEQ ID NO: 459
  Description of Artificial Sequence: Synthetic hazel nut; inner sequence

SEQ ID NO: 16331 - DNA, 30 bp, Artificial Sequence; identical to SEQ ID NO: 496
  Description of Artificial Sequence: Synthetic hazel nut; inner sequence

SEQ ID NO: 16332 - DNA, 30 bp, Artificial Sequence; identical to SEQ ID NO: 165
  Description of Artificial Sequence: Synthetic hazel nut; inner sequence

SEQ ID NO: 16333 - DNA, 30 bp, Artificial Sequence; identical to SEQ ID NO: 167
  Description of Artificial Sequence: Synthetic hazel nut; inner sequence

SEQ ID NO: 16334 - DNA, 30 bp, Artificial Sequence; identical to SEQ ID NO: 791
  Description of Artificial Sequence: Synthetic hazel nut; inner sequence

SEQ ID NO: 16335 - DNA, 30 bp, Artificial Sequence; identical to SEQ ID NO: 4205
  Description of Artificial Sequence: Synthetic hazel nut; inner sequence

SEQ ID NO: 16336 - DNA, 29 bp, Artificial Sequence
  Description of Artificial Sequence: Synthetic hazel nut; inner sequence
cgtacgacacgacagacatgcacgacgca

SEQ ID NO: 16337 - DNA, 30 bp, Artificial Sequence; identical to SEQ ID NO: 4954
  Description of Artificial Sequence: Synthetic hazel nut; inner sequence

SEQ ID NO: 16338 - DNA, 30 bp, Artificial Sequence; identical to SEQ ID NO: 919
  Description of Artificial Sequence: Synthetic hazel nut; inner sequence

SEQ ID NO: 16339 - DNA, 30 bp, Artificial Sequence; identical to SEQ ID NO: 317
  Description of Artificial Sequence: Synthetic hazel nut; inner sequence

SEQ ID NO: 16340 - DNA, 30 bp, Artificial Sequence; identical to SEQ ID NO: 345
  Description of Artificial Sequence: Synthetic hazel nut; inner sequence

SEQ ID NO: 16341 - DNA, 30 bp, Artificial Sequence; identical to SEQ ID NO: 348
  Description of Artificial Sequence: Synthetic hazel nut; inner sequence

SEQ ID NO: 16342 - DNA, 30 bp, Artificial Sequence
  Description of Artificial Sequence: Synthetic hazel nut; inner sequence
cgtaccgtggcagaacgcgtcactgtgtcg

SEQ ID NO: 16343 - DNA, 30 bp, Artificial Sequence; identical to SEQ ID NO: 494
  Description of Artificial Sequence: Synthetic hazel nut; inner sequence

SEQ ID NO: 16344 - DNA, 30 bp, Artificial Sequence; identical to SEQ ID NO: 4955
  Description of Artificial Sequence: Synthetic hazel nut; inner sequence

SEQ ID NO: 16345 - DNA, 30 bp, Artificial Sequence; identical to SEQ ID NO: 4854
  Description of Artificial Sequence: Synthetic hazel nut; inner sequence

SEQ ID NO: 16346 - DNA, 30 bp, Artificial Sequence; identical to SEQ ID NO: 406
  Description of Artificial Sequence: Synthetic hazel nut; inner sequence

SEQ ID NO: 16347 - DNA, 28 bp, Artificial Sequence
  Description of Artificial Sequence: Synthetic hazel nut; inner sequence
cgcaccgtcgatacgtcatgcacgcacc

SEQ ID NO: 16348 - DNA, 30 bp, Artificial Sequence; identical to SEQ ID NO: 390
  Description of Artificial Sequence: Synthetic hazel nut; inner sequence

SEQ ID NO: 16349 - DNA, 30 bp, Artificial Sequence; identical to SEQ ID NO: 146
  Description of Artificial Sequence: Synthetic hazel nut; inner sequence

SEQ ID NO: 16350 - DNA, 30 bp, Artificial Sequence; identical to SEQ ID NO: 343
  Description of Artificial Sequence: Synthetic hazel nut; inner sequence

SEQ ID NO: 16351 - DNA, 30 bp, Artificial Sequence; identical to SEQ ID NO: 109
  Description of Artificial Sequence: Synthetic hazel nut; inner sequence

SEQ ID NO: 16352 - DNA, 30 bp, Artificial Sequence
  Description of Artificial Sequence: Synthetic hazel nut; inner sequence
cgacacacggtgcaacgtcaacactgcggc

SEQ ID NO: 16353 - DNA, 30 bp, Artificial Sequence; identical to SEQ ID NO: 183
  Description of Artificial Sequence: Synthetic hazel nut; inner sequence

SEQ ID NO: 16354 - DNA, 30 bp, Artificial Sequence; identical to SEQ ID NO: 384
  Description of Artificial Sequence: Synthetic hazel nut; inner sequence

SEQ ID NO: 16355 - DNA, 30 bp, Artificial Sequence; identical to SEQ ID NO: 576
  Description of Artificial Sequence: Synthetic hazel nut; inner sequence

SEQ ID NO: 16356 - DNA, 30 bp, Artificial Sequence; identical to SEQ ID NO: 654
  Description of Artificial Sequence: Synthetic hazel nut; inner sequence

SEQ ID NO: 16357 - DNA, 30 bp, Artificial Sequence; identical to SEQ ID NO: 407
  Description of Artificial Sequence: Synthetic hazel nut; inner sequence

SEQ ID NO: 16358 - DNA, 30 bp, Artificial Sequence; identical to SEQ ID NO: 4739
  Description of Artificial Sequence: Synthetic hazel nut; inner sequence

SEQ ID NO: 16359 - DNA, 30 bp, Artificial Sequence; identical to SEQ ID NO: 420
  Description of Artificial Sequence: Synthetic hazel nut; inner sequence

SEQ ID NO: 16360 - DNA, 30 bp, Artificial Sequence; identical to SEQ ID NO: 4694
  Description of Artificial Sequence: Synthetic hazel nut; inner sequence

SEQ ID NO: 16361 - DNA, 30 bp, Artificial Sequence; identical to SEQ ID NO: 385
  Description of Artificial Sequence: Synthetic hazel nut; inner sequence

SEQ ID NO: 16362 - DNA, 30 bp, Artificial Sequence; identical to SEQ ID NO: 528
  Description of Artificial Sequence: Synthetic hazel nut; inner sequence

SEQ ID NO: 16363 - DNA, 30 bp, Artificial Sequence; identical to SEQ ID NO: 291
  Description of Artificial Sequence: Synthetic hazel nut; inner sequence

SEQ ID NO: 16364 - DNA, 30 bp, Artificial Sequence; identical to SEQ ID NO: 923
  Description of Artificial Sequence: Synthetic hazel nut; inner sequence

SEQ ID NO: 16365 - DNA, 30 bp, Artificial Sequence; identical to SEQ ID NO: 211
  Description of Artificial Sequence: Synthetic hazel nut; inner sequence

SEQ ID NO: 16366 - DNA, 30 bp, Artificial Sequence; identical to SEQ ID NO: 380
  Description of Artificial Sequence: Synthetic hazel nut; inner sequence

SEQ ID NO: 16367 - DNA, 30 bp, Artificial Sequence
  Description of Artificial Sequence: Synthetic hazel nut; inner sequence
gcaccatcacgttgacgctgcccgtttgcc

SEQ ID NO: 16368 - DNA, 30 bp, Artificial Sequence; identical to SEQ ID NO: 798
  Description of Artificial Sequence: Synthetic hazel nut; inner sequence

SEQ ID NO: 16369 - DNA, 30 bp, Artificial Sequence; identical to SEQ ID NO: 369
  Description of Artificial Sequence: Synthetic hazel nut; inner sequence

SEQ ID NO: 16370 - DNA, 30 bp, Artificial Sequence; identical to SEQ ID NO: 854
  Description of Artificial Sequence: Synthetic hazel nut; inner sequence

SEQ ID NO: 16371 - DNA, 30 bp, Artificial Sequence; identical to SEQ ID NO: 410
  Description of Artificial Sequence: Synthetic hazel nut; inner sequence

SEQ ID NO: 16372 - DNA, 30 bp, Artificial Sequence; identical to SEQ ID NO: 316
  Description of Artificial Sequence: Synthetic hazel nut; inner sequence

SEQ ID NO: 16373 - DNA, 31 bp, Artificial Sequence
  Description of Artificial Sequence: Synthetic hazel nut; inner sequence
cgtggcacgatggtaggacgacgcgttcacg

SEQ ID NO: 16374 - DNA, 30 bp, Artificial Sequence; identical to SEQ ID NO: 4312
  Description of Artificial Sequence: Synthetic hazel nut; inner sequence

SEQ ID NO: 16375 - DNA, 30 bp, Artificial Sequence; identical to SEQ ID NO: 4790
  Description of Artificial Sequence: Synthetic hazel nut; inner sequence

SEQ ID NO: 16376 - DNA, 30 bp, Artificial Sequence; identical to SEQ ID NO: 83
  Description of Artificial Sequence: Synthetic hazel nut; inner sequence

SEQ ID NO: 16377 - DNA, 30 bp, Artificial Sequence; identical to SEQ ID NO: 751
  Description of Artificial Sequence: Synthetic hazel nut; inner sequence

SEQ ID NO: 16378 - DNA, 30 bp, Artificial Sequence; identical to SEQ ID NO: 401
  Description of Artificial Sequence: Synthetic hazel nut; inner sequence

SEQ ID NO: 16379 - DNA, 30 bp, Artificial Sequence; identical to SEQ ID NO: 815
  Description of Artificial Sequence: Synthetic hazel nut; inner sequence

SEQ ID NO: 16380 - DNA, 30 bp, Artificial Sequence
  Description of Artificial Sequence: Synthetic hazel nut; inner sequence
tcatggccgaacgtgacgtacaccgtgccg

SEQ ID NO: 16381 - DNA, 30 bp, Artificial Sequence; identical to SEQ ID NO: 331
  Description of Artificial Sequence: Synthetic hazel nut; inner sequence

SEQ ID NO: 16382 - DNA, 30 bp, Artificial Sequence; identical to SEQ ID NO: 8824
  Description of Artificial Sequence: Synthetic hazel nut; inner sequence

SEQ ID NO: 16383 - DNA, 30 bp, Artificial Sequence
  Description of Artificial Sequence: Synthetic hazel nut; inner sequence
cacgcgtcgtgagcaaggcatgccgtatcg

SEQ ID NO: 16384 - DNA, 30 bp, Artificial Sequence; identical to SEQ ID NO: 463
  Description of Artificial Sequence: Synthetic hazel nut; inner sequence

SEQ ID NO: 16385 - DNA, 30 bp, Artificial Sequence; identical to SEQ ID NO: 729
  Description of Artificial Sequence: Synthetic hazel nut; inner sequence

SEQ ID NO: 16386 - DNA, 30 bp, Artificial Sequence
  Description of Artificial Sequence: Synthetic hazel nut; inner sequence
gcacacagggcatcgtggacgtgtgtcgcg

SEQ ID NO: 16387 - DNA, 30 bp, Artificial Sequence
  Description of Artificial Sequence: Synthetic hazel nut; inner sequence
cgcgcaacgtgatggatgggctgatgcgca

SEQ ID NO: 16388 - DNA, 30 bp, Artificial Sequence; identical to SEQ ID NO: 4882
  Description of Artificial Sequence: Synthetic hazel nut; inner sequence

SEQ ID NO: 16389 - DNA, 30 bp, Artificial Sequence
  Description of Artificial Sequence: Synthetic hazel nut; inner sequence
cgtaacgcatcatggtgcatgcgcttcacg

SEQ ID NO: 16390 - DNA, 30 bp, Artificial Sequence; identical to SEQ ID NO: 272
  Description of Artificial Sequence: Synthetic hazel nut; inner sequence

SEQ ID NO: 16391 - DNA, 30 bp, Artificial Sequence; identical to SEQ ID NO: 620
  Description of Artificial Sequence: Synthetic hazel nut; inner sequence

SEQ ID NO: 16392 - DNA, 30 bp, Artificial Sequence; identical to SEQ ID NO: 491
  Description of Artificial Sequence: Synthetic hazel nut; inner sequence

SEQ ID NO: 16393 - DNA, 30 bp, Artificial Sequence; identical to SEQ ID NO: 474
  Description of Artificial Sequence: Synthetic hazel nut; inner sequence

SEQ ID NO: 16394 - DNA, 30 bp, Artificial Sequence; identical to SEQ ID NO: 861
  Description of Artificial Sequence: Synthetic hazel nut; inner sequence

SEQ ID NO: 16395 - DNA, 30 bp, Artificial Sequence; identical to SEQ ID NO: 672
  Description of Artificial Sequence: Synthetic hazel nut; inner sequence

SEQ ID NO: 16396 - DNA, 30 bp, Artificial Sequence; identical to SEQ ID NO: 4597
  Description of Artificial Sequence: Synthetic hazel nut; inner sequence

SEQ ID NO: 16397 - DNA, 30 bp, Artificial Sequence; identical to SEQ ID NO: 289
  Description of Artificial Sequence: Synthetic hazel nut; inner sequence

SEQ ID NO: 16398 - DNA, 30 bp, Artificial Sequence; identical to SEQ ID NO: 726
  Description of Artificial Sequence: Synthetic hazel nut; inner sequence

SEQ ID NO: 16399 - DNA, 30 bp, Artificial Sequence
  Description of Artificial Sequence: Synthetic hazel nut; inner sequence
cgcaccgcaagtgacgtgtccgtgccgtga

SEQ ID NO: 16400 - DNA, 30 bp, Artificial Sequence; identical to SEQ ID NO: 454
  Description of Artificial Sequence: Synthetic hazel nut; inner sequence

SEQ ID NO: 16401 - DNA, 30 bp, Artificial Sequence; identical to SEQ ID NO: 809
  Description of Artificial Sequence: Synthetic hazel nut; inner sequence

SEQ ID NO: 16402 - DNA, 30 bp, Artificial Sequence; identical to SEQ ID NO: 242
  Description of Artificial Sequence: Synthetic hazel nut; inner sequence

SEQ ID NO: 16403 - DNA, 30 bp, Artificial Sequence; identical to SEQ ID NO: 700
  Description of Artificial Sequence: Synthetic hazel nut; inner sequence

SEQ ID NO: 16404 - DNA, 30 bp, Artificial Sequence; identical to SEQ ID NO: 583
  Description of Artificial Sequence: Synthetic hazel nut; inner sequence

SEQ ID NO: 16405 - DNA, 30 bp, Artificial Sequence; identical to SEQ ID NO: 467
  Description of Artificial Sequence: Synthetic hazel nut; inner sequence

SEQ ID NO: 16406 - DNA, 30 bp, Artificial Sequence; identical to SEQ ID NO: 106
  Description of Artificial Sequence: Synthetic hazel nut; inner sequence

SEQ ID NO: 16407 - DNA, 30 bp, Artificial Sequence; identical to SEQ ID NO: 135
  Description of Artificial Sequence: Synthetic hazel nut; inner sequence

SEQ ID NO: 16408 - DNA, 30 bp, Artificial Sequence
  Description of Artificial Sequence: Synthetic hazel nut; inner sequence
cgtaccggcagggagcgtgcacactgcgca

SEQ ID NO: 16409 - DNA, 30 bp, Artificial Sequence
  Description of Artificial Sequence: Synthetic hazel nut; inner sequence
catgatggccgtgctgaccacgcgtgcgca

SEQ ID NO: 16410 - DNA, 30 bp, Artificial Sequence; identical to SEQ ID NO: 611
  Description of Artificial Sequence: Synthetic hazel nut; inner sequence

SEQ ID NO: 16411 - DNA, 30 bp, Artificial Sequence; identical to SEQ ID NO: 4924
  Description of Artificial Sequence: Synthetic hazel nut; inner sequence

SEQ ID NO: 16412 - DNA, 30 bp, Artificial Sequence
  Description of Artificial Sequence: Synthetic hazel nut; inner sequence
cgacacgcatcagggacgcaacgctgcacg

SEQ ID NO: 16413 - DNA, 30 bp, Artificial Sequence; identical to SEQ ID NO: 535
  Description of Artificial Sequence: Synthetic hazel nut; inner sequence

SEQ ID NO: 16414 - DNA, 30 bp, Artificial Sequence; identical to SEQ ID NO: 442
  Description of Artificial Sequence: Synthetic hazel nut; inner sequence

SEQ ID NO: 16415 - DNA, 30 bp, Artificial Sequence; identical to SEQ ID NO: 886
  Description of Artificial Sequence: Synthetic hazel nut; inner sequence

SEQ ID NO: 16416 - DNA, 30 bp, Artificial Sequence; identical to SEQ ID NO: 326
  Description of Artificial Sequence: Synthetic hazel nut; inner sequence

SEQ ID NO: 16417 - DNA, 30 bp, Artificial Sequence; identical to SEQ ID NO: 358
  Description of Artificial Sequence: Synthetic hazel nut; inner sequence

SEQ ID NO: 16418 - DNA, 30 bp, Artificial Sequence; identical to SEQ ID NO: 438
  Description of Artificial Sequence: Synthetic hazel nut; inner sequence

SEQ ID NO: 16419 - DNA, 30 bp, Artificial Sequence; identical to SEQ ID NO: 153
  Description of Artificial Sequence: Synthetic hazel nut; inner sequence

SEQ ID NO: 16420 - DNA, 30 bp, Artificial Sequence; identical to SEQ ID NO: 990
  Description of Artificial Sequence: Synthetic hazel nut; inner sequence

SEQ ID NO: 16421 - DNA, 30 bp, Artificial Sequence; identical to SEQ ID NO: 297
  Description of Artificial Sequence: Synthetic hazel nut; inner sequence

SEQ ID NO: 16422 - DNA, 30 bp, Artificial Sequence; identical to SEQ ID NO: 960
  Description of Artificial Sequence: Synthetic hazel nut; inner sequence

SEQ ID NO: 16423 - DNA, 30 bp, Artificial Sequence; identical to SEQ ID NO: 571
  Description of Artificial Sequence: Synthetic hazel nut; inner sequence

SEQ ID NO: 16424 - DNA, 30 bp, Artificial Sequence; identical to SEQ ID NO: 477
  Description of Artificial Sequence: Synthetic hazel nut; inner sequence

SEQ ID NO: 16425 - DNA, 30 bp, Artificial Sequence; identical to SEQ ID NO: 736
  Description of Artificial Sequence: Synthetic hazel nut; inner sequence

SEQ ID NO: 16426 - DNA, 30 bp, Artificial Sequence; identical to SEQ ID NO: 4663
  Description of Artificial Sequence: Synthetic hazel nut; inner sequence

SEQ ID NO: 16427 - DNA, 30 bp, Artificial Sequence
  Description of Artificial Sequence: Synthetic hazel nut; inner sequence
gacatgcgatgaacgaggcatgatgcgtca

SEQ ID NO: 16428 - DNA, 30 bp, Artificial Sequence; identical to SEQ ID NO: 4706
  Description of Artificial Sequence: Synthetic hazel nut; inner sequence

SEQ ID NO: 16429 - DNA, 30 bp, Artificial Sequence; identical to SEQ ID NO: 530
  Description of Artificial Sequence: Synthetic hazel nut; inner sequence

SEQ ID NO: 16430 - DNA, 30 bp, Artificial Sequence; identical to SEQ ID NO: 632
  Description of Artificial Sequence: Synthetic hazel nut; inner sequence

SEQ ID NO: 16431 - DNA, 30 bp, Artificial Sequence
  Description of Artificial Sequence: Synthetic hazel nut; inner sequence
gcatgccgtacgatccctcactgtgcggtg

SEQ ID NO: 16432 - DNA, 30 bp, Artificial Sequence; identical to SEQ ID NO: 828
  Description of Artificial Sequence: Synthetic hazel nut; inner sequence

SEQ ID NO: 16433 - DNA, 30 bp, Artificial Sequence; identical to SEQ ID NO: 392
  Description of Artificial Sequence: Synthetic hazel nut; inner sequence

SEQ ID NO: 16434 - DNA, 30 bp, Artificial Sequence
  Description of Artificial Sequence: Synthetic hazel nut; inner sequence
cgtgctgacatgctcgtccctcactgcgtg

SEQ ID NO: 16435 - DNA, 30 bp, Artificial Sequence; identical to SEQ ID NO: 604
  Description of Artificial Sequence: Synthetic hazel nut; inner sequence

SEQ ID NO: 16436 - DNA, 30 bp, Artificial Sequence
  Description of Artificial Sequence: Synthetic hazel nut; inner sequence
gcgacacacggatcgaccttcgtagccacg

SEQ ID NO: 16437 - DNA, 30 bp, Artificial Sequence; identical to SEQ ID NO: 156
  Description of Artificial Sequence: Synthetic hazel nut; inner sequence

SEQ ID NO: 16438 - DNA, 30 bp, Artificial Sequence; identical to SEQ ID NO: 387
  Description of Artificial Sequence: Synthetic hazel nut; inner sequence

SEQ ID NO: 16439 - DNA, 30 bp, Artificial Sequence; identical to SEQ ID NO: 377
  Description of Artificial Sequence: Synthetic hazel nut; inner sequence

SEQ ID NO: 16440 - DNA, 30 bp, Artificial Sequence; identical to SEQ ID NO: 569
  Description of Artificial Sequence: Synthetic hazel nut; inner sequence

SEQ ID NO: 16441 - DNA, 30 bp, Artificial Sequence; identical to SEQ ID NO: 350
  Description of Artificial Sequence: Synthetic hazel nut; inner sequence

SEQ ID NO: 16442 - DNA, 30 bp, Artificial Sequence
  Description of Artificial Sequence: Synthetic hazel nut; inner sequence
acgtatgccgcatcgtcacgccaacatggt

SEQ ID NO: 16443 - DNA, 30 bp, Artificial Sequence; identical to SEQ ID NO: 303
  Description of Artificial Sequence: Synthetic hazel nut; inner sequence

SEQ ID NO: 16444 - DNA, 30 bp, Artificial Sequence; identical to SEQ ID NO: 215
  Description of Artificial Sequence: Synthetic hazel nut; inner sequence

SEQ ID NO: 16445 - DNA, 30 bp, Artificial Sequence; identical to SEQ ID NO: 4621
  Description of Artificial Sequence: Synthetic hazel nut; inner sequence

SEQ ID NO: 16446 - DNA, 30 bp, Artificial Sequence; identical to SEQ ID NO: 347
  Description of Artificial Sequence: Synthetic hazel nut; inner sequence

SEQ ID NO: 16447 - DNA, 30 bp, Artificial Sequence; identical to SEQ ID NO: 928
  Description of Artificial Sequence: Synthetic hazel nut; inner sequence

SEQ ID NO: 16448 - DNA, 30 bp, Artificial Sequence; identical to SEQ ID NO: 4819
  Description of Artificial Sequence: Synthetic hazel nut; inner sequence

SEQ ID NO: 16449 - DNA, 30 bp, Artificial Sequence; identical to SEQ ID NO: 342
  Description of Artificial Sequence: Synthetic hazel nut; inner sequence

SEQ ID NO: 16450 - DNA, 30 bp, Artificial Sequence; identical to SEQ ID NO: 320
  Description of Artificial Sequence: Synthetic hazel nut; inner sequence

SEQ ID NO: 16451 - DNA, 30 bp, Artificial Sequence
  Description of Artificial Sequence: Synthetic hazel nut; inner sequence
gcatggcaacgcgtacctctgcacttcaca

SEQ ID NO: 16452 - DNA, 30 bp, Artificial Sequence; identical to SEQ ID NO: 127
  Description of Artificial Sequence: Synthetic hazel nut; inner sequence

SEQ ID NO: 16453 - DNA, 30 bp, Artificial Sequence; identical to SEQ ID NO: 4502
  Description of Artificial Sequence: Synthetic hazel nut; inner sequence

SEQ ID NO: 16454 - DNA, 30 bp, Artificial Sequence; identical to SEQ ID NO: 457
  Description of Artificial Sequence: Synthetic hazel nut; inner sequence

SEQ ID NO: 16455 - DNA, 30 bp, Artificial Sequence; identical to SEQ ID NO: 498
  Description of Artificial Sequence: Synthetic hazel nut; inner sequence

SEQ ID NO: 16456 - DNA, 30 bp, Artificial Sequence; identical to SEQ ID NO: 116
  Description of Artificial Sequence: Synthetic hazel nut; inner sequence

SEQ ID NO: 16457 - DNA, 30 bp, Artificial Sequence
  Description of Artificial Sequence: Synthetic hazel nut; inner sequence
ggaatgcgatgaacgaggcatgatgcgtca

SEQ ID NO: 16458 - DNA, 30 bp, Artificial Sequence; identical to SEQ ID NO: 254
  Description of Artificial Sequence: Synthetic hazel nut; inner sequence

SEQ ID NO: 16459 - DNA, 30 bp, Artificial Sequence; identical to SEQ ID NO: 572
  Description of Artificial Sequence: Synthetic hazel nut; inner sequence

SEQ ID NO: 16460 - DNA, 30 bp, Artificial Sequence; identical to SEQ ID NO: 288
  Description of Artificial Sequence: Synthetic hazel nut; inner sequence

SEQ ID NO: 16461 - DNA, 30 bp, Artificial Sequence; identical to SEQ ID NO: 439
  Description of Artificial Sequence: Synthetic hazel nut; inner sequence

SEQ ID NO: 16462 - DNA, 30 bp, Artificial Sequence; identical to SEQ ID NO: 8826
  Description of Artificial Sequence: Synthetic hazel nut; inner sequence

SEQ ID NO: 16463 - DNA, 30 bp, Artificial Sequence; identical to SEQ ID NO: 414
  Description of Artificial Sequence: Synthetic hazel nut; inner sequence

SEQ ID NO: 16464 - DNA, 30 bp, Artificial Sequence; identical to SEQ ID NO: 186
  Description of Artificial Sequence: Synthetic hazel nut; inner sequence

SEQ ID NO: 16465 - DNA, 30 bp, Artificial Sequence; identical to SEQ ID NO: 868
  Description of Artificial Sequence: Synthetic hazel nut; inner sequence

SEQ ID NO: 16466 - DNA, 31 bp, Artificial Sequence; identical to SEQ ID NO: 258
  Description of Artificial Sequence: Synthetic hazel nut; inner sequence

SEQ ID NO: 16467 - DNA, 30 bp, Artificial Sequence; identical to SEQ ID NO: 204
  Description of Artificial Sequence: Synthetic hazel nut; inner sequence

SEQ ID NO: 16468 - DNA, 30 bp, Artificial Sequence; identical to SEQ ID NO: 4420
  Description of Artificial Sequence: Synthetic hazel nut; inner sequence

SEQ ID NO: 16469 - DNA, 30 bp, Artificial Sequence; identical to SEQ ID NO: 4617
  Description of Artificial Sequence: Synthetic hazel nut; inner sequence

SEQ ID NO: 16470 - DNA, 30 bp, Artificial Sequence; identical to SEQ ID NO: 212
  Description of Artificial Sequence: Synthetic hazel nut; inner sequence

SEQ ID NO: 16471 - DNA, 30 bp, Artificial Sequence
  Description of Artificial Sequence: Synthetic hazel nut; inner sequence
gcacgtgctgtgaccggtaacgatgtggca

SEQ ID NO: 16472 - DNA, 30 bp, Artificial Sequence; identical to SEQ ID NO: 239
  Description of Artificial Sequence: Synthetic hazel nut; inner sequence

SEQ ID NO: 16473 - DNA, 30 bp, Artificial Sequence; identical to SEQ ID NO: 485
  Description of Artificial Sequence: Synthetic hazel nut; inner sequence

SEQ ID NO: 16474 - DNA, 30 bp, Artificial Sequence; identical to SEQ ID NO: 399
  Description of Artificial Sequence: Synthetic hazel nut; inner sequence

SEQ ID NO: 16475 - DNA, 30 bp, Artificial Sequence; identical to SEQ ID NO: 691
  Description of Artificial Sequence: Synthetic hazel nut; inner sequence

SEQ ID NO: 16476 - DNA, 30 bp, Artificial Sequence
  Description of Artificial Sequence: Synthetic hazel nut; inner sequence
ggtatgcgatgaacgaggcatgatgcgtca

SEQ ID NO: 16477 - DNA, 30 bp, Artificial Sequence; identical to SEQ ID NO: 603
  Description of Artificial Sequence: Synthetic hazel nut; inner sequence

SEQ ID NO: 16478 - DNA, 30 bp, Artificial Sequence; identical to SEQ ID NO: 490
  Description of Artificial Sequence: Synthetic hazel nut; inner sequence

SEQ ID NO: 16479 - DNA, 30 bp, Artificial Sequence
  Description of Artificial Sequence: Synthetic hazel nut; inner sequence
ggccacgatgaccctccctacgtacgcacg

SEQ ID NO: 16480 - DNA, 30 bp, Artificial Sequence
  Description of Artificial Sequence: Synthetic hazel nut; inner sequence
gtgcgaaacggaccatacgtacagtacgcg

SEQ ID NO: 16481 - DNA, 30 bp, Artificial Sequence; identical to SEQ ID NO: 4336
  Description of Artificial Sequence: Synthetic hazel nut; inner sequence

SEQ ID NO: 16482 - DNA, 30 bp, Artificial Sequence
  Description of Artificial Sequence: Synthetic hazel nut; inner sequence
ccgcacgatgccgatggaccatgcgacacg

SEQ ID NO: 16483 - DNA, 30 bp, Artificial Sequence; identical to SEQ ID NO: 973
  Description of Artificial Sequence: Synthetic hazel nut; inner sequence

SEQ ID NO: 16484 - DNA, 30 bp, Artificial Sequence; identical to SEQ ID NO: 4913
  Description of Artificial Sequence: Synthetic hazel nut; inner sequence

SEQ ID NO: 16485 - DNA, 30 bp, Artificial Sequence; identical to SEQ ID NO: 205
  Description of Artificial Sequence: Synthetic hazel nut; inner sequence

SEQ ID NO: 16486 - DNA, 30 bp, Artificial Sequence; identical to SEQ ID NO: 835
  Description of Artificial Sequence: Synthetic hazel nut; inner sequence

SEQ ID NO: 16487 - DNA, 30 bp, Artificial Sequence; identical to SEQ ID NO: 298
  Description of Artificial Sequence: Synthetic hazel nut; inner sequence

SEQ ID NO: 16488 - DNA, 30 bp, Artificial Sequence
  Description of Artificial Sequence: Synthetic hazel nut; inner sequence
gcaacagcatgccgatacgtaccgcgtaca

SEQ ID NO: 16489 - DNA, 30 bp, Artificial Sequence; identical to SEQ ID NO: 192
  Description of Artificial Sequence: Synthetic hazel nut; inner sequence

SEQ ID NO: 16490 - DNA, 30 bp, Artificial Sequence; identical to SEQ ID NO: 4297
  Description of Artificial Sequence: Synthetic hazel nut; inner sequence

SEQ ID NO: 16491 - DNA, 30 bp, Artificial Sequence; identical to SEQ ID NO: 155
  Description of Artificial Sequence: Synthetic hazel nut; inner sequence

SEQ ID NO: 16492 - DNA, 30 bp, Artificial Sequence; identical to SEQ ID NO: 553
  Description of Artificial Sequence: Synthetic hazel nut; inner sequence

SEQ ID NO: 16493 - DNA, 30 bp, Artificial Sequence; identical to SEQ ID NO: 267
  Description of Artificial Sequence: Synthetic hazel nut; inner sequence

SEQ ID NO: 16494 - DNA, 30 bp, Artificial Sequence; identical to SEQ ID NO: 568
  Description of Artificial Sequence: Synthetic hazel nut; inner sequence

SEQ ID NO: 16495 - DNA, 30 bp, Artificial Sequence; identical to SEQ ID NO: 1001
  Description of Artificial Sequence: Synthetic hazel nut; inner sequence

SEQ ID NO: 16496 - DNA, 30 bp, Artificial Sequence; identical to SEQ ID NO: 4994
  Description of Artificial Sequence: Synthetic hazel nut; inner sequence

SEQ ID NO: 16497 - DNA, 30 bp, Artificial Sequence; identical to SEQ ID NO: 175
  Description of Artificial Sequence: Synthetic hazel nut; inner sequence

SEQ ID NO: 16498 - DNA, 30 bp, Artificial Sequence; identical to SEQ ID NO: 4774
  Description of Artificial Sequence: Synthetic hazel nut; inner sequence

SEQ ID NO: 16499 - DNA, 30 bp, Artificial Sequence; identical to SEQ ID NO: 357
  Description of Artificial Sequence: Synthetic hazel nut; inner sequence

SEQ ID NO: 16500 - DNA, 31 bp, Artificial Sequence; identical to SEQ ID NO: 250
  Description of Artificial Sequence: Synthetic hazel nut; inner sequence

SEQ ID NO: 16501 - DNA, 30 bp, Artificial Sequence
  Description of Artificial Sequence: Synthetic hazel nut; inner sequence
cgcaacgagcgtacgacgatggcacaccgt

SEQ ID NO: 16502 - DNA, 30 bp, Artificial Sequence; identical to SEQ ID NO: 481
  Description of Artificial Sequence: Synthetic hazel nut; inner sequence

SEQ ID NO: 16503 - DNA, 30 bp, Artificial Sequence
  Description of Artificial Sequence: Synthetic hazel nut; inner sequence
cgtgacggtgacggcacatgcgacgcgaca

SEQ ID NO: 16504 - DNA, 30 bp, Artificial Sequence
  Description of Artificial Sequence: Synthetic hazel nut; inner sequence
ggtgacacgcattacgccttcgacgtcacg

SEQ ID NO: 16505 - DNA, 30 bp, Artificial Sequence; identical to SEQ ID NO: 563
  Description of Artificial Sequence: Synthetic hazel nut; inner sequence

SEQ ID NO: 16506 - DNA, 30 bp, Artificial Sequence; identical to SEQ ID NO: 379
  Description of Artificial Sequence: Synthetic hazel nut; inner sequence

SEQ ID NO: 16507 - DNA, 30 bp, Artificial Sequence; identical to SEQ ID NO: 4573
  Description of Artificial Sequence: Synthetic hazel nut; inner sequence

SEQ ID NO: 16508 - DNA, 30 bp, Artificial Sequence; identical to SEQ ID NO: 299
  Description of Artificial Sequence: Synthetic hazel nut; inner sequence

SEQ ID NO: 16509 - DNA, 30 bp, Artificial Sequence; identical to SEQ ID NO: 767
  Description of Artificial Sequence: Synthetic hazel nut; inner sequence

SEQ ID NO: 16510 - DNA, 30 bp, Artificial Sequence; identical to SEQ ID NO: 85
  Description of Artificial Sequence: Synthetic hazel nut; inner sequence

SEQ ID NO: 16511 - DNA, 30 bp, Artificial Sequence; identical to SEQ ID NO: 262
  Description of Artificial Sequence: Synthetic hazel nut; inner sequence

SEQ ID NO: 16512 - DNA, 30 bp, Artificial Sequence; identical to SEQ ID NO: 862
  Description of Artificial Sequence: Synthetic hazel nut; inner sequence

SEQ ID NO: 16513 - DNA, 30 bp, Artificial Sequence
  Description of Artificial Sequence: Synthetic hazel nut; inner sequence
tgacgcgaatggacgcacactgcctacgca

SEQ ID NO: 16514 - DNA, 30 bp, Artificial Sequence; identical to SEQ ID NO: 754
  Description of Artificial Sequence: Synthetic hazel nut; inner sequence

SEQ ID NO: 16515 - DNA, 30 bp, Artificial Sequence; identical to SEQ ID NO: 681
  Description of Artificial Sequence: Synthetic hazel nut; inner sequence

SEQ ID NO: 16516 - DNA, 26 bp, Artificial Sequence
  Description of Artificial Sequence: Synthetic hazel nut; inner sequence
gacgtgagcacgtaatggcctgcgcg

SEQ ID NO: 16517 - DNA, 30 bp, Artificial Sequence; identical to SEQ ID NO: 308
  Description of Artificial Sequence: Synthetic hazel nut; inner sequence

SEQ ID NO: 16518 - DNA, 30 bp, Artificial Sequence; identical to SEQ ID NO: 306
  Description of Artificial Sequence: Synthetic hazel nut; inner sequence

SEQ ID NO: 16519 - DNA, 30 bp, Artificial Sequence; identical to SEQ ID NO: 381
  Description of Artificial Sequence: Synthetic hazel nut; inner sequence

SEQ ID NO: 16520 - DNA, 30 bp, Artificial Sequence; identical to SEQ ID NO: 419
  Description of Artificial Sequence: Synthetic hazel nut; inner sequence

SEQ ID NO: 16521 - DNA, 30 bp, Artificial Sequence; identical to SEQ ID NO: 507
  Description of Artificial Sequence: Synthetic hazel nut; inner sequence

SEQ ID NO: 16522 - DNA, 30 bp, Artificial Sequence; identical to SEQ ID NO: 130
  Description of Artificial Sequence: Synthetic hazel nut; inner sequence

SEQ ID NO: 16523 - DNA, 30 bp, Artificial Sequence; identical to SEQ ID NO: 746
  Description of Artificial Sequence: Synthetic hazel nut; inner sequence

SEQ ID NO: 16524 - DNA, 30 bp, Artificial Sequence
  Description of Artificial Sequence: Synthetic hazel nut; inner sequence
cgacacacagtgacgacagcatccgtcgtg

SEQ ID NO: 16525 - DNA, 30 bp, Artificial Sequence; identical to SEQ ID NO: 8546
  Description of Artificial Sequence: Synthetic hazel nut; inner sequence

SEQ ID NO: 16526 - DNA, 30 bp, Artificial Sequence; identical to SEQ ID NO: 699
  Description of Artificial Sequence: Synthetic hazel nut; inner sequence

SEQ ID NO: 16527 - DNA, 30 bp, Artificial Sequence; identical to SEQ ID NO: 312
  Description of Artificial Sequence: Synthetic hazel nut; inner sequence

SEQ ID NO: 16528 - DNA, 30 bp, Artificial Sequence
  Description of Artificial Sequence: Synthetic hazel nut; inner sequence
gtgctgcatgccaccttgcctaacgtgtca

SEQ ID NO: 16529 - DNA, 30 bp, Artificial Sequence; identical to SEQ ID NO: 236
  Description of Artificial Sequence: Synthetic hazel nut; inner sequence

SEQ ID NO: 16530 - DNA, 30 bp, Artificial Sequence; identical to SEQ ID NO: 162
  Description of Artificial Sequence: Synthetic hazel nut; inner sequence

SEQ ID NO: 16531 - DNA, 30 bp, Artificial Sequence
  Description of Artificial Sequence: Synthetic hazel nut; inner sequence
ggcatgcgatgaccgaggcatgatgcgtca

SEQ ID NO: 16532 - DNA, 30 bp, Artificial Sequence; identical to SEQ ID NO: 191
  Description of Artificial Sequence: Synthetic hazel nut; inner sequence

SEQ ID NO: 16533 - DNA, 30 bp, Artificial Sequence; identical to SEQ ID NO: 243
  Description of Artificial Sequence: Synthetic hazel nut; inner sequence

SEQ ID NO: 16534 - DNA, 30 bp, Artificial Sequence; identical to SEQ ID NO: 826
  Description of Artificial Sequence: Synthetic hazel nut; inner sequence

SEQ ID NO: 16535 - DNA, 30 bp, Artificial Sequence; identical to SEQ ID NO: 497
  Description of Artificial Sequence: Synthetic hazel nut; inner sequence

SEQ ID NO: 16536 - DNA, 30 bp, Artificial Sequence; identical to SEQ ID NO: 586
  Description of Artificial Sequence: Synthetic hazel nut; inner sequence

SEQ ID NO: 16537 - DNA, 30 bp, Artificial Sequence; identical to SEQ ID NO: 752
  Description of Artificial Sequence: Synthetic hazel nut; inner sequence

SEQ ID NO: 16538 - DNA, 31 bp, Artificial Sequence; identical to SEQ ID NO: 845
  Description of Artificial Sequence: Synthetic hazel nut; inner sequence

SEQ ID NO: 16539 - DNA, 30 bp, Artificial Sequence; identical to SEQ ID NO: 952
  Description of Artificial Sequence: Synthetic hazel nut; inner sequence

SEQ ID NO: 16540 - DNA, 29 bp, Artificial Sequence
  Description of Artificial Sequence: Synthetic hazel nut; inner sequence
cgcaacgacactcacgggcacgacgcgca

SEQ ID NO: 16541 - DNA, 30 bp, Artificial Sequence; identical to SEQ ID NO: 466
  Description of Artificial Sequence: Synthetic hazel nut; inner sequence

SEQ ID NO: 16542 - DNA, 30 bp, Artificial Sequence; identical to SEQ ID NO: 394
  Description of Artificial Sequence: Synthetic hazel nut; inner sequence

SEQ ID NO: 16543 - DNA, 30 bp, Artificial Sequence; identical to SEQ ID NO: 336
  Description of Artificial Sequence: Synthetic hazel nut; inner sequence

SEQ ID NO: 16544 - DNA, 30 bp, Artificial Sequence
  Description of Artificial Sequence: Synthetic hazel nut; inner sequence
cgaccatgcacacgtggtgatgacggcatg

SEQ ID NO: 16545 - DNA, 30 bp, Artificial Sequence; identical to SEQ ID NO: 456
  Description of Artificial Sequence: Synthetic hazel nut; inner sequence

SEQ ID NO: 16546 - DNA, 30 bp, Artificial Sequence; identical to SEQ ID NO: 524
  Description of Artificial Sequence: Synthetic hazel nut; inner sequence

SEQ ID NO: 16547 - DNA, 30 bp, Artificial Sequence; identical to SEQ ID NO: 447
  Description of Artificial Sequence: Synthetic hazel nut; inner sequence

SEQ ID NO: 16548 - DNA, 30 bp, Artificial Sequence; identical to SEQ ID NO: 859
  Description of Artificial Sequence: Synthetic hazel nut; inner sequence

SEQ ID NO: 16549 - DNA, 30 bp, Artificial Sequence; identical to SEQ ID NO: 628
  Description of Artificial Sequence: Synthetic hazel nut; inner sequence

SEQ ID NO: 16550 - DNA, 30 bp, Artificial Sequence; identical to SEQ ID NO: 959
  Description of Artificial Sequence: Synthetic hazel nut; inner sequence

SEQ ID NO: 16551 - DNA, 30 bp, Artificial Sequence; identical to SEQ ID NO: 5000
  Description of Artificial Sequence: Synthetic hazel nut; inner sequence

SEQ ID NO: 16552 - DNA, 30 bp, Artificial Sequence; identical to SEQ ID NO: 788
  Description of Artificial Sequence: Synthetic hazel nut; inner sequence

SEQ ID NO: 16553 - DNA, 30 bp, Artificial Sequence; identical to SEQ ID NO: 393
  Description of Artificial Sequence: Synthetic hazel nut; inner sequence

SEQ ID NO: 16554 - DNA, 30 bp, Artificial Sequence
  Description of Artificial Sequence: Synthetic hazel nut; inner sequence
ccgatgcggaccgacacacctcaccttgcg

SEQ ID NO: 16555 - DNA, 30 bp, Artificial Sequence
  Description of Artificial Sequence: Synthetic hazel nut; inner sequence
gccatgcgatgaacgaggcatgatgcgtca

SEQ ID NO: 16556 - DNA, 30 bp, Artificial Sequence; identical to SEQ ID NO: 4792
  Description of Artificial Sequence: Synthetic hazel nut; inner sequence

SEQ ID NO: 16557 - DNA, 28 bp, Artificial Sequence
  Description of Artificial Sequence: Synthetic hazel nut; inner sequence
ggcatgcacgcacctacacgtgatcatg

SEQ ID NO: 16558 - DNA, 30 bp, Artificial Sequence; identical to SEQ ID NO: 840
  Description of Artificial Sequence: Synthetic hazel nut; inner sequence

SEQ ID NO: 16559 - DNA, 30 bp, Artificial Sequence; identical to SEQ ID NO: 860
  Description of Artificial Sequence: Synthetic hazel nut; inner sequence

SEQ ID NO: 16560 - DNA, 30 bp, Artificial Sequence; identical to SEQ ID NO: 825
  Description of Artificial Sequence: Synthetic hazel nut; inner sequence

SEQ ID NO: 16561 - DNA, 30 bp, Artificial Sequence
  Description of Artificial Sequence: Synthetic hazel nut; inner sequence
ggcatgcgatgaacgaggcatgacgcgtca

SEQ ID NO: 16562 - DNA, 30 bp, Artificial Sequence; identical to SEQ ID NO: 478
  Description of Artificial Sequence: Synthetic hazel nut; inner sequence

SEQ ID NO: 16563 - DNA, 30 bp, Artificial Sequence; identical to SEQ ID NO: 4229
  Description of Artificial Sequence: Synthetic hazel nut; inner sequence

SEQ ID NO: 16564 - DNA, 30 bp, Artificial Sequence; identical to SEQ ID NO: 4915
  Description of Artificial Sequence: Synthetic hazel nut; inner sequence

SEQ ID NO: 16565 - DNA, 30 bp, Artificial Sequence; identical to SEQ ID NO: 373
  Description of Artificial Sequence: Synthetic hazel nut; inner sequence

SEQ ID NO: 16566 - DNA, 30 bp, Artificial Sequence; identical to SEQ ID NO: 189
  Description of Artificial Sequence: Synthetic hazel nut; inner sequence

SEQ ID NO: 16567 - DNA, 30 bp, Artificial Sequence; identical to SEQ ID NO: 545
  Description of Artificial Sequence: Synthetic hazel nut; inner sequence

SEQ ID NO: 16568 - DNA, 30 bp, Artificial Sequence; identical to SEQ ID NO: 295
  Description of Artificial Sequence: Synthetic hazel nut; inner sequence

SEQ ID NO: 16569 - DNA, 30 bp, Artificial Sequence; identical to SEQ ID NO: 460
  Description of Artificial Sequence: Synthetic hazel nut; inner sequence

SEQ ID NO: 16570 - DNA, 30 bp, Artificial Sequence; identical to SEQ ID NO: 696
  Description of Artificial Sequence: Synthetic hazel nut; inner sequence

SEQ ID NO: 16571 - DNA, 30 bp, Artificial Sequence; identical to SEQ ID NO: 141
  Description of Artificial Sequence: Synthetic hazel nut; inner sequence

SEQ ID NO: 16572 - DNA, 30 bp, Artificial Sequence; identical to SEQ ID NO: 529
  Description of Artificial Sequence: Synthetic hazel nut; inner sequence

SEQ ID NO: 16573 - DNA, 30 bp, Artificial Sequence
  Description of Artificial Sequence: Synthetic hazel nut; inner sequence
gcgtgtcagcaatacgtcctcatctgcgcg

SEQ ID NO: 16574 - DNA, 30 bp, Artificial Sequence; identical to SEQ ID NO: 4995
  Description of Artificial Sequence: Synthetic hazel nut; inner sequence

SEQ ID NO: 16575 - DNA, 30 bp, Artificial Sequence; identical to SEQ ID NO: 372
  Description of Artificial Sequence: Synthetic hazel nut; inner sequence

SEQ ID NO: 16576 - DNA, 30 bp, Artificial Sequence; identical to SEQ ID NO: 887
  Description of Artificial Sequence: Synthetic hazel nut; inner sequence

SEQ ID NO: 16577 - DNA, 30 bp, Artificial Sequence; identical to SEQ ID NO: 517
  Description of Artificial Sequence: Synthetic hazel nut; inner sequence

SEQ ID NO: 16578 - DNA, 31 bp, Artificial Sequence; identical to SEQ ID NO: 150
  Description of Artificial Sequence: Synthetic hazel nut; inner sequence

SEQ ID NO: 16579 - DNA, 30 bp, Artificial Sequence; identical to SEQ ID NO: 837
  Description of Artificial Sequence: Synthetic hazel nut; inner sequence

SEQ ID NO: 16580 - DNA, 30 bp, Artificial Sequence; identical to SEQ ID NO: 113
  Description of Artificial Sequence: Synthetic hazel nut; inner sequence

SEQ ID NO: 16581 - DNA, 30 bp, Artificial Sequence; identical to SEQ ID NO: 638
  Description of Artificial Sequence: Synthetic hazel nut; inner sequence

SEQ ID NO: 16582 - DNA, 30 bp, Artificial Sequence; identical to SEQ ID NO: 388
  Description of Artificial Sequence: Synthetic hazel nut; inner sequence

SEQ ID NO: 16583 - DNA, 30 bp, Artificial Sequence
  Description of Artificial Sequence: Synthetic hazel nut; inner sequence
cgcatcgtacgtactcctcgtcactgcgcg

SEQ ID NO: 16584 - DNA, 30 bp, Artificial Sequence; identical to SEQ ID NO: 227
  Description of Artificial Sequence: Synthetic hazel nut; inner sequence

SEQ ID NO: 16585 - DNA, 30 bp, Artificial Sequence
  Description of Artificial Sequence: Synthetic hazel nut; inner sequence
cgtaccgcaagtgacgtgtcagtgccgtga

SEQ ID NO: 16586 - DNA, 30 bp, Artificial Sequence; identical to SEQ ID NO: 4931
  Description of Artificial Sequence: Synthetic hazel nut; inner sequence

SEQ ID NO: 16587 - DNA, 30 bp, Artificial Sequence; identical to SEQ ID NO: 487
  Description of Artificial Sequence: Synthetic hazel nut; inner sequence

SEQ ID NO: 16588 - DNA, 30 bp, Artificial Sequence; identical to SEQ ID NO: 4702
  Description of Artificial Sequence: Synthetic hazel nut; inner sequence

SEQ ID NO: 16589 - DNA, 30 bp, Artificial Sequence; identical to SEQ ID NO: 4807
  Description of Artificial Sequence: Synthetic hazel nut; inner sequence

SEQ ID NO: 16590 - DNA, 30 bp, Artificial Sequence; identical to SEQ ID NO: 4652
  Description of Artificial Sequence: Synthetic hazel nut; inner sequence

SEQ ID NO: 16591 - DNA, 30 bp, Artificial Sequence
  Description of Artificial Sequence: Synthetic hazel nut; inner sequence
ggcatgcgatgaacgagacatgatgcgtca

SEQ ID NO: 16592 - DNA, 30 bp, Artificial Sequence
  Description of Artificial Sequence: Synthetic hazel nut; inner sequence
ggacgacgcgaccaagacagcatgcgcaca

SEQ ID NO: 16593 - DNA, 30 bp, Artificial Sequence; identical to SEQ ID NO: 8816
  Description of Artificial Sequence: Synthetic hazel nut; inner sequence

SEQ ID NO: 16594 - DNA, 30 bp, Artificial Sequence; identical to SEQ ID NO: 910
  Description of Artificial Sequence: Synthetic hazel nut; inner sequence

SEQ ID NO: 16595 - DNA, 30 bp, Artificial Sequence
  Description of Artificial Sequence: Synthetic hazel nut; inner sequence
ggcatgcgatgaacgaggcctgatgcgtca

SEQ ID NO: 16596 - DNA, 30 bp, Artificial Sequence; identical to SEQ ID NO: 405
  Description of Artificial Sequence: Synthetic hazel nut; inner sequence

SEQ ID NO: 16597 - DNA, 30 bp, Artificial Sequence; identical to SEQ ID NO: 12997
  Description of Artificial Sequence: Synthetic hazel nut; inner sequence

SEQ ID NO: 16598 - DNA, 30 bp, Artificial Sequence; identical to SEQ ID NO: 665
  Description of Artificial Sequence: Synthetic hazel nut; inner sequence

SEQ ID NO: 16599 - DNA, 30 bp, Artificial Sequence
  Description of Artificial Sequence: Synthetic hazel nut; inner sequence
gcacgcagtgacaccgttgtggacggcgca

SEQ ID NO: 16600 - DNA, 30 bp, Artificial Sequence; identical to SEQ ID NO: 540
  Description of Artificial Sequence: Synthetic hazel nut; inner sequence

SEQ ID NO: 16601 - DNA, 30 bp, Artificial Sequence; identical to SEQ ID NO: 593
  Description of Artificial Sequence: Synthetic hazel nut; inner sequence

SEQ ID NO: 16602 - DNA, 30 bp, Artificial Sequence; identical to SEQ ID NO: 444
  Description of Artificial Sequence: Synthetic hazel nut; inner sequence

SEQ ID NO: 16603 - DNA, 30 bp, Artificial Sequence
  Description of Artificial Sequence: Synthetic hazel nut; inner sequence
catgcgcgatgatcgcacgcgtacgtcacg

SEQ ID NO: 16604 - DNA, 30 bp, Artificial Sequence; identical to SEQ ID NO: 600
  Description of Artificial Sequence: Synthetic hazel nut; inner sequence

SEQ ID NO: 16605 - DNA, 30 bp, Artificial Sequence
  Description of Artificial Sequence: Synthetic hazel nut; inner sequence
ggcatgcgatgaaagaggcatgatgcgtca

SEQ ID NO: 16606 - DNA, 30 bp, Artificial Sequence; identical to SEQ ID NO: 4886
  Description of Artificial Sequence: Synthetic hazel nut; inner sequence

SEQ ID NO: 16607 - DNA, 30 bp, Artificial Sequence; identical to SEQ ID NO: 244
  Description of Artificial Sequence: Synthetic hazel nut; inner sequence

SEQ ID NO: 16608 - DNA, 30 bp, Artificial Sequence
  Description of Artificial Sequence: Synthetic hazel nut; inner sequence
ggcatgcgatgaacgaggcatgatgcgtcc

SEQ ID NO: 16609 - DNA, 30 bp, Artificial Sequence
  Description of Artificial Sequence: Synthetic hazel nut; inner sequence
gcgatccgcgtcctgtcacgttacgcagcc

SEQ ID NO: 16610 - DNA, 30 bp, Artificial Sequence; identical to SEQ ID NO: 4198
  Description of Artificial Sequence: Synthetic hazel nut; inner sequence

SEQ ID NO: 16611 - DNA, 30 bp, Artificial Sequence; identical to SEQ ID NO: 143
  Description of Artificial Sequence: Synthetic hazel nut; inner sequence

SEQ ID NO: 16612 - DNA, 30 bp, Artificial Sequence
  Description of Artificial Sequence: Synthetic hazel nut; inner sequence
cgaaccagcgtcacgtacggcatggcgaca

SEQ ID NO: 16613 - DNA, 30 bp, Artificial Sequence; identical to SEQ ID NO: 344
  Description of Artificial Sequence: Synthetic hazel nut; inner sequence

SEQ ID NO: 16614 - DNA, 30 bp, Artificial Sequence; identical to SEQ ID NO: 310
  Description of Artificial Sequence: Synthetic hazel nut; inner sequence

SEQ ID NO: 16615 - DNA, 30 bp, Artificial Sequence; identical to SEQ ID NO: 396
  Description of Artificial Sequence: Synthetic hazel nut; inner sequence

SEQ ID NO: 16616 - DNA, 30 bp, Artificial Sequence; identical to SEQ ID NO: 180
  Description of Artificial Sequence: Synthetic hazel nut; inner sequence

SEQ ID NO: 16617 - DNA, 30 bp, Artificial Sequence; identical to SEQ ID NO: 413
  Description of Artificial Sequence: Synthetic hazel nut; inner sequence

SEQ ID NO: 16618 - DNA, 29 bp, Artificial Sequence
  Description of Artificial Sequence: Synthetic hazel nut; inner sequence
gcgtgcatggaagggacgtacgctgcgcc

SEQ ID NO: 16619 - DNA, 30 bp, Artificial Sequence
  Description of Artificial Sequence: Synthetic hazel nut; inner sequence
ccacgcagtgacgaccagccgtacgcaacg

SEQ ID NO: 16620 - DNA, 30 bp, Artificial Sequence; identical to SEQ ID NO: 4809
  Description of Artificial Sequence: Synthetic hazel nut; inner sequence

SEQ ID NO: 16621 - DNA, 30 bp, Artificial Sequence
  Description of Artificial Sequence: Synthetic hazel nut; inner sequence
gcacacggccgaacgcgtcccacatgcatg

SEQ ID NO: 16622 - DNA, 30 bp, Artificial Sequence; identical to SEQ ID NO: 495
  Description of Artificial Sequence: Synthetic hazel nut; inner sequence

SEQ ID NO: 16623 - DNA, 30 bp, Artificial Sequence; identical to SEQ ID NO: 522
  Description of Artificial Sequence: Synthetic hazel nut; inner sequence

SEQ ID NO: 16624 - DNA, 30 bp, Artificial Sequence; identical to SEQ ID NO: 608
  Description of Artificial Sequence: Synthetic hazel nut; inner sequence

SEQ ID NO: 16625 - DNA, 30 bp, Artificial Sequence; identical to SEQ ID NO: 383
  Description of Artificial Sequence: Synthetic hazel nut; inner sequence

SEQ ID NO: 16626 - DNA, 30 bp, Artificial Sequence; identical to SEQ ID NO: 351
  Description of Artificial Sequence: Synthetic hazel nut; inner sequence

SEQ ID NO: 16627 - DNA, 30 bp, Artificial Sequence
  Description of Artificial Sequence: Synthetic hazel nut; inner sequence
ggcatgcgatgcacgaggcatgatgcgtca

SEQ ID NO: 16628 - DNA, 30 bp, Artificial Sequence
  Description of Artificial Sequence: Synthetic hazel nut; inner sequence
cgcgtgaacggaacgtcctgtcgtcacgtc

SEQ ID NO: 16629 - DNA, 30 bp, Artificial Sequence
  Description of Artificial Sequence: Synthetic hazel nut; inner sequence
gcatgccaatcacatgtcgtgtcgcgcaca

SEQ ID NO: 16630 - DNA, 30 bp, Artificial Sequence
  Description of Artificial Sequence: Synthetic hazel nut; inner sequence
ggcctgacacgcatcagcctgaccgtcaca

SEQ ID NO: 16631 - DNA, 30 bp, Artificial Sequence; identical to SEQ ID NO: 8801
  Description of Artificial Sequence: Synthetic hazel nut; inner sequence

SEQ ID NO: 16632 - DNA, 30 bp, Artificial Sequence; identical to SEQ ID NO: 340
  Description of Artificial Sequence: Synthetic hazel nut; inner sequence

SEQ ID NO: 16633 - DNA, 30 bp, Artificial Sequence; identical to SEQ ID NO: 198
  Description of Artificial Sequence: Synthetic hazel nut; inner sequence

SEQ ID NO: 16634 - DNA, 30 bp, Artificial Sequence
  Description of Artificial Sequence: Synthetic hazel nut; inner sequence
gacgcacagcatgagggacgtatcgccacg

SEQ ID NO: 16635 - DNA, 30 bp, Artificial Sequence; identical to SEQ ID NO: 264
  Description of Artificial Sequence: Synthetic hazel nut; inner sequence

SEQ ID NO: 16636 - DNA, 30 bp, Artificial Sequence; identical to SEQ ID NO: 590
  Description of Artificial Sequence: Synthetic hazel nut; inner sequence

SEQ ID NO: 16637 - DNA, 30 bp, Artificial Sequence
  Description of Artificial Sequence: Synthetic hazel nut; inner sequence
cgatgcgcaggcaggaggtacgtggccacc

SEQ ID NO: 16638 - DNA, 30 bp, Artificial Sequence
  Description of Artificial Sequence: Synthetic hazel nut; inner sequence
cgcatcgagcaacacgtacgcacgacctgc

SEQ ID NO: 16639 - DNA, 30 bp, Artificial Sequence; identical to SEQ ID NO: 646
  Description of Artificial Sequence: Synthetic hazel nut; inner sequence

SEQ ID NO: 16640 - DNA, 30 bp, Artificial Sequence
  Description of Artificial Sequence: Synthetic hazel nut; inner sequence
acgtcacgcacagtgtcacgttccgatgcg

SEQ ID NO: 16641 - DNA, 30 bp, Artificial Sequence; identical to SEQ ID NO: 354
  Description of Artificial Sequence: Synthetic hazel nut; inner sequence

SEQ ID NO: 16642 - DNA, 30 bp, Artificial Sequence; identical to SEQ ID NO: 4539
  Description of Artificial Sequence: Synthetic hazel nut; inner sequence

SEQ ID NO: 16643 - DNA, 30 bp, Artificial Sequence
  Description of Artificial Sequence: Synthetic hazel nut; inner sequence
gcacaaggcgtgacgtaccatgtgtccatc

SEQ ID NO: 16644 - DNA, 30 bp, Artificial Sequence
  Description of Artificial Sequence: Synthetic hazel nut; inner sequence
gcacggcgcagctcacgtccttgcgtcacc

SEQ ID NO: 16645 - DNA, 30 bp, Artificial Sequence; identical to SEQ ID NO: 4642
  Description of Artificial Sequence: Synthetic hazel nut; inner sequence

SEQ ID NO: 16646 - DNA, 30 bp, Artificial Sequence; identical to SEQ ID NO: 4687
  Description of Artificial Sequence: Synthetic hazel nut; inner sequence

SEQ ID NO: 16647 - DNA, 30 bp, Artificial Sequence; identical to SEQ ID NO: 994
  Description of Artificial Sequence: Synthetic hazel nut; inner sequence

SEQ ID NO: 16648 - DNA, 30 bp, Artificial Sequence; identical to SEQ ID NO: 482
  Description of Artificial Sequence: Synthetic hazel nut; inner sequence

SEQ ID NO: 16649 - DNA, 30 bp, Artificial Sequence
  Description of Artificial Sequence: Synthetic hazel nut; inner sequence
cgatgcgcatcattggtacgacattgccgt

SEQ ID NO: 16650 - DNA, 30 bp, Artificial Sequence; identical to SEQ ID NO: 565
  Description of Artificial Sequence: Synthetic hazel nut; inner sequence

SEQ ID NO: 16651 - DNA, 30 bp, Artificial Sequence
  Description of Artificial Sequence: Synthetic hazel nut; inner sequence
ggcatgagatgaacgaggcatgatgcgtca

SEQ ID NO: 16652 - DNA, 30 bp, Artificial Sequence
  Description of Artificial Sequence: Synthetic hazel nut; inner sequence
gcacggcagcaacgtgacctgcactgcacc

SEQ ID NO: 16653 - DNA, 30 bp, Artificial Sequence; identical to SEQ ID NO: 539
  Description of Artificial Sequence: Synthetic hazel nut; inner sequence

SEQ ID NO: 16654 - DNA, 30 bp, Artificial Sequence
  Description of Artificial Sequence: Synthetic hazel nut; inner sequence
cgcaccgacaacatgttgccttaccgcatg

SEQ ID NO: 16655 - DNA, 30 bp, Artificial Sequence
  Description of Artificial Sequence: Synthetic hazel nut; inner sequence
cacgtgacgcatgcacttcgccttgccaca

SEQ ID NO: 16656 - DNA, 30 bp, Artificial Sequence; identical to SEQ ID NO: 370
  Description of Artificial Sequence: Synthetic hazel nut; inner sequence

SEQ ID NO: 16657 - DNA, 30 bp, Artificial Sequence
  Description of Artificial Sequence: Synthetic hazel nut; inner sequence
cgacgcaccgatacatgaccacgcttcacg

SEQ ID NO: 16658 - DNA, 30 bp, Artificial Sequence; identical to SEQ ID NO: 4831
  Description of Artificial Sequence: Synthetic hazel nut; inner sequence

SEQ ID NO: 16659 - DNA, 30 bp, Artificial Sequence; identical to SEQ ID NO: 471
  Description of Artificial Sequence: Synthetic hazel nut; inner sequence

SEQ ID NO: 16660 - DNA, 30 bp, Artificial Sequence
  Description of Artificial Sequence: Synthetic hazel nut; inner sequence
tgacatcgttacgcacgcactctgcacgta

SEQ ID NO: 16661 - DNA, 30 bp, Artificial Sequence; identical to SEQ ID NO: 4726
  Description of Artificial Sequence: Synthetic hazel nut; inner sequence

SEQ ID NO: 16662 - DNA, 30 bp, Artificial Sequence
  Description of Artificial Sequence: Synthetic hazel nut; inner sequence
cgtggcagacggcacggaacgcacggtgca

SEQ ID NO: 16663 - DNA, 30 bp, Artificial Sequence
  Description of Artificial Sequence: Synthetic hazel nut; inner sequence
ggacagcgcgaaggtacgtactgccgtggt

SEQ ID NO: 16664 - DNA, 30 bp, Artificial Sequence
  Description of Artificial Sequence: Synthetic hazel nut; inner sequence
cgtaccacgtaacgacagcatgctttcggt

SEQ ID NO: 16665 - DNA, 29 bp, Artificial Sequence
  Description of Artificial Sequence: Synthetic hazel nut; inner sequence
cgcaacgacactcacgggcatgacgcgca

SEQ ID NO: 16666 - DNA, 30 bp, Artificial Sequence; identical to SEQ ID NO: 512
  Description of Artificial Sequence: Synthetic hazel nut; inner sequence

SEQ ID NO: 16667 - DNA, 30 bp, Artificial Sequence; identical to SEQ ID NO: 556
  Description of Artificial Sequence: Synthetic hazel nut; inner sequence

SEQ ID NO: 16668 - DNA, 30 bp, Artificial Sequence
  Description of Artificial Sequence: Synthetic hazel nut; inner sequence
cgcaccgtgcaacgacagcttggcggcgtg

SEQ ID NO: 16669 - DNA, 30 bp, Artificial Sequence
  Description of Artificial Sequence: Synthetic hazel nut; inner sequence
gcgtgaggcacacatgcttgtcgcgtcgca

SEQ ID NO: 16670 - DNA, 30 bp, Artificial Sequence; identical to SEQ ID NO: 488
  Description of Artificial Sequence: Synthetic hazel nut; inner sequence

SEQ ID NO: 16671 - DNA, 30 bp, Artificial Sequence; identical to SEQ ID NO: 418
  Description of Artificial Sequence: Synthetic hazel nut; inner sequence

SEQ ID NO: 16672 - DNA, 30 bp, Artificial Sequence
  Description of Artificial Sequence: Synthetic hazel nut; inner sequence
cacgcacagtgtagggaccgttgctgcacg

SEQ ID NO: 16673 - DNA, 30 bp, Artificial Sequence; identical to SEQ ID NO: 776
  Description of Artificial Sequence: Synthetic hazel nut; inner sequence

SEQ ID NO: 16674 - DNA, 30 bp, Artificial Sequence; identical to SEQ ID NO: 725
  Description of Artificial Sequence: Synthetic hazel nut; inner sequence

SEQ ID NO: 16675 - DNA, 30 bp, Artificial Sequence
  Description of Artificial Sequence: Synthetic hazel nut; inner sequence
ggcatgcgatgaacgaggaatgatgcgtca

SEQ ID NO: 16676 - DNA, 30 bp, Artificial Sequence
  Description of Artificial Sequence: Synthetic hazel nut; inner sequence
cacacgtcacatcgtgcacatgcgatcgta

SEQ ID NO: 16677 - DNA, 30 bp, Artificial Sequence
  Description of Artificial Sequence: Synthetic hazel nut; inner sequence
cgtgccggcaaggacgcaccatgacgcaca

SEQ ID NO: 16678 - DNA, 30 bp, Artificial Sequence; identical to SEQ ID NO: 763
  Description of Artificial Sequence: Synthetic hazel nut; inner sequence

SEQ ID NO: 16679 - DNA, 30 bp, Artificial Sequence; identical to SEQ ID NO: 683
  Description of Artificial Sequence: Synthetic hazel nut; inner sequence

SEQ ID NO: 16680 - DNA, 30 bp, Artificial Sequence; identical to SEQ ID NO: 4835
  Description of Artificial Sequence: Synthetic hazel nut; inner sequence

SEQ ID NO: 16681 - DNA, 30 bp, Artificial Sequence; identical to SEQ ID NO: 452
  Description of Artificial Sequence: Synthetic hazel nut; inner sequence

SEQ ID NO: 16682 - DNA, 30 bp, Artificial Sequence; identical to SEQ ID NO: 905
  Description of Artificial Sequence: Synthetic hazel nut; inner sequence

SEQ ID NO: 16683 - DNA, 30 bp, Artificial Sequence; identical to SEQ ID NO: 339
  Description of Artificial Sequence: Synthetic hazel nut; inner sequence

SEQ ID NO: 16684 - DNA, 30 bp, Artificial Sequence; identical to SEQ ID NO: 12996
  Description of Artificial Sequence: Synthetic hazel nut; inner sequence

SEQ ID NO: 16685 - DNA, 30 bp, Artificial Sequence
  Description of Artificial Sequence: Synthetic hazel nut; inner sequence
gcatgacaatgccatagcgtcacctgcacg

SEQ ID NO: 16686 - DNA, 30 bp, Artificial Sequence; identical to SEQ ID NO: 525
  Description of Artificial Sequence: Synthetic hazel nut; inner sequence

SEQ ID NO: 16687 - DNA, 30 bp, Artificial Sequence; identical to SEQ ID NO: 397
  Description of Artificial Sequence: Synthetic hazel nut; inner sequence

SEQ ID NO: 16688 - DNA, 30 bp, Artificial Sequence
  Description of Artificial Sequence: Synthetic hazel nut; inner sequence
ggccacagcgtacctcaacgttgacgtgca

SEQ ID NO: 16689 - DNA, 30 bp, Artificial Sequence; identical to SEQ ID NO: 717
  Description of Artificial Sequence: Synthetic hazel nut; inner sequence

SEQ ID NO: 16690 - DNA, 30 bp, Artificial Sequence
  Description of Artificial Sequence: Synthetic hazel nut; inner sequence
ccgacatcgtaccgatcacgtgcttacgta

SEQ ID NO: 16691 - DNA, 30 bp, Artificial Sequence; identical to SEQ ID NO: 650
  Description of Artificial Sequence: Synthetic hazel nut; inner sequence

SEQ ID NO: 16692 - DNA, 30 bp, Artificial Sequence
  Description of Artificial Sequence: Synthetic hazel nut; inner sequence
cgcaccgtcgatacctcatgcacgctgaca

SEQ ID NO: 16693 - DNA, 30 bp, Artificial Sequence; identical to SEQ ID NO: 743
  Description of Artificial Sequence: Synthetic hazel nut; inner sequence

SEQ ID NO: 16694 - DNA, 30 bp, Artificial Sequence; identical to SEQ ID NO: 980
  Description of Artificial Sequence: Synthetic hazel nut; inner sequence

SEQ ID NO: 16695 - DNA, 30 bp, Artificial Sequence
  Description of Artificial Sequence: Synthetic hazel nut; inner sequence
cgcaccgtgacgagacgtgctagtgtgtca

SEQ ID NO: 16696 - DNA, 30 bp, Artificial Sequence
  Description of Artificial Sequence: Synthetic hazel nut; inner sequence
ggcatgtgatgaacgaggcatgatgcgtca

SEQ ID NO: 16697 - DNA, 30 bp, Artificial Sequence; identical to SEQ ID NO: 4376
  Description of Artificial Sequence: Synthetic hazel nut; inner sequence

SEQ ID NO: 16698 - DNA, 30 bp, Artificial Sequence
  Description of Artificial Sequence: Synthetic hazel nut; inner sequence
gcgtgatggcgcaacgtcctgtgcttcgcg

SEQ ID NO: 16699 - DNA, 30 bp, Artificial Sequence; identical to SEQ ID NO: 594
  Description of Artificial Sequence: Synthetic hazel nut; inner sequence

SEQ ID NO: 16700 - DNA, 30 bp, Artificial Sequence; identical to SEQ ID NO: 324
  Description of Artificial Sequence: Synthetic hazel nut; inner sequence

SEQ ID NO: 16701 - DNA, 30 bp, Artificial Sequence; identical to SEQ ID NO: 329
  Description of Artificial Sequence: Synthetic hazel nut; inner sequence

SEQ ID NO: 16702 - DNA, 30 bp, Artificial Sequence; identical to SEQ ID NO: 534
  Description of Artificial Sequence: Synthetic hazel nut; inner sequence

SEQ ID NO: 16703 - DNA, 30 bp, Artificial Sequence
  Description of Artificial Sequence: Synthetic hazel nut; inner sequence
cgtcacgcacgtgaacgcgtcattgccgca

SEQ ID NO: 16704 - DNA, 30 bp, Artificial Sequence; identical to SEQ ID NO: 8960
  Description of Artificial Sequence: Synthetic hazel nut; inner sequence

SEQ ID NO: 16705 - DNA, 30 bp, Artificial Sequence
  Description of Artificial Sequence: Synthetic hazel nut; inner sequence
gcgacgcacatcaccgcactgaccgtgtgt

SEQ ID NO: 16706 - DNA, 30 bp, Artificial Sequence
  Description of Artificial Sequence: Synthetic hazel nut; inner sequence
cacacgcagtgcgactgacctgacgtcacg

SEQ ID NO: 16707 - DNA, 30 bp, Artificial Sequence; identical to SEQ ID NO: 4531
  Description of Artificial Sequence: Synthetic hazel nut; inner sequence

SEQ ID NO: 16708 - DNA, 30 bp, Artificial Sequence; identical to SEQ ID NO: 806
  Description of Artificial Sequence: Synthetic hazel nut; inner sequence

SEQ ID NO: 16709 - DNA, 30 bp, Artificial Sequence
  Description of Artificial Sequence: Synthetic hazel nut; inner sequence
ggcatgcgatgaacgaggcatgatgagtca

SEQ ID NO: 16710 - DNA, 30 bp, Artificial Sequence
  Description of Artificial Sequence: Synthetic hazel nut; inner sequence
ggcacacgggcaggacgtgctactcgcgca

SEQ ID NO: 16711 - DNA, 29 bp, Artificial Sequence
  Description of Artificial Sequence: Synthetic hazel nut; inner sequence
cgaccagcgcaagtaagtggcgtgatgca

SEQ ID NO: 16712 - DNA, 30 bp, Artificial Sequence; identical to SEQ ID NO: 8971
  Description of Artificial Sequence: Synthetic hazel nut; inner sequence

SEQ ID NO: 16713 - DNA, 30 bp, Artificial Sequence
  Description of Artificial Sequence: Synthetic hazel nut; inner sequence
gcccagtgcaacgtaggtacgtaccgtgcc

SEQ ID NO: 16714 - DNA, 30 bp, Artificial Sequence; identical to SEQ ID NO: 668
  Description of Artificial Sequence: Synthetic hazel nut; inner sequence

SEQ ID NO: 16715 - DNA, 30 bp, Artificial Sequence
  Description of Artificial Sequence: Synthetic hazel nut; inner sequence
cgtgaacacgtgccgacgatgcgtaccgtc

SEQ ID NO: 16716 - DNA, 30 bp, Artificial Sequence; identical to SEQ ID NO: 305
  Description of Artificial Sequence: Synthetic hazel nut; inner sequence

SEQ ID NO: 16717 - DNA, 30 bp, Artificial Sequence; identical to SEQ ID NO: 4610
  Description of Artificial Sequence: Synthetic hazel nut; inner sequence

SEQ ID NO: 16718 - DNA, 30 bp, Artificial Sequence
  Description of Artificial Sequence: Synthetic hazel nut; inner sequence
ggcatgcgacgaacgaggcatgatgcgtca

SEQ ID NO: 16719 - DNA, 30 bp, Artificial Sequence; identical to SEQ ID NO: 440
  Description of Artificial Sequence: Synthetic hazel nut; inner sequence

SEQ ID NO: 16720 - DNA, 30 bp, Artificial Sequence
  Description of Artificial Sequence: Synthetic hazel nut; inner sequence
ggcatgcgatgaatgaggcatgatgcgtca

SEQ ID NO: 16721 - DNA, 30 bp, Artificial Sequence; identical to SEQ ID NO: 705
  Description of Artificial Sequence: Synthetic hazel nut; inner sequence

SEQ ID NO: 16722 - DNA, 30 bp, Artificial Sequence
  Description of Artificial Sequence: Synthetic hazel nut; inner sequence
acgcttaggcacatcgtccgctgcttcacg

SEQ ID NO: 16723 - DNA, 30 bp, Artificial Sequence; identical to SEQ ID NO: 263
  Description of Artificial Sequence: Synthetic hazel nut; inner sequence

SEQ ID NO: 16724 - DNA, 30 bp, Artificial Sequence; identical to SEQ ID NO: 273
  Description of Artificial Sequence: Synthetic hazel nut; inner sequence

SEQ ID NO: 16725 - DNA, 30 bp, Artificial Sequence; identical to SEQ ID NO: 984
  Description of Artificial Sequence: Synthetic hazel nut; inner sequence

SEQ ID NO: 16726 - DNA, 30 bp, Artificial Sequence
  Description of Artificial Sequence: Synthetic hazel nut; inner sequence
cgtggcgaacgaacatacgcacactgcacg

SEQ ID NO: 16727 - DNA, 30 bp, Artificial Sequence; identical to SEQ ID NO: 721
  Description of Artificial Sequence: Synthetic hazel nut; inner sequence

SEQ ID NO: 16728 - DNA, 30 bp, Artificial Sequence; identical to SEQ ID NO: 389
  Description of Artificial Sequence: Synthetic hazel nut; inner sequence

SEQ ID NO: 16729 - DNA, 30 bp, Artificial Sequence
  Description of Artificial Sequence: Synthetic hazel nut; inner sequence
gcgtaaggcaggcaagtacggcacgcatcg

SEQ ID NO: 16730 - DNA, 30 bp, Artificial Sequence
  Description of Artificial Sequence: Synthetic hazel nut; inner sequence
ggcatgcgatgaacgaggcatgatacgtca

SEQ ID NO: 16731 - DNA, 30 bp, Artificial Sequence
  Description of Artificial Sequence: Synthetic hazel nut; inner sequence
ggcatgcgatgaacgaggcatgatgcgtga

SEQ ID NO: 16732 - DNA, 30 bp, Artificial Sequence; identical to SEQ ID NO: 422
  Description of Artificial Sequence: Synthetic hazel nut; inner sequence

SEQ ID NO: 16733 - DNA, 30 bp, Artificial Sequence
  Description of Artificial Sequence: Synthetic hazel nut; inner sequence
gcgtgaggagtgacgccaccatcatgcaca

SEQ ID NO: 16734 - DNA, 30 bp, Artificial Sequence; identical to SEQ ID NO: 731
  Description of Artificial Sequence: Synthetic hazel nut; inner sequence

SEQ ID NO: 16735 - DNA, 30 bp, Artificial Sequence
  Description of Artificial Sequence: Synthetic hazel nut; inner sequence
ggcctgaccacaccgtatgcatcgcgtcca

SEQ ID NO: 16736 - DNA, 30 bp, Artificial Sequence
  Description of Artificial Sequence: Synthetic hazel nut; inner sequence
acgcacaacgtcaacatgaggtgcgcaaca

SEQ ID NO: 16737 - DNA, 30 bp, Artificial Sequence; identical to SEQ ID NO: 87
  Description of Artificial Sequence: Synthetic hazel nut; inner sequence

SEQ ID NO: 16738 - DNA, 30 bp, Artificial Sequence; identical to SEQ ID NO: 779
  Description of Artificial Sequence: Synthetic hazel nut; inner sequence

SEQ ID NO: 16739 - DNA, 30 bp, Artificial Sequence
  Description of Artificial Sequence: Synthetic hazel nut; inner sequence
cgtgacgcagtgcctagctgtgacagtgca

SEQ ID NO: 16740 - DNA, 30 bp, Artificial Sequence
  Description of Artificial Sequence: Synthetic hazel nut; inner sequence
cgcaacggagcacgtgacctggcctgcacg

SEQ ID NO: 16741 - DNA, 30 bp, Artificial Sequence
  Description of Artificial Sequence: Synthetic hazel nut; inner sequence
gcgacgaagcgacatgtgccttgcgatgcc

SEQ ID NO: 16742 - DNA, 30 bp, Artificial Sequence; identical to SEQ ID NO: 210
  Description of Artificial Sequence: Synthetic hazel nut; inner sequence

SEQ ID NO: 16743 - DNA, 30 bp, Artificial Sequence; identical to SEQ ID NO: 546
  Description of Artificial Sequence: Synthetic hazel nut; inner sequence

SEQ ID NO: 16744 - DNA, 30 bp, Artificial Sequence
  Description of Artificial Sequence: Synthetic hazel nut; inner sequence
cgtgtgtacgcatcgaccgtctgtgccatg

SEQ ID NO: 16745 - DNA, 30 bp, Artificial Sequence; identical to SEQ ID NO: 598
  Description of Artificial Sequence: Synthetic hazel nut; inner sequence

SEQ ID NO: 16746 - DNA, 29 bp, Artificial Sequence
  Description of Artificial Sequence: Synthetic hazel nut; inner sequence
gcatgcgatgaacgaggcatgatgcgtca

SEQ ID NO: 16747 - DNA, 30 bp, Artificial Sequence; identical to SEQ ID NO: 589
  Description of Artificial Sequence: Synthetic hazel nut; inner sequence

SEQ ID NO: 16748 - DNA, 30 bp, Artificial Sequence
  Description of Artificial Sequence: Synthetic hazel nut; inner sequence
cgtaccaccgtgtgcatgtgatgcatggca

SEQ ID NO: 16749 - DNA, 30 bp, Artificial Sequence; identical to SEQ ID NO: 361
  Description of Artificial Sequence: Synthetic hazel nut; inner sequence

SEQ ID NO: 16750 - DNA, 30 bp, Artificial Sequence
  Description of Artificial Sequence: Synthetic hazel nut; inner sequence
ggcatgcgatgaacgaggtatgatgcgtca

SEQ ID NO: 16751 - DNA, 30 bp, Artificial Sequence; identical to SEQ ID NO: 486
  Description of Artificial Sequence: Synthetic hazel nut; inner sequence

SEQ ID NO: 16752 - DNA, 30 bp, Artificial Sequence
  Description of Artificial Sequence: Synthetic hazel nut; inner sequence
gcacgtcatgctgaccgaactgcctacgca

SEQ ID NO: 16753 - DNA, 30 bp, Artificial Sequence
  Description of Artificial Sequence: Synthetic hazel nut; inner sequence
cacacggaacgcacatggtggtacgacgcg

SEQ ID NO: 16754 - DNA, 30 bp, Artificial Sequence; identical to SEQ ID NO: 365
  Description of Artificial Sequence: Synthetic hazel nut; inner sequence

SEQ ID NO: 16755 - DNA, 30 bp, Artificial Sequence
  Description of Artificial Sequence: Synthetic hazel nut; inner sequence
gcgaggaacgtgcacatcgtccgctgcatg

SEQ ID NO: 16756 - DNA, 30 bp, Artificial Sequence; identical to SEQ ID NO: 866
  Description of Artificial Sequence: Synthetic hazel nut; inner sequence

SEQ ID NO: 16757 - DNA, 30 bp, Artificial Sequence; identical to SEQ ID NO: 916
  Description of Artificial Sequence: Synthetic hazel nut; inner sequence

SEQ ID NO: 16758 - DNA, 30 bp, Artificial Sequence; identical to SEQ ID NO: 4585
  Description of Artificial Sequence: Synthetic hazel nut; inner sequence

SEQ ID NO: 16759 - DNA, 30 bp, Artificial Sequence
  Description of Artificial Sequence: Synthetic hazel nut; inner sequence
tgcgcatgcatcgtcggcactgagcttgcc

SEQ ID NO: 16760 - DNA, 30 bp, Artificial Sequence; identical to SEQ ID NO: 884
  Description of Artificial Sequence: Synthetic hazel nut; inner sequence

SEQ ID NO: 16761 - DNA, 30 bp, Artificial Sequence
  Description of Artificial Sequence: Synthetic hazel nut; inner sequence
ccgacacgcatggtaaggtaggcaggcacg

SEQ ID NO: 16762 - DNA, 30 bp, Artificial Sequence; identical to SEQ ID NO: 166
  Description of Artificial Sequence: Synthetic hazel nut; inner sequence

SEQ ID NO: 16763 - DNA, 30 bp, Artificial Sequence; identical to SEQ ID NO: 4893
  Description of Artificial Sequence: Synthetic hazel nut; inner sequence

SEQ ID NO: 16764 - DNA, 30 bp, Artificial Sequence; identical to SEQ ID NO: 4238
  Description of Artificial Sequence: Synthetic hazel nut; inner sequence

SEQ ID NO: 16765 - DNA, 30 bp, Artificial Sequence
  Description of Artificial Sequence: Synthetic hazel nut; inner sequence
catgtgcgaacggacgtacacgtgtgatca

SEQ ID NO: 16766 - DNA, 30 bp, Artificial Sequence; identical to SEQ ID NO: 676
  Description of Artificial Sequence: Synthetic hazel nut; inner sequence

SEQ ID NO: 16767 - DNA, 30 bp, Artificial Sequence
  Description of Artificial Sequence: Synthetic hazel nut; inner sequence
cgaccacactcaggcacgtacggtatgtca

SEQ ID NO: 16768 - DNA, 30 bp, Artificial Sequence
  Description of Artificial Sequence: Synthetic hazel nut; inner sequence
cgcaccgtcgatacgtcatgcacgctgaga

SEQ ID NO: 16769 - DNA, 30 bp, Artificial Sequence
  Description of Artificial Sequence: Synthetic hazel nut; inner sequence
tgacgcagcgtaacgttcgagtggtacgta

SEQ ID NO: 16770 - DNA, 30 bp, Artificial Sequence
  Description of Artificial Sequence: Synthetic hazel nut; inner sequence
ggcatgcgatgaacgaggcatgatgcctca

SEQ ID NO: 16771 - DNA, 30 bp, Artificial Sequence; identical to SEQ ID NO: 914
  Description of Artificial Sequence: Synthetic hazel nut; inner sequence

SEQ ID NO: 16772 - DNA, 30 bp, Artificial Sequence; identical to SEQ ID NO: 720
  Description of Artificial Sequence: Synthetic hazel nut; inner sequence

SEQ ID NO: 16773 - DNA, 30 bp, Artificial Sequence; identical to SEQ ID NO: 867
  Description of Artificial Sequence: Synthetic hazel nut; inner sequence

SEQ ID NO: 16774 - DNA, 30 bp, Artificial Sequence
  Description of Artificial Sequence: Synthetic hazel nut; inner sequence
cacgacacgatgtccacgtcccgttcgcgc

SEQ ID NO: 16775 - DNA, 30 bp, Artificial Sequence; identical to SEQ ID NO: 989
  Description of Artificial Sequence: Synthetic hazel nut; inner sequence

SEQ ID NO: 16776 - DNA, 30 bp, Artificial Sequence
  Description of Artificial Sequence: Synthetic hazel nut; inner sequence
ggcatgcggtgaacgaggcatgatgcgtca

SEQ ID NO: 16777 - DNA, 30 bp, Artificial Sequence
  Description of Artificial Sequence: Synthetic hazel nut; inner sequence
cgcatggcaacatgtccgcacgcgtgcacg

SEQ ID NO: 16778 - DNA, 30 bp, Artificial Sequence
  Description of Artificial Sequence: Synthetic hazel nut; inner sequence
gccacgtcgatgcccaacgctcactgcgtg

SEQ ID NO: 16779 - DNA, 30 bp, Artificial Sequence; identical to SEQ ID NO: 719
  Description of Artificial Sequence: Synthetic hazel nut; inner sequence

SEQ ID NO: 16780 - DNA, 30 bp, Artificial Sequence; identical to SEQ ID NO: 318
  Description of Artificial Sequence: Synthetic hazel nut; inner sequence

SEQ ID NO: 16781 - DNA, 30 bp, Artificial Sequence
  Description of Artificial Sequence: Synthetic hazel nut; inner sequence
ggcacgatcgacatgtcacagtgctgcgca

SEQ ID NO: 16782 - DNA, 30 bp, Artificial Sequence; identical to SEQ ID NO: 330
  Description of Artificial Sequence: Synthetic hazel nut; inner sequence

SEQ ID NO: 16783 - DNA, 30 bp, Artificial Sequence
  Description of Artificial Sequence: Synthetic hazel nut; inner sequence
ggccgacgcggaacggtgcatgaccatgca

SEQ ID NO: 16784 - DNA, 30 bp, Artificial Sequence; identical to SEQ ID NO: 4875
  Description of Artificial Sequence: Synthetic hazel nut; inner sequence

SEQ ID NO: 16785 - DNA, 30 bp, Artificial Sequence
  Description of Artificial Sequence: Synthetic hazel nut; inner sequence
cgcgtcatgcgtaccgaacgtgtctgcgct

SEQ ID NO: 16786 - DNA, 30 bp, Artificial Sequence; identical to SEQ ID NO: 376
  Description of Artificial Sequence: Synthetic hazel nut; inner sequence

SEQ ID NO: 16787 - DNA, 30 bp, Artificial Sequence
  Description of Artificial Sequence: Synthetic hazel nut; inner sequence
ggcgtgcgatgaacgaggcatgatgcgtca

SEQ ID NO: 16788 - DNA, 30 bp, Artificial Sequence; identical to SEQ ID NO: 8792
  Description of Artificial Sequence: Synthetic hazel nut; inner sequence

SEQ ID NO: 16789 - DNA, 30 bp, Artificial Sequence; identical to SEQ ID NO: 8758
  Description of Artificial Sequence: Synthetic hazel nut; inner sequence

SEQ ID NO: 16790 - DNA, 30 bp, Artificial Sequence; identical to SEQ ID NO: 335
  Description of Artificial Sequence: Synthetic hazel nut; inner sequence

SEQ ID NO: 16791 - DNA, 30 bp, Artificial Sequence
  Description of Artificial Sequence: Synthetic hazel nut; inner sequence
cgtgcaacaggtcagtgacgacgctgtgcc

SEQ ID NO: 16792 - DNA, 30 bp, Artificial Sequence
  Description of Artificial Sequence: Synthetic hazel nut; inner sequence
tgacacaccgacgagcacgatgacttcgcg

SEQ ID NO: 16793 - DNA, 30 bp, Artificial Sequence
  Description of Artificial Sequence: Synthetic hazel nut; inner sequence
tgcgttgcatcgtacgtgtgcttgccgaca

SEQ ID NO: 16794 - DNA, 30 bp, Artificial Sequence
  Description of Artificial Sequence: Synthetic hazel nut; inner sequence
gatgtgccgcctcgacgtaccagctgcgac

SEQ ID NO: 16795 - DNA, 30 bp, Artificial Sequence
  Description of Artificial Sequence: Synthetic hazel nut; inner sequence
cacgtgacggcacgggaagtcatgtgcaca

SEQ ID NO: 16796 - DNA, 30 bp, Artificial Sequence; identical to SEQ ID NO: 128
  Description of Artificial Sequence: Synthetic hazel nut; inner sequence

SEQ ID NO: 16797 - DNA, 30 bp, Artificial Sequence; identical to SEQ ID NO: 218
  Description of Artificial Sequence: Synthetic hazel nut; inner sequence

SEQ ID NO: 16798 - DNA, 30 bp, Artificial Sequence; identical to SEQ ID NO: 636
  Description of Artificial Sequence: Synthetic hazel nut; inner sequence

SEQ ID NO: 16799 - DNA, 30 bp, Artificial Sequence
  Description of Artificial Sequence: Synthetic hazel nut; inner sequence
ggcatgcgatgaacgtggcatgatgcgtca

SEQ ID NO: 16800 - DNA, 30 bp, Artificial Sequence; identical to SEQ ID NO: 682
  Description of Artificial Sequence: Synthetic hazel nut; inner sequence

SEQ ID NO: 16801 - DNA, 30 bp, Artificial Sequence
  Description of Artificial Sequence: Synthetic hazel nut; inner sequence
ccatggcacacggacactaggtccatcgcg

SEQ ID NO: 16802 - DNA, 28 bp, Artificial Sequence
  Description of Artificial Sequence: Synthetic hazel nut; inner sequence
gtacgatgctgcccgacatgtgtacgtg

SEQ ID NO: 16803 - DNA, 30 bp, Artificial Sequence
  Description of Artificial Sequence: Synthetic hazel nut; inner sequence
cgacccgcatgtacgttggtgcgtgccgct

SEQ ID NO: 16804 - DNA, 30 bp, Artificial Sequence
  Description of Artificial Sequence: Synthetic hazel nut; inner sequence
cgcgtacgaagcacaggacgtcactgcacg

SEQ ID NO: 16805 - DNA, 30 bp, Artificial Sequence; identical to SEQ ID NO: 8925
  Description of Artificial Sequence: Synthetic hazel nut; inner sequence

SEQ ID NO: 16806 - DNA, 30 bp, Artificial Sequence; identical to SEQ ID NO: 337
  Description of Artificial Sequence: Synthetic hazel nut; inner sequence

SEQ ID NO: 16807 - DNA, 30 bp, Artificial Sequence; identical to SEQ ID NO: 4419
  Description of Artificial Sequence: Synthetic hazel nut; inner sequence

SEQ ID NO: 16808 - DNA, 30 bp, Artificial Sequence
  Description of Artificial Sequence: Synthetic hazel nut; inner sequence
ggcgtagggagcgtaccgtatcgtgcgtca

SEQ ID NO: 16809 - DNA, 30 bp, Artificial Sequence; identical to SEQ ID NO: 437
  Description of Artificial Sequence: Synthetic hazel nut; inner sequence

SEQ ID NO: 16810 - DNA, 30 bp, Artificial Sequence
  Description of Artificial Sequence: Synthetic hazel nut; inner sequence
ggcatgcgatggatgtgcgttgtgctcggc

SEQ ID NO: 16811 - DNA, 30 bp, Artificial Sequence
  Description of Artificial Sequence: Synthetic hazel nut; inner sequence
cgtgcagtcagcgcgtcaccatacggtgtg

SEQ ID NO: 16812 - DNA, 30 bp, Artificial Sequence; identical to SEQ ID NO: 8770
  Description of Artificial Sequence: Synthetic hazel nut; inner sequence

SEQ ID NO: 16813 - DNA, 30 bp, Artificial Sequence
  Description of Artificial Sequence: Synthetic hazel nut; inner sequence
gccactatgcctgcctgaccgtgacgcacg

SEQ ID NO: 16814 - DNA, 30 bp, Artificial Sequence
  Description of Artificial Sequence: Synthetic hazel nut; inner sequence
gcacgcagcgtacggtcactctgaggcaca

SEQ ID NO: 16815 - DNA, 30 bp, Artificial Sequence; identical to SEQ ID NO: 409
  Description of Artificial Sequence: Synthetic hazel nut; inner sequence

SEQ ID NO: 16816 - DNA, 30 bp, Artificial Sequence
  Description of Artificial Sequence: Synthetic hazel nut; inner sequence
ggccgacggaccgacgcaacgtactgcgtg

SEQ ID NO: 16817 - DNA, 30 bp, Artificial Sequence; identical to SEQ ID NO: 961
  Description of Artificial Sequence: Synthetic hazel nut; inner sequence

SEQ ID NO: 16818 - DNA, 30 bp, Artificial Sequence
  Description of Artificial Sequence: Synthetic hazel nut; inner sequence
aacgtgtgtgcgcaacgactgatgtacgtg

SEQ ID NO: 16819 - DNA, 30 bp, Artificial Sequence
  Description of Artificial Sequence: Synthetic hazel nut; inner sequence
acgtcaacgacaccgatgcacgtcactgcg

SEQ ID NO: 16820 - DNA, 30 bp, Artificial Sequence; identical to SEQ ID NO: 623
  Description of Artificial Sequence: Synthetic hazel nut; inner sequence

SEQ ID NO: 16821 - DNA, 30 bp, Artificial Sequence; identical to SEQ ID NO: 4817
  Description of Artificial Sequence: Synthetic hazel nut; inner sequence

SEQ ID NO: 16822 - DNA, 30 bp, Artificial Sequence; identical to SEQ ID NO: 637
  Description of Artificial Sequence: Synthetic hazel nut; inner sequence

SEQ ID NO: 16823 - DNA, 30 bp, Artificial Sequence; identical to SEQ ID NO: 647
  Description of Artificial Sequence: Synthetic hazel nut; inner sequence

SEQ ID NO: 16824 - DNA, 30 bp, Artificial Sequence
  Description of Artificial Sequence: Synthetic hazel nut; inner sequence
cgcacggtcgatacgtcatgcacgctgaca

SEQ ID NO: 16825 - DNA, 30 bp, Artificial Sequence
  Description of Artificial Sequence: Synthetic hazel nut; inner sequence
cgtgccgtaacagcaacgtacttggccaca

SEQ ID NO: 16826 - DNA, 30 bp, Artificial Sequence; identical to SEQ ID NO: 544
  Description of Artificial Sequence: Synthetic hazel nut; inner sequence

SEQ ID NO: 16827 - DNA, 30 bp, Artificial Sequence; identical to SEQ ID NO: 757
  Description of Artificial Sequence: Synthetic hazel nut; inner sequence

SEQ ID NO: 16828 - DNA, 30 bp, Artificial Sequence; identical to SEQ ID NO: 991
  Description of Artificial Sequence: Synthetic hazel nut; inner sequence

SEQ ID NO: 16829 - DNA, 30 bp, Artificial Sequence
  Description of Artificial Sequence: Synthetic hazel nut; inner sequence
cgcatcgcaatggccacgcgcaccgtcacg

SEQ ID NO: 16830 - DNA, 30 bp, Artificial Sequence; identical to SEQ ID NO: 8999
  Description of Artificial Sequence: Synthetic hazel nut; inner sequence

SEQ ID NO: 16831 - DNA, 30 bp, Artificial Sequence; identical to SEQ ID NO: 890
  Description of Artificial Sequence: Synthetic hazel nut; inner sequence

SEQ ID NO: 16832 - DNA, 30 bp, Artificial Sequence
  Description of Artificial Sequence: Synthetic hazel nut; inner sequence
cgcatcgtagccgtgtgccgtgtacgcagg

SEQ ID NO: 16833 - DNA, 30 bp, Artificial Sequence; identical to SEQ ID NO: 4710
  Description of Artificial Sequence: Synthetic hazel nut; inner sequence

SEQ ID NO: 16834 - DNA, 30 bp, Artificial Sequence; identical to SEQ ID NO: 4958
  Description of Artificial Sequence: Synthetic hazel nut; inner sequence

SEQ ID NO: 16835 - DNA, 30 bp, Artificial Sequence; identical to SEQ ID NO: 4852
  Description of Artificial Sequence: Synthetic hazel nut; inner sequence

SEQ ID NO: 16836 - DNA, 30 bp, Artificial Sequence
  Description of Artificial Sequence: Synthetic hazel nut; inner sequence
cgtgccacgacgtatgcctccgcagccacg

SEQ ID NO: 16837 - DNA, 30 bp, Artificial Sequence
  Description of Artificial Sequence: Synthetic hazel nut; inner sequence
gcgtcacagcgtggtacgtctcgcaccgtg

SEQ ID NO: 16838 - DNA, 30 bp, Artificial Sequence
  Description of Artificial Sequence: Synthetic hazel nut; inner sequence
cggcatgacggcaactgtgctacgtgcgcg

SEQ ID NO: 16839 - DNA, 30 bp, Artificial Sequence; identical to SEQ ID NO: 643
  Description of Artificial Sequence: Synthetic hazel nut; inner sequence

SEQ ID NO: 16840 - DNA, 30 bp, Artificial Sequence; identical to SEQ ID NO: 449
  Description of Artificial Sequence: Synthetic hazel nut; inner sequence

SEQ ID NO: 16841 - DNA, 30 bp, Artificial Sequence
  Description of Artificial Sequence: Synthetic hazel nut; inner sequence
cgaccaacgtgatgcaacgtgtacttcggc

SEQ ID NO: 16842 - DNA, 30 bp, Artificial Sequence; identical to SEQ ID NO: 349
  Description of Artificial Sequence: Synthetic hazel nut; inner sequence

SEQ ID NO: 16843 - DNA, 30 bp, Artificial Sequence; identical to SEQ ID NO: 260
  Description of Artificial Sequence: Synthetic hazel nut; inner sequence

SEQ ID NO: 16844 - DNA, 30 bp, Artificial Sequence
  Description of Artificial Sequence: Synthetic hazel nut; inner sequence
cgtgaacacgcacaatgacactgccgcacg

SEQ ID NO: 16845 - DNA, 30 bp, Artificial Sequence; identical to SEQ ID NO: 8860
  Description of Artificial Sequence: Synthetic hazel nut; inner sequence

SEQ ID NO: 16846 - DNA, 30 bp, Artificial Sequence
  Description of Artificial Sequence: Synthetic hazel nut; inner sequence
ggcatgcgatgaacgaggcatgatgcgtaa

SEQ ID NO: 16847 - DNA, 30 bp, Artificial Sequence
  Description of Artificial Sequence: Synthetic hazel nut; inner sequence
gcaccacgccgacaatgtacgctgctgacc

SEQ ID NO: 16848 - DNA, 30 bp, Artificial Sequence
  Description of Artificial Sequence: Synthetic hazel nut; inner sequence
cgacacggaccgacctgcgaactgcacgcg

SEQ ID NO: 16849 - DNA, 30 bp, Artificial Sequence
  Description of Artificial Sequence: Synthetic hazel nut; inner sequence
gcgaatgcaccgacacgtccctcacgcacg

SEQ ID NO: 16850 - DNA, 30 bp, Artificial Sequence; identical to SEQ ID NO: 585
  Description of Artificial Sequence: Synthetic hazel nut; inner sequence

SEQ ID NO: 16851 - DNA, 30 bp, Artificial Sequence
  Description of Artificial Sequence: Synthetic hazel nut; inner sequence
cgtgcgtagcgaccaaccgtcaacgtggcc

SEQ ID NO: 16852 - DNA, 30 bp, Artificial Sequence; identical to SEQ ID NO: 4579
  Description of Artificial Sequence: Synthetic hazel nut; inner sequence

SEQ ID NO: 16853 - DNA, 30 bp, Artificial Sequence
  Description of Artificial Sequence: Synthetic hazel nut; inner sequence
cgacacgacgacctgcacgctacgtgaatg

SEQ ID NO: 16854 - DNA, 30 bp, Artificial Sequence; identical to SEQ ID NO: 770
  Description of Artificial Sequence: Synthetic hazel nut; inner sequence

SEQ ID NO: 16855 - DNA, 30 bp, Artificial Sequence
  Description of Artificial Sequence: Synthetic hazel nut; inner sequence
ggaccgaacgtgtacggcagatacgtggca

SEQ ID NO: 16856 - DNA, 30 bp, Artificial Sequence; identical to SEQ ID NO: 4956
  Description of Artificial Sequence: Synthetic hazel nut; inner sequence

SEQ ID NO: 16857 - DNA, 30 bp, Artificial Sequence; identical to SEQ ID NO: 375
  Description of Artificial Sequence: Synthetic hazel nut; inner sequence

SEQ ID NO: 16858 - DNA, 30 bp, Artificial Sequence; identical to SEQ ID NO: 271
  Description of Artificial Sequence: Synthetic hazel nut; inner sequence

SEQ ID NO: 16859 - DNA, 30 bp, Artificial Sequence
  Description of Artificial Sequence: Synthetic hazel nut; inner sequence
cacgtgcacgtggcgtcgttggcctacgcg

SEQ ID NO: 16860 - DNA, 30 bp, Artificial Sequence; identical to SEQ ID NO: 4273
  Description of Artificial Sequence: Synthetic hazel nut; inner sequence

SEQ ID NO: 16861 - DNA, 30 bp, Artificial Sequence
  Description of Artificial Sequence: Synthetic hazel nut; inner sequence
cgtcacgcagacgtagtgccgcagtacgca

SEQ ID NO: 16862 - DNA, 30 bp, Artificial Sequence
  Description of Artificial Sequence: Synthetic hazel nut; inner sequence
ggcatgcgattaacgaggcatgatgcgtca

SEQ ID NO: 16863 - DNA, 30 bp, Artificial Sequence
  Description of Artificial Sequence: Synthetic hazel nut; inner sequence
cgaccacacgtaagatggcctcgctgcacc

SEQ ID NO: 16864 - DNA, 30 bp, Artificial Sequence
  Description of Artificial Sequence: Synthetic hazel nut; inner sequence
cgacggcaggcacggtgacatcagtacgta

SEQ ID NO: 16865 - DNA, 30 bp, Artificial Sequence; identical to SEQ ID NO: 8994
  Description of Artificial Sequence: Synthetic hazel nut; inner sequence

SEQ ID NO: 16866 - DNA, 30 bp, Artificial Sequence
  Description of Artificial Sequence: Synthetic hazel nut; inner sequence
ggcacgcgatgaacgaggcatgatgcgtca

SEQ ID NO: 16867 - DNA, 30 bp, Artificial Sequence; identical to SEQ ID NO: 912
  Description of Artificial Sequence: Synthetic hazel nut; inner sequence

SEQ ID NO: 16868 - DNA, 30 bp, Artificial Sequence
  Description of Artificial Sequence: Synthetic hazel nut; inner sequence
gcgtagggcggacggacattgcacttcgcc

SEQ ID NO: 16869 - DNA, 30 bp, Artificial Sequence
  Description of Artificial Sequence: Synthetic hazel nut; inner sequence
cgaacgcacaaggcaacgtacgcgcagtca

SEQ ID NO: 16870 - DNA, 30 bp, Artificial Sequence; identical to SEQ ID NO: 307
  Description of Artificial Sequence: Synthetic hazel nut; inner sequence

SEQ ID NO: 16871 - DNA, 30 bp, Artificial Sequence; identical to SEQ ID NO: 883
  Description of Artificial Sequence: Synthetic hazel nut; inner sequence

SEQ ID NO: 16872 - DNA, 29 bp, Artificial Sequence
  Description of Artificial Sequence: Synthetic hazel nut; inner sequence
ggcatgcgatggatgtggtggtgctgtca

SEQ ID NO: 16873 - DNA, 30 bp, Artificial Sequence
  Description of Artificial Sequence: Synthetic hazel nut; inner sequence
acgactcgacctaaccgtactacgtgtgcg

SEQ ID NO: 16874 - DNA, 30 bp, Artificial Sequence; identical to SEQ ID NO: 684
  Description of Artificial Sequence: Synthetic hazel nut; inner sequence

SEQ ID NO: 16875 - DNA, 30 bp, Artificial Sequence; identical to SEQ ID NO: 728
  Description of Artificial Sequence: Synthetic hazel nut; inner sequence

SEQ ID NO: 16876 - DNA, 30 bp, Artificial Sequence
  Description of Artificial Sequence: Synthetic hazel nut; inner sequence
cgtaacgtaccacggtgcgtctgtgcgtcc

SEQ ID NO: 16877 - DNA, 30 bp, Artificial Sequence
  Description of Artificial Sequence: Synthetic hazel nut; inner sequence
acgtcgcagcgtaacggttgggatgtgaca

SEQ ID NO: 16878 - DNA, 30 bp, Artificial Sequence
  Description of Artificial Sequence: Synthetic hazel nut; inner sequence
ccatgcaggacgtagcgtgaccgttgcaca

SEQ ID NO: 16879 - DNA, 30 bp, Artificial Sequence
  Description of Artificial Sequence: Synthetic hazel nut; inner sequence
cacgtatgcgtaacggacatgcgcttcact

SEQ ID NO: 16880 - DNA, 30 bp, Artificial Sequence
  Description of Artificial Sequence: Synthetic hazel nut; inner sequence
tcgcaccgtgacagtgaggcattgtggaca

SEQ ID NO: 16881 - DNA, 30 bp, Artificial Sequence; identical to SEQ ID NO: 645
  Description of Artificial Sequence: Synthetic hazel nut; inner sequence

SEQ ID NO: 16882 - DNA, 30 bp, Artificial Sequence; identical to SEQ ID NO: 932
  Description of Artificial Sequence: Synthetic hazel nut; inner sequence

SEQ ID NO: 16883 - DNA, 30 bp, Artificial Sequence
  Description of Artificial Sequence: Synthetic hazel nut; inner sequence
gcatacggaacgaacgtaatggacgacgta

SEQ ID NO: 16884 - DNA, 30 bp, Artificial Sequence
  Description of Artificial Sequence: Synthetic hazel nut; inner sequence
cgtgcagcttgacgtacggttggccacgta

SEQ ID NO: 16885 - DNA, 30 bp, Artificial Sequence; identical to SEQ ID NO: 4960
  Description of Artificial Sequence: Synthetic hazel nut; inner sequence

SEQ ID NO: 16886 - DNA, 30 bp, Artificial Sequence
  Description of Artificial Sequence: Synthetic hazel nut; inner sequence
ccgtcggcacacaggtccactcgctacgca

SEQ ID NO: 16887 - DNA, 30 bp, Artificial Sequence; identical to SEQ ID NO: 849
  Description of Artificial Sequence: Synthetic hazel nut; inner sequence

SEQ ID NO: 16888 - DNA, 30 bp, Artificial Sequence
  Description of Artificial Sequence: Synthetic hazel nut; inner sequence
agtgtgccgatgcgtccctatcacgtggca

SEQ ID NO: 16889 - DNA, 30 bp, Artificial Sequence; identical to SEQ ID NO: 4655
  Description of Artificial Sequence: Synthetic hazel nut; inner sequence

SEQ ID NO: 16890 - DNA, 30 bp, Artificial Sequence
  Description of Artificial Sequence: Synthetic hazel nut; inner sequence
cgatccgacgaacgtgcgtgtcacatcgcg

SEQ ID NO: 16891 - DNA, 30 bp, Artificial Sequence
  Description of Artificial Sequence: Synthetic hazel nut; inner sequence
cggtgcagcgtgcatcggaaggtggcgtga

SEQ ID NO: 16892 - DNA, 30 bp, Artificial Sequence
  Description of Artificial Sequence: Synthetic hazel nut; inner sequence
ggcatgcgatgaacgaggcatggtgcgtca

SEQ ID NO: 16893 - DNA, 30 bp, Artificial Sequence; identical to SEQ ID NO: 395
  Description of Artificial Sequence: Synthetic hazel nut; inner sequence

SEQ ID NO: 16894 - DNA, 30 bp, Artificial Sequence; identical to SEQ ID NO: 4401
  Description of Artificial Sequence: Synthetic hazel nut; inner sequence

SEQ ID NO: 16895 - DNA, 30 bp, Artificial Sequence
  Description of Artificial Sequence: Synthetic hazel nut; inner sequence
ccatgcgtgcaacctcgcccttacgtagcg

SEQ ID NO: 16896 - DNA, 30 bp, Artificial Sequence
  Description of Artificial Sequence: Synthetic hazel nut; inner sequence
gcggcacacgtaccttccttgcgcatgggc

SEQ ID NO: 16897 - DNA, 30 bp, Artificial Sequence; identical to SEQ ID NO: 514
  Description of Artificial Sequence: Synthetic hazel nut; inner sequence

SEQ ID NO: 16898 - DNA, 30 bp, Artificial Sequence; identical to SEQ ID NO: 602
  Description of Artificial Sequence: Synthetic hazel nut; inner sequence

SEQ ID NO: 16899 - DNA, 30 bp, Artificial Sequence
  Description of Artificial Sequence: Synthetic hazel nut; inner sequence
cgtgacgaacgtaggtcggtcagcttgcca

SEQ ID NO: 16900 - DNA, 30 bp, Artificial Sequence; identical to SEQ ID NO: 818
  Description of Artificial Sequence: Synthetic hazel nut; inner sequence

SEQ ID NO: 16901 - DNA, 30 bp, Artificial Sequence
  Description of Artificial Sequence: Synthetic hazel nut; inner sequence
cggtacggatgcatcctccttcacggcacg

SEQ ID NO: 16902 - DNA, 30 bp, Artificial Sequence; identical to SEQ ID NO: 906
  Description of Artificial Sequence: Synthetic hazel nut; inner sequence

SEQ ID NO: 16903 - DNA, 30 bp, Artificial Sequence; identical to SEQ ID NO: 4735
  Description of Artificial Sequence: Synthetic hazel nut; inner sequence

SEQ ID NO: 16904 - DNA, 30 bp, Artificial Sequence
  Description of Artificial Sequence: Synthetic hazel nut; inner sequence
tcggtacgtagcatggatcgttgcgacacg

SEQ ID NO: 16905 - DNA, 30 bp, Artificial Sequence; identical to SEQ ID NO: 75
  Description of Artificial Sequence: Synthetic hazel nut; inner sequence

SEQ ID NO: 16906 - DNA, 30 bp, Artificial Sequence
  Description of Artificial Sequence: Synthetic hazel nut; inner sequence
cgtgacgcacaacaaggcatgtgaggcaca

SEQ ID NO: 16907 - DNA, 30 bp, Artificial Sequence
  Description of Artificial Sequence: Synthetic hazel nut; inner sequence
cgcaaggcatgtcgcactctcaccgtgacg

SEQ ID NO: 16908 - DNA, 30 bp, Artificial Sequence
  Description of Artificial Sequence: Synthetic hazel nut; inner sequence
ggtgacacaacggaggtacgtcgctgcacg

SEQ ID NO: 16909 - DNA, 30 bp, Artificial Sequence; identical to SEQ ID NO: 4948
  Description of Artificial Sequence: Synthetic hazel nut; inner sequence

SEQ ID NO: 16910 - DNA, 30 bp, Artificial Sequence; identical to SEQ ID NO: 8712
  Description of Artificial Sequence: Synthetic hazel nut; inner sequence

SEQ ID NO: 16911 - DNA, 30 bp, Artificial Sequence
  Description of Artificial Sequence: Synthetic hazel nut; inner sequence
gcaatcaggcacactgaccctctcagcacg

SEQ ID NO: 16912 - DNA, 30 bp, Artificial Sequence
  Description of Artificial Sequence: Synthetic hazel nut; inner sequence
acgtgcggaacgtcgatcgctgccttgtcc

SEQ ID NO: 16913 - DNA, 30 bp, Artificial Sequence; identical to SEQ ID NO: 12869
  Description of Artificial Sequence: Synthetic hazel nut; inner sequence

SEQ ID NO: 16914 - DNA, 30 bp, Artificial Sequence
  Description of Artificial Sequence: Synthetic hazel nut; inner sequence
cggaccgaagagtgcacgtgctacgtaacg

SEQ ID NO: 16915 - DNA, 30 bp, Artificial Sequence; identical to SEQ ID NO: 480
  Description of Artificial Sequence: Synthetic hazel nut; inner sequence

SEQ ID NO: 16916 - DNA, 30 bp, Artificial Sequence; identical to SEQ ID NO: 4971
  Description of Artificial Sequence: Synthetic hazel nut; inner sequence

SEQ ID NO: 16917 - DNA, 30 bp, Artificial Sequence
  Description of Artificial Sequence: Synthetic hazel nut; inner sequence
ggacgcgcatgaccgtcggatcgcgacaca

SEQ ID NO: 16918 - DNA, 30 bp, Artificial Sequence
  Description of Artificial Sequence: Synthetic hazel nut; inner sequence
gcaacgcatgacgcaggccagcacttcgca

SEQ ID NO: 16919 - DNA, 30 bp, Artificial Sequence; identical to SEQ ID NO: 903
  Description of Artificial Sequence: Synthetic hazel nut; inner sequence

SEQ ID NO: 16920 - DNA, 30 bp, Artificial Sequence; identical to SEQ ID NO: 4552
  Description of Artificial Sequence: Synthetic hazel nut; inner sequence

SEQ ID NO: 16921 - DNA, 30 bp, Artificial Sequence; identical to SEQ ID NO: 531
  Description of Artificial Sequence: Synthetic hazel nut; inner sequence

SEQ ID NO: 16922 - DNA, 30 bp, Artificial Sequence; identical to SEQ ID NO: 8756
  Description of Artificial Sequence: Synthetic hazel nut; inner sequence

SEQ ID NO: 16923 - DNA, 30 bp, Artificial Sequence
  Description of Artificial Sequence: Synthetic hazel nut; inner sequence
ggcacacgtgatggacgacgttcccgatgc

SEQ ID NO: 16924 - DNA, 30 bp, Artificial Sequence; identical to SEQ ID NO: 679
  Description of Artificial Sequence: Synthetic hazel nut; inner sequence

SEQ ID NO: 16925 - DNA, 30 bp, Artificial Sequence
  Description of Artificial Sequence: Synthetic hazel nut; inner sequence
cgcgcagtgaccgcatgttccctcgtcaca

SEQ ID NO: 16926 - DNA, 30 bp, Artificial Sequence
  Description of Artificial Sequence: Synthetic hazel nut; inner sequence
gaccacgcgcatgaccgtacgtgcaccatg

SEQ ID NO: 16927 - DNA, 25 bp, Artificial Sequence
  Description of Artificial Sequence: Synthetic hazel nut; inner sequence
cgcaccgtcaagcaggcacgtgtca

SEQ ID NO: 16928 - DNA, 30 bp, Artificial Sequence
  Description of Artificial Sequence: Synthetic hazel nut; inner sequence
agcgtggcacggtacggatacgttggcaca

SEQ ID NO: 16929 - DNA, 30 bp, Artificial Sequence; identical to SEQ ID NO: 8968
  Description of Artificial Sequence: Synthetic hazel nut; inner sequence

SEQ ID NO: 16930 - DNA, 30 bp, Artificial Sequence
  Description of Artificial Sequence: Synthetic hazel nut; inner sequence
gcatcatgaccctcactgaccgcatgcgcg

SEQ ID NO: 16931 - DNA, 30 bp, Artificial Sequence
  Description of Artificial Sequence: Synthetic hazel nut; inner sequence
cgcaccgtcgatacgtcatgcaggctgaca

SEQ ID NO: 16932 - DNA, 30 bp, Artificial Sequence
  Description of Artificial Sequence: Synthetic hazel nut; inner sequence
cgaccacgtggcatgacggcgtgcgacgta

SEQ ID NO: 16933 - DNA, 30 bp, Artificial Sequence
  Description of Artificial Sequence: Synthetic hazel nut; inner sequence
cgtcgcgacgagcaaggtgaacgtgtcccg

SEQ ID NO: 16934 - DNA, 30 bp, Artificial Sequence; identical to SEQ ID NO: 4384
  Description of Artificial Sequence: Synthetic hazel nut; inner sequence

SEQ ID NO: 16935 - DNA, 30 bp, Artificial Sequence; identical to SEQ ID NO: 655
  Description of Artificial Sequence: Synthetic hazel nut; inner sequence

SEQ ID NO: 16936 - DNA, 30 bp, Artificial Sequence
  Description of Artificial Sequence: Synthetic hazel nut; inner sequence
gcagcacggcatgtgacgtattcccgctgc

SEQ ID NO: 16937 - DNA, 30 bp, Artificial Sequence
  Description of Artificial Sequence: Synthetic hazel nut; inner sequence
acatgcgcatcgagcctacctgtacgcaca

SEQ ID NO: 16938 - DNA, 30 bp, Artificial Sequence
  Description of Artificial Sequence: Synthetic hazel nut; inner sequence
acacgacatgaggacgatacgcaccgtgcc

SEQ ID NO: 16939 - DNA, 30 bp, Artificial Sequence; identical to SEQ ID NO: 441
  Description of Artificial Sequence: Synthetic hazel nut; inner sequence

SEQ ID NO: 16940 - DNA, 26 bp, Artificial Sequence
  Description of Artificial Sequence: Synthetic hazel nut; inner sequence
gcatgggtgcgatcgtaacgcgtggt

SEQ ID NO: 16941 - DNA, 30 bp, Artificial Sequence
  Description of Artificial Sequence: Synthetic hazel nut; inner sequence
gcatcacaacatcatgccgtgatctgcaca

SEQ ID NO: 16942 - DNA, 30 bp, Artificial Sequence
  Description of Artificial Sequence: Synthetic hazel nut; inner sequence
gtcaccacgacgatgagcgccatgtcgacg

SEQ ID NO: 16943 - DNA, 30 bp, Artificial Sequence
  Description of Artificial Sequence: Synthetic hazel nut; inner sequence
cgtacggcacgcgacatgacatccgccatg

SEQ ID NO: 16944 - DNA, 30 bp, Artificial Sequence
  Description of Artificial Sequence: Synthetic hazel nut; inner sequence
gcacacagcacgatgactgcactgatcggt

SEQ ID NO: 16945 - DNA, 30 bp, Artificial Sequence; identical to SEQ ID NO: 4861
  Description of Artificial Sequence: Synthetic hazel nut; inner sequence

SEQ ID NO: 16946 - DNA, 30 bp, Artificial Sequence; identical to SEQ ID NO: 4611
  Description of Artificial Sequence: Synthetic hazel nut; inner sequence

SEQ ID NO: 16947 - DNA, 30 bp, Artificial Sequence; identical to SEQ ID NO: 570
  Description of Artificial Sequence: Synthetic hazel nut; inner sequence

SEQ ID NO: 16948 - DNA, 30 bp, Artificial Sequence
  Description of Artificial Sequence: Synthetic hazel nut; inner sequence
gcgtgtcagcaatacgtcctcatctgcacg

SEQ ID NO: 16949 - DNA, 30 bp, Artificial Sequence
  Description of Artificial Sequence: Synthetic hazel nut; inner sequence
cgtaccgcaagcgacgtgtccgtgccgtga

SEQ ID NO: 16950 - DNA, 30 bp, Artificial Sequence
  Description of Artificial Sequence: Synthetic hazel nut; inner sequence
cacgcagtgacgcatgtgcaccacgacgcg

SEQ ID NO: 16951 - DNA, 30 bp, Artificial Sequence
  Description of Artificial Sequence: Synthetic hazel nut; inner sequence
ggcacaccacaggtacgcatcgcctcggtc

SEQ ID NO: 16952 - DNA, 30 bp, Artificial Sequence
  Description of Artificial Sequence: Synthetic hazel nut; inner sequence
cgtaccacgcgaggacaagcatgggtcacg

SEQ ID NO: 16953 - DNA, 30 bp, Artificial Sequence
  Description of Artificial Sequence: Synthetic hazel nut; inner sequence
caacgcgcaacggtgaggtaggcctgagca

SEQ ID NO: 16954 - DNA, 30 bp, Artificial Sequence
  Description of Artificial Sequence: Synthetic hazel nut; inner sequence
gcacaaggcgataccgtccgcaacgccacg

SEQ ID NO: 16955 - DNA, 30 bp, Artificial Sequence
  Description of Artificial Sequence: Synthetic hazel nut; inner sequence
ccgacgatgcagtgtggcgtaacgtgcatg

SEQ ID NO: 16956 - DNA, 30 bp, Artificial Sequence
  Description of Artificial Sequence: Synthetic hazel nut; inner sequence
cgcaacgcaagatggtgcccgtcctgcacg

SEQ ID NO: 16957 - DNA, 30 bp, Artificial Sequence
  Description of Artificial Sequence: Synthetic hazel nut; inner sequence
tggacgcaacgaaacgtacgccacttcgcg

SEQ ID NO: 16958 - DNA, 30 bp, Artificial Sequence; identical to SEQ ID NO: 4254
  Description of Artificial Sequence: Synthetic hazel nut; inner sequence

SEQ ID NO: 16959 - DNA, 31 bp, Artificial Sequence; identical to SEQ ID NO: 652
  Description of Artificial Sequence: Synthetic hazel nut; inner sequence

SEQ ID NO: 16960 - DNA, 30 bp, Artificial Sequence; identical to SEQ ID NO: 784
  Description of Artificial Sequence: Synthetic hazel nut; inner sequence

SEQ ID NO: 16961 - DNA, 30 bp, Artificial Sequence; identical to SEQ ID NO: 601
  Description of Artificial Sequence: Synthetic hazel nut; inner sequence

SEQ ID NO: 16962 - DNA, 30 bp, Artificial Sequence
  Description of Artificial Sequence: Synthetic hazel nut; inner sequence
ggcatgcgcgtaccatcgagggggcgtgga

SEQ ID NO: 16963 - DNA, 30 bp, Artificial Sequence; identical to SEQ ID NO: 187
  Description of Artificial Sequence: Synthetic hazel nut; inner sequence

SEQ ID NO: 16964 - DNA, 30 bp, Artificial Sequence
  Description of Artificial Sequence: Synthetic hazel nut; inner sequence
gcacggaacgcaatgtacgtagcgtcgaca

SEQ ID NO: 16965 - DNA, 30 bp, Artificial Sequence
  Description of Artificial Sequence: Synthetic hazel nut; inner sequence
acggcacggacactacggcatgtacgcata

SEQ ID NO: 16966 - DNA, 30 bp, Artificial Sequence
  Description of Artificial Sequence: Synthetic hazel nut; inner sequence
cgtgacgcacatggcacacaccgctacgcg

SEQ ID NO: 16967 - DNA, 30 bp, Artificial Sequence; identical to SEQ ID NO: 811
  Description of Artificial Sequence: Synthetic hazel nut; inner sequence

SEQ ID NO: 16968 - DNA, 30 bp, Artificial Sequence
  Description of Artificial Sequence: Synthetic hazel nut; inner sequence
cctgcctcgtgcctggacgctccatgcgcg

SEQ ID NO: 16969 - DNA, 30 bp, Artificial Sequence; identical to SEQ ID NO: 4590
  Description of Artificial Sequence: Synthetic hazel nut; inner sequence

SEQ ID NO: 16970 - DNA, 30 bp, Artificial Sequence
  Description of Artificial Sequence: Synthetic hazel nut; inner sequence
gcgcatgcaaggcacggtacgtactgcgca

SEQ ID NO: 16971 - DNA, 30 bp, Artificial Sequence; identical to SEQ ID NO: 768
  Description of Artificial Sequence: Synthetic hazel nut; inner sequence

SEQ ID NO: 16972 - DNA, 30 bp, Artificial Sequence; identical to SEQ ID NO: 677
  Description of Artificial Sequence: Synthetic hazel nut; inner sequence

SEQ ID NO: 16973 - DNA, 30 bp, Artificial Sequence
  Description of Artificial Sequence: Synthetic hazel nut; inner sequence
ggccgaacggacgtacgtgcacgcagcccg

SEQ ID NO: 16974 - DNA, 30 bp, Artificial Sequence; identical to SEQ ID NO: 574
  Description of Artificial Sequence: Synthetic hazel nut; inner sequence

SEQ ID NO: 16975 - DNA, 30 bp, Artificial Sequence
  Description of Artificial Sequence: Synthetic hazel nut; inner sequence
cgatggccgaacgaagcacgttgctacgcg

SEQ ID NO: 16976 - DNA, 30 bp, Artificial Sequence
  Description of Artificial Sequence: Synthetic hazel nut; inner sequence
ccgtcacatggatcggacctgatgcgcacc

SEQ ID NO: 16977 - DNA, 30 bp, Artificial Sequence; identical to SEQ ID NO: 341
  Description of Artificial Sequence: Synthetic hazel nut; inner sequence

SEQ ID NO: 16978 - DNA, 30 bp, Artificial Sequence
  Description of Artificial Sequence: Synthetic hazel nut; inner sequence
cgtgacacgaacgcgatgtacgatgcgaca

SEQ ID NO: 16979 - DNA, 30 bp, Artificial Sequence
  Description of Artificial Sequence: Synthetic hazel nut; inner sequence
acgatgcggcatacgtacgctacgtggcca

SEQ ID NO: 16980 - DNA, 30 bp, Artificial Sequence
  Description of Artificial Sequence: Synthetic hazel nut; inner sequence
cgtgccgccaccctgaccgatgcgtggtga

SEQ ID NO: 16981 - DNA, 30 bp, Artificial Sequence; identical to SEQ ID NO: 555
  Description of Artificial Sequence: Synthetic hazel nut; inner sequence

SEQ ID NO: 16982 - DNA, 30 bp, Artificial Sequence
  Description of Artificial Sequence: Synthetic hazel nut; inner sequence
ggcatgggatgaacgaggcatgatgcgtca

SEQ ID NO: 16983 - DNA, 30 bp, Artificial Sequence; identical to SEQ ID NO: 403
  Description of Artificial Sequence: Synthetic hazel nut; inner sequence

SEQ ID NO: 16984 - DNA, 30 bp, Artificial Sequence
  Description of Artificial Sequence: Synthetic hazel nut; inner sequence
ccgtgcgcatgaacggtatggtgcttcgtg

SEQ ID NO: 16985 - DNA, 30 bp, Artificial Sequence
  Description of Artificial Sequence: Synthetic hazel nut; inner sequence
gcgtgtgcgtacgatgacctgcgatgcgcc

SEQ ID NO: 16986 - DNA, 30 bp, Artificial Sequence
  Description of Artificial Sequence: Synthetic hazel nut; inner sequence
gcgtgcgatgaccggatcgtgccatgcgga

SEQ ID NO: 16987 - DNA, 30 bp, Artificial Sequence
  Description of Artificial Sequence: Synthetic hazel nut; inner sequence
tgacagcatggccaaacgacatcgtgcaca

SEQ ID NO: 16988 - DNA, 30 bp, Artificial Sequence
  Description of Artificial Sequence: Synthetic hazel nut; inner sequence
gcaatgcacacgtacgaccttcgcgccacg

SEQ ID NO: 16989 - DNA, 30 bp, Artificial Sequence
  Description of Artificial Sequence: Synthetic hazel nut; inner sequence
ggcaacacggtgcacatcgggtacatcgcg

SEQ ID NO: 16990 - DNA, 30 bp, Artificial Sequence; identical to SEQ ID NO: 799
  Description of Artificial Sequence: Synthetic hazel nut; inner sequence

SEQ ID NO: 16991 - DNA, 30 bp, Artificial Sequence; identical to SEQ ID NO: 8579
  Description of Artificial Sequence: Synthetic hazel nut; inner sequence

SEQ ID NO: 16992 - DNA, 30 bp, Artificial Sequence; identical to SEQ ID NO: 4761
  Description of Artificial Sequence: Synthetic hazel nut; inner sequence

SEQ ID NO: 16993 - DNA, 30 bp, Artificial Sequence
  Description of Artificial Sequence: Synthetic hazel nut; inner sequence
cacgcagggaacgtatccgtccttgccgcg

SEQ ID NO: 16994 - DNA, 31 bp, Artificial Sequence; identical to SEQ ID NO: 971
  Description of Artificial Sequence: Synthetic hazel nut; inner sequence

SEQ ID NO: 16995 - DNA, 30 bp, Artificial Sequence; identical to SEQ ID NO: 621
  Description of Artificial Sequence: Synthetic hazel nut; inner sequence

SEQ ID NO: 16996 - DNA, 30 bp, Artificial Sequence; identical to SEQ ID NO: 901
  Description of Artificial Sequence: Synthetic hazel nut; inner sequence

SEQ ID NO: 16997 - DNA, 30 bp, Artificial Sequence
  Description of Artificial Sequence: Synthetic hazel nut; inner sequence
gcacacataccgttacgttgtggtgcacca

SEQ ID NO: 16998 - DNA, 30 bp, Artificial Sequence; identical to SEQ ID NO: 493
  Description of Artificial Sequence: Synthetic hazel nut; inner sequence

SEQ ID NO: 16999 - DNA, 30 bp, Artificial Sequence
  Description of Artificial Sequence: Synthetic hazel nut; inner sequence
ggcatgcgttgaacgaggcatgatgcgtca

SEQ ID NO: 17000 - DNA, 30 bp, Artificial Sequence
  Description of Artificial Sequence: Synthetic hazel nut; inner sequence
gcaaccacagcacatcgacgccctcgcacc

SEQ ID NO: 17001 - DNA, 30 bp, Artificial Sequence
  Description of Artificial Sequence: Synthetic hazel nut; inner sequence
cacgacaagcacacatgtcctgcctgcacg

SEQ ID NO: 17002 - DNA, 30 bp, Artificial Sequence; identical to SEQ ID NO: 891
  Description of Artificial Sequence: Synthetic hazel nut; inner sequence

SEQ ID NO: 17003 - DNA, 53 bp, Artificial Sequence; identical to SEQ ID NO: 1003
  Description of Artificial Sequence: Synthetic hazel nut; 5' sequence and inner sequence

SEQ ID NO: 17004 - DNA, 53 bp, Artificial Sequence; identical to SEQ ID NO: 1010
  Description of Artificial Sequence: Synthetic hazel nut; 5' sequence and inner sequence

SEQ ID NO: 17005 - DNA, 53 bp, Artificial Sequence; identical to SEQ ID NO: 1004
  Description of Artificial Sequence: Synthetic hazel nut; 5' sequence and inner sequence

SEQ ID NO: 17006 - DNA, 53 bp, Artificial Sequence; identical to SEQ ID NO: 1008
  Description of Artificial Sequence: Synthetic hazel nut; 5' sequence and inner sequence

SEQ ID NO: 17007 - DNA, 53 bp, Artificial Sequence; identical to SEQ ID NO: 1006
  Description of Artificial Sequence: Synthetic hazel nut; 5' sequence and inner sequence

SEQ ID NO: 17008 - DNA, 53 bp, Artificial Sequence; identical to SEQ ID NO: 1005
  Description of Artificial Sequence: Synthetic hazel nut; 5' sequence and inner sequence

SEQ ID NO: 17009 - DNA, 53 bp, Artificial Sequence; identical to SEQ ID NO: 1020
  Description of Artificial Sequence: Synthetic hazel nut; 5' sequence and inner sequence

SEQ ID NO: 17010 - DNA, 53 bp, Artificial Sequence; identical to SEQ ID NO: 1036
  Description of Artificial Sequence: Synthetic hazel nut; 5' sequence and inner sequence

SEQ ID NO: 17011 - DNA, 53 bp, Artificial Sequence; identical to SEQ ID NO: 1009
  Description of Artificial Sequence: Synthetic hazel nut; 5' sequence and inner sequence

SEQ ID NO: 17012 - DNA, 53 bp, Artificial Sequence; identical to SEQ ID NO: 1007
  Description of Artificial Sequence: Synthetic hazel nut; 5' sequence and inner sequence

SEQ ID NO: 17013 - DNA, 53 bp, Artificial Sequence; identical to SEQ ID NO: 1012
  Description of Artificial Sequence: Synthetic hazel nut; 5' sequence and inner sequence

SEQ ID NO: 17014 - DNA, 53 bp, Artificial Sequence; identical to SEQ ID NO: 1040
  Description of Artificial Sequence: Synthetic hazel nut; 5' sequence and inner sequence

SEQ ID NO: 17015 - DNA, 53 bp, Artificial Sequence; identical to SEQ ID NO: 1011
  Description of Artificial Sequence: Synthetic hazel nut; 5' sequence and inner sequence

SEQ ID NO: 17016 - DNA, 53 bp, Artificial Sequence; identical to SEQ ID NO: 1045
  Description of Artificial Sequence: Synthetic hazel nut; 5' sequence and inner sequence

SEQ ID NO: 17017 - DNA, 53 bp, Artificial Sequence; identical to SEQ ID NO: 1023
  Description of Artificial Sequence: Synthetic hazel nut; 5' sequence and inner sequence

SEQ ID NO: 17018 - DNA, 53 bp, Artificial Sequence; identical to SEQ ID NO: 1030
  Description of Artificial Sequence: Synthetic hazel nut; 5' sequence and inner sequence

SEQ ID NO: 17019 - DNA, 53 bp, Artificial Sequence; identical to SEQ ID NO: 1022
  Description of Artificial Sequence: Synthetic hazel nut; 5' sequence and inner sequence

SEQ ID NO: 17020 - DNA, 53 bp, Artificial Sequence; identical to SEQ ID NO: 1108
  Description of Artificial Sequence: Synthetic hazel nut; 5' sequence and inner sequence

SEQ ID NO: 17021 - DNA, 53 bp, Artificial Sequence; identical to SEQ ID NO: 1021
  Description of Artificial Sequence: Synthetic hazel nut; 5' sequence and inner sequence

SEQ ID NO: 17022 - DNA, 53 bp, Artificial Sequence; identical to SEQ ID NO: 1014
  Description of Artificial Sequence: Synthetic hazel nut; 5' sequence and inner sequence

SEQ ID NO: 17023 - DNA, 53 bp, Artificial Sequence; identical to SEQ ID NO: 1044
  Description of Artificial Sequence: Synthetic hazel nut; 5' sequence and inner sequence

SEQ ID NO: 17024 - DNA, 53 bp, Artificial Sequence; identical to SEQ ID NO: 1129
  Description of Artificial Sequence: Synthetic hazel nut; 5' sequence and inner sequence

SEQ ID NO: 17025 - DNA, 53 bp, Artificial Sequence; identical to SEQ ID NO: 1028
  Description of Artificial Sequence: Synthetic hazel nut; 5' sequence and inner sequence

SEQ ID NO: 17026 - DNA, 53 bp, Artificial Sequence; identical to SEQ ID NO: 1041
  Description of Artificial Sequence: Synthetic hazel nut; 5' sequence and inner sequence

SEQ ID NO: 17027 - DNA, 53 bp, Artificial Sequence; identical to SEQ ID NO: 1033
  Description of Artificial Sequence: Synthetic hazel nut; 5' sequence and inner sequence

SEQ ID NO: 17028 - DNA, 52 bp, Artificial Sequence; identical to SEQ ID NO: 1193
  Description of Artificial Sequence: Synthetic hazel nut; 5' sequence and inner sequence

SEQ ID NO: 17029 - DNA, 53 bp, Artificial Sequence; identical to SEQ ID NO: 1079
  Description of Artificial Sequence: Synthetic hazel nut; 5' sequence and inner sequence

SEQ ID NO: 17030 - DNA, 53 bp, Artificial Sequence; identical to SEQ ID NO: 1052
  Description of Artificial Sequence: Synthetic hazel nut; 5' sequence and inner sequence

SEQ ID NO: 17031 - DNA, 53 bp, Artificial Sequence; identical to SEQ ID NO: 1046
  Description of Artificial Sequence: Synthetic hazel nut; 5' sequence and inner sequence

SEQ ID NO: 17032 - DNA, 53 bp, Artificial Sequence; identical to SEQ ID NO: 1016
  Description of Artificial Sequence: Synthetic hazel nut; 5' sequence and inner sequence

SEQ ID NO: 17033 - DNA, 53 bp, Artificial Sequence; identical to SEQ ID NO: 1060
  Description of Artificial Sequence: Synthetic hazel nut; 5' sequence and inner sequence

SEQ ID NO: 17034 - DNA, 53 bp, Artificial Sequence; identical to SEQ ID NO: 1017
  Description of Artificial Sequence: Synthetic hazel nut; 5' sequence and inner sequence

SEQ ID NO: 17035 - DNA, 53 bp, Artificial Sequence; identical to SEQ ID NO: 1013
  Description of Artificial Sequence: Synthetic hazel nut; 5' sequence and inner sequence

SEQ ID NO: 17036 - DNA, 53 bp, Artificial Sequence; identical to SEQ ID NO: 1025
  Description of Artificial Sequence: Synthetic hazel nut; 5' sequence and inner sequence

SEQ ID NO: 17037 - DNA, 53 bp, Artificial Sequence; identical to SEQ ID NO: 1077
  Description of Artificial Sequence: Synthetic hazel nut; 5' sequence and inner sequence

SEQ ID NO: 17038 - DNA, 53 bp, Artificial Sequence; identical to SEQ ID NO: 1018
  Description of Artificial Sequence: Synthetic hazel nut; 5' sequence and inner sequence

SEQ ID NO: 17039 - DNA, 53 bp, Artificial Sequence; identical to SEQ ID NO: 1051
  Description of Artificial Sequence: Synthetic hazel nut; 5' sequence and inner sequence

SEQ ID NO: 17040 - DNA, 53 bp, Artificial Sequence; identical to SEQ ID NO: 1015
  Description of Artificial Sequence: Synthetic hazel nut; 5' sequence and inner sequence

SEQ ID NO: 17041 - DNA, 53 bp, Artificial Sequence; identical to SEQ ID NO: 1049
  Description of Artificial Sequence: Synthetic hazel nut; 5' sequence and inner sequence

SEQ ID NO: 17042 - DNA, 53 bp, Artificial Sequence; identical to SEQ ID NO: 1050
  Description of Artificial Sequence: Synthetic hazel nut; 5' sequence and inner sequence

SEQ ID NO: 17043 - DNA, 53 bp, Artificial Sequence; identical to SEQ ID NO: 1064
  Description of Artificial Sequence: Synthetic hazel nut; 5' sequence and inner sequence

SEQ ID NO: 17044 - DNA, 53 bp, Artificial Sequence; identical to SEQ ID NO: 1053
  Description of Artificial Sequence: Synthetic hazel nut; 5' sequence and inner sequence

SEQ ID NO: 17045 - DNA, 53 bp, Artificial Sequence; identical to SEQ ID NO: 1098
  Description of Artificial Sequence: Synthetic hazel nut; 5' sequence and inner sequence

SEQ ID NO: 17046 - DNA, 53 bp, Artificial Sequence; identical to SEQ ID NO: 1088
  Description of Artificial Sequence: Synthetic hazel nut; 5' sequence and inner sequence

SEQ ID NO: 17047 - DNA, 53 bp, Artificial Sequence; identical to SEQ ID NO: 1074
  Description of Artificial Sequence: Synthetic hazel nut; 5' sequence and inner sequence

SEQ ID NO: 17048 - DNA, 53 bp, Artificial Sequence; identical to SEQ ID NO: 1247
  Description of Artificial Sequence: Synthetic hazel nut; 5' sequence and inner sequence

SEQ ID NO: 17049 - DNA, 53 bp, Artificial Sequence; identical to SEQ ID NO: 1037
  Description of Artificial Sequence: Synthetic hazel nut; 5' sequence and inner sequence

SEQ ID NO: 17050 - DNA, 53 bp, Artificial Sequence; identical to SEQ ID NO: 1096
  Description of Artificial Sequence: Synthetic hazel nut; 5' sequence and inner sequence

SEQ ID NO: 17051 - DNA, 53 bp, Artificial Sequence; identical to SEQ ID NO: 1131
  Description of Artificial Sequence: Synthetic hazel nut; 5' sequence and inner sequence

SEQ ID NO: 17052 - DNA, 53 bp, Artificial Sequence; identical to SEQ ID NO: 1178
  Description of Artificial Sequence: Synthetic hazel nut; 5' sequence and inner sequence

SEQ ID NO: 17053 - DNA, 53 bp, Artificial Sequence; identical to SEQ ID NO: 1066
  Description of Artificial Sequence: Synthetic hazel nut; 5' sequence and inner sequence

SEQ ID NO: 17054 - DNA, 53 bp, Artificial Sequence; identical to SEQ ID NO: 1081
  Description of Artificial Sequence: Synthetic hazel nut; 5' sequence and inner sequence

SEQ ID NO: 17055 - DNA, 53 bp, Artificial Sequence; identical to SEQ ID NO: 1115
  Description of Artificial Sequence: Synthetic hazel nut; 5' sequence and inner sequence

SEQ ID NO: 17056 - DNA, 53 bp, Artificial Sequence; identical to SEQ ID NO: 1138
  Description of Artificial Sequence: Synthetic hazel nut; 5' sequence and inner sequence

SEQ ID NO: 17057 - DNA, 53 bp, Artificial Sequence; identical to SEQ ID NO: 1034
  Description of Artificial Sequence: Synthetic hazel nut; 5' sequence and inner sequence

SEQ ID NO: 17058 - DNA, 53 bp, Artificial Sequence; identical to SEQ ID NO: 1073
  Description of Artificial Sequence: Synthetic hazel nut; 5' sequence and inner sequence

SEQ ID NO: 17059 - DNA, 52 bp, Artificial Sequence; identical to SEQ ID NO: 1070
  Description of Artificial Sequence: Synthetic hazel nut; 5' sequence and inner sequence

SEQ ID NO: 17060 - DNA, 53 bp, Artificial Sequence; identical to SEQ ID NO: 1519
  Description of Artificial Sequence: Synthetic hazel nut; 5' sequence and inner sequence

SEQ ID NO: 17061 - DNA, 53 bp, Artificial Sequence; identical to SEQ ID NO: 1172
  Description of Artificial Sequence: Synthetic hazel nut; 5' sequence and inner sequence

SEQ ID NO: 17062 - DNA, 53 bp, Artificial Sequence; identical to SEQ ID NO: 1185
  Description of Artificial Sequence: Synthetic hazel nut; 5' sequence and inner sequence

SEQ ID NO: 17063 - DNA, 53 bp, Artificial Sequence; identical to SEQ ID NO: 1255
  Description of Artificial Sequence: Synthetic hazel nut; 5' sequence and inner sequence

SEQ ID NO: 17064 - DNA, 53 bp, Artificial Sequence; identical to SEQ ID NO: 1067
  Description of Artificial Sequence: Synthetic hazel nut; 5' sequence and inner sequence

SEQ ID NO: 17065 - DNA, 53 bp, Artificial Sequence; identical to SEQ ID NO: 1281
  Description of Artificial Sequence: Synthetic hazel nut; 5' sequence and inner sequence

SEQ ID NO: 17066 - DNA, 53 bp, Artificial Sequence; identical to SEQ ID NO: 1035
  Description of Artificial Sequence: Synthetic hazel nut; 5' sequence and inner sequence

SEQ ID NO: 17067 - DNA, 53 bp, Artificial Sequence; identical to SEQ ID NO: 1057
  Description of Artificial Sequence: Synthetic hazel nut; 5' sequence and inner sequence

SEQ ID NO: 17068 - DNA, 53 bp, Artificial Sequence; identical to SEQ ID NO: 1038
  Description of Artificial Sequence: Synthetic hazel nut; 5' sequence and inner sequence

SEQ ID NO: 17069 - DNA, 53 bp, Artificial Sequence; identical to SEQ ID NO: 1029
  Description of Artificial Sequence: Synthetic hazel nut; 5' sequence and inner sequence

SEQ ID NO: 17070 - DNA, 53 bp, Artificial Sequence; identical to SEQ ID NO: 1366
  Description of Artificial Sequence: Synthetic hazel nut; 5' sequence and inner sequence

SEQ ID NO: 17071 - DNA, 53 bp, Artificial Sequence; identical to SEQ ID NO: 1054
  Description of Artificial Sequence: Synthetic hazel nut; 5' sequence and inner sequence

SEQ ID NO: 17072 - DNA, 53 bp, Artificial Sequence; identical to SEQ ID NO: 1526
  Description of Artificial Sequence: Synthetic hazel nut; 5' sequence and inner sequence

SEQ ID NO: 17073 - DNA, 53 bp, Artificial Sequence; identical to SEQ ID NO: 1031
  Description of Artificial Sequence: Synthetic hazel nut; 5' sequence and inner sequence

SEQ ID NO: 17074 - DNA, 53 bp, Artificial Sequence; identical to SEQ ID NO: 1470
  Description of Artificial Sequence: Synthetic hazel nut; 5' sequence and inner sequence

SEQ ID NO: 17075 - DNA, 53 bp, Artificial Sequence; identical to SEQ ID NO: 1090
  Description of Artificial Sequence: Synthetic hazel nut; 5' sequence and inner sequence

SEQ ID NO: 17076 - DNA, 53 bp, Artificial Sequence; identical to SEQ ID NO: 1285
  Description of Artificial Sequence: Synthetic hazel nut; 5' sequence and inner sequence

SEQ ID NO: 17077 - DNA, 53 bp, Artificial Sequence; identical to SEQ ID NO: 1032
  Description of Artificial Sequence: Synthetic hazel nut; 5' sequence and inner sequence

SEQ ID NO: 17078 - DNA, 53 bp, Artificial Sequence; identical to SEQ ID NO: 1055
  Description of Artificial Sequence: Synthetic hazel nut; 5' sequence and inner sequence

SEQ ID NO: 17079 - DNA, 53 bp, Artificial Sequence; identical to SEQ ID NO: 1042
  Description of Artificial Sequence: Synthetic hazel nut; 5' sequence and inner sequence

SEQ ID NO: 17080 - DNA, 53 bp, Artificial Sequence; identical to SEQ ID NO: 1080
  Description of Artificial Sequence: Synthetic hazel nut; 5' sequence and inner sequence

SEQ ID NO: 17081 - DNA, 53 bp, Artificial Sequence; identical to SEQ ID NO: 1061
  Description of Artificial Sequence: Synthetic hazel nut; 5' sequence and inner sequence

SEQ ID NO: 17082 - DNA, 53 bp, Artificial Sequence; identical to SEQ ID NO: 1059
  Description of Artificial Sequence: Synthetic hazel nut; 5' sequence and inner sequence

SEQ ID NO: 17083 - DNA, 53 bp, Artificial Sequence; identical to SEQ ID NO: 1219
  Description of Artificial Sequence: Synthetic hazel nut; 5' sequence and inner sequence

SEQ ID NO: 17084 - DNA, 53 bp, Artificial Sequence; identical to SEQ ID NO: 1144
  Description of Artificial Sequence: Synthetic hazel nut; 5' sequence and inner sequence

SEQ ID NO: 17085 - DNA, 53 bp, Artificial Sequence; identical to SEQ ID NO: 1102
  Description of Artificial Sequence: Synthetic hazel nut; 5' sequence and inner sequence

SEQ ID NO: 17086 - DNA, 53 bp, Artificial Sequence; identical to SEQ ID NO: 5356
  Description of Artificial Sequence: Synthetic hazel nut; 5' sequence and inner sequence

SEQ ID NO: 17087 - DNA, 53 bp, Artificial Sequence; identical to SEQ ID NO: 1048
  Description of Artificial Sequence: Synthetic hazel nut; 5' sequence and inner sequence

SEQ ID NO: 17088 - DNA, 53 bp, Artificial Sequence; identical to SEQ ID NO: 1024
  Description of Artificial Sequence: Synthetic hazel nut; 5' sequence and inner sequence

SEQ ID NO: 17089 - DNA, 53 bp, Artificial Sequence; identical to SEQ ID NO: 1203
  Description of Artificial Sequence: Synthetic hazel nut; 5' sequence and inner sequence

SEQ ID NO: 17090 - DNA, 53 bp, Artificial Sequence; identical to SEQ ID NO: 1019
  Description of Artificial Sequence: Synthetic hazel nut; 5' sequence and inner sequence

SEQ ID NO: 17091 - DNA, 53 bp, Artificial Sequence; identical to SEQ ID NO: 1188
  Description of Artificial Sequence: Synthetic hazel nut; 5' sequence and inner sequence

SEQ ID NO: 17092 - DNA, 53 bp, Artificial Sequence; identical to SEQ ID NO: 1151
  Description of Artificial Sequence: Synthetic hazel nut; 5' sequence and inner sequence

SEQ ID NO: 17093 - DNA, 53 bp, Artificial Sequence; identical to SEQ ID NO: 1062
  Description of Artificial Sequence: Synthetic hazel nut; 5' sequence and inner sequence

SEQ ID NO: 17094 - DNA, 53 bp, Artificial Sequence; identical to SEQ ID NO: 1152
  Description of Artificial Sequence: Synthetic hazel nut; 5' sequence and inner sequence

SEQ ID NO: 17095 - DNA, 53 bp, Artificial Sequence; identical to SEQ ID NO: 5469
  Description of Artificial Sequence: Synthetic hazel nut; 5' sequence and inner sequence

SEQ ID NO: 17096 - DNA, 53 bp, Artificial Sequence; identical to SEQ ID NO: 1111
  Description of Artificial Sequence: Synthetic hazel nut; 5' sequence and inner sequence

SEQ ID NO: 17097 - DNA, 53 bp, Artificial Sequence; identical to SEQ ID NO: 1063
  Description of Artificial Sequence: Synthetic hazel nut; 5' sequence and inner sequence

SEQ ID NO: 17098 - DNA, 53 bp, Artificial Sequence; identical to SEQ ID NO: 1084
  Description of Artificial Sequence: Synthetic hazel nut; 5' sequence and inner sequence

SEQ ID NO: 17099 - DNA, 53 bp, Artificial Sequence; identical to SEQ ID NO: 1613
  Description of Artificial Sequence: Synthetic hazel nut; 5' sequence and inner sequence

SEQ ID NO: 17100 - DNA, 53 bp, Artificial Sequence; identical to SEQ ID NO: 1230
  Description of Artificial Sequence: Synthetic hazel nut; 5' sequence and inner sequence

SEQ ID NO: 17101 - DNA, 53 bp, Artificial Sequence; identical to SEQ ID NO: 1097
  Description of Artificial Sequence: Synthetic hazel nut; 5' sequence and inner sequence

SEQ ID NO: 17102 - DNA, 53 bp, Artificial Sequence; identical to SEQ ID NO: 1195
  Description of Artificial Sequence: Synthetic hazel nut; 5' sequence and inner sequence

SEQ ID NO: 17103 - DNA, 53 bp, Artificial Sequence; identical to SEQ ID NO: 1229
  Description of Artificial Sequence: Synthetic hazel nut; 5' sequence and inner sequence

SEQ ID NO: 17104 - DNA, 53 bp, Artificial Sequence; identical to SEQ ID NO: 1136
  Description of Artificial Sequence: Synthetic hazel nut; 5' sequence and inner sequence

SEQ ID NO: 17105 - DNA, 53 bp, Artificial Sequence; identical to SEQ ID NO: 1197
  Description of Artificial Sequence: Synthetic hazel nut; 5' sequence and inner sequence

SEQ ID NO: 17106 - DNA, 53 bp, Artificial Sequence; identical to SEQ ID NO: 1245
  Description of Artificial Sequence: Synthetic hazel nut; 5' sequence and inner sequence

SEQ ID NO: 17107 - DNA, 53 bp, Artificial Sequence; identical to SEQ ID NO: 1117
  Description of Artificial Sequence: Synthetic hazel nut; 5' sequence and inner sequence

SEQ ID NO: 17108 - DNA, 53 bp, Artificial Sequence; identical to SEQ ID NO: 1171
  Description of Artificial Sequence: Synthetic hazel nut; 5' sequence and inner sequence

SEQ ID NO: 17109 - DNA, 53 bp, Artificial Sequence; identical to SEQ ID NO: 1068
  Description of Artificial Sequence: Synthetic hazel nut; 5' sequence and inner sequence

SEQ ID NO: 17110 - DNA, 53 bp, Artificial Sequence; identical to SEQ ID NO: 1325
  Description of Artificial Sequence: Synthetic hazel nut; 5' sequence and inner sequence

SEQ ID NO: 17111 - DNA, 53 bp, Artificial Sequence; identical to SEQ ID NO: 1149
  Description of Artificial Sequence: Synthetic hazel nut; 5' sequence and inner sequence

SEQ ID NO: 17112 - DNA, 53 bp, Artificial Sequence; identical to SEQ ID NO: 1126
  Description of Artificial Sequence: Synthetic hazel nut; 5' sequence and inner sequence

SEQ ID NO: 17113 - DNA, 53 bp, Artificial Sequence; identical to SEQ ID NO: 1492
  Description of Artificial Sequence: Synthetic hazel nut; 5' sequence and inner sequence

SEQ ID NO: 17114 - DNA, 53 bp, Artificial Sequence; identical to SEQ ID NO: 1321
  Description of Artificial Sequence: Synthetic hazel nut; 5' sequence and inner sequence

SEQ ID NO: 17115 - DNA, 53 bp, Artificial Sequence; identical to SEQ ID NO: 1313
  Description of Artificial Sequence: Synthetic hazel nut; 5' sequence and inner sequence

SEQ ID NO: 17116 - DNA, 53 bp, Artificial Sequence; identical to SEQ ID NO: 1359
  Description of Artificial Sequence: Synthetic hazel nut; 5' sequence and inner sequence

SEQ ID NO: 17117 - DNA, 53 bp, Artificial Sequence; identical to SEQ ID NO: 1065
  Description of Artificial Sequence: Synthetic hazel nut; 5' sequence and inner sequence

SEQ ID NO: 17118 - DNA, 53 bp, Artificial Sequence; identical to SEQ ID NO: 1112
  Description of Artificial Sequence: Synthetic hazel nut; 5' sequence and inner sequence

SEQ ID NO: 17119 - DNA, 53 bp, Artificial Sequence; identical to SEQ ID NO: 1164
  Description of Artificial Sequence: Synthetic hazel nut; 5' sequence and inner sequence

SEQ ID NO: 17120 - DNA, 53 bp, Artificial Sequence; identical to SEQ ID NO: 5289
  Description of Artificial Sequence: Synthetic hazel nut; 5' sequence and inner sequence

SEQ ID NO: 17121 - DNA, 53 bp, Artificial Sequence; identical to SEQ ID NO: 1103
  Description of Artificial Sequence: Synthetic hazel nut; 5' sequence and inner sequence

SEQ ID NO: 17122 - DNA, 53 bp, Artificial Sequence; identical to SEQ ID NO: 1181
  Description of Artificial Sequence: Synthetic hazel nut; 5' sequence and inner sequence

SEQ ID NO: 17123 - DNA, 53 bp, Artificial Sequence; identical to SEQ ID NO: 1269
  Description of Artificial Sequence: Synthetic hazel nut; 5' sequence and inner sequence

SEQ ID NO: 17124 - DNA, 53 bp, Artificial Sequence; identical to SEQ ID NO: 1610
  Description of Artificial Sequence: Synthetic hazel nut; 5' sequence and inner sequence

SEQ ID NO: 17125 - DNA, 53 bp, Artificial Sequence; identical to SEQ ID NO: 1929
  Description of Artificial Sequence: Synthetic hazel nut; 5' sequence and inner sequence

SEQ ID NO: 17126 - DNA, 53 bp, Artificial Sequence; identical to SEQ ID NO: 1276
  Description of Artificial Sequence: Synthetic hazel nut; 5' sequence and inner sequence

SEQ ID NO: 17127 - DNA, 53 bp, Artificial Sequence; identical to SEQ ID NO: 1275
  Description of Artificial Sequence: Synthetic hazel nut; 5' sequence and inner sequence

SEQ ID NO: 17128 - DNA, 53 bp, Artificial Sequence; identical to SEQ ID NO: 1039
  Description of Artificial Sequence: Synthetic hazel nut; 5' sequence and inner sequence

SEQ ID NO: 17129 - DNA, 53 bp, Artificial Sequence; identical to SEQ ID NO: 1552
  Description of Artificial Sequence: Synthetic hazel nut; 5' sequence and inner sequence

SEQ ID NO: 17130 - DNA, 53 bp, Artificial Sequence; identical to SEQ ID NO: 1071
  Description of Artificial Sequence: Synthetic hazel nut; 5' sequence and inner sequence

SEQ ID NO: 17131 - DNA, 53 bp, Artificial Sequence; identical to SEQ ID NO: 1043
  Description of Artificial Sequence: Synthetic hazel nut; 5' sequence and inner sequence

SEQ ID NO: 17132 - DNA, 53 bp, Artificial Sequence; identical to SEQ ID NO: 1093
  Description of Artificial Sequence: Synthetic hazel nut; 5' sequence and inner sequence

SEQ ID NO: 17133 - DNA, 53 bp, Artificial Sequence; identical to SEQ ID NO: 1072
  Description of Artificial Sequence: Synthetic hazel nut; 5' sequence and inner sequence

SEQ ID NO: 17134 - DNA, 53 bp, Artificial Sequence; identical to SEQ ID NO: 1086
  Description of Artificial Sequence: Synthetic hazel nut; 5' sequence and inner sequence

SEQ ID NO: 17135 - DNA, 53 bp, Artificial Sequence; identical to SEQ ID NO: 1207
  Description of Artificial Sequence: Synthetic hazel nut; 5' sequence and inner sequence

SEQ ID NO: 17136 - DNA, 53 bp, Artificial Sequence; identical to SEQ ID NO: 1706
  Description of Artificial Sequence: Synthetic hazel nut; 5' sequence and inner sequence

SEQ ID NO: 17137 - DNA, 53 bp, Artificial Sequence; identical to SEQ ID NO: 1095
  Description of Artificial Sequence: Synthetic hazel nut; 5' sequence and inner sequence

SEQ ID NO: 17138 - DNA, 53 bp, Artificial Sequence; identical to SEQ ID NO: 1076
  Description of Artificial Sequence: Synthetic hazel nut; 5' sequence and inner sequence

SEQ ID NO: 17139 - DNA, 53 bp, Artificial Sequence; identical to SEQ ID NO: 1209
  Description of Artificial Sequence: Synthetic hazel nut; 5' sequence and inner sequence

SEQ ID NO: 17140 - DNA, 53 bp, Artificial Sequence; identical to SEQ ID NO: 1047
  Description of Artificial Sequence: Synthetic hazel nut; 5' sequence and inner sequence

SEQ ID NO: 17141 - DNA, 53 bp, Artificial Sequence; identical to SEQ ID NO: 1099
  Description of Artificial Sequence: Synthetic hazel nut; 5' sequence and inner sequence

SEQ ID NO: 17142 - DNA, 53 bp, Artificial Sequence; identical to SEQ ID NO: 1956
  Description of Artificial Sequence: Synthetic hazel nut; 5' sequence and inner sequence

SEQ ID NO: 17143 - DNA, 53 bp, Artificial Sequence; identical to SEQ ID NO: 1078
  Description of Artificial Sequence: Synthetic hazel nut; 5' sequence and inner sequence

SEQ ID NO: 17144 - DNA, 53 bp, Artificial Sequence; identical to SEQ ID NO: 1174
  Description of Artificial Sequence: Synthetic hazel nut; 5' sequence and inner sequence

SEQ ID NO: 17145 - DNA, 53 bp, Artificial Sequence; identical to SEQ ID NO: 1134
  Description of Artificial Sequence: Synthetic hazel nut; 5' sequence and inner sequence

SEQ ID NO: 17146 - DNA, 53 bp, Artificial Sequence; identical to SEQ ID NO: 1069
  Description of Artificial Sequence: Synthetic hazel nut; 5' sequence and inner sequence

SEQ ID NO: 17147 - DNA, 53 bp, Artificial Sequence; identical to SEQ ID NO: 1140
  Description of Artificial Sequence: Synthetic hazel nut; 5' sequence and inner sequence

SEQ ID NO: 17148 - DNA, 53 bp, Artificial Sequence; identical to SEQ ID NO: 1082
  Description of Artificial Sequence: Synthetic hazel nut; 5' sequence and inner sequence

SEQ ID NO: 17149 - DNA, 53 bp, Artificial Sequence; identical to SEQ ID NO: 1110
  Description of Artificial Sequence: Synthetic hazel nut; 5' sequence and inner sequence

SEQ ID NO: 17150 - DNA, 53 bp, Artificial Sequence; identical to SEQ ID NO: 1283
  Description of Artificial Sequence: Synthetic hazel nut; 5' sequence and inner sequence

SEQ ID NO: 17151 - DNA, 53 bp, Artificial Sequence; identical to SEQ ID NO: 1058
  Description of Artificial Sequence: Synthetic hazel nut; 5' sequence and inner sequence

SEQ ID NO: 17152 - DNA, 53 bp, Artificial Sequence; identical to SEQ ID NO: 1314
  Description of Artificial Sequence: Synthetic hazel nut; 5' sequence and inner sequence

SEQ ID NO: 17153 - DNA, 53 bp, Artificial Sequence; identical to SEQ ID NO: 1190
  Description of Artificial Sequence: Synthetic hazel nut; 5' sequence and inner sequence

SEQ ID NO: 17154 - DNA, 53 bp, Artificial Sequence; identical to SEQ ID NO: 1121
  Description of Artificial Sequence: Synthetic hazel nut; 5' sequence and inner sequence

SEQ ID NO: 17155 - DNA, 53 bp, Artificial Sequence; identical to SEQ ID NO: 1663
  Description of Artificial Sequence: Synthetic hazel nut; 5' sequence and inner sequence

SEQ ID NO: 17156 - DNA, 53 bp, Artificial Sequence; identical to SEQ ID NO: 5659
  Description of Artificial Sequence: Synthetic hazel nut; 5' sequence and inner sequence

SEQ ID NO: 17157 - DNA, 53 bp, Artificial Sequence; identical to SEQ ID NO: 1120
  Description of Artificial Sequence: Synthetic hazel nut; 5' sequence and inner sequence

SEQ ID NO: 17158 - DNA, 53 bp, Artificial Sequence; identical to SEQ ID NO: 1092
  Description of Artificial Sequence: Synthetic hazel nut; 5' sequence and inner sequence

SEQ ID NO: 17159 - DNA, 53 bp, Artificial Sequence; identical to SEQ ID NO: 1579
  Description of Artificial Sequence: Synthetic hazel nut; 5' sequence and inner sequence

SEQ ID NO: 17160 - DNA, 53 bp, Artificial Sequence; identical to SEQ ID NO: 1182
  Description of Artificial Sequence: Synthetic hazel nut; 5' sequence and inner sequence

SEQ ID NO: 17161 - DNA, 53 bp, Artificial Sequence; identical to SEQ ID NO: 1200
  Description of Artificial Sequence: Synthetic hazel nut; 5' sequence and inner sequence

SEQ ID NO: 17162 - DNA, 53 bp, Artificial Sequence; identical to SEQ ID NO: 1100
  Description of Artificial Sequence: Synthetic hazel nut; 5' sequence and inner sequence

SEQ ID NO: 17163 - DNA, 53 bp, Artificial Sequence; identical to SEQ ID NO: 1458
  Description of Artificial Sequence: Synthetic hazel nut; 5' sequence and inner sequence

SEQ ID NO: 17164 - DNA, 53 bp, Artificial Sequence; identical to SEQ ID NO: 1232
  Description of Artificial Sequence: Synthetic hazel nut; 5' sequence and inner sequence

SEQ ID NO: 17165 - DNA, 53 bp, Artificial Sequence; identical to SEQ ID NO: 1246
  Description of Artificial Sequence: Synthetic hazel nut; 5' sequence and inner sequence

SEQ ID NO: 17166 - DNA, 53 bp, Artificial Sequence; identical to SEQ ID NO: 1465
  Description of Artificial Sequence: Synthetic hazel nut; 5' sequence and inner sequence

SEQ ID NO: 17167 - DNA, 53 bp, Artificial Sequence; identical to SEQ ID NO: 1311
  Description of Artificial Sequence: Synthetic hazel nut; 5' sequence and inner sequence

SEQ ID NO: 17168 - DNA, 53 bp, Artificial Sequence; identical to SEQ ID NO: 5272
  Description of Artificial Sequence: Synthetic hazel nut; 5' sequence and inner sequence

SEQ ID NO: 17169 - DNA, 53 bp, Artificial Sequence; identical to SEQ ID NO: 1266
  Description of Artificial Sequence: Synthetic hazel nut; 5' sequence and inner sequence

SEQ ID NO: 17170 - DNA, 53 bp, Artificial Sequence; identical to SEQ ID NO: 1184
  Description of Artificial Sequence: Synthetic hazel nut; 5' sequence and inner sequence

SEQ ID NO: 17171 - DNA, 53 bp, Artificial Sequence; identical to SEQ ID NO: 1762
  Description of Artificial Sequence: Synthetic hazel nut; 5' sequence and inner sequence

SEQ ID NO: 17172 - DNA, 53 bp, Artificial Sequence; identical to SEQ ID NO: 1567
  Description of Artificial Sequence: Synthetic hazel nut; 5' sequence and inner sequence

SEQ ID NO: 17173 - DNA, 53 bp, Artificial Sequence; identical to SEQ ID NO: 1520
  Description of Artificial Sequence: Synthetic hazel nut; 5' sequence and inner sequence

SEQ ID NO: 17174 - DNA, 53 bp, Artificial Sequence; identical to SEQ ID NO: 1353
  Description of Artificial Sequence: Synthetic hazel nut; 5' sequence and inner sequence

SEQ ID NO: 17175 - DNA, 53 bp, Artificial Sequence; identical to SEQ ID NO: 1367
  Description of Artificial Sequence: Synthetic hazel nut; 5' sequence and inner sequence

SEQ ID NO: 17176 - DNA, 53 bp, Artificial Sequence; identical to SEQ ID NO: 5240
  Description of Artificial Sequence: Synthetic hazel nut; 5' sequence and inner sequence

SEQ ID NO: 17177 - DNA, 53 bp, Artificial Sequence; identical to SEQ ID NO: 1194
  Description of Artificial Sequence: Synthetic hazel nut; 5' sequence and inner sequence

SEQ ID NO: 17178 - DNA, 53 bp, Artificial Sequence; identical to SEQ ID NO: 1154
  Description of Artificial Sequence: Synthetic hazel nut; 5' sequence and inner sequence

SEQ ID NO: 17179 - DNA, 53 bp, Artificial Sequence; identical to SEQ ID NO: 1026
  Description of Artificial Sequence: Synthetic hazel nut; 5' sequence and inner sequence

SEQ ID NO: 17180 - DNA, 53 bp, Artificial Sequence; identical to SEQ ID NO: 1240
  Description of Artificial Sequence: Synthetic hazel nut; 5' sequence and inner sequence

SEQ ID NO: 17181 - DNA, 53 bp, Artificial Sequence; identical to SEQ ID NO: 1290
  Description of Artificial Sequence: Synthetic hazel nut; 5' sequence and inner sequence

SEQ ID NO: 17182 - DNA, 53 bp, Artificial Sequence; identical to SEQ ID NO: 1233
  Description of Artificial Sequence: Synthetic hazel nut; 5' sequence and inner sequence

SEQ ID NO: 17183 - DNA, 53 bp, Artificial Sequence; identical to SEQ ID NO: 1201
  Description of Artificial Sequence: Synthetic hazel nut; 5' sequence and inner sequence

SEQ ID NO: 17184 - DNA, 53 bp, Artificial Sequence; identical to SEQ ID NO: 1027
  Description of Artificial Sequence: Synthetic hazel nut; 5' sequence and inner sequence

SEQ ID NO: 17185 - DNA, 54 bp, Artificial Sequence; identical to SEQ ID NO: 1221
  Description of Artificial Sequence: Synthetic hazel nut; 5' sequence and inner sequence

SEQ ID NO: 17186 - DNA, 53 bp, Artificial Sequence; identical to SEQ ID NO: 1505
  Description of Artificial Sequence: Synthetic hazel nut; 5' sequence and inner sequence

SEQ ID NO: 17187 - DNA, 53 bp, Artificial Sequence; identical to SEQ ID NO: 1133
  Description of Artificial Sequence: Synthetic hazel nut; 5' sequence and inner sequence

SEQ ID NO: 17188 - DNA, 53 bp, Artificial Sequence; identical to SEQ ID NO: 1217
  Description of Artificial Sequence: Synthetic hazel nut; 5' sequence and inner sequence

SEQ ID NO: 17189 - DNA, 53 bp, Artificial Sequence; identical to SEQ ID NO: 1823
  Description of Artificial Sequence: Synthetic hazel nut; 5' sequence and inner sequence

SEQ ID NO: 17190 - DNA, 53 bp, Artificial Sequence; identical to SEQ ID NO: 1137
  Description of Artificial Sequence: Synthetic hazel nut; 5' sequence and inner sequence

SEQ ID NO: 17191 - DNA, 53 bp, Artificial Sequence; identical to SEQ ID NO: 5755
  Description of Artificial Sequence: Synthetic hazel nut; 5' sequence and inner sequence

SEQ ID NO: 17192 - DNA, 53 bp, Artificial Sequence; identical to SEQ ID NO: 5583
  Description of Artificial Sequence: Synthetic hazel nut; 5' sequence and inner sequence

SEQ ID NO: 17193 - DNA, 53 bp, Artificial Sequence; identical to SEQ ID NO: 1094
  Description of Artificial Sequence: Synthetic hazel nut; 5' sequence and inner sequence

SEQ ID NO: 17194 - DNA, 53 bp, Artificial Sequence; identical to SEQ ID NO: 1168
  Description of Artificial Sequence: Synthetic hazel nut; 5' sequence and inner sequence

SEQ ID NO: 17195 - DNA, 53 bp, Artificial Sequence; identical to SEQ ID NO: 1125
  Description of Artificial Sequence: Synthetic hazel nut; 5' sequence and inner sequence

SEQ ID NO: 17196 - DNA, 53 bp, Artificial Sequence; identical to SEQ ID NO: 1360
  Description of Artificial Sequence: Synthetic hazel nut; 5' sequence and inner sequence

SEQ ID NO: 17197 - DNA, 53 bp, Artificial Sequence; identical to SEQ ID NO: 1104
  Description of Artificial Sequence: Synthetic hazel nut; 5' sequence and inner sequence

SEQ ID NO: 17198 - DNA, 53 bp, Artificial Sequence; identical to SEQ ID NO: 1225
  Description of Artificial Sequence: Synthetic hazel nut; 5' sequence and inner sequence

SEQ ID NO: 17199 - DNA, 53 bp, Artificial Sequence; identical to SEQ ID NO: 5429
  Description of Artificial Sequence: Synthetic hazel nut; 5' sequence and inner sequence

SEQ ID NO: 17200 - DNA, 53 bp, Artificial Sequence; identical to SEQ ID NO: 5230
  Description of Artificial Sequence: Synthetic hazel nut; 5' sequence and inner sequence

SEQ ID NO: 17201 - DNA, 53 bp, Artificial Sequence; identical to SEQ ID NO: 1626
  Description of Artificial Sequence: Synthetic hazel nut; 5' sequence and inner sequence

SEQ ID NO: 17202 - DNA, 53 bp, Artificial Sequence; identical to SEQ ID NO: 5521
  Description of Artificial Sequence: Synthetic hazel nut; 5' sequence and inner sequence

SEQ ID NO: 17203 - DNA, 53 bp, Artificial Sequence; identical to SEQ ID NO: 1101
  Description of Artificial Sequence: Synthetic hazel nut; 5' sequence and inner sequence

SEQ ID NO: 17204 - DNA, 53 bp, Artificial Sequence; identical to SEQ ID NO: 5985
  Description of Artificial Sequence: Synthetic hazel nut; 5' sequence and inner sequence

SEQ ID NO: 17205 - DNA, 53 bp, Artificial Sequence; identical to SEQ ID NO: 1105
  Description of Artificial Sequence: Synthetic hazel nut; 5' sequence and inner sequence

SEQ ID NO: 17206 - DNA, 53 bp, Artificial Sequence; identical to SEQ ID NO: 1722
  Description of Artificial Sequence: Synthetic hazel nut; 5' sequence and inner sequence

SEQ ID NO: 17207 - DNA, 53 bp, Artificial Sequence; identical to SEQ ID NO: 1220
  Description of Artificial Sequence: Synthetic hazel nut; 5' sequence and inner sequence

SEQ ID NO: 17208 - DNA, 53 bp, Artificial Sequence; identical to SEQ ID NO: 1909
  Description of Artificial Sequence: Synthetic hazel nut; 5' sequence and inner sequence

SEQ ID NO: 17209 - DNA, 53 bp, Artificial Sequence; identical to SEQ ID NO: 1606
  Description of Artificial Sequence: Synthetic hazel nut; 5' sequence and inner sequence

SEQ ID NO: 17210 - DNA, 53 bp, Artificial Sequence; identical to SEQ ID NO: 1122
  Description of Artificial Sequence: Synthetic hazel nut; 5' sequence and inner sequence

SEQ ID NO: 17211 - DNA, 53 bp, Artificial Sequence
  Description of Artificial Sequence: Synthetic hazel nut; 5' sequence and inner sequence
tagggaagagaaggacatatgatcgcaacgcacgtcacgtccttggcggcaca

SEQ ID NO: 17212 - DNA, 51 bp, Artificial Sequence; identical to SEQ ID NO: 1148
  Description of Artificial Sequence: Synthetic hazel nut; 5' sequence and inner sequence

SEQ ID NO: 17213 - DNA, 53 bp, Artificial Sequence; identical to SEQ ID NO: 1124
  Description of Artificial Sequence: Synthetic hazel nut; 5' sequence and inner sequence

SEQ ID NO: 17214 - DNA, 53 bp, Artificial Sequence; identical to SEQ ID NO: 1118
  Description of Artificial Sequence: Synthetic hazel nut; 5' sequence and inner sequence

SEQ ID NO: 17215 - DNA, 53 bp, Artificial Sequence; identical to SEQ ID NO: 1630
  Description of Artificial Sequence: Synthetic hazel nut; 5' sequence and inner sequence

SEQ ID NO: 17216 - DNA, 53 bp, Artificial Sequence; identical to SEQ ID NO: 1257
  Description of Artificial Sequence: Synthetic hazel nut; 5' sequence and inner sequence

SEQ ID NO: 17217 - DNA, 53 bp, Artificial Sequence; identical to SEQ ID NO: 1123
  Description of Artificial Sequence: Synthetic hazel nut; 5' sequence and inner sequence

SEQ ID NO: 17218 - DNA, 53 bp, Artificial Sequence
  Description of Artificial Sequence: Synthetic hazel nut; 5' sequence and inner sequence
tagggaagagaaggacatatgatcgtaccacaggctcggtccgctacgacacg

SEQ ID NO: 17219 - DNA, 53 bp, Artificial Sequence; identical to SEQ ID NO: 1355
  Description of Artificial Sequence: Synthetic hazel nut; 5' sequence and inner sequence

SEQ ID NO: 17220 - DNA, 53 bp, Artificial Sequence; identical to SEQ ID NO: 1333
  Description of Artificial Sequence: Synthetic hazel nut; 5' sequence and inner sequence

SEQ ID NO: 17221 - DNA, 53 bp, Artificial Sequence; identical to SEQ ID NO: 5662
  Description of Artificial Sequence: Synthetic hazel nut; 5' sequence and inner sequence

SEQ ID NO: 17222 - DNA, 53 bp, Artificial Sequence; identical to SEQ ID NO: 1114
  Description of Artificial Sequence: Synthetic hazel nut; 5' sequence and inner sequence

SEQ ID NO: 17223 - DNA, 53 bp, Artificial Sequence; identical to SEQ ID NO: 1436
  Description of Artificial Sequence: Synthetic hazel nut; 5' sequence and inner sequence

SEQ ID NO: 17224 - DNA, 53 bp, Artificial Sequence; identical to SEQ ID NO: 1953
  Description of Artificial Sequence: Synthetic hazel nut; 5' sequence and inner sequence

SEQ ID NO: 17225 - DNA, 53 bp, Artificial Sequence; identical to SEQ ID NO: 1176
  Description of Artificial Sequence: Synthetic hazel nut; 5' sequence and inner sequence

SEQ ID NO: 17226 - DNA, 53 bp, Artificial Sequence; identical to SEQ ID NO: 9678
  Description of Artificial Sequence: Synthetic hazel nut; 5' sequence and inner sequence

SEQ ID NO: 17227 - DNA, 53 bp, Artificial Sequence; identical to SEQ ID NO: 5772
  Description of Artificial Sequence: Synthetic hazel nut; 5' sequence and inner sequence

SEQ ID NO: 17228 - DNA, 53 bp, Artificial Sequence; identical to SEQ ID NO: 1056
  Description of Artificial Sequence: Synthetic hazel nut; 5' sequence and inner sequence

SEQ ID NO: 17229 - DNA, 53 bp, Artificial Sequence; identical to SEQ ID NO: 1450
  Description of Artificial Sequence: Synthetic hazel nut; 5' sequence and inner sequence

SEQ ID NO: 17230 - DNA, 53 bp, Artificial Sequence; identical to SEQ ID NO: 1142
  Description of Artificial Sequence: Synthetic hazel nut; 5' sequence and inner sequence

SEQ ID NO: 17231 - DNA, 53 bp, Artificial Sequence; identical to SEQ ID NO: 1169
  Description of Artificial Sequence: Synthetic hazel nut; 5' sequence and inner sequence

SEQ ID NO: 17232 - DNA, 53 bp, Artificial Sequence; identical to SEQ ID NO: 1718
  Description of Artificial Sequence: Synthetic hazel nut; 5' sequence and inner sequence

SEQ ID NO: 17233 - DNA, 53 bp, Artificial Sequence; identical to SEQ ID NO: 1222
  Description of Artificial Sequence: Synthetic hazel nut; 5' sequence and inner sequence

SEQ ID NO: 17234 - DNA, 53 bp, Artificial Sequence; identical to SEQ ID NO: 1293
  Description of Artificial Sequence: Synthetic hazel nut; 5' sequence and inner sequence

SEQ ID NO: 17235 - DNA, 53 bp, Artificial Sequence; identical to SEQ ID NO: 1163
  Description of Artificial Sequence: Synthetic hazel nut; 5' sequence and inner sequence

SEQ ID NO: 17236 - DNA, 53 bp, Artificial Sequence; identical to SEQ ID NO: 1253
  Description of Artificial Sequence: Synthetic hazel nut; 5' sequence and inner sequence

SEQ ID NO: 17237 - DNA, 53 bp, Artificial Sequence; identical to SEQ ID NO: 1196
  Description of Artificial Sequence: Synthetic hazel nut; 5' sequence and inner sequence

SEQ ID NO: 17238 - DNA, 53 bp, Artificial Sequence; identical to SEQ ID NO: 1279
  Description of Artificial Sequence: Synthetic hazel nut; 5' sequence and inner sequence

SEQ ID NO: 17239 - DNA, 53 bp, Artificial Sequence; identical to SEQ ID NO: 1468
  Description of Artificial Sequence: Synthetic hazel nut; 5' sequence and inner sequence

SEQ ID NO: 17240 - DNA, 53 bp, Artificial Sequence; identical to SEQ ID NO: 1206
  Description of Artificial Sequence: Synthetic hazel nut; 5' sequence and inner sequence

SEQ ID NO: 17241 - DNA, 53 bp, Artificial Sequence; identical to SEQ ID NO: 1274
  Description of Artificial Sequence: Synthetic hazel nut; 5' sequence and inner sequence

SEQ ID NO: 17242 - DNA, 53 bp, Artificial Sequence; identical to SEQ ID NO: 1506
  Description of Artificial Sequence: Synthetic hazel nut; 5' sequence and inner sequence

SEQ ID NO: 17243 - DNA, 53 bp, Artificial Sequence; identical to SEQ ID NO: 1332
  Description of Artificial Sequence: Synthetic hazel nut; 5' sequence and inner sequence

SEQ ID NO: 17244 - DNA, 53 bp, Artificial Sequence; identical to SEQ ID NO: 5627
  Description of Artificial Sequence: Synthetic hazel nut; 5' sequence and inner sequence

SEQ ID NO: 17245 - DNA, 53 bp, Artificial Sequence; identical to SEQ ID NO: 5612
  Description of Artificial Sequence: Synthetic hazel nut; 5' sequence and inner sequence

SEQ ID NO: 17246 - DNA, 53 bp, Artificial Sequence; identical to SEQ ID NO: 1091
  Description of Artificial Sequence: Synthetic hazel nut; 5' sequence and inner sequence

SEQ ID NO: 17247 - DNA, 53 bp, Artificial Sequence; identical to SEQ ID NO: 9984
  Description of Artificial Sequence: Synthetic hazel nut; 5' sequence and inner sequence

SEQ ID NO: 17248 - DNA, 53 bp, Artificial Sequence; identical to SEQ ID NO: 1228
  Description of Artificial Sequence: Synthetic hazel nut; 5' sequence and inner sequence

SEQ ID NO: 17249 - DNA, 53 bp, Artificial Sequence; identical to SEQ ID NO: 5673
  Description of Artificial Sequence: Synthetic hazel nut; 5' sequence and inner sequence

SEQ ID NO: 17250 - DNA, 53 bp, Artificial Sequence; identical to SEQ ID NO: 1832
  Description of Artificial Sequence: Synthetic hazel nut; 5' sequence and inner sequence

SEQ ID NO: 17251 - DNA, 53 bp, Artificial Sequence; identical to SEQ ID NO: 1237
  Description of Artificial Sequence: Synthetic hazel nut; 5' sequence and inner sequence

SEQ ID NO: 17252 - DNA, 53 bp, Artificial Sequence; identical to SEQ ID NO: 1177
  Description of Artificial Sequence: Synthetic hazel nut; 5' sequence and inner sequence

SEQ ID NO: 17253 - DNA, 53 bp, Artificial Sequence; identical to SEQ ID NO: 5492
  Description of Artificial Sequence: Synthetic hazel nut; 5' sequence and inner sequence

SEQ ID NO: 17254 - DNA, 53 bp, Artificial Sequence; identical to SEQ ID NO: 1145
  Description of Artificial Sequence: Synthetic hazel nut; 5' sequence and inner sequence

SEQ ID NO: 17255 - DNA, 53 bp, Artificial Sequence; identical to SEQ ID NO: 1371
  Description of Artificial Sequence: Synthetic hazel nut; 5' sequence and inner sequence

SEQ ID NO: 17256 - DNA, 53 bp, Artificial Sequence; identical to SEQ ID NO: 1816
  Description of Artificial Sequence: Synthetic hazel nut; 5' sequence and inner sequence

SEQ ID NO: 17257 - DNA, 53 bp, Artificial Sequence; identical to SEQ ID NO: 1278
  Description of Artificial Sequence: Synthetic hazel nut; 5' sequence and inner sequence

SEQ ID NO: 17258 - DNA, 53 bp, Artificial Sequence; identical to SEQ ID NO: 5571
  Description of Artificial Sequence: Synthetic hazel nut; 5' sequence and inner sequence

SEQ ID NO: 17259 - DNA, 53 bp, Artificial Sequence; identical to SEQ ID NO: 1249
  Description of Artificial Sequence: Synthetic hazel nut; 5' sequence and inner sequence

SEQ ID NO: 17260 - DNA, 53 bp, Artificial Sequence; identical to SEQ ID NO: 1300
  Description of Artificial Sequence: Synthetic hazel nut; 5' sequence and inner sequence

SEQ ID NO: 17261 - DNA, 53 bp, Artificial Sequence; identical to SEQ ID NO: 1364
  Description of Artificial Sequence: Synthetic hazel nut; 5' sequence and inner sequence

SEQ ID NO: 17262 - DNA, 53 bp, Artificial Sequence; identical to SEQ ID NO: 1234
  Description of Artificial Sequence: Synthetic hazel nut; 5' sequence and inner sequence

SEQ ID NO: 17263 - DNA, 53 bp, Artificial Sequence; identical to SEQ ID NO: 5576
  Description of Artificial Sequence: Synthetic hazel nut; 5' sequence and inner sequence

SEQ ID NO: 17264 - DNA, 53 bp, Artificial Sequence
  Description of Artificial Sequence: Synthetic hazel nut; 5' sequence and inner sequence
tagggaagagaaggacatatgatggacgcacaccgaccgtacgccgtgtcgca

SEQ ID NO: 17265 - DNA, 53 bp, Artificial Sequence
  Description of Artificial Sequence: Synthetic hazel nut; 5' sequence and inner sequence
tagggaagagaaggacatatgatgcgacacggtagcatcgacggtacgcgcga

SEQ ID NO: 17266 - DNA, 53 bp, Artificial Sequence
  Description of Artificial Sequence: Synthetic hazel nut; 5' sequence and inner sequence
tagggaagagaaggacatatgatcgtgcgcaacgagcaggaccacgcgtcacg

SEQ ID NO: 17267 - DNA, 53 bp, Artificial Sequence; identical to SEQ ID NO: 5489
  Description of Artificial Sequence: Synthetic hazel nut; 5' sequence and inner sequence

SEQ ID NO: 17268 - DNA, 53 bp, Artificial Sequence; identical to SEQ ID NO: 1950
  Description of Artificial Sequence: Synthetic hazel nut; 5' sequence and inner sequence

SEQ ID NO: 17269 - DNA, 53 bp, Artificial Sequence; identical to SEQ ID NO: 1352
  Description of Artificial Sequence: Synthetic hazel nut; 5' sequence and inner sequence

SEQ ID NO: 17270 - DNA, 53 bp, Artificial Sequence
  Description of Artificial Sequence: Synthetic hazel nut; 5' sequence and inner sequence
tagggaagagaaggacatatgatgacggatcgacctcaacgtgttgcgatgca

SEQ ID NO: 17271 - DNA, 53 bp, Artificial Sequence; identical to SEQ ID NO: 1160
  Description of Artificial Sequence: Synthetic hazel nut; 5' sequence and inner sequence

SEQ ID NO: 17272 - DNA, 53 bp, Artificial Sequence; identical to SEQ ID NO: 1256
  Description of Artificial Sequence: Synthetic hazel nut; 5' sequence and inner sequence

SEQ ID NO: 17273 - DNA, 53 bp, Artificial Sequence; identical to SEQ ID NO: 5485
  Description of Artificial Sequence: Synthetic hazel nut; 5' sequence and inner sequence

SEQ ID NO: 17274 - DNA, 53 bp, Artificial Sequence; identical to SEQ ID NO: 1158
  Description of Artificial Sequence: Synthetic hazel nut; 5' sequence and inner sequence

SEQ ID NO: 17275 - DNA, 53 bp, Artificial Sequence; identical to SEQ ID NO: 1592
  Description of Artificial Sequence: Synthetic hazel nut; 5' sequence and inner sequence

SEQ ID NO: 17276 - DNA, 53 bp, Artificial Sequence; identical to SEQ ID NO: 1433
  Description of Artificial Sequence: Synthetic hazel nut; 5' sequence and inner sequence

SEQ ID NO: 17277 - DNA, 53 bp, Artificial Sequence; identical to SEQ ID NO: 1697
  Description of Artificial Sequence: Synthetic hazel nut; 5' sequence and inner sequence

SEQ ID NO: 17278 - DNA, 53 bp, Artificial Sequence; identical to SEQ ID NO: 1881
  Description of Artificial Sequence: Synthetic hazel nut; 5' sequence and inner sequence

SEQ ID NO: 17279 - DNA, 53 bp, Artificial Sequence; identical to SEQ ID NO: 1575
  Description of Artificial Sequence: Synthetic hazel nut; 5' sequence and inner sequence

SEQ ID NO: 17280 - DNA, 53 bp, Artificial Sequence; identical to SEQ ID NO: 1673
  Description of Artificial Sequence: Synthetic hazel nut; 5' sequence and inner sequence

SEQ ID NO: 17281 - DNA, 53 bp, Artificial Sequence; identical to SEQ ID NO: 5746
  Description of Artificial Sequence: Synthetic hazel nut; 5' sequence and inner sequence

SEQ ID NO: 17282 - DNA, 53 bp, Artificial Sequence; identical to SEQ ID NO: 5871
  Description of Artificial Sequence: Synthetic hazel nut; 5' sequence and inner sequence

SEQ ID NO: 17283 - DNA, 53 bp, Artificial Sequence; identical to SEQ ID NO: 1231
  Description of Artificial Sequence: Synthetic hazel nut; 5' sequence and inner sequence

SEQ ID NO: 17284 - DNA, 53 bp, Artificial Sequence; identical to SEQ ID NO: 1161
  Description of Artificial Sequence: Synthetic hazel nut; 5' sequence and inner sequence

SEQ ID NO: 17285 - DNA, 53 bp, Artificial Sequence; identical to SEQ ID NO: 1687
  Description of Artificial Sequence: Synthetic hazel nut; 5' sequence and inner sequence

SEQ ID NO: 17286 - DNA, 53 bp, Artificial Sequence; identical to SEQ ID NO: 1429
  Description of Artificial Sequence: Synthetic hazel nut; 5' sequence and inner sequence

SEQ ID NO: 17287 - DNA, 53 bp, Artificial Sequence; identical to SEQ ID NO: 1147
  Description of Artificial Sequence: Synthetic hazel nut; 5' sequence and inner sequence

SEQ ID NO: 17288 - DNA, 53 bp, Artificial Sequence; identical to SEQ ID NO: 1430
  Description of Artificial Sequence: Synthetic hazel nut; 5' sequence and inner sequence

SEQ ID NO: 17289 - DNA, 53 bp, Artificial Sequence; identical to SEQ ID NO: 1527
  Description of Artificial Sequence: Synthetic hazel nut; 5' sequence and inner sequence

SEQ ID NO: 17290 - DNA, 53 bp, Artificial Sequence; identical to SEQ ID NO: 1277
  Description of Artificial Sequence: Synthetic hazel nut; 5' sequence and inner sequence

SEQ ID NO: 17291 - DNA, 53 bp, Artificial Sequence; identical to SEQ ID NO: 1362
  Description of Artificial Sequence: Synthetic hazel nut; 5' sequence and inner sequence

SEQ ID NO: 17292 - DNA, 53 bp, Artificial Sequence; identical to SEQ ID NO: 1315
  Description of Artificial Sequence: Synthetic hazel nut; 5' sequence and inner sequence

SEQ ID NO: 17293 - DNA, 53 bp, Artificial Sequence; identical to SEQ ID NO: 1282
  Description of Artificial Sequence: Synthetic hazel nut; 5' sequence and inner sequence

SEQ ID NO: 17294 - DNA, 53 bp, Artificial Sequence; identical to SEQ ID NO: 1634
  Description of Artificial Sequence: Synthetic hazel nut; 5' sequence and inner sequence

SEQ ID NO: 17295 - DNA, 53 bp, Artificial Sequence; identical to SEQ ID NO: 1671
  Description of Artificial Sequence: Synthetic hazel nut; 5' sequence and inner sequence

SEQ ID NO: 17296 - DNA, 53 bp, Artificial Sequence; identical to SEQ ID NO: 1268
  Description of Artificial Sequence: Synthetic hazel nut; 5' sequence and inner sequence

SEQ ID NO: 17297 - DNA, 53 bp, Artificial Sequence; identical to SEQ ID NO: 1783
  Description of Artificial Sequence: Synthetic hazel nut; 5' sequence and inner sequence

SEQ ID NO: 17298 - DNA, 53 bp, Artificial Sequence; identical to SEQ ID NO: 1270
  Description of Artificial Sequence: Synthetic hazel nut; 5' sequence and inner sequence

SEQ ID NO: 17299 - DNA, 53 bp, Artificial Sequence; identical to SEQ ID NO: 1338
  Description of Artificial Sequence: Synthetic hazel nut; 5' sequence and inner sequence

SEQ ID NO: 17300 - DNA, 53 bp, Artificial Sequence; identical to SEQ ID NO: 1202
  Description of Artificial Sequence: Synthetic hazel nut; 5' sequence and inner sequence

SEQ ID NO: 17301 - DNA, 53 bp, Artificial Sequence; identical to SEQ ID NO: 1107
  Description of Artificial Sequence: Synthetic hazel nut; 5' sequence and inner sequence

SEQ ID NO: 17302 - DNA, 53 bp, Artificial Sequence; identical to SEQ ID NO: 1448
  Description of Artificial Sequence: Synthetic hazel nut; 5' sequence and inner sequence

SEQ ID NO: 17303 - DNA, 53 bp, Artificial Sequence; identical to SEQ ID NO: 1287
  Description of Artificial Sequence: Synthetic hazel nut; 5' sequence and inner sequence

SEQ ID NO: 17304 - DNA, 53 bp, Artificial Sequence; identical to SEQ ID NO: 1292
  Description of Artificial Sequence: Synthetic hazel nut; 5' sequence and inner sequence

SEQ ID NO: 17305 - DNA, 53 bp, Artificial Sequence; identical to SEQ ID NO: 1323
  Description of Artificial Sequence: Synthetic hazel nut; 5' sequence and inner sequence

SEQ ID NO: 17306 - DNA, 53 bp, Artificial Sequence; identical to SEQ ID NO: 1597
  Description of Artificial Sequence: Synthetic hazel nut; 5' sequence and inner sequence

SEQ ID NO: 17307 - DNA, 53 bp, Artificial Sequence; identical to SEQ ID NO: 5813
  Description of Artificial Sequence: Synthetic hazel nut; 5' sequence and inner sequence

SEQ ID NO: 17308 - DNA, 53 bp, Artificial Sequence; identical to SEQ ID NO: 1173
  Description of Artificial Sequence: Synthetic hazel nut; 5' sequence and inner sequence

SEQ ID NO: 17309 - DNA, 53 bp, Artificial Sequence; identical to SEQ ID NO: 1089
  Description of Artificial Sequence: Synthetic hazel nut; 5' sequence and inner sequence

SEQ ID NO: 17310 - DNA, 53 bp, Artificial Sequence; identical to SEQ ID NO: 1223
  Description of Artificial Sequence: Synthetic hazel nut; 5' sequence and inner sequence

SEQ ID NO: 17311 - DNA, 53 bp, Artificial Sequence; identical to SEQ ID NO: 5707
  Description of Artificial Sequence: Synthetic hazel nut; 5' sequence and inner sequence

SEQ ID NO: 17312 - DNA, 53 bp, Artificial Sequence; identical to SEQ ID NO: 1157
  Description of Artificial Sequence: Synthetic hazel nut; 5' sequence and inner sequence

SEQ ID NO: 17313 - DNA, 53 bp, Artificial Sequence; identical to SEQ ID NO: 1875
  Description of Artificial Sequence: Synthetic hazel nut; 5' sequence and inner sequence

SEQ ID NO: 17314 - DNA, 53 bp, Artificial Sequence; identical to SEQ ID NO: 1208
  Description of Artificial Sequence: Synthetic hazel nut; 5' sequence and inner sequence

SEQ ID NO: 17315 - DNA, 53 bp, Artificial Sequence; identical to SEQ ID NO: 9401
  Description of Artificial Sequence: Synthetic hazel nut; 5' sequence and inner sequence

SEQ ID NO: 17316 - DNA, 53 bp, Artificial Sequence; identical to SEQ ID NO: 1248
  Description of Artificial Sequence: Synthetic hazel nut; 5' sequence and inner sequence

SEQ ID NO: 17317 - DNA, 53 bp, Artificial Sequence; identical to SEQ ID NO: 1170
  Description of Artificial Sequence: Synthetic hazel nut; 5' sequence and inner sequence

SEQ ID NO: 17318 - DNA, 53 bp, Artificial Sequence; identical to SEQ ID NO: 1688
  Description of Artificial Sequence: Synthetic hazel nut; 5' sequence and inner sequence

SEQ ID NO: 17319 - DNA, 53 bp, Artificial Sequence; identical to SEQ ID NO: 5517
  Description of Artificial Sequence: Synthetic hazel nut; 5' sequence and inner sequence

SEQ ID NO: 17320 - DNA, 53 bp, Artificial Sequence; identical to SEQ ID NO: 1309
  Description of Artificial Sequence: Synthetic hazel nut; 5' sequence and inner sequence

SEQ ID NO: 17321 - DNA, 53 bp, Artificial Sequence; identical to SEQ ID NO: 5745
  Description of Artificial Sequence: Synthetic hazel nut; 5' sequence and inner sequence

SEQ ID NO: 17322 - DNA, 53 bp, Artificial Sequence; identical to SEQ ID NO: 1224
  Description of Artificial Sequence: Synthetic hazel nut; 5' sequence and inner sequence

SEQ ID NO: 17323 - DNA, 53 bp, Artificial Sequence; identical to SEQ ID NO: 1261
  Description of Artificial Sequence: Synthetic hazel nut; 5' sequence and inner sequence

SEQ ID NO: 17324 - DNA, 53 bp, Artificial Sequence; identical to SEQ ID NO: 1551
  Description of Artificial Sequence: Synthetic hazel nut; 5' sequence and inner sequence

SEQ ID NO: 17325 - DNA, 53 bp, Artificial Sequence; identical to SEQ ID NO: 1132
  Description of Artificial Sequence: Synthetic hazel nut; 5' sequence and inner sequence

SEQ ID NO: 17326 - DNA, 51 bp, Artificial Sequence; identical to SEQ ID NO: 1241
  Description of Artificial Sequence: Synthetic hazel nut; 5' sequence and inner sequence

SEQ ID NO: 17327 - DNA, 53 bp, Artificial Sequence; identical to SEQ ID NO: 1561
  Description of Artificial Sequence: Synthetic hazel nut; 5' sequence and inner sequence

SEQ ID NO: 17328 - DNA, 53 bp, Artificial Sequence; identical to SEQ ID NO: 1541
  Description of Artificial Sequence: Synthetic hazel nut; 5' sequence and inner sequence

SEQ ID NO: 17329 - DNA, 53 bp, Artificial Sequence; identical to SEQ ID NO: 5940
  Description of Artificial Sequence: Synthetic hazel nut; 5' sequence and inner sequence

SEQ ID NO: 17330 - DNA, 53 bp, Artificial Sequence; identical to SEQ ID NO: 1459
  Description of Artificial Sequence: Synthetic hazel nut; 5' sequence and inner sequence

SEQ ID NO: 17331 - DNA, 53 bp, Artificial Sequence; identical to SEQ ID NO: 1496
  Description of Artificial Sequence: Synthetic hazel nut; 5' sequence and inner sequence

SEQ ID NO: 17332 - DNA, 53 bp, Artificial Sequence; identical to SEQ ID NO: 1165
  Description of Artificial Sequence: Synthetic hazel nut; 5' sequence and inner sequence

SEQ ID NO: 17333 - DNA, 53 bp, Artificial Sequence; identical to SEQ ID NO: 1167
  Description of Artificial Sequence: Synthetic hazel nut; 5' sequence and inner sequence

SEQ ID NO: 17334 - DNA, 53 bp, Artificial Sequence; identical to SEQ ID NO: 1791
  Description of Artificial Sequence: Synthetic hazel nut; 5' sequence and inner sequence

SEQ ID NO: 17335 - DNA, 53 bp, Artificial Sequence; identical to SEQ ID NO: 5205
  Description of Artificial Sequence: Synthetic hazel nut; 5' sequence and inner sequence

SEQ ID NO: 17336 - DNA, 52 bp, Artificial Sequence; identical to SEQ ID NO: 1549
  Description of Artificial Sequence: Synthetic hazel nut; 5' sequence and inner sequence

SEQ ID NO: 17337 - DNA, 53 bp, Artificial Sequence; identical to SEQ ID NO: 5954
  Description of Artificial Sequence: Synthetic hazel nut; 5' sequence and inner sequence

SEQ ID NO: 17338 - DNA, 53 bp, Artificial Sequence; identical to SEQ ID NO: 1919
  Description of Artificial Sequence: Synthetic hazel nut; 5' sequence and inner sequence

SEQ ID NO: 17339 - DNA, 53 bp, Artificial Sequence; identical to SEQ ID NO: 1317
  Description of Artificial Sequence: Synthetic hazel nut; 5' sequence and inner sequence

SEQ ID NO: 17340 - DNA, 53 bp, Artificial Sequence; identical to SEQ ID NO: 1345
  Description of Artificial Sequence: Synthetic hazel nut; 5' sequence and inner sequence

SEQ ID NO: 17341 - DNA, 53 bp, Artificial Sequence; identical to SEQ ID NO: 1348
  Description of Artificial Sequence: Synthetic hazel nut; 5' sequence and inner sequence

SEQ ID NO: 17342 - DNA, 53 bp, Artificial Sequence
  Description of Artificial Sequence: Synthetic hazel nut; 5' sequence and inner sequence
tagggaagagaaggacatatgatcgtaccgtggcagaacgcgtcactgtgtcg

SEQ ID NO: 17343 - DNA, 53 bp, Artificial Sequence; identical to SEQ ID NO: 1494
  Description of Artificial Sequence: Synthetic hazel nut; 5' sequence and inner sequence

SEQ ID NO: 17344 - DNA, 53 bp, Artificial Sequence; identical to SEQ ID NO: 5955
  Description of Artificial Sequence: Synthetic hazel nut; 5' sequence and inner sequence

SEQ ID NO: 17345 - DNA, 53 bp, Artificial Sequence; identical to SEQ ID NO: 5854
  Description of Artificial Sequence: Synthetic hazel nut; 5' sequence and inner sequence

SEQ ID NO: 17346 - DNA, 53 bp, Artificial Sequence; identical to SEQ ID NO: 1406
  Description of Artificial Sequence: Synthetic hazel nut; 5' sequence and inner sequence

SEQ ID NO: 17347 - DNA, 51 bp, Artificial Sequence; identical to SEQ ID NO: 1423
  Description of Artificial Sequence: Synthetic hazel nut; 5' sequence and inner sequence

SEQ ID NO: 17348 - DNA, 53 bp, Artificial Sequence; identical to SEQ ID NO: 1390
  Description of Artificial Sequence: Synthetic hazel nut; 5' sequence and inner sequence

SEQ ID NO: 17349 - DNA, 53 bp, Artificial Sequence; identical to SEQ ID NO: 1146
  Description of Artificial Sequence: Synthetic hazel nut; 5' sequence and inner sequence

SEQ ID NO: 17350 - DNA, 53 bp, Artificial Sequence; identical to SEQ ID NO: 1343
  Description of Artificial Sequence: Synthetic hazel nut; 5' sequence and inner sequence

SEQ ID NO: 17351 - DNA, 53 bp, Artificial Sequence; identical to SEQ ID NO: 1109
  Description of Artificial Sequence: Synthetic hazel nut; 5' sequence and inner sequence

SEQ ID NO: 17352 - DNA, 53 bp, Artificial Sequence
  Description of Artificial Sequence: Synthetic hazel nut; 5' sequence and inner sequence
tagggaagagaaggacatatgatcgacacacggtgcaacgtcaacactgcggc

SEQ ID NO: 17353 - DNA, 53 bp, Artificial Sequence; identical to SEQ ID NO: 1183
  Description of Artificial Sequence: Synthetic hazel nut; 5' sequence and inner sequence

SEQ ID NO: 17354 - DNA, 53 bp, Artificial Sequence; identical to SEQ ID NO: 1384
  Description of Artificial Sequence: Synthetic hazel nut; 5' sequence and inner sequence

SEQ ID NO: 17355 - DNA, 53 bp, Artificial Sequence; identical to SEQ ID NO: 1576
  Description of Artificial Sequence: Synthetic hazel nut; 5' sequence and inner sequence

SEQ ID NO: 17356 - DNA, 53 bp, Artificial Sequence; identical to SEQ ID NO: 1654
  Description of Artificial Sequence: Synthetic hazel nut; 5' sequence and inner sequence

SEQ ID NO: 17357 - DNA, 53 bp, Artificial Sequence; identical to SEQ ID NO: 1407
  Description of Artificial Sequence: Synthetic hazel nut; 5' sequence and inner sequence

SEQ ID NO: 17358 - DNA, 53 bp, Artificial Sequence; identical to SEQ ID NO: 5739
  Description of Artificial Sequence: Synthetic hazel nut; 5' sequence and inner sequence

SEQ ID NO: 17359 - DNA, 53 bp, Artificial Sequence; identical to SEQ ID NO: 1420
  Description of Artificial Sequence: Synthetic hazel nut; 5' sequence and inner sequence

SEQ ID NO: 17360 - DNA, 53 bp, Artificial Sequence; identical to SEQ ID NO: 5694
  Description of Artificial Sequence: Synthetic hazel nut; 5' sequence and inner sequence

SEQ ID NO: 17361 - DNA, 53 bp, Artificial Sequence; identical to SEQ ID NO: 1385
  Description of Artificial Sequence: Synthetic hazel nut; 5' sequence and inner sequence

SEQ ID NO: 17362 - DNA, 53 bp, Artificial Sequence; identical to SEQ ID NO: 1528
  Description of Artificial Sequence: Synthetic hazel nut; 5' sequence and inner sequence

SEQ ID NO: 17363 - DNA, 53 bp, Artificial Sequence; identical to SEQ ID NO: 1291
  Description of Artificial Sequence: Synthetic hazel nut; 5' sequence and inner sequence

SEQ ID NO: 17364 - DNA, 53 bp, Artificial Sequence; identical to SEQ ID NO: 1923
  Description of Artificial Sequence: Synthetic hazel nut; 5' sequence and inner sequence

SEQ ID NO: 17365 - DNA, 53 bp, Artificial Sequence; identical to SEQ ID NO: 1211
  Description of Artificial Sequence: Synthetic hazel nut; 5' sequence and inner sequence

SEQ ID NO: 17366 - DNA, 53 bp, Artificial Sequence; identical to SEQ ID NO: 1380
  Description of Artificial Sequence: Synthetic hazel nut; 5' sequence and inner sequence

SEQ ID NO: 17367 - DNA, 53 bp, Artificial Sequence
  Description of Artificial Sequence: Synthetic hazel nut; 5' sequence and inner sequence
tagggaagagaaggacatatgatgcaccatcacgttgacgctgcccgtttgcc

SEQ ID NO: 17368 - DNA, 53 bp, Artificial Sequence; identical to SEQ ID NO: 1798
  Description of Artificial Sequence: Synthetic hazel nut; 5' sequence and inner sequence

SEQ ID NO: 17369 - DNA, 53 bp, Artificial Sequence; identical to SEQ ID NO: 1369
  Description of Artificial Sequence: Synthetic hazel nut; 5' sequence and inner sequence

SEQ ID NO: 17370 - DNA, 53 bp, Artificial Sequence; identical to SEQ ID NO: 1854
  Description of Artificial Sequence: Synthetic hazel nut; 5' sequence and inner sequence

SEQ ID NO: 17371 - DNA, 53 bp, Artificial Sequence; identical to SEQ ID NO: 1410
  Description of Artificial Sequence: Synthetic hazel nut; 5' sequence and inner sequence

SEQ ID NO: 17372 - DNA, 53 bp, Artificial Sequence; identical to SEQ ID NO: 1316
  Description of Artificial Sequence: Synthetic hazel nut; 5' sequence and inner sequence

SEQ ID NO: 17373 - DNA, 54 bp, Artificial Sequence
  Description of Artificial Sequence: Synthetic hazel nut; 5' sequence and inner sequence
tagggaagagaaggacatatgatcgtggcacgatggtaggacgacgcgttcacg

SEQ ID NO: 17374 - DNA, 53 bp, Artificial Sequence; identical to SEQ ID NO: 5312
  Description of Artificial Sequence: Synthetic hazel nut; 5' sequence and inner sequence

SEQ ID NO: 17375 - DNA, 53 bp, Artificial Sequence; identical to SEQ ID NO: 5790
  Description of Artificial Sequence: Synthetic hazel nut; 5' sequence and inner sequence

SEQ ID NO: 17376 - DNA, 53 bp, Artificial Sequence; identical to SEQ ID NO: 1083
  Description of Artificial Sequence: Synthetic hazel nut; 5' sequence and inner sequence

SEQ ID NO: 17377 - DNA, 53 bp, Artificial Sequence; identical to SEQ ID NO: 1751
  Description of Artificial Sequence: Synthetic hazel nut; 5' sequence and inner sequence

SEQ ID NO: 17378 - DNA, 53 bp, Artificial Sequence; identical to SEQ ID NO: 1401
  Description of Artificial Sequence: Synthetic hazel nut; 5' sequence and inner sequence

SEQ ID NO: 17379 - DNA, 53 bp, Artificial Sequence; identical to SEQ ID NO: 1815
  Description of Artificial Sequence: Synthetic hazel nut; 5' sequence and inner sequence

SEQ ID NO: 17380 - DNA, 53 bp, Artificial Sequence
  Description of Artificial Sequence: Synthetic hazel nut; 5' sequence and inner sequence
tagggaagagaaggacatatgattcatggccgaacgtgacgtacaccgtgccg

SEQ ID NO: 17381 - DNA, 53 bp, Artificial Sequence; identical to SEQ ID NO: 1331
  Description of Artificial Sequence: Synthetic hazel nut; 5' sequence and inner sequence

SEQ ID NO: 17382 - DNA, 53 bp, Artificial Sequence; identical to SEQ ID NO: 9824
  Description of Artificial Sequence: Synthetic hazel nut; 5' sequence and inner sequence

SEQ ID NO: 17383 - DNA, 53 bp, Artificial Sequence
  Description of Artificial Sequence: Synthetic hazel nut; 5' sequence and inner sequence
tagggaagagaaggacatatgatcacgcgtcgtgagcaaggcatgccgtatcg

SEQ ID NO: 17384 - DNA, 53 bp, Artificial Sequence; identical to SEQ ID NO: 1463
  Description of Artificial Sequence: Synthetic hazel nut; 5' sequence and inner sequence

SEQ ID NO: 17385 - DNA, 53 bp, Artificial Sequence; identical to SEQ ID NO: 1729
  Description of Artificial Sequence: Synthetic hazel nut; 5' sequence and inner sequence

SEQ ID NO: 17386 - DNA, 53 bp, Artificial Sequence
  Description of Artificial Sequence: Synthetic hazel nut; 5' sequence and inner sequence
tagggaagagaaggacatatgatgcacacagggcatcgtggacgtgtgtcgcg

SEQ ID NO: 17387 - DNA, 53 bp, Artificial Sequence
  Description of Artificial Sequence: Synthetic hazel nut; 5' sequence and inner sequence
tagggaagagaaggacatatgatcgcgcaacgtgatggatgggctgatgcgca

SEQ ID NO: 17388 - DNA, 53 bp, Artificial Sequence; identical to SEQ ID NO: 5882
  Description of Artificial Sequence: Synthetic hazel nut; 5' sequence and inner sequence

SEQ ID NO: 17389 - DNA, 53 bp, Artificial Sequence
  Description of Artificial Sequence: Synthetic hazel nut; 5' sequence and inner sequence
tagggaagagaaggacatatgatcgtaacgcatcatggtgcatgcgcttcacg

SEQ ID NO: 17390 - DNA, 53 bp, Artificial Sequence; identical to SEQ ID NO: 1272
  Description of Artificial Sequence: Synthetic hazel nut; 5' sequence and inner sequence

SEQ ID NO: 17391 - DNA, 53 bp, Artificial Sequence; identical to SEQ ID NO: 1620
  Description of Artificial Sequence: Synthetic hazel nut; 5' sequence and inner sequence

SEQ ID NO: 17392 - DNA, 53 bp, Artificial Sequence; identical to SEQ ID NO: 1491
  Description of Artificial Sequence: Synthetic hazel nut; 5' sequence and inner sequence

SEQ ID NO: 17393 - DNA, 53 bp, Artificial Sequence; identical to SEQ ID NO: 1474
  Description of Artificial Sequence: Synthetic hazel nut; 5' sequence and inner sequence

SEQ ID NO: 17394 - DNA, 53 bp, Artificial Sequence; identical to SEQ ID NO: 1861
  Description of Artificial Sequence: Synthetic hazel nut; 5' sequence and inner sequence

SEQ ID NO: 17395 - DNA, 53 bp, Artificial Sequence; identical to SEQ ID NO: 1672
  Description of Artificial Sequence: Synthetic hazel nut; 5' sequence and inner sequence

SEQ ID NO: 17396 - DNA, 53 bp, Artificial Sequence; identical to SEQ ID NO: 5597
  Description of Artificial Sequence: Synthetic hazel nut; 5' sequence and inner sequence

SEQ ID NO: 17397 - DNA, 53 bp, Artificial Sequence; identical to SEQ ID NO: 1289
  Description of Artificial Sequence: Synthetic hazel nut; 5' sequence and inner sequence

SEQ ID NO: 17398 - DNA, 53 bp, Artificial Sequence; identical to SEQ ID NO: 1726
  Description of Artificial Sequence: Synthetic hazel nut; 5' sequence and inner sequence

SEQ ID NO: 17399 - DNA, 53 bp, Artificial Sequence
  Description of Artificial Sequence: Synthetic hazel nut; 5' sequence and inner sequence
tagggaagagaaggacatatgatcgcaccgcaagtgacgtgtccgtgccgtga

SEQ ID NO: 17400 - DNA, 53 bp, Artificial Sequence; identical to SEQ ID NO: 1454
  Description of Artificial Sequence: Synthetic hazel nut; 5' sequence and inner sequence

SEQ ID NO: 17401 - DNA, 53 bp, Artificial Sequence; identical to SEQ ID NO: 1809
  Description of Artificial Sequence: Synthetic hazel nut; 5' sequence and inner sequence

SEQ ID NO: 17402 - DNA, 53 bp, Artificial Sequence; identical to SEQ ID NO: 1242
  Description of Artificial Sequence: Synthetic hazel nut; 5' sequence and inner sequence

SEQ ID NO: 17403 - DNA, 53 bp, Artificial Sequence; identical to SEQ ID NO: 1700
  Description of Artificial Sequence: Synthetic hazel nut; 5' sequence and inner sequence

SEQ ID NO: 17404 - DNA, 53 bp, Artificial Sequence; identical to SEQ ID NO: 1583
  Description of Artificial Sequence: Synthetic hazel nut; 5' sequence and inner sequence

SEQ ID NO: 17405 - DNA, 53 bp, Artificial Sequence; identical to SEQ ID NO: 1467
  Description of Artificial Sequence: Synthetic hazel nut; 5' sequence and inner sequence

SEQ ID NO: 17406 - DNA, 53 bp, Artificial Sequence; identical to SEQ ID NO: 1106
  Description of Artificial Sequence: Synthetic hazel nut; 5' sequence and inner sequence

SEQ ID NO: 17407 - DNA, 53 bp, Artificial Sequence; identical to SEQ ID NO: 1135
  Description of Artificial Sequence: Synthetic hazel nut; 5' sequence and inner sequence

SEQ ID NO: 17408 - DNA, 53 bp, Artificial Sequence
  Description of Artificial Sequence: Synthetic hazel nut; 5' sequence and inner sequence
tagggaagagaaggacatatgatcgtaccggcagggagcgtgcacactgcgca

SEQ ID NO: 17409 - DNA, 53 bp, Artificial Sequence
  Description of Artificial Sequence: Synthetic hazel nut; 5' sequence and inner sequence
tagggaagagaaggacatatgatcatgatggccgtgctgaccacgcgtgcgca

SEQ ID NO: 17410 - DNA, 53 bp, Artificial Sequence; identical to SEQ ID NO: 1611
  Description of Artificial Sequence: Synthetic hazel nut; 5' sequence and inner sequence

SEQ ID NO: 17411 - DNA, 53 bp, Artificial Sequence; identical to SEQ ID NO: 5924
  Description of Artificial Sequence: Synthetic hazel nut; 5' sequence and inner sequence

SEQ ID NO: 17412 - DNA, 53 bp, Artificial Sequence
  Description of Artificial Sequence: Synthetic hazel nut; 5' sequence and inner sequence
tagggaagagaaggacatatgatcgacacgcatcagggacgcaacgctgcacg

SEQ ID NO: 17413 - DNA, 53 bp, Artificial Sequence; identical to SEQ ID NO: 1535
  Description of Artificial Sequence: Synthetic hazel nut; 5' sequence and inner sequence

SEQ ID NO: 17414 - DNA, 53 bp, Artificial Sequence; identical to SEQ ID NO: 1442
  Description of Artificial Sequence: Synthetic hazel nut; 5' sequence and inner sequence

SEQ ID NO: 17415 - DNA, 53 bp, Artificial Sequence; identical to SEQ ID NO: 1886
  Description of Artificial Sequence: Synthetic hazel nut; 5' sequence and inner sequence

SEQ ID NO: 17416 - DNA, 53 bp, Artificial Sequence; identical to SEQ ID NO: 1326
  Description of Artificial Sequence: Synthetic hazel nut; 5' sequence and inner sequence

SEQ ID NO: 17417 - DNA, 53 bp, Artificial Sequence; identical to SEQ ID NO: 1358
  Description of Artificial Sequence: Synthetic hazel nut; 5' sequence and inner sequence

SEQ ID NO: 17418 - DNA, 53 bp, Artificial Sequence; identical to SEQ ID NO: 1438
  Description of Artificial Sequence: Synthetic hazel nut; 5' sequence and inner sequence

SEQ ID NO: 17419 - DNA, 53 bp, Artificial Sequence; identical to SEQ ID NO: 1153
  Description of Artificial Sequence: Synthetic hazel nut; 5' sequence and inner sequence

SEQ ID NO: 17420 - DNA, 53 bp, Artificial Sequence; identical to SEQ ID NO: 1990
  Description of Artificial Sequence: Synthetic hazel nut; 5' sequence and inner sequence

SEQ ID NO: 17421 - DNA, 53 bp, Artificial Sequence; identical to SEQ ID NO: 1297
  Description of Artificial Sequence: Synthetic hazel nut; 5' sequence and inner sequence

SEQ ID NO: 17422 - DNA, 53 bp, Artificial Sequence; identical to SEQ ID NO: 1960
  Description of Artificial Sequence: Synthetic hazel nut; 5' sequence and inner sequence

SEQ ID NO: 17423 - DNA, 53 bp, Artificial Sequence; identical to SEQ ID NO: 1571
  Description of Artificial Sequence: Synthetic hazel nut; 5' sequence and inner sequence

SEQ ID NO: 17424 - DNA, 53 bp, Artificial Sequence; identical to SEQ ID NO: 1477
  Description of Artificial Sequence: Synthetic hazel nut; 5' sequence and inner sequence

SEQ ID NO: 17425 - DNA, 53 bp, Artificial Sequence; identical to SEQ ID NO: 1736
  Description of Artificial Sequence: Synthetic hazel nut; 5' sequence and inner sequence

SEQ ID NO: 17426 - DNA, 53 bp, Artificial Sequence; identical to SEQ ID NO: 5663
  Description of Artificial Sequence: Synthetic hazel nut; 5' sequence and inner sequence

SEQ ID NO: 17427 - DNA, 53 bp, Artificial Sequence
  Description of Artificial Sequence: Synthetic hazel nut; 5' sequence and inner sequence
tagggaagagaaggacatatgatgacatgcgatgaacgaggcatgatgcgtca

SEQ ID NO: 17428 - DNA, 53 bp, Artificial Sequence; identical to SEQ ID NO: 5706
  Description of Artificial Sequence: Synthetic hazel nut; 5' sequence and inner sequence

SEQ ID NO: 17429 - DNA, 53 bp, Artificial Sequence; identical to SEQ ID NO: 1530
  Description of Artificial Sequence: Synthetic hazel nut; 5' sequence and inner sequence

SEQ ID NO: 17430 - DNA, 53 bp, Artificial Sequence; identical to SEQ ID NO: 1632
  Description of Artificial Sequence: Synthetic hazel nut; 5' sequence and inner sequence

SEQ ID NO: 17431 - DNA, 53 bp, Artificial Sequence
  Description of Artificial Sequence: Synthetic hazel nut; 5' sequence and inner sequence
tagggaagagaaggacatatgatgcatgccgtacgatccctcactgtgcggtg

SEQ ID NO: 17432 - DNA, 53 bp, Artificial Sequence; identical to SEQ ID NO: 1828
  Description of Artificial Sequence: Synthetic hazel nut; 5' sequence and inner sequence

SEQ ID NO: 17433 - DNA, 53 bp, Artificial Sequence; identical to SEQ ID NO: 1392
  Description of Artificial Sequence: Synthetic hazel nut; 5' sequence and inner sequence

SEQ ID NO: 17434 - DNA, 53 bp, Artificial Sequence
  Description of Artificial Sequence: Synthetic hazel nut; 5' sequence and inner sequence
tagggaagagaaggacatatgatcgtgctgacatgctcgtccctcactgcgtg

SEQ ID NO: 17435 - DNA, 53 bp, Artificial Sequence; identical to SEQ ID NO: 1604
  Description of Artificial Sequence: Synthetic hazel nut; 5' sequence and inner sequence

SEQ ID NO: 17436 - DNA, 53 bp, Artificial Sequence
  Description of Artificial Sequence: Synthetic hazel nut; 5' sequence and inner sequence
tagggaagagaaggacatatgatgcgacacacggatcgaccttcgtagccacg

SEQ ID NO: 17437 - DNA, 53 bp, Artificial Sequence; identical to SEQ ID NO: 1156
  Description of Artificial Sequence: Synthetic hazel nut; 5' sequence and inner sequence

SEQ ID NO: 17438 - DNA, 53 bp, Artificial Sequence; identical to SEQ ID NO: 1387
  Description of Artificial Sequence: Synthetic hazel nut; 5' sequence and inner sequence

SEQ ID NO: 17439 - DNA, 53 bp, Artificial Sequence; identical to SEQ ID NO: 1377
  Description of Artificial Sequence: Synthetic hazel nut; 5' sequence and inner sequence

SEQ ID NO: 17440 - DNA, 53 bp, Artificial Sequence; identical to SEQ ID NO: 1569
  Description of Artificial Sequence: Synthetic hazel nut; 5' sequence and inner sequence

SEQ ID NO: 17441 - DNA, 53 bp, Artificial Sequence; identical to SEQ ID NO: 1350
  Description of Artificial Sequence: Synthetic hazel nut; 5' sequence and inner sequence

SEQ ID NO: 17442 - DNA, 53 bp, Artificial Sequence
  Description of Artificial Sequence: Synthetic hazel nut; 5' sequence and inner sequence
tagggaagagaaggacatatgatacgtatgccgcatcgtcacgccaacatggt

SEQ ID NO: 17443 - DNA, 53 bp, Artificial Sequence; identical to SEQ ID NO: 1303
  Description of Artificial Sequence: Synthetic hazel nut; 5' sequence and inner sequence

SEQ ID NO: 17444 - DNA, 53 bp, Artificial Sequence; identical to SEQ ID NO: 1215
  Description of Artificial Sequence: Synthetic hazel nut; 5' sequence and inner sequence

SEQ ID NO: 17445 - DNA, 53 bp, Artificial Sequence; identical to SEQ ID NO: 5621
  Description of Artificial Sequence: Synthetic hazel nut; 5' sequence and inner sequence

SEQ ID NO: 17446 - DNA, 53 bp, Artificial Sequence; identical to SEQ ID NO: 1347
  Description of Artificial Sequence: Synthetic hazel nut; 5' sequence and inner sequence

SEQ ID NO: 17447 - DNA, 53 bp, Artificial Sequence; identical to SEQ ID NO: 1928
  Description of Artificial Sequence: Synthetic hazel nut; 5' sequence and inner sequence

SEQ ID NO: 17448 - DNA, 53 bp, Artificial Sequence; identical to SEQ ID NO: 5819
  Description of Artificial Sequence: Synthetic hazel nut; 5' sequence and inner sequence

SEQ ID NO: 17449 - DNA, 53 bp, Artificial Sequence; identical to SEQ ID NO: 1342
  Description of Artificial Sequence: Synthetic hazel nut; 5' sequence and inner sequence

SEQ ID NO: 17450 - DNA, 53 bp, Artificial Sequence; identical to SEQ ID NO: 1320
  Description of Artificial Sequence: Synthetic hazel nut; 5' sequence and inner sequence

SEQ ID NO: 17451 - DNA, 53 bp, Artificial Sequence
  Description of Artificial Sequence: Synthetic hazel nut; 5' sequence and inner sequence
tagggaagagaaggacatatgatgcatggcaacgcgtacctctgcacttcaca

SEQ ID NO: 17452 - DNA, 53 bp, Artificial Sequence; identical to SEQ ID NO: 1127
  Description of Artificial Sequence: Synthetic hazel nut; 5' sequence and inner sequence

SEQ ID NO: 17453 - DNA, 53 bp, Artificial Sequence; identical to SEQ ID NO: 5502
  Description of Artificial Sequence: Synthetic hazel nut; 5' sequence and inner sequence

SEQ ID NO: 17454 - DNA, 53 bp, Artificial Sequence; identical to SEQ ID NO: 1457
  Description of Artificial Sequence: Synthetic hazel nut; 5' sequence and inner sequence

SEQ ID NO: 17455 - DNA, 53 bp, Artificial Sequence; identical to SEQ ID NO: 1498
  Description of Artificial Sequence: Synthetic hazel nut; 5' sequence and inner sequence

SEQ ID NO: 17456 - DNA, 53 bp, Artificial Sequence; identical to SEQ ID NO: 1116
  Description of Artificial Sequence: Synthetic hazel nut; 5' sequence and inner sequence

SEQ ID NO: 17457 - DNA, 53 bp, Artificial Sequence
  Description of Artificial Sequence: Synthetic hazel nut; 5' sequence and inner sequence
tagggaagagaaggacatatgatggaatgcgatgaacgaggcatgatgcgtca

SEQ ID NO: 17458 - DNA, 53 bp, Artificial Sequence; identical to SEQ ID NO: 1254
  Description of Artificial Sequence: Synthetic hazel nut; 5' sequence and inner sequence

SEQ ID NO: 17459 - DNA, 53 bp, Artificial Sequence; identical to SEQ ID NO: 1572
  Description of Artificial Sequence: Synthetic hazel nut; 5' sequence and inner sequence

SEQ ID NO: 17460 - DNA, 53 bp, Artificial Sequence; identical to SEQ ID NO: 1288
  Description of Artificial Sequence: Synthetic hazel nut; 5' sequence and inner sequence

SEQ ID NO: 17461 - DNA, 53 bp, Artificial Sequence; identical to SEQ ID NO: 1439
  Description of Artificial Sequence: Synthetic hazel nut; 5' sequence and inner sequence

SEQ ID NO: 17462 - DNA, 53 bp, Artificial Sequence; identical to SEQ ID NO: 9826
  Description of Artificial Sequence: Synthetic hazel nut; 5' sequence and inner sequence

SEQ ID NO: 17463 - DNA, 53 bp, Artificial Sequence; identical to SEQ ID NO: 1414
  Description of Artificial Sequence: Synthetic hazel nut; 5' sequence and inner sequence

SEQ ID NO: 17464 - DNA, 53 bp, Artificial Sequence; identical to SEQ ID NO: 1186
  Description of Artificial Sequence: Synthetic hazel nut; 5' sequence and inner sequence

SEQ ID NO: 17465 - DNA, 53 bp, Artificial Sequence; identical to SEQ ID NO: 1868
  Description of Artificial Sequence: Synthetic hazel nut; 5' sequence and inner sequence

SEQ ID NO: 17466 - DNA, 54 bp, Artificial Sequence; identical to SEQ ID NO: 1258
  Description of Artificial Sequence: Synthetic hazel nut; 5' sequence and inner sequence

SEQ ID NO: 17467 - DNA, 53 bp, Artificial Sequence; identical to SEQ ID NO: 1204
  Description of Artificial Sequence: Synthetic hazel nut; 5' sequence and inner sequence

SEQ ID NO: 17468 - DNA, 53 bp, Artificial Sequence; identical to SEQ ID NO: 5420
  Description of Artificial Sequence: Synthetic hazel nut; 5' sequence and inner sequence

SEQ ID NO: 17469 - DNA, 53 bp, Artificial Sequence; identical to SEQ ID NO: 5617
  Description of Artificial Sequence: Synthetic hazel nut; 5' sequence and inner sequence

SEQ ID NO: 17470 - DNA, 53 bp, Artificial Sequence; identical to SEQ ID NO: 1212
  Description of Artificial Sequence: Synthetic hazel nut; 5' sequence and inner sequence

SEQ ID NO: 17471 - DNA, 53 bp, Artificial Sequence
  Description of Artificial Sequence: Synthetic hazel nut; 5' sequence and inner sequence
tagggaagagaaggacatatgatgcacgtgctgtgaccggtaacgatgtggca

SEQ ID NO: 17472 - DNA, 53 bp, Artificial Sequence; identical to SEQ ID NO: 1239
  Description of Artificial Sequence: Synthetic hazel nut; 5' sequence and inner sequence

SEQ ID NO: 17473 - DNA, 53 bp, Artificial Sequence; identical to SEQ ID NO: 1485
  Description of Artificial Sequence: Synthetic hazel nut; 5' sequence and inner sequence

SEQ ID NO: 17474 - DNA, 53 bp, Artificial Sequence; identical to SEQ ID NO: 1399
  Description of Artificial Sequence: Synthetic hazel nut; 5' sequence and inner sequence

SEQ ID NO: 17475 - DNA, 53 bp, Artificial Sequence; identical to SEQ ID NO: 1691
  Description of Artificial Sequence: Synthetic hazel nut; 5' sequence and inner sequence

SEQ ID NO: 17476 - DNA, 53 bp, Artificial Sequence
  Description of Artificial Sequence: Synthetic hazel nut; 5' sequence and inner sequence
tagggaagagaaggacatatgatggtatgcgatgaacgaggcatgatgcgtca

SEQ ID NO: 17477 - DNA, 53 bp, Artificial Sequence; identical to SEQ ID NO: 1603
  Description of Artificial Sequence: Synthetic hazel nut; 5' sequence and inner sequence

SEQ ID NO: 17478 - DNA, 53 bp, Artificial Sequence; identical to SEQ ID NO: 1490
  Description of Artificial Sequence: Synthetic hazel nut; 5' sequence and inner sequence

SEQ ID NO: 17479 - DNA, 53 bp, Artificial Sequence
  Description of Artificial Sequence: Synthetic hazel nut; 5' sequence and inner sequence
tagggaagagaaggacatatgatggccacgatgaccctccctacgtacgcacg

SEQ ID NO: 17480 - DNA, 53 bp, Artificial Sequence
  Description of Artificial Sequence: Synthetic hazel nut; 5' sequence and inner sequence
tagggaagagaaggacatatgatgtgcgaaacggaccatacgtacagtacgcg

SEQ ID NO: 17481 - DNA, 53 bp, Artificial Sequence; identical to SEQ ID NO: 5336
  Description of Artificial Sequence: Synthetic hazel nut; 5' sequence and inner sequence

SEQ ID NO: 17482 - DNA, 53 bp, Artificial Sequence
  Description of Artificial Sequence: Synthetic hazel nut; 5' sequence and inner sequence
tagggaagagaaggacatatgatccgcacgatgccgatggaccatgcgacacg

SEQ ID NO: 17483 - DNA, 53 bp, Artificial Sequence; identical to SEQ ID NO: 1973
  Description of Artificial Sequence: Synthetic hazel nut; 5' sequence and inner sequence

SEQ ID NO: 17484 - DNA, 53 bp, Artificial Sequence; identical to SEQ ID NO: 5913
  Description of Artificial Sequence: Synthetic hazel nut; 5' sequence and inner sequence

SEQ ID NO: 17485 - DNA, 53 bp, Artificial Sequence; identical to SEQ ID NO: 1205
  Description of Artificial Sequence: Synthetic hazel nut; 5' sequence and inner sequence

SEQ ID NO: 17486 - DNA, 53 bp, Artificial Sequence; identical to SEQ ID NO: 1835
  Description of Artificial Sequence: Synthetic hazel nut; 5' sequence and inner sequence

SEQ ID NO: 17487 - DNA, 53 bp, Artificial Sequence; identical to SEQ ID NO: 1298
  Description of Artificial Sequence: Synthetic hazel nut; 5' sequence and inner sequence

SEQ ID NO: 17488 - DNA, 53 bp, Artificial Sequence
  Description of Artificial Sequence: Synthetic hazel nut; 5' sequence and inner sequence
tagggaagagaaggacatatgatgcaacagcatgccgatacgtaccgcgtaca

SEQ ID NO: 17489 - DNA, 53 bp, Artificial Sequence; identical to SEQ ID NO: 1192
  Description of Artificial Sequence: Synthetic hazel nut; 5' sequence and inner sequence

SEQ ID NO: 17490 - DNA, 53 bp, Artificial Sequence; identical to SEQ ID NO: 5297
  Description of Artificial Sequence: Synthetic hazel nut; 5' sequence and inner sequence

SEQ ID NO: 17491 - DNA, 53 bp, Artificial Sequence; identical to SEQ ID NO: 1155
  Description of Artificial Sequence: Synthetic hazel nut; 5' sequence and inner sequence

SEQ ID NO: 17492 - DNA, 53 bp, Artificial Sequence; identical to SEQ ID NO: 1553
  Description of Artificial Sequence: Synthetic hazel nut; 5' sequence and inner sequence

SEQ ID NO: 17493 - DNA, 53 bp, Artificial Sequence; identical to SEQ ID NO: 1267
  Description of Artificial Sequence: Synthetic hazel nut; 5' sequence and inner sequence

SEQ ID NO: 17494 - DNA, 53 bp, Artificial Sequence; identical to SEQ ID NO: 1568
  Description of Artificial Sequence: Synthetic hazel nut; 5' sequence and inner sequence

SEQ ID NO: 17495 - DNA, 53 bp, Artificial Sequence; identical to SEQ ID NO: 2001
  Description of Artificial Sequence: Synthetic hazel nut; 5' sequence and inner sequence

SEQ ID NO: 17496 - DNA, 53 bp, Artificial Sequence; identical to SEQ ID NO: 5994
  Description of Artificial Sequence: Synthetic hazel nut; 5' sequence and inner sequence

SEQ ID NO: 17497 - DNA, 53 bp, Artificial Sequence; identical to SEQ ID NO: 1175
  Description of Artificial Sequence: Synthetic hazel nut; 5' sequence and inner sequence

SEQ ID NO: 17498 - DNA, 53 bp, Artificial Sequence; identical to SEQ ID NO: 5774
  Description of Artificial Sequence: Synthetic hazel nut; 5' sequence and inner sequence

(The sequence listing continues in the following parts.)
